(19) United States
(12) Patent Application Publication
(10) Pub. No.: US 2025/0235561 A1
(43) Pub. Date: Jul. 24, 2025

(54) MATERIALS AND METHODS FOR TREATMENT OF HEREDITARY HAEMOCHROMATOSIS

(71) Applicant: CRISPR Therapeutics AG, Zug (CH)

(72) Inventors: Roman Lvovitch Bogorad, South Boston, MA (US); Chad Albert Cowan, South Boston, MA (US); Ante Sven Lundberg, South Boston, MA (US)

(21) Appl. No.: 19/010,148

(22) Filed: Jan. 5, 2025

Related U.S. Application Data
(63) Continuation of application No. 17/371,386, filed on Jul. 9, 2021, now Pat. No. 12,186,406.
Application No. 17/371,386 is a continuation of application No. 16/084,531, filed on Sep. 12, 2018, now Pat. No. 11,083,799.
(60) Provisional application No. 62/323,890, filed on Apr. 18, 2016.
(60) Provisional application No. 62/309,136, filed on Mar. 16, 2016.

(51) Int. Cl. A61K 48/00; A61K 9/00; C12N 5/071; C12N 5/0775; C12N 15/10; C12N 15/113; C12N 15/90

(52) U.S. Cl. CPC A61K 48/0058; A61K 9/0019; A61K 48/005; A61K 48/0066; A61K 48/0075; C12N 5/0663; C12N 5/067; C12N 15/102; C12N 15/1138; C12N 15/907; C12N 2310/20

(57) ABSTRACT

Materials and methods for treating a patient with hereditary hemochromatosis (HHC), both ex vivo and in vivo, and materials and methods for modulating the expression, function, or activity of a haemochromatosis (HFE) gene in a cell by genome editing.

### FIELD

[0001] The present application provides materials and methods for treating a patient with hereditary haemochromatosis (HHC), both ex vivo and in vivo. In addition, the present application provides materials and methods for modulating the expression, function, and/or activity of a haemochromatosis (HFE) gene in a cell by genome editing.

### RELATED APPLICATIONS

[0002] This application is a continuation of U.S. application Ser. No. 17/371,386, filed Jul. 9, 2021, which is a continuation of U.S. application Ser. No. 16/084,531, filed Sep. 12, 2018, now U.S. Pat. No. 11,083,799, which is a U.S. National Phase of International Application No. PCT/IB2017/000317, filed Mar. 16, 2017, which claims the benefit of U.S. Provisional Application No. 62/309,136, filed Mar. 16, 2016 and U.S. Provisional Application No. 62/323,890, filed Apr. 18, 2016. Each of these related applications is incorporated herein in its entirety by reference.

### INCORPORATION BY REFERENCE OF SEQUENCE LISTING

[0003] This application contains a Sequence Listing in computer readable form (Filename: 80EM-341767-US3_SequenceListing; Filesize: 80,993 kilobytes; Created Apr. 14, 2025), which is incorporated herein by reference in its entirety and forms part of the disclosure.

### BACKGROUND

[0004] HHC is characterized by excessive storage of iron in the liver, skin, pancreas, heart, joints, and testes. It remains the most common, identified, genetic disorder in Caucasians. Although its geographic distribution is worldwide, it is most common in populations of northern European origin, particularly Nordic or Celtic ancestry, in which it occurs with a prevalence of approximately 1 per 220-250 individuals. The pathophysiologic predisposition to increased, inappropriate absorption of dietary iron may lead to the development of life-threatening complications such as cirrhosis, hepatocellular carcinoma (HCC), diabetes, and heart disease.

[0005] In 1996, HFE, a gene involved in HHC, was located on Chromosome 6 (6p21.3 region) and found to contain 7 exons spanning 12 kb.

[0006] It was discovered that the HFE gene has multiple allelic variants. One known mutation is a G-to-A missense mutation leading to the substitution of tyrosine for cysteine at amino acid position 282 of the protein product (C282Y). C282Y homozygotes account for 80-85% of typical patients with HHC. Allele frequencies of HFE C282Y in ethnically diverse western European white populations are 5-14% and in North American non-Hispanic whites are 6-7%. C282Y exists as a polymorphism only in Western European white and derivative populations, although C282Y may have arisen independently in non-whites outside Europe. There are two other regularly identified mutations of the HFE gene, one in which aspartate is substituted for histidine at amino acid position 63 (H63D), and the other in which cysteine is substituted for serine at amino acid position 65 (S65C). These mutations are generally not associated with iron loading unless seen with C282Y as a compound heterozygote, C282Y/H63D or C282Y/S65C.

[0007] Over the last 10 years, mutations of other genes coding for iron regulatory proteins have been implicated in inherited iron overload syndromes (e.g., hepcidin, hemojuvelin, transferrin receptor 2, and ferroportin). These mutations of other genes coding for iron regulatory proteins are thought to account for most of the non-HFE forms of HHC.

[0008] The largest predicted primary translation product of the HFE gene is 348 amino acids, which gives rise to a mature protein of approximately 321 amino acids after cleavage of the signal sequence. The HFE protein is similar to HLA Class I molecules at the level of the primary structure and tertiary structure. The mature protein is expressed on the cell surface as a heterodimer with beta-2-microglobulin, and this interaction is necessary for normal presentation on the cell surface. The C282Y pathogenic variant destroys a key cysteine residue that is required for disulfide bonding with beta-2-microglobulin. As a result, the HFE protein does not mature properly and becomes trapped in the endoplasmic reticulum and Golgi apparatus, leading to decreased cell-surface expression.

[0009] The diagnosis of HHC in individuals is typically based on finding elevated transferrin-iron saturation 45% or higher and serum ferritin concentration above the upper limit of normal (i.e., >300 ng/mL in men and >200 ng/mL in women) and two pathogenic variants on confirmatory HFE molecular genetic testing. Although serum ferritin concentration may increase progressively over time in untreated individuals with HHC, it is not specific for HHC, and therefore cannot be used alone for identification of individuals with HHC.

[0010] For patients diagnosed with HHC, treatment by phlebotomy (removal of blood) is an available option to help maintain serum ferritin concentration at s 50 ng/mL.

[0011] An alternative treatment for patients diagnosed with HHC includes genome engineering. Genome engineering refers to the strategies and techniques for the targeted, specific modification of the genetic information (genome) of living organisms. Genome engineering is a very active field of research because of the wide range of possible applications, particularly in the areas of human health; the correction of a gene carrying a harmful mutation, for example, or to explore the function of a gene. Early technologies developed to insert a transgene into a living cell were often limited by the random nature of the insertion of the new sequence into the genome. Random insertions into the genome may result in disrupting normal regulation of neighboring genes leading to severe unwanted effects. Furthermore, random integration 15 technologies offer little reproducibility, as there is no guarantee that the sequence would be inserted at the same place in two different cells. Recent genome engineering strategies, such as ZFNs, TALENs, HEs and MegaTALs, enable a specific area of the DNA to be modified, thereby increasing the precision of the correction or insertion compared to early technologies. These newer platforms offer a much larger degree of reproducibility, but still have their limitations.

[0012] Despite efforts from researchers and medical professionals worldwide who have been trying to address HHC, there still remains a critical need for developing safe and effective treatments for HHC.

[0013] Currently, phlebotomy treatment is the only available treatment for addressing HHC, and it only aims to manage symptoms, not treat the cause.

### SUMMARY

[0014] The present disclosure presents an approach to address the genetic basis of HHC. By using genome engineering tools to create permanent changes to the genome that can address the HFE gene and restore HFE protein activity with as few as a single treatment, the resulting therapy may ameliorate the effects of or completely eliminate HHC.

[0015] Provided herein are cellular, ex vivo and in vivo methods for creating permanent changes to the genome by deleting, inserting, correcting, or modulating the expression or function of one or more mutations within or near an HFE gene or other DNA sequences that encode regulatory elements of the HFE gene, which can be used to treat HHC. Also provided herein are components, kits, and compositions for performing such methods. Also provided are cells produced by such methods.

[0016] Provided herein is a method for editing an HFE gene in a human cell by genome editing, the method comprising: introducing into the human cell one or more deoxyribonucleic acid (DNA) endonucleases to effect one or more single-strand breaks (SSBs) or double-strand breaks (DSBs) within or near the HFE gene or other DNA sequences that encode regulatory elements of the HFE gene that results in a permanent deletion, insertion, correction, or modulation of expression or function of one or more mutations within or near or affecting the expression or function of the HFE gene and results in restoration of HFE protein activity. The human cell can be a liver cell, skin cell, pancreatic cell, heart cell, joint cell, or cell from the testes.

[0017] Also provided herein is a method for inserting a haemochromatosis (HFE) gene in a human cell by genome editing, the method comprising: introducing into the human cell one or more deoxyribonucleic acid (DNA) endonucleases to effect one or more single-strand breaks (SSBs) or double-strand breaks (DSBs) within or near a safe harbor locus that results in a permanent insertion of the HFE gene, and results in restoration of HFE protein activity.

[0018] Also provided herein is an ex vivo method for treating a patient (e.g., a human) with HHC, the method comprising: creating a patient specific induced pluripotent stem cell (iPSC); editing within or near an HFE gene or other DNA sequences that encode regulatory elements of the HFE gene of the iPSC, or editing within or near a safe harbor locus of the iPSC; differentiating the genome-edited iPSC into a hepatocyte; and implanting the hepatocyte into the patient.

[0019] The step of creating a patient specific induced pluripotent stem cell (iPSC) can comprise: isolating a somatic cell from the patient; and introducing a set of pluripotency-associated genes into the somatic cell to induce the somatic cell to become a pluripotent stem cell. The somatic cell can be a fibroblast. The set of pluripotency-associated genes can be one or more of the genes selected from the group consisting of OCT4, SOX2, KLF4, Lin28, NANOG and cMYC.

[0020] The step of editing within or near an HFE gene or other DNA sequences that encode regulatory elements of the HFE gene of the iPSC or editing within or near a safe harbor locus of the iPSC can comprise: introducing into the iPSC one or more deoxyribonucleic acid (DNA) endonucleases to effect one or more single-strand breaks (SSBs) or double-strand breaks (DSBs) within or near the HFE gene or other DNA sequences that encode regulatory elements of the HFE gene that results in a permanent deletion, insertion, correction, or modulation of expression or function of one or more mutations within or near or affecting the expression or function of the HFE gene, or within or near a safe harbor locus, that results in restoration of HFE protein activity.

[0021] The safe harbor locus can be selected from the group consisting of AAVS1 (PPP1R12C), ALB, Angptl3, ApoC3, ASGR2, CCR5, FIX (F9), G6PC, Gys2, HGD, Lp(a), Pcsk9, Serpina1, TF, and TTR.

[0022] The step of differentiating the genome-edited iPSC into a hepatocyte can comprise: contacting the genome-edited iPSC with one or more of activin, B27 supplement, FGF4, HGF, BMP2, BMP4, Oncostatin M, or Dexametason.

[0023] The step of implanting the hepatocyte into the patient can comprise: implanting the hepatocyte into the patient by transplantation, local injection, systemic infusion, or combinations thereof.

[0024] Also provided herein is an ex vivo method for treating a patient (e.g., a human) with HHC, the method comprising: performing a biopsy of the patient's liver; isolating a liver specific progenitor cell or primary hepatocyte from the patient's liver; editing within or near an HFE gene or other DNA sequences that encode regulatory elements of the HFE gene of the liver specific progenitor cell or primary hepatocyte or editing within or near a safe harbor locus of the liver specific progenitor cell or primary hepatocyte; and implanting the genome-edited liver specific progenitor cell or primary hepatocyte into the patient.

[0025] The step of isolating a liver specific progenitor cell or primary hepatocyte from the patient's liver can comprise perfusion of fresh liver tissues with digestion enzymes, cell differencial centrifugation, cell culturing, or combinations thereof.

[0026] The step of editing within or near an HFE gene or other DNA sequences that encode regulatory elements of the HFE gene of the liver specific progenitor cell or primary hepatocyte or editing within or near a safe harbor locus of the liver specific progenitor cell or primary hepatocyte can comprise: introducing into the liver specific progenitor cell or primary hepatocyte one or more deoxyribonucleic acid (DNA) endonucleases to effect one or more single-strand breaks (SSBs) or double-strand breaks (DSBs) within or near the HFE gene or other DNA sequences that encode regulatory elements of the HFE gene or within or near a safe harbor locus that results in a permanent deletion, insertion, correction, or modulation of expression or function of one or more mutations within or near or affecting the expression or function of the HFE gene, or within or near a safe harbor locus, that results in restoration of HFE protein activity.

[0027] The safe harbor locus can be selected from the group consisting of AAVS1 (PPP1R12C), ALB, Angptl3, ApoC3, ASGR2, CCR5, FIX (F9), G6PC, Gys2, HGD, Lp(a), Pcsk9, Serpina1, TF, and TTR.

[0028] The step of implanting the genome-edited liver specific progenitor cell or primary hepatocyte into the patient can comprise: implanting the genome-edited liver specific progenitor cell or primary hepatocyte into the patient by transplantation, local injection, systemic infusion, or combinations thereof.

[0029] Also provided herein is an ex vivo method for treating a patient (e.g., a human) with HHC, the method comprising: isolating a mesenchymal stem cell from the patient; editing within or near an HFE gene or other DNA sequences that encode regulatory elements of the HFE gene of the mesenchymal stem cell, or editing within or near a safe harbor locus of the mesenchymal stem cell; differentiating the genome-edited mesenchymal stem cell into a hepatocyte; and implanting the hepatocyte into the patient.

[0030] The mesenchymal stem cell can be isolated from the patient's bone marrow by performing a biopsy of the patient's bone marrow or the mesenchymal stem cell can be isolated from peripheral blood. The step of isolating a mesenchymal stem cell from the patient can comprise aspiration of bone marrow and isolation of mesenchymal cells using density gradient centrifugation media.

[0031] The step of editing within or near the HFE gene or other DNA sequences that encode regulatory elements of the HFE gene of the mesenchymal stem cell can comprise introducing into the mesenchymal stem cell one or more deoxyribonucleic acid (DNA) endonucleases to effect one or more single-strand breaks (SSBs) or double-strand breaks (DSBs) within or near the HFE gene or other DNA sequences that encode regulatory elements of the HFE gene that results in a permanent deletion, insertion, correction, or modulation of expression or function of one or more mutations within or near or affecting the expression or function of the HFE gene or within or near a safe harbor locus, that results in restoration of HFE protein activity.

[0032] The safe harbor locus can be selected from the group consisting of AAVS1 (PPP1R12C), ALB, Angptl3, ApoC3, ASGR2, CCR5, FIX (F9), G6PC, Gys2, HGD, Lp(a), Pcsk9, Serpina1, TF, and TTR.

[0033] The step of differentiating the genome-edited mesenchymal stem cell into a hepatocyte can comprise contacting the genome-edited mesenchymal stem cell with one or more of insulin, transferrin, FGF4, HGF, or bile acids.

[0034] The step of implanting the hepatocyte into the patient can comprise implanting the hepatocyte into the patient by transplantation, local injection, systemic infusion, or combinations thereof.

[0035] Also provided herein is an in vivo method for treating a patient (e.g., a human) with HHC, the method comprising the step of editing an HFE gene in a cell of the patient or other DNA sequences that encode regulatory elements of the HFE gene, or editing within or near a safe harbor locus in a cell of the patient. The cell can be a liver cell, skin cell, pancreatic cell, heart cell, joint cell, or cell from the testes.

[0036] The step of editing an HFE gene in a cell of the patient can comprise introducing into the cell one or more deoxyribonucleic acid (DNA) endonucleases to effect one or more single-strand breaks (SSBs) or double-strand breaks (DSBs) within or near the HFE gene or other DNA sequences that encode regulatory elements of the HFE gene that results in a permanent deletion, insertion, correction, or modulation of expression or function of one or more mutations within or near or affecting the expression or function of the HFE gene or within or near a safe harbor locus that results in restoration of HFE protein activity.

[0037] The one or more DNA endonucleases can be a Cas1, Cas1B, Cas2, Cas3, Cas4, Cas5, Cas6, Cas7, Cas8, Cas9 (also known as Csn1 and Csx12), Cas100, Csy1, Csy2, Csy3, Cse1, Cse2, Csc1, Csc2, Csa5, Csn2, Csm2, Csm3, Csm4, Csm5, Csm6, Cmr1, Cmr3, Cmr4, Cmr5, Cmr6, Csb1, Csb2, Csb3, Csx17, Csx14, Csx10, Csx16, CsaX, Csx3, Csx1, Csx15, Csf1, Csf2, Csf3, Csf4, or Cpf1 endonuclease; a homolog thereof, a recombination of the naturally occurring molecule thereof, codon-optimized thereof, or modified versions thereof, and combinations thereof.

[0038] The method can comprise introducing into the cell one or more polynucleotides encoding the one or more DNA endonucleases. The method can comprise introducing into the cell one or more ribonucleic acids (RNAs) encoding the one or more DNA endonucleases. The one or more polynucleotides or one or more RNAs can be one or more modified polynucleotides or one or more modified RNAs. The DNA endonuclease can be one or more proteins or polypeptides.

[0039] The method can further comprise introducing into the cell one or more guide ribonucleic acids (gRNAs). The one or more gRNAs can be single-molecule guide RNA (sgRNAs). The one or more gRNAs or one or more sgRNAs can be one or more modified gRNAs, one or more modified sgRNAs, or combinations thereof. The one or more DNA endonucleases can be pre-complexed with one or more gRNAs, one or more sgRNAs, or combinations thereof.

[0040] The method can further comprise introducing into the cell a polynucleotide donor template comprising at least a portion of the wild-type HFE gene, DNA sequences that encode wild-type regulatory elements of the HFE gene, and/or cDNA. The at least a portion of the wild-type HFE gene or cDNA can be exon 1, exon 2, exon 3, exon 4, exon 5, exon 6, exon 7, intronic regions, fragments of combinations thereof, or the entire HFE gene or cDNA. The donor template can be either single or double stranded. The donor template can have homologous arms to the 6p21.3 region.

[0041] The method can further comprise introducing into the cell one guide ribonucleic acid (gRNA) and a polynucleotide donor template comprising at least a portion of the wild-type HFE gene. The method can further comprise introducing into the cell one guide ribonucleic acid (gRNA) and a polynucleotide donor template comprising at least a portion of a codon optimized or modified HFE gene. The one or more DNA endonucleases can be one or more Cas9 or Cpf1 endonucleases that effect one single-strand break (SSB) or double-strand break (DSB) at a locus within or near the HFE gene (or codon optimized or modified HFE gene) or other DNA sequences that encode regulatory elements of the HFE gene, or within or near a safe harbor locus that facilitates insertion of a new sequence from the polynucleotide donor template into the chromosomal DNA at the locus or safe harbor locus that results in a permanent insertion or correction of a part of the chromosomal DNA of the HFE gene or other DNA sequences that encode regulatory elements of the HFE gene proximal to the locus, or safe harbor locus. The gRNA can comprise a spacer sequence that is complementary to a segment of the locus. Proximal can mean nucleotides both upstream and downstream of the locus or safe harbor locus.

[0042] The method can further comprise introducing into the cell one or more guide ribonucleic acid (gRNAs) and a polynucleotide donor template comprising at least a portion of the wild-type HFE gene. The one or more DNA endonucleases can be one or more Cas9 or Cpf1 endonucleases that effect or create at least two (e.g., a pair) single-strand breaks (SSBs) and/or double-strand breaks (DSBs), the first at a 5′ locus and the second at a 3′ locus, within or near the HFE gene or other DNA sequences that encode regulatory elements of the HFE gene or within or near a safe harbor locus that facilitates insertion of a new sequence from the polynucleotide donor template into the chromosomal DNA between the 5′ locus and the 3′ locus that results in a permanent insertion or correction of the chromosomal DNA between the 5′ locus and the 3′ locus within or near the HFE gene or other DNA sequences that encode regulatory elements of the HFE gene or within or near a safe harbor locus. The first guide RNA can comprise a spacer sequence that is complementary to a segment of the 5′ locus and the second guide RNA can comprise a spacer sequence that is complementary to a segment of the 3′ locus.

[0043] The one or more gRNAs can be one or more single-molecule guide RNA (sgRNAs). The one or more gRNAs or one or more sgRNAs can be one or more modified gRNAs or one or more modified sgRNAs. The one or more DNA endonucleases can be pre-complexed with one or more gRNAs or one or more sgRNAs.

[0044] The at least a portion of the wild-type HFE gene or cDNA can be exon 1, exon 2, exon 3, exon 4, exon 5, exon 6, exon 7, intronic regions, fragments, or combinations thereof, or the entire HFE gene or cDNA.

[0045] The donor template can be either a single or double stranded polynucleotide. The donor template can have homologous arms to the 6p21.3 region.

[0046] The gRNA or sgRNA can be directed to one or more of the pathological variants: C282Y, H63D, or S65C or combinations thereof.

[0047] The SSB or DSB can be in the first, second, third, fourth, fifth, sixth, seventh exon, or combinations thereof or introns of the HFE gene.

[0048] The insertion or correction can be by homology directed repair (HDR).

[0049] The method can further comprise introducing into the cell two guide ribonucleic acids (gRNAs). The one or more DNA endonucleases can be one or more Cas9 or Cpf1 endonucleases that effect or create two or more (e.g., a pair) double-strand breaks (DSBs), the first at a 5′ DSB locus and the second at a 3′ DSB locus, within or near the HFE gene or other DNA sequences that encode regulatory elements of the HFE gene, or within or near a safe harbor locus that causes a deletion of the chromosomal DNA between the 5′ DSB locus and the 3′ DSB locus that results in a permanent deletion of the chromosomal DNA between the 5′ DSB locus and the 3′ DSB locus within or near the HFE gene or other DNA sequences that encode regulatory elements of the HFE gene or safe harbor locus. The first guide RNA can comprise a spacer sequence that is complementary to a segment of the 5′ DSB locus and the second guide RNA comprises a spacer sequence that is complementary to a segment of the 3′ DSB locus.

[0050] The two gRNAs can be two single-molecule guide RNA (sgRNAs). The two gRNAs or two sgRNAs can be two modified gRNAs or two modified sgRNAs. The one or more DNA endonucleases can be pre-complexed with one or two gRNAs or one or two sgRNAs.

[0051] The 5′ DSB and/or 3′ DSB can be in or near the first exon, first intron, second exon, second intron, third exon, third intron, fourth exon, fourth intron, fifth exon, fifth intron, sixth exon, sixth intron, seventh exon, seventh intron, or combinations thereof, of the HFE gene.

[0052] The deletion can be a deletion of 1 kb or less.

[0053] The Cas9 or Cpf1 mRNA, gRNA, and donor template can be formulated into separate lipid nanoparticles or co-formulated into a lipid nanoparticle.

[0054] The Cas9 or Cpf1 mRNA can be formulated into a lipid nanoparticle, and the gRNA and donor template can be delivered to the cell by an adeno-associated virus (AAV) vector.

[0055] The Cas9 or Cpf1 mRNA can be formulated into a lipid nanoparticle, and the gRNA can be delivered to the cell by electroporation and donor template can be delivered to the cell by an adeno-associated virus (AAV) vector.

[0056] The HFE gene can be located on Chromosome 6: 26087458-26095569 (Genome Reference Consortium—GRCh38/hg38).

[0057] The restoration of HFE protein activity can be compared to a control (e.g., wild-type or normal HFE protein activity).

[0058] Also provided herein is one or more guide ribonucleic acids (gRNAs) for editing an HFE gene in a cell from a patient with HHC. The one or more gRNAs and/or sgRNAs can comprise a spacer sequence selected from the group consisting of nucleic acid sequences in SEQ ID NOs: 1-64,980 of the Sequence Listing. The one or more gRNAs can be one or more single-molecule guide RNAs (sgRNAs). The one or more gRNAs or one or more sgRNAs can be one or more modified gRNAs or one or more modified sgRNAs. The cell can be a liver cell, skin cell, pancreatic cell, heart cell, joint cell, or cell from the testes.

[0059] It is understood that the inventions described in this specification are not limited to the examples summarized in this Summary. Various other aspects are described and exemplified herein.

### BRIEF DESCRIPTION OF THE DRAWINGS

[0060] Various aspects of materials and methods for treatment of HHC disclosed and described in this specification can be better understood by reference to the accompanying figures, in which:

[0061] FIG. 1A is a depiction of the type II CRISPR/Cas system;

[0062] FIG. 1B is a depiction of the type II CRISPR/Cas system;

[0063] FIG. 2A describes the cutting efficiencies of gRNAs selected via an in-vitro transcribed (IVT) gRNA screen;

[0064] FIG. 2B describes the cutting efficiencies of gRNAs selected via an in-vitro transcribed (IVT) gRNA screen;

[0065] FIG. 2C describes the cutting efficiencies of gRNAs selected via an in-vitro transcribed (IVT) gRNA screen;

[0066] FIG. 2D describes the cutting efficiencies of gRNAs selected via an in-vitro transcribed (IVT) gRNA screen;

[0067] FIG. 3A describes the cutting efficiency of S. pyogenes gRNAs in HEK293T cells targeting the HFE gene;

[0068] FIG. 3B describes the cutting efficiency of S. pyogenes gRNAs in HEK293T cells targeting the HFE gene; and

[0069] FIG. 3C describes the cutting efficiency of S. pyogenes gRNAs in HEK293T cells targeting the HFE gene.

### BRIEF DESCRIPTION OF THE SEQUENCE LISTING

[0070] SEQ ID NOs: 1-4,455 are 20 bp spacer sequences for targeting an HFE gene with an S. pyogenes Cas9 endonuclease.

[0071] SEQ ID NOs: 4,456-4,979 are 20 bp spacer sequences for targeting an HFE gene with an S. aureus Cas9 endonuclease.

[0072] SEQ ID NOs: 4,980-5,139 are 20 bp spacer sequences for targeting an HFE gene with an S. thermophilus Cas9 endonuclease.

[0073] SEQ ID NOs: 5,140-5,192 are 20 bp spacer sequences for targeting an HFE gene with a T. denticola Cas9 endonuclease.

[0074] SEQ ID NOs: 5,193-5,617 are 20 bp spacer sequences for targeting an HFE gene with an N. meningitides Cas9 endonuclease.

[0075] SEQ ID NOs: 5,618-10,121 are 20-24 bp spacer sequences for targeting an HFE gene with an Acidominococcus, a Lachnospiraceae, and a Franciscella Novicida Cpf1 endonuclease.

[0076] SEQ ID NOs: 10,122-12,153 are 20 bp spacer sequences for targeting exons 1-2 of an AAVS1 (PPP1 R12C) gene with an S. pyogenes Cas9 endonuclease.

[0077] SEQ ID NOs: 12,154-12,324 are 20 bp spacer sequences for targeting exons 1-2 of an AAVS1 (PPP1 R12C) gene with an S. aureus Cas9 endonuclease.

[0078] SEQ ID NOs: 12,325-12,342 are 20 bp spacer sequences for targeting exons 1-2 of an AAVS1 (PPP1 R12C) gene with an S. thermophilus Cas9 endonuclease.

[0079] SEQ ID NOs: 12,343-12,351 are 20 bp spacer sequences for targeting exons 1-2 of an AAVS1 (PPP1 R12C) gene with a T. denticola Cas9 endonuclease.

[0080] SEQ ID NOs: 12,352-12,426 are 20 bp spacer sequences for targeting exons 1-2 of an AAVS1 (PPP1 R12C) gene with an N. meningitides Cas9 endonuclease.

[0081] SEQ ID NOs: 12,427-13,602 are 22 bp spacer sequences for targeting exons 1-2 of an AAVS1 (PPP1 R12C) gene with an Acidominococcus, Lachnospiraceae, and Francisella novicida Cpf1 endonuclease.

[0082] SEQ ID NOs: 13,603-13,770 are 20 bp spacer sequences for targeting exons 1-2 of an Alb gene with an S. pyogenes Cas9 endonuclease.

[0083] SEQ ID NOs: 13,771-13,798 are 20 bp spacer sequences for targeting exons 1-2 of an Alb gene with an S. aureus Cas9 endonuclease.

[0084] SEQ ID NOs: 13,799-13,816 are 20 bp spacer sequences for targeting exons 1-2 of an Alb gene with an S. thermophilus Cas9 endonuclease.

[0085] SEQ ID NOs: 13,817-13,821 are 20 bp spacer sequences for targeting exons 1-2 of an Alb gene with a T. denticola Cas9 endonuclease.

[0086] SEQ ID NOs: 13,822-13,845 are 20 bp spacer sequences for targeting exons 1-2 of an Alb gene with an N. meningitides Cas9 endonuclease.

[0087] SEQ ID NOs: 13,846-14,224 are 22 bp spacer sequences for targeting exons 1-2 of an Alb gene with an Acidominococcus, Lachnospiraceae, and Francisella novicida Cpf1 endonuclease.

[0088] SEQ ID NOs: 14,225-14,569 are 20 bp spacer sequences for targeting exons 1-2 of an Angptl3 gene with an S. pyogenes Cas9 endonuclease.

[0089] SEQ ID NOs: 14,570-14,605 are 20 bp spacer sequences for targeting exons 1-2 of an Angptl3 gene with an S. aureus Cas9 endonuclease.

[0090] SEQ ID NOs: 14,606-14,628 are 20 bp spacer sequences for targeting exons 1-2 of an Angptl3 gene with an S. thermophilus Cas9 endonuclease.

[0091] SEQ ID NOs: 14,629-14,641 are 20 bp spacer sequences for targeting exons 1-2 of an Angptl3 gene with a T. denticola Cas9 endonuclease.

[0092] SEQ ID NOs: 14,642-14,704 are 20 bp spacer sequences for targeting exons 1-2 of an Angptl3 gene with an N. meningitides Cas9 endonuclease.

[0093] SEQ ID NOs: 14,705-15,552 are 22 bp spacer sequences for targeting exons 1-2 of an Angptl3 gene with an Acidominococcus, Lachnospiraceae, and Francisella novicida Cpf1 endonuclease.

[0094] SEQ ID NOs: 15,553-15,955 are 20 bp spacer sequences for targeting exons 1-2 of an ApoC3 gene with an S. pyogenes Cas9 endonuclease.

[0095] SEQ ID NOs: 15,956-15,980 are 20 bp spacer sequences for targeting exons 1-2 of an ApoC3 gene with an S. aureus Cas9 endonuclease.

[0096] SEQ ID NOs: 15,981-15,983 are 20 bp spacer sequences for targeting exons 1-2 of an ApoC3 gene with an S. thermophilus Cas9 endonuclease.

[0097] SEQ ID NOs: 15,984-15,985 are 20 bp spacer sequences for targeting exons 1-2 of an ApoC3 gene with a T. denticola Cas9 endonuclease.

[0098] SEQ ID NOs: 15,986-15,997 are 20 bp spacer sequences for targeting exons 1-2 of an ApoC3 gene with an N. meningitides Cas9 endonuclease.

[0099] SEQ ID NOs: 15,998-16,229 are 22 bp spacer sequences for targeting exons 1-2 of an ApoC3 gene with an Acidominococcus, Lachnospiraceae, and Francisella novicida Cpf1 endonuclease.

[0100] SEQ ID NOs: 16,230-17,997 are 20 bp spacer sequences for targeting exons 1-2 of an ASGR2 gene with an S. pyogenes Cas9 endonuclease.

[0101] SEQ ID NOs: 17,998-18,203 are 20 bp spacer sequences for targeting exons 1-2 of an ASGR2 gene with an S. aureus Cas9 endonuclease.

[0102] SEQ ID NOs: 18,204-18,227 are 20 bp spacer sequences for targeting exons 1-2 of an ASGR2 gene with an S. thermophilus Cas9 endonuclease.

[0103] SEQ ID NOs: 18,228-18,239 are 20 bp spacer sequences for targeting exons 1-2 of an ASGR2 gene with a T. denticola Cas9 endonuclease.

[0104] SEQ ID NOs: 18,240-18,322 are 20 bp spacer sequences for targeting exons 1-2 of an ASGR2 gene with an N. meningitides Cas9 endonuclease.

[0105] SEQ ID NOs: 18,323-19,762 are 22 bp spacer sequences for targeting exons 1-2 of an ASGR2 gene with an Acidominococcus, Lachnospiraceae, and Francisella novicida Cpf1 endonuclease.

[0106] SEQ ID NOs: 19,763-19,965 are 20 bp spacer sequences for targeting exons 1-2 of a CCR5 gene with an S. pyogenes Cas9 endonuclease.

[0107] SEQ ID NOs: 19,966-19,997 are 20 bp spacer sequences for targeting exons 1-2 of a CCR5 gene with an S. aureus Cas9 endonuclease.

[0108] SEQ ID NOs: 19,998-20,011 are 20 bp spacer sequences for targeting exons 1-2 of a CCR5 gene with an S. thermophilus Cas9 endonuclease.

[0109] SEQ ID NOs: 20,012-20,013 are 20 bp spacer sequences for targeting exons 1-2 of a CCR5 gene with a T. denticola Cas9 endonuclease.

[0110] SEQ ID NOs: 20,014-20,041 are 20 bp spacer sequences for targeting exons 1-2 of a CCR5 gene with an N. meningitides Cas9 endonuclease.

[0111] SEQ ID NOs: 20,042-20,341 are 22 bp spacer sequences for targeting exons 1-2 of a CCR5 gene with an Acidominococcus, Lachnospiraceae, and Francisella novicida Cpf1 endonuclease.

[0112] SEQ ID NOs: 20,342-21,807 are 20 bp spacer sequences for targeting exons 1-2 of an F9 gene with an S. pyogenes Cas9 endonuclease.

[0113] SEQ ID NOs: 21,808-21,970 are 20 bp spacer sequences for targeting exons 1-2 of an F9 gene with an S. aureus Cas9 endonuclease.

[0114] SEQ ID NOs: 21,971-22,031 are 20 bp spacer sequences for targeting exons 1-2 of an F9 gene with an S. thermophilus Cas9 endonuclease.

[0115] SEQ ID NOs: 22,032-22,056 are 20 bp spacer sequences for targeting exons 1-2 of an F9 gene with a T. denticola Cas9 endonuclease.

[0116] SEQ ID NOs: 22,057-22,209 are 20 bp spacer sequences for targeting exons 1-2 of an F9 gene with an N. meningitides Cas9 endonuclease.

[0117] SEQ ID NOs: 22,210-24,350 are 22 bp spacer sequences for targeting exons 1-2 of an F9 gene with an Acidominococcus, Lachnospiraceae, and Francisella novicida Cpf1 endonuclease.

[0118] SEQ ID NOs: 24,351-25,366 are gRNA 20 bp spacer sequences for targeting exons 1-2 of the G6PC gene with an S. pyogenes Cas9 endonuclease.

[0119] SEQ ID NOs: 25,367-25,483 are gRNA 20 bp spacer sequences for targeting exons 1-2 of the G6PC gene with an S. aureus Cas9 endonuclease.

[0120] SEQ ID NOs: 25,484-25,507 are gRNA 20 bp spacer sequences for targeting exons 1-2 of the G6PC gene with an S. thermophilus Cas9 endonuclease.

[0121] SEQ ID NOs: 25,508-25,516 are gRNA 20 bp spacer sequences for targeting exons 1-2 of the G6PC gene with a T. denticola Cas9 endonuclease.

[0122] SEQ ID NOs: 25,517-25,606 are gRNA 20 bp spacer sequences for targeting exons 1-2 of the G6PC gene with an N. meningitides Cas9 endonuclease.

[0123] SEQ ID NOs: 25,607-26,701 are gRNA 22 bp spacer sequences for targeting exons 1-2 of the G6PC gene with an Acidominococcus, Lachnospiraceae, and Francisella novicida Cpf1 endonuclease.

[0124] SEQ ID NOs: 26,702-32,194 are 20 bp spacer sequences for targeting exons 1-2 of an Gys2 gene with an S. pyogenes Cas9 endonuclease.

[0125] SEQ ID NOs: 32,195-32,870 are gRNA 20 bp spacer sequences for targeting exons 1-2 of an Gys2 gene with an S. aureus Cas9 endonuclease.

[0126] SEQ ID NOs: 32,871-33,148 are gRNA 20 bp spacer sequences for targeting exons 1-2 of an Gys2 gene with an S. thermophilus Cas9 endonuclease.

[0127] SEQ ID NOs: 33,149-33,262 are gRNA 20 bp spacer sequences for targeting exons 1-2 of an Gys2 gene with a T. denticola Cas9 endonuclease.

[0128] SEQ ID NOs: 33,263-33,942 are gRNA 20 bp spacer sequences for targeting exons 1-2 of an Gys2 gene with an N. meningitides Cas9 endonuclease.

[0129] SEQ ID NOs: 33,943-42,374 are gRNA 22 bp spacer sequences for targeting exons 1-2 of an Gys2 gene with an Acidominococcus, Lachnospiraceae, and Francisella novicida Cpf1 endonuclease.

[0130] SEQ ID NOs: 42,375-44,067 are gRNA 20 bp spacer sequences for targeting exons 1-2 of an HGD gene with an S. pyogenes Cas9 endonuclease.

[0131] SEQ ID NOs: 44,068-44,281 are gRNA 20 bp spacer sequences for targeting exons 1-2 of an HGD gene with an S. aureus Cas9 endonuclease.

[0132] SEQ ID NOs: 44,282-44,364 are gRNA 20 bp spacer sequences for targeting exons 1-2 of an HGD gene with an S. thermophilus Cas9 endonuclease.

[0133] SEQ ID NOs: 44,365-44,383 are gRNA 20 bp spacer sequences for targeting exons 1-2 of an HGD gene with a T. denticola Cas9 endonuclease.

[0134] SEQ ID NOs: 44,384-44,584 are gRNA 20 bp spacer sequences for targeting exons 1-2 of an HGD gene with an N. meningitides Cas9 endonuclease.

[0135] SEQ ID NOs: 44,585-46,909 are gRNA 22 bp spacer sequences for targeting exons 1-2 of an HGD gene with an Acidominococcus, Lachnospiraceae, and Francisella novicida Cpf1 endonuclease.

[0136] SEQ ID NOs: 46,910-50,704 are gRNA 20 bp spacer sequences for targeting exons 1-2 of an Lp(a) gene with an S. pyogenes Cas9 endonuclease.

[0137] SEQ ID NOs: 50,705-51,114 are gRNA 20 bp spacer sequences for exons 1-2 of targeting the Lp(a) gene with an S. aureus Cas9 endonuclease.

[0138] SEQ ID NOs: 51,115-51,250 are gRNA 20 bp spacer sequences for targeting the exons 1-2 of Lp(a) gene with an S. thermophilus Cas9 endonuclease.

[0139] SEQ ID NOs: 51,251-51,285 are gRNA 20 bp spacer sequences for targeting exons 1-2 of an Lp(a) gene with a T. denticola Cas9 endonuclease.

[0140] SEQ ID NOs: 51,286-51,653 are gRNA 20 bp spacer sequences for targeting exons 1-2 of an Lp(a) gene with an N. meningitides Cas9 endonuclease.

[0141] SEQ ID NOs: 51,654-56,274 are gRNA 22 bp spacer sequences for targeting exons 1-2 of an Lp(a) gene with an Acidominococcus, Lachnospiraceae, and Francisella novicida Cpf1 endonuclease.

[0142] SEQ ID NOs: 56,275-58,294 are gRNA 20 bp spacer sequences for targeting exons 1-2 of a PCSK9 gene with an S. pyogenes Cas9 endonuclease.

[0143] SEQ ID NOs: 58,295-58,481 are gRNA 20 bp spacer sequences for targeting exons 1-2 of a PCSK9 gene with an S. aureus Cas9 endonuclease.

[0144] SEQ ID NOs: 58,482-58,517 are gRNA 20 bp spacer sequences, for targeting exons 1-2 of a PCSK9 gene with an S. thermophilus Cas9 endonuclease.

[0145] SEQ ID NOs: 58,518-58,531 are gRNA 20 bp spacer sequences for targeting exons 1-2 of a PCSK9 gene with a T. denticola Cas9 endonuclease.

[0146] SEQ ID NOs: 58,532-58,671 are gRNA 20 bp spacer sequences for targeting exons 1-2 of a PCSK9 gene with an N. meningitides Cas9 endonuclease.

[0147] SEQ ID NOs: 58,672-60,465 are gRNA 22 bp spacer sequences for targeting exons 1-2 of a PCSK9 gene with an Acidominococcus, Lachnospiraceae, and Francisella novicida Cpf1 endonuclease.

[0148] SEQ ID NOs: 60,466-61,603 are gRNA 20 bp spacer sequences for targeting exons 1-2 of a Serpina1 gene with an S. pyogenes Cas9 endonuclease.

[0149] SEQ ID NOs: 61,604-61,696 are gRNA 20 bp spacer sequences for targeting exons 1-2 of a Serpina1 gene with an S. aureus Cas9 endonuclease.

[0150] SEQ ID NOs: 61,697-61,708 are gRNA 20 bp spacer sequences for targeting exons 1-2 of a Serpina1 gene with an S. thermophilus Cas9 endonuclease.

[0151] SEQ ID NOs: 61,709-61,711 are gRNA 20 bp spacer sequences for targeting exons 1-2 of a Serpina1 gene with a T. denticola Cas9 endonuclease.

[0152] SEQ ID NOs: 61,712-61,762 are gRNA 20 bp spacer sequences for targeting exons 1-2 of a Serpina1 gene with an N. meningitides Cas9 endonuclease.

[0153] SEQ ID NOs: 61,763-62,566 are gRNA 22 bp spacer sequences for targeting exons 1-2 of a Serpina1 gene with an Acidominococcus, Lachnospiraceae, and Francisella novicida Cpf1 endonuclease.

[0154] SEQ ID NOs: 62,567-63,398 are gRNA 20 bp spacer sequences for targeting exons 1-2 of a TF gene with an S. pyogenes Cas9 endonuclease.

[0155] SEQ ID NOs: 63,399-63,484 are gRNA 20 bp spacer sequences for targeting exons 1-2 of a TF gene with an S. aureus Cas9 endonuclease.

[0156] SEQ ID NOs: 63,485-63,496 are gRNA 20 bp spacer sequences for targeting exons 1-2 of a TF gene with an S. thermophilus Cas9 endonuclease.

[0157] SEQ ID NOs: 63,497-63,503 are gRNA 20 bp spacer sequences for targeting exons 1-2 of a TF gene with a T. denticola Cas9 endonuclease.

[0158] SEQ ID NOs: 63,504-63,547 are gRNA 20 bp spacer sequences for targeting exons 1-2 of a TF gene with an N. meningitides Cas9 endonuclease.

[0159] SEQ ID NOs: 63,548-64,183 are gRNA 22 bp spacer sequences targeting exons 1-2 of a TF gene with an Acidominococcus, Lachnospiraceae, and Francisella novicida Cpf1 endonuclease.

[0160] SEQ ID NOs: 64,184-64,483 are gRNA 20 bp spacer sequences for targeting exons 1-2 of an TTR gene with an S. pyogenes Cas9 endonuclease.

[0161] SEQ ID NOs: 64,484-64,524 are gRNA 20 bp spacer sequences for targeting exons 1-2 of a TTR gene with an S. aureus Cas9 endonuclease.

[0162] SEQ ID NOs: 64,525-64,541 are gRNA 20 bp spacer sequences for targeting exons 1-2 of a TTR gene with an S. thermophilus Cas9 endonuclease.

[0163] SEQ ID NOs: 64,542-64,543 are gRNA 20 bp spacer sequences for targeting exons 1-2 of a TTR gene with a T. denticola Cas9 endonuclease.

[0164] SEQ ID NOs: 64,544-64,578 are gRNA 20 bp spacer sequences for targeting exons 1-2 of a TTR gene with an N. meningitides Cas9 endonuclease.

[0165] SEQ ID NOs: 64,579-64,980 are gRNA 22 bp spacer sequences for targeting exons 1-2 of a TTR gene with an Acidominococcus, Lachnospiraceae, and Francisella novicida Cpf1 endonuclease.

### DETAILED DESCRIPTION

### Hereditary Haemochromatosis (HHC)

[0166] HFE, a gene involved in HHC, is located on Chromosome 6 (6p21.3 region) and contains 7 exons spanning 12 kb.

[0167] It was discovered that the HFE gene has multiple allelic variants. One known mutation is a G-to-A missense mutation leading to the substitution of tyrosine for cysteine at amino acid position 282 of the protein product (C282Y). C282Y homozygotes account for 80%-85% of typical patients with HHC. Allele frequencies of HFE C282Y in ethnically diverse western European white populations are 5-14% and in North American non-Hispanic whites are 6-7%. C282Y exists as a polymorphism only in Western European white and derivative populations, although C282Y may have arisen independently in non-whites outside Europe. There are two other regularly identified mutations of the HFE gene, one in which aspartate is substituted for histidine at amino acid position 63 (H63D), and the other in which cysteine is substituted for serine at amino acid position 65 (S65C). These mutations are generally not associated with iron loading unless seen with C282Y as a compound heterozygote, C282Y/H63D or C282Y/S65C.

[0168] Mutations of other genes coding for iron regulatory proteins have been implicated in inherited iron overload syndromes (e.g., hepcidin, hemojuvelin, transferrin receptor 2, and ferroportin). These other mutated genes are thought to account for most of the non-HFE forms of HHC.

### Therapeutic Approach

[0169] As the known forms of HHC are monogenic disorders with recessive inheritance, it is likely that correcting one of the mutant alleles per cell will be sufficient for correction and restoration or partial restoration of HFE function. The correction of one allele can coincide with one copy that remains with the original mutation, or a copy that was cleaved and repaired by non-homologous end joining (NHEJ) and therefore was not properly corrected. Bi-allelic correction can also occur. Various editing strategies that can be employed for specific mutations are discussed below.

[0170] Correction of one or possibly both of the mutant alleles provides an important improvement over existing or potential therapies, such as introduction of HFE expression cassettes through lentivirus delivery and integration. Gene editing has the advantage of precise genome modification and lower adverse effects.or example, the mutation can be corrected by the insertions or deletions that arise due to the NHEJ repair pathway. If the patient's HFE gene has an inserted or deleted base, a targeted cleavage can result in a NHEJ-mediated insertion or deletion that restores the frame. Missense mutations can also be corrected through NHEJ-mediated correction using one or more guide RNA. The ability or likelihood of the cut(s) to correct the mutation can be designed or evaluated based on the local sequence and micro-homologies. NHEJ can also be used to delete segments of the gene, either directly or by altering splice donor or acceptor sites through cleavage by one gRNA targeting several locations, or several gRNAs. This may be useful if an amino acid, domain or exon contains the mutations and can be removed or inverted, or if the deletion otherwise restored function to the protein. Pairs of guide strands have been used for deletions and corrections of inversions.

[0171] Alternatively, the donor for correction by HDR contains the corrected sequence with small or large flanking homology arms to allow for annealing. HDR is essentially an error-free mechanism that uses a supplied homologous DNA sequence as a template during DSB repair. The rate of HDR is a function of the distance between the mutation and the cut site so choosing overlapping or nearby target sites is important. Templates can include extra sequences flanked by the homologous regions or can contain a sequence that differs from the genomic sequence, thus allowing sequence editing.

[0172] In addition to correcting mutations by NHEJ or HDR, a range of other options are possible. If there are small or large deletions or multiple mutations, a cDNA can be knocked in that contains the exons affected. A full length cDNA can be knocked into any “safe harbor”—i.e., non-deleterious insertion point that is not the HFE gene itself—, with or without suitable regulatory sequences. If this construct is knocked-in near the HFE regulatory elements, it should have physiological control, similar to the normal gene. Two or more (e.g., a pair) nucleases can be used to delete mutated gene regions, though a donor would usually have to be provided to restore function. In this case two gRNA and one donor sequence would be supplied.

[0173] Provided herein are cellular, ex vivo and in vivo methods for using genome engineering tools to create permanent changes to the genome by: 1) correcting, by insertions or deletions that arise due to the NHEJ pathway, one or more mutations within or near the HFE gene or other DNA sequences that encode regulatory elements of the HFE gene, 2) correcting, by HDR, one or more mutations within or near the HFE gene or other DNA sequences that encode regulatory elements of the HFE gene, or 3) deletion of the mutant region and/or knocking-in HFE cDNA or minigene into the gene locus or a safe harbour locus, such as, e.g., targeting exons 1-2 (exon 1, intron 1, and exon 2) of an AAVS1 (PPP1 R12C) gene, an ALB gene, an Angptl3 gene, an ApoC3 gene, an ASGR2 gene, a CCR5 gene, a FIX (F9) gene, a G6PC gene, a Gys2 gene, an HGD gene, an Lp(a) gene, a Pcsk9 gene, a Serpina1 gene, a TF gene, and/or a TTR gene, or 4) deletion of the mutant region and knocking-in HFE cDNA or a minigene (comprised of one or more exons and introns or natural or synthetic introns) into the first exon of HGD, leading to disruption of HGD expression. HGD−/− hepatocytes have proliferation advantage when FAH activity is absent or reduced. Inhibition of FAH can be achieved by treatment with shRNA (AAV) targeting FAH, or siRNA (LNP formulated, or conjugate with GalNAc, or with cholesterol) or treatment with CEHPOBA (see e.g., Paulk et al. “In vivo selection of transplanted hepatocytes by pharmacological inhibition of fumarylacetoacetate hydrolase in wild-type mice.” Mol Ther 2012, 20(10):1981-1987). Assessment of efficiency of HDR mediated knock-in of cDNA into the first exon can utilize cDNA knock-in into “safe harbor” sites such as: single-stranded or double-stranded DNA having homologous arms to one of the following regions, for example: ApoC3 (chr11:116829908-116833071), Angptl3 (chr1:62,597,487-62,606,305), Serpina1 (chr14:94376747-94390692), Lp(a) (chr6:160531483-160664259), Pcsk9 (chr1:55,039,475-55,064,852), FIX (chrX:139,530,736-139,563,458), ALB (chr4:73,404,254-73,421,411), TTR (chr18:31,591,766-31,599,023), TF (chr3:133,661,997-133,779,005), Gys2 (chr12:21,536,188-21,604,857), AAVS1(PPP1 R12C) (chr19:55,090,912-55,117,599), HGD (chr3:120,628,167-120,682,570), CCR5 (chr3:46,370,854-46,376,206), ASGR2 (chr17:7,101,322-7,114,310), G6PC (chr17: 42,900,796-42,914,432), 5′UTR correspondent to ASS1 or alternative 5′ UTR, complete CDS of HFE and 3′ UTR of HFE or modified 3′ UTR and at least 80 nt of the first intron, alternatively same DNA template sequence will be delivered by AAV. Both the HDR and knock-in strategies utilize a donor DNA template in Homology-Directed Repair (HDR). HDR in either strategy may be accomplished by making one or more single-stranded breaks (SSBs) or one or more double-stranded breaks (DSBs) at specific sites in the genome by using one or more endonucleases.

[0174] Such methods use endonucleases, such as CRISPR-associated (Cas9, Cpf1 and the like) nucleases, to permanently delete, insert, edit or correct one or more mutations within or near the genomic locus of the HFE gene or other DNA sequences that encode regulatory elements of the HFE gene. In this way, examples set forth in the present disclosure can help to restore the reading frame or the wild-type sequence of, or otherwise correct, the gene with as few as a single treatment (rather than deliver potential therapies for the lifetime of the patient).

[0175] Provided herein are methods for treating a patient with HHC. An aspect of such method is an ex vivo cell-based therapy. For example, a patient specific induced pluripotent stem cell (iPSC) can be created. Then, the chromosomal DNA of these iPS cells can be edited using the materials and methods described herein. Next, the genome-edited iPSCs can be differentiated into hepatocytes. Finally, the hepatocytes can be implanted into the patient.

[0176] Another aspect of such method is an ex vivo cell-based therapy. For example, a biopsy of the patient's liver is performed. Then, a liver specific progenitor cell or primary hepatocyte is isolated from the biopsied material. Next, the chromosomal DNA of these liver specific progenitor cells or primary hepatocytes can be edited using the materials and methods described herein. Finally, the genome-edited liver specific progenitor cell or primary hepatocyte can be implanted into the patient.

[0177] Yet another aspect of such method is an ex vivo cell-based therapy. For example, a mesenchymal stem cell can be isolated from the patient, which can be isolated from the patient's bone marrow by performing a biopsy of the patient's bone marrow or isolated from peripheral blood. Next, the chromosomal DNA of these mesenchymal stem cells can be edited using the materials and methods described herein. Next, the genome-edited mesenchymal stem cells can be differentiated into hepatocytes. Finally, these hepatocytes can be implanted into the patient.

[0178] One advantage of an ex vivo cell therapy approach is the ability to conduct a comprehensive analysis of the therapeutic prior to administration. Nuclease-based therapeutics can have some level of off-target effects. Performing gene correction ex vivo allows one to characterize the corrected cell population prior to implantation. The present disclosure includes sequencing the entire genome of the corrected cells to ensure that the off-target effects, if any, can be in genomic locations associated with minimal risk to the patient. Furthermore, populations of specific cells, including clonal populations, can be isolated prior to implantation.

[0179] Another advantage of ex vivo cell therapy relates to genetic correction in iPSCs compared to other primary cell sources. iPSCs are prolific, making it easy to obtain the large number of cells that will be required for a cell-based therapy. Furthermore, iPSCs are an ideal cell type for performing clonal isolations. This allows screening for the correct genomic correction, without risking a decrease in viability. In contrast, other potential cell types, such as primary hepatocytes, are viable for only a few passages and difficult to clonally expand. Thus, manipulation of iPSCs for the treatment of HHC can be much easier, and can shorten the amount of time needed to make the desired genetic correction.

[0180] Methods can also include an in vivo based therapy. Chromosomal DNA of the cells in the patient is edited using the materials and methods described herein.

[0181] An advantage of in vivo gene therapy can be the ease of therapeutic production and administration. The same therapeutic approach and therapy will have the potential to be used to treat more than one patient, for example a number of patients who share the same or similar genotype or allele. In contrast, ex vivo cell therapy typically requires using a patient's own cells, which are isolated, manipulated and returned to the same patient.

[0182] Also provided herein is a cellular method for editing the HFE gene in a cell by genome editing. For example, a cell can be isolated from a patient or animal. Then, the chromosomal DNA of the cell can be edited using the materials and methods described herein.

[0183] The methods provided herein, regardless of whether a cellular or ex vivo or in vivo method, can involve one or a combination of the following: 1) correcting, by insertions or deletions that arise due to the imprecise NHEJ pathway, one or more mutations within or near the HFE gene or other DNA sequences that encode regulatory elements of the HFE gene, 2) correcting, by HDR, one or more mutations within or near the HFE gene or other DNA sequences that encode regulatory elements of the HFE gene, or 3) deletion of the mutant region and/or knocking-in HFE cDNA into the gene 25 locus or at a heterologous location in the genome (such as a safe harbor locus, such as, e.g., targeting exons 1-2 (exon 1, intron 1, and exon 2) of an AAVS1 (PPP1R12C) gene, an ALB gene, an Angptl3 gene, an ApoC3 gene, an ASGR2 gene, a CCR5 gene, a FIX (F9) gene, a G6PC gene, a Gys2 gene, an HGD gene, an Lp(a) gene, a Pcsk9 gene, a Serpina1 gene, a TF gene, and/or a TTR gene). Both the HDR and knock-in strategies utilize a donor DNA template in HDR. HDR in either strategy may be accomplished by making one or more single-stranded breaks (SSBs) or double-stranded breaks (DSBs) at specific sites in the genome by using one or more endonucleases.

[0184] For example, the NHEJ correction strategy can involve correcting a specific mutation in the HFE gene by inducing one single stranded break or double stranded break in the gene of interest with one or more CRISPR endonucleases and a gRNA (e.g., crRNA+tracrRNA, or sgRNA), or two or more single stranded breaks or double stranded breaks in the gene of interest with two or more CRISPR endonucleases and two or more sgRNAs. This approach can require development and optimization of sgRNAs and donor DNA molecules for the major varient of the HFE gene.

[0185] For example, the HDR correction strategy can involve correcting a specific mutation in the HFE gene by inducing one single stranded break or double stranded break in the gene of interest with one or more CRISPR endonucleases and a gRNA (e.g., crRNA+tracrRNA, or sgRNA), or two or more single stranded breaks or double stranded breaks in the gene of interest with one or more CRISPR endonucleases and two or more gRNAs, in the presence of a donor DNA template introduced exogenously to direct the cellular DSB response to Homology-Directed Repair (the donor DNA template can be a short single stranded oligonucleotide, a short double stranded oligonucleotide, a long single or double stranded DNA molecule). This approach can require development and optimization of gRNAs and donor DNA molecules for the major varient of the HFE gene.

[0186] For example, the knock-in strategy involves knocking-in HFE cDNA into the locus of the gene using a gRNA (e.g., crRNA+tracrRNA, or sgRNA) or a pair of gRNAs targeting upstream of or in the first or other exon and/or intron of the HFE gene, or in a safe harbor site (such as, e.g., exon 1-2 of, AAVS1 (PPP1R12C), ALB, Angptl3, ApoC3, ASGR2, CCR5, FIX (F9), G6PC, Gys2, HGD, Lp(a), Pcsk9, Serpina1, TF, and/or TTR). The donor DNA can be single or double stranded DNA having homologous arms to the human 6p21.3 region.

[0187] The advantages for the above strategies (correction and knock-in) are similar, including in principle both short and long term beneficial clinical and laboratory effects. The knock-in approach does provide one advantage over the correction approach—the ability to treat all patients versus only a subset of patients.

[0188] In addition to the above genome editing strategies, another strategy involves modulating expression, function, or activity of HFE by editing in the regulatory sequence.

[0189] In addition to the editing options listed above, Cas9 or similar proteins can be used to target effector domains to the same target sites that can be identified for editing, or additional target sites within range of the effector domain. A range of chromatin modifying enzymes, methylases or demethlyases can be used to alter expression of the target gene. One possibility is increasing the expression of the HFE protein if the mutation leads to lower activity. These types of epigenetic regulation have some advantages, particularly as they are limited in possible off-target effects.

[0190] A number of types of genomic target sites can be present in addition to mutations in the coding and splicing sequences.

[0191] The regulation of transcription and translation implicates a number of different classes of sites that interact with cellular proteins or nucleotides. Often the DNA binding sites of transcription factors or other proteins can be targeted for mutation or deletion to study the role of the site, though they can also be targeted to change gene expression. Sites can be added through non-homologous end joining NHEJ or direct genome editing by HDR. Increased use of genome sequencing, RNA expression and genome-wide studies of transcription factor binding have increased our ability to identify how the sites lead to developmental or temporal gene regulation. These control systems can be direct or can involve extensive cooperative regulation that can require the integration of activities from multiple enhancers. Transcription factors typically bind 6-12 bp-long degenerate DNA sequences. The low level of specificity provided by individual sites suggests that complex interactions and rules are involved in binding and the functional outcome. Binding sites with less degeneracy can provide simpler means of regulation. Artificial transcription factors can be designed to specify longer sequences that have less similar sequences in the genome and have lower potential for off-target cleavage. Any of these types of binding sites can be mutated, deleted or even created to enable changes in gene regulation or expression (Canver, M. C. et al., Nature (2015)).

[0192] Another class of gene regulatory regions having these features is microRNA (miRNA) binding sites. miRNAs are non-coding RNAs that play key roles in post-transcriptional gene regulation. miRNA can regulate the expression of 30% of all mammalian protein-encoding genes. Specific and potent gene silencing by double stranded RNA (RNAi) was discovered, plus additional small noncoding RNA (Canver, M. C. et al., Nature (2015)). The largest class of noncoding RNAs important for gene silencing are miRNAs. In mammals, miRNAs are first transcribed as a long RNA transcripts, which can be separate transcriptional units, part of protein introns, or other transcripts. The long transcripts are called primary miRNA (pri-miRNA) that include imperfectly base-paired hairpin structures. These pri-miRNA can be cleaved into one or more shorter precursor miRNAs (pre-miRNAs) by Microprocessor, a protein complex in the nucleus, involving Drosha.

[0193] Pre-miRNAs are short stem loops ˜70 nucleotides in length with a 2-nucleotide 3′-overhang that are exported, into the mature 19-25 nucleotide miRNA:miRNA* duplexes. The miRNA strand with lower base pairing stability (the guide strand) can be loaded onto the RNA-induced silencing complex (RISC). The passenger guide strand (marked with *), can be functional, but is usually degraded. The mature miRNA tethers RISC to partly complementary sequence motifs in target mRNAs predominantly found within the 3′ untranslated regions (UTRs) and induces posttranscriptional gene silencing (Bartel, D. P. Cell 136, 215-233 (2009); Saj, A. & Lai, E. C. Curr Opin Genet Dev 21, 504-510 (2011)).

[0194] miRNAs can be important in development, differentiation, cell cycle and growth control, and in virtually all biological pathways in mammals and other multicellular organisms. miRNAs can also be involved in cell cycle control, apoptosis and stem cell differentiation, hematopoiesis, hypoxia, muscle development, neurogenesis, insulin secretion, cholesterol metabolism, aging, viral replication and immune responses.

[0195] A single miRNA can target hundreds of different mRNA transcripts, while an individual transcript can be targeted by many different miRNAs. More than 28645 microRNAs have been annotated in the latest release of miRBase (v.21). Some miRNAs can be encoded by multiple loci, some of which can be expressed from tandemly co-transcribed clusters. The features allow for complex regulatory networks with multiple pathways and feedback controls. miRNAs can be integral parts of these feedback and regulatory circuits and can help regulate gene expression by keeping protein production within limits (Herranz, H. & Cohen, S. M. Genes Dev 24, 1339-1344 (2010); Posadas, D. M. & Carthew, R. W. Curr Opin Genet Dev 27, 1-6 (2014)).

[0196] miRNA can also be important in a large number of human diseases that are associated with abnormal miRNA expression. This association underscores the importance of the miRNA regulatory pathway. Recent miRNA deletion studies have linked miRNA with regulation of the immune responses (Stern-Ginossar, N. et al., Science 317, 376-381 (2007)).

[0197] miRNA also have a strong link to cancer and can play a role in different types of cancer. miRNAs have been found to be downregulated in a number of tumors. miRNA can be important in the regulation of key cancer-related pathways, such as cell cycle control and the DNA damage response, and can therefore be used in diagnosis and can be targeted clinically. MicroRNAs can delicately regulate the balance of angiogenesis, such that experiments depleting all microRNAs suppresses tumor angiogenesis (Chen, S. et al., Genes Dev 28, 1054-1067 (2014)).

[0198] As has been shown for protein coding genes, miRNA genes can also be subject to epigenetic changes occurring with cancer. Many miRNA loci can be associated with CpG islands increasing their opportunity for regulation by DNA methylation (Weber, B., Stresemann, C., Brueckner, B. & Lyko, F. Cell Cycle 6, 1001-1005 (2007)). The majority of studies have used treatment with chromatin remodeling drugs to reveal epigenetically silenced miRNAs.

[0199] In addition to their role in RNA silencing, miRNA can also activate translation (Posadas, D. M. & Carthew, R. W. Curr Opin Genet Dev 27, 1-6 (2014)). Knocking out these sites may lead to decreased expression of the targeted gene, while introducing these sites may increase expression.

[0200] Individual miRNA can be knocked out most effectively by mutating the seed sequence (bases 2-8 of the microRNA), which can be important for binding specificity. Cleavage in this region, followed by mis-repair by NHEJ can effectively abolish miRNA function by blocking binding to target sites. miRNA could also be inhibited by specific targeting of the special loop region adjacent to the palindromic sequence. Catalytically inactive Cas9 can also be used to inhibit shRNA expression (Zhao, Y. et al., Sci Rep 4, 3943 (2014)). In addition to targeting the miRNA, the binding sites can also be targeted and mutated to prevent the silencing by miRNA.

### Human Cells

[0201] For ameliorating HHC, as described and illustrated herein, the principal targets for gene editing are human cells. For example, in the ex vivo methods, the human cells can be somatic cells, which after being modified using the techniques as described, can give rise to hepatocytes or progenitor cells. For example, in the in vivo methods, the human cells can be hepatocytes, or cells from other affected organs.

[0202] By performing gene editing in autologous cells that are derived from and therefore already completely matched with the patient in need, it is possible to generate cells that can be safely re-introduced into the patient, and effectively give rise to a population of cells that can be effective in ameliorating one or more clinical conditions associated with the patient's disease.

[0203] Progenitor cells (also referred to as stem cells herein) are capable of both proliferation and giving rise to more progenitor cells, these in turn having the ability to generate a large number of mother cells that can in turn give rise to differentiated or differentiable daughter cells. The daughter cells themselves can be induced to proliferate and produce progeny that subsequently differentiate into one or more mature cell types, while also retaining one or more cells with parental developmental potential. The term “stem cell” refers then, to a cell with the capacity or potential, under particular circumstances, to differentiate to a more specialized or differentiated phenotype, and which retains the capacity, under certain circumstances, to proliferate without substantially differentiating. In one aspect, the term progenitor or stem cell refers to a generalized mother cell whose descendants (progeny) specialize, often in different directions, by differentiation, e.g., by acquiring completely individual characters, as occurs in progressive diversification of embryonic cells and tissues. Cellular differentiation is a complex process typically occurring through many cell divisions. A differentiated cell may derive from a multipotent cell that, itself, is derived from a multipotent cell, and so on. While each of these multipotent cells may be considered stem cells, the range of cell types that each can give rise to may vary considerably. Some differentiated cells also have the capacity to give rise to cells of greater developmental potential. Such capacity may be natural or may be induced artificially upon treatment with various factors. In many biological instances, stem cells can also be “multipotent” because they can produce progeny of more than one distinct cell type, but this is not required for “stem-ness.”

[0204] Self-renewal can be another important aspect of the stem cell. In theory, self-renewal can occur by either of two major mechanisms. Stem cells can divide asymmetrically, with one daughter retaining the stem state and the other daughter expressing some distinct other specific function and phenotype. Alternatively, some of the stem cells in a population can divide symmetrically into two stems, thus maintaining some stem cells in the population as a whole, while other cells in the population give rise to differentiated progeny only. Generally, “progenitor cells” have a cellular phenotype that is more primitive (i.e., is at an earlier step along a developmental pathway or progression than is a fully differentiated cell). Often, progenitor cells also have significant or very high proliferative potential. Progenitor cells can give rise to multiple distinct differentiated cell types or to a single differentiated cell type, depending on the developmental pathway and on the environment in which the cells develop and differentiate.

[0205] In the context of cell ontogeny, the adjective “differentiated,” or “differentiating” is a relative term. A “differentiated cell” is a cell that has progressed further down the developmental pathway than the cell to which it is being compared. Thus, stem cells can differentiate into lineage-restricted precursor cells (such as a myocyte progenitor cell), which in turn can differentiate into other types of precursor cells further down the pathway (such as a myocyte precursor), and then to an end-stage differentiated cell, such as a myocyte, which plays a characteristic role in a certain tissue type, and may or may not retain the capacity to proliferate further.

### Induced Pluripotent Stem Cells

[0206] The genetically engineered human cells described herein can be induced pluripotent stem cells (iPSCs). An advantage of using iPSCs is that the cells can be derived from the same subject to which the progenitor cells are to be administered. That is, a somatic cell can be obtained from a subject, reprogrammed to an induced pluripotent stem cell, and then re-differentiated into a progenitor cell to be administered to the subject (e.g., autologous cells). Because the progenitors are essentially derived from an autologous source, the risk of engraftment rejection or allergic response can be reduced compared to the use of cells from another subject or group of subjects. In addition, the use of iPSCs negates the need for cells obtained from an embryonic source. Thus, in one aspect, the stem cells used in the disclosed methods are not embryonic stem cells.

[0207] Although differentiation is generally irreversible under physiological contexts, several methods have been recently developed to reprogram somatic cells to iPSCs. Exemplary methods are known to those of skill in the art and are described briefly herein below.

[0208] The term “reprogramming” refers to a process that alters or reverses the differentiation state of a differentiated cell (e.g., a somatic cell). Stated another way, reprogramming refers to a process of driving the differentiation of a cell backwards to a more undifferentiated or more primitive type of cell. It should be noted that placing many primary cells in culture can lead to some loss of fully differentiated characteristics. Thus, simply culturing such cells included in the term differentiated cells does not render these cells non-differentiated cells (e.g., undifferentiated cells) or pluripotent cells. The transition of a differentiated cell to pluripotency requires a reprogramming stimulus beyond the stimuli that lead to partial loss of differentiated character in culture. Reprogrammed cells also have the characteristic of the capacity of extended passaging without loss of growth potential, relative to primary cell parents, which generally have capacity for only a limited number of divisions in culture.

[0209] The cell to be reprogrammed can be either partially or terminally differentiated prior to reprogramming. Reprogramming can encompasse complete reversion of the differentiation state of a differentiated cell (e.g., a somatic cell) to a pluripotent state or a multipotent state. Reprogramming can encompasse complete or partial reversion of the differentiation state of a differentiated cell (e.g., a somatic cell) to an undifferentiated cell (e.g., an embryonic-like cell). Reprogramming can result in expression of particular genes by the cells, the expression of which further contributes to reprogramming. In certain examples described herein, reprogramming of a differentiated cell (e.g., a somatic cell) can cause the differentiated cell to assume an undifferentiated state (e.g., is an undifferentiated cell). The resulting cells are referred to as “reprogrammed cells,” or “induced pluripotent stem cells (iPSCs or PS cells).”

[0210] Reprogramming can involve alteration, e.g., reversal, of at least some of the heritable patterns of nucleic acid modification (e.g., methylation), chromatin condensation, epigenetic changes, genomic imprinting, etc., that occur during cellular differentiation. Reprogramming is distinct from simply maintaining the existing undifferentiated state of a cell that is already pluripotent or maintaining the existing less than fully differentiated state of a cell that is already a multipotent cell (e.g., a hematopoietic stem cell). Reprogramming is also distinct from promoting the self-renewal or proliferation of cells that are already pluripotent or multipotent, although the compositions and methods described herein can also be of use for such purposes, in some examples.

[0211] Many methods are known in the art that can be used to generate pluripotent stem cells from somatic cells. Any such method that reprograms a somatic cell to the pluripotent phenotype would be appropriate for use in the methods described herein.

[0212] Reprogramming methodologies for generating pluripotent cells using defined combinations of transcription factors have been described. Mouse somatic cells can be converted to ES cell-like cells with expanded developmental potential by the direct transduction of Oct4, Sox2, Klf4, and c-Myc; see, e.g., Takahashi and Yamanaka, Cell 126(4): 663-76 (2006). iPSCs resemble ES cells, as they restore the pluripotency-associated transcriptional circuitry and much of the epigenetic landscape. In addition, mouse iPSCs satisfy all the standard assays for pluripotency: specifically, in vitro differentiation into cell types of the three germ layers, teratoma formation, contribution to chimeras, germline transmission [see, e.g., Maherali and Hochedlinger, Cell Stem Cell. 3(6):595-605 (2008)], and tetraploid complementation.

[0213] Human iPSCs can be obtained using similar transduction methods, and the transcription factor trio, OCT4, SOX2, and NANOG, has been established as the core set of transcription factors that govern pluripotency; see, e.g., Budniatzky and Gepstein, Stem Cells Transl Med. 3(4):448-57 (2014); Barrett et al., Stem Cells Trans Med 3:1-6 sctm.2014-0121 (2014); Focosi et al., Blood Cancer Journal 4: e211 (2014); and references cited therein. The production of iPSCs can be achieved by the introduction of nucleic acid sequences encoding stem cell-associated genes into an adult, somatic cell, historically using viral vectors.

[0214] iPSCs can be generated or derived from terminally differentiated somatic cells, as well as from adult stem cells, or somatic stem cells. That is, a non-pluripotent progenitor cell can be rendered pluripotent or multipotent by reprogramming. In such instances, it may not be necessary to include as many reprogramming factors as required to reprogram a terminally differentiated cell. Further, reprogramming can be induced by the non-viral introduction of reprogramming factors, e.g., by introducing the proteins themselves, or by introducing nucleic acids that encode the reprogramming factors, or by introducing messenger RNAs that upon translation produce the reprogramming factors (see e.g., Warren et al., Cell Stem Cell, 7(5):618-30 (2010). Reprogramming can be achieved by introducing a combination of nucleic acids encoding stem cell-associated genes, including, for example, Oct-4 (also known as Oct-3/4 or Pouf51), Sox1, Sox2, Sox3, Sox 15, Sox 18, NANOG, Klfl, Klf2, Klf4, Klf5, NR5A2, c-Myc, 1-Myc, n-Myc, Rem2, Tert, and LIN28. Reprogramming using the methods and compositions described herein can further comprise introducing one or more of Oct-3/4, a member of the Sox family, a member of the Klf family, and a member of the Myc family to a somatic cell. The methods and compositions described herein can further comprise introducing one or more of each of Oct-4, Sox2, Nanog, c-MYC and Klf4 for reprogramming. As noted above, the exact method used for reprogramming is not necessarily critical to the methods and compositions described herein. However, where cells differentiated from the reprogrammed cells are to be used in, e.g., human therapy, in one aspect the reprogramming is not effected by a method that alters the genome. Thus, in such examples, reprogramming can be achieved, e.g., without the use of viral or plasmid vectors.

[0215] The efficiency of reprogramming (i.e., the number of reprogrammed cells) derived from a population of starting cells can be enhanced by the addition of various agents, e.g., small molecules, as shown by Shi et al., Cell-Stem Cell 2:525-528 (2008); Huangfu et al., Nature Biotechnology 26(7):795-797 (2008) and Marson et al., Cell-Stem Cell 3: 132-135 (2008). Thus, an agent or combination of agents that enhance the efficiency or rate of induced pluripotent stem cell production can be used in the production of patient-specific or disease-specific iPSCs. Some non-limiting examples of agents that enhance reprogramming efficiency include soluble Wnt, Wnt conditioned media, BIX-01294 (a G9a histone methyltransferase), PD0325901 (a MEK inhibitor), DNA methyltransferase inhibitors, histone deacetylase (HDAC) inhibitors, valproic acid, 5′-azacytidine, dexamethasone, suberoylanilide, hydroxamic acid (SAHA), vitamin C, and trichostatin (TSA), among others.

[0216] Other non-limiting examples of reprogramming enhancing agents include: Suberoylanilide Hydroxamic Acid (SAHA (e.g., MK0683, vorinostat) and other hydroxamic acids), BML-210, Depudecin (e.g., (−)-Depudecin), HC Toxin, Nullscript (4-(1,3-Dioxo-IH,3H-benzo[de]isoquinolin-2-yl)-N-hydroxybutanamide), Phenylbutyrate (e.g., sodium phenylbutyrate) and Valproic Acid ((VP A) and other short chain fatty acids), Scriptaid, Suramin Sodium, Trichostatin A (TSA), APHA Compound 8, Apicidin, Sodium Butyrate, pivaloyloxymethyl butyrate (Pivanex, AN-9), Trapoxin B, Chlamydocin, Depsipeptide (also known as FR901228 or FK228), benzamides (e.g., CI-994 (e.g., N-acetyl dinaline) and MS-27-275), MGCD0103, NVP-LAQ-824, CBHA (m-carboxycinnaminic acid bishydroxamic acid), JNJ16241199, Tubacin, A-161906, proxamide, oxamflatin, 3-CI-UCHA (e.g., 6-(3-chlorophenylureido)caproic hydroxamic acid), AOE (2-amino-8-oxo-9, 10-epoxydecanoic acid), CHAP31 and CHAP 50. Other reprogramming enhancing agents include, for example, dominant negative forms of the HDACs (e.g., catalytically inactive forms), siRNA inhibitors of the HDACs, and antibodies that specifically bind to the HDACs. Such inhibitors are available, e.g., from BIOMOL International, Fukasawa, Merck Biosciences, Novartis, Gloucester Pharmaceuticals, Titan Pharmaceuticals, MethylGene, and Sigma Aldrich.

[0217] To confirm the induction of pluripotent stem cells for use with the methods described herein, isolated clones can be tested for the expression of a stem cell marker. Such expression in a cell derived from a somatic cell identifies the cells as induced pluripotent stem cells. Stem cell markers can be selected from the non-limiting group including SSEA3, SSEA4, CD9, Nanog, Fbxl5, Ecatl, Esgl, Eras, Gdf3, Fgf4, Cripto, Daxl, Zpf296, SIc2a3, Rexl, Utfl, and Natl. In one case, for example, a cell that expresses Oct4 or Nanog is identified as pluripotent. Methods for detecting the expression of such markers can include, for example, RT-PCR and immunological methods that detect the presence of the encoded polypeptides, such as Western blots or flow cytometric analyses. Detection can involve not only RT-PCR, but can also include detection of protein markers. Intracellular markers may be best identified via RT-PCR, or protein detection methods such as immunocytochemistry, while cell surface markers are readily identified, e.g., by immunocytochemistry.

[0218] The pluripotent stem cell character of isolated cells can be confirmed by tests evaluating the ability of the iPSCs to differentiate into cells of each of the three germ layers. As one example, teratoma formation in nude mice can be used to evaluate the pluripotent character of the isolated clones. The cells can be introduced into nude mice and histology and/or immunohistochemistry can be performed on a tumor arising from the cells. The growth of a tumor comprising cells from all three germ layers, for example, further indicates that the cells are pluripotent stem cells.

### Hepatocytes

[0219] The genetically engineered human cells described herein can be hepatocytes. A hepatocyte is a cell of the main parenchymal tissue of the liver. Hepatocytes make up 70-85% of the liver's mass. These cells are involved in: protein synthesis; protein storage; transformation of carbohydrates; synthesis of cholesterol, bile salts and phospholipids; detoxification, modification, and excretion of exogenous and endogenous substances; and initiation of formation and secretion of bile.

[0220] Although the HFE gene is expressed in various tissues, iron is primarily deposed in hepatocytes and thus correction of the HFE gene should be primarily targeted to hepatocytes and the liver.

Creating Patient Specific iPSCs

[0221] One step of the ex vivo methods of the present disclosure can involve creating a patient specific PS cell, patient specific iPS cells, or a patient specific iPS cell line. There are many established methods in the art for creating patient specific iPS cells, as described in Takahashi and Yamanaka 2006; Takahashi, Tanabe et al. 2007. For example, the creating step can comprise: isolating a somatic cell, such as a skin cell or fibroblast, from the patient; and introducing a set of pluripotency-associated genes into the somatic cell in order to induce the cell to become a pluripotent stem cell. The set of pluripotency-associated genes can be one or more of the genes selected from the group consisting of OCT4, SOX2, KLF4, Lin28, NANOG, and cMYC.

### Performing a Biopsy or Aspirate of the Patient's Bone Marrow

[0222] A biopsy or aspirate is a sample of tissue or fluid taken from the body. There are many different kinds of biopsies or aspirates. Nearly all of them involve using a sharp tool to remove a small amount of tissue. If the biopsy will be on the skin or other sensitive area, numbing medicine can be applied first. A biopsy or aspirate can be performed according to any of the known methods in the art. For example, in a liver biopsy, a needle is injected into the liver through the skin or the belly, capturing the liver tissue. For example, in a bone marrow aspirate, a large needle is used to enter the pelvis bone to collect bone marrow.

### Isolating a Liver Specific Progenitor Cell or Primary Hepatocyte

[0223] Liver specific progenitor cells and primary hepatocytes may be isolated according to any method known in the art. For example, human hepatocytes are isolated from fresh surgical specimens (e.g., an autologous sample). Healthy liver tissue is used to isolate hepatocytes by collagenase digestion. The obtained cell suspension is filtered through a 100-mm nylon mesh and sedimented by centrifugation at 50 g for 5 minutes, resuspended, and washed two to three times in cold wash medium. Human liver stem cells are obtained by culturing under stringent conditions of hepatocytes obtained from fresh liver preparations. Hepatocytes seeded on collagen-coated plates are cultured for 2 weeks. After 2 weeks, surviving cells are removed, and characterized for expression of stem cells markers (Herrera et al, STEM CELLS 2006; 24: 2840-2850).

### Isolating a Mesenchymal Stem Cell

[0224] Mesenchymal stem cells can be isolated according to any method known in the art, such as from a patient's bone marrow or peripheral blood. For example, marrow aspirate can be collected into a syringe with heparin. Cells can be washed and centrifuged on a Percoll™ density gradient. Cells, such as blood cells, liver cells, interstitial cells, macrophages, mast cells, and thymocytes, can be separated using density gradient centrifugation media, Percoll™. The cells can then be cultured in Dulbecco's modified Eagle's medium (DMEM) (low glucose) containing 10% fetal bovine serum (FBS) (Pittinger M F, Mackay A M, Beck S C et al., Science 1999; 284:143-147).

### Genome Editing

[0225] Genome editing generally refers to the process of modifying the nucleotide sequence of a genome, preferably in a precise or pre-determined manner. Examples of methods of genome editing described herein include methods of using site-directed nucleases to cut deoxyribonucleic acid (DNA) at precise target locations in the genome, thereby creating single-strand or double-strand DNA breaks at particular locations within the genome. Such breaks can be and regularly are repaired by natural, endogenous cellular processes, such as HDR and NHEJ. These two main DNA repair processes consist of a family of alternative pathways. NHEJ directly joins the DNA ends resulting from a double-strand break, sometimes with the loss or addition of nucleotide sequence, which may disrupt or enhance gene expression. HDR utilizes a homologous sequence, or donor sequence, as a template for inserting a defined DNA sequence at the break point. The homologous sequence can be in the endogenous genome, such as a sister chromatid. Alternatively, the donor can be an exogenous nucleic acid, such as a plasmid, a single-strand oligonucleotide, a double-stranded oligonucleotide, a duplex oligonucleotide or a virus, that has regions of high homology with the nuclease-cleaved locus, but which can also contain additional sequence or sequence changes including deletions that can be incorporated into the cleaved target locus. A third repair mechanism can be microhomology-mediated end joining (MMEJ), also referred to as “Alternative NHEJ”, in which the genetic outcome is similar to NHEJ in that small deletions and insertions can occur at the cleavage site. MMEJ can make use of homologous sequences of a few basepairs flanking the DNA break site to drive a more favored DNA end joining repair outcome, and recent reports have further elucidated the molecular mechanism of this process. In some instances it may be possible to predict likely repair outcomes based on analysis of potential microhomologies at the site of the DNA break.

[0226] Each of these genome editing mechanisms can be used to create desired genomic alterations. A step in the genome editing process can be to create one or two DNA breaks, the latter as double-strand breaks or as two single-stranded breaks, in the target locus as near the site of intended mutation. This can be achieved via the use of site-directed polypeptides, as described and illustrated herein.

[0227] Site-directed polypeptides, such as a DNA endonuclease, can introduce double-strand breaks or single-strand breaks in nucleic acids, e.g., genomic DNA. The double-strand break can stimulate a cell's endogenous DNA-repair pathways (e.g., homology-dependent repair or non-homologous end joining or alternative non-homologous end joining (A-NHEJ) or microhomology-mediated end joining). NHEJ can repair cleaved target nucleic acid without the need for a homologous template. This can sometimes result in small deletions or insertions (indels) in the target nucleic acid at the site of cleavage, and can lead to disruption or alteration of gene expression. HDR can occur when a homologous repair template, or donor, is available. The homologous donor template can comprise sequences that can be homologous to sequences flanking the target nucleic acid cleavage site. The sister chromatid can be used by the cell as the repair template. However, for the purposes of genome editing, the repair template can be supplied as an exogenous nucleic acid, such as a plasmid, duplex oligonucleotide, single-strand oligonucleotide, double-stranded oligonucleotide, or viral nucleic acid. With exogenous donor templates, an additional nucleic acid sequence (such as a transgene) or modification (such as a single or multiple base change or a deletion) can be introduced between the flanking regions of homology so that the additional or altered nucleic acid sequence also becomes incorporated into the target locus. MMEJ can result in a genetic outcome that is similar to NHEJ in that small deletions and insertions can occur at the cleavage site. MMEJ can make use of homologous sequences of a few basepairs flanking the cleavage site to drive a favored end-joining DNA repair outcome. In some instances it may be possible to predict likely repair outcomes based on analysis of potential microhomologies in the nuclease target regions.

[0228] Thus, in some cases, homologous recombination can be used to insert an exogenous polynucleotide sequence into the target nucleic acid cleavage site. An exogenous polynucleotide sequence is termed a donor polynucleotide (or donor or donor sequence or polynucleotide donor template) herein. The donor polynucleotide, a portion of the donor polynucleotide, a copy of the donor polynucleotide, or a portion of a copy of the donor polynucleotide can be inserted into the target nucleic acid cleavage site. The donor polynucleotide can be an exogenous polynucleotide sequence, i.e., a sequence that does not naturally occur at the target nucleic acid cleavage site.

[0229] The modifications of the target DNA due to NHEJ and/or HDR can lead to, for example, mutations, deletions, alterations, integrations, gene correction, gene replacement, gene tagging, transgene insertion, nucleotide deletion, gene disruption, translocations and/or gene mutation. The processes of deleting genomic DNA and integrating non-native nucleic acid into genomic DNA are examples of genome editing.

### CRISPR Endonuclease System

[0230] A CRISPR (Clustered Regularly Interspaced Short Palindromic Repeats) genomic locus can be found in the genomes of many prokaryotes (e.g., bacteria and archaea). In prokaryotes, the CRISPR locus encodes products that function as a type of immune system to help defend the prokaryotes against foreign invaders, such as virus and phage. There are three stages of CRISPR locus function: integration of new sequences into the CRISPR locus, expression of CRISPR RNA (crRNA), and silencing of foreign invader nucleic acid. Five types of CRISPR systems (e.g., Type I, Type II, Type III, Type U, and Type V) have been identified.

[0231] A CRISPR locus includes a number of short repeating sequences referred to as “repeats.” When expressed, the repeats can form secondary structures (e.g., hairpins) and/or comprise unstructured single-stranded sequences. The repeats usually occur in clusters and frequently diverge between species. The repeats are regularly interspaced with unique intervening sequences referred to as “spacers,” resulting in a repeat-spacer-repeat locus architecture. The spacers are identical to or have high homology with known foreign invader sequences. A spacer-repeat unit encodes a crisprRNA (crRNA), which is processed into a mature form of the spacer-repeat unit. A crRNA comprises a “seed” or spacer sequence that is involved in targeting a target nucleic acid (in the naturally occurring form in prokaryotes, the spacer sequence targets the foreign invader nucleic acid). A spacer sequence is located at the 5′ or 3′ end of the crRNA.

[0232] A CRISPR locus also comprises polynucleotide sequences encoding CRISPR Associated (Cas) genes. Cas genes encode endonucleases involved in the biogenesis and the interference stages of crRNA function in prokaryotes. Some Cas genes comprise homologous secondary and/or tertiary structures.

### Type II CRISPR Systems

[0233] crRNA biogenesis in a Type II CRISPR system in nature requires a trans-activating CRISPR RNA (tracrRNA). The tracrRNA can be modified by endogenous RNaseIII, and then hybridizes to a crRNA repeat in the pre-crRNA array. Endogenous RNaseIII can be recruited to cleave the pre-crRNA. Cleaved crRNAs can be subjected to exoribonuclease trimming to produce the mature crRNA form (e.g., 5′ trimming). The tracrRNA can remain hybridized to the crRNA, and the tracrRNA and the crRNA associate with a site-directed polypeptide (e.g., Cas9). The crRNA of the crRNA-tracrRNA-Cas9 complex can guide the complex to a target nucleic acid to which the crRNA can hybridize. Hybridization of the crRNA to the target nucleic acid can activate Cas9 for targeted nucleic acid cleavage. The target nucleic acid in a Type II CRISPR system is referred to as a protospacer adjacent motif (PAM). In nature, the PAM is essential to facilitate binding of a site-directed polypeptide (e.g., Cas9) to the target nucleic acid. Type II systems (also referred to as Nmeni or CASS4) are further subdivided into Type II-A (CASS4) and II-B (CASS4a). Jinek et al., Science, 337(6096):816-821 (2012) showed that the CRISPR/Cas9 system is useful for RNA-programmable genome editing, and international patent application publication number WO2013/176772 provides numerous examples and applications of the CRISPR/Cas endonuclease system for site-specific gene editing.

### Type V CRISPR Systems

[0234] Type V CRISPR systems have several important differences from Type II systems. For example, Cpf1 is a single RNA-guided endonuclease that, in contrast to Type II systems, lacks tracrRNA. In fact, Cpf1-associated CRISPR arrays can be processed into mature crRNAs without the requirement of an additional trans-activating tracrRNA. The Type V CRISPR array can be processed into short mature crRNAs of 42-44 nucleotides in length, with each mature crRNA beginning with 19 nucleotides of direct repeat followed by 23-25 nucleotides of spacer sequence. In contrast, mature crRNAs in Type II systems can start with 20-24 nucleotides of spacer sequence followed by about 22 nucleotides of direct repeat. Also, Cpf1 can utilize a T-rich protospacer-adjacent motif such that Cpf1-crRNA complexes efficiently cleave target DNA preceeded by a short T-rich PAM, which is in contrast to the G-rich PAM following the target DNA for Type II systems. Thus, Type V systems cleave at a point that is distant from the PAM, while Type II systems cleave at a point that is adjacent to the PAM. In addition, in contrast to Type II systems, Cpf1 cleaves DNA via a staggered DNA double-stranded break with a 4 or 5 nucleotide 5′ overhang. Type II systems cleave via a blunt double-stranded break. Similar to Type II systems, Cpf1 contains a predicted RuvC-like endonuclease domain, but lacks a second HNH endonuclease domain, which is in contrast to Type II systems.

### Cas Genes/Polypeptides and Protospacer Adjacent Motifs

[0235] Exemplary CRISPR/Cas polypeptides include the Cas9 polypeptides in FIG. 1 of Fonfara et al., Nucleic Acids Research, 42: 2577-2590 (2014). The CRISPR/Cas gene naming system has undergone extensive rewriting since the Cas genes were discovered. FIG. 5 of Fonfara, supra, provides PAM sequences for the Cas9 polypeptides from various species.

### Site-Directed Polypeptides

[0236] A site-directed polypeptide is a nuclease used in genome editing to cleave DNA. The site-directed can be administered to a cell or a patient as either: one or more polypeptides, or one or more mRNAs encoding the polypeptide.

[0237] In the context of a CRISPR/Cas or CRISPR/Cpf1 system, the site-directed polypeptide can bind to a guide RNA that, in turn, specifies the site in the target DNA to which the polypeptide is directed. In the CRISPR/Cas or CRISPR/Cpf1 systems disclosed herein, the site-directed polypeptide can be an endonuclease, such as a DNA endonuclease.

[0238] A site-directed polypeptide can comprises a plurality of nucleic acid-cleaving (i.e., nuclease) domains. Two or more nucleic acid-cleaving domains can be linked together via a linker. For example, the linker can comprise a flexible linker. Linkers can comprise 1,2, 3, 4, 5, 6, 7, 8, 9, 10, 11, 12, 13, 14, 15, 16, 17, 18, 19, 20, 21, 22, 23, 24, 25, 30, 35, 40 or more amino acids in length.

[0239] Naturally-occurring wild-type Cas9 enzymes comprise two nuclease domains, a HNH nuclease domain and a RuvC domain. Herein, the “Cas9” refers to both naturally-occurring and recombinant Cas9s. Cas9 enzymes contemplated herein can comprise a HNH or HNH-like nuclease domain, and/or a RuvC or RuvC-like nuclease domain.

[0240] HNH or HNH-like domains comprise a McrA-like fold. HNH or HNH-like domains comprises two antiparallel β-strands and an α-helix. HNH or HNH-like domains comprises a metal binding site (e.g., a divalent cation binding site). HNH or HNH-like domains can cleave one strand of a target nucleic acid (e.g., the complementary strand of the crRNA targeted strand).

[0241] RuvC or RuvC-like domains comprise an RNaseH or RNaseH-like fold. RuvC/RNaseH domains are involved in a diverse set of nucleic acid-based functions including acting on both RNA and DNA. The RNaseH domain comprises 5 β-strands surrounded by a plurality of α-helices. RuvC/RNaseH or RuvC/RNaseH-like domains comprise a metal binding site (e.g., a divalent cation binding site). RuvC/RNaseH or RuvC/RNaseH-like domains can cleave one strand of a target nucleic acid (e.g., the non-complementary strand of a double-stranded target DNA).

[0242] Site-directed polypeptides can introduce double-strand breaks or single-strand breaks in nucleic acids, e.g., genomic DNA. The double-strand break can stimulate a cell's endogenous DNA-repair pathways (e.g., HDR or NHEJ or alternative non-homologous end joining (A-NHEJ) or microhomology-mediated end joining (MMEJ)). NHEJ can repair cleaved target nucleic acid without the need for a homologous template. This can sometimes result in small deletions or insertions (indels) in the target nucleic acid at the site of cleavage, and can lead to disruption or alteration of gene expression. HDR can occur when a homologous repair template, or donor, is available. The homologous donor template can comprise sequences that are homologous to sequences flanking the target nucleic acid cleavage site. The sister chromatid can be used by the cell as the repair template. However, for the purposes of genome editing, the repair template can be supplied as an exogenous nucleic acid, such as a plasmid, duplex oligonucleotide, single-strand oligonucleotide or viral nucleic acid. With exogenous donor templates, an additional nucleic acid sequence (such as a transgene) or modification (such as a single or multiple base change or a deletion) can be introduced between the flanking regions of homology so that the additional or altered nucleic acid sequence also becomes incorporated into the target locus. MMEJ can result in a genetic outcome that is similar to NHEJ in that small deletions and insertions can occur at the cleavage site. MMEJ can make use of homologous sequences of a few basepairs flanking the cleavage site to drive a favored end-joining DNA repair outcome. In some instances it may be possible to predict likely repair outcomes based on analysis of potential microhomologies in the nuclease target regions.

[0243] Thus, in some cases, homologous recombination can be used to insert an exogenous polynucleotide sequence into the target nucleic acid cleavage site. An exogenous polynucleotide sequence is termed a donor polynucleotide (or donor or donor sequence) herein. The donor polynucleotide, a portion of the donor polynucleotide, a copy of the donor polynucleotide, or a portion of a copy of the donor polynucleotide can be inserted into the target nucleic acid cleavage site. The donor polynucleotide can be an exogenous polynucleotide sequence, i.e., a sequence that does not naturally occur at the target nucleic acid cleavage site.

[0244] The modifications of the target DNA due to NHEJ and/or HDR can lead to, for example, mutations, deletions, alterations, integrations, gene correction, gene replacement, gene tagging, transgene insertion, nucleotide deletion, gene disruption, translocations and/or gene mutation. The processes of deleting genomic DNA and integrating non-native nucleic acid into genomic DNA are examples of genome editing.

[0245] The site-directed polypeptide can comprise an amino acid sequence having at least 10%, at least 15%, at least 20%, at least 30%, at least 40%, at least 50%, at least 60%, at least 70%, at least 75%, at least 80%, at least 85%, at least 90%, at least 95%, at least 99%, or 100% amino acid sequence identity to a wild-type exemplary site-directed polypeptide [e.g., Cas9 from S. pyogenes, US2014/0068797 Sequence ID No. 8 or Sapranauskas et al., Nucleic Acids Res, 39(21): 9275-9282 (2011)], and various other site-directed polypeptides. The site-directed polypeptide can comprise at least 70, 75, 80, 85, 90, 95, 97, 99, or 100% identity to a wild-type site-directed polypeptide (e.g., Cas9 from S. pyogenes, supra) over 10 contiguous amino acids. The site-directed polypeptide can comprises at most: 70, 75, 80, 85, 90, 95, 97, 99, or 100% identity to a wild-type site-directed polypeptide (e.g., Cas9 from S. pyogenes, supra) over 10 contiguous amino acids. The site-directed polypeptide can comprise at least: 70, 75, 80, 85, 90, 95, 97, 99, or 100% identity to a wild-type site-directed polypeptide (e.g., Cas9 from S. pyogenes, supra) over 10 contiguous amino acids in a HNH nuclease domain of the site-directed polypeptide. The site-directed polypeptide can comprise at most: 70, 75, 80, 85, 90, 95, 97, 99, or 100% identity to a wild-type site-directed polypeptide (e.g., Cas9 from S. pyogenes, supra) over 10 contiguous amino acids in a HNH nuclease domain of the site-directed polypeptide. The site-directed polypeptide can comprise at least: 70, 75, 80, 85, 90, 95, 97, 99, or 100% identity to a wild-type site-directed polypeptide (e.g., Cas9 from S. pyogenes, supra) over 10 contiguous amino acids in a RuvC nuclease domain of the site-directed polypeptide. The site-directed polypeptide can comprise at most: 70, 75, 80, 85, 90, 95, 97, 99, or 100% identity to a wild-type site-directed polypeptide (e.g., Cas9 from S. pyogenes, supra) over 10 contiguous amino acids in a RuvC nuclease domain of the site-directed polypeptide.

[0246] The site-directed polypeptide can comprise a modified form of a wild-type exemplary site-directed polypeptide. The modified form of the wild-type exemplary site-directed polypeptide can comprise a mutation that reduces the nucleic acid-cleaving activity of the site-directed polypeptide. The modified form of the wild-type exemplary site-directed polypeptide can have less than 90%, less than 80%, less than 70%, less than 60%, less than 50%, less than 40%, less than 30%, less than 20%, less than 10%, less than 5%, or less than 1% of the nucleic acid-cleaving activity of the wild-type exemplary site-directed polypeptide (e.g., Cas9 from S. pyogenes, supra). The modified form of the site-directed polypeptide can have no substantial nucleic acid-cleaving activity. When a site-directed polypeptide is a modified form that has no substantial nucleic acid-cleaving activity, it is referred to herein as “enzymatically inactive.”

[0247] The modified form of the site-directed polypeptide can comprise a mutation such that it can induce a single-strand break (SSB) on a target nucleic acid (e.g., by cutting only one of the sugar-phosphate backbones of a double-strand target nucleic acid). The mutation can result in less than 90%, less than 80%, less than 70%, less than 60%, less than 50%, less than 40%, less than 30%, less than 20%, less than 10%, 10 less than 5%, or less than 1% of the nucleic acid-cleaving activity in one or more of the plurality of nucleic acid-cleaving domains of the wild-type site directed polypeptide (e.g., Cas9 from S. pyogenes, supra). The mutation can result in one or more of the plurality of nucleic acid-cleaving domains retaining the ability to cleave the complementary strand of the target nucleic acid, but reducing its ability to cleave the non-complementary strand of the target nucleic acid. The mutation can result in one or more of the plurality of nucleic acid-cleaving domains retaining the ability to cleave the non-complementary strand of the target nucleic acid, but reducing its ability to cleave the complementary strand of the target nucleic acid. For example, residues in the wild-type exemplary S. pyogenes Cas9 polypeptide, such as Asp10, His840, Asn854 and Asn856, are mutated to inactivate one or more of the plurality of nucleic acid-cleaving domains (e.g., nuclease domains). The residues to be mutated can correspond to residues Asp10, His840, Asn854 and Asn856 in the wild-type exemplary S. pyogenes Cas9 polypeptide (e.g., as determined by sequence and/or structural alignment). Non-limiting examples of mutations include D10A, H840A, N854A or N856A. One skilled in the art will recognize that mutations other than alanine substitutions can be suitable.

[0248] A D10A mutation can be combined with one or more of H840A, N854A, or N856A mutations to produce a site-directed polypeptide substantially lacking DNA cleavage activity. A H840A mutation can be combined with one or more of D10A, N854A, or N856A mutations to produce a site-directed polypeptide substantially lacking DNA cleavage activity. A N854A mutation can be combined with one or more of H840A, D10A, or N856A mutations to produce a site-directed polypeptide substantially lacking DNA cleavage activity. A N856A mutation can be combined with one or more of H840A, N854A, or D10A mutations to produce a site-directed polypeptide substantially lacking DNA cleavage activity. Site-directed polypeptides that comprise one substantially inactive nuclease domain are referred to as “nickases”.

[0249] Nickase variants of RNA-guided endonucleases, for example Cas9, can be used to increase the specificity of CRISPR-mediated genome editing. Wild type Cas9 is typically guided by a single guide RNA designed to hybridize with a specified ˜20 nucleotide sequence in the target sequence (such as an endogenous genomic locus). However, several mismatches can be tolerated between the guide RNA and the target locus, effectively reducing the length of required homology in the target site to, for example, as little as 13 nt of homology, and thereby resulting in elevated potential for binding and double-strand nucleic acid cleavage by the CRISPR/Cas9 complex elsewhere in the target genome—also known as off-target cleavage. Because nickase variants of Cas9 each only cut one strand, in order to create a double-strand break it is necessary for a pair of nickases to bind in close proximity and on opposite strands of the target nucleic acid, thereby creating a pair of nicks, which is the equivalent of a double-strand break. This requires that two separate guide RNAs—one for each nickase—must bind in close proximity and on opposite strands of the target nucleic acid. This requirement essentially doubles the minimum length of homology needed for the double-strand break to occur, thereby reducing the likelihood that a double-strand cleavage event will occur elsewhere in the genome, where the two guide RNA sites—if they exist—are unlikely to be sufficiently close to each other to enable the double-strand break to form. As described in the art, nickases can also be used to promote HDR versus NHEJ. HDR can be used to introduce selected changes into target sites in the genome through the use of specific donor sequences that effectively mediate the desired changes.

[0250] Mutations contemplated can include substitutions, additions, and deletions, or any combination thereof. The mutation converts the mutated amino acid to alanine. The mutation converts the mutated amino acid to another amino acid (e.g., glycine, serine, threonine, cysteine, valine, leucine, isoleucine, methionine, proline, phenylalanine, tyrosine, tryptophan, aspartic acid, glutamic acid, asparagines, glutamine, histidine, lysine, or arginine). The mutation converts the mutated amino acid to a non-natural amino acid (e.g., selenomethionine). The mutation converts the mutated amino acid to amino acid mimics (e.g., phosphomimics). The mutation can be a conservative mutation. For example, the mutation converts the mutated amino acid to amino acids that resemble the size, shape, charge, polarity, conformation, and/or rotamers of the mutated amino acids (e.g., cysteine/serine mutation, lysine/asparagine mutation, histidine/phenylalanine mutation). The mutation can cause a shift in reading frame and/or the creation of a premature stop codon. Mutations can cause changes to regulatory regions of genes or loci that affect expression of one or more genes.

[0251] The site-directed polypeptide (e.g., variant, mutated, enzymatically inactive and/or conditionally enzymatically inactive site-directed polypeptide) can target nucleic acid. The site-directed polypeptide (e.g., variant, mutated, enzymatically inactive and/or conditionally enzymatically inactive endoribonuclease) can target DNA. The site-directed polypeptide (e.g., variant, mutated, enzymatically inactive and/or conditionally enzymatically inactive endoribonuclease) can target RNA.

[0252] The site-directed polypeptide can comprise one or more non-native sequences (e.g., the site-directed polypeptide is a fusion protein).

[0253] The site-directed polypeptide can comprise an amino acid sequence comprising at least 15% amino acid identity to a Cas9 from a bacterium (e.g., S. pyogenes), a nucleic acid binding domain, and two nucleic acid cleaving domains (i.e., a HNH domain and a RuvC domain).

[0254] The site-directed polypeptide can comprise an amino acid sequence comprising at least 15% amino acid identity to a Cas9 from a bacterium (e.g., S. pyogenes), and two nucleic acid cleaving domains (i.e., a HNH domain and a RuvC domain).

[0255] The site-directed polypeptide can comprise an amino acid sequence comprising at least 15% amino acid identity to a Cas9 from a bacterium (e.g., S. pyogenes), and two nucleic acid cleaving domains, wherein one or both of the nucleic acid cleaving domains comprise at least 50% amino acid identity to a nuclease domain from Cas9 from a bacterium (e.g., S. pyogenes).

[0256] The site-directed polypeptide can comprise an amino acid sequence comprising at least 15% amino acid identity to a Cas9 from a bacterium (e.g., S. pyogenes), two nucleic acid cleaving domains (i.e., a HNH domain and a RuvC domain), and non-native sequence (for example, a nuclear localization signal) or a linker linking the site-directed polypeptide to a non-native sequence.

[0257] The site-directed polypeptide can comprise an amino acid sequence comprising at least 15% amino acid identity to a Cas9 from a bacterium (e.g., S. pyogenes), two nucleic acid cleaving domains (i.e., a HNH domain and a RuvC domain), wherein the site-directed polypeptide comprises a mutation in one or both of the nucleic acid cleaving domains that reduces the cleaving activity of the nuclease domains by at least 50%.

[0258] The site-directed polypeptide can comprise an amino acid sequence comprising at least 15% amino acid identity to a Cas9 from a bacterium (e.g., S. pyogenes), and two nucleic acid cleaving domains (i.e., a HNH domain and a RuvC domain), wherein one of the nuclease domains comprises mutation of aspartic acid 10, and/or wherein one of the nuclease domains can comprise a mutation of histidine 840, and wherein the mutation reduces the cleaving activity of the nuclease domain(s) by at 10 least 50%.

[0259] The one or more site-directed polypeptides, e.g. DNA endonucleases, can comprise two nickases that together effect one double-strand break at a specific locus in the genome, or four nickases that together effect or cause two double-strand breaks at specific loci in the genome. Alternatively, one site-directed polypeptide, e.g. DNA endonuclease, can effect or cause one double-strand break at a specific locus in the genome.

### Genome-Targeting Nucleic Acid

[0260] The present disclosure provides a genome-targeting nucleic acid that can direct the activities of an associated polypeptide (e.g., a site-directed polypeptide) to a specific target sequence within a target nucleic acid. The genome-targeting nucleic acid can be an RNA. A genome-targeting RNA is referred to as a “guide RNA” or “gRNA” herein. A guide RNA can comprise at least a spacer sequence that hybridizes to a target nucleic acid sequence of interest, and a CRISPR repeat sequence. In Type II systems, the gRNA also comprises a second RNA called the tracrRNA sequence. In the Type II guide RNA (gRNA), the CRISPR repeat sequence and tracrRNA sequence hybridize to each other to form a duplex. In the Type V guide RNA (gRNA), the crRNA forms a duplex. In both systems, the duplex can bind a site-directed polypeptide, such that the guide RNA and site-direct polypeptide form a complex. The genome-targeting nucleic acid can provide target specificity to the complex by virtue of its association with the site-directed polypeptide. The genome-targeting nucleic acid thus can direct the activity of the site-directed polypeptide.

[0261] Exemplary guide RNAs include the spacer sequences in SEQ ID NOs: 1-64,980 of the Sequence Listing, shown with the genome location of their target sequence and the associated Cas9 cut site, wherein the genome location is based on the GRCh38/hg38 human genome assembly.

[0262] Each guide RNA can be designed to include a spacer sequence complementary to its genomic target sequence. For example, each of the spacer sequences in SEQ ID NOs: 1-64,980 of the Sequence Listing can be put into a single RNA chimera or a crRNA (along with a corresponding tracrRNA). See Jinek et al., Science, 337, 816-821 (2012) and Deltcheva et al., Nature, 471, 602-607 (2011).

[0263] The genome-targeting nucleic acid can be a double-molecule guide RNA. The genome-targeting nucleic acid can be a single-molecule guide RNA.

[0264] A double-molecule guide RNA can comprise two strands of RNA. The first strand comprises in the 5′ to 3′ direction, an optional spacer extension sequence, a spacer sequence and a minimum CRISPR repeat sequence. The second strand can comprise a minimum tracrRNA sequence (complementary to the minimum CRISPR repeat sequence), a 3′ tracrRNA sequence and an optional tracrRNA extension sequence.

[0265] A single-molecule guide RNA (sgRNA) in a Type II system can comprise, in the 5′ to 3′ direction, an optional spacer extension sequence, a spacer sequence, a minimum CRISPR repeat sequence, a single-molecule guide linker, a minimum tracrRNA sequence, a 3′ tracrRNA sequence and an optional tracrRNA extension sequence. The optional tracrRNA extension can comprise elements that contribute additional functionality (e.g., stability) to the guide RNA. The single-molecule guide linker can link the minimum CRISPR repeat and the minimum tracrRNA sequence to form a hairpin structure. The optional tracrRNA extension can comprise one or more hairpins.

[0266] A single-molecule guide RNA (sgRNA) in a Type V system can comprise, in the 5′ to 3′ direction, a minimum CRISPR repeat sequence and a spacer sequence.

[0267] The sgRNA can comprise a 20 nucleotide spacer sequence at the 5′ end of the sgRNA sequence. The sgRNA can comprise a less than a 20 nucleotide spacer sequence at the 5′ end of the sgRNA sequence. The sgRNA can comprise a more than 20 nucleotide spacer sequence at the 5′ end of the sgRNA sequence. The sgRNA can comprise a variable length spacer sequence with 17-30 nucleotides at the 5′ end of the sgRNA sequence (see Table 1).

[0268] The sgRNA can comprise no uracil at the 3′end of the sgRNA sequence, such as in SEQ ID NO. 64,985 of Table 1. The sgRNA can comprise one or more uracil at the 3′end of the sgRNA sequence, such as in SEQ ID NOs. 64,986-64,987 in Table 1. For example, the sgRNA can comprise 1 uracil (U) at the 3′end of the sgRNA sequence. The sgRNA can comprise 2 uracil (UU) at the 3′end of the sgRNA sequence. The sgRNA can comprise 3 uracil (UUU) at the 3′end of the sgRNA sequence. The sgRNA can comprise 4 uracil (UUUU) at the 3′end of the sgRNA sequence. The sgRNA can comprise 5 uracil (UUUUU) at the 3′end of the sgRNA sequence. The sgRNA can comprise 6 uracil (UUUUUU) at the 3′end of the sgRNA sequence. The sgRNA can comprise 7 uracil (UUUUUUU) at the 3′end of the sgRNA sequence. The sgRNA can comprise 8 uracil (UUUUUUUU) at the 3′end of the sgRNA sequence.

[0269] The sgRNA can be unmodified or modified. For example, modified sgRNAs can comprise one or more 2′-O-methyl phosphorothioate nucleotides. For example, modified sgRNAs can comprise 2′-O-methyl phosphorothioate nucleotides as the first 3 nucleotides and 2′-O-methyl phosphorothioate nucleotides as the last 3 nucleotides, such as in SEQ ID NO. 64,984 in Table 1 where “*” indicates 2′-O-methyl phosphorothioate nucleotides. The first 3 nucleotides in the n₍₁₇₋₃₀₎ region of SEQ ID NO. 64,987 can be 2′-O-methyl phosphorothioate nucleotides (i.e.: n*). The last 3 nucleotides within the u(1-8) region of SEQ ID NO. 64,987 can be 2′-O-methyl phosphorothioate urasils (i.e.: u*). In certain examples where the u₍₁₋₈₎ region of SEQ ID NO. 64,987 contains less than 3 urasil, one or two nucleotides prior to the u₍₁₋₈₎ region can be 2′-O-methyl phosphorothioate nucleotides such that the last three nucleotides of the sequence are 2′-O-methyl phosphorothioate nucleotides.

TABLE 1

| SEQ ID NO. | sgRNA sequence |
|---|---|
| 64,983 | nnnnnnnnnnnnnnnnnnnnguuuuagagcuagaa |
| | auagcaaguuaaaauaaggcuaguccguuaucaac |
| | uugaaaaaguggcaccgagucggugcuuuu |
| 64,984 | n*n*n*nnnnnnnnnnnnnnnnnguuuuagagcua |
| | gaaauagcaaguuaaaauaaggcuaguccguuauc |
| | aacuugaaaaaguggcaccaauucggugcun*n*n* |
| 64,985 | nnnnnnnnnnnnnnnnnnnnguuuuagagcuagaa |
| | auagcaaguuaaaauaaggcuaguccguuaucaac |
| | uugaaaaaguggcaccgagucggugc |
| 64,986 | n₍₁₇₋₃₀₎guuuuagagcuagaaauagcaaguuaaaa |
| | uaaggcuaguccguuaucaacuugaaaaaguggc |
| | accgagucggugcu₍₁₋₈₎ |
| 64,987 | n₍₁₇₋₃₀₎guuuuagagcuagaaauagcaaguuaaa |
| | auaaggcuaguccguuaucaacuugaaaaagugg |
| | caccgagucggugcu₍₁₋₈₎ |

[0270] By way of illustration, guide RNAs used in the CRISPR/Cas/Cpf1 system, or other smaller RNAs, can be readily synthesized by chemical means, as illustrated below and described in the art. While chemical synthetic procedures are continually expanding, purifications of such RNAs by procedures such as high performance liquid chromatography (HPLC, which avoids the use of gels such as PAGE) tends to become more challenging as polynucleotide lengths increase significantly beyond a hundred or so nucleotides. One approach used for generating RNAs of greater length is to produce two or more molecules that are ligated together. Much longer RNAs, such as those encoding a Cas9 or Cpf1 endonuclease, are more readily generated enzymatically. Various types of RNA modifications can be introduced during or after chemical synthesis and/or enzymatic generation of RNAs, e.g., modifications that enhance stability, reduce the likelihood or degree of innate immune response, and/or enhance other attributes, as described in the art.

### Spacer Extension Sequence

[0271] In some examples of genome-targeting nucleic acids, a spacer extension sequence can modify activity, provide stability and/or provide a location for modifications of a genome-targeting nucleic acid. A spacer extension sequence can modify on- or off-target activity or specificity. In some examples, a spacer extension sequence can be provided. The spacer extension sequence can have a length of more than 1, 5, 10, 15, 20, 25, 30, 35, 40, 45, 50, 60, 70, 80, 90, 100, 120, 140, 160, 180, 200, 220, 240, 260, 280, 300, 320, 340, 360, 380, 400, 1000, 2000, 3000, 4000, 5000, 6000, or 7000 or more nucleotides. The spacer extension sequence can have a length of less than 1, 5, 10, 15, 20, 25, 30, 35, 40, 45, 50, 60, 70, 80, 90, 100, 120, 140, 160, 180, 200, 220, 240, 260, 280, 300, 320, 340, 360, 380, 400, 1000, 2000, 3000, 4000, 5000, 6000, 7000 or more nucleotides. The spacer extension sequence can be less than 10 nucleotides in length. The spacer extension sequence can be between 10-30 nucleotides in length. The spacer extension sequence can be between 30-70 nucleotides in length.

[0272] The spacer extension sequence can comprise another moiety (e.g., a stability control sequence, an endoribonuclease binding sequence, a ribozyme). The moiety can decrease or increase the stability of a nucleic acid targeting nucleic acid. The moiety can be a transcriptional terminator segment (i.e., a transcription termination sequence). The moiety can function in a eukaryotic cell. The moiety can function in a prokaryotic cell. The moiety can function in both eukaryotic and prokaryotic cells. Non-limiting examples of suitable moieties include: a 5′ cap (e.g., a 7-methylguanylate cap (m7 G)), a riboswitch sequence (e.g., to allow for regulated stability and/or regulated accessibility by proteins and protein complexes), a sequence that forms a dsRNA duplex (i.e., a hairpin), a sequence that targets the RNA to a subcellular location (e.g., nucleus, mitochondria, chloroplasts, and the like), a modification or sequence that provides for tracking (e.g., direct conjugation to a fluorescent molecule, conjugation to a moiety that facilitates fluorescent detection, a sequence that allows for fluorescent detection, etc.), and/or a modification or sequence that provides a binding site for proteins (e.g., proteins that act on DNA, including transcriptional activators, transcriptional repressors, DNA methyltransferases, DNA demethylases, histone acetyltransferases, histone deacetylases, and the like).

### Spacer Sequence

[0273] The spacer sequence hybridizes to a sequence in a target nucleic acid of interest. The spacer of a genome-targeting nucleic acid can interact with a target nucleic acid in a sequence-specific manner via hybridization (i.e., base pairing). The nucleotide sequence of the spacer can vary depending on the sequence of the target nucleic acid of interest.

[0274] In a CRISPR/Cas system herein, the spacer sequence can be designed to hybridize to a target nucleic acid that is located 5′ of a PAM of the Cas9 enzyme used in the system. The spacer may perfectly match the target sequence or may have mismatches. Each Cas9 enzyme has a particular PAM sequence that it recognizes in a target DNA. For example, S. pyogenes recognizes in a target nucleic acid a PAM that comprises the sequence 5′-NRG-3′, where R comprises either A or G, where N is any nucleotide and N is immediately 3′ of the target nucleic acid sequence targeted by the spacer sequence.

[0275] The target nucleic acid sequence can comprise 20 nucleotides. The target nucleic acid can comprise less than 20 nucleotides. The target nucleic acid can comprise more than 20 nucleotides. The target nucleic acid can comprise at least: 5, 10, 15, 16, 17, 18, 19, 20, 21, 22, 23, 24, 25, 30 or more nucleotides. The target nucleic acid can comprise at most: 5, 10, 15, 16, 17, 18, 19, 20, 21, 22, 23, 24, 25, 30 or more nucleotides. The target nucleic acid sequence can comprise 20 bases immediately 5′ of the first nucleotide of the PAM. For example, in a sequence comprising 5′-NNNNNNNNNNNNNNNNNNNNNRG-3′ (SEQ ID NO. 64,981), the target nucleic acid can comprise the sequence that corresponds to the Ns, wherein N is any nucleotide, and the underlined NRG sequence is the S. pyogenes PAM.

[0276] The spacer sequence that hybridizes to the target nucleic acid can have a length of at least about 6 nucleotides (nt). The spacer sequence can be at least about 6 nt, at least about 10 nt, at least about 15 nt, at least about 18 nt, at least about 19 nt, at least about 20 nt, at least about 25 nt, at least about 30 nt, at least about 35 nt or at least about 40 nt, from about 6 nt to about 80 nt, from about 6 nt to about 50 nt, from about 6 nt to about 45 nt, from about 6 nt to about 40 nt, from about 6 nt to about 35 nt, from about 6 nt to about 30 nt, from about 6 nt to about 25 nt, from about 6 nt to about 20 nt, from about 6 nt to about 19 nt, from about 10 nt to about 50 nt, from about 10 nt to about 45 nt, from about 10 nt to about 40 nt, from about 10 nt to about 35 nt, from about 10 nt to about 30 nt, from about 10 nt to about 25 nt, from about 10 nt to about 20 nt, from about 10 nt to about 19 nt, from about 19 nt to about 25 nt, from about 19 nt to about 30 nt, from about 19 nt to about 35 nt, from about 19 nt to about 40 nt, from about 19 nt to about 45 nt, from about 19 nt to about 50 nt, from about 19 nt to about 60 nt, from about 20 nt to about 25 nt, from about 20 nt to about 30 nt, from about 20 nt to about 35 nt, from about 20 nt to about 40 nt, from about 20 nt to about 45 nt, from about 20 nt to about 50 nt, or from about 20 nt to about 60 nt. In some examples, the spacer sequence can comprise 20 nucleotides. In some examples, the spacer can comprise 19 nucleotides.

[0277] In some examples, the percent complementarity between the spacer sequence and the target nucleic acid is at least about 30%, at least about 40%, at least about 50%, at least about 60%, at least about 65%, at least about 70%, at least about 75%, at least about 80%, at least about 85%, at least about 90%, at least about 95%, at 30 least about 97%, at least about 98%, at least about 99%, or 100%. In some examples, the percent complementarity between the spacer sequence and the target nucleic acid is at most about 30%, at most about 40%, at most about 50%, at most about 60%, at most about 65%, at most about 70%, at most about 75%, at most about 80%, at most about 85%, at most about 90%, at most about 95%, at most about 97%, at most about 98%, at most about 99%, or 100%. In some examples, the percent complementarity between the spacer sequence and the target nucleic acid is 100% over the six contiguous 5′-most nucleotides of the target sequence of the complementary strand of the target nucleic acid. The percent complementarity between the spacer sequence and the target nucleic acid can be at least 60% over about 20 contiguous nucleotides. The length of the spacer sequence and the target nucleic acid can differ by 1 to 6 nucleotides, which may be thought of as a bulge or bulges.

[0278] The spacer sequence can be designed or chosen using a computer program. The computer program can use variables, such as predicted melting temperature, secondary structure formation, predicted annealing temperature, sequence identity, genomic context, chromatin accessibility, % GC, frequency of genomic occurrence (e.g., of sequences that are identical or are similar but vary in one or more spots as a result of mismatch, insertion or deletion), methylation status, presence of SNPs, and the like.

### Minimum CRISPR Repeat Sequence

[0279] A minimum CRISPR repeat sequence can be a sequence with at least about 30%, about 40%, about 50%, about 60%, about 65%, about 70%, about 75%, about 80%, about 85%, about 90%, about 95%, or 100% sequence identity to a reference CRISPR repeat sequence (e.g., crRNA from S. pyogenes).

[0280] A minimum CRISPR repeat sequence can comprise nucleotides that can hybridize to a minimum tracrRNA sequence in a cell. The minimum CRISPR repeat sequence and a minimum tracrRNA sequence can form a duplex, i.e. a base-paired double-stranded structure. Together, the minimum CRISPR repeat sequence and the minimum tracrRNA sequence can bind to the site-directed polypeptide. At least a part of the minimum CRISPR repeat sequence can hybridize to the minimum tracrRNA sequence. At least a part of the minimum CRISPR repeat sequence can comprise at least about 30%, about 40%, about 50%, about 60%, about 65%, about 70%, about 75%, about 80%, about 85%, about 90%, about 95%, or 100% complementary to the minimum tracrRNA sequence. At least a part of the minimum CRISPR repeat sequence can comprise at most about 30%, about 40%, about 50%, about 60%, about 65%, about 70%, about 75%, about 80%, about 85%, about 90%, about 95%, or 100% complementary to the minimum tracrRNA sequence.

[0281] The minimum CRISPR repeat sequence can have a length from about 7 nucleotides to about 100 nucleotides. For example, the length of the minimum CRISPR repeat sequence is from about 7 nucleotides (nt) to about 50 nt, from about 7 nt to about 40 nt, from about 7 nt to about 30 nt, from about 7 nt to about 25 nt, from about 7 nt to about 20 nt, from about 7 nt to about 15 nt, from about 8 nt to about 40 nt, from about 8 nt to about 30 nt, from about 8 nt to about 25 nt, from about 8 nt to about 20 nt, from about 8 nt to about 15 nt, from about 15 nt to about 100 nt, from about 15 nt to about 80 nt, from about 15 nt to about 50 nt, from about 15 nt to about 40 nt, from about 15 nt to about 30 nt, or from about 15 nt to about 25 nt. In some examples, the minimum CRISPR repeat sequence can be approximately 9 nucleotides in length. The minimum CRISPR repeat sequence can be approximately 12 nucleotides in length.

[0282] The minimum CRISPR repeat sequence can be at least about 60% identical 10 to a reference minimum CRISPR repeat sequence (e.g., wild-type crRNA from S. pyogenes) over a stretch of at least 6, 7, or 8 contiguous nucleotides. For example, the minimum CRISPR repeat sequence can be at least about 65% identical, at least about 70% identical, at least about 75% identical, at least about 80% identical, at least about 85% identical, at least about 90% identical, at least about 95% identical, at least about 98% identical, at least about 99% identical or 100% identical to a reference minimum CRISPR repeat sequence over a stretch of at least 6, 7, or 8 contiguous nucleotides.

Minimum tracrRNA Sequence

[0283] A minimum tracrRNA sequence can be a sequence with at least about 30%, about 40%, about 50%, about 60%, about 65%, about 70%, about 75%, about 80%, about 85%, about 90%, about 95%, or 100% sequence identity to a reference tracrRNA sequence (e.g., wild type tracrRNA from S. pyogenes).

[0284] A minimum tracrRNA sequence can comprise nucleotides that hybridize to a minimum CRISPR repeat sequence in a cell. A minimum tracrRNA sequence and a minimum CRISPR repeat sequence form a duplex, i.e. a base-paired double-stranded structure. Together, the minimum tracrRNA sequence and the minimum CRISPR repeat can bind to a site-directed polypeptide. At least a part of the minimum tracrRNA sequence can hybridize to the minimum CRISPR repeat sequence. The minimum tracrRNA sequence can be at least about 30%, about 40%, about 50%, about 60%, about 65%, about 70%, about 75%, about 80%, about 85%, about 90%, about 95%, or 100% complementary to the minimum CRISPR repeat sequence.

[0285] The minimum tracrRNA sequence can have a length from about 7 nucleotides to about 100 nucleotides. For example, the minimum tracrRNA sequence can be from about 7 nucleotides (nt) to about 50 nt, from about 7 nt to about 40 nt, from about 7 nt to about 30 nt, from about 7 nt to about 25 nt, from about 7 nt to about 20 nt, from about 7 nt to about 15 nt, from about 8 nt to about 40 nt, from about 8 nt to about 30 nt, from about 8 nt to about 25 nt, from about 8 nt to about 20 nt, from about 8 nt to about 15 nt, from about 15 nt to about 100 nt, from about 15 nt to about 80 nt, from about 15 nt to about 50 nt, from about 15 nt to about 40 nt, from about 15 nt to about 30 nt or from about 15 nt to about 25 nt long. The minimum tracrRNA sequence can be approximately 9 nucleotides in length. The minimum tracrRNA sequence can be approximately 12 nucleotides. The minimum tracrRNA can consist of tracrRNA nt 23-48 described in Jinek et al., supra.

[0286] The minimum tracrRNA sequence can be at least about 60% identical to a reference minimum tracrRNA (e.g., wild type, tracrRNA from S. pyogenes) sequence over a stretch of at least 6, 7, or 8 contiguous nucleotides. For example, the minimum tracrRNA sequence can be at least about 65% identical, about 70% identical, about 75% identical, about 80% identical, about 85% identical, about 90% identical, about 95% identical, about 98% identical, about 99% identical or 100% identical to a reference minimum tracrRNA sequence over a stretch of at least 6, 7, or 8 contiguous nucleotides.

[0287] The duplex between the minimum CRISPR RNA and the minimum tracrRNA can comprise a double helix. The duplex between the minimum CRISPR RNA and the minimum tracrRNA can comprise at least about 1, 2, 3, 4, 5, 6, 7, 8, 9, or 10 or more nucleotides. The duplex between the minimum CRISPR RNA and the minimum tracrRNA can comprise at most about 1, 2, 3, 4, 5, 6, 7, 8, 9, or 10 or more nucleotides.

[0288] The duplex can comprise a mismatch (i.e., the two strands of the duplex are not 100% complementary). The duplex can comprise at least about 1, 2, 3, 4, or 5 or mismatches. The duplex can comprise at most about 1, 2, 3, 4, or 5 or mismatches. The duplex can comprise no more than 2 mismatches.

### Bulges

[0289] In some cases, there can be a “bulge” in the duplex between the minimum CRISPR RNA and the minimum tracrRNA. A bulge is an unpaired region of nucleotides within the duplex. A bulge can contribute to the binding of the duplex to the site-directed polypeptide. The bulge can comprise, on one side of the duplex, an unpaired 5′-XXXY-3′ where X is any purine and Y comprises a nucleotide that can form a wobble pair with a nucleotide on the opposite strand, and an unpaired nucleotide region on the other side of the duplex. The number of unpaired nucleotides on the two sides of the duplex can be different.

[0290] In one example, the bulge can comprise an unpaired purine (e.g., adenine) on the minimum CRISPR repeat strand of the bulge. In some examples, the bulge can comprise an unpaired 5′-AAGY-3′ of the minimum tracrRNA sequence strand of the bulge, where Y comprises a nucleotide that can form a wobble pairing with a nucleotide on the minimum CRISPR repeat strand.

[0291] A bulge on the minimum CRISPR repeat side of the duplex can comprise at least 1, 2, 3, 4, or 5 or more unpaired nucleotides. A bulge on the minimum CRISPR repeat side of the duplex can comprise at most 1, 2, 3, 4, or 5 or more unpaired nucleotides. A bulge on the minimum CRISPR repeat side of the duplex can comprise 1 unpaired nucleotide.

[0292] A bulge on the minimum tracrRNA sequence side of the duplex can comprise at least 1, 2, 3, 4, 5, 6, 7, 8, 9, or 10 or more unpaired nucleotides. A bulge on the minimum tracrRNA sequence side of the duplex can comprise at most 1, 2, 3, 4, 5, 6, 7, 8, 9, or 10 or more unpaired nucleotides. A bulge on a second side of the duplex (e.g., 15 the minimum tracrRNA sequence side of the duplex) can comprise 4 unpaired nucleotides.

[0293] A bulge can comprise at least one wobble pairing. In some examples, a bulge can comprise at most one wobble pairing. A bulge can comprise at least one purine nucleotide. A bulge can comprise at least 3 purine nucleotides. A bulge sequence can comprises at least 5 purine nucleotides. A bulge sequence can comprise at least one guanine nucleotide. In some examples, a bulge sequence can comprise at least one adenine nucleotide.

### Hairpins

[0294] In various examples, one or more hairpins can be located 3′ to the minimum tracrRNA in the 3′ tracrRNA sequence.

[0295] The hairpin can start at least about 1, 2, 3, 4, 5, 6, 7, 8, 9, 10, 15, or 20 or more nucleotides 3′ from the last paired nucleotide in the minimum CRISPR repeat and minimum tracrRNA sequence duplex. The hairpin can start at most about 1, 2, 3, 4, 5, 6, 7, 8, 9 or 10 or more nucleotides 3′ of the last paired nucleotide in the minimum CRISPR repeat and minimum tracrRNA sequence duplex.

[0296] The hairpin can comprise at least about 1, 2, 3, 4, 5, 6, 7, 8, 9, 10, 15, or 20 or more consecutive nucleotides. The hairpin can comprise at most about 1, 2, 3, 4, 5, 6, 7, 8, 9, 10, 15, or more consecutive nucleotides.

[0297] The hairpin can comprise a CC dinucleotide (i.e., two consecutive cytosine nucleotides).

[0298] The hairpin can comprise duplexed nucleotides (e.g., nucleotides in a hairpin, hybridized together). For example, a hairpin can comprise a CC dinucleotide that is hybridized to a GG dinucleotide in a hairpin duplex of the 3′ tracrRNA sequence.

[0299] One or more of the hairpins can interact with guide RNA-interacting regions of a site-directed polypeptide.

[0300] In some examples, there are two or more hairpins, and in other examples there are three or more hairpins.

3′ tracrRNA Sequence

[0301] A 3′ tracrRNA sequence can comprise a sequence with at least about 30%, about 40%, about 50%, about 60%, about 65%, about 70%, about 75%, about 80%, about 85%, about 90%, about 95%, or 100% sequence identity to a reference tracrRNA sequence (e.g., a tracrRNA from S. pyogenes).

[0302] The 3′ tracrRNA sequence can have a length from about 6 nucleotides to about 100 nucleotides. For example, the 3′ tracrRNA sequence can have a length from about 6 nucleotides (nt) to about 50 nt, from about 6 nt to about 40 nt, from about 6 nt to about 30 nt, from about 6 nt to about 25 nt, from about 6 nt to about 20 nt, from about 6 nt to about 15 nt, from about 8 nt to about 40 nt, from about 8 nt to about 30 nt, from about 8 nt to about 25 nt, from about 8 nt to about 20 nt, from about 8 nt to about 15 nt, from about 15 nt to about 100 nt, from about 15 nt to about 80 nt, from about 15 nt to about 50 nt, from about 15 nt to about 40 nt, from about 15 nt to about 30 nt, or from about 15 nt to about 25 nt. The 3′ tracrRNA sequence can have a length of approximately 14 nucleotides.

[0303] The 3′ tracrRNA sequence can be at least about 60% identical to a reference 3′ tracrRNA sequence (e.g., wild type 3′ tracrRNA sequence from S. pyogenes) over a stretch of at least 6, 7, or 8 contiguous nucleotides. For example, the 3′ tracrRNA sequence can be at least about 60% identical, about 65% identical, about 70% identical, about 75% identical, about 80% identical, about 85% identical, about 90% identical, about 95% identical, about 98% identical, about 99% identical, or 100% identical, to a reference 3′ tracrRNA sequence (e.g., wild type 3′ tracrRNA sequence from S. pyogenes) over a stretch of at least 6, 7, or 8 contiguous nucleotides.

[0304] The 3′ tracrRNA sequence can comprise more than one duplexed region (e.g., hairpin, hybridized region). The 3′ tracrRNA sequence can comprise two duplexed regions.

[0305] The 3′ tracrRNA sequence can comprise a stem loop structure. The stem loop structure in the 3′ tracrRNA can comprise at least 1, 2, 3, 4, 5, 6, 7, 8, 9, 10, 15 or 20 or more nucleotides. The stem loop structure in the 3′ tracrRNA can comprise at most 1, 2, 3, 4, 5, 6, 7, 8, 9 or 10 or more nucleotides. The stem loop structure can comprise a functional moiety. For example, the stem loop structure can comprise an aptamer, a ribozyme, a protein-interacting hairpin, a CRISPR array, an intron, or an exon. The stem loop structure can comprise at least about 1, 2, 3, 4, or 5 or more functional moieties. The stem loop structure can comprise at most about 1, 2, 3, 4, or 5 or more functional moieties.

[0306] The hairpin in the 3′ tracrRNA sequence can comprise a P-domain. In some examples, the P-domain can comprise a double-stranded region in the hairpin.

tracrRNA Extension Sequence

[0307] A tracrRNA extension sequence may be provided whether the tracrRNA is in the context of single-molecule guides or double-molecule guides. The tracrRNA extension sequence can have a length from about 1 nucleotide to about 400 nucleotides. The tracrRNA extension sequence can have a length of more than 1, 5, 10, 15, 20, 25, 30, 35, 40, 45, 50, 60, 70, 80, 90, 100, 120, 140, 160, 180, 200, 220, 240, 260, 280, 300, 320, 340, 360, 380, or 400 nucleotides. The tracrRNA extension sequence can have a length from about 20 to about 5000 or more nucleotides. The tracrRNA extension sequence can have a length of more than 1000 nucleotides. The tracrRNA extension sequence can have a length of less than 1, 5, 10, 15, 20, 25, 30, 35, 40, 45, 50, 60, 70, 80, 90, 100, 120, 140, 160, 180, 200, 220, 240, 260, 280, 300, 320, 340, 360, 380, 400 or more nucleotides. The tracrRNA extension sequence can have a length of less than 1000 nucleotides. The tracrRNA extension sequence can comprise less than 10 nucleotides in length. The tracrRNA extension sequence can be 10-30 nucleotides in length. The tracrRNA extension sequence can be 30-70 nucleotides in length.

[0308] The tracrRNA extension sequence can comprise a functional moiety (e.g., a stability control sequence, ribozyme, endoribonuclease binding sequence). The functional moiety can comprise a transcriptional terminator segment (i.e., a transcription termination sequence). The functional moiety can have a total length from about 10 nucleotides (nt) to about 100 nucleotides, from about 10 nt to about 20 nt, from about 20 nt to about 30 nt, from about 30 nt to about 40 nt, from about 40 nt to about 50 nt, from about 50 nt to about 60 nt, from about 60 nt to about 70 nt, from about 70 nt to about 80 nt, from about 80 nt to about 90 nt, or from about 90 nt to about 100 nt, from about 15 nt to about 80 nt, from about 15 nt to about 50 nt, from about 15 nt to about 40 nt, from about 15 nt to about 30 nt, or from about 15 nt to about 25 nt. The functional moiety can function in a eukaryotic cell. The functional moiety can function in a prokaryotic cell. The functional moiety can function in both eukaryotic and prokaryotic cells.

[0309] Non-limiting examples of suitable tracrRNA extension functional moieties include a 3′ poly-adenylated tail, a riboswitch sequence (e.g., to allow for regulated stability and/or regulated accessibility by proteins and protein complexes), a sequence that forms a dsRNA duplex (i.e., a hairpin), a sequence that targets the RNA to a subcellular location (e.g., nucleus, mitochondria, chloroplasts, and the like), a modification or sequence that provides for tracking (e.g., direct conjugation to a fluorescent molecule, conjugation to a moiety that facilitates fluorescent detection, a sequence that allows for fluorescent detection, etc.), and/or a modification or sequence that provides a binding site for proteins (e.g., proteins that act on DNA, including transcriptional activators, transcriptional repressors, DNA methyltransferases, DNA demethylases, histone acetyltransferases, histone deacetylases, and the like). The tracrRNA extension sequence can comprise a primer binding site or a molecular index (e.g., barcode sequence). The tracrRNA extension sequence can comprise one or more affinity tags.

### Single-Molecule Guide Linker Sequence

[0310] The linker sequence of a single-molecule guide nucleic acid can have a length from about 3 nucleotides to about 100 nucleotides. In Jinek et al., supra, for example, a simple 4 nucleotide “tetraloop” (-GAAA-) was used, Science, 337(6096):816-821 (2012). An illustrative linker has a length from about 3 nucleotides (nt) to about 90 nt, from about 3 nt to about 80 nt, from about 3 nt to about 70 nt, from about 3 nt to about 60 nt, from about 3 nt to about 50 nt, from about 3 nt to about 40 nt, from about 3 nt to about 30 nt, from about 3 nt to about 20 nt, from about 3 nt to about 10 nt. For example, the linker can have a length from about 3 nt to about 5 nt, from about 5 nt to about 10 nt, from about 10 nt to about 15 nt, from about 15 nt to about 20 nt, from about 20 nt to about 25 nt, from about 25 nt to about 30 nt, from about 30 nt to about 35 nt, from about 35 nt to about 40 nt, from about 40 nt to about 50 nt, from about 50 nt to about 60 nt, from about 60 nt to about 70 nt, from about 70 nt to about 80 nt, from about 80 nt to about 90 nt, or from about 90 nt to about 100 nt. The linker of a single-molecule guide nucleic acid can be between 4 and 40 nucleotides. The linker can be at least about 100, 500, 1000, 1500, 2000, 2500, 3000, 3500, 4000, 4500, 5000, 5500, 6000, 6500, or 7000 or more nucleotides. The linker can be at most about 100, 500, 1000, 1500, 2000, 2500, 3000, 3500, 4000, 4500, 5000, 5500, 6000, 6500, or 7000 or more nucleotides.

[0311] Linkers can comprise any of a variety of sequences, although in some examples the linker will not comprise sequences that have extensive regions of homology with other portions of the guide RNA, which might cause intramolecular binding that could interfere with other functional regions of the guide. In Jinek et al., supra, a simple 4 nucleotide sequence -GAAA- was used, Science, 337(6096):816-821 (2012), but numerous other sequences, including longer sequences can likewise be used.

[0312] The linker sequence can comprise a functional moiety. For example, the linker sequence can comprise one or more features, including an aptamer, a ribozyme, a protein-interacting hairpin, a protein binding site, a CRISPR array, an intron, or an exon. The linker sequence can comprise at least about 1, 2, 3, 4, or 5 or more functional moieties. In some examples, the linker sequence can comprise at most about 1, 2, 3, 4, or 5 or more functional moieties.

Genome Engineering Strategies to Correct Cells by Deletion, Insertion, or Correction of One or More Mutations within or Near the HFE Gene, or by Knocking-In HFE cDNA into the Locus of the Corresponding HFE Gene or Safe Harbor Site

[0313] The methods of the present disclosure can involve correction of one or both of the mutant alleles. Gene editing to correct the mutation has the advantage of restoration of correct expression levels and temporal control. Sequencing the patient's HFE alleles allows for design of the gene editing strategy to best correct the identified mutation(s).

[0314] A step of the ex vivo methods of the present disclosure can comprise editing/correcting the patient specific iPSC cells using genome engineering. Alternatively, a step of the ex vivo methods of the present disclosure can comprise editing/correcting the liver specific progenitor cell, primary hepatocyte, or mesenchymal stem cell. Likewise, a step of the in vivo methods of the present disclosure can comprise editing/correcting the cells in a HHC patient using genome engineering. Similarly, a step in the cellular methods of the present disclosure can comprise editing/correcting the HFE gene in a human cell by genome engineering.

[0315] HHC patients exhibit one or more mutations in the HFE gene. Therefore, different patients will generally require different correction strategies. Any CRISPR endonuclease may be used in the methods of the present disclosure, each CRISPR endonuclease having its own associated PAM, which may or may not be disease specific. For example, gRNA spacer sequences for targeting the HFE gene with a CRISPR/Cas9 endonuclease from S. pyogenes have been identified in SEQ ID NOs. 1-4,455 of the Sequence Listing. gRNA spacer sequences for targeting the HFE gene with a CRISPR/Cas9 endonuclease from S. aureus have been identified in SEQ ID NOs. 4,456-4,979 of the Sequence Listing. gRNA spacer sequences for targeting the HFE gene with a CRISPR/Cas9 endonuclease from S. thermophilus have been identified in SEQ ID NOs. 4,980-5,139 of the Sequence Listing. gRNA spacer sequences for targeting the HFE gene with a CRISPR/Cas9 endonuclease from T. denticola have been identified in SEQ ID NOs. 5,140-5,192 of the Sequence Listing. gRNA spacer sequences for targeting the HFE gene with a CRISPR/Cas9 endonuclease from N. meningitides have been identified in SEQ ID NOs. 5,193-5,617 of the Sequence Listing. gRNA spacer sequences for targeting the HFE gene with a CRISPR/Cpf1 endonuclease from Acidominococcus, Lachnospiraceae, and Franciscella Novicida have been identified in SEQ ID NOs. 5,618-10,121 of the Sequence Listing.

[0316] For example, the mutation can be corrected by the insertions or deletions that arise due to the imprecise NHEJ repair pathway. If the patient's HFE gene has an inserted or deleted base, a targeted cleavage can result in a NHEJ-mediated insertion or deletion that restores the frame. Missense mutations can also be corrected through NHEJ-mediated correction using one or more guide RNA. The ability or likelihood of the cut(s) to correct the mutation can be designed or evaluated based on the local sequence and micro-homologies. NHEJ can also be used to delete segments of the gene, either directly or by altering splice donor or acceptor sites through cleavage by one gRNA targeting several locations, or several gRNAs. This may be useful if an amino acid, domain or exon contains the mutations and can be removed or inverted, or if the deletion otherwise restored function to the protein. Pairs of guide strands have been used for deletions and corrections of inversions.

[0317] Alternatively, the donor for correction by HDR contains the corrected sequence with small or large flanking homology arms to allow for annealing. HDR is essentially an error-free mechanism that uses a supplied homologous DNA sequence as a template during DSB repair. The rate of HDR is a function of the distance between the mutation and the cut site so choosing overlapping or nearest target sites is important. Templates can include extra sequences flanked by the homologous regions or can contain a sequence that differs from the genomic sequence, thus allowing sequence editing.

[0318] In addition to correcting mutations by NHEJ or HDR, a range of other options are possible. If there are small or large deletions or multiple mutations, a cDNA can be knocked in that contains the exons affected. A full length cDNA can be knocked into any “safe harbor”, but must use a supplied or other promoter. If this construct is knocked into the correct location, it will have physiological control, similar to the normal gene. Pairs of nucleases can be used to delete mutated gene regions, though a donor would usually have to be provided to restore function. In this case two gRNA would be supplied and one donor sequence.

[0319] Some genome engineering strategies involve correction of one or more mutations in or near the HFE gene, or deleting the mutant HFE DNA and/or knocking-in HFE cDNA into the locus of the corresponding gene or a safe harbor locus by HDR, which is also known as homologous recombination (HR). Homology directed repair can be one strategy for treating patients that have one or more mutations in or near the HFE gene. These strategies can restore the HFE gene and reverse, treat, and/or mitigate the diseased state. These strategies can require a more custom approach based on the location of the patient's mutation(s). Donor nucleotides for correcting mutations often are small (<300 bp). This is advantageous, as HDR efficiencies may be inversely related to the size of the donor molecule. Also, it is expected that the donor templates can fit into size constrained adeno-associated virus (AAV) molecules, which have been shown to be an effective means of donor template delivery.

[0320] Homology direct repair is a cellular mechanism for repairing double-stranded breaks (DSBs). The most common form is homologous recombination. There are additional pathways for HDR, including single-strand annealing and alternative-HDR. Genome engineering tools allow researchers to manipulate the cellular homologous recombination pathways to create site-specific modifications to the genome. It has been found that cells can repair a double-stranded break using a synthetic donor molecule provided in trans. Therefore, by introducing a double-stranded break near a specific mutation and providing a suitable donor, targeted changes can be made in the genome. Specific cleavage increases the rate of HDR more than 1,000 fold above the rate of 1 in 10⁶ cells receiving a homologous donor alone. The rate of HDR at a particular nucleotide is a function of the distance to the cut site, so choosing overlapping or nearest target sites is important. Gene editing offers the advantage over gene addition, as correcting in situ leaves the rest of the genome unperturbed.

[0321] Supplied donors for editing by HDR vary markedly but can contain the intended sequence with small or large flanking homology arms to allow annealing to the genomic DNA. The homology regions flanking the introduced genetic changes can be 30 bp or smaller, or as large as a multi-kilobase cassette that can contain promoters, cDNAs, etc. Both single-stranded and double-stranded oligonucleotide donors have been used. These oligonucleotides range in size from less than 100 nt to over many kb, though longer ssDNA can also be generated and used. Double-stranded donors can be used, including PCR amplicons, plasmids, and mini-circles. In general, it has been found that an AAV vector can be a very effective means of delivery of a donor template, though the packaging limits for individual donors is <5kb. Active transcription of the donor increased HDR three-fold, indicating the inclusion of promoter may increase conversion. Conversely, CpG methylation of the donor decreased gene expression and HDR.

[0322] In addition to wildtype endonucleases, such as Cas9, nickase variants exist that have one or the other nuclease domain inactivated resulting in cutting of only one DNA strand. HDR can be directed from individual Cas nickases or using pairs of nickases that flank the target area. Donors can be single-stranded, nicked, or dsDNA.

[0323] The donor DNA can be supplied with the nuclease or independently by a variety of different methods, for example by transfection, nano-particle, micro-injection, or viral transduction. A range of tethering options has been proposed to increase the availability of the donors for HDR. Examples include attaching the donor to the nuclease, attaching to DNA binding proteins that bind nearby, or attaching to proteins that are involved in DNA end binding or repair.

[0324] The repair pathway choice can be guided by a number of culture conditions, such as those that influence cell cycling, or by targeting of DNA repair and associated proteins. For example, to increase HDR, key NHEJ molecules can be suppressed, such as KU70, KU80 or DNA ligase IV.

[0325] Without a donor present, the ends from a DNA break or ends from different breaks can be joined using the several nonhomologous repair pathways in which the DNA ends are joined with little or no base-pairing at the junction. In addition to canonical NHEJ, there are similar repair mechanisms, such as alt-NHEJ. If there are two breaks, the intervening segment can be deleted or inverted. NHEJ repair pathways can lead to insertions, deletions or mutations at the joints.

[0326] NHEJ was used to insert a 15-kb inducible gene expression cassette into a defined locus in human cell lines after nuclease cleavage. Maresca, M., Lin, V. G., Guo, N. & Yang, Y., Genome Res 23, 539-546 (2013).

[0327] In addition to genome editing by NHEJ or HDR, site-specific gene insertions have been conducted that use both the NHEJ pathway and HR. A combination approach may be applicable in certain settings, possibly including intron/exon borders. NHEJ may prove effective for ligation in the intron, while the error-free HDR may be better suited in the coding region.

[0328] The HFE gene contains 7 exons. Any one or more of the 7 exons or nearby introns can be repaired in order to correct a mutation and restore HFE protein activity. Alternatively, there are various mutations associated with HHC, which are a combination of insertions, deletions, missense, nonsense, frameshift and other mutations, with the common effect of inactivating the HFE gene. Any one or more of the mutations can be repaired in order to restore the inactive HFE gene expression. For example, one or more of the following pathological variants may be corrected: C282Y, H63D, S65C, or combinations thereof (See Table 2). As a further alternative, HFE cDNA can be knocked-in to the locus of the corresponding gene or knocked-in to a safe harbor site, such as AAVS1. In some examples, the methods can provide one gRNA or a pair of gRNAs that can be used to facilitate incorporation of a new sequence from a polynucleotide donor template to correct one or more mutations or to knock-in a part of or the entire HFE gene or cDNA.

TABLE 2

| Variant | Location | Variant type |
|---|---|---|
| C282Y | 6: 26092913, rs1800562 | missense |
| H63D | 6: 26090951, rs1799945 | missense |
| S65C | 6: 26090957, rs1800730 | missense |

[0329] The methods can provide gRNA pairs that make a deletion by cutting the gene twice, one gRNA cutting at the 5′ end of one or more mutations and the other gRNA cutting at the 3′ end of one or more mutations that facilitates insertion of a new sequence from a polynucleotide donor template to replace the one or more mutations. The cutting can be accomplished by a pair of DNA endonucleases that each makes a DSB in the genome, or by multiple nickases that together make a DSB in the genome.

[0330] Alternatively, the methods can provide one gRNA to make one double-strand cut around one or more mutations that facilitates insertion of a new sequence from a polynucleotide donor template to replace the one or more mutations. The double-strand cut can be made by a single DNA endonuclease or multiple nickases that together make a DSB in the genome.

[0331] Illustrative modifications within the HFE gene include replacements within or near (proximal) to the mutations referred to above, such as within the region of less than 3 kb, less than 2kb, less than 1 kb, less than 0.5 kb upstream or downstream of the specific mutation. Given the relatively wide variations of mutations in the HFE gene, it will be appreciated that numerous variations of the replacements referenced above (including without limitation larger as well as smaller deletions), would be expected to result in restoration of the HFE protein activity.

[0332] Such variants can include replacements that are larger in the 5′ and/or 3′ direction than the specific mutation in question, or smaller in either direction. Accordingly, by “near” or “proximal” with respect to specific replacements, it is intended that the SSB or DSB locus associated with a desired replacement boundary (also referred to herein as an endpoint) can be within a region that is less than about 3 kb from the reference locus noted. The SSB or DSB locus can be more proximal and within 2 kb, within 1 kb, within 0.5 kb, or within 0.1 kb. In the case of small replacement, the desired endpoint can be at or “adjacent to” the reference locus, by which it is intended that the endpoint can be within 100 bp, within 50 bp, within 25 bp, or less than about 10 bp to 5 bp from the reference locus.

[0333] Examples comprising larger or smaller replacements can be expected to provide the same benefit, as long as the HFE protein activity is restored. It is thus expected that many variations of the replacements described and illustrated herein can be effective for ameliorating HHC.

[0334] Another genome engineering strategy involves exon deletion. Targeted deletion of specific exons can be an attractive strategy for treating a large subset of patients with a single therapeutic cocktail. Deletions can either be single exon deletions or multi-exon deletions. While multi-exon deletions can reach a larger number of patients, for larger deletions the efficiency of deletion greatly decreases with increased size. Therefore, deletions range can be from 40 to 10,000 base pairs (bp) in size. For example, deletions can range from 40-100; 100-300; 300-500; 500-1,000; 1,000-2,000; 2,000-3,000; 3,000-5,000; or 5,000-10,000 base pairs in size.

[0335] As stated previously, the HFE gene contains 7 exons. Any one or more of the 7 exons, or aberrant intronic splice acceptor or donor sites, may be deleted in order to restore the HFE reading frame. In some embodiments, the methods provide gRNA pairs that can be used to delete exons 1, 2, 3, 4, 5, 6, 7 or any combinations thereof.

[0336] In order to ensure that the pre-mRNA is properly processed following deletion, the surrounding splicing signals can be deleted. Splicing donor and acceptors are generally within 100 base pairs of the neighboring intron. Therefore, in some examples, methods can provide all gRNAs that cut approximately +/−100-3100 bp with respect to each exon/intron junction of interest.

[0337] For any of the genome editing strategies, gene editing can be confirmed by sequencing or PCR analysis.

### Target Sequence Selection

[0338] Shifts in the location of the 5′ boundary and/or the 3′ boundary relative to particular reference loci can be used to facilitate or enhance particular applications of gene editing, which depend in part on the endonuclease system selected for the editing, as further described and illustrated herein.

[0339] In a first nonlimiting example of such target sequence selection, many endonuclease systems have rules or criteria that can guide the initial selection of potential target sites for cleavage, such as the requirement of a PAM sequence motif in a particular position adjacent to the DNA cleavage sites in the case of CRISPR Type II or Type V endonucleases.

[0340] In another nonlimiting example of target sequence selection or optimization, the frequency of off-target activity for a particular combination of target sequence and gene editing endonuclease (i.e. the frequency of DSBs occurring at sites other than the selected target sequence) can be assessed relative to the frequency of on-target activity. In some cases, cells that have been correctly edited at the desired locus can have a selective advantage relative to other cells. Illustrative, but nonlimiting, examples of a selective advantage include the acquisition of attributes such as enhanced rates of replication, persistence, resistance to certain conditions, enhanced rates of successful engraftment or persistence in vivo following introduction into a patient, and other attributes associated with the maintenance or increased numbers or viability of such cells. In other cases, cells that have been correctly edited at the desired locus can be positively selected for by one or more screening methods used to identify, sort or otherwise select for cells that have been correctly edited. Both selective advantage and directed selection methods can take advantage of the phenotype associated with the correction. In some cases, cells can be edited two or more times in order to create a second modification that creates a new phenotype that is used to select or purify the intended population of cells. Such a second modification could be created by adding a second gRNA for a selectable or screenable marker. In some cases, cells can be correctly edited at the desired locus using a DNA fragment that contains the cDNA and also a selectable marker.

[0341] Whether any selective advantage is applicable or any directed selection is to be applied in a particular case, target sequence selection can also be guided by consideration of off-target frequencies in order to enhance the effectiveness of the application and/or reduce the potential for undesired alterations at sites other than the desired target. As described further and illustrated herein and in the art, the occurrence of off-target activity can be influenced by a number of factors including similarities and dissimilarities between the target site and various off-target sites, as well as the particular endonuclease used. Bioinformatics tools are available that assist in the prediction of off-target activity, and frequently such tools can also be used to identify the most likely sites of off-target activity, which can then be assessed in experimental settings to evaluate relative frequencies of off-target to on-target activity, thereby allowing the selection of sequences that have higher relative on-target activities. Illustrative examples of such techniques are provided herein, and others are known in the art.

[0342] Another aspect of target sequence selection relates to homologous recombination events. Sequences sharing regions of homology can serve as focal points for homologous recombination events that result in deletion of intervening sequences. Such recombination events occur during the normal course of replication of chromosomes and other DNA sequences, and also at other times when DNA sequences are being synthesized, such as in the case of repairs of double-strand breaks (DSBs), which occur on a regular basis during the normal cell replication cycle but can also be enhanced by the occurrence of various events (such as UV light and other inducers of DNA breakage) or the presence of certain agents (such as various chemical inducers). Many such inducers cause DSBs to occur indiscriminately in the genome, and DSBs can be regularly induced and repaired in normal cells. During repair, the original sequence can be reconstructed with complete fidelity, however, in some cases, small insertions or deletions (referred to as “indels”) are introduced at the DSB site.

[0343] DSBs can also be specifically induced at particular locations, as in the case of the endonucleases systems described herein, which can be used to cause directed or preferential gene modification events at selected chromosomal locations. The tendency for homologous sequences to be subject to recombination in the context of DNA repair (as well as replication) can be taken advantage of in a number of circumstances, and is the basis for one application of gene editing systems, such as CRISPR, in which homology directed repair is used to insert a sequence of interest, provided through use of a “donor” polynucleotide, into a desired chromosomal location.

[0344] Regions of homology between particular sequences, which can be small regions of “microhomology” that can comprise as few as ten basepairs or less, can also be used to bring about desired deletions. For example, a single DSB can be introduced at a site that exhibits microhomology with a nearby sequence. During the normal course of repair of such DSB, a result that occurs with high frequency is the deletion of the intervening sequence as a result of recombination being facilitated by the DSB and concomitant cellular repair process.

[0345] In some circumstances, however, selecting target sequences within regions of homology can also give rise to much larger deletions, including gene fusions (when the deletions are in coding regions), which may or may not be desired given the particular circumstances.

[0346] The examples provided herein further illustrate the selection of various target regions for the creation of DSBs designed to induce replacements that result in restoration of HFE protein activity, as well as the selection of specific target sequences within such regions that are designed to minimize off-target events relative to on-target events.

### Nucleic Acid Modifications

[0347] In some cases, polynucleotides introduced into cells can comprise one or more modifications that can be used individually or in combination, for example, to enhance activity, stability or specificity, alter delivery, reduce innate immune responses in host cells, or for other enhancements, as further described herein and known in the art.

[0348] In certain examples, modified polynucleotides can be used in the CRISPR/Cas9/Cpf1 system, in which case the guide RNAs (either single-molecule guides or double-molecule guides) and/or a DNA or an RNA encoding a Cas or Cpf1 endonuclease introduced into a cell can be modified, as described and illustrated below. Such modified polynucleotides can be used in the CRISPR/Cas9/Cpf1 system to edit any one or more genomic loci.

[0349] Using the CRISPR/Cas9/Cpf1 system for purposes of nonlimiting illustrations of such uses, modifications of guide RNAs can be used to enhance the formation or stability of the CRISPR/Cas9/Cpf1 genome editing complex comprising guide RNAs, which can be single-molecule guides or double-molecule, and a Cas or Cpf1 endonuclease. Modifications of guide RNAs can also or alternatively be used to enhance the initiation, stability or kinetics of interactions between the genome editing complex with the target sequence in the genome, which can be used, for example, to enhance on-target activity. Modifications of guide RNAs can also or alternatively be used to enhance specificity, e.g., the relative rates of genome editing at the on-target site as compared to effects at other (off-target) sites.

[0350] Modifications can also or alternatively be used to increase the stability of a guide RNA, e.g., by increasing its resistance to degradation by ribonucleases (RNases) present in a cell, thereby causing its half-life in the cell to be increased. Modifications enhancing guide RNA half-life can be particularly useful in aspects in which a Cas or Cpf1 endonuclease is introduced into the cell to be edited via an RNA that needs to be translated in order to generate endonuclease, because increasing the half-life of guide RNAs introduced at the same time as the RNA encoding the endonuclease can be used to increase the time that the guide RNAs and the encoded Cas or Cpf1 endonuclease co-exist in the cell.

[0351] Modifications can also or alternatively be used to decrease the likelihood or degree to which RNAs introduced into cells elicit innate immune responses. Such responses, which have been well characterized in the context of RNA interference (RNAi), including small-interfering RNAs (siRNAs), as described below and in the art, tend to be associated with reduced half-life of the RNA and/or the elicitation of cytokines or other factors associated with immune responses.

[0352] One or more types of modifications can also be made to RNAs encoding an endonuclease that are introduced into a cell, including, without limitation, modifications that enhance the stability of the RNA (such as by increasing its degradation by RNAses present in the cell), modifications that enhance translation of the resulting product (i.e. the endonuclease), and/or modifications that decrease the likelihood or degree to which the RNAs introduced into cells elicit innate immune responses.

[0353] Combinations of modifications, such as the foregoing and others, can likewise be used. In the case of CRISPR/Cas9/Cpf1, for example, one or more types of modifications can be made to guide RNAs (including those exemplified above), and/or one or more types of modifications can be made to RNAs encoding Cas endonuclease (including those exemplified above).

[0354] By way of illustration, guide RNAs used in the CRISPR/Cas9/Cpf1 system, or other smaller RNAs can be readily synthesized by chemical means, enabling a number of modifications to be readily incorporated, as illustrated below and described in the art. While chemical synthetic procedures are continually expanding, purifications of such RNAs by procedures such as high performance liquid chromatography (HPLC, which avoids the use of gels such as PAGE) tends to become more challenging as polynucleotide lengths increase significantly beyond a hundred or so nucleotides. One approach that can be used for generating chemically-modifed RNAs of greater length is to produce two or more molecules that are ligated together. Much longer RNAs, such as those encoding a Cas9 endonuclease, are more readily generated enzymatically. While fewer types of modifications are available for use in enzymatically produced RNAs, there are still modifications that can be used to, e.g., enhance stability, reduce the likelihood or degree of innate immune response, and/or enhance other attributes, as described further below and in the art; and new types of modifications are regularly being developed.

[0355] By way of illustration of various types of modifications, especially those used frequently with smaller chemically synthesized RNAs, modifications can comprise one or more nucleotides modified at the 2′ position of the sugar, in some aspects a 2′-O-alkyl, 2′-O-alkyl-O-alkyl, or 2′-fluoro-modified nucleotide. In some examples, RNA modifications can comprise 2′-fluoro, 2′-amino or 2′ O-methyl modifications on the ribose of pyrimidines, abasic residues, or an inverted base at the 3′ end of the RNA. Such modifications can be routinely incorporated into oligonucleotides and these oligonucleotides have been shown to have a higher Tm (i.e., higher target binding affinity) than 2′-deoxyoligonucleotides against a given target.

[0356] A number of nucleotide and nucleoside modifications have been shown to make the oligonucleotide into which they are incorporated more resistant to nuclease digestion than the native oligonucleotide; these modified oligos survive intact for a longer time than unmodified oligonucleotides. Specific examples of modified oligonucleotides include those comprising modified backbones, for example, phosphorothioates, phosphotriesters, methyl phosphonates, short chain alkyl or cycloalkyl intersugar linkages or short chain heteroatomic or heterocyclic intersugar linkages. Some oligonucleotides are oligonucleotides with phosphorothioate backbones and those with heteroatom backbones, particularly CH₂—NH—O—CH₂, CH, —N(CH₃)—O—CH₂ (known as a methylene(methylimino) or MMI backbone), CH₂—O—N (CH₃)—CH₂, CH₂—N(CH₃)—N(CH₃)—CH₂ and O—N(CH₃)— CH₂—CH₂ backbones, wherein the native phosphodiester backbone is represented as O—P—O—CH,); amide backbones [see De Mesmaeker et al., Ace. Chem. Res., 28:366-374 (1995)]; morpholino backbone structures (see Summerton and Weller, U.S. Pat. No. 5,034,506); peptide nucleic acid (PNA) backbone (wherein the phosphodiester backbone of the oligonucleotide is replaced with a polyamide backbone, the nucleotides being bound directly or indirectly to the aza nitrogen atoms of the polyamide backbone, see Nielsen et al., Science 1991, 254, 1497). Phosphorus-containing linkages include, but are not limited to, phosphorothioates, chiral phosphorothioates, phosphorodithioates, phosphotriesters, aminoalkylphosphotriesters, methyl and other alkyl phosphonates comprising 3′alkylene phosphonates and chiral phosphonates, phosphinates, phosphoramidates comprising 3′-amino phosphoramidate and aminoalkylphosphoramidates, thionophosphoramidates, thionoalkylphosphonates, thionoalkylphosphotriesters, and boranophosphates having normal 3′-5′ linkages, 2′-5′ linked analogs of these, and those having inverted polarity wherein the adjacent pairs of nucleoside units are linked 3′-5′ to 5′-3′ or 2′-5′ to 5′-2′; see U.S. Pat. Nos. 3,687,808; 4,469,863; 4,476,301; 5,023,243; 5,177,196; 5,188,897; 5,264,423; 5,276,019; 5,278,302; 5,286,717; 5,321,131; 5,399,676; 5,405,939; 5,453,496; 5,455,233; 5,466,677; 5,476,925; 5,519,126; 5,536,821; 5,541,306; 5,550,111; 5,563,253; 5,571,799; 5,587,361; and 5,625,050.

[0357] Morpholino-based oligomeric compounds are described in Braasch and David Corey, Biochemistry, 41(14): 4503-4510 (2002); Genesis, Volume 30, Issue 3, (2001); Heasman, Dev. Biol., 243: 209-214 (2002); Nasevicius et al., Nat. Genet., 26:216-220 (2000); Lacerra et al., Proc. Natl. Acad. Sci., 97: 9591-9596 (2000); and U.S. Pat. No. 5,034,506, issued Jul. 23, 1991.

[0358] Cyclohexenyl nucleic acid oligonucleotide mimetics are described in Wang et al., J. Am. Chem. Soc., 122: 8595-8602 (2000).

[0359] Modified oligonucleotide backbones that do not include a phosphorus atom therein have backbones that are formed by short chain alkyl or cycloalkyl internucleoside linkages, mixed heteroatom and alkyl or cycloalkyl internucleoside linkages, or one or more short chain heteroatomic or heterocyclic internucleoside linkages. These comprise those having morpholino linkages (formed in part from the sugar portion of a nucleoside); siloxane backbones; sulfide, sulfoxide and sulfone backbones; formacetyl and thioformacetyl backbones; methylene formacetyl and thioformacetyl backbones; alkene containing backbones; sulfamate backbones; methyleneimino and methylenehydrazino backbones; sulfonate and sulfonamide backbones; amide backbones; and others having mixed N, O, S, and CH₂ component parts; see U.S. Pat. Nos. 5,034,506; 5,166,315; 5,185,444; 5,214,134; 5,216,141; 5,235,033; 5,264,562; 5,264,564; 5,405,938; 5,434,257; 5,466,677; 5,470,967; 5,489,677; 5,541,307; 5,561,225; 5,596,086; 5,602,240; 5,610,289; 5,602,240; 5,608,046; 5,610,289; 5,618,704; 5,623,070; 5,663,312; 5,633,360; 5,677,437; and 5,677,439.

[0360] One or more substituted sugar moieties can also be included, e.g., one of the following at the 2′ position: OH, SH, SCH₃, F, OCN, OCH₃ OCH₃, OCH₃ O(CH₂)n CH₃, O(CH₂)n NH₂, or O(CH₂)n CH₃, where n is from 1 to about 10; C1 to C10 lower alkyl, alkoxyalkoxy, substituted lower alkyl, alkaryl or aralkyl; Cl; Br; CN; CF₃; OCF₃; O—, S—, or N-alkyl; O—, S—, or N-alkenyl; SOCH₃; SO₂ CH₃; ONO₂; NO₂; N₃; NH₂; heterocycloalkyl; heterocycloalkaryl; aminoalkylamino; polyalkylamino; substituted silyl; an RNA cleaving group; a reporter group; an intercalator; a group for improving the pharmacokinetic properties of an oligonucleotide; or a group for improving the pharmacodynamic properties of an oligonucleotide and other substituents having similar properties. In some aspects, a modification includes 2′-methoxyethoxy (2′-O—CH₂CH₂OCH₃, also known as 2′-O-(2-methoxyethyl)) (Martin et al, Helv. Chim. Acta, 1995, 78, 486). Other modifications include 2′-methoxy (2′-0-CH₃), 2′-propoxy (2′-OCH₂ CH₂CH₃) and 2′-fluoro (2′-F). Similar modifications can also be made at other positions on the oligonucleotide, particularly the 3′ position of the sugar on the 3′ terminal nucleotide and the 5′ position of 5′ terminal nucleotide. Oligonucleotides can also have sugar mimetics, such as cyclobutyls in place of the pentofuranosyl group.

[0361] In some examples, both a sugar and an internucleoside linkage, i.e., the backbone, of the nucleotide units can be replaced with novel groups. The base units can be maintained for hybridization with an appropriate nucleic acid target compound. One such oligomeric compound, an oligonucleotide mimetic that has been shown to have excellent hybridization properties, is referred to as a peptide nucleic acid (PNA). In PNA compounds, the sugar-backbone of an oligonucleotide can be replaced with an amide containing backbone, for example, an aminoethylglycine backbone. The nucleobases can be retained and bound directly or indirectly to aza nitrogen atoms of 15 the amide portion of the backbone. Representative United States patents that teach the preparation of PNA compounds comprise, but are not limited to, U.S. Pat. Nos. 5,539,082; 5,714,331; and 5,719,262. Further teaching of PNA compounds can be found in Nielsen et al, Science, 254: 1497-1500 (1991).

[0362] Guide RNAs can also include, additionally or alternatively, nucleobase (often referred to in the art simply as “base”) modifications or substitutions. As used herein, “unmodified” or “natural” nucleobases include adenine (A), guanine (G), thymine (T), cytosine (C), and uracil (U). Modified nucleobases include nucleobases found only infrequently or transiently in natural nucleic acids, e.g., hypoxanthine, 6-methyladenine, 5-Me pyrimidines, particularly 5-methylcytosine (also referred to as 5-methyl-2′ deoxycytosine and often referred to in the art as 5-Me-C), 5-hydroxymethylcytosine (HMC), glycosyl HMC and gentobiosyl HMC, as well as synthetic nucleobases, e.g., 2-aminoadenine, 2-(methylamino)adenine, 2-(imidazolylalkyl)adenine, 2-(aminoalklyamino)adenine or other heterosubstituted alkyladenines, 2-thiouracil, 2-thiothymine, 5-bromouracil, 5-hydroxymethyluracil, 8-azaguanine, 7-deazaguanine, N6 (6-aminohexyl)adenine, and 2,6-diaminopurine. Kornberg, A., DNA Replication, W. H. Freeman & Co., San Francisco, pp75-77 (1980); Gebeyehu et al., Nucl. Acids Res. 15:4513 (1997). A “universal” base known in the art, e.g., inosine, can also be included. 5-Me-C substitutions have been shown to increase nucleic acid duplex stability by 0.6-1.2° C. (Sanghvi, Y. S., in Crooke, S. T. and Lebleu, B., eds., Antisense Research and Applications, CRC Press, Boca Raton, 1993, pp. 276-278) and are aspects of base substitutions.

[0363] Modified nucleobases can comprise other synthetic and natural nucleobases, such as 5-methylcytosine (5-me-C), 5-hydroxymethyl cytosine, xanthine, hypoxanthine, 2-aminoadenine, 6-methyl and other alkyl derivatives of adenine and guanine, 2-propyl and other alkyl derivatives of adenine and guanine, 2-thiouracil, 2-thiothymine and 2-thiocytosine, 5-halouracil and cytosine, 5-propynyl uracil and cytosine, 6-azo uracil, cytosine and thymine, 5-uracil (pseudo-uracil), 4-thiouracil, 8-halo, 8-amino, 8-thiol, 8-thioalkyl, 8-hydroxyl and other 8-substituted adenines and guanines, 5-halo particularly 5-bromo, 5-trifluoromethyl and other 5-substituted uracils and cytosines, 7-methylquanine and 7-methyladenine, 8-azaguanine and 8-azaadenine, 7-deazaguanine and 7-deazaadenine, and 3-deazaguanine and 3-deazaadenine.

[0364] Further, nucleobases can comprise those disclosed in U.S. Pat. No. 3,687,808, those disclosed in ‘The Concise Encyclopedia of Polymer Science And Engineering’, pages 858-859, Kroschwitz, J. I., ed. John Wiley & Sons, 1990, those disclosed by Englisch et al., Angewandle Chemie, International Edition’, 1991, 30, page 613, and those disclosed by Sanghvi, Y. S., Chapter 15, Antisense Research and Applications’, pages 289-302, Crooke, S. T. and Lebleu, B. ea., CRC Press, 1993. Certain of these nucleobases are particularly useful for increasing the binding affinity of the oligomeric compounds of the invention. These include 5-substituted pyrimidines, 6-azapyrimidines and N-2, N-6 and 0-6 substituted purines, comprising 2-aminopropyladenine, 5-propynyluracil and 5-propynylcytosine. 5-methylcytosine substitutions have been shown to increase nucleic acid duplex stability by 0.6-1.2° C. (Sanghvi, Y. S., Crooke, S. T. and Lebleu, B., eds, ‘Antisense Research and Applications’, CRC Press, Boca Raton, 1993, pp. 276-278) and are aspects of base substitutions, even more particularly when combined with 2′-O-methoxyethyl sugar modifications. Modified nucleobases are described in U.S. Pat. Nos. 3,687,808, as well as U.S. Pat. Nos. 4,845,205; 5,130,302; 5,134,066; 5,175,273; 5,367,066; 5,432,272; 5,457,187; 5,459,255; 5,484,908; 5,502,177; 5,525,711; 5,552,540; 5,587,469; 5,596,091; 5,614,617; 5,681,941; 5,750,692; 5,763,588; 5,830,653; 6,005,096; and US Patent Application Publication 2003/0158403.

[0365] Thus, the term “modified” refers to a non-natural sugar, phosphate, or base that is incorporated into a guide RNA, an endonuclease, or both a guide RNA and an endonuclease. It is not necessary for all positions in a given oligonucleotide to be uniformly modified, and in fact more than one of the aforementioned modifications can be incorporated in a single oligonucleotide, or even in a single nucleoside within an oligonucleotide.

[0366] The guide RNAs and/or mRNA (or DNA) encoding an endonuclease can be chemically linked to one or more moieties or conjugates that enhance the activity, cellular distribution, or cellular uptake of the oligonucleotide. Such moieties comprise, but are not limited to, lipid moieties such as a cholesterol moiety [Letsinger et al., Proc. Natl. Acad. Sci. USA, 86: 6553-6556 (1989)]; cholic acid [Manoharan et al., Bioorg. Med. Chem. Let., 4: 1053-1060 (1994)]; a thioether, e.g., hexyl-S—tritylthiol [Manoharan et al, Ann. N. Y. Acad. Sci., 660: 306-309 (1992) and Manoharan et al., Bioorg. Med. Chem. Let., 3: 2765-2770 (1993)]; a thiocholesterol [Oberhauser et al., Nucl. Acids Res., 20: 533-538 (1992)]; an aliphatic chain, e.g., dodecandiol or undecyl residues [Kabanov et al., FEBS Lett., 259: 327-330 (1990) and Svinarchuk et al., Biochimie, 75: 49-54 (1993)]; a phospholipid, e.g., di-hexadecyl-rac-glycerol or triethylammonium 1,2-di-O-hexadecyl-rac-glycero-3-H-phosphonate [Manoharan et al., Tetrahedron Lett., 36: 3651-3654 (1995) and Shea et al., Nucl. Acids Res., 18: 3777-3783 (1990)]; a polyamine or a polyethylene glycol chain [Mancharan et al., Nucleosides & Nucleotides, 14: 969-973 (1995)]; adamantane acetic acid [Manoharan et al., Tetrahedron Lett., 36: 3651-3654 (1995)]; a palmityl moiety [(Mishra et al., Biochim. Biophys. Acta, 1264: 229-237 (1995)]; or an octadecylamine or hexylamino-carbonyl-t oxycholesterol moiety [Crooke et al., J. Pharmacol. Exp. Ther., 277: 923-937 (1996)]. See also U.S. Pat. Nos. 4,828,979; 4,948,882; 5,218,105; 5,525,465; 5,541,313; 5,545,730; 5,552,538; 5,578,717, 5,580,731; 5,580,731; 5,591,584; 5,109,124; 5,118,802; 5,138,045; 5,414,077; 5,486,603; 5,512,439; 5,578,718; 5,608,046; 4,587,044; 4,605,735; 4,667,025; 4,762,779; 4,789,737; 4,824,941; 4,835,263; 4,876,335; 4,904,582; 4,958,013; 5,082,830; 5,112,963; 5,214,136; 5,082,830; 5,112,963; 5,214,136; 5,245,022; 5,254,469; 5,258,506; 5,262,536; 5,272,250; 5,292,873; 5,317,098; 5,371,241, 5,391,723; 5,416,203, 5,451,463; 5,510,475; 5,512,667; 5,514,785; 5,565,552; 5,567,810; 5,574,142; 5,585,481; 5,587,371; 5,595,726; 5,597,696; 5,599,923; 5,599, 928 and 5,688,941.

[0367] Sugars and other moieties can be used to target proteins and complexes comprising nucleotides, such as cationic polysomes and liposomes, to particular sites. For example, hepatic cell directed transfer can be mediated via asialoglycoprotein receptors (ASGPRs); see, e.g., Hu, et al., Protein Pept Lett. 21(10):1025-30 (2014). Other systems known in the art and regularly developed can be used to target biomolecules of use in the present case and/or complexes thereof to particular target cells of interest.

[0368] These targeting moieties or conjugates can include conjugate groups covalently bound to functional groups, such as primary or secondary hydroxyl groups. Conjugate groups of the invention include intercalators, reporter molecules, polyamines, polyamides, polyethylene glycols, polyethers, groups that enhance the pharmacodynamic properties of oligomers, and groups that enhance the pharmacokinetic properties of oligomers. Typical conjugate groups include cholesterols, lipids, phospholipids, biotin, phenazine, folate, phenanthridine, anthraquinone, acridine, fluoresceins, rhodamines, coumarins, and dyes. Groups that enhance the pharmacodynamic properties, in the context of this disclosure, include groups that improve uptake, enhance resistance to degradation, and/or strengthen sequence-specific hybridization with the target nucleic acid. Groups that enhance the pharmacokinetic properties, in the context of this invention, include groups that improve uptake, distribution, metabolism or excretion of the compounds of the present invention. Representative conjugate groups are disclosed in International Patent Application No. PCT/US92/09196, filed Oct. 23, 1992, and U.S. Pat. No. 6,287,860. Conjugate moieties include, but are not limited to, lipid moieties such as a cholesterol moiety, cholic acid, a thioether, e.g., hexyl-5-tritylthiol, a thiocholesterol, an aliphatic chain, e.g., dodecandiol or undecyl residues, a phospholipid, e.g., di-hexadecyl-rac- glycerol or triethylammonium I,2-di-O-hexadecyl-rac-glycero-3-H-phosphonate, a polyamine or a polyethylene glycol chain, or adamantane acetic acid, a palmityl moiety, or an octadecylamine or hexylamino-carbonyl-oxy cholesterol moiety. See, e.g., U.S. Pat. Nos. 4,828,979; 4,948,882; 5,218,105; 5,525,465; 5,541,313; 5,545,730; 5,552,538; 5,578,717, 5,580,731; 5,580,731; 5,591,584; 5,109,124; 5,118,802; 5,138,045; 5,414,077; 5,486,603; 5,512,439; 5,578,718; 5,608,046; 4,587,044; 4,605,735; 4,667,025; 4,762,779; 4,789,737; 4,824,941; 4,835,263; 4,876,335; 4,904,582; 4,958,013; 5,082,830; 5,112,963; 5,214,136; 5,082,830; 5,112,963; 5,214,136; 5,245,022; 5,254,469; 5,258,506; 5,262,536; 5,272,250; 5,292,873; 5,317,098; 5,371,241, 5,391,723; 5,416,203, 5,451,463; 5,510,475; 5,512,667; 5,514,785; 5,565,552; 5,567,810; 5,574,142; 5,585,481; 5,587,371; 5,595,726; 5,597,696; 5,599,923; 5,599,928 and 5,688,941.

[0369] Longer polynucleotides that are less amenable to chemical synthesis and are typically produced by enzymatic synthesis can also be modified by various means. Such modifications can include, for example, the introduction of certain nucleotide analogs, the incorporation of particular sequences or other moieties at the 5′ or 3′ ends of molecules, and other modifications. By way of illustration, the mRNA encoding Cas9 is approximately 4 kb in length and can be synthesized by in vitro transcription. Modifications to the mRNA can be applied to, e.g., increase its translation or stability (such as by increasing its resistance to degradation with a cell), or to reduce the tendency of the RNA to elicit an innate immune response that is often observed in cells following introduction of exogenous RNAs, particularly longer RNAs such as that encoding Cas9.

[0370] Numerous such modifications have been described in the art, such as polyA tails, 5′ cap analogs (e.g., Anti Reverse Cap Analog (ARCA) or m7G(5′)ppp(5′)G (mCAP)), modified 5′ or 3′ untranslated regions (UTRs), use of modified bases (such as Pseudo-UTP, 2-Thio-UTP, 5-Methylcytidine-5′-Triphosphate (5-Methyl-CTP) or N6-Methyl-ATP), or treatment with phosphatase to remove 5′ terminal phosphates. These and other modifications are known in the art, and new modifications of RNAs are regularly being developed.

[0371] There are numerous commercial suppliers of modified RNAs, including for example, TriLink Biotech, AxoLabs, Bio-Synthesis Inc., Dharmacon and many others. As described by TriLink, for example, 5-Methyl-CTP can be used to impart desirable characteristics, such as increased nuclease stability, increased translation or reduced interaction of innate immune receptors with in vitro transcribed RNA. 5-Methylcytidine-5′-Triphosphate (5-Methyl-CTP), N6-Methyl-ATP, as well as Pseudo-UTP and 2-Thio-UTP, have also been shown to reduce innate immune stimulation in culture and in vivo while enhancing translation, as illustrated in publications by Kormann et al. and Warren et al. referred to below.

[0372] It has been shown that chemically modified mRNA delivered in vivo can be used to achieve improved therapeutic effects; see, e.g., Kormann et al., Nature Biotechnology 29, 154-157 (2011). Such modifications can be used, for example, to increase the stability of the RNA molecule and/or reduce its immunogenicity. Using chemical modifications such as Pseudo-U, N6-Methyl-A, 2-Thio-U and 5-Methyl-C, it was found that substituting just one quarter of the uridine and cytidine residues with 2-Thio-U and 5-Methyl-C respectively resulted in a significant decrease in toll-like receptor (TLR) mediated recognition of the mRNA in mice. By reducing the activation of the innate immune system, these modifications can be used to effectively increase the stability and longevity of the mRNA in vivo; see, e.g., Kormann et al., supra.

[0373] It has also been shown that repeated administration of synthetic messenger RNAs incorporating modifications designed to bypass innate anti-viral responses can reprogram differentiated human cells to pluripotency. See, e.g., Warren, et al., Cell Stem Cell, 7(5):618-30 (2010). Such modified mRNAs that act as primary reprogramming proteins can be an efficient means of reprogramming multiple human cell types. Such cells are referred to as induced pluripotency stem cells (iPSCs), and it was found that enzymatically synthesized RNA incorporating 5-Methyl-CTP, Pseudo-UTP and an Anti Reverse Cap Analog (ARCA) could be used to effectively evade the cell's antiviral response; see, e.g., Warren et al., supra.

[0374] Other modifications of polynucleotides described in the art include, for example, the use of polyA tails, the addition of 5′ cap analogs (such as m7G(5′)ppp(5′)G (mCAP)), modifications of 5′ or 3′ untranslated regions (UTRs), or treatment with phosphatase to remove 5′ terminal phosphates—and new approaches are regularly being developed.

[0375] A number of compositions and techniques applicable to the generation of modified RNAs for use herein have been developed in connection with the modification of RNA interference (RNAi), including small-interfering RNAs (siRNAs). siRNAs present particular challenges in vivo because their effects on gene silencing via mRNA interference are generally transient, which can require repeat administration. In addition, siRNAs are double-stranded RNAs (dsRNA) and mammalian cells have immune responses that have evolved to detect and neutralize dsRNA, which is often a by-product of viral infection. Thus, there are mammalian enzymes such as PKR (dsRNA-responsive kinase), and potentially retinoic acid-inducible gene I (RIG-1), that can mediate cellular responses to dsRNA, as well as Toll-like receptors (such as TLR3, TLR7 and TLR8) that can trigger the induction of cytokines in response to such molecules; see, e.g., the reviews by Angart et al., Pharmaceuticals (Basel) 6(4): 440-468 (2013); Kanasty et al., Molecular Therapy 20(3): 513-524 (2012); Burnett et al., Biotechnol J. 6(9):1130-46 (2011); Judge and MacLachlan, Hum Gene Ther 19(2):111-24 (2008); and references cited therein.

[0376] A large variety of modifications have been developed and applied to enhance RNA stability, reduce innate immune responses, and/or achieve other benefits that can be useful in connection with the introduction of polynucleotides into human cells, as described herein; see, e.g., the reviews by Whitehead K A et al., Annual Review of Chemical and Biomolecular Engineering, 2: 77-96 (2011); Gaglione and Messere, Mini Rev Med Chem, 10(7):578-95 (2010); Chernolovskaya et al, Curr Opin Mol Ther., 12(2):158-67 (2010); Deleavey et al., Curr Protoc Nucleic Acid Chem Chapter 16:Unit 16.3 (2009); Behlke, Oligonucleotides 18(4):305-19 (2008); Fucini et al., Nucleic Acid Ther 22(3): 205-210 (2012); Bremsen et al., Front Genet 3:154 (2012).

[0377] As noted above, there are a number of commercial suppliers of modified RNAs, many of which have specialized in modifications designed to improve the effectiveness of siRNAs. A variety of approaches are offered based on various findings reported in the literature. For example, Dharmacon notes that replacement of a non-bridging oxygen with sulfur (phosphorothioate, PS) has been extensively used to improve nuclease resistance of siRNAs, as reported by Kole, Nature Reviews Drug Discovery 11:125-140 (2012). Modifications of the 2′-position of the ribose have been reported to improve nuclease resistance of the internucleotide phosphate bond while increasing duplex stability (Tm), which has also been shown to provide protection from immune activation. A combination of moderate PS backbone modifications with small, well-tolerated 2′-substitutions (2′-O-Methyl, 2′-Fluoro, 2′-Hydro) have been associated with highly stable siRNAs for applications in vivo, as reported by Soutschek et al. Nature 432:173-178 (2004); and 2′-O-Methyl modifications have been reported to be effective in improving stability as reported by Volkov, Oligonucleotides 19:191-202 (2009). With respect to decreasing the induction of innate immune responses, modifying specific sequences with 2′-O-Methyl, 2′-Fluoro, 2′-Hydro have been reported to reduce TLR7/TLR8 interaction while generally preserving silencing activity; see, e.g., Judge et al., Mol. Ther. 13:494-505 (2006); and Cekaite et al., J. Mol. Biol. 365:90-108 (2007). Additional modifications, such as 2-thiouracil, pseudouracil, 5-methylcytosine, 5-methyluracil, and N6-methyladenosine have also been shown to minimize the immune effects mediated by TLR3, TLR7, and TLR8; see, e.g., Kariko, K. et al., Immunity 23:165-175 (2005).

[0378] As is also known in the art, and commercially available, a number of conjugates can be applied to polynucleotides, such as RNAs, for use herein that can enhance their delivery and/or uptake by cells, including for example, cholesterol, tocopherol and folic acid, lipids, peptides, polymers, linkers and aptamers; see, e.g., the review by Winkler, Ther. Deliv. 4:791-809 (2013), and references cited therein.

### Codon-Optimization

[0379] A polynucleotide encoding a site-directed polypeptide can be codon-optimized according to methods standard in the art for expression in the cell containing the target DNA of interest. For example, if the intended target nucleic acid is in a human cell, a human codon-optimized polynucleotide encoding Cas9 is contemplated for use for producing the Cas9 polypeptide.

### Complexes of a Genome-Targeting Nucleic Acid and a Site-Directed Polypeptide

[0380] A genome-targeting nucleic acid interacts with a site-directed polypeptide (e.g., a nucleic acid-guided nuclease such as Cas9), thereby forming a complex. The genome-targeting nucleic acid guides the site-directed polypeptide to a target nucleic acid.

### RNPs

[0381] The site-directed polypeptide and genome-targeting nucleic acid can each be administered separately to a cell or a patient. On the other hand, the site-directed polypeptide can be pre-complexed with one or more guide RNAs, or one or more crRNA together with a tracrRNA. The pre-complexed material can then be administered to a cell or a patient. Such pre-complexed material is known as a ribonucleoprotein particle (RNP).

### Nucleic Acids Encoding System Components

[0382] The present disclosure provides a nucleic acid comprising a nucleotide sequence encoding a genome-targeting nucleic acid of the disclosure, a site-directed polypeptide of the disclosure, and/or any nucleic acid or proteinaceous molecule necessary to carry out the aspects of the methods of the disclosure.

[0383] The nucleic acid encoding a genome-targeting nucleic acid of the disclosure, a site-directed polypeptide of the disclosure, and/or any nucleic acid or proteinaceous molecule necessary to carry out the aspects of the methods of the disclosure can comprise a vector (e.g., a recombinant expression vector).

[0384] The term “vector” refers to a nucleic acid molecule capable of transporting another nucleic acid to which it has been linked. One type of vector is a “plasmid”, which refers to a circular double-stranded DNA loop into which additional nucleic acid segments can be ligated. Another type of vector is a viral vector, wherein additional nucleic acid segments can be ligated into the viral genome. Certain vectors are capable of autonomous replication in a host cell into which they are introduced (e.g., bacterial vectors having a bacterial origin of replication and episomal mammalian vectors). Other vectors (e.g., non-episomal mammalian vectors) are integrated into the genome of a host cell upon introduction into the host cell, and thereby are replicated along with the host genome.

[0385] In some examples, vectors can be capable of directing the expression of nucleic acids to which they are operatively linked. Such vectors are referred to herein as “recombinant expression vectors”, or more simply “expression vectors”, which serve equivalent functions.

[0386] The term “operably linked” means that the nucleotide sequence of interest is linked to regulatory sequence(s) in a manner that allows for expression of the nucleotide sequence. The term “regulatory sequence” is intended to include, for example, promoters, enhancers and other expression control elements (e.g., polyadenylation signals). Such regulatory sequences are well known in the art and are described, for example, in Goeddel; Gene Expression Technology: Methods in Enzymology 185, Academic Press, San Diego, CA (1990). Regulatory sequences include those that direct constitutive expression of a nucleotide sequence in many types of host cells, and those that direct expression of the nucleotide sequence only in certain host cells (e.g., tissue-specific regulatory sequences). It will be appreciated by those skilled in the art that the design of the expression vector can depend on such factors as the choice of the target cell, the level of expression desired, and the like.

[0387] Expression vectors contemplated include, but are not limited to, viral vectors based on vaccinia virus, poliovirus, adenovirus, adeno-associated virus, SV40, herpes simplex virus, human immunodeficiency virus, retrovirus (e.g., Murine Leukemia Virus, spleen necrosis virus, and vectors derived from retroviruses such as Rous Sarcoma Virus, Harvey Sarcoma Virus, avian leukosis virus, a lentivirus, human immunodeficiency virus, myeloproliferative sarcoma virus, and mammary tumor virus) and other recombinant vectors. Other vectors contemplated for eukaryotic target cells include, but are not limited to, the vectors pXT1, pSG5, pSVK3, pBPV, pMSG, and pSVLSV40 (Pharmacia). Additional vectors contemplated for eukaryotic target cells include, but are not limited to, the vectors pCTx-1, pCTx-2, and pCTx-3. Other vectors can be used so long as they are compatible with the host cell.

[0388] In some examples, a vector can comprise one or more transcription and/or translation control elements. Depending on the host/vector system utilized, any of a number of suitable transcription and translation control elements, including constitutive and inducible promoters, transcription enhancer elements, transcription terminators, etc. can be used in the expression vector. The vector can be a self-inactivating vector that either inactivates the viral sequences or the components of the CRISPR machinery or other elements.

[0389] Non-limiting examples of suitable eukaryotic promoters (i.e., promoters functional in a eukaryotic cell) include those from cytomegalovirus (CMV) immediate early, herpes simplex virus (HSV) thymidine kinase, early and late SV40, long terminal repeats (LTRs) from retrovirus, human elongation factor-1 promoter (EF1), a hybrid construct comprising the cytomegalovirus (CMV) enhancer fused to the chicken beta-actin promoter (CAG), murine stem cell virus promoter (MSCV), phosphoglycerate kinase-1 locus promoter (PGK), and mouse metallothionein-1.

[0390] For expressing small RNAs, including guide RNAs used in connection with Cas endonuclease, various promoters such as RNA polymerase III promoters, including for example U6 and H1, can be advantageous. Descriptions of and parameters for enhancing the use of such promoters are known in art, and additional information and approaches are regularly being described; see, e.g., Ma, H. et al., Molecular Therapy—Nucleic Acids 3, e161 (2014) doi:10.1038/mtna.2014.12.

[0391] The expression vector can also contain a ribosome binding site for translation initiation and a transcription terminator. The expression vector can also comprise appropriate sequences for amplifying expression. The expression vector can also include nucleotide sequences encoding non-native tags (e.g., histidine tag, hemagglutinin tag, green fluorescent protein, etc.) that are fused to the site-directed polypeptide, thus resulting in a fusion protein.

[0392] A promoter can be an inducible promoter (e.g., a heat shock promoter, tetracycline-regulated promoter, steroid-regulated promoter, metal-regulated promoter, estrogen receptor-regulated promoter, etc.). The promoter can be a constitutive promoter (e.g., CMV promoter, UBC promoter). In some cases, the promoter can be a spatially restricted and/or temporally restricted promoter (e.g., a tissue specific promoter, a cell type specific promoter, etc.).

[0393] The nucleic acid encoding a genome-targeting nucleic acid of the disclosure and/or a site-directed polypeptide can be packaged into or on the surface of delivery vehicles for delivery to cells. Delivery vehicles contemplated include, but are not limited to, nanospheres, liposomes, quantum dots, nanoparticles, polyethylene glycol particles, hydrogels, and micelles. As described in the art, a variety of targeting moieties can be used to enhance the preferential interaction of such vehicles with desired cell types or locations.

[0394] Introduction of the complexes, polypeptides, and nucleic acids of the disclosure into cells can occur by viral or bacteriophage infection, transfection, conjugation, protoplast fusion, lipofection, electroporation, nucleofection, calcium phosphate precipitation, polyethyleneimine (PEI)-mediated transfection, DEAE-dextran mediated transfection, liposome-mediated transfection, particle gun technology, calcium phosphate precipitation, direct micro-injection, nanoparticle-mediated nucleic acid delivery, and the like.

### Delivery

[0395] Guide RNA polynucleotides (RNA or DNA) and/or endonuclease polynucleotide(s) (RNA or DNA) can be delivered by viral or non-viral delivery vehicles known in the art. Alternatively, endonuclease polypeptide(s) can be delivered by viral or non-viral delivery vehicles known in the art, such as electroporation or lipid nanoparticles. In further alternative aspects, the DNA endonuclease can be delivered as one or more polypeptides, either alone or pre-complexed with one or more guide RNAs, or one or more crRNA together with a tracrRNA.

[0396] Polynucleotides can be delivered by non-viral delivery vehicles including, but not limited to, nanoparticles, liposomes, ribonucleoproteins, positively charged peptides, small molecule RNA-conjugates, aptamer-RNA chimeras, and RNA-fusion protein complexes. Some exemplary non-viral delivery vehicles are described in Peer and Lieberman, Gene Therapy, 18: 1127-1133 (2011) (which focuses on non-viral delivery vehicles for siRNA that are also useful for delivery of other polynucleotides).

[0397] Polynucleotides, such as guide RNA, sgRNA, and mRNA encoding an endonuclease, can be delivered to a cell or a patient by a lipid nanoparticle (LNP).

[0398] A LNP refers to any particle having a diameter of less than 1000 nm, 500 nm, 250 nm, 200 nm, 150 nm, 100 nm, 75 nm, 50 nm, or 25 nm. Alternatively, a nanoparticle can range in size from 1-1000 nm, 1-500 nm, 1-250 nm, 25-200 nm, 25-100 nm, 35-75 nm, or 25-60 nm.

[0399] LNPs can be made from cationic, anionic, or neutral lipids. Neutral lipids, such as the fusogenic phospholipid DOPE or the membrane component cholesterol, can be included in LNPs as ‘helper lipids’ to enhance transfection activity and nanoparticle stability. Limitations of cationic lipids include low efficacy owing to poor stability and rapid clearance, as well as the generation of inflammatory or anti-inflammatory responses.

[0400] LNPs can also be comprised of hydrophobic lipids, hydrophilic lipids, or both hydrophobic and hydrophilic lipids.

[0401] Any lipid or combination of lipids that are known in the art can be used to produce a LNP. Examples of lipids used to produce LNPs are: DOTMA, DOSPA, DOTAP, DMRIE, DC-cholesterol, DOTAP-cholesterol, GAP-DMORIE-DPyPE, and GL67A-DOPE-DMPE-polyethylene glycol (PEG). Examples of cationic lipids are: 98N12-5, C12-200, DLin-KC2-DMA (KC2), DLin-MC3-DMA (MC3), XTC, MD1, and 7C1. Examples of neutral lipids are: DPSC, DPPC, POPC, DOPE, and SM. Examples of PEG-modified lipids are: PEG-DMG, PEG-CerC14, and PEG-CerC20.

[0402] The lipids can be combined in any number of molar ratios to produce a LNP. In addition, the polynucleotide(s) can be combined with lipid(s) in a wide range of molar ratios to produce a LNP.

[0403] As stated previously, the site-directed polypeptide and genome-targeting nucleic acid can each be administered separately to a cell or a patient. On the other hand, the site-directed polypeptide can be pre-complexed with one or more guide RNAs, or one or more crRNA together with a tracrRNA. The pre-complexed material can then be administered to a cell or a patient. Such pre-complexed material is known as a ribonucleoprotein particle (RNP).

[0404] RNA is capable of forming specific interactions with RNA or DNA. While this property is exploited in many biological processes, it also comes with the risk of promiscuous interactions in a nucleic acid-rich cellular environment. One solution to this problem is the formation of ribonucleoprotein particles (RNPs), in which the RNA is pre-complexed with an endonuclease. Another benefit of the RNP is protection of the RNA from degradation.

[0405] The endonuclease in the RNP can be modified or unmodified. Likewise, the gRNA, crRNA, tracrRNA, or sgRNA can be modified or unmodified. Numerous modifications are known in the art and can be used.

[0406] The endonuclease and sgRNA can be generally combined in a 1:1 molar ratio. Alternatively, the endonuclease, crRNA and tracrRNA can be generally combined in a 1:1:1 molar ratio. However, a wide range of molar ratios can be used to produce a RNP.

[0407] A recombinant adeno-associated virus (AAV) vector can be used for delivery. Techniques to produce rAAV particles, in which an AAV genome to be packaged that includes the polynucleotide to be delivered, rep and cap genes, and helper virus functions are provided to a cell are standard in the art. Production of rAAV typically requires that the following components are present within a single cell (denoted herein 10 as a packaging cell): a rAAV genome, AAV rep and cap genes separate from (i.e., not in) the rAAV genome, and helper virus functions. The AAV rep and cap genes may be from any AAV serotype for which recombinant virus can be derived, and may be from a different AAV serotype than the rAAV genome ITRs, including, but not limited to, AAV serotypes AAV-1, AAV-2, AAV-3, AAV-4, AAV-5, AAV-6, AAV-7, AAV-8, AAV-9, AAV-10, AAV-11, AAV-12, AAV-13 and AAV rh.74. Production of pseudotyped rAAV is disclosed in, for example, international patent application publication number WO 01/83692. See Table 3.

TABLE 3

| AAV Serotype | Genbank Accession No. |
|---|---|
| AAV-1 | NC_002077.1 |
| AAV-2 | NC_001401.2 |
| AAV-3 | NC_001729.1 |
| AAV-3B | AF028705.1 |
| AAV-4 | NC_001829.1 |
| AAV-5 | NC_006152.1 |
| AAV-6 | AF028704.1 |
| AAV-7 | NC_006260.1 |
| AAV-8 | NC_006261.1 |
| AAV-9 | AX753250.1 |
| AAV-10 | AY631965.1 |
| AAV-11 | AY631966.1 |
| AAV-12 | DQ813647.1 |
| AAV-13 | EU285562.1 |

[0408] A method of generating a packaging cell involves creating a cell line that stably expresses all of the necessary components for AAV particle production. For example, a plasmid (or multiple plasmids) comprising a rAAV genome lacking AAV rep and cap genes, AAV rep and cap genes separate from the rAAV genome, and a selectable marker, such as a neomycin resistance gene, are integrated into the genome of a cell. AAV genomes have been introduced into bacterial plasmids by procedures such as GC tailing (Samulski et al., 1982, Proc. Natl. Acad. S6. USA, 79:2077-2081), addition of synthetic linkers containing restriction endonuclease cleavage sites (Laughlin et al., 1983, Gene, 23:65-73) or by direct, blunt-end ligation (Senapathy & Carter, 1984, J. Biol. Chem., 259:4661-4666). The packaging cell line can then be infected with a helper virus, such as adenovirus. The advantages of this method are that the cells are selectable and are suitable for large-scale production of rAAV. Other examples of suitable methods employ adenovirus or baculovirus, rather than plasmids, to introduce rAAV genomes and/or rep and cap genes into packaging cells.

[0409] General principles of rAAV production are reviewed in, for example, Carter, 1992, Current Opinions in Biotechnology, 1533-539; and Muzyczka, 1992, Curr. Topics in Microbial. and Immunol., 158:97-129). Various approaches are described in Ratschin et al., Mol. Cell. Biol. 4:2072 (1984); Hermonat et al., Proc. Natl. Acad. Sci. USA, 81:6466 (1984); Tratschin et al., Mol. Cell. Biol. 5:3251 (1985); McLaughlin et al., J. Virol., 62:1963 (1988); and Lebkowski et al., 1988 Mol. Cell. Biol., 7:349 (1988). Samulski et al. (1989, J. Virol., 63:3822-3828); U.S. Pat. No. 5,173,414; WO 95/13365 and corresponding U.S. Pat. No. 5,658,776; WO 95/13392; WO 96/17947; PCT/US98/18600; WO 97/09441 (PCT/US96/14423); WO 97/08298 (PCT/US96/13872); WO 97/21825 (PCT/US96/20777); WO 97/06243 (PCT/FR96/01064); WO 99/11764; Perrin et al. (1995) Vaccine 13:1244-1250; Paul et al. (1993) Human Gene Therapy 4:609-615; Clark et al. (1996) Gene Therapy 3:1124-1132; U.S. Pat. Nos. 5,786,211; 5,871,982; and 6,258,595.

[0410] AAV vector serotypes can be matched to target cell types. For example, the following exemplary cell types can be transduced by the indicated AAV serotypes among others. See Table 4.

TABLE 4

| Tissue/Cell Type | Serotype |
|---|---|
| Liver | AAV8, AA3, AA5, AAV9 |
| Skeletal muscle | AAV1, AAV7, AAV6, AAV8, AAV9 |
| Central nervous system | AAV5, AAV1, AAV4 |
| RPE | AAV5, AAV4 |
| Photoreceptor cells | AAV5 |
| Lung | AAV9 |
| Heart | AAV8 |
| Pancreas | AAV8 |
| Kidney | AAV2, AAV8 |

[0411] In addition to adeno-associated viral vectors, other viral vectors can be used. Such viral vectors include, but are not limited to, lentivirus, alphavirus, enterovirus, pestivirus, baculovirus, herpesvirus, Epstein Barr virus, papovavirusr, poxvirus, vaccinia virus, and herpes simplex virus.

[0412] In some cases, Cas9 mRNA, sgRNA targeting one or two loci in the HFE gene, and donor DNA can each be separately formulated into lipid nanoparticles, or are all co-formulated into one lipid nanoparticle.

[0413] In some cases, Cas9 mRNA can be formulated in a lipid nanoparticle, while sgRNA and donor DNA can be delivered in an AAV vector.

[0414] Options are available to deliver the Cas9 nuclease as a DNA plasmid, as mRNA or as a protein. The guide RNA can be expressed from the same DNA, or can also be delivered as an RNA. The RNA can be chemically modified to alter or improve its half-life, or decrease the likelihood or degree of immune response. The endonuclease protein can be complexed with the gRNA prior to delivery. Viral vectors allow efficient delivery; split versions of Cas9 and smaller orthologs of Cas9 can be packaged in AAV, as can donors for HDR. A range of non-viral delivery methods also exist that can deliver each of these components, or non-viral and viral methods can be employed in tandem. For example, nano-particles can be used to deliver the protein and guide RNA, while AAV can be used to deliver a donor DNA.

### Genetically Modified Cells

[0415] The term “genetically modified cell” refers to a cell that comprises at least one genetic modification introduced by genome editing (e.g., using the CRISPR/Cas9/Cpf1 system). In some ex vivo examples herein, the genetically modified cell can be genetically modified progenitor cell. In some in vivo examples herein, the genetically modified cell can be a genetically modified liver cell. A genetically modified cell comprising an exogenous genome-targeting nucleic acid and/or an exogenous nucleic acid encoding a genome-targeting nucleic acid is contemplated herein.

[0416] The term “control treated population” describes a population of cells that has been treated with identical media, viral induction, nucleic acid sequences, temperature, confluency, flask size, pH, etc., with the exception of the addition of the genome editing components. Any method known in the art can be used to measure restoration of the HFE gene or protein expression or activity, for example Western Blot analysis of the HFE protein or quantifying HFE mRNA.

[0417] The term “isolated cell” refers to a cell that has been removed from an organism in which it was originally found, or a descendant of such a cell. Optionally, the cell can be cultured in vitro, e.g., under defined conditions or in the presence of other cells. Optionally, the cell can be later introduced into a second organism or re-introduced into the organism from which it (or the cell from which it is descended) was isolated.

[0418] The term “isolated population” with respect to an isolated population of cells refers to a population of cells that has been removed and separated from a mixed or heterogeneous population of cells. In some cases, the isolated population can be a substantially pure population of cells, as compared to the heterogeneous population from which the cells were isolated or enriched. In some cases, the isolated population can be an isolated population of human progenitor cells, e.g., a substantially pure population of human progenitor cells, as compared to a heterogeneous population of cells comprising human progenitor cells and cells from which the human progenitor cells were derived.

[0419] The term “substantially enhanced,” with respect to a particular cell population, refers to a population of cells in which the occurrence of a particular type of cell is increased relative to pre-existing or reference levels, by at least 2-fold, at least 3-, at least 4-, at least 5-, at least 6-, at least 7-, at least 8-, at least 9, at least 10-, at least 20-, at least 50-, at least 100-, at least 400-, at least 1000-, at least 5000-, at least 20000-, at least 100000- or more fold depending, e.g., on the desired levels of such cells for ameliorating hereditary haemochromatosis.

[0420] The term “substantially pure” with respect to a particular cell population, refers to a population of cells that is at least about 75%, at least about 85%, at least about 90%, or at least about 95% pure, with respect to the cells making up a total cell population. That is, the terms “substantially pure” or “essentially purified,” with regard to a population of progenitor cells, refers to a population of cells that contain fewer than about 20%, about 15%, about 10%, about 9%, about 8%, about 7%, about 6%, about 5%, about 4%, about 3%, about 2%, about 1%, or less than 1%, of cells that are not progenitor cells as defined by the terms herein.

Differentiation of Genome-Edited iPSCs into Hepatocytes

[0421] Another step of the ex vivo methods of the present disclosure can comprise differentiating the genome-edited iPSCs into hepatocytes. The differentiating step can be performed according to any method known in the art. For example, hiPSC are differentiated into definitive endoderm using various treatments, including activin and B27 supplement (Life Technology). The definitive endoderm is further differentiated into hepatocyte, the treatment includes: FGF4, HGF, BMP2, BMP4, Oncostatin M, Dexametason, etc (Duan et al, STEM CELLS; 2010; 28:674-686, Ma et al, STEM CELLS TRANSLATIONAL MEDICINE 2013; 2:409-419).

Differentiation of Genome-Edited Mesenchymal Stem Cells into Hepatocytes

[0422] Another step of the ex vivo methods of the present disclosure can comprise differentiating the genome-edited mesenchymal stem cells into hepatocytes. The differentiating step can be performed according to any method known in the art. For example, hMSC are treated with various factors and hormones, including insulin, transferrin, FGF4, HGF, bile acids (Sawitza I et al, Sci Rep. 2015; 5: 13320).

Implanting Cells into Patients

[0423] Another step of the ex vivo methods of the present disclosure can comprise implanting liver specific progenitor cells or primary hepatocytes into patients. This implanting step can be accomplished using any method of implantation known in the art. For example, the genetically modified cells can be injected directly in the patient's liver or otherwise administered to the patient. The genetically modified cells may be purified ex vivo using a selected marker.

### Pharmaceutically Acceptable Carriers

[0424] The ex vivo methods of administering progenitor cells to a subject contemplated herein can involve the use of therapeutic compositions comprising progenitor cells.

[0425] Therapeutic compositions can contain a physiologically tolerable carrier together with the cell composition, and optionally at least one additional bioactive agent as described herein, dissolved or dispersed therein as an active ingredient. In some cases, the therapeutic composition is not substantially immunogenic when administered to a mammal or human patient for therapeutic purposes, unless so desired.

[0426] In general, the progenitor cells described herein can be administered as a suspension with a pharmaceutically acceptable carrier. One of skill in the art will recognize that a pharmaceutically acceptable carrier to be used in a cell composition will not include buffers, compounds, cryopreservation agents, preservatives, or other agents in amounts that substantially interfere with the viability of the cells to be delivered to the subject. A formulation comprising cells can include e.g., osmotic buffers that permit cell membrane integrity to be maintained, and optionally, nutrients to maintain cell viability or enhance engraftment upon administration. Such formulations and suspensions are known to those of skill in the art and/or can be adapted for use with the progenitor cells, as described herein, using routine experimentation.

[0427] A cell composition can also be emulsified or presented as a liposome composition, provided that the emulsification procedure does not adversely affect cell viability. The cells and any other active ingredient can be mixed with excipients that are pharmaceutically acceptable and compatible with the active ingredient, and in amounts suitable for use in the therapeutic methods described herein.

[0428] Additional agents included in a cell composition can include pharmaceutically acceptable salts of the components therein. Pharmaceutically acceptable salts include the acid addition salts (formed with the free amino groups of the polypeptide) that are formed with inorganic acids, such as, for example, hydrochloric or phosphoric acids, or such organic acids as acetic, tartaric, mandelic and the like. Salts formed with the free carboxyl groups can also be derived from inorganic bases, such as, for example, sodium, potassium, ammonium, calcium or ferric hydroxides, and such organic bases as isopropylamine, trimethylamine, 2-ethylamino ethanol, histidine, procaine and the like.

[0429] Physiologically tolerable carriers are well known in the art. Exemplary liquid carriers are sterile aqueous solutions that contain no materials in addition to the active ingredients and water, or contain a buffer such as sodium phosphate at physiological pH value, physiological saline or both, such as phosphate-buffered saline. Still further, aqueous carriers can contain more than one buffer salt, as well as salts such as sodium and potassium chlorides, dextrose, polyethylene glycol and other solutes. Liquid compositions can also contain liquid phases in addition to and to the exclusion of water. Exemplary of such additional liquid phases are glycerin, vegetable oils such as cottonseed oil, and water-oil emulsions. The amount of an active compound used in the cell compositions that is effective in the treatment of a particular disorder or condition can depend on the nature of the disorder or condition, and can be determined by standard clinical techniques.

### Administration & Efficacy

[0430] The terms “administering,” “introducing” and “transplanting” are used interchangeably in the context of the placement of cells, e.g., progenitor cells, into a subject, by a method or route that results in at least partial localization of the introduced cells at a desired site, such as a site of injury or repair, such that a desired effect(s) is produced. The cells e.g., progenitor cells, or their differentiated progeny, can be administered by any appropriate route that results in delivery to a desired location in the subject where at least a portion of the implanted cells or components of the cells remain viable. The period of viability of the cells after administration to a subject can be as short as a few hours, e.g., twenty-four hours, to a few days, to as long as several years, or even the life time of the patient, i.e., long-term engraftment. For example, in some aspects described herein, an effective amount of myogenic progenitor cells is administered via a systemic route of administration, such as an intraperitoneal or intravenous route.

[0431] The terms “individual”, “subject,” “host” and “patient” are used interchangeably herein and refer to any subject for whom diagnosis, treatment or therapy is desired. In some aspects, the subject is a mammal. In some aspects, the subject is a human being.

[0432] When provided prophylactically, progenitor cells described herein can be administered to a subject in advance of any symptom of HHC, e.g., prior to the development of abdominal pain, weakness, lethargy, and weight loss, cirrhosis, progressive increase in skin pigmentation, diabetes mellitus, congestive heart failure, and/or arrhythmias, arthritis, and hypogonadism. Accordingly, the prophylactic administration of a liver progenitor cell population serves to prevent hereditary haemochromatosis.

[0433] When provided therapeutically, liver progenitor cells are provided at (or after) the onset of a symptom or indication of hereditary haemochromatosis, e.g., upon the onset of disease.

[0434] The liver progenitor cell population being administered according to the methods described herein can comprise allogeneic liver progenitor cells obtained from one or more donors. “Allogeneic” refers to a liver progenitor cell or biological samples comprising liver progenitor cells obtained from one or more different donors of the same species, where the genes at one or more loci are not identical. For example, a liver progenitor cell population being administered to a subject can be derived from one more unrelated donor subjects, or from one or more non-identical siblings. In some cases, syngeneic liver progenitor cell populations can be used, such as those obtained from genetically identical animals, or from identical twins. The liver progenitor cells can be autologous cells; that is, the liver progenitor cells are obtained or isolated from a subject and administered to the same subject, i.e., the donor and recipient are the same.

[0435] The term “effective amount” refers to the amount of a population of progenitor cells or their progeny needed to prevent or alleviate at least one or more signs or symptoms of HHC, and relates to a sufficient amount of a composition to provide the desired effect, e.g., to treat a subject having HHC. The term “therapeutically effective amount” therefore refers to an amount of progenitor cells or a composition comprising progenitor cells that is sufficient to promote a particular effect when administered to a typical subject, such as one who has or is at risk for HHC. An effective amount would also include an amount sufficient to prevent or delay the development of a symptom of the disease, alter the course of a symptom of the disease (for example but not limited to, slow the progression of a symptom of the disease), or reverse a symptom of the disease. It is understood that for any given case, an appropriate “effective amount” can be determined by one of ordinary skill in the art using routine experimentation.

[0436] For use in the various aspects described herein, an effective amount of progenitor cells comprises at least 10² progenitor cells, at least 5×10² progenitor cells, at least 10³ progenitor cells, at least 5×10³ progenitor cells, at least 10⁴ progenitor cells, at least 5×10⁴ progenitor cells, at least 10⁵ progenitor cells, at least 2×10⁵ progenitor cells, at least 3×10⁵ progenitor cells, at least 4×10⁵ progenitor cells, at least 5×10⁵ progenitor cells, at least 6×10⁵ progenitor cells, at least 7×10⁵ progenitor cells, at least 8×10⁵ progenitor cells, at least 9×10⁵ progenitor cells, at least 1×10⁶ progenitor cells, at least 2×10⁶ progenitor cells, at least 3×10⁶ progenitor cells, at least 4×10⁶ progenitor cells, at least 5×10⁶ progenitor cells, at least 6×10⁶ progenitor cells, at least 7×10⁶ progenitor cells, at least 8×10⁶ progenitor cells, at least 9×10⁶ progenitor cells, or multiples thereof. The progenitor cells can be derived from one or more donors, or can be obtained from an autologous source. In some examples described herein, the progenitor cells can be expanded in culture prior to administration to a subject in need thereof.

[0437] Modest and incremental increases in the levels of functional HFE expressed in cells of patients having HHC can be beneficial for ameliorating one or more symptoms of the disease, for increasing long-term survival, and/or for reducing side effects associated with other treatments. Upon administration of such cells to human patients, the presence of liver progenitors that are producing increased levels of functional HFE is beneficial. In some cases, effective treatment of a subject gives rise to at least about 3%, 5% or 7% functional HFE relative to total HFE in the treated subject. In some examples, functional HFE will be at least about 10% of total HFE. In some examples, functional HFE will be at least about 20% to 30% of total HFE. Similarly, the introduction of even relatively limited subpopulations of cells having significantly elevated levels of functional HFE can be beneficial in various patients because in some situations normalized cells will have a selective advantage relative to diseased cells. However, even modest levels of liver progenitors with elevated levels of functional HFE can be beneficial for ameliorating one or more aspects of HHC in patients. In some examples, about 10%, about 20%, about 30%, about 40%, about 50%, about 60%, about 70%, about 80%, about 90% or more of the liver progenitors in patients to whom such cells are administered are producing increased levels of functional HFE.

[0438] “Administered” refers to the delivery of a progenitor cell composition into a subject by a method or route that results in at least partial localization of the cell composition at a desired site. A cell composition can be administered by any appropriate route that results in effective treatment in the subject, i.e. administration results in delivery to a desired location in the subject where at least a portion of the composition delivered, i.e. at least 1×10⁴ cells are delivered to the desired site for a period of time. Modes of administration include injection, infusion, instillation, or ingestion. “Injection” includes, without limitation, intravenous, intramuscular, intra-arterial, intrathecal, intraventricular, intracapsular, intraorbital, intracardiac, intradermal, intraperitoneal, transtracheal, subcutaneous, subcuticular, intraarticular, sub capsular, subarachnoid, intraspinal, intracerebro spinal, and intrasternal injection and infusion. In some examples, the route is intravenous. For the delivery of cells, administration by injection or infusion can be made.

[0439] The cells can be administered systemically. The phrases “systemic administration,” “administered systemically”, “peripheral administration” and “administered peripherally” refer to the administration of a population of progenitor cells other than directly into a target site, tissue, or organ, such that it enters, instead, the subject's circulatory system and, thus, is subject to metabolism and other like processes.

[0440] The efficacy of a treatment comprising a composition for the treatment of HHC can be determined by the skilled clinician. However, a treatment is considered “effective treatment,” if any one or all of the signs or symptoms of, as but one example, levels of functional HFE are altered in a beneficial manner (e.g., increased by at least 10%), or other clinically accepted symptoms or markers of disease are improved or ameliorated. Efficacy can also be measured by failure of an individual to worsen as assessed by hospitalization or need for medical interventions (e.g., progression of the disease is halted or at least slowed). Methods of measuring these indicators are known to those of skill in the art and/or described herein. Treatment includes any treatment of a disease in an individual or an animal (some non-limiting examples include a human, or a mammal) and includes: (1) inhibiting the disease, e.g., arresting, or slowing the progression of symptoms; or (2) relieving the disease, e.g., causing regression of symptoms; and (3) preventing or reducing the likelihood of the development of symptoms.

[0441] The treatment according to the present disclosure can ameliorate one or more symptoms associated with HHC by increasing the amount of functional HFE in the individual. Early signs typically associated with HHC include for example, abdominal pain, weakness, lethargy, and weight loss, cirrhosis, progressive increase in skin pigmentation, diabetes mellitus, congestive heart failure, and/or arrhythmias, arthritis, and hypogonadism.

### Kits

[0442] The present disclosure provides kits for carrying out the methods described herein. A kit can include one or more of a genome-targeting nucleic acid, a polynucleotide encoding a genome-targeting nucleic acid, a site-directed polypeptide, a polynucleotide encoding a site-directed polypeptide, and/or any nucleic acid or proteinaceous molecule necessary to carry out the aspects of the methods described herein, or any combination thereof.

[0443] A kit can comprise: (1) a vector comprising a nucleotide sequence encoding a genome-targeting nucleic acid, (2) the site-directed polypeptide or a vector comprising a nucleotide sequence encoding the site-directed polypeptide, and (3) a reagent for reconstitution and/or dilution of the vector(s) and or polypeptide.

[0444] A kit can comprise: (1) a vector comprising (i) a nucleotide sequence encoding a genome-targeting nucleic acid, and (ii) a nucleotide sequence encoding the site-directed polypeptide; and (2) a reagent for reconstitution and/or dilution of the vector.

[0445] In any of the above kits, the kit can comprise a single-molecule guide genome-targeting nucleic acid. In any of the above kits, the kit can comprise a double-molecule genome-targeting nucleic acid. In any of the above kits, the kit can comprise two or more double-molecule guides or single-molecule guides. The kits can comprise a vector that encodes the nucleic acid targeting nucleic acid.

[0446] In any of the above kits, the kit can further comprise a polynucleotide to be inserted to effect the desired genetic modification.

[0447] Components of a kit can be in separate containers, or combined in a single container.

[0448] Any kit described above can further comprise one or more additional reagents, where such additional reagents are selected from a buffer, a buffer for introducing a polypeptide or polynucleotide into a cell, a wash buffer, a control reagent, a control vector, a control RNA polynucleotide, a reagent for in vitro production of the polypeptide from DNA, adaptors for sequencing and the like. A buffer can be a stabilization buffer, a reconstituting buffer, a diluting buffer, or the like. A kit can also comprise one or more components that can be used to facilitate or enhance the on-target binding or the cleavage of DNA by the endonuclease, or improve the specificity of targeting.

[0449] In addition to the above-mentioned components, a kit can further comprise instructions for using the components of the kit to practice the methods. The instructions for practicing the methods can be recorded on a suitable recording medium. For example, the instructions can be printed on a substrate, such as paper or plastic, etc. The instructions can be present in the kits as a package insert, in the labeling of the container of the kit or components thereof (i.e., associated with the packaging or subpackaging), etc. The instructions can be present as an electronic storage data file present on a suitable computer readable storage medium, e.g. CD-ROM, diskette, flash drive, etc. In some instances, the actual instructions are not present in the kit, but means for obtaining the instructions from a remote source (e.g. via the Internet), can be provided. An example of this case is a kit that comprises a web address where the instructions can be viewed and/or from which the instructions can be downloaded. As with the instructions, this means for obtaining the instructions can be recorded on a suitable substrate.

### Guide RNA Formulation

[0450] Guide RNAs of the present disclosure can be formulated with pharmaceutically acceptable excipients such as carriers, solvents, stabilizers, adjuvants, diluents, etc., depending upon the particular mode of administration and dosage form. Guide RNA compositions can be formulated to achieve a physiologically compatible pH, and range from a pH of about 3 to a pH of about 11, about pH 3 to about pH 7, depending on the formulation and route of administration. In some cases, the pH can be adjusted to a range from about pH 5.0 to about pH 8. In some cases, the compositions can comprise a therapeutically effective amount of at least one compound as described herein, together with one or more pharmaceutically acceptable excipients. Optionally, the compositions can comprise a combination of the compounds described herein, or can include a second active ingredient useful in the treatment or prevention of bacterial growth (for example and without limitation, anti-bacterial or anti-microbial agents), or can include a combination of reagents of the present disclosure.

[0451] Suitable excipients include, for example, carrier molecules that include large, slowly metabolized macromolecules such as proteins, polysaccharides, polylactic acids, polyglycolic acids, polymeric amino acids, amino acid copolymers, and inactive virus particles. Other exemplary excipients can include antioxidants (for example and without limitation, ascorbic acid), chelating agents (for example and without limitation, EDTA), carbohydrates (for example and without limitation, dextrin, hydroxyalkylcellulose, and hydroxyalkylmethylcellulose), stearic acid, liquids (for example and without limitation, oils, water, saline, glycerol and ethanol), wetting or emulsifying agents, pH buffering substances, and the like.

### Other Possible Therapeutic Approaches

[0452] Gene editing can be conducted using nucleases engineered to target specific sequences. To date there are four major types of nucleases: meganucleases and their derivatives, zinc finger nucleases (ZFNs), transcription activator like effector nucleases (TALENs), and CRISPR-Cas9 nuclease systems. The nuclease platforms vary in difficulty of design, targeting density and mode of action, particularly as the specificity of ZFNs and TALENs is through protein-DNA interactions, while RNA-DNA interactions primarily guide Cas9. Cas9 cleavage also requires an adjacent motif, the PAM, which differs between different CRISPR systems. Cas9 from Streptococcus pyogenes cleaves using a NGG PAM, CRISPR from Neisseria meningitidis can cleave at sites with PAMs including NNNNGATT, NNNNNGTTT and NNNNGCTT. A number of other Cas9 orthologs target protospacer adjacent to alternative PAMs.

[0453] CRISPR endonucleases, such as Cas9, can be used in the methods of the present disclosure. However, the teachings described herein, such as therapeutic target sites, could be applied to other forms of endonucleases, such as ZFNs, TALENs, HEs, or MegaTALs, or using combinations of nulceases. However, in order to apply the teachings of the present disclosure to such endonucleases, one would need to, among other things, engineer proteins directed to the specific target sites.

[0454] Additional binding domains can be fused to the Cas9 protein to increase specificity. The target sites of these constructs would map to the identified gRNA specified site, but would require additional binding motifs, such as for a zinc finger domain. In the case of Mega-TAL, a meganuclease can be fused to a TALE DNA-binding domain. The meganuclease domain can increase specificity and provide the cleavage. Similarly, inactivated or dead Cas9 (dCas9) can be fused to a cleavage domain and require the sgRNA/Cas9 target site and adjacent binding site for the fused DNA-binding domain. This likely would require some protein engineering of the dCas9, in addition to the catalytic inactivation, to decrease binding without the additional binding site.

### Zinc Finger Nucleases

[0455] Zinc finger nucleases (ZFNs) are modular proteins comprised of an engineered zinc finger DNA binding domain linked to the catalytic domain of the type II endonuclease Fokl. Because Fokl functions only as a dimer, a pair of ZFNs must be engineered to bind to cognate target “half-site” sequences on opposite DNA strands and with precise spacing between them to enable the catalytically active Fokl dimer to form. Upon dimerization of the Fokl domain, which itself has no sequence specificity per se, a DNA double-strand break is generated between the ZFN half-sites as the initiating step in genome editing.

[0456] The DNA binding domain of each ZFN is typically comprised of 3-6 zinc fingers of the abundant Cys2-His2 architecture, with each finger primarily recognizing a triplet of nucleotides on one strand of the target DNA sequence, although cross-strand interaction with a fourth nucleotide also can be important. Alteration of the amino acids of a finger in positions that make key contacts with the DNA alters the sequence specificity of a given finger. Thus, a four-finger zinc finger protein will selectively recognize a 12 bp target sequence, where the target sequence is a composite of the triplet preferences contributed by each finger, although triplet preference can be influenced to varying degrees by neighboring fingers. An important aspect of ZFNs is that they can be readily re-targeted to almost any genomic address simply by modifying individual fingers, although considerable expertise is required to do this well. In most applications of ZFNs, proteins of 4-6 fingers are used, recognizing 12-18 bp respectively. Hence, a pair of ZFNs will typically recognize a combined target sequence of 24-36 bp, not including the typical 5-7 bp spacer between half-sites. The binding sites can be separated further with larger spacers, including 15-17 bp. A target sequence of this length is likely to be unique in the human genome, assuming repetitive sequences or gene homologs are excluded during the design process. Nevertheless, the ZFN protein-DNA interactions are not absolute in their specificity so off-target binding and cleavage events do occur, either as a heterodimer between the two ZFNs, or as a homodimer of one or the other of the ZFNs. The latter possibility has been effectively eliminated by engineering the dimerization interface of the Fokl domain to create “plus” and “minus” variants, also known as obligate heterodimer variants, which can only dimerize with each other, and not with themselves. Forcing the obligate heterodimer prevents formation of the homodimer. This has greatly enhanced specificity of ZFNs, as well as any other nuclease that adopts these Fokl variants.

[0457] A variety of ZFN-based systems have been described in the art, modifications thereof are regularly reported, and numerous references describe rules and parameters that are used to guide the design of ZFNs; see, e.g., Segal et al., Proc Natl Acad Sci USA 96(6):2758-63 (1999); Dreier B et al., J Mol Biol. 303(4):489-502 (2000); Liu Q et al., J Biol Chem. 277(6):3850-6 (2002); Dreier et al., J Biol Chem 280(42):35588-97 (2005); and Dreier et al., J Biol Chem. 276(31):29466-78 (2001).

### Transcription Activator-Like Effector Nucleases (TALENs)

[0458] TALENs represent another format of modular nucleases whereby, as with ZFNs, an engineered DNA binding domain is linked to the Fokl nuclease domain, and a pair of TALENs operate in tandem to achieve targeted DNA cleavage. The major difference from ZFNs is the nature of the DNA binding domain and the associated target DNA sequence recognition properties. The TALEN DNA binding domain derives from TALE proteins, which were originally described in the plant bacterial pathogen Xanthomonas sp. TALEs are comprised of tandem arrays of 33-35 amino acid repeats, with each repeat recognizing a single basepair in the target DNA sequence that is typically up to 20 bp in length, giving a total target sequence length of up to 40 bp. Nucleotide specificity of each repeat is determined by the repeat variable diresidue (RVD), which includes just two amino acids at positions 12 and 13. The bases guanine, adenine, cytosine and thymine are predominantly recognized by the four RVDs: Asn-Asn, Asn-Ile, His-Asp and Asn-Gly, respectively. This constitutes a much simpler recognition code than for zinc fingers, and thus represents an advantage over the latter for nuclease design. Nevertheless, as with ZFNs, the protein-DNA interactions of TALENs are not absolute in their specificity, and TALENs have also benefitted from the use of obligate heterodimer variants of the Fokl domain to reduce off-target activity.

[0459] Additional variants of the Fokl domain have been created that are deactivated in their catalytic function. If one half of either a TALEN or a ZFN pair contains an inactive Fokl domain, then only single-strand DNA cleavage (nicking) will occur at the target site, rather than a DSB. The outcome is comparable to the use of CRISPR/Cas9/Cpf1 “nickase” mutants in which one of the Cas9 cleavage domains has been deactivated. DNA nicks can be used to drive genome editing by HDR, but at lower efficiency than with a DSB. The main benefit is that off-target nicks are quickly and accurately repaired, unlike the DSB, which is prone to NHEJ-mediated mis-repair.

[0460] A variety of TALEN-based systems have been described in the art, and modifications thereof are regularly reported; see, e.g., Boch, Science 326(5959):1509-12 (2009); Mak et al., Science 335(6069):716-9 (2012); and Moscou et al., Science 326(5959):1501 (2009). The use of TALENs based on the “Golden Gate” platform, or cloning scheme, has been described by multiple groups; see, e.g., Cermak et al., Nucleic Acids Res. 39(12):e82 (2011); Li et al., Nucleic Acids Res. 39(14):6315-25(2011); Weber et al., PLoS One. 6(2):e16765 (2011); Wang et al., J Genet Genomics 41(6):339-47, Epub 2014 May 17 (2014); and Cermak T et al., Methods Mol Biol. 1239:133-59 (2015).

### Homing Endonucleases

[0461] Homing endonucleases (HEs) are sequence-specific endonucleases that have long recognition sequences (14-44 base pairs) and cleave DNA with high specificity—often at sites unique in the genome. There are at least six known families of HEs as classified by their structure, including LAGLIDADG (SEQ ID NO. 64,982), GIY-YIG, His-Cis box, H—N—H, PD-(D/E)xK, and Vsr-like that are derived from a broad range of hosts, including eukarya, protists, bacteria, archaea, cyanobacteria and phage. As with ZFNs and TALENs, HEs can be used to create a DSB at a target locus as the initial step in genome editing. In addition, some natural and engineered HEs cut only a single strand of DNA, thereby functioning as site-specific nickases. The large target sequence of HEs and the specificity that they offer have made them attractive candidates to create site-specific DSBs.

[0462] A variety of HE-based systems have been described in the art, and modifications thereof are regularly reported; see, e.g., the reviews by Steentoft et al., Glycobiology 24(8):663-80 (2014); Belfort and Bonocora, Methods Mol Biol. 1123:1-26 (2014); Hafez and Hausner, Genome 55(8):553-69 (2012); and references cited therein.

### MegaTAL/Tev-mTALEN/MegaTev

[0463] As further examples of hybrid nucleases, the MegaTAL platform and Tev-mTALEN platform use a fusion of TALE DNA binding domains and catalytically active HEs, taking advantage of both the tunable DNA binding and specificity of the TALE, as well as the cleavage sequence specificity of the HE; see, e.g., Boissel et al., NAR 42: 2591-2601 (2014); Kleinstiver et al., G3 4:1155-65 (2014); and Boissel and Scharenberg, Methods Mol. Biol. 1239: 171-96 (2015).

[0464] In a further variation, the MegaTev architecture is the fusion of a meganuclease (Mega) with the nuclease domain derived from the GIY-YIG homing endonuclease I-Tevl (Tev). The two active sites are positioned ˜30 bp apart on a DNA substrate and generate two DSBs with non-compatible cohesive ends; see, e.g., Wolfs et al., NAR 42, 8816-29 (2014). It is anticipated that other combinations of existing nuclease-based approaches will evolve and be useful in achieving the targeted genome modifications described herein.

dCas9-Fokl or dCpf1-Fok1 and Other Nucleases

[0465] Combining the structural and functional properties of the nuclease platforms described above offers a further approach to genome editing that can potentially overcome some of the inherent deficiencies. As an example, the CRISPR genome editing system typically uses a single Cas9 endonuclease to create a DSB. The specificity of targeting is driven by a 20 or 24 nucleotide sequence in the guide RNA that undergoes Watson-Crick base-pairing with the target DNA (plus an additional 2 bases in the adjacent NAG or NGG PAM sequence in the case of Cas9 from S. pyogenes). Such a sequence is long enough to be unique in the human genome, however, the specificity of the RNA/DNA interaction is not absolute, with significant promiscuity sometimes tolerated, particularly in the 5′ half of the target sequence, effectively reducing the number of bases that drive specificity. One solution to this has been to completely deactivate the Cas9 or Cpf1 catalytic function—retaining only the RNA-guided DNA binding function—and instead fusing a Fokl domain to the deactivated Cas9; see, e.g., Tsai et al., Nature Biotech 32: 569-76 (2014); and Guilinger et al., Nature Biotech. 32: 577-82 (2014). Because Fokl must dimerize to become catalytically active, two guide RNAs are required to tether two Fokl fusions in close proximity to form the dimer and cleave DNA. This essentially doubles the number of bases in the combined target sites, thereby increasing the stringency of targeting by CRISPR-based systems.

[0466] As further example, fusion of the TALE DNA binding domain to a catalytically active HE, such as I-Tevl, takes advantage of both the tunable DNA binding and specificity of the TALE, as well as the cleavage sequence specificity of I-Tevl, with the expectation that off-target cleavage can be further reduced.

### Methods and Compositions of the Invention

[0467] Accordingly, the present disclosure relates in particular to the following non-limiting inventions: In a first method, Method 1, the present disclosure provides a method for editing an HFE gene in a human cell by genome editing, the method comprising: introducing into the human cell one or more deoxyribonucleic acid (DNA) endonucleases to effect one or more single-strand breaks (SSBs) or double-strand breaks (DSBs) within or near the HFE gene or other DNA sequences that encode regulatory elements of the HFE gene that results in a permanent deletion, insertion, correction, or modulation of expression or function of one or more mutations within or near or affecting the expression or function of the HFE gene and results in restoration of HFE protein activity.

[0468] In another method, Method 2, the present disclosure provides an ex vivo method for inserting a haemochromatosis (HFE) gene in a human cell by genome editing, the method comprising: introducing into the human cell one or more deoxyribonucleic acid (DNA) endonucleases to effect one or more single-strand breaks (SSBs) or double-strand breaks (DSBs) within or near a safe harbor locus that results in a permanent insertion of the HFE gene, and results in restoration of HFE protein activity.

[0469] In another method, Method 3, the present disclosure provides an ex vivo method for treating a patient with HHC, the method comprising: creating a patient specific induced pluripotent stem cell (iPSC); editing within or near an HFE gene or other DNA sequences that encode regulatory elements of the HFE gene of the iPSC, or editing within or near a safe harbor locus of the iPSC; differentiating the genome-edited iPSC into a hepatocyte; and implanting the hepatocyte into the patient.

[0470] In another method, Method 4, the present disclosure provides an ex vivo method for treating a patient with HHC as provided in Method 3 wherein the creating step comprises: isolating a somatic cell from the patient; and introducing a set of pluripotency-associated genes into the somatic cell to induce the somatic cell to become a pluripotent stem cell.

[0471] In another method, Method 5, the present disclosure provides an ex vivo method for treating a patient with HHC as provided in Method 4, wherein the somatic cell is a fibroblast.

[0472] In another method, Method 6, the present disclosure provides an ex vivo method for treating a patient with HHC as provided in Methods 4 or 5, wherein the set of pluripotency-associated genes is one or more of the genes selected from the group consisting of OCT4, SOX2, KLF4, Lin28, NANOG and cMYC.

[0473] In another method, Method 7, the present disclosure provides an ex vivo method for treating a patient with HHC as provided in any one of Methods 3-6, wherein the editing step comprises introducing into the iPSC one or more deoxyribonucleic acid (DNA) endonucleases to effect one or more single-strand breaks (SSBs) or double-strand breaks (DSBs) within or near the HFE gene or other DNA sequences that encode regulatory elements of the HFE gene that results in a permanent deletion, insertion, correction, or modulation of expression or function of one or more mutations within or near or affecting the expression or function of the HFE gene, or within or near a safe harbor locus, that results in restoration of HFE protein activity.

[0474] In another method, Method 8, the present disclosure provides an ex vivo method for treating a patient with HHC as provided in Method 7, wherein the safe harbor locus is selected from the group consisting of AAVS1 (PPP1R12C), ALB, Angptl3, ApoC3, ASGR2, CCR5, FIX (F9), G6PC, Gys2, HGD, Lp(a), Pcsk9, Serpina1, TF, and TTR.

[0475] In another method, Method 9, the present disclosure provides an ex vivo method for treating a patient with HHC as provided in any one of Methods 3-8, wherein the differentiating step comprises contacting the genome-edited iPSC with one or more of activin, B27 supplement, FGF4, HGF, BMP2, BMP4, Oncostatin M, or Dexametason.

[0476] In another method, Method 10, the present disclosure provides an ex vivo method for treating a patient with HHC as provided in any one of Methods 3-9, wherein the implanting step comprises implanting the hepatocyte into the patient by transplantation, local injection, systemic infusion, or combinations thereof.

[0477] In another method, Method 11, the present disclosure provides an ex vivo method for treating a patient with HHC, the method comprising: performing a biopsy of the patient's liver; isolating a liver specific progenitor cell or primary hepatocyte from the patient's liver; editing within or near an HFE gene or other DNA sequences that encode regulatory elements of the HFE gene of the liver specific progenitor cell or primary hepatocyte or editing within or near a safe harbor locus of the liver specific progenitor cell or primary hepatocyte; and implanting the genome-edited liver specific progenitor cell or primary hepatocyte into the patient.

[0478] In another method, Method 12, the present disclosure provides an ex vivo method for treating a patient with HHC as provided in Method 11, wherein the isolating step comprises: perfusion of fresh liver tissues with digestion enzymes, cell differencial centrifugation, cell culturing, or combinations thereof.

[0479] In another method, Method 13, the present disclosure provides an ex vivo method for treating a patient with HHC as provided in Methods 11 or 12, wherein the editing step comprises introducing into the liver specific progenitor cell or primary hepatocyte one or more deoxyribonucleic acid (DNA) endonucleases to effect one or more single-strand breaks (SSBs) or double-strand breaks (DSBs) within or near the HFE gene or other DNA sequences that encode regulatory elements of the HFE gene or within or near a safe harbor locus that results in a permanent deletion, insertion, correction, or modulation of expression or function of one or more mutations within or near or affecting the expression or function of the HFE gene, or within or near a safe harbor locus, and restoration of HFE protein activity.

[0480] In another method, Method 14, the present disclosure provides an ex vivo method for treating a patient with HHC as provided in Method 13, wherein the safe harbor locus is selected from the group consisting of AAVS1 (PPP1R12C), ALB, Angptl3, ApoC3, ASGR2, CCR5, FIX (F9), G6PC, Gys2, HGD, Lp(a), Pcsk9, Serpina1, TF, and TTR.

[0481] In another method, Method 15, the present disclosure provides an ex vivo method for treating a patient with HHC as provided in any one of Methods 11-14, wherein the implanting step comprises implanting the genome-edited liver specific progenitor cell or primary hepatocyte into the patient by transplantation, local injection, systemic infusion, or combinations thereof.

[0482] In another method, Method 16, the present disclosure provides an ex vivo method for treating a patient with HHC, the method comprising: isolating a mesenchymal stem cell from the patient; editing within or near an HFE gene or other DNA sequences that encode regulatory elements of the HFE gene of the mesenchymal stem cell, or editing within or near a safe harbor locus of the mesenchymal stem cell; differentiating the genome-edited mesenchymal stem cell into a hepatocyte; and implanting the hepatocyte into the patient.

[0483] In another method, Method 17, the present disclosure provides an ex vivo method for treating a patient with HHC as provided in Method 16, wherein the mesenchymal stem cell is isolated from the patient's bone marrow by performing a biopsy of the patient's bone marrow or the mesenchymal stem cell is isolated from peripheral blood.

[0484] In another method, Method 18, the present disclosure provides an ex vivo method for treating a patient with HHC as provided in Methods 16 or 17, wherein the isolating step comprises: aspiration of bone marrow and isolation of mesenchymal cells using density gradient centrifugation media.

[0485] In another method, Method 19, the present disclosure provides an ex vivo method for treating a patient with HHC as provided in any one of Methods 16-18, wherein the editing step comprises introducing into the mesenchymal stem cell one or more deoxyribonucleic acid (DNA) endonucleases to effect one or more single-strand breaks (SSBs) or double-strand breaks (DSBs) within or near the HFE gene or other DNA sequences that encode regulatory elements of the HFE gene that results in a permanent deletion, insertion, correction, or modulation of expression or function of one or more mutations within or near or affecting the expression or function of the HFE gene or within or near a safe harbor locus, that results in restoration of HFE protein activity.

[0486] In another method, Method 20, the present disclosure provides an ex vivo method for treating a patient with HHC as provided in Method 19, wherein the safe harbor locus is selected from the group consisting of AAVS1 (PPP1R12C), ALB, Angptl3, ApoC3, ASGR2, CCR5, FIX (F9), G6PC, Gys2, HGD, Lp(a), Pcsk9, Serpina1, TF, and TTR.

[0487] In another method, Method 21, the present disclosure provides an ex vivo method for treating a patient with HHC as provided in any one of Methods 16-20, wherein the differentiating step comprises contacting the genome-edited mesenchymal stem cell with one or more of insulin, transferrin, FGF4, HGF, or bile acids.

[0488] In another method, Method 22, the present disclosure provides an ex vivo method for treating a patient with HHC as provided in any one of Methods 16-21, wherein the implanting step comprises implanting the hepatocyte into the patient by transplantation, local injection, systemic infusion, or combinations thereof.

[0489] In another method, Method 23, the present disclosure provides an in vivo method for treating a patient with HHC, the method comprising the step of editing an HFE gene in a cell of the patient or other DNA sequences that encode regulatory elements of the HFE gene, or editing within or near a safe harbor locus in a cell of the patient.

[0490] In another method, Method 24, the present disclosure provides an in vivo method for treating a patient with HHC as provided in Method 23, wherein the editing step comprises introducing into the cell one or more deoxyribonucleic acid (DNA) endonucleases to effect one or more single-strand breaks (SSBs) or double-strand breaks (DSBs) within or near the HFE gene or other DNA sequences that encode regulatory elements of the HFE gene that results in a permanent deletion, insertion, correction, or modulation of expression or function of one or more mutations within or near or affecting the expression or function of the HFE gene or within or near a safe harbor locus that results in restoration of HFE protein activity.

[0491] In another method, Method 25, the present disclosure provides a method according to any one of Methods 1, 2, 7, 13, 19, and 24, wherein the one or more DNA endonucleases is a Cas, Cas1B, Cas2, Cas3, Cas4, Cas5, Cas6, Cas7, Cas8, Cas9 (also known as Csn1 and Csx12), Cas100, Csy1, Csy2, Csy3, Cse1, Cse2, Csc1, Csc2, Csa5, Csn2, Csm2, Csm3, Csm4, Csm5, Csm6, Cmr1, Cmr3, Cmr4, Cmr5, Cmr6, Csb1, Csb2, Csb3, Csx17, Csx14, Csx10, Csx16, CsaX, Csx3, Csx1, Csx15, Csf1, Csf2, Csf3, Csf4, or Cpf1 endonuclease; a homolog thereof, a recombination of the naturally occurring molecule thereof, codon-optimized thereof, or modified versions thereof, and combinations thereof.

[0492] In another method, Method 26, the present disclosure provides a method as provided in Method 25, wherein the method comprises introducing into the cell one or more polynucleotides encoding the one or more DNA endonucleases.

[0493] In another method, Method 27, the present disclosure provides a method as provided in Method 25, wherein the method comprises introducing into the cell one or more ribonucleic acids (RNAs) encoding the one or more DNA endonucleases.

[0494] In another method, Method 28, the present disclosure provides a method as provided in Methods 26 or 27, wherein the one or more polynucleotides or one or more RNAs is one or more modified polynucleotides or one or more modified RNAs.

[0495] In another method, Method 29, the present disclosure provides a method as provided in Method 25, wherein the DNA endonuclease is one or more proteins or polypeptides.

[0496] In another method, Method 30, the present disclosure provides a method as provided in any one of Methods 1-29, wherein the method further comprises introducing into the cell one or more guide ribonucleic acids (gRNAs).

[0497] In another method, Method 31, the present disclosure provides a method as provided in Method 30, wherein the one or more gRNAs are single-molecule guide RNA (sgRNAs).

[0498] In another method, Method 32, the present disclosure provides a method as provided in Methods 30 or 31, wherein the one or more gRNAs or one or more sgRNAs is one or more modified gRNAs or one or more modified sgRNAs.

[0499] In another method, Method 33, the present disclosure provides a method as provided in any one of Methods 29-31, wherein the one or more DNA endonucleases is pre-complexed with one or more gRNAs or one or more sgRNAs.

[0500] In another method, Method 34, the present disclosure provides a method as provided in any one of Methods 1-33, wherein the method further comprises introducing into the cell a polynucleotide donor template comprising at least a portion of the wild-type HFE gene, DNA sequences that encode wild-type regulatory elements of the HFE gene, or cDNA.

[0501] In another method, Method 35, the present disclosure provides a method as provided in Method 34, wherein the at least a portion of the wild-type HFE gene or cDNA is exon 1, exon 2, exon 3, exon 4, exon 5, exon 6, exon 7, intronic regions, fragments or combinations thereof, or the entire HFE gene or cDNA.

[0502] In another method, Method 36, the present disclosure provides a method as provided in any one of Methods 34 or 35, wherein the donor template is either single or double stranded.

[0503] In another method, Method 37, the present disclosure provides a method as provided in any one of Methods 34-36, wherein the donor template has homologous arms to the 6p21.3 region.

[0504] In another method, Method 38, the present disclosure provides a method as provided in any one of Methods 1, 2, 7, 13, 19, and 24, wherein the method further comprises introducing into the cell one guide ribonucleic acid (gRNA) and a polynucleotide donor template comprising at least a portion of the wild-type HFE gene, and wherein the one or more DNA endonucleases is one or more Cas9 or Cpf1 endonucleases that effect one single-strand break (SSB) or double-strand break (DSB) at a locus within or near the HFE gene or other DNA sequences that encode regulatory elements of the HFE gene, or within or near a safe harbor locus, that facilitates insertion of a new sequence from the polynucleotide donor template into the chromosomal DNA at the locus or safe harbor locus that results in a permanent insertion or correction of a part of the chromosomal DNA of the HFE gene or other DNA sequences that encode regulatory elements of the HFE gene proximal to the locus, or safe harbor locus, and wherein the gRNA comprises a spacer sequence that is complementary to a segment of the locus, or safe harbor locus.

[0505] In another method, Method 39, the present disclosure provides a method as provided in Method 38, wherein proximal means nucleotides both upstream and downstream of the locus or safe harbor locus.

[0506] In another method, Method 40, the present disclosure provides a method as provided in any one of Methods 1, 2, 7, 13, 19, and 24, wherein the method further comprises introducing into the cell one or more guide ribonucleic acid (gRNAs) and a polynucleotide donor template comprising at least a portion of the wild-type HFE gene, and wherein the one or more DNA endonucleases is one or more Cas9 or Cpf1 endonucleases that effect a pair of single-strand breaks (SSBs) or double-strand breaks (DSBs), the first at a 5′ locus and the second at a 3′ locus, within or near the HFE gene or other DNA sequences that encode regulatory elements of the HFE gene or within or near a safe harbor locus that facilitates insertion of a new sequence from the polynucleotide donor template into the chromosomal DNA between the 5′ locus and the 3′ locus that results in a permanent insertion or correction of the chromosomal DNA between the 5′ locus and the 3′ locus within or near the HFE gene or other DNA sequences that encode regulatory elements of the HFE gene or within or near a safe harbor locus, and wherein the first guide RNA comprises a spacer sequence that is complementary to a segment of the 5′ locus and the second guide RNA comprises a spacer sequence that is complementary to a segment of the 3′ locus.

[0507] In another method, Method 41, the present disclosure provides a method as provided in any one of Methods 38-40, wherein the one or more gRNAs are one or more single-molecule guide RNA (sgRNAs).

[0508] In another method, Method 42, the present disclosure provides a method as provided in any one of Methods 38-41, wherein the one or more gRNAs or one or more sgRNAs is one or more modified gRNAs or one or more modified sgRNAs.

[0509] In another method, Method 43, the present disclosure provides a method as provided in any one of Methods 38-42, wherein the one or more DNA endonucleases is pre-complexed with one or more gRNAs or one or more sgRNAs.

[0510] In another method, Method 44, the present disclosure provides a method as provided in any one of Methods 38-43, wherein the at least a portion of the wild-type HFE gene or cDNA is exon 1, exon 2, exon 3, exon 4, exon 5, exon 6, exon 7, intronic regions, fragments or combinations thereof, or the entire HFE gene or cDNA.

[0511] In another method, Method 45, the present disclosure provides a method as provided in any one of Methods 38-44, wherein the donor template is either a single or double stranded polynucleotide.

[0512] In another method, Method 46, the present disclosure provides a method as provided in any one of Methods 38-45, wherein the donor template has homologous arms to the 6p21.3 region.

[0513] In another method, Method 47, the present disclosure provides a method as provided in any one of Method 44, wherein the SSB or DSB are in the first, second, third, fourth, fifth, sixth, seventh exon, or combinations thereof, of the HFE gene.

[0514] In another method, Method 48, the present disclosure provides a method as provided in any one of Methods 1, 2, 7, 13, 19, 24, 30-33, or 41-43, wherein the gRNA or sgRNA is directed to one or more of the following pathological variants: C282Y, H63D, S65C, or combinations thereof.

[0515] In another method, Method 49, the present disclosure provides a method as provided in any one of Methods 1, 2, 7, 13, 19, and 24-48, wherein the insertion or correction is by HDR.

[0516] In another method, Method 50, the present disclosure provides a method as provided in any one of Methods 1, 2, 7, 13, 19, and 24, wherein the method further comprises introducing into the cell two guide ribonucleic acid (gRNAs), and wherein the one or more DNA endonucleases is one or more Cas9 or Cpf1 endonucleases that effect a pair of double-strand breaks (DSBs), the first at a 5′ DSB locus and the second at a 3′ DSB locus, within or near the HFE gene or other DNA sequences that encode regulatory elements of the HFE gene, or within or near a safe harbor locus that causes a deletion of the chromosomal DNA between the 5′ DSB locus and the 3′ DSB locus that results in a permanent deletion of the chromosomal DNA between the 5′ DSB locus and the 3′ DSB locus within or near the HFE gene or other DNA sequences that encode regulatory elements of the HFE gene or safe harbor locus, and wherein the first guide RNA comprises a spacer sequence that is complementary to a segment of the 5′ DSB locus and the second guide RNA comprises a spacer sequence that is complementary to a segment of the 3′ DSB locus.

[0517] In another method, Method 51, the present disclosure provides a method as provided in Method 50, wherein the two gRNAs are two single-molecule guide RNA (sgRNAs).

[0518] In another method, Method 52, the present disclosure provides a method as provided in Methods 50 or 51 wherein the two gRNAs or two sgRNAs are two modified gRNAs or two modified sgRNAs.

[0519] In another method, Method 53, the present disclosure provides a method as provided in any one of Methods 50-52, wherein the one or more DNA endonucleases is pre-complexed with one or two gRNAs or one or two sgRNAs.

[0520] In another method, Method 54, the present disclosure provides a method as provided in any one of Methods 50-53, wherein both the 5′ DSB and 3′ DSB are in or near either the first exon, first intron, second exon, second intron, third exon, third intron, fourth exon, fourth intron, fifth exon, fifth intron, sixth exon, sixth intron, seventh exon, seventh intron, or combinations thereof, of the HFE gene.

[0521] In another method, Method 55, the present disclosure provides a method as provided in any one of Methods 50-54, wherein the deletion is a deletion of 1 kb or less.

[0522] In another method, Method 56, the present disclosure provides a method as provided in any one of Methods 1, 2, 7, 13, 19, and 24-55 wherein the Cas9 or Cpf1 mRNA, gRNA, and donor template are either each formulated into separate lipid nanoparticles or all co-formulated into a lipid nanoparticle.

[0523] In another method, Method 57, the present disclosure provides a method as provided in any one of Methods 1, 2, 7, 13, 19, and 24-55, wherein the Cas9 or Cpf1 mRNA is formulated into a lipid nanoparticle, and both the gRNA and donor template are delivered to the cell by an adeno-associated virus (AAV) vector.

[0524] In another method, Method 58, the present disclosure provides a method as provided in any one of Methods 1, 2, 7, 13, 19, and 24-55, wherein the Cas9 or Cpf1 mRNA is formulated into a lipid nanoparticle, and the gRNA is delivered to the cell by electroporation and donor template is delivered to the cell by an adeno-associated virus (AAV) vector.

[0525] In another method, Method 59, the present disclosure provides a method as provided in any one of Methods 1-58, wherein the HFE gene is located on Chromosome 6: 26087458-26095569 (Genome Reference Consortium—GRCh38/hg38).

[0526] In another method, Method 60, the present disclosure provides a method as provided in any one of Methods 1, 2, 7, 13, 19, and 24, wherein the restoration of HFE protein activity is compared to wild-type or normal HFE protein activity.

[0527] In a first composition, Composition 1, the present disclosure provides one or more guide ribonucleic acids (gRNAs) for editing an HFE gene in a cell from a patient with HHC, the one or more gRNAs comprising a spacer sequence selected from the group consisting of nucleic acid sequences in SEQ ID NOs: 1-64,980 of the Sequence Listing.

[0528] In another composition, Composition 2, the present disclosure provides the one or more gRNAs of Composition 1, wherein the one or more gRNAs are one or more single-molecule guide RNAs (sgRNAs).

[0529] In another composition, Composition 3, the present disclosure provides the one or more gRNAs or sgRNAs of Compositions 1 or 2, wherein the one or more gRNAs or one or more sgRNAs is one or more modified gRNAs or one or more modified sgRNAs.

[0530] In another composition, Composition 4, the present disclosure provides the one or more gRNAs or sgRNAs of Compositions 1-3, wherein the cell is selected from a group consisting of a liver cell, skin cell, pancreatic cell, heart cell, joint cell, or cell from the testes.

[0531] In another method, Method 65, the present disclosure provides a method as provided in any one of Method 1, wherein the human cell is selected from a group consisting of a liver cell, skin cell, pancreatic cell, heart cell, joint cell, or cell from the testes.

[0532] In another method, Method 66, the present disclosure provides a method as provided in any one of Method 23, wherein the human cell is selected from a group consisting of a liver cell, skin cell, pancreatic cell, heart cell, joint cell, or cell from the testes.

### Definitions

[0533] The term “comprising” or “comprises” is used in reference to compositions, methods, and respective component(s) thereof, that are essential to the invention, yet open to the inclusion of unspecified elements, whether essential or not.

[0534] The term “consisting essentially of” refers to those elements required for a given aspect. The term permits the presence of additional elements that do not materially affect the basic and novel or functional characteristic(s) of that aspect of the invention.

[0535] The term “consisting of” refers to compositions, methods, and respective components thereof as described herein, which are exclusive of any element not recited in that description of the aspect.

[0536] The singular forms “a,” “an,” and “the” include plural references, unless the context clearly dictates otherwise.

[0537] Any numerical range recited in this specification describes all sub-ranges of the same numerical precision (i.e., having the same number of specified digits) subsumed within the recited range. For example, a recited range of “1.0 to 10.0” describes all sub-ranges between (and including) the recited minimum value of 1.0 and the recited maximum value of 10.0, such as, for example, “2.4 to 7.6,” even if the range of “2.4 to 7.6” is not expressly recited in the text of the specification. Accordingly, the Applicant reserves the right to amend this specification, including the claims, to expressly recite any sub-range of the same numerical precision subsumed within the ranges expressly recited in this specification. All such ranges are inherently described in this specification such that amending to expressly recite any such sub-ranges will comply with written description, sufficiency of description, and added matter requirements, including the requirements under 35 U.S.C. § 112(a) and Article 123(2) EPC. Also, unless expressly specified or otherwise required by context, all numerical parameters described in this specification (such as those expressing values, ranges, amounts, percentages, and the like) may be read as if prefaced by the word “about,” even if the word “about” does not expressly appear before a number. Additionally, numerical parameters described in this specification should be construed in light of the number of reported significant digits, numerical precision, and by applying ordinary rounding techniques. It is also understood that numerical parameters described in this specification will necessarily possess the inherent variability characteristic of the underlying measurement techniques used to determine the numerical value of the parameter.

### EXAMPLES

[0538] The invention will be more fully understood by reference to the following examples, which provide illustrative non-limiting aspects of the invention.

[0539] The examples describe the use of the CRISPR system as an illustrative genome editing technique to create defined therapeutic genomic deletions, insertions, or replacements, termed “genomic modifications” herein, in the HFE gene that lead to permanent correction of mutations in the genomic locus, or expression at a heterologous locus, that restore HFE protein activity.

[0540] Single gRNAs spanning different regions of the HFE gene were selected and tested for cutting efficiencies (Table 5).

TABLE 5

| SEQ | | gRNA Sequence without | PAM |
|---|---|---|---|
| ID NO. | gRNA Name | PAM | Sequence |
| 409 | Hfe_T5 | CGCTTGCTGCGTGAGTCCGA | GGG |
| 4117 | Hfe_T338 | AGATGCCCAGTAAAACTTCC | TGG |
| 377 | Hfe_T252 | TGAGCCTAGGCAATAGCTGT | AGG |
| 378 | Hfe_T101 | GAGCCTAGGCAATAGCTGTA | GGG |
| 4114 | Hfe_T394 | TACAGCTATTGCCTAGGCTC | AGG |
| 4112 | Hfe_T240 | TCACCCTACAGCTATTGCCT | AGG |
| 379 | Hfe_T158 | AATAGCTGTAGGGTGACTTC | TGG |
| 4106 | Hfe_T377 | TTTTGGGGGGCGGGGAAACG | GGG |
| 4102 | Hfe_T278 | CTCCGCTTCTTTTGGGGGGC | GGG |
| 4100 | Hfe_T402 | AAATCTCCGCTTCTTTTGGG | GGG |
| 4099 | Hfe_T285 | TAAATCTCCGCTTCTTTTGG | GGG |
| 4098 | Hfe_T398 | TTAAATCTCCGCTTCTTTTG | GGG |
| 386 | Hfe_T238 | AAAAGAAGCGGAGATTTAAC | GGG |
| 4097 | Hfe_T304 | GTTAAATCTCCGCTTCTTTT | GGG |
| 387 | Hfe_T88 | AAAGAAGCGGAGATTTAACG | GGG |
| 4096 | Hfe_T108 | CGTTAAATCTCCGCTTCTTT | TGG |
| 388 | Hfe_T18 | GGAGATTTAACGGGGACGTG | CGG |
| 391 | Hfe_T60 | GGGAAATGGGCCCGCGAGCC | AGG |
| 399 | Hfe_T117 | AATGGGCCCGCGAGCCAGGC | CGG |
| 4093 | Hfe_T99 | GAAGCGCCGGCCTGGCTCGC | GGG |
| 4092 | Hfe_T100 | AGAAGCGCCGGCCTGGCTCG | CGG |
| 4091 | Hfe_T239 | CAGGAGGAGAAGCGCCGGCC | TGG |
| 401 | Hfe_T118 | CCTGATGCTTTTGCAGACCG | CGG |
| 4087 | Hfe_T246 | CGGTCTGCAAAAGCATCAGG | AGG |
| 4085 | Hfe_T24 | CCGCGGTCTGCAAAAGCATC | AGG |
| 403 | Hfe_T27 | TTTGCAGACCGCGGTCCTGC | AGG |
| 404 | Hfe_T34 | TTGCAGACCGCGGTCCTGCA | GGG |
| 405 | Hfe_T146 | TGCAGACCGCGGTCCTGCAG | GGG |
| 4082 | Hfe_T152 | CAAGCGCCCCTGCAGGACCG | CGG |
| 4081 | Hfe_T78 | CACGCAGCAAGCGCCCCTGC | AGG |
| 408 | Hfe_T11 | GCGCTTGCTGCGTGAGTCCG | AGG |
| 410 | Hfe_T269 | CTGCGTGAGTCCGAGGGCTG | CGG |
| 411 | Hfe_T157 | TGCGTGAGTCCGAGGGCTGC | GGG |
| 413 | Hfe_T19 | CCGAGGGCTGCGGGCGAACT | AGG |
| 414 | Hfe_T1 | CGAGGGCTGCGGGCGAACTA | GGG |
| 415 | Hfe_T3 | GAGGGCTGCGGGCGAACTAG | GGG |
| 4077 | Hfe_T61 | CCTAGTTCGCCCGCAGCCCT | CGG |
| 416 | Hfe_T28 | CTGCGGGCGAACTAGGGGCG | CGG |
| 417 | Hfe_T68 | CGGGCGAACTAGGGGCGCGG | CGG |
| 418 | Hfe_T122 | GGGCGAACTAGGGGCGCGGC | GGG |
| 419 | Hfe_T113 | GGCGAACTAGGGGCGCGGCG | GGG |
| 420 | Hfe_T138 | GCGAACTAGGGGCGCGGCGG | GGG |
| 423 | Hfe_T274 | ACTAGCTTTTTCTTTGCGCT | TGG |
| 426 | Hfe_T208 | GCTTGGGAGTTTGCTAACTT | TGG |
| 428 | Hfe_T264 | TGGGAGTTTGCTAACTTTGG | AGG |
| 3678 | Hfe_T131 | CTCATACCATCAGCTGTGTC | TGG |
| 964 | Hfe_T132 | CTGATGGTATGAGTTGATGC | AGG |
| 969 | Hfe_T207 | CCTCCTACTACACATGGTTA | AGG |
| 3671 | Hfe_T352 | TTAACCATGTGTAGTAGGAG | GGG |
| 3670 | Hfe_T233 | CTTAACCATGTGTAGTAGGA | GGG |
| 3669 | Hfe_T171 | CCTTAACCATGTGTAGTAGG | AGG |
| 3667 | Hfe_T59 | AGGCCTTAACCATGTGTAGT | AGG |
| 3659 | Hfe_T385 | TAGTGCAGAGAGTGTGAACC | TGG |
| 972 | Hfe_T547 | CTCTCTGCACTACCTCTTCA | TGG |
| 973 | Hfe_T303 | TCTCTGCACTACCTCTTCAT | GGG |
| 3654 | Hfe_T448 | GCTCTGAGGCACCCATGAAG | AGG |
| 977 | Hfe_T458 | CTTCATGGGTGCCTCAGAGC | AGG |
| 978 | Hfe_T642 | GGTGCCTCAGAGCAGGACCT | TGG |
| 3651 | Hfe_T667 | AAGACCAAGGTCCTGCTCTG | AGG |
| 980 | Hfe_T732 | TCTTTCCTTGTTTGAAGCTT | TGG |
| 981 | Hfe_T740 | CTTTCCTTGTTTGAAGCTTT | GGG |
| 3646 | Hfe_T281 | GTAGCCCAAAGCTTCAAACA | AGG |
| 982 | Hfe_T44 | GTTTGAAGCTTTGGGCTACG | TGG |
| 3642 | Hfe_T102 | GATCATAGAACACGAACAGC | TGG |
| 986 | Hfe_T4 | TGATCATGAGAGTCGCCGTG | TGG |
| 988 | Hfe_T106 | GTGTGGAGCCCCGAACTCCA | TGG |
| 989 | Hfe_T33 | TGTGGAGCCCCGAACTCCAT | GGG |
| 3639 | Hfe_T151 | ATGGAGTTCGGGGCTCCACA | CGG |
| 3638 | Hfe_T91 | CTGGAAACCCATGGAGTTCG | GGG |
| 3637 | Hfe_T388 | ACTGGAAACCCATGGAGTTC | GGG |
| 3636 | Hfe_T234 | TACTGGAAACCCATGGAGTT | CGG |
| 3634 | Hfe_T552 | GAAATTCTACTGGAAACCCA | TGG |
| 3633 | Hfe_T372 | CATCTGGCTTGAAATTCTAC | TGG |
| 3632 | Hfe_T494 | GACTCAGCTGCAGCCACATC | TGG |
| 1000 | Hfe_T694 | CAGCTGAGTCAGAGTCTGAA | AGG |
| 1002 | Hfe_T762 | TGAGTCAGAGTCTGAAAGGG | TGG |
| 1003 | Hfe_T579 | GAGTCAGAGTCTGAAAGGGT | GGG |
| 1004 | Hfe_T558 | ACATGTTCACTGTTGACTTC | TGG |
| 1005 | Hfe_T397 | TGTTGACTTCTGGACTATTA | TGG |
| 1010 | Hfe_T608 | ACAACCACAGCAAGGGTATG | TGG |
| 1013 | Hfe_T566 | CACAGCAAGGGTATGTGGAG | AGG |
| 1014 | Hfe_T721 | ACAGCAAGGGTATGTGGAGA | GGG |
| 3624 | Hfe_T374 | CTCTCCACATACCCTTGCTG | TGG |
| 1015 | Hfe_T687 | CAGCAAGGGTATGTGGAGAG | GGG |
| 3621 | Hfe_T411 | AAGCTCTGACAACCTCAGGA | AGG |
| 3619 | Hfe_T530 | TGAAAAGCTCTGACAACCTC | AGG |
| 1028 | Hfe_T429 | GCTGGAAGTCTGAGGTCTTG | TGG |
| 1029 | Hfe_T386 | CTGGAAGTCTGAGGTCTTGT | GGG |
| 1032 | Hfe_T441 | GTCTGAGGTCTTGTGGGAGC | AGG |
| 1033 | Hfe_T636 | TCTGAGGTCTTGTGGGAGCA | GGG |
| 1041 | Hfe_T658 | ATTTGCTTCCTGAGATCATT | TGG |
| 1042 | Hfe_T359 | TCCTGAGATCATTTGGTCCT | TGG |
| 1043 | Hfe_T290 | CCTGAGATCATTTGGTCCTT | GGG |
| 1044 | Hfe_T346 | CTGAGATCATTTGGTCCTTG | GGG |
| 3610 | Hfe_T168 | CCCAAGGACCAAATGATCTC | AGG |
| 1045 | Hfe_T446 | GATCATTTGGTCCTTGGGGA | TGG |
| 1049 | Hfe_T553 | CCTTGGGGATGGTGGAAATA | GGG |
| 1050 | Hfe_T216 | GAAATAGGGACCTATTCCTT | TGG |
| 1053 | Hfe_T376 | TCCTTTGGTTGCAGTTAACA | AGG |
| 1054 | Hfe_T188 | TTGGTTGCAGTTAACAAGGC | TGG |
| 3604 | Hfe_T232 | GCCTTGTTAACTGCAACCAA | AGG |
| 1055 | Hfe_T230 | TGGTTGCAGTTAACAAGGCT | GGG |
| 1056 | Hfe_T329 | GGTTGCAGTTAACAAGGCTG | GGG |
| 3601 | Hfe_T537 | ACCTGCAGGGTGTGGGACTC | TGG |
| 1062 | Hfe_T396 | CACACCCTGCAGGTCATCCT | GGG |
| 3598 | Hfe_T450 | ACAGCCCAGGATGACCTGCA | GGG |
| 1067 | Hfe_T48 | GCAAGAAGACAACAGTACCG | AGG |
| 1068 | Hfe_T175 | CAAGAAGACAACAGTACCGA | GGG |
| 1069 | Hfe_T84 | ACAACAGTACCGAGGGCTAC | TGG |
| 1071 | Hfe_T89 | ACCGAGGGCTACTGGAAGTA | CGG |
| 1072 | Hfe_T50 | CCGAGGGCTACTGGAAGTAC | GGG |
| 3592 | Hfe_T144 | CCCGTACTTCCAGTAGCCCT | CGG |
| 1073 | Hfe_T57 | TACTGGAAGTACGGGTATGA | TGG |
| 1074 | Hfe_T23 | ACTGGAAGTACGGGTATGAT | GGG |
| 1076 | Hfe_T66 | GAAGTACGGGTATGATGGGC | AGG |
| 3588 | Hfe_T504 | GTGTGTCAGGGCAGAATTCA | AGG |
| 1077 | Hfe_T521 | TGAATTCTGCCCTGACACAC | TGG |
| 1078 | Hfe_T206 | TCTGCCCTGACACACTGGAT | TGG |
| 3585 | Hfe_T404 | CTCTCCAATCCAGTGTGTCA | GGG |
| 3584 | Hfe_T211 | GCTCTCCAATCCAGTGTGTC | AGG |
| 1084 | Hfe_T531 | ATTGGAGAGCAGCAGAACCC | AGG |
| 1088 | Hfe_T542 | CAGGGCCTGGCCCACCAAGC | TGG |
| 1090 | Hfe_T472 | CCTGGCCCACCAAGCTGGAG | TGG |
| 1091 | Hfe_T375 | CTGGCCCACCAAGCTGGAGT | GGG |
| 3577 | Hfe_T508 | CTTTCCCACTCCAGCTTGGT | GGG |
| 1096 | Hfe_T528 | GTGGGAAAGGCACAAGATTC | GGG |
| 1098 | Hfe_T179 | AAAGGCACAAGATTCGGGCC | AGG |
| 1101 | Hfe_T277 | AGATTCGGGCCAGGCAGAAC | AGG |
| 1102 | Hfe_T318 | GATTCGGGCCAGGCAGAACA | GGG |
| 1103 | Hfe_T313 | CAGGCAGAACAGGGCCTACC | TGG |
| 3573 | Hfe_T405 | CAGGTAGGCCCTGTTCTGCC | TGG |
| 3572 | Hfe_T493 | AGGGCAGTCCCTCTCCAGGT | AGG |
| 1121 | Hfe_T342 | AGAGGTGTTTTGGACCAACA | AGG |
| 1122 | Hfe_T104 | TGTTTTGGACCAACAAGGTA | TGG |
| 1123 | Hfe_T299 | TTTGGACCAACAAGGTATGG | TGG |
| 3561 | Hfe_T82 | GTGTTTCCACCATACCTTGT | TGG |
| 1125 | Hfe_T98 | CTTCTGCCCCTATACTCTAG | TGG |
| 1128 | Hfe_T355 | CCTATACTCTAGTGGCAGAG | TGG |
| 3558 | Hfe_T120 | ACTCTGCCACTAGAGTATAG | GGG |
| 3557 | Hfe_T111 | CACTCTGCCACTAGAGTATA | GGG |
| 3556 | Hfe_T205 | CCACTCTGCCACTAGAGTAT | AGG |
| 1137 | Hfe_T210 | GTTGCAGGGCACGGAATCCC | TGG |
| 1138 | Hfe_T112 | CAGGGCACGGAATCCCTGGT | TGG |
| 1142 | Hfe_T418 | ATCCCTGGTTGGAGTTTCAG | AGG |
| 3552 | Hfe_T327 | CACCTCTGAAACTCCAACCA | GGG |
| 1158 | Hfe_T294 | ATGAGACAGCCACAAGTCAT | GGG |
| 1161 | Hfe_T204 | TCTCCATGCATATGGCTCAA | AGG |
| 1162 | Hfe_T231 | CTCCATGCATATGGCTCAAA | GGG |
| 3531 | Hfe_T322 | TTCCCTTTGAGCCATATGCA | TGG |
| 1164 | Hfe_T361 | GGCTCAAAGGGAAGTGTCTA | TGG |
| 1223 | Hfe_T129 | TCAGCTATCATATGAATACC | AGG |
| 3479 | Hfe_T250 | CCTCACTTGATATTTTGTCC | TGG |
| 3478 | Hfe_T369 | GATTCTTCTACTCTGATAAG | TGG |
| 1232 | Hfe_T8 | TCAGAGTAGAAGAATCCTTT | AGG |
| 3471 | Hfe_T217 | AAGAAGCGGACTTGTAAGAT | AGG |
| 1241 | Hfe_T62 | AATGCCTCCTAGGTTGACCC | AGG |
| 3465 | Hfe_T147 | TTCACCTGGGTCAACCTAGG | AGG |
| 3463 | Hfe_T289 | AGTTTCACCTGGGTCAACCT | AGG |
| 3461 | Hfe_T421 | ACAGATGGTCAGTTTCACCT | GGG |
| 3460 | Hfe_T209 | TACAGATGGTCAGTTTCACC | TGG |
| 3450 | Hfe_T311 | GACTCTAACACAGTGTCACT | TGG |
| 1258 | Hfe_T92 | CTGTGTTAGAGTCCAATCTT | AGG |
| 3448 | Hfe_T224 | ACCATTTTGTGTCCTAAGAT | TGG |
| 1266 | Hfe_T193 | TCCTTCCTCCAACCTATAGA | AGG |
| 3438 | Hfe_T235 | CACTTCCTTCTATAGGTTGG | AGG |
| 3433 | Hfe_T243 | TTTACCCTTGCCAGGAAGAC | TGG |
| 3431 | Hfe_T83 | GGGATCTGTTTACCCTTGCC | AGG |
| 3417 | Hfe_T93 | CACCAAAGGAGGCACTTGAC | AGG |
| 1278 | Hfe_T371 | TCAAGTGCCTCCTTTGGTGA | AGG |
| 3395 | Hfe_T198 | TCGAACTCCTTGGCATCCAT | TGG |
| 3394 | Hfe_T186 | GTCTTTAGGTTCGAACTCCT | TGG |
| 1295 | Hfe_T41 | CCTAAAGACGTATTGCCCAA | TGG |
| 1296 | Hfe_T36 | CTAAAGACGTATTGCCCAAT | GGG |
| 1297 | Hfe_T133 | TAAAGACGTATTGCCCAATG | GGG |
| 3393 | Hfe_T39 | CCATTGGGCAATACGTCTTT | AGG |
| 1298 | Hfe_T87 | GACGTATTGCCCAATGGGGA | TGG |
| 1299 | Hfe_T45 | ACGTATTGCCCAATGGGGAT | GGG |
| 1301 | Hfe_T801 | CAATGGGGATGGGACCTACC | AGG |
| 1302 | Hfe_T125 | AATGGGGATGGGACCTACCA | GGG |
| 3391 | Hfe_T366 | TGGTAGGTCCCATCCCCATT | GGG |
| 3390 | Hfe_T167 | CTGGTAGGTCCCATCCCCAT | TGG |
| 1303 | Hfe_T324 | GGGATGGGACCTACCAGGGC | TGG |
| 1304 | Hfe_T134 | CTACCAGGGCTGGATAACCT | TGG |
| 3389 | Hfe_T174 | CAAGGTTATCCAGCCCTGGT | AGG |
| 3387 | Hfe_T140 | CAGCCAAGGTTATCCAGCCC | TGG |
| 1305 | Hfe_T85 | ATAACCTTGGCTGTACCCCC | TGG |
| 1306 | Hfe_T155 | TAACCTTGGCTGTACCCCCT | GGG |
| 1307 | Hfe_T242 | AACCTTGGCTGTACCCCCTG | GGG |
| 3385 | Hfe_T331 | TTCCCCAGGGGGTACAGCCA | AGG |
| 3382 | Hfe_T829 | TATCTCTGCTCTTCCCCAGG | GGG |
| 3381 | Hfe_T731 | ATATCTCTGCTCTTCCCCAG | GGG |

[0541] All tested gRNAs can be used for an HDR/correction based editing approach. Single gRNAs targeting the splice acceptors can be used to induce exon skipping to restore the reading frame of the HFE gene. Selected pairs of gRNAs can be used to make deletions in the HFE gene that restore the reading frame. Selected pairs of gRNAs can be used to make deletions that simulate patient mutations and can be used to generate model HFE mutant lines.

[0542] Various Gas orthologs were evaluated for cutting. SP, NM, ST, SA, and TD gRNAs were delivered as RNA, expressed from the U6 promoter in plasmids, or expressed from the U6 promoter in lentivirus. The corresponding Gas protein was either knocked into the cell line of interest and constitutively expressed, delivered as mRNA, or delivered as protein. The activity of the gRNAs in all the above mentioned formats were evaluated using TIDE analysis or next generation sequencing in HEK293T cells, K562 cells, or induced pluripotent stem cells (iPSCs).

[0543] Overall, it was determined that most gRNAs tested induced cutting. However, the amount of cutting was highly dependent on the Gas protein tested. It was found that, generally, SP Cas9 gRNAs induce the highest levels of cutting. Generally, it is beneficial to select gRNAs for therapeutic application that have the highest cutting efficiency possible. However, for an iPSC based therapy, the cutting efficiency is not as important. iPSCs are highly proliferative and make it simple to isolate a clonal population of cells with the desired edit, even when the editing efficiency is less than 10%.

[0544] Introduction of the defined therapeutic modifications described above represents a novel therapeutic strategy for the potential amelioration of HHC, as described and illustrated herein.

### Example 1—CRISPR/SpCas9 Target Sites for the HFE Gene

[0545] Regions of the HFE gene were scanned for target sites. Each area was scanned for a protospacer adjacent motif (PAM) having the sequence NRG. gRNA 20 bp spacer sequences corresponding to the PAM were identified, as shown in SEQ ID NOs: 1-4,455 of the Sequence Listing.

### Example 2—CRISPR/SaCas9 Target Sites for the HFE Gene

[0546] Regions of the HFE gene were scanned for target sites. Each area was scanned for a protospacer adjacent motif (PAM) having the sequence NNGRRT. gRNA 20 bp spacer sequences corresponding to the PAM were identified, as shown in SEQ ID NOs: 4,456-4,979 of the Sequence Listing.

### Example 3—CRISPR/StCas9 Target Sites for the HFE Gene

[0547] Regions of the HFE gene were scanned for target sites. Each area was scanned for a protospacer adjacent motif (PAM) having the sequence NNAGAAW. gRNA 24 bp spacer sequences corresponding to the PAM were identified, as shown in SEQ ID NOs: 4,980-5,139 of the Sequence Listing.

### Example 4—CRISPR/TdCas9 Target Sites for the HFE Gene

[0548] Regions of the HFE gene were scanned for target sites. Each area was scanned for a protospacer adjacent motif (PAM) having the sequence NAAAAC. gRNA 24 bp spacer sequences corresponding to the PAM were identified, as shown in SEQ ID NOs: 5,140-5,192 of the Sequence Listing.

### Example 5—CRISPR/NmCas9 Target Sites for the HFE Gene

[0549] Regions of the HFE gene were scanned for target sites. Each area was gRNA 24 bp spacer sequences corresponding to the PAM were identified, as shown in SEQ ID NOs: 5,193-5,617 of the Sequence Listing.

### Example 6—CRISPR/Cpf1 Target Sites for the HFE Gene

[0550] Regions of the HFE gene were scanned for target sites. Each area was scanned for a protospacer adjacent motif (PAM) having the sequence YTN. gRNA 20-24 bp spacer sequences corresponding to the PAM were identified, as shown in SEQ ID NOs: 5,618-10,121 of the Sequence Listing.

### Example 7—CRISPR/SpCas9 Target Sites for the AAVS1 (PPP1R12C) Gene

[0551] Exons 1-2 of the AAVS1 (PPP1 R12C) gene were scanned for target sites. Each area was scanned for a protospacer adjacent motif (PAM) having the sequence NRG. gRNA 20 bp spacer sequences corresponding to the PAM were identified, as shown in SEQ ID NOs: 10,122-12,153 of the Sequence Listing.

### Example 8—CRISPR/SaCas9 Target Sites for the AAVS1 (PPP1R12C) Gene

[0552] Exons 1-2 of the AAVS1 (PPP1 R12C) gene were scanned for target sites. Each area was scanned for a protospacer adjacent motif (PAM) having the sequence NNGRRT. gRNA 20 bp spacer sequences corresponding to the PAM were identified, as shown in SEQ ID NOs: 12,154-12,324 of the Sequence Listing.

### Example 9—CRISPR/StCas9 Target Sites for the AAVS1 (PPP1R12C) Gene

[0553] Exons 1-2 of the AAVS1 (PPP1 R12C) gene were scanned for target sites. Each area was scanned for a protospacer adjacent motif (PAM) having the sequence NNAGAAW. gRNA 20 bp spacer sequences corresponding to the PAM were identified, as shown in SEQ ID NOs: 12,325-12,342 of the Sequence Listing.

### Example 10—CRISPR/TdCas9 Target Sites for the AAVS1 (PPP1R12C) Gene

[0554] Exons 1-2 of the AAVS1 (PPP1 R12C) gene were scanned for target sites. Each area was scanned for a protospacer adjacent motif (PAM) having the sequence NAAAAC. gRNA 20 bp spacer sequences corresponding to the PAM were identified, as shown in SEQ ID NOs: 12,343-12,351 of the Sequence Listing.

### Example 11—CRISPR/NmCas9 Target Sites for the AAVS1 (PPP1R12C) Gene

[0555] Exons 1-2 of the AAVS1 (PPP1 R12C) gene were scanned for target sites. Each area was scanned for a protospacer adjacent motif (PAM) having the sequence NNNNGHTT. gRNA 20 bp spacer sequences corresponding to the PAM were identified, as shown in SEQ ID NOs: 12,352-12,426 of the Sequence Listing.

### Example 12—CRISPR/Cpf1 Target Sites for the AAVS1 (PPP1R12C) Gene

[0556] Exons 1-2 of the AAVS1 (PPP1 R12C) gene were scanned for target sites. Each area was scanned for a protospacer adjacent motif (PAM) having the sequence YTN. gRNA 22 bp spacer sequences corresponding to the PAM were identified, as shown in SEQ ID NOs: 12,427-13,602 of the Sequence Listing.

### Example 13—CRISPR/SpCas9 Target Sites for the ALB Gene

[0557] Exons 1-2 of the ALB gene were scanned for target sites. Each area was scanned for a protospacer adjacent motif (PAM) having the sequence NRG. gRNA 20 bp spacer sequences corresponding to the PAM were identified, as shown in SEQ ID NOs: 13,603-13,770 of the Sequence Listing.

### Example 14—CRISPR/SaCas9 Target Sites for the ALB Gene

[0558] Exons 1-2 of the ALB gene were scanned for target sites. Each area was scanned for a protospacer adjacent motif (PAM) having the sequence NNGRRT. gRNA 20 bp spacer sequences corresponding to the PAM were identified, as shown in SEQ ID NOs: 13,771-13,798 of the Sequence Listing.

### Example 15—CRISPR/StCas9 Target Sites for the ALB Gene

[0559] Exons 1-2 of the ALB gene were scanned for target sites. Each area was scanned for a protospacer adjacent motif (PAM) having the sequence NNAGAAW. gRNA 20 bp spacer sequences corresponding to the PAM were identified, as shown in SEQ ID NOs: 13,799-13,816 of the Sequence Listing.

### Example 16—CRISPR/TdCas9 Target Sites for the ALB Gene

[0560] Exons 1-2 of the ALB gene were scanned for target sites. Each area was scanned for a protospacer adjacent motif (PAM) having the sequence NAAAAC. gRNA 20 bp spacer sequences corresponding to the PAM were identified, as shown in SEQ ID NOs: 13,817-13,821 of the Sequence Listing.

### Example 17—CRISPR/NmCas9 Target Sites for the ALB Gene

[0561] Exons 1-2 of the ALB gene were scanned for target sites. Each area was SEQ ID NOs: 13,822-13,845 of the Sequence Listing.

### Example 18—CRISPR/Cpf1 Target Sites for the ALB Gene

[0562] Exons 1-2 of the ALB gene were scanned for target sites. Each area was scanned for a protospacer adjacent motif (PAM) having the sequence YTN. gRNA 22 bp spacer sequences corresponding to the PAM were identified, as shown in SEQ ID NOs: 13,846-14,224 of the Sequence Listing.

### Example 19—CRISPR/SpCas9 Target Sites for the Angptl3 Gene

[0563] Exons 1-2 of the Angptl3 gene were scanned for target sites. Each area was scanned for a protospacer adjacent motif (PAM) having the sequence NRG. gRNA 20 bp spacer sequences corresponding to the PAM were identified, as shown in SEQ ID NOs: 14,225-14,569 of the Sequence Listing.

### Example 20—CRISPR/SaCas9 Target Sites for the Angptl3 Gene

[0564] Exons 1-2 of the Angptl3 gene were scanned for target sites. Each area was scanned for a protospacer adjacent motif (PAM) having the sequence NNGRRT. gRNA 20 bp spacer sequences corresponding to the PAM were identified, as shown in SEQ ID NOs: 14,570-14,605 of the Sequence Listing.

### Example 21—CRISPR/StCas9 Target Sites for the Anqptl3 Gene

[0565] Exons 1-2 of the Angptl3 gene were scanned for target sites. Each area was scanned for a protospacer adjacent motif (PAM) having the sequence NNAGAAW. gRNA 20 bp spacer sequences corresponding to the PAM were identified, as shown in SEQ ID NOs: 14,606-14,628 of the Sequence Listing.

### Example 22—CRISPR/TdCas9 Target Sites for the Angptl3 Gene

[0566] Exons 1-2 of the Angptl3 gene were scanned for target sites. Each area was scanned for a protospacer adjacent motif (PAM) having the sequence NAAAAC. gRNA 20 bp spacer sequences corresponding to the PAM were identified, as shown in SEQ ID NOs: 14,629-14,641 of the Sequence Listing.

### Example 23—CRISPR/NmCas9 Target Sites for the Angptl3 Gene

[0567] Exons 1-2 of the Angptl3 gene were scanned for target sites. Each area was SEQ ID NOs: 14,642-14,704 of the Sequence Listing.

### Example 24—CRISPR/Cpf1 Target Sites for the Anqptl3 Gene

[0568] Exons 1-2 of the Angptl3 gene were scanned for target sites. Each area was scanned for a protospacer adjacent motif (PAM) having the sequence YTN. gRNA 22 bp spacer sequences corresponding to the PAM were identified, as shown in SEQ ID NOs: 14,705-15,552 of the Sequence Listing.

### Example 25—CRISPR/SpCas9 Target Sites for the ApoC3 Gene

[0569] Exons 1-2 of the ApoC3 gene were scanned for target sites. Each area was scanned for a protospacer adjacent motif (PAM) having the sequence NRG. gRNA 20 bp spacer sequences corresponding to the PAM were identified, as shown in SEQ ID NOs: 15,553-15,955 of the Sequence Listing.

### Example 26—CRISPR/SaCas9 Target Sites for the ApoC3 Gene

[0570] Exons 1-2 of the ApoC3 gene were scanned for target sites. Each area was scanned for a protospacer adjacent motif (PAM) having the sequence NNGRRT. gRNA 20 bp spacer sequences corresponding to the PAM were identified, as shown in SEQ ID NOs: 15,956-15,980 of the Sequence Listing.

### Example 27—CRISPR/StCas9 Target Sites for the ApoC3 Gene

[0571] Exons 1-2 of the ApoC3 gene were scanned for target sites. Each area was scanned for a protospacer adjacent motif (PAM) having the sequence NNAGAAW. gRNA 20 bp spacer sequences corresponding to the PAM were identified, as shown in SEQ ID NOs: 15,981-15,983 of the Sequence Listing.

### Example 28—CRISPR/TdCas9 Target Sites for the ApoC3 Gene

[0572] Exons 1-2 of the ApoC3 gene were scanned for target sites. Each area was scanned for a protospacer adjacent motif (PAM) having the sequence NAAAAC. gRNA 20 bp spacer sequences corresponding to the PAM were identified, as shown in SEQ ID NOs: 15,984-15,985 of the Sequence Listing.

### Example 29—CRISPR/NmCas9 Target Sites for the ApoC3 Gene

[0573] Exons 1-2 of the ApoC3 gene were scanned for target sites. Each area was SEQ ID NOs: 15,986-15,997 of the Sequence Listing.

### Example 30—CRISPR/Cpf1 Target Sites for the ApoC3 Gene

[0574] Exons 1-2 of the ApoC3 gene were scanned for target sites. Each area was scanned for a protospacer adjacent motif (PAM) having the sequence YTN. gRNA 22 bp spacer sequences corresponding to the PAM were identified, as shown in SEQ ID NOs: 15,998-16,229 of the Sequence Listing.

### Example 31—CRISPR/SpCas9 Target Sites for the ASGR2 Gene

[0575] Exons 1-2 of the ASGR2 gene were scanned for target sites. Each area was scanned for a protospacer adjacent motif (PAM) having the sequence NRG. gRNA 20 bp spacer sequences corresponding to the PAM were identified, as shown in SEQ ID NOs: 16,230-17,997 of the Sequence Listing.

### Example 32—CRISPR/SaCas9 Target Sites for the ASGR2 Gene

[0576] Exons 1-2 of the ASGR2 gene were scanned for target sites. Each area was scanned for a protospacer adjacent motif (PAM) having the sequence NNGRRT. gRNA 20 bp spacer sequences corresponding to the PAM were identified, as shown in SEQ ID NOs: 17,998-18,203 of the Sequence Listing.

### Example 33—CRISPR/StCas9 Target Sites for the ASGR2 Gene

[0577] Exons 1-2 of the ASGR2 gene were scanned for target sites. Each area was scanned for a protospacer adjacent motif (PAM) having the sequence NNAGAAW. gRNA 20 bp spacer sequences corresponding to the PAM were identified, as shown in SEQ ID NOs: 18,204-18,227 of the Sequence Listing.

### Example 34—CRISPR/TdCas9 Target Sites for the ASGR2 Gene

[0578] Exons 1-2 of the ASGR2 gene were scanned for target sites. Each area was scanned for a protospacer adjacent motif (PAM) having the sequence NAAAAC. gRNA 20 bp spacer sequences corresponding to the PAM were identified, as shown in SEQ ID NOs: 18,228-18,239 of the Sequence Listing.

### Example 35—CRISPR/NmCas9 Target Sites for the ASGR2 Gene

[0579] Exons 1-2 of the ASGR2 gene were scanned for target sites. Each area was SEQ ID NOs: 18,240-18,322 of the Sequence Listing.

### Example 36—CRISPR/Cpf1 Target Sites for the ASGR2 Gene

[0580] Exons 1-2 of the ASGR2 gene were scanned for target sites. Each area was scanned for a protospacer adjacent motif (PAM) having the sequence YTN. gRNA 22 bp spacer sequences corresponding to the PAM were identified, as shown in SEQ ID NOs: 18,323-19,762 of the Sequence Listing.

### Example 37—CRISPR/SpCas9 Target Sites for the CCR5 Gene

[0581] Exons 1-2 of the CCR5 gene were scanned for target sites. Each area was scanned for a protospacer adjacent motif (PAM) having the sequence NRG. gRNA 20 bp spacer sequences corresponding to the PAM were identified, as shown in SEQ ID NOs: 19,763-19,965 of the Sequence Listing.

### Example 38—CRISPR/SaCas9 Target Sites for the CCR5 Gene

[0582] Exons 1-2 of the CCR5 gene were scanned for target sites. Each area was scanned for a protospacer adjacent motif (PAM) having the sequence NNGRRT. gRNA 20 bp spacer sequences corresponding to the PAM were identified, as shown in SEQ ID NOs: 19,966-19,997 of the Sequence Listing.

### Example 39—CRISPR/StCas9 Target Sites for the CCR5 Gene

[0583] Exons 1-2 of the CCR5 gene were scanned for target sites. Each area was scanned for a protospacer adjacent motif (PAM) having the sequence NNAGAAW. gRNA 20 bp spacer sequences corresponding to the PAM were identified, as shown in SEQ ID NOs: 19,998-20,011 of the Sequence Listing.

### Example 40—CRISPR/TdCas9 Target Sites for the CCR5 Gene

[0584] Exons 1-2 of the CCR5 gene were scanned for target sites. Each area was scanned for a protospacer adjacent motif (PAM) having the sequence NAAAAC. gRNA 20 bp spacer sequences corresponding to the PAM were identified, as shown in SEQ ID NOs: 20,012-20,013 of the Sequence Listing.

### Example 41—CRISPR/NmCas9 Target Sites for the CCR5 Gene

[0585] Exons 1-2 of the CCR5 gene were scanned for target sites. Each area was SEQ ID NOs: 20,014-20,041 of the Sequence Listing.

### Example 42—CRISPR/Cpf1 Target Sites for the CCR5 Gene

[0586] Exons 1-2 of the CCR5 gene were scanned for target sites. Each area was scanned for a protospacer adjacent motif (PAM) having the sequence YTN. gRNA 22 bp spacer sequences corresponding to the PAM were identified, as shown in SEQ ID NOs: 20,042-20,341 of the Sequence Listing.

### Example 43—CRISPR/SpCas9 Target Sites for the FIX (F9) Gene

[0587] Exons 1-2 of the FIX (F9) gene were scanned for target sites. Each area was scanned for a protospacer adjacent motif (PAM) having the sequence NRG. gRNA 20 bp spacer sequences corresponding to the PAM were identified, as shown in SEQ ID NOs: 20,342-21,807 of the Sequence Listing.

### Example 44—CRISPR/SaCas9 Target Sites for the FIX (F9) Gene

[0588] Exons 1-2 of the FIX (F9) gene were scanned for target sites. Each area was scanned for a protospacer adjacent motif (PAM) having the sequence NNGRRT. gRNA 20 bp spacer sequences corresponding to the PAM were identified, as shown in SEQ ID NOs: 21,808-21,970 of the Sequence Listing.

### Example 45—CRISPR/StCas9 Target Sites for the FIX (F9) Gene

[0589] Exons 1-2 of the FIX (F9) gene were scanned for target sites. Each area was scanned for a protospacer adjacent motif (PAM) having the sequence NNAGAAW. gRNA 20 bp spacer sequences corresponding to the PAM were identified, as shown in SEQ ID NOs: 21,971-22,031 of the Sequence Listing.

### Example 46—CRISPR/TdCas9 Target Sites for the FIX (F9) Gene

[0590] Exons 1-2 of the FIX (F9) gene were scanned for target sites. Each area was scanned for a protospacer adjacent motif (PAM) having the sequence NAAAAC. gRNA 20 bp spacer sequences corresponding to the PAM were identified, as shown in SEQ ID NOs: 22,032-22,056 of the Sequence Listing.

### Example 47—CRISPR/NmCas9 Target Sites for the FIX (F9) Gene

[0591] Exons 1-2 of the FIX (F9) gene were scanned for target sites. Each area was scanned for a protospacer adjacent motif (PAM) having the sequence NNNNGHTT. SEQ ID NOs: 22,057-22,209 of the Sequence Listing.

### Example 48—CRISPR/Cpf1 Target Sites for the FIX (F9) Gene

[0592] Exons 1-2 of the FIX (F9) gene were scanned for target sites. Each area was scanned for a protospacer adjacent motif (PAM) having the sequence YTN. gRNA 22 bp spacer sequences corresponding to the PAM were identified, as shown in SEQ ID NOs: 22,210-24,350 of the Sequence Listing.

### Example 49—CRISPR/SpCas9 Target Sites for the G6PC Gene

[0593] Regions of the G6PC gene were scanned for target sites. Each area was scanned for a protospacer adjacent motif (PAM) having the sequence NRG. gRNA 20 bp spacer sequences corresponding to the PAM were identified, as shown in SEQ ID NOs: 24,351-25,366 of the Sequence Listing.

### Example 50—CRISPR/SaCas9 Target Sites for the G6PC Gene

[0594] Regions of the G6PC gene were scanned for target sites. Each area was scanned for a protospacer adjacent motif (PAM) having the sequence NNGRRT. gRNA 20 bp spacer sequences corresponding to the PAM were identified, as shown in SEQ ID NOs: 25,367-25,483 of the Sequence Listing.

### Example 51—CRISPR/StCas9 Target Sites for the G6PC Gene

[0595] Regions of the G6PC gene were scanned for target sites. Each area was scanned for a protospacer adjacent motif (PAM) having the sequence NNAGAAW. gRNA 20 bp spacer sequences corresponding to the PAM were identified, as shown in SEQ ID NOs: 25,484-25,507 of the Sequence Listing.

### Example 52—CRISPR/TdCas9 Target Sites for the G6PC Gene

[0596] Regions of the G6PC gene were scanned for target sites. Each area was scanned for a protospacer adjacent motif (PAM) having the sequence NAAAAC. gRNA 20 bp spacer sequences corresponding to the PAM were identified, as shown in SEQ ID NOs: 25,508-25,516 of the Sequence Listing.

### Example 53—CRISPR/NmCas9 Target Sites for the G6PC Gene

[0597] Regions of the G6PC gene were scanned for target sites. Each area was SEQ ID NOs: 25,517-25,606 of the Sequence Listing.

### Example 54—CRISPR/Cpf1 Target Sites for the G6PC Gene

[0598] Regions of the G6PC gene were scanned for target sites. Each area was scanned for a protospacer adjacent motif (PAM) having the sequence YTN. gRNA 22 bp spacer sequences corresponding to the PAM were identified, as shown in SEQ ID NOs: 25,607-26,701 of the Sequence Listing.

### Example 55—CRISPR/SpCas9 Target Sites for the Gys2 Gene

[0599] Exons 1-2 of the Gys2 gene were scanned for target sites. Each area was scanned for a protospacer adjacent motif (PAM) having the sequence NRG. gRNA 20 bp spacer sequences corresponding to the PAM were identified, as shown in SEQ ID NOs: 26,702-32,194 of the Sequence Listing.

### Example 56—CRISPR/SaCas9 Target Sites for the Gys2 Gene

[0600] Exons 1-2 of the Gys2 gene were scanned for target sites. Each area was scanned for a protospacer adjacent motif (PAM) having the sequence NNGRRT. gRNA 20 bp spacer sequences corresponding to the PAM were identified, as shown in SEQ ID NOs: 32,195-32,870 of the Sequence Listing.

### Example 57—CRISPR/StCas9 Target Sites for the Gvs2 Gene

[0601] Exons 1-2 of the Gys2 gene were scanned for target sites. Each area was scanned for a protospacer adjacent motif (PAM) having the sequence NNAGAAW. gRNA 20 bp spacer sequences corresponding to the PAM were identified, as shown in SEQ ID NOs: 32,871-33,148 of the Sequence Listing.

### Example 58—CRISPR/TdCas9 Target Sites for the Gys2 Gene

[0602] Exons 1-2 of the Gys2 gene were scanned for target sites. Each area was scanned for a protospacer adjacent motif (PAM) having the sequence NAAAAC. gRNA 20 bp spacer sequences corresponding to the PAM were identified, as shown in SEQ ID NOs: 33,149-33,262 of the Sequence Listing.

### Example 59—CRISPR/NmCas9 Target Sites for the Gvs2 Gene

[0603] Exons 1-2 of the Gys2 gene were scanned for target sites. Each area was SEQ ID NOs: 33,263-33,942 of the Sequence Listing.

### Example 60—CRISPR/Cpf1 Target Sites for the Gys2 Gene

[0604] Exons 1-2 of the Gys2 gene were scanned for target sites. Each area was scanned for a protospacer adjacent motif (PAM) having the sequence YTN. gRNA 22 bp spacer sequences corresponding to the PAM were identified, as shown in SEQ ID NOs: 33,943-42,374 of the Sequence Listing.

### Example 61—CRISPR/SpCas9 Target Sites for the HGD Gene

[0605] Exons 1-2 of the HGD gene were scanned for target sites. Each area was scanned for a protospacer adjacent motif (PAM) having the sequence NRG. gRNA 20 bp spacer sequences corresponding to the PAM were identified, as shown in SEQ ID NOs: 42,375-44,067 of the Sequence Listing.

### Example 62—CRISPR/SaCas9 Target Sites for the HGD Gene

[0606] Exons 1-2 of the HGD gene were scanned for target sites. Each area was scanned for a protospacer adjacent motif (PAM) having the sequence NNGRRT. gRNA 20 bp spacer sequences corresponding to the PAM were identified, as shown in SEQ ID NOs: 44,068-44,281 of the Sequence Listing.

### Example 63—CRISPR/StCas9 Target Sites for the HGD Gene

[0607] Exons 1-2 of the HGD gene were scanned for target sites. Each area was scanned for a protospacer adjacent motif (PAM) having the sequence NNAGAAW. gRNA 20 bp spacer sequences corresponding to the PAM were identified, as shown in SEQ ID NOs: 44,282-44,364 of the Sequence Listing.

### Example 64—CRISPR/TdCas9 Target Sites for the HGD Gene

[0608] Exons 1-2 of the HGD gene were scanned for target sites. Each area was scanned for a protospacer adjacent motif (PAM) having the sequence NAAAAC. gRNA 20 bp spacer sequences corresponding to the PAM were identified, as shown in SEQ ID NOs: 44,365-44,383 of the Sequence Listing.

### Example 65—CRISPR/NmCas9 Target Sites for the HGD Gene

[0609] Exons 1-2 of the HGD gene were scanned for target sites. Each area was SEQ ID NOs: 44,384-44,584 of the Sequence Listing.

### Example 66—CRISPR/Cpf1 Target Sites for the HGD Gene

[0610] Exons 1-2 of the HGD gene were scanned for target sites. Each area was scanned for a protospacer adjacent motif (PAM) having the sequence YTN. gRNA 22 bp spacer sequences corresponding to the PAM were identified, as shown in SEQ ID NOs: 44,585-46,909 of the Sequence Listing.

### Example 67—CRISPR/SpCas9 Target Sites for the Lp(a) Gene

[0611] Exons 1-2 of the Lp(a) gene were scanned for target sites. Each area was scanned for a protospacer adjacent motif (PAM) having the sequence NRG. gRNA 20 bp spacer sequences corresponding to the PAM were identified, as shown in SEQ ID NOs: 46,910-50,704 of the Sequence Listing.

### Example 68—CRISPR/SaCas9 Target Sites for the Lp(a) Gene

[0612] Exons 1-2 of the Lp(a) gene were scanned for target sites. Each area was scanned for a protospacer adjacent motif (PAM) having the sequence NNGRRT. gRNA 20 bp spacer sequences corresponding to the PAM were identified, as shown in SEQ ID NOs: 50,705-51,114 of the Sequence Listing.

### Example 69—CRISPR/StCas9 Target Sites for the LP(a) Gene

[0613] Exons 1-2 of the Lp(a) gene were scanned for target sites. Each area was scanned for a protospacer adjacent motif (PAM) having the sequence NNAGAAW. gRNA 20 bp spacer sequences corresponding to the PAM were identified, as shown in SEQ ID NOs: 51,115-51,250 of the Sequence Listing.

### Example 70—CRISPR/TdCas9 Target Sites for the Lp(a) Gene

[0614] Exons 1-2 of the Lp(a) gene were scanned for target sites. Each area was scanned for a protospacer adjacent motif (PAM) having the sequence NAAAAC. gRNA 20 bp spacer sequences corresponding to the PAM were identified, as shown in SEQ ID NOs: 51,251-51,285 of the Sequence Listing.

### Example 71—CRISPR/NmCas9 Target Sites for the LP(a) Gene

[0615] Exons 1-2 of the Lp(a) gene were scanned for target sites. Each area was SEQ ID NOs: 51,286-51,653 of the Sequence Listing.

### Example 72—CRISPR/Cpf1 Target Sites for the Lp(a) Gene

[0616] Exons 1-2 of the Lp(a) gene were scanned for target sites. Each area was scanned for a protospacer adjacent motif (PAM) having the sequence YTN. gRNA 22 bp spacer sequences corresponding to the PAM were identified, as shown in SEQ ID NOs: 51,654-56,274 of the Sequence Listing.

### Example 73—CRISPR/SpCas9 Target Sites for the PCSK9 Gene

[0617] Exons 1-2 of the PCSK9 gene were scanned for target sites. Each area was scanned for a protospacer adjacent motif (PAM) having the sequence NRG. gRNA 20 bp spacer sequences corresponding to the PAM were identified, as shown in SEQ ID NOs: 56,275-58,294 of the Sequence Listing.

### Example 74—CRISPR/SaCas9 Target Sites for the PCSK9 Gene

[0618] Exons 1-2 of the PCSK9 gene were scanned for target sites. Each area was scanned for a protospacer adjacent motif (PAM) having the sequence NNGRRT. gRNA 20 bp spacer sequences corresponding to the PAM were identified, as shown in SEQ ID NOs: 58,295-58,481 of the Sequence Listing.

### Example 75—CRISPR/StCas9 Target Sites for the PCSK9 Gene

[0619] Exons 1-2 of the PCSK9 gene were scanned for target sites. Each area was scanned for a protospacer adjacent motif (PAM) having the sequence NNAGAAW. gRNA 20 bp spacer sequences corresponding to the PAM were identified, as shown in SEQ ID NOs: 58,482-58,517 of the Sequence Listing.

### Example 76—CRISPR/TdCas9 Target Sites for the PCSK9 Gene

[0620] Exons 1-2 of the PCSK9 gene were scanned for target sites. Each area was scanned for a protospacer adjacent motif (PAM) having the sequence NAAAAC. gRNA 20 bp spacer sequences corresponding to the PAM were identified, as shown in SEQ ID NOs: 58,518-58,531 of the Sequence Listing.

### Example 77—CRISPR/NmCas9 Target Sites for the PCSK9 Gene

[0621] Exons 1-2 of the PCSK9 gene were scanned for target sites. Each area was SEQ ID NOs: 58,532-58,671 of the Sequence Listing.

### Example 78—CRISPR/Cpf1 Target Sites for the PCSK9 Gene

[0622] Exons 1-2 of the PCSK9 gene were scanned for target sites. Each area was scanned for a protospacer adjacent motif (PAM) having the sequence YTN. gRNA 22 bp spacer sequences corresponding to the PAM were identified, as shown in SEQ ID NOs: 58,672-60,465 of the Sequence Listing.

### Example 79—CRISPR/SpCas9 Target Sites for the Serpina1 Gene

[0623] Exons 1-2 of the Serpina1 gene were scanned for target sites. Each area was scanned for a protospacer adjacent motif (PAM) having the sequence NRG. gRNA 20 bp spacer sequences corresponding to the PAM were identified, as shown in SEQ ID NOs: 60,466-61,603 of the Sequence Listing.

### Example 80—CRISPR/SaCas9 Target Sites for the Serpina1 Gene

[0624] Exons 1-2 of the Serpina1 gene were scanned for target sites. Each area was scanned for a protospacer adjacent motif (PAM) having the sequence NNGRRT. gRNA 20 bp spacer sequences corresponding to the PAM were identified, as shown in SEQ ID NOs: 61,604-61,696 of the Sequence Listing.

### Example 81—CRISPR/StCas9 Target Sites for the Serpina1 Gene

[0625] Exons 1-2 of the Serpina1 gene were scanned for target sites. Each area was scanned for a protospacer adjacent motif (PAM) having the sequence NNAGAAW. gRNA 20 bp spacer sequences corresponding to the PAM were identified, as shown in SEQ ID NOs: 61,697-61,708 of the Sequence Listing.

### Example 82—CRISPR/TdCas9 Target Sites for the Serpina1 Gene

[0626] Exons 1-2 of the Serpina1 gene were scanned for target sites. Each area was scanned for a protospacer adjacent motif (PAM) having the sequence NAAAAC. gRNA 20 bp spacer sequences corresponding to the PAM were identified, as shown in SEQ ID NOs: 61,709-61,711 of the Sequence Listing.

### Example 83—CRISPR/NmCas9 Target Sites for the Serpina1 Gene

[0627] Exons 1-2 of the Serpina1 gene were scanned for target sites. Each area was scanned for a protospacer adjacent motif (PAM) having the sequence NNNNGHTT. SEQ ID NOs: 61,712-61,762 of the Sequence Listing.

### Example 84—CRISPR/Cpf1 Target Sites for the Serpina1 Gene

[0628] Exons 1-2 of the Serpina1 gene were scanned for target sites. Each area was scanned for a protospacer adjacent motif (PAM) having the sequence YTN. gRNA 22 bp spacer sequences corresponding to the PAM were identified, as shown in SEQ ID NOs: 61,763-62,566 of the Sequence Listing.

### Example 85—CRISPR/SpCas9 Target Sites for the TF Gene

[0629] Exons 1-2 of the TF gene were scanned for target sites. Each area was scanned for a protospacer adjacent motif (PAM) having the sequence NRG. gRNA 20 bp spacer sequences corresponding to the PAM were identified, as shown in SEQ ID NOs: 62,567-63,398 of the Sequence Listing.

### Example 86—CRISPR/SaCas9 Target Sites for the TF Gene

[0630] Exons 1-2 of the TF gene were scanned for target sites. Each area was scanned for a protospacer adjacent motif (PAM) having the sequence NNGRRT. gRNA 20 bp spacer sequences corresponding to the PAM were identified, as shown in SEQ ID NOs: 63,399-63,484 of the Sequence Listing.

### Example 87—CRISPR/StCas9 Target Sites for the TF Gene

[0631] Exons 1-2 of the TF gene were scanned for target sites. Each area was scanned for a protospacer adjacent motif (PAM) having the sequence NNAGAAW. gRNA 20 bp spacer sequences corresponding to the PAM were identified, as shown in SEQ ID NOs: 63,485-63,496 of the Sequence Listing.

### Example 88—CRISPR/TdCas9 Target Sites for the TF Gene

[0632] Exons 1-2 of the TF gene were scanned for target sites. Each area was scanned for a protospacer adjacent motif (PAM) having the sequence NAAAAC. gRNA 20 bp spacer sequences corresponding to the PAM were identified, as shown in SEQ ID NOs: 63,497-63,503 of the Sequence Listing.

### Example 89—CRISPR/NmCas9 Target Sites for the TF Gene

[0633] Exons 1-2 of the TF gene were scanned for target sites. Each area was SEQ ID NOs: 63,504-63,547 of the Sequence Listing.

### Example 90—CRISPR/Cpf1 Target Sites for the TF Gene

[0634] Exons 1-2 of the TF gene were scanned for target sites. Each area was scanned for a protospacer adjacent motif (PAM) having the sequence YTN. gRNA 22 bp spacer sequences corresponding to the PAM were identified, as shown in SEQ ID NOs: 63,548-64,183 of the Sequence Listing.

### Example 91—CRISPR/SpCas9 Target Sites for the TTR Gene

[0635] Exons 1-2 of the TTR gene were scanned for target sites. Each area was scanned for a protospacer adjacent motif (PAM) having the sequence NRG. gRNA 20 bp spacer sequences corresponding to the PAM were identified, as shown in SEQ ID NOs: 64,184-64,483 of the Sequence Listing.

### Example 92—CRISPR/SaCas9 Target Sites for the TTR Gene

[0636] Exons 1-2 of the TTR gene were scanned for target sites. Each area was scanned for a protospacer adjacent motif (PAM) having the sequence NNGRRT. gRNA 20 bp spacer sequences corresponding to the PAM were identified, as shown in SEQ ID NOs: 64,484-64,524 of the Sequence Listing.

### Example 93—CRISPR/StCas9 Target Sites for the TTR Gene

[0637] Exons 1-2 of the TTR gene were scanned for target sites. Each area was scanned for a protospacer adjacent motif (PAM) having the sequence NNAGAAW. gRNA 20 bp spacer sequences corresponding to the PAM were identified, as shown in SEQ ID NOs: 64,525-64,541 of the Sequence Listing.

### Example 94—CRISPR/TdCas9 Target Sites for the TTR Gene

[0638] Exons 1-2 of the TTR gene were scanned for target sites. Each area was scanned for a protospacer adjacent motif (PAM) having the sequence NAAAAC. gRNA 20 bp spacer sequences corresponding to the PAM were identified, as shown in SEQ ID NOs: 64,542-64,543 of the Sequence Listing.

### Example 95—CRISPR/NmCas9 Target Sites for the TTR Gene

[0639] Exons 1-2 of the TTR gene were scanned for target sites. Each area was SEQ ID NOs: 64,544-64,578 of the Sequence Listing.

### Example 96—CRISPR/Cpf1 Target Sites for the TTR Gene

[0640] Exons 1-2 of the TTR gene were scanned for target sites. Each area was scanned for a protospacer adjacent motif (PAM) having the sequence YTN. gRNA 22 bp spacer sequences corresponding to the PAM were identified, as shown in SEQ ID NOs: 64,579-64,980 of the Sequence Listing.

### Example 97—Bioinformatics Analysis of the Guide Strands

[0641] Candidate guides will be screened and selected in a multi-step process that involves both theoretical binding and experimentally assessed activity. By way of illustration, candidate guides having sequences that match a particular on-target site, such as a site within the HFE gene, with adjacent PAM can be assessed for their potential to cleave at off-target sites having similar sequences, using one or more of a variety of bioinformatics tools available for assessing off-target binding, as described and illustrated in more detail below, in order to assess the likelihood of effects at chromosomal positions other than those intended. Candidates predicted to have relatively lower potential for off-target activity can then be assessed experimentally to measure their on-target activity, and then off-target activities at various sites. Preferred guides have sufficiently high on-target activity to achieve desired levels of gene editing at the selected locus, and relatively lower off-target activity to reduce the likelihood of alterations at other chromosomal loci. The ratio of on-target to off-target activity is often referred to as the “specificity” of a guide.

[0642] For initial screening of predicted off-target activities, there are a number of bioinformatics tools known and publicly available that can be used to predict the most likely off-target sites; and since binding to target sites in the CRISPR/Cas9/Cpf1 nuclease system is driven by Watson-Crick base pairing between complementary sequences, the degree of dissimilarity (and therefore reduced potential for off-target binding) is essentially related to primary sequence differences: mismatches and bulges, i.e. bases that are changed to a non-complementary base, and insertions or deletions of bases in the potential off-target site relative to the target site. An exemplary bioinformatics tool called COSMID (CRISPR Off-target Sites with Mismatches, Insertions and Deletions) (available on the web at crispr.bme.gatech.edu) compiles such similarities. Other bioinformatics tools include, but are not limited to, GUIDO, autoCOSMID, and CCtop.

[0643] Bioinformatics were used to minimize off-target cleavage in order to reduce the detrimental effects of mutations and chromosomal rearrangements. Studies on CRISPR/Cas9 systems suggested the possibility of high off-target activity due to nonspecific hybridization of the guide strand to DNA sequences with base pair mismatches and/or bulges, particularly at positions distal from the PAM region. Therefore, it is important to have a bioinformatics tool that can identify potential off-target sites that have insertions and/or deletions between the RNA guide strand and genomic sequences, in addition to base-pair mismatches. The bioinformatics-based tool, COSMID (CRISPR Off-target Sites with Mismatches, Insertions and Deletions) was therefore used to search genomes for potential CRISPR off-target sites (available on the web at crispr.bme.gatech.edu). COSMID output ranked lists of the potential off-target sites based on the number and location of mismatches, allowing more informed choice of target sites, and avoiding the use of sites with more likely off-target cleavage.

[0644] Additional bioinformatics pipelines were employed that weigh the estimated on- and/or off-target activity of gRNA targeting sites in a region. Other features that may be used to predict activity include information about the cell type in question, DNA accessibility, chromatin state, transcription factor binding sites, transcription factor binding data, and other CHIP-seq data. Additional factors are weighed that predict editing efficiency, such as relative positions and directions of pairs of gRNAs, local sequence features and micro-homologies.

### Example 98—Testing of Preferred Guides in Cells for On-Target Activity

[0645] The gRNAs predicted to have the lowest off-target activity will then be tested for on-target activity in a model cell line, such as Huh-7 cells, and evaluated for indel frequency using TIDE or next generation sequencing. TIDE is a web tool to rapidly assess genome editing by CRISPR-Cas9 of a target locus determined by a guide RNA (gRNA or sgRNA). Based on quantitative sequence trace data from two standard capillary sequencing reactions, the TIDE software quantifies the editing efficacy and identifies the predominant types of insertions and deletions (indels) in the DNA of a targeted cell pool. See Brinkman et al, Nucl. Acids Res. (2014) for a detailed explanation and examples. Next-generation sequencing (NGS), also known as high-throughput sequencing, is the catch-all term used to describe a number of different modern sequencing technologies including: Illumina (Solexa) sequencing, Roche 454 sequencing, Ion torrent: Proton/PGM sequencing, and SOLiD sequencing. These recent technologies allow one to sequence DNA and RNA much more quickly and cheaply than the previously used Sanger sequencing, and as such have revolutionised the study of genomics and molecular biology.

[0646] Transfection of tissue culture cells, allows screening of different constructs and a robust means of testing activity and specificity. Tissue culture cell lines, such as Huh-7 cells, are easily transfected and result in high activity. These or other cell lines will be evaluated to determine the cell lines that match with hepatocytes and provide the best surrogate. These cells will then be used for many early stage tests. For example, 10 individual gRNAs for S. pyogenes Cas9 will be transfected into the cells using plasmids, such as, for example, CTx-1, CTx-2, or CTx-3, which are suitable for expression in human cells. Several days later, the genomic DNA is harvested and the target site amplified by PCR. The cutting activity can be measured by the rate of insertions, deletions and mutations introduced by NHEJ repair of the free DNA ends. Although this method cannot differentiate correctly repaired sequences from uncleaved DNA, the level of cutting can be gauged by the amount of mis-repair. Off-target activity can be observed by amplifying identified putative off-target sites and using similar methods to detect cleavage. Translocation can also be assayed using primers flanking cut sites, to determine if specific cutting and translocations happen. Un-guided assays have been developed allowing complementary testing of off-target cleavage including guide-seq. The gRNA or pairs of gRNA with significant activity can then be followed up in cultured cells to measure correction of the HFE mutation. Off-target events can be followed again. Similarly hepatocytes can be transfected and the level of gene correction and possible off-target events measured. These experiments allow optimization of nuclease and donor design and delivery.

### Example 99—Testing of Preferred Guides in Cells for Off-Target Activity

[0647] The gRNAs having the best on-target activity from the TIDE and next generation sequencing studies in the above example will then be tested for off-target activity using whole genome sequencing. Candidate gRNAs will be more completely evaluated in hepatocytes or iPSCs.

### Example 100—Testing Different Approaches for HDR Gene Editing

[0648] After testing the gRNAs for both on-target activity and off-target activity, mutation correction and knock-in strategies will be tested for HDR gene editing.

[0649] For the mutation correction approach, donor DNA template will be provided as a short single-stranded oligonucleotide, a short double-stranded oligonucleotide (PAM sequence intact/PAM sequence mutated), a long single-stranded DNA molecule (PAM sequence intact/PAM sequence mutated) or a long double-stranded DNA molecule (PAM sequence intact/PAM sequence mutated). In addition, the donor DNA template will be delivered by AAV.

[0650] For the cDNA knock-in approach, a single-stranded or double-stranded DNA having homologous arms to the 6p21.3 region may include more than 40 nt of the first exon (the first coding exon) of the HFE gene, the complete CDS of the HFE gene and 3′UTR of the HFE gene, and at least 40 nt of the following intron. The single-stranded or double-stranded DNA having homologous arms to the 6p21.3 region may include more than 80 nt of the first exon of the HFE gene, the complete CDS of the HFE gene and 3′UTR of the HFE gene, and at least 80 nt of the following intron. The single-stranded or double-stranded DNA having homologous arms to the 6p21.3 region may 15 include more than 100 nt of the first exon of the HFE gene, the complete CDS of the HFE gene and 3′UTR of the HFE gene, and at least 100 nt of the following intron. The single-stranded or double-stranded DNA having homologous arms to the 6p21.3 region may include more than 150 nt of the first exon of the HFE gene, the complete CDS of the HFE gene and 3′UTR of the HFE gene, and at least 150 nt of the following intron. The single-stranded or double-stranded DNA having homologous arms to the 6p21.3 region may include more than 300 nt of the first exon of the HFE gene, the complete CDS of the HFE gene and 3′UTR of the HFE gene, and at least 300 nt of the following intron. The single-stranded or double-stranded DNA having homologous arms to the 6p21.3 region may include more than 400 nt of the first exon of the HFE gene, the complete CDS of the HFE gene and 3′UTR of the HFE gene, and at least 400 nt of the following intron. Alternatively, the DNA template will be delivered by AAV.

### Example 101—Re-Assessment of Lead CRISPR-Cas9/DNA Donor Combinations

[0651] After testing the different strategies for HDR gene editing, the lead CRISPR-Cas9/DNA donor combinations will be re-assessed in primary human hepatocytes for efficiency of deletion, recombination, and off-target specificity. Cas9 mRNA or RNP will be formulated into lipid nanoparticles for delivery, sgRNAs will be formulated into nanoparticles or delivered as AAV, and donor DNA will be formulated into nanoparticles or delivered as AAV.

### Example 102—In Vivo Testing in Relevant Animal Model

[0652] After the CRISPR-Cas9/DNA donor combinations have been re-assessed, the lead formulations will be tested in vivo in a FRG mouse model with the livers repopulated with human hepatocytes (normal or HFE deficient human hepatocytes).

[0653] Culture in human cells allows direct testing on the human target and the background human genome, as described above.

[0654] Preclinical efficacy and safety evaluations can be observed through engraftment of modified mouse or human hepatocytes in FRG mice. The modified cells can be observed in the months after engraftment.

### Example 103—In Vitro Transcribed (IVT) qRNA Screen

[0655] To identify a large spectrum of pairs of gRNAs able to edit the cognate DNA target region, an in vitro transcribed (IVT) gRNA screen was conducted. The HFE genomic sequence, located on Chromsome 6 (6p21.3 region), was submitted for analysis using a gRNA design software. The resulting list of gRNAs were narrowed to a list of about 200 gRNAs based on uniqueness of sequence (only gRNAs without a perfect match somewhere else in the genome were screened) and minimal predicted off targets. This set of gRNAs were in vitro transcribed, and transfected using messenger Max into HEK293T cells that stably express Cas9. Cells were harvested 48 hours post transfection, the genomic DNA was isolated, and cutting efficiencey was evaluated using TIDE analysis. (FIGS. 2A-2D; FIGS. 3A-C).

### NOTE REGARDING ILLUSTRATIVE EXAMPLES

[0656] While the present disclosure provides descriptions of various specific aspects for the purpose of illustrating various aspects of the present invention and/or its potential applications, it is understood that variations and modifications will occur to those skilled in the art. Accordingly, the invention or inventions described herein should be understood to be at least as broad as they are claimed, and not as more narrowly defined by particular illustrative aspects provided herein.

[0657] Any patent, publication, or other disclosure material identified herein is incorporated by reference into this specification in its entirety unless otherwise indicated, but only to the extent that the incorporated material does not conflict with existing descriptions, definitions, statements, or other disclosure material expressly set forth in this specification. As such, and to the extent necessary, the express disclosure as set forth in this specification supersedes any conflicting material incorporated by reference. Any material, or portion thereof, that is said to be incorporated by reference into this specification, but which conflicts with existing definitions, statements, or other disclosure material set forth herein, is only incorporated to the extent that no conflict arises between that incorporated material and the existing disclosure material. Applicants reserve the right to amend this specification to expressly recite any subject matter, or portion thereof, incorporated by reference herein.

1-66. (canceled)

67. A composition for targeting the haemochromatosis (HFE) gene in a cell, comprising a guide ribonucleic acid (gRNA) comprising a spacer sequence that is an RNA sequence corresponding to any one of SEQ ID NOs: 3610, 973, 378, 1029, 3598, 3634, 1142, 388, 1121, 3678, 1137, 3531, 3654, 1045, 1096, 3558, and 3585.

68. The composition of claim 67, comprising a CRISPR/Cas9 system comprising the gRNA and a deoxyribonucleic acid (DNA) endonuclease, wherein the CRISPR/Cas9 system is capable of effecting one or more site-specific DNA breaks within or near the HFE gene when introduced into the cell.

69. The composition of claim 68, wherein the gRNA is a single-molecule guide ribonucleic acid (sgRNA).

70. The composition of claim 68, wherein the gRNA is a modified gRNA.

71. The composition of claim 70, wherein the modified gRNA comprises a nucleotide modified at the 2′ position of the sugar; and/or a nucleotide comprising one or more 2′-fluoro, 2′-amino or 2′ O-methyl modifications on the ribose of pyrimidines, abasic residues, or an inverted base at the 3′ end of the RNA.

72. The composition of claim 70, wherein the modified gRNA comprises one or more 2-O-alkyl, 2′-O-alkyl-O-alkyl, and 2′-fluoro-modified nucleotides.

73. The composition of claim 70, wherein the modified RNA comprises 2′-O-methyl phosphorothioate nucleotides as the first 3 nucleotides, 2′-O-methyl phosphorothioate nucleotides as the last 3 nucleotides, or both.

74. The composition of claim 68, wherein the DNA endonuclease is a S. pyogenes Cas9, S. aureus Cas9, S. thermophilus Cas9, T. denticola Cas9, or N. meningitides Cas9.

75. The composition of claim 68, wherein the DNA endonucleases is pre-complexed with the gRNA.

76. The composition of claim 68, wherein the DNA endonuclease and the gRNA are each formulated into separate lipid nanoparticles.

77. The composition of claim 68, wherein the DNA endonuclease and the gRNA are co-formulated into a lipid nanoparticle.

78. The composition of claim 68, wherein the CRISPR/Cas9 system comprising one or more nucleic acids encoding the DNA endonuclease and/or the gRNA.

79. The composition of claim 78, wherein the CRISPR/Cas9 system comprising mRNAs encoding the DNA endonuclease.

80. The composition of claim 68, further comprising a polynucleotide donor template comprising at least a portion of the wild-type HFE gene, at least a portion of DNA sequences that encode wild-type regulatory elements of the HFE gene, or at least a portion of cDNA corresponding to the wild-type HFE gene.

81. The composition of 80, wherein the polynucleotide donor template is either a single or double stranded polynucleotide.

82. The composition of claim 80, wherein the donor template has homology arms homologous to the 6p21.3 region.

83. The composition of claim 80, wherein the Cas9 is formulated into a lipid nanoparticle, and the gRNA and/or donor template is delivered to the cell by an adeno-associated virus (AAV) vector.

84. The composition of claim 68, wherein the one or more site-specific DNA breaks comprises single-strand breaks (SSBs).

85. The composition of claim 68, wherein the cell is selected from a group consisting of a liver cell, skin cell, pancreatic cell, heart cell, joint cell, or cell from the testes.

86. The composition of claim 68, wherein the cell is a cell from a patient with hereditary hemochromatosis (HHC).

The application's sequence listing, which the Patent Office published only in electronic form, follows.

SEQUENCE LISTING (64987 sequences)

SEQ ID NO: 1 - DNA, 20 bp, synthetic construct
  misc_feature 1..20: note = chemically synthesized
  source 1..20: mol_type = other DNA
ccagaccagcctgaccaaca

SEQ ID NO: 2 - DNA, 20 bp, synthetic construct
  misc_feature 1..20: note = chemically synthesized
  source 1..20: mol_type = other DNA
ctaaaaatacaaaaattaac

SEQ ID NO: 3 - DNA, 20 bp, synthetic construct
  misc_feature 1..20: note = chemically synthesized
  source 1..20: mol_type = other DNA
taaaaatacaaaaattaacc

SEQ ID NO: 4 - DNA, 20 bp, synthetic construct
  misc_feature 1..20: note = chemically synthesized
  source 1..20: mol_type = other DNA
atacaaaaattaaccaggca

SEQ ID NO: 5 - DNA, 20 bp, synthetic construct
  misc_feature 1..20: note = chemically synthesized
  source 1..20: mol_type = other DNA
caaaaattaaccaggcatgg

SEQ ID NO: 6 - DNA, 20 bp, synthetic construct
  misc_feature 1..20: note = chemically synthesized
  source 1..20: mol_type = other DNA
aaattaaccaggcatggtgg

SEQ ID NO: 7 - DNA, 20 bp, synthetic construct
  misc_feature 1..20: note = chemically synthesized
  source 1..20: mol_type = other DNA
aattaaccaggcatggtggc

SEQ ID NO: 8 - DNA, 20 bp, synthetic construct
  misc_feature 1..20: note = chemically synthesized
  source 1..20: mol_type = other DNA
gtggcaggtacctgtaatcc

SEQ ID NO: 9 - DNA, 20 bp, synthetic construct
  misc_feature 1..20: note = chemically synthesized
  source 1..20: mol_type = other DNA
tacctgtaatcccagctgct

SEQ ID NO: 10 - DNA, 20 bp, synthetic construct
  misc_feature 1..20: note = chemically synthesized
  source 1..20: mol_type = other DNA
acctgtaatcccagctgctt

SEQ ID NO: 11 - DNA, 20 bp, synthetic construct
  misc_feature 1..20: note = chemically synthesized
  source 1..20: mol_type = other DNA
ctgtaatcccagctgcttgg

SEQ ID NO: 12 - DNA, 20 bp, synthetic construct
  misc_feature 1..20: note = chemically synthesized
  source 1..20: mol_type = other DNA
tgtaatcccagctgcttggg

SEQ ID NO: 13 - DNA, 20 bp, synthetic construct
  misc_feature 1..20: note = chemically synthesized
  source 1..20: mol_type = other DNA
tcccagctgcttgggaggct

SEQ ID NO: 14 - DNA, 20 bp, synthetic construct
  misc_feature 1..20: note = chemically synthesized
  source 1..20: mol_type = other DNA
cccagctgcttgggaggctg

SEQ ID NO: 15 - DNA, 20 bp, synthetic construct
  misc_feature 1..20: note = chemically synthesized
  source 1..20: mol_type = other DNA
agctgcttgggaggctgagg

SEQ ID NO: 16 - DNA, 20 bp, synthetic construct
  misc_feature 1..20: note = chemically synthesized
  source 1..20: mol_type = other DNA
gctgcttgggaggctgaggc

SEQ ID NO: 17 - DNA, 20 bp, synthetic construct
  misc_feature 1..20: note = chemically synthesized
  source 1..20: mol_type = other DNA
tgcttgggaggctgaggcag

SEQ ID NO: 18 - DNA, 20 bp, synthetic construct
  misc_feature 1..20: note = chemically synthesized
  source 1..20: mol_type = other DNA
gcaggagaattgcttgaacc

SEQ ID NO: 19 - DNA, 20 bp, synthetic construct
  misc_feature 1..20: note = chemically synthesized
  source 1..20: mol_type = other DNA
caggagaattgcttgaacct

SEQ ID NO: 20 - DNA, 20 bp, synthetic construct
  misc_feature 1..20: note = chemically synthesized
  source 1..20: mol_type = other DNA
ggagaattgcttgaacctgg

SEQ ID NO: 21 - DNA, 20 bp, synthetic construct
  misc_feature 1..20: note = chemically synthesized
  source 1..20: mol_type = other DNA
gagaattgcttgaacctggg

SEQ ID NO: 22 - DNA, 20 bp, synthetic construct
  misc_feature 1..20: note = chemically synthesized
  source 1..20: mol_type = other DNA
gaattgcttgaacctgggag

SEQ ID NO: 23 - DNA, 20 bp, synthetic construct
  misc_feature 1..20: note = chemically synthesized
  source 1..20: mol_type = other DNA
aattgcttgaacctgggagg

SEQ ID NO: 24 - DNA, 20 bp, synthetic construct
  misc_feature 1..20: note = chemically synthesized
  source 1..20: mol_type = other DNA
ttgcttgaacctgggaggag

SEQ ID NO: 25 - DNA, 20 bp, synthetic construct
  misc_feature 1..20: note = chemically synthesized
  source 1..20: mol_type = other DNA
ttgaacctgggaggaggagc

SEQ ID NO: 26 - DNA, 20 bp, synthetic construct
  misc_feature 1..20: note = chemically synthesized
  source 1..20: mol_type = other DNA
aacctgggaggaggagccag

SEQ ID NO: 27 - DNA, 20 bp, synthetic construct
  misc_feature 1..20: note = chemically synthesized
  source 1..20: mol_type = other DNA
tgggaggaggagccagtggc

SEQ ID NO: 28 - DNA, 20 bp, synthetic construct
  misc_feature 1..20: note = chemically synthesized
  source 1..20: mol_type = other DNA
gggaggaggagccagtggcc

SEQ ID NO: 29 - DNA, 20 bp, synthetic construct
  misc_feature 1..20: note = chemically synthesized
  source 1..20: mol_type = other DNA
gaggagccagtggccgggat

SEQ ID NO: 30 - DNA, 20 bp, synthetic construct
  misc_feature 1..20: note = chemically synthesized
  source 1..20: mol_type = other DNA
aggagccagtggccgggatt

SEQ ID NO: 31 - DNA, 20 bp, synthetic construct
  misc_feature 1..20: note = chemically synthesized
  source 1..20: mol_type = other DNA
tgggccactgcactccaacc

SEQ ID NO: 32 - DNA, 20 bp, synthetic construct
  misc_feature 1..20: note = chemically synthesized
  source 1..20: mol_type = other DNA
gggccactgcactccaacct

SEQ ID NO: 33 - DNA, 20 bp, synthetic construct
  misc_feature 1..20: note = chemically synthesized
  source 1..20: mol_type = other DNA
ctgcactccaacctgggcaa

SEQ ID NO: 34 - DNA, 20 bp, synthetic construct
  misc_feature 1..20: note = chemically synthesized
  source 1..20: mol_type = other DNA
gcactccaacctgggcaata

SEQ ID NO: 35 - DNA, 20 bp, synthetic construct
  misc_feature 1..20: note = chemically synthesized
  source 1..20: mol_type = other DNA
tccaacctgggcaatagagt

SEQ ID NO: 36 - DNA, 20 bp, synthetic construct
  misc_feature 1..20: note = chemically synthesized
  source 1..20: mol_type = other DNA
ccaacctgggcaatagagtg

SEQ ID NO: 37 - DNA, 20 bp, synthetic construct
  misc_feature 1..20: note = chemically synthesized
  source 1..20: mol_type = other DNA
ggctctgtcaaaaaaaaaaa

SEQ ID NO: 38 - DNA, 20 bp, synthetic construct
  misc_feature 1..20: note = chemically synthesized
  source 1..20: mol_type = other DNA
ctgtcaaaaaaaaaaaaaga

SEQ ID NO: 39 - DNA, 20 bp, synthetic construct
  misc_feature 1..20: note = chemically synthesized
  source 1..20: mol_type = other DNA
tgtcaaaaaaaaaaaaagat

SEQ ID NO: 40 - DNA, 20 bp, synthetic construct
  misc_feature 1..20: note = chemically synthesized
  source 1..20: mol_type = other DNA
aaaaaaaaaagataggatta

SEQ ID NO: 41 - DNA, 20 bp, synthetic construct
  misc_feature 1..20: note = chemically synthesized
  source 1..20: mol_type = other DNA
aaagataggattatagatta

SEQ ID NO: 42 - DNA, 20 bp, synthetic construct
  misc_feature 1..20: note = chemically synthesized
  source 1..20: mol_type = other DNA
gattatagattatagcataa

SEQ ID NO: 43 - DNA, 20 bp, synthetic construct
  misc_feature 1..20: note = chemically synthesized
  source 1..20: mol_type = other DNA
attatagattatagcataat

SEQ ID NO: 44 - DNA, 20 bp, synthetic construct
  misc_feature 1..20: note = chemically synthesized
  source 1..20: mol_type = other DNA
tagcataatgggataaaatt

SEQ ID NO: 45 - DNA, 20 bp, synthetic construct
  misc_feature 1..20: note = chemically synthesized
  source 1..20: mol_type = other DNA
atgggataaaattgagactc

SEQ ID NO: 46 - DNA, 20 bp, synthetic construct
  misc_feature 1..20: note = chemically synthesized
  source 1..20: mol_type = other DNA
gaaataaactctcacattta

SEQ ID NO: 47 - DNA, 20 bp, synthetic construct
  misc_feature 1..20: note = chemically synthesized
  source 1..20: mol_type = other DNA
ataaactctcacatttatgg

SEQ ID NO: 48 - DNA, 20 bp, synthetic construct
  misc_feature 1..20: note = chemically synthesized
  source 1..20: mol_type = other DNA
atggtagattgatttttgat

SEQ ID NO: 49 - DNA, 20 bp, synthetic construct
  misc_feature 1..20: note = chemically synthesized
  source 1..20: mol_type = other DNA
tggtagattgatttttgata

SEQ ID NO: 50 - DNA, 20 bp, synthetic construct
  misc_feature 1..20: note = chemically synthesized
  source 1..20: mol_type = other DNA
ggtagattgatttttgataa

SEQ ID NO: 51 - DNA, 20 bp, synthetic construct
  misc_feature 1..20: note = chemically synthesized
  source 1..20: mol_type = other DNA
ccaaaacacttcaatgaaaa

SEQ ID NO: 52 - DNA, 20 bp, synthetic construct
  misc_feature 1..20: note = chemically synthesized
  source 1..20: mol_type = other DNA
aaaacacttcaatgaaaaaa

SEQ ID NO: 53 - DNA, 20 bp, synthetic construct
  misc_feature 1..20: note = chemically synthesized
  source 1..20: mol_type = other DNA
gaaaaaagagtcttctcaac

SEQ ID NO: 54 - DNA, 20 bp, synthetic construct
  misc_feature 1..20: note = chemically synthesized
  source 1..20: mol_type = other DNA
agagtcttctcaacaagtga

SEQ ID NO: 55 - DNA, 20 bp, synthetic construct
  misc_feature 1..20: note = chemically synthesized
  source 1..20: mol_type = other DNA
gtcttctcaacaagtgatgg

SEQ ID NO: 56 - DNA, 20 bp, synthetic construct
  misc_feature 1..20: note = chemically synthesized
  source 1..20: mol_type = other DNA
aaccacatttttgttctatc

SEQ ID NO: 57 - DNA, 20 bp, synthetic construct
  misc_feature 1..20: note = chemically synthesized
  source 1..20: mol_type = other DNA
accacatttttgttctatct

SEQ ID NO: 58 - DNA, 20 bp, synthetic construct
  misc_feature 1..20: note = chemically synthesized
  source 1..20: mol_type = other DNA
ccacatttttgttctatctg

SEQ ID NO: 59 - DNA, 20 bp, synthetic construct
  misc_feature 1..20: note = chemically synthesized
  source 1..20: mol_type = other DNA
ggggccctgattcaaaaacc

SEQ ID NO: 60 - DNA, 20 bp, synthetic construct
  misc_feature 1..20: note = chemically synthesized
  source 1..20: mol_type = other DNA
gggccctgattcaaaaaccc

SEQ ID NO: 61 - DNA, 20 bp, synthetic construct
  misc_feature 1..20: note = chemically synthesized
  source 1..20: mol_type = other DNA
ctgattcaaaaacccaggca

SEQ ID NO: 62 - DNA, 20 bp, synthetic construct
  misc_feature 1..20: note = chemically synthesized
  source 1..20: mol_type = other DNA
ttcaaaaacccaggcaaaga

SEQ ID NO: 63 - DNA, 20 bp, synthetic construct
  misc_feature 1..20: note = chemically synthesized
  source 1..20: mol_type = other DNA
caaaaacccaggcaaagatg

SEQ ID NO: 64 - DNA, 20 bp, synthetic construct
  misc_feature 1..20: note = chemically synthesized
  source 1..20: mol_type = other DNA
aaaacccaggcaaagatgga

SEQ ID NO: 65 - DNA, 20 bp, synthetic construct
  misc_feature 1..20: note = chemically synthesized
  source 1..20: mol_type = other DNA
aggcaaagatggagagaaat

SEQ ID NO: 66 - DNA, 20 bp, synthetic construct
  misc_feature 1..20: note = chemically synthesized
  source 1..20: mol_type = other DNA
gaactctcatacactgctga

SEQ ID NO: 67 - DNA, 20 bp, synthetic construct
  misc_feature 1..20: note = chemically synthesized
  source 1..20: mol_type = other DNA
aactctcatacactgctgat

SEQ ID NO: 68 - DNA, 20 bp, synthetic construct
  misc_feature 1..20: note = chemically synthesized
  source 1..20: mol_type = other DNA
ctctcatacactgctgatag

SEQ ID NO: 69 - DNA, 20 bp, synthetic construct
  misc_feature 1..20: note = chemically synthesized
  source 1..20: mol_type = other DNA
tctcatacactgctgatagg

SEQ ID NO: 70 - DNA, 20 bp, synthetic construct
  misc_feature 1..20: note = chemically synthesized
  source 1..20: mol_type = other DNA
ggaggataaaatgcttactt

SEQ ID NO: 71 - DNA, 20 bp, synthetic construct
  misc_feature 1..20: note = chemically synthesized
  source 1..20: mol_type = other DNA
ataaaatgcttactttggaa

SEQ ID NO: 72 - DNA, 20 bp, synthetic construct
  misc_feature 1..20: note = chemically synthesized
  source 1..20: mol_type = other DNA
gcttactttggaaaagaatg

SEQ ID NO: 73 - DNA, 20 bp, synthetic construct
  misc_feature 1..20: note = chemically synthesized
  source 1..20: mol_type = other DNA
agaatgtggcaattcctcaa

SEQ ID NO: 74 - DNA, 20 bp, synthetic construct
  misc_feature 1..20: note = chemically synthesized
  source 1..20: mol_type = other DNA
gaatgtggcaattcctcaaa

SEQ ID NO: 75 - DNA, 20 bp, synthetic construct
  misc_feature 1..20: note = chemically synthesized
  source 1..20: mol_type = other DNA
caattcctcaaaaggttaaa

SEQ ID NO: 76 - DNA, 20 bp, synthetic construct
  misc_feature 1..20: note = chemically synthesized
  source 1..20: mol_type = other DNA
aacagtgttaccatatgacc

SEQ ID NO: 77 - DNA, 20 bp, synthetic construct
  misc_feature 1..20: note = chemically synthesized
  source 1..20: mol_type = other DNA
tgacccagcaaacccacttc

SEQ ID NO: 78 - DNA, 20 bp, synthetic construct
  misc_feature 1..20: note = chemically synthesized
  source 1..20: mol_type = other DNA
acttctagatatataaccaa

SEQ ID NO: 79 - DNA, 20 bp, synthetic construct
  misc_feature 1..20: note = chemically synthesized
  source 1..20: mol_type = other DNA
accaaaagaaatcaaaacat

SEQ ID NO: 80 - DNA, 20 bp, synthetic construct
  misc_feature 1..20: note = chemically synthesized
  source 1..20: mol_type = other DNA
ttgtacataaatgtttataa

SEQ ID NO: 81 - DNA, 20 bp, synthetic construct
  misc_feature 1..20: note = chemically synthesized
  source 1..20: mol_type = other DNA
tataacagcactattcccaa

SEQ ID NO: 82 - DNA, 20 bp, synthetic construct
  misc_feature 1..20: note = chemically synthesized
  source 1..20: mol_type = other DNA
cactattcccaatagccata

SEQ ID NO: 83 - DNA, 20 bp, synthetic construct
  misc_feature 1..20: note = chemically synthesized
  source 1..20: mol_type = other DNA
tattcccaatagccataaag

SEQ ID NO: 84 - DNA, 20 bp, synthetic construct
  misc_feature 1..20: note = chemically synthesized
  source 1..20: mol_type = other DNA
agaaacaaaccaatgtccat

SEQ ID NO: 85 - DNA, 20 bp, synthetic construct
  misc_feature 1..20: note = chemically synthesized
  source 1..20: mol_type = other DNA
tgaataaataaaatatgttg

SEQ ID NO: 86 - DNA, 20 bp, synthetic construct
  misc_feature 1..20: note = chemically synthesized
  source 1..20: mol_type = other DNA
gttgtggtatgtccttataa

SEQ ID NO: 87 - DNA, 20 bp, synthetic construct
  misc_feature 1..20: note = chemically synthesized
  source 1..20: mol_type = other DNA
gtccttataatagatattat

SEQ ID NO: 88 - DNA, 20 bp, synthetic construct
  misc_feature 1..20: note = chemically synthesized
  source 1..20: mol_type = other DNA
aaaaacattatgctaaatga

SEQ ID NO: 89 - DNA, 20 bp, synthetic construct
  misc_feature 1..20: note = chemically synthesized
  source 1..20: mol_type = other DNA
aacattatgctaaatgaaag

SEQ ID NO: 90 - DNA, 20 bp, synthetic construct
  misc_feature 1..20: note = chemically synthesized
  source 1..20: mol_type = other DNA
ttatgctaaatgaaagaagc

SEQ ID NO: 91 - DNA, 20 bp, synthetic construct
  misc_feature 1..20: note = chemically synthesized
  source 1..20: mol_type = other DNA
taaatgaaagaagccagtca

SEQ ID NO: 92 - DNA, 20 bp, synthetic construct
  misc_feature 1..20: note = chemically synthesized
  source 1..20: mol_type = other DNA
gaaagaagccagtcacggca

SEQ ID NO: 93 - DNA, 20 bp, synthetic construct
  misc_feature 1..20: note = chemically synthesized
  source 1..20: mol_type = other DNA
tgtatactaaatgttccaaa

SEQ ID NO: 94 - DNA, 20 bp, synthetic construct
  misc_feature 1..20: note = chemically synthesized
  source 1..20: mol_type = other DNA
tactaaatgttccaaataga

SEQ ID NO: 95 - DNA, 20 bp, synthetic construct
  misc_feature 1..20: note = chemically synthesized
  source 1..20: mol_type = other DNA
aaatgttccaaatagaaaga

SEQ ID NO: 96 - DNA, 20 bp, synthetic construct
  misc_feature 1..20: note = chemically synthesized
  source 1..20: mol_type = other DNA
tgttccaaatagaaagaaag

SEQ ID NO: 97 - DNA, 20 bp, synthetic construct
  misc_feature 1..20: note = chemically synthesized
  source 1..20: mol_type = other DNA
aatagaaagaaagtagatta

SEQ ID NO: 98 - DNA, 20 bp, synthetic construct
  misc_feature 1..20: note = chemically synthesized
  source 1..20: mol_type = other DNA
aaagtagattaaagattgtc

SEQ ID NO: 99 - DNA, 20 bp, synthetic construct
  misc_feature 1..20: note = chemically synthesized
  source 1..20: mol_type = other DNA
aagtagattaaagattgtct

SEQ ID NO: 100 - DNA, 20 bp, synthetic construct
  misc_feature 1..20: note = chemically synthesized
  source 1..20: mol_type = other DNA
agtagattaaagattgtcta

SEQ ID NO: 101 - DNA, 20 bp, synthetic construct
  misc_feature 1..20: note = chemically synthesized
  source 1..20: mol_type = other DNA
gattaaagattgtctagggc

SEQ ID NO: 102 - DNA, 20 bp, synthetic construct
  misc_feature 1..20: note = chemically synthesized
  source 1..20: mol_type = other DNA
attaaagattgtctagggct

SEQ ID NO: 103 - DNA, 20 bp, synthetic construct
  misc_feature 1..20: note = chemically synthesized
  source 1..20: mol_type = other DNA
taaagattgtctagggctgg

SEQ ID NO: 104 - DNA, 20 bp, synthetic construct
  misc_feature 1..20: note = chemically synthesized
  source 1..20: mol_type = other DNA
aaagattgtctagggctggg

SEQ ID NO: 105 - DNA, 20 bp, synthetic construct
  misc_feature 1..20: note = chemically synthesized
  source 1..20: mol_type = other DNA
aagattgtctagggctggga

SEQ ID NO: 106 - DNA, 20 bp, synthetic construct
  misc_feature 1..20: note = chemically synthesized
  source 1..20: mol_type = other DNA
agattgtctagggctgggag

SEQ ID NO: 107 - DNA, 20 bp, synthetic construct
  misc_feature 1..20: note = chemically synthesized
  source 1..20: mol_type = other DNA
attgtctagggctgggaggg

SEQ ID NO: 108 - DNA, 20 bp, synthetic construct
  misc_feature 1..20: note = chemically synthesized
  source 1..20: mol_type = other DNA
ttgtctagggctgggagggg

SEQ ID NO: 109 - DNA, 20 bp, synthetic construct
  misc_feature 1..20: note = chemically synthesized
  source 1..20: mol_type = other DNA
gtctagggctgggaggggag

SEQ ID NO: 110 - DNA, 20 bp, synthetic construct
  misc_feature 1..20: note = chemically synthesized
  source 1..20: mol_type = other DNA
tctagggctgggaggggagg

SEQ ID NO: 111 - DNA, 20 bp, synthetic construct
  misc_feature 1..20: note = chemically synthesized
  source 1..20: mol_type = other DNA
tagggctgggaggggaggag

SEQ ID NO: 112 - DNA, 20 bp, synthetic construct
  misc_feature 1..20: note = chemically synthesized
  source 1..20: mol_type = other DNA
agggctgggaggggaggagg

SEQ ID NO: 113 - DNA, 20 bp, synthetic construct
  misc_feature 1..20: note = chemically synthesized
  source 1..20: mol_type = other DNA
ggctgggaggggaggaggag

SEQ ID NO: 114 - DNA, 20 bp, synthetic construct
  misc_feature 1..20: note = chemically synthesized
  source 1..20: mol_type = other DNA
ggaggggaggaggaggagaa

SEQ ID NO: 115 - DNA, 20 bp, synthetic construct
  misc_feature 1..20: note = chemically synthesized
  source 1..20: mol_type = other DNA
aggggaggaggaggagaatg

SEQ ID NO: 116 - DNA, 20 bp, synthetic construct
  misc_feature 1..20: note = chemically synthesized
  source 1..20: mol_type = other DNA
ggggaggaggaggagaatgg

SEQ ID NO: 117 - DNA, 20 bp, synthetic construct
  misc_feature 1..20: note = chemically synthesized
  source 1..20: mol_type = other DNA
aggaggagaatggaggaatc

SEQ ID NO: 118 - DNA, 20 bp, synthetic construct
  misc_feature 1..20: note = chemically synthesized
  source 1..20: mol_type = other DNA
ggaggagaatggaggaatct

SEQ ID NO: 119 - DNA, 20 bp, synthetic construct
  misc_feature 1..20: note = chemically synthesized
  source 1..20: mol_type = other DNA
aggagaatggaggaatctgg

SEQ ID NO: 120 - DNA, 20 bp, synthetic construct
  misc_feature 1..20: note = chemically synthesized
  source 1..20: mol_type = other DNA
ggagaatggaggaatctggg

SEQ ID NO: 121 - DNA, 20 bp, synthetic construct
  misc_feature 1..20: note = chemically synthesized
  source 1..20: mol_type = other DNA
aatctgggaggcgatgaatt

SEQ ID NO: 122 - DNA, 20 bp, synthetic construct
  misc_feature 1..20: note = chemically synthesized
  source 1..20: mol_type = other DNA
atctgggaggcgatgaatta

SEQ ID NO: 123 - DNA, 20 bp, synthetic construct
  misc_feature 1..20: note = chemically synthesized
  source 1..20: mol_type = other DNA
tctgggaggcgatgaattaa

SEQ ID NO: 124 - DNA, 20 bp, synthetic construct
  misc_feature 1..20: note = chemically synthesized
  source 1..20: mol_type = other DNA
atgaattaagggtactgaat

SEQ ID NO: 125 - DNA, 20 bp, synthetic construct
  misc_feature 1..20: note = chemically synthesized
  source 1..20: mol_type = other DNA
tgaattaagggtactgaatt

SEQ ID NO: 126 - DNA, 20 bp, synthetic construct
  misc_feature 1..20: note = chemically synthesized
  source 1..20: mol_type = other DNA
gaattaagggtactgaatta

SEQ ID NO: 127 - DNA, 20 bp, synthetic construct
  misc_feature 1..20: note = chemically synthesized
  source 1..20: mol_type = other DNA
aattaagggtactgaattag

SEQ ID NO: 128 - DNA, 20 bp, synthetic construct
  misc_feature 1..20: note = chemically synthesized
  source 1..20: mol_type = other DNA
ggtactgaattaggggaaca

SEQ ID NO: 129 - DNA, 20 bp, synthetic construct
  misc_feature 1..20: note = chemically synthesized
  source 1..20: mol_type = other DNA
aggggaacatggtttctttt

SEQ ID NO: 130 - DNA, 20 bp, synthetic construct
  misc_feature 1..20: note = chemically synthesized
  source 1..20: mol_type = other DNA
ggggaacatggtttcttttt

SEQ ID NO: 131 - DNA, 20 bp, synthetic construct
  misc_feature 1..20: note = chemically synthesized
  source 1..20: mol_type = other DNA
gggaacatggtttctttttg

SEQ ID NO: 132 - DNA, 20 bp, synthetic construct
  misc_feature 1..20: note = chemically synthesized
  source 1..20: mol_type = other DNA
gaacatggtttctttttggg

SEQ ID NO: 133 - DNA, 20 bp, synthetic construct
  misc_feature 1..20: note = chemically synthesized
  source 1..20: mol_type = other DNA
atggtttctttttggggaga

SEQ ID NO: 134 - DNA, 20 bp, synthetic construct
  misc_feature 1..20: note = chemically synthesized
  source 1..20: mol_type = other DNA
gagatagaaatgtaaaattt

SEQ ID NO: 135 - DNA, 20 bp, synthetic construct
  misc_feature 1..20: note = chemically synthesized
  source 1..20: mol_type = other DNA
gaaatgtaaaattttggtaa

SEQ ID NO: 136 - DNA, 20 bp, synthetic construct
  misc_feature 1..20: note = chemically synthesized
  source 1..20: mol_type = other DNA
attttatttattttattttt

SEQ ID NO: 137 - DNA, 20 bp, synthetic construct
  misc_feature 1..20: note = chemically synthesized
  source 1..20: mol_type = other DNA
tatttattttatttttgaga

SEQ ID NO: 138 - DNA, 20 bp, synthetic construct
  misc_feature 1..20: note = chemically synthesized
  source 1..20: mol_type = other DNA
tttattttatttttgagacg

SEQ ID NO: 139 - DNA, 20 bp, synthetic construct
  misc_feature 1..20: note = chemically synthesized
  source 1..20: mol_type = other DNA
ggagtttcgctcttgttgcc

SEQ ID NO: 140 - DNA, 20 bp, synthetic construct
  misc_feature 1..20: note = chemically synthesized
  source 1..20: mol_type = other DNA
gagtttcgctcttgttgccc

SEQ ID NO: 141 - DNA, 20 bp, synthetic construct
  misc_feature 1..20: note = chemically synthesized
  source 1..20: mol_type = other DNA
ttcgctcttgttgcccaggc

SEQ ID NO: 142 - DNA, 20 bp, synthetic construct
  misc_feature 1..20: note = chemically synthesized
  source 1..20: mol_type = other DNA
cgctcttgttgcccaggctg

SEQ ID NO: 143 - DNA, 20 bp, synthetic construct
  misc_feature 1..20: note = chemically synthesized
  source 1..20: mol_type = other DNA
ttgcccaggctggagtgcaa

SEQ ID NO: 144 - DNA, 20 bp, synthetic construct
  misc_feature 1..20: note = chemically synthesized
  source 1..20: mol_type = other DNA
ggagtgcaatggcatgatct

SEQ ID NO: 145 - DNA, 20 bp, synthetic construct
  misc_feature 1..20: note = chemically synthesized
  source 1..20: mol_type = other DNA
tcaccacaacctccgcctcc

SEQ ID NO: 146 - DNA, 20 bp, synthetic construct
  misc_feature 1..20: note = chemically synthesized
  source 1..20: mol_type = other DNA
caccacaacctccgcctccc

SEQ ID NO: 147 - DNA, 20 bp, synthetic construct
  misc_feature 1..20: note = chemically synthesized
  source 1..20: mol_type = other DNA
aacctccgcctcccaggttc

SEQ ID NO: 148 - DNA, 20 bp, synthetic construct
  misc_feature 1..20: note = chemically synthesized
  source 1..20: mol_type = other DNA
ttcaagcgattctcctgtct

SEQ ID NO: 149 - DNA, 20 bp, synthetic construct
  misc_feature 1..20: note = chemically synthesized
  source 1..20: mol_type = other DNA
ttctcctgtctcagcttccc

SEQ ID NO: 150 - DNA, 20 bp, synthetic construct
  misc_feature 1..20: note = chemically synthesized
  source 1..20: mol_type = other DNA
tcctgtctcagcttcccgag

SEQ ID NO: 151 - DNA, 20 bp, synthetic construct
  misc_feature 1..20: note = chemically synthesized
  source 1..20: mol_type = other DNA
gtctcagcttcccgagtagc

SEQ ID NO: 152 - DNA, 20 bp, synthetic construct
  misc_feature 1..20: note = chemically synthesized
  source 1..20: mol_type = other DNA
ttcccgagtagctggaatta

SEQ ID NO: 153 - DNA, 20 bp, synthetic construct
  misc_feature 1..20: note = chemically synthesized
  source 1..20: mol_type = other DNA
tcccgagtagctggaattac

SEQ ID NO: 154 - DNA, 20 bp, synthetic construct
  misc_feature 1..20: note = chemically synthesized
  source 1..20: mol_type = other DNA
caggtgcatgccaccacacc

SEQ ID NO: 155 - DNA, 20 bp, synthetic construct
  misc_feature 1..20: note = chemically synthesized
  source 1..20: mol_type = other DNA
ccagctaatttttttttttt

SEQ ID NO: 156 - DNA, 20 bp, synthetic construct
  misc_feature 1..20: note = chemically synthesized
  source 1..20: mol_type = other DNA
aattttttttttttgagatg

SEQ ID NO: 157 - DNA, 20 bp, synthetic construct
  misc_feature 1..20: note = chemically synthesized
  source 1..20: mol_type = other DNA
cttgctcttgtctcccatgc

SEQ ID NO: 158 - DNA, 20 bp, synthetic construct
  misc_feature 1..20: note = chemically synthesized
  source 1..20: mol_type = other DNA
tgctcttgtctcccatgctg

SEQ ID NO: 159 - DNA, 20 bp, synthetic construct
  misc_feature 1..20: note = chemically synthesized
  source 1..20: mol_type = other DNA
tctcccatgctggagtgtga

SEQ ID NO: 160 - DNA, 20 bp, synthetic construct
  misc_feature 1..20: note = chemically synthesized
  source 1..20: mol_type = other DNA
ggagtgtgatggcacgatct

SEQ ID NO: 161 - DNA, 20 bp, synthetic construct
  misc_feature 1..20: note = chemically synthesized
  source 1..20: mol_type = other DNA
tcactgcaacctacgcctcc

SEQ ID NO: 162 - DNA, 20 bp, synthetic construct
  misc_feature 1..20: note = chemically synthesized
  source 1..20: mol_type = other DNA
cactgcaacctacgcctccc

SEQ ID NO: 163 - DNA, 20 bp, synthetic construct
  misc_feature 1..20: note = chemically synthesized
  source 1..20: mol_type = other DNA
aacctacgcctcccgggttc

SEQ ID NO: 164 - DNA, 20 bp, synthetic construct
  misc_feature 1..20: note = chemically synthesized
  source 1..20: mol_type = other DNA
ttcaagcgattctcctgcct

SEQ ID NO: 165 - DNA, 20 bp, synthetic construct
  misc_feature 1..20: note = chemically synthesized
  source 1..20: mol_type = other DNA
tcctgcctcagcctctaatg

SEQ ID NO: 166 - DNA, 20 bp, synthetic construct
  misc_feature 1..20: note = chemically synthesized
  source 1..20: mol_type = other DNA
gcctcagcctctaatgtagc

SEQ ID NO: 167 - DNA, 20 bp, synthetic construct
  misc_feature 1..20: note = chemically synthesized
  source 1..20: mol_type = other DNA
cctcagcctctaatgtagct

SEQ ID NO: 168 - DNA, 20 bp, synthetic construct
  misc_feature 1..20: note = chemically synthesized
  source 1..20: mol_type = other DNA
ctctaatgtagctgggatta

SEQ ID NO: 169 - DNA, 20 bp, synthetic construct
  misc_feature 1..20: note = chemically synthesized
  source 1..20: mol_type = other DNA
cagttgcctgctatcacgcc

SEQ ID NO: 170 - DNA, 20 bp, synthetic construct
  misc_feature 1..20: note = chemically synthesized
  source 1..20: mol_type = other DNA
ccggctaatttttgtatttt

SEQ ID NO: 171 - DNA, 20 bp, synthetic construct
  misc_feature 1..20: note = chemically synthesized
  source 1..20: mol_type = other DNA
taatttttgtatttttagta

SEQ ID NO: 172 - DNA, 20 bp, synthetic construct
  misc_feature 1..20: note = chemically synthesized
  source 1..20: mol_type = other DNA
ttttgtatttttagtaaaga

SEQ ID NO: 173 - DNA, 20 bp, synthetic construct
  misc_feature 1..20: note = chemically synthesized
  source 1..20: mol_type = other DNA
tttgtatttttagtaaagac

SEQ ID NO: 174 - DNA, 20 bp, synthetic construct
  misc_feature 1..20: note = chemically synthesized
  source 1..20: mol_type = other DNA
ttgtatttttagtaaagacg

SEQ ID NO: 175 - DNA, 20 bp, synthetic construct
  misc_feature 1..20: note = chemically synthesized
  source 1..20: mol_type = other DNA
aagacggggtttcaccatgt

SEQ ID NO: 176 - DNA, 20 bp, synthetic construct
  misc_feature 1..20: note = chemically synthesized
  source 1..20: mol_type = other DNA
cggggtttcaccatgttggc

SEQ ID NO: 177 - DNA, 20 bp, synthetic construct
  misc_feature 1..20: note = chemically synthesized
  source 1..20: mol_type = other DNA
ggggtttcaccatgttggcc

SEQ ID NO: 178 - DNA, 20 bp, synthetic construct
  misc_feature 1..20: note = chemically synthesized
  source 1..20: mol_type = other DNA
tttcaccatgttggccaggc

SEQ ID NO: 179 - DNA, 20 bp, synthetic construct
  misc_feature 1..20: note = chemically synthesized
  source 1..20: mol_type = other DNA
tggtctcgaacccctgatct

SEQ ID NO: 180 - DNA, 20 bp, synthetic construct
  misc_feature 1..20: note = chemically synthesized
  source 1..20: mol_type = other DNA
ggtctcgaacccctgatctc

SEQ ID NO: 181 - DNA, 20 bp, synthetic construct
  misc_feature 1..20: note = chemically synthesized
  source 1..20: mol_type = other DNA
ctcaggtgatctgccttcct

SEQ ID NO: 182 - DNA, 20 bp, synthetic construct
  misc_feature 1..20: note = chemically synthesized
  source 1..20: mol_type = other DNA
ctgccttcctcggccgccca

SEQ ID NO: 183 - DNA, 20 bp, synthetic construct
  misc_feature 1..20: note = chemically synthesized
  source 1..20: mol_type = other DNA
tcctcggccgcccaaagtgc

SEQ ID NO: 184 - DNA, 20 bp, synthetic construct
  misc_feature 1..20: note = chemically synthesized
  source 1..20: mol_type = other DNA
cctcggccgcccaaagtgct

SEQ ID NO: 185 - DNA, 20 bp, synthetic construct
  misc_feature 1..20: note = chemically synthesized
  source 1..20: mol_type = other DNA
gcccaaagtgctgggattac

SEQ ID NO: 186 - DNA, 20 bp, synthetic construct
  misc_feature 1..20: note = chemically synthesized
  source 1..20: mol_type = other DNA
agtgctgggattacaagcgt

SEQ ID NO: 187 - DNA, 20 bp, synthetic construct
  misc_feature 1..20: note = chemically synthesized
  source 1..20: mol_type = other DNA
gattacaagcgtgagccact

SEQ ID NO: 188 - DNA, 20 bp, synthetic construct
  misc_feature 1..20: note = chemically synthesized
  source 1..20: mol_type = other DNA
acaagcgtgagccactgagc

SEQ ID NO: 189 - DNA, 20 bp, synthetic construct
  misc_feature 1..20: note = chemically synthesized
  source 1..20: mol_type = other DNA
caagcgtgagccactgagcc

SEQ ID NO: 190 - DNA, 20 bp, synthetic construct
  misc_feature 1..20: note = chemically synthesized
  source 1..20: mol_type = other DNA
gccaatttttgcattttaca

SEQ ID NO: 191 - DNA, 20 bp, synthetic construct
  misc_feature 1..20: note = chemically synthesized
  source 1..20: mol_type = other DNA
ttttacatagatgaattata

SEQ ID NO: 192 - DNA, 20 bp, synthetic construct
  misc_feature 1..20: note = chemically synthesized
  source 1..20: mol_type = other DNA
tcttaccaaaaattgaaaaa

SEQ ID NO: 193 - DNA, 20 bp, synthetic construct
  misc_feature 1..20: note = chemically synthesized
  source 1..20: mol_type = other DNA
cttaccaaaaattgaaaaaa

SEQ ID NO: 194 - DNA, 20 bp, synthetic construct
  misc_feature 1..20: note = chemically synthesized
  source 1..20: mol_type = other DNA
caaaaattgaaaaaaaggaa

SEQ ID NO: 195 - DNA, 20 bp, synthetic construct
  misc_feature 1..20: note = chemically synthesized
  source 1..20: mol_type = other DNA
aaaaaaaggaatagtactat

SEQ ID NO: 196 - DNA, 20 bp, synthetic construct
  misc_feature 1..20: note = chemically synthesized
  source 1..20: mol_type = other DNA
ttattgtatctgtttgccta

SEQ ID NO: 197 - DNA, 20 bp, synthetic construct
  misc_feature 1..20: note = chemically synthesized
  source 1..20: mol_type = other DNA
gtatctgtttgcctacagtc

SEQ ID NO: 198 - DNA, 20 bp, synthetic construct
  misc_feature 1..20: note = chemically synthesized
  source 1..20: mol_type = other DNA
tatctgtttgcctacagtcg

SEQ ID NO: 199 - DNA, 20 bp, synthetic construct
  misc_feature 1..20: note = chemically synthesized
  source 1..20: mol_type = other DNA
ataatgcctgttgaatttgc

SEQ ID NO: 200 - DNA, 20 bp, synthetic construct
  misc_feature 1..20: note = chemically synthesized
  source 1..20: mol_type = other DNA
ttgaatttgctagatatgta

SEQ ID NO: 201 - DNA, 20 bp, synthetic construct
  misc_feature 1..20: note = chemically synthesized
  source 1..20: mol_type = other DNA
tgaatttgctagatatgtaa

SEQ ID NO: 202 - DNA, 20 bp, synthetic construct
  misc_feature 1..20: note = chemically synthesized
  source 1..20: mol_type = other DNA
ttgctagatatgtaaaggtt

SEQ ID NO: 203 - DNA, 20 bp, synthetic construct
  misc_feature 1..20: note = chemically synthesized
  source 1..20: mol_type = other DNA
gctagatatgtaaaggtttg

SEQ ID NO: 204 - DNA, 20 bp, synthetic construct
  misc_feature 1..20: note = chemically synthesized
  source 1..20: mol_type = other DNA
tgtaaaggtttggagcaaat

SEQ ID NO: 205 - DNA, 20 bp, synthetic construct
  misc_feature 1..20: note = chemically synthesized
  source 1..20: mol_type = other DNA
gtaaaggtttggagcaaatc

SEQ ID NO: 206 - DNA, 20 bp, synthetic construct
  misc_feature 1..20: note = chemically synthesized
  source 1..20: mol_type = other DNA
taatattgtttgaaatgtct

SEQ ID NO: 207 - DNA, 20 bp, synthetic construct
  misc_feature 1..20: note = chemically synthesized
  source 1..20: mol_type = other DNA
aatattgtttgaaatgtcta

SEQ ID NO: 208 - DNA, 20 bp, synthetic construct
  misc_feature 1..20: note = chemically synthesized
  source 1..20: mol_type = other DNA
aataattcccaaacttcgtt

SEQ ID NO: 209 - DNA, 20 bp, synthetic construct
  misc_feature 1..20: note = chemically synthesized
  source 1..20: mol_type = other DNA
ataattcccaaacttcgttg

SEQ ID NO: 210 - DNA, 20 bp, synthetic construct
  misc_feature 1..20: note = chemically synthesized
  source 1..20: mol_type = other DNA
taattcccaaacttcgttga

SEQ ID NO: 211 - DNA, 20 bp, synthetic construct
  misc_feature 1..20: note = chemically synthesized
  source 1..20: mol_type = other DNA
attcccaaacttcgttgagg

SEQ ID NO: 212 - DNA, 20 bp, synthetic construct
  misc_feature 1..20: note = chemically synthesized
  source 1..20: mol_type = other DNA
cccaaacttcgttgagggag

SEQ ID NO: 213 - DNA, 20 bp, synthetic construct
  misc_feature 1..20: note = chemically synthesized
  source 1..20: mol_type = other DNA
ccaaacttcgttgagggaga

SEQ ID NO: 214 - DNA, 20 bp, synthetic construct
  misc_feature 1..20: note = chemically synthesized
  source 1..20: mol_type = other DNA
acttcgttgagggagaagga

SEQ ID NO: 215 - DNA, 20 bp, synthetic construct
  misc_feature 1..20: note = chemically synthesized
  source 1..20: mol_type = other DNA
gcttttaaaatcccattgcc

SEQ ID NO: 216 - DNA, 20 bp, synthetic construct
  misc_feature 1..20: note = chemically synthesized
  source 1..20: mol_type = other DNA
cttttaaaatcccattgccc

SEQ ID NO: 217 - DNA, 20 bp, synthetic construct
  misc_feature 1..20: note = chemically synthesized
  source 1..20: mol_type = other DNA
ttaaaatcccattgcccagg

SEQ ID NO: 218 - DNA, 20 bp, synthetic construct
  misc_feature 1..20: note = chemically synthesized
  source 1..20: mol_type = other DNA
gtggcatcccatactgttac

SEQ ID NO: 219 - DNA, 20 bp, synthetic construct
  misc_feature 1..20: note = chemically synthesized
  source 1..20: mol_type = other DNA
tggcatcccatactgttact

SEQ ID NO: 220 - DNA, 20 bp, synthetic construct
  misc_feature 1..20: note = chemically synthesized
  source 1..20: mol_type = other DNA
tgttactgggaattatgcat

SEQ ID NO: 221 - DNA, 20 bp, synthetic construct
  misc_feature 1..20: note = chemically synthesized
  source 1..20: mol_type = other DNA
gttactgggaattatgcatt

SEQ ID NO: 222 - DNA, 20 bp, synthetic construct
  misc_feature 1..20: note = chemically synthesized
  source 1..20: mol_type = other DNA
ctgggaattatgcattggga

SEQ ID NO: 223 - DNA, 20 bp, synthetic construct
  misc_feature 1..20: note = chemically synthesized
  source 1..20: mol_type = other DNA
ttgggatggatcctttaacc

SEQ ID NO: 224 - DNA, 20 bp, synthetic construct
  misc_feature 1..20: note = chemically synthesized
  source 1..20: mol_type = other DNA
tgggatggatcctttaaccg

SEQ ID NO: 225 - DNA, 20 bp, synthetic construct
  misc_feature 1..20: note = chemically synthesized
  source 1..20: mol_type = other DNA
ggatggatcctttaaccgag

SEQ ID NO: 226 - DNA, 20 bp, synthetic construct
  misc_feature 1..20: note = chemically synthesized
  source 1..20: mol_type = other DNA
tttaaccgaggagattatta

SEQ ID NO: 227 - DNA, 20 bp, synthetic construct
  misc_feature 1..20: note = chemically synthesized
  source 1..20: mol_type = other DNA
accgaggagattattatagc

SEQ ID NO: 228 - DNA, 20 bp, synthetic construct
  misc_feature 1..20: note = chemically synthesized
  source 1..20: mol_type = other DNA
cgaggagattattatagccg

SEQ ID NO: 229 - DNA, 20 bp, synthetic construct
  misc_feature 1..20: note = chemically synthesized
  source 1..20: mol_type = other DNA
ttatagccggagctctgaac

SEQ ID NO: 230 - DNA, 20 bp, synthetic construct
  misc_feature 1..20: note = chemically synthesized
  source 1..20: mol_type = other DNA
gagctctgaaccagcaatct

SEQ ID NO: 231 - DNA, 20 bp, synthetic construct
  misc_feature 1..20: note = chemically synthesized
  source 1..20: mol_type = other DNA
agcaatctcagttcttgtga

SEQ ID NO: 232 - DNA, 20 bp, synthetic construct
  misc_feature 1..20: note = chemically synthesized
  source 1..20: mol_type = other DNA
atctcagttcttgtgatagt

SEQ ID NO: 233 - DNA, 20 bp, synthetic construct
  misc_feature 1..20: note = chemically synthesized
  source 1..20: mol_type = other DNA
agttcttgtgatagtgagca

SEQ ID NO: 234 - DNA, 20 bp, synthetic construct
  misc_feature 1..20: note = chemically synthesized
  source 1..20: mol_type = other DNA
acaaactaacaccaaaatgc

SEQ ID NO: 235 - DNA, 20 bp, synthetic construct
  misc_feature 1..20: note = chemically synthesized
  source 1..20: mol_type = other DNA
aacaccaaaatgcaagctta

SEQ ID NO: 236 - DNA, 20 bp, synthetic construct
  misc_feature 1..20: note = chemically synthesized
  source 1..20: mol_type = other DNA
caaaatgcaagcttaaagca

SEQ ID NO: 237 - DNA, 20 bp, synthetic construct
  misc_feature 1..20: note = chemically synthesized
  source 1..20: mol_type = other DNA
gcttaaagcaaagtttattg

SEQ ID NO: 238 - DNA, 20 bp, synthetic construct
  misc_feature 1..20: note = chemically synthesized
  source 1..20: mol_type = other DNA
gaagcacaataatacactct

SEQ ID NO: 239 - DNA, 20 bp, synthetic construct
  misc_feature 1..20: note = chemically synthesized
  source 1..20: mol_type = other DNA
aagcacaataatacactctg

SEQ ID NO: 240 - DNA, 20 bp, synthetic construct
  misc_feature 1..20: note = chemically synthesized
  source 1..20: mol_type = other DNA
agcacaataatacactctga

SEQ ID NO: 241 - DNA, 20 bp, synthetic construct
  misc_feature 1..20: note = chemically synthesized
  source 1..20: mol_type = other DNA
caataatacactctgaggga

SEQ ID NO: 242 - DNA, 20 bp, synthetic construct
  misc_feature 1..20: note = chemically synthesized
  source 1..20: mol_type = other DNA
taatacactctgagggacag

SEQ ID NO: 243 - DNA, 20 bp, synthetic construct
  misc_feature 1..20: note = chemically synthesized
  source 1..20: mol_type = other DNA
aatacactctgagggacagc

SEQ ID NO: 244 - DNA, 20 bp, synthetic construct
  misc_feature 1..20: note = chemically synthesized
  source 1..20: mol_type = other DNA
acagcgggcttatttctgcg

SEQ ID NO: 245 - DNA, 20 bp, synthetic construct
  misc_feature 1..20: note = chemically synthesized
  source 1..20: mol_type = other DNA
ttatttctgcgaagtgaact

SEQ ID NO: 246 - DNA, 20 bp, synthetic construct
  misc_feature 1..20: note = chemically synthesized
  source 1..20: mol_type = other DNA
gtgaactcagcacttcttta

SEQ ID NO: 247 - DNA, 20 bp, synthetic construct
  misc_feature 1..20: note = chemically synthesized
  source 1..20: mol_type = other DNA
gaactcagcacttctttaca

SEQ ID NO: 248 - DNA, 20 bp, synthetic construct
  misc_feature 1..20: note = chemically synthesized
  source 1..20: mol_type = other DNA
agcacttctttacagagctc

SEQ ID NO: 249 - DNA, 20 bp, synthetic construct
  misc_feature 1..20: note = chemically synthesized
  source 1..20: mol_type = other DNA
gcacttctttacagagctca

SEQ ID NO: 250 - DNA, 20 bp, synthetic construct
  misc_feature 1..20: note = chemically synthesized
  source 1..20: mol_type = other DNA
cagagctcaaggtgctttta

SEQ ID NO: 251 - DNA, 20 bp, synthetic construct
  misc_feature 1..20: note = chemically synthesized
  source 1..20: mol_type = other DNA
agagctcaaggtgcttttat

SEQ ID NO: 252 - DNA, 20 bp, synthetic construct
  misc_feature 1..20: note = chemically synthesized
  source 1..20: mol_type = other DNA
gagctcaaggtgcttttatg

SEQ ID NO: 253 - DNA, 20 bp, synthetic construct
  misc_feature 1..20: note = chemically synthesized
  source 1..20: mol_type = other DNA
aggtgcttttatggggtttg

SEQ ID NO: 254 - DNA, 20 bp, synthetic construct
  misc_feature 1..20: note = chemically synthesized
  source 1..20: mol_type = other DNA
ggtgcttttatggggtttgt

SEQ ID NO: 255 - DNA, 20 bp, synthetic construct
  misc_feature 1..20: note = chemically synthesized
  source 1..20: mol_type = other DNA
gtgcttttatggggtttgtg

SEQ ID NO: 256 - DNA, 20 bp, synthetic construct
  misc_feature 1..20: note = chemically synthesized
  source 1..20: mol_type = other DNA
gcttttatggggtttgtggg

SEQ ID NO: 257 - DNA, 20 bp, synthetic construct
  misc_feature 1..20: note = chemically synthesized
  source 1..20: mol_type = other DNA
cttttatggggtttgtgggg

SEQ ID NO: 258 - DNA, 20 bp, synthetic construct
  misc_feature 1..20: note = chemically synthesized
  source 1..20: mol_type = other DNA
tttatggggtttgtggggag

SEQ ID NO: 259 - DNA, 20 bp, synthetic construct
  misc_feature 1..20: note = chemically synthesized
  source 1..20: mol_type = other DNA
ggggtttgtggggaggagtt

SEQ ID NO: 260 - DNA, 20 bp, synthetic construct
  misc_feature 1..20: note = chemically synthesized
  source 1..20: mol_type = other DNA
gggtttgtggggaggagttg

SEQ ID NO: 261 - DNA, 20 bp, synthetic construct
  misc_feature 1..20: note = chemically synthesized
  source 1..20: mol_type = other DNA
tgtggggaggagttgaggtt

SEQ ID NO: 262 - DNA, 20 bp, synthetic construct
  misc_feature 1..20: note = chemically synthesized
  source 1..20: mol_type = other DNA
gtggggaggagttgaggttt

SEQ ID NO: 263 - DNA, 20 bp, synthetic construct
  misc_feature 1..20: note = chemically synthesized
  source 1..20: mol_type = other DNA
ttgaggtttgggctgtatct

SEQ ID NO: 264 - DNA, 20 bp, synthetic construct
  misc_feature 1..20: note = chemically synthesized
  source 1..20: mol_type = other DNA
tttgggctgtatctgagtga

SEQ ID NO: 265 - DNA, 20 bp, synthetic construct
  misc_feature 1..20: note = chemically synthesized
  source 1..20: mol_type = other DNA
ttgggctgtatctgagtgac

SEQ ID NO: 266 - DNA, 20 bp, synthetic construct
  misc_feature 1..20: note = chemically synthesized
  source 1..20: mol_type = other DNA
aggatgatgttatttgattg

SEQ ID NO: 267 - DNA, 20 bp, synthetic construct
  misc_feature 1..20: note = chemically synthesized
  source 1..20: mol_type = other DNA
tgttatttgattgaagtgta

SEQ ID NO: 268 - DNA, 20 bp, synthetic construct
  misc_feature 1..20: note = chemically synthesized
  source 1..20: mol_type = other DNA
atctaaaattaaactgtgca

SEQ ID NO: 269 - DNA, 20 bp, synthetic construct
  misc_feature 1..20: note = chemically synthesized
  source 1..20: mol_type = other DNA
ggtcttacctataatttgtt

SEQ ID NO: 270 - DNA, 20 bp, synthetic construct
  misc_feature 1..20: note = chemically synthesized
  source 1..20: mol_type = other DNA
tacctataatttgttaagaa

SEQ ID NO: 271 - DNA, 20 bp, synthetic construct
  misc_feature 1..20: note = chemically synthesized
  source 1..20: mol_type = other DNA
atttgttaagaaaagcctcc

SEQ ID NO: 272 - DNA, 20 bp, synthetic construct
  misc_feature 1..20: note = chemically synthesized
  source 1..20: mol_type = other DNA
tttgttaagaaaagcctccc

SEQ ID NO: 273 - DNA, 20 bp, synthetic construct
  misc_feature 1..20: note = chemically synthesized
  source 1..20: mol_type = other DNA
ttgttaagaaaagcctccca

SEQ ID NO: 274 - DNA, 20 bp, synthetic construct
  misc_feature 1..20: note = chemically synthesized
  source 1..20: mol_type = other DNA
taagaaaagcctcccaggga

SEQ ID NO: 275 - DNA, 20 bp, synthetic construct
  misc_feature 1..20: note = chemically synthesized
  source 1..20: mol_type = other DNA
aagaaaagcctcccagggat

SEQ ID NO: 276 - DNA, 20 bp, synthetic construct
  misc_feature 1..20: note = chemically synthesized
  source 1..20: mol_type = other DNA
agaaaagcctcccagggatg

SEQ ID NO: 277 - DNA, 20 bp, synthetic construct
  misc_feature 1..20: note = chemically synthesized
  source 1..20: mol_type = other DNA
gaaaagcctcccagggatgg

SEQ ID NO: 278 - DNA, 20 bp, synthetic construct
  misc_feature 1..20: note = chemically synthesized
  source 1..20: mol_type = other DNA
aaaagcctcccagggatggg

SEQ ID NO: 279 - DNA, 20 bp, synthetic construct
  misc_feature 1..20: note = chemically synthesized
  source 1..20: mol_type = other DNA
aaagcctcccagggatgggg

SEQ ID NO: 280 - DNA, 20 bp, synthetic construct
  misc_feature 1..20: note = chemically synthesized
  source 1..20: mol_type = other DNA
tgtaaattctattataatga

SEQ ID NO: 281 - DNA, 20 bp, synthetic construct
  misc_feature 1..20: note = chemically synthesized
  source 1..20: mol_type = other DNA
taatgatggcatgatgaact

SEQ ID NO: 282 - DNA, 20 bp, synthetic construct
  misc_feature 1..20: note = chemically synthesized
  source 1..20: mol_type = other DNA
aatgatggcatgatgaactt

SEQ ID NO: 283 - DNA, 20 bp, synthetic construct
  misc_feature 1..20: note = chemically synthesized
  source 1..20: mol_type = other DNA
atgatggcatgatgaacttg

SEQ ID NO: 284 - DNA, 20 bp, synthetic construct
  misc_feature 1..20: note = chemically synthesized
  source 1..20: mol_type = other DNA
atgaacttggggtgaacttg

SEQ ID NO: 285 - DNA, 20 bp, synthetic construct
  misc_feature 1..20: note = chemically synthesized
  source 1..20: mol_type = other DNA
acttggggtgaacttgaaga

SEQ ID NO: 286 - DNA, 20 bp, synthetic construct
  misc_feature 1..20: note = chemically synthesized
  source 1..20: mol_type = other DNA
cttggggtgaacttgaagac

SEQ ID NO: 287 - DNA, 20 bp, synthetic construct
  misc_feature 1..20: note = chemically synthesized
  source 1..20: mol_type = other DNA
aagacaggcttttgtgttgt

SEQ ID NO: 288 - DNA, 20 bp, synthetic construct
  misc_feature 1..20: note = chemically synthesized
  source 1..20: mol_type = other DNA
agacaggcttttgtgttgtt

SEQ ID NO: 289 - DNA, 20 bp, synthetic construct
  misc_feature 1..20: note = chemically synthesized
  source 1..20: mol_type = other DNA
ttgttgggcatgtgccacct

SEQ ID NO: 290 - DNA, 20 bp, synthetic construct
  misc_feature 1..20: note = chemically synthesized
  source 1..20: mol_type = other DNA
tgttgggcatgtgccacctt

SEQ ID NO: 291 - DNA, 20 bp, synthetic construct
  misc_feature 1..20: note = chemically synthesized
  source 1..20: mol_type = other DNA
gttgggcatgtgccacctta

SEQ ID NO: 292 - DNA, 20 bp, synthetic construct
  misc_feature 1..20: note = chemically synthesized
  source 1..20: mol_type = other DNA
taccctcctttctctttctc

SEQ ID NO: 293 - DNA, 20 bp, synthetic construct
  misc_feature 1..20: note = chemically synthesized
  source 1..20: mol_type = other DNA
accctcctttctctttctcc

SEQ ID NO: 294 - DNA, 20 bp, synthetic construct
  misc_feature 1..20: note = chemically synthesized
  source 1..20: mol_type = other DNA
tctctttctccaggatattt

SEQ ID NO: 295 - DNA, 20 bp, synthetic construct
  misc_feature 1..20: note = chemically synthesized
  source 1..20: mol_type = other DNA
tctccaggatattttggcca

SEQ ID NO: 296 - DNA, 20 bp, synthetic construct
  misc_feature 1..20: note = chemically synthesized
  source 1..20: mol_type = other DNA
ttatcataaactccatccct

SEQ ID NO: 297 - DNA, 20 bp, synthetic construct
  misc_feature 1..20: note = chemically synthesized
  source 1..20: mol_type = other DNA
tatcataaactccatccctt

SEQ ID NO: 298 - DNA, 20 bp, synthetic construct
  misc_feature 1..20: note = chemically synthesized
  source 1..20: mol_type = other DNA
atcataaactccatccctta

SEQ ID NO: 299 - DNA, 20 bp, synthetic construct
  misc_feature 1..20: note = chemically synthesized
  source 1..20: mol_type = other DNA
ataaactccatcccttaggg

SEQ ID NO: 300 - DNA, 20 bp, synthetic construct
  misc_feature 1..20: note = chemically synthesized
  source 1..20: mol_type = other DNA
tccatcccttagggtggcat

SEQ ID NO: 301 - DNA, 20 bp, synthetic construct
  misc_feature 1..20: note = chemically synthesized
  source 1..20: mol_type = other DNA
ccatcccttagggtggcatt

SEQ ID NO: 302 - DNA, 20 bp, synthetic construct
  misc_feature 1..20: note = chemically synthesized
  source 1..20: mol_type = other DNA
catcccttagggtggcatta

SEQ ID NO: 303 - DNA, 20 bp, synthetic construct
  misc_feature 1..20: note = chemically synthesized
  source 1..20: mol_type = other DNA
cccttagggtggcattaggg

SEQ ID NO: 304 - DNA, 20 bp, synthetic construct
  misc_feature 1..20: note = chemically synthesized
  source 1..20: mol_type = other DNA
gggtggcattagggtagtct

SEQ ID NO: 305 - DNA, 20 bp, synthetic construct
  misc_feature 1..20: note = chemically synthesized
  source 1..20: mol_type = other DNA
ggtggcattagggtagtctt

SEQ ID NO: 306 - DNA, 20 bp, synthetic construct
  misc_feature 1..20: note = chemically synthesized
  source 1..20: mol_type = other DNA
ggtagtcttgggcctgaatt

SEQ ID NO: 307 - DNA, 20 bp, synthetic construct
  misc_feature 1..20: note = chemically synthesized
  source 1..20: mol_type = other DNA
gtagtcttgggcctgaattt

SEQ ID NO: 308 - DNA, 20 bp, synthetic construct
  misc_feature 1..20: note = chemically synthesized
  source 1..20: mol_type = other DNA
gtcttgggcctgaatttagg

SEQ ID NO: 309 - DNA, 20 bp, synthetic construct
  misc_feature 1..20: note = chemically synthesized
  source 1..20: mol_type = other DNA
tcttgggcctgaatttaggt

SEQ ID NO: 310 - DNA, 20 bp, synthetic construct
  misc_feature 1..20: note = chemically synthesized
  source 1..20: mol_type = other DNA
gggcctgaatttaggtgggc

SEQ ID NO: 311 - DNA, 20 bp, synthetic construct
  misc_feature 1..20: note = chemically synthesized
  source 1..20: mol_type = other DNA
cctgaatttaggtgggccag

SEQ ID NO: 312 - DNA, 20 bp, synthetic construct
  misc_feature 1..20: note = chemically synthesized
  source 1..20: mol_type = other DNA
aggtgggccagtggctgtct

SEQ ID NO: 313 - DNA, 20 bp, synthetic construct
  misc_feature 1..20: note = chemically synthesized
  source 1..20: mol_type = other DNA
gccagtggctgtcttagtga

SEQ ID NO: 314 - DNA, 20 bp, synthetic construct
  misc_feature 1..20: note = chemically synthesized
  source 1..20: mol_type = other DNA
ctaacaattacccattaaat

SEQ ID NO: 315 - DNA, 20 bp, synthetic construct
  misc_feature 1..20: note = chemically synthesized
  source 1..20: mol_type = other DNA
acccattaaatcagtgtgtc

SEQ ID NO: 316 - DNA, 20 bp, synthetic construct
  misc_feature 1..20: note = chemically synthesized
  source 1..20: mol_type = other DNA
cccattaaatcagtgtgtct

SEQ ID NO: 317 - DNA, 20 bp, synthetic construct
  misc_feature 1..20: note = chemically synthesized
  source 1..20: mol_type = other DNA
ccattaaatcagtgtgtctg

SEQ ID NO: 318 - DNA, 20 bp, synthetic construct
  misc_feature 1..20: note = chemically synthesized
  source 1..20: mol_type = other DNA
taaatcagtgtgtctggggt

SEQ ID NO: 319 - DNA, 20 bp, synthetic construct
  misc_feature 1..20: note = chemically synthesized
  source 1..20: mol_type = other DNA
aaatcagtgtgtctggggtt

SEQ ID NO: 320 - DNA, 20 bp, synthetic construct
  misc_feature 1..20: note = chemically synthesized
  source 1..20: mol_type = other DNA
atcagtgtgtctggggttag

SEQ ID NO: 321 - DNA, 20 bp, synthetic construct
  misc_feature 1..20: note = chemically synthesized
  source 1..20: mol_type = other DNA
agtgtgtctggggttaggag

SEQ ID NO: 322 - DNA, 20 bp, synthetic construct
  misc_feature 1..20: note = chemically synthesized
  source 1..20: mol_type = other DNA
gtgtgtctggggttaggagc

SEQ ID NO: 323 - DNA, 20 bp, synthetic construct
  misc_feature 1..20: note = chemically synthesized
  source 1..20: mol_type = other DNA
caatatgtttaatcattctc

SEQ ID NO: 324 - DNA, 20 bp, synthetic construct
  misc_feature 1..20: note = chemically synthesized
  source 1..20: mol_type = other DNA
cagataatcccaatactgta

SEQ ID NO: 325 - DNA, 20 bp, synthetic construct
  misc_feature 1..20: note = chemically synthesized
  source 1..20: mol_type = other DNA
aaagtttgtgaaacacttgt

SEQ ID NO: 326 - DNA, 20 bp, synthetic construct
  misc_feature 1..20: note = chemically synthesized
  source 1..20: mol_type = other DNA
tgtcagataattcaattatg

SEQ ID NO: 327 - DNA, 20 bp, synthetic construct
  misc_feature 1..20: note = chemically synthesized
  source 1..20: mol_type = other DNA
gtcagataattcaattatga

SEQ ID NO: 328 - DNA, 20 bp, synthetic construct
  misc_feature 1..20: note = chemically synthesized
  source 1..20: mol_type = other DNA
taattcaattatgaaggctg

SEQ ID NO: 329 - DNA, 20 bp, synthetic construct
  misc_feature 1..20: note = chemically synthesized
  source 1..20: mol_type = other DNA
ttcaattatgaaggctgtgg

SEQ ID NO: 330 - DNA, 20 bp, synthetic construct
  misc_feature 1..20: note = chemically synthesized
  source 1..20: mol_type = other DNA
tcaattatgaaggctgtgga

SEQ ID NO: 331 - DNA, 20 bp, synthetic construct
  misc_feature 1..20: note = chemically synthesized
  source 1..20: mol_type = other DNA
gaaggctgtggaaggtgttt

SEQ ID NO: 332 - DNA, 20 bp, synthetic construct
  misc_feature 1..20: note = chemically synthesized
  source 1..20: mol_type = other DNA
ggctgtggaaggtgtttcag

SEQ ID NO: 333 - DNA, 20 bp, synthetic construct
  misc_feature 1..20: note = chemically synthesized
  source 1..20: mol_type = other DNA
gctgtggaaggtgtttcagt

SEQ ID NO: 334 - DNA, 20 bp, synthetic construct
  misc_feature 1..20: note = chemically synthesized
  source 1..20: mol_type = other DNA
gtgtttcagtaggatctaat

SEQ ID NO: 335 - DNA, 20 bp, synthetic construct
  misc_feature 1..20: note = chemically synthesized
  source 1..20: mol_type = other DNA
aatcaaaaaacaaaatgaaa

SEQ ID NO: 336 - DNA, 20 bp, synthetic construct
  misc_feature 1..20: note = chemically synthesized
  source 1..20: mol_type = other DNA
tgaaaaagctttatatttct

SEQ ID NO: 337 - DNA, 20 bp, synthetic construct
  misc_feature 1..20: note = chemically synthesized
  source 1..20: mol_type = other DNA
tttatatttctaagtcaaat

SEQ ID NO: 338 - DNA, 20 bp, synthetic construct
  misc_feature 1..20: note = chemically synthesized
  source 1..20: mol_type = other DNA
ttctaagtcaaataagacat

SEQ ID NO: 339 - DNA, 20 bp, synthetic construct
  misc_feature 1..20: note = chemically synthesized
  source 1..20: mol_type = other DNA
aagtcaaataagacataagt

SEQ ID NO: 340 - DNA, 20 bp, synthetic construct
  misc_feature 1..20: note = chemically synthesized
  source 1..20: mol_type = other DNA
aataagacataagttggtct

SEQ ID NO: 341 - DNA, 20 bp, synthetic construct
  misc_feature 1..20: note = chemically synthesized
  source 1..20: mol_type = other DNA
ataagacataagttggtcta

SEQ ID NO: 342 - DNA, 20 bp, synthetic construct
  misc_feature 1..20: note = chemically synthesized
  source 1..20: mol_type = other DNA
acataagttggtctaaggtt

SEQ ID NO: 343 - DNA, 20 bp, synthetic construct
  misc_feature 1..20: note = chemically synthesized
  source 1..20: mol_type = other DNA
cataaatatttaaatatcta

SEQ ID NO: 344 - DNA, 20 bp, synthetic construct
  misc_feature 1..20: note = chemically synthesized
  source 1..20: mol_type = other DNA
atatttaaatatctaaagtt

SEQ ID NO: 345 - DNA, 20 bp, synthetic construct
  misc_feature 1..20: note = chemically synthesized
  source 1..20: mol_type = other DNA
taaatatctaaagttcagat

SEQ ID NO: 346 - DNA, 20 bp, synthetic construct
  misc_feature 1..20: note = chemically synthesized
  source 1..20: mol_type = other DNA
gttcagatcagaacattgcg

SEQ ID NO: 347 - DNA, 20 bp, synthetic construct
  misc_feature 1..20: note = chemically synthesized
  source 1..20: mol_type = other DNA
cccaatcaacaacacccctt

SEQ ID NO: 348 - DNA, 20 bp, synthetic construct
  misc_feature 1..20: note = chemically synthesized
  source 1..20: mol_type = other DNA
ccaatcaacaacaccccttc

SEQ ID NO: 349 - DNA, 20 bp, synthetic construct
  misc_feature 1..20: note = chemically synthesized
  source 1..20: mol_type = other DNA
cccttcaggatttaaaaacc

SEQ ID NO: 350 - DNA, 20 bp, synthetic construct
  misc_feature 1..20: note = chemically synthesized
  source 1..20: mol_type = other DNA
ccttcaggatttaaaaacca

SEQ ID NO: 351 - DNA, 20 bp, synthetic construct
  misc_feature 1..20: note = chemically synthesized
  source 1..20: mol_type = other DNA
cttcaggatttaaaaaccaa

SEQ ID NO: 352 - DNA, 20 bp, synthetic construct
  misc_feature 1..20: note = chemically synthesized
  source 1..20: mol_type = other DNA
ttcaggatttaaaaaccaag

SEQ ID NO: 353 - DNA, 20 bp, synthetic construct
  misc_feature 1..20: note = chemically synthesized
  source 1..20: mol_type = other DNA
tcaggatttaaaaaccaagg

SEQ ID NO: 354 - DNA, 20 bp, synthetic construct
  misc_feature 1..20: note = chemically synthesized
  source 1..20: mol_type = other DNA
ttaaaaaccaagggggacac

SEQ ID NO: 355 - DNA, 20 bp, synthetic construct
  misc_feature 1..20: note = chemically synthesized
  source 1..20: mol_type = other DNA
aagggggacactggatcacc

SEQ ID NO: 356 - DNA, 20 bp, synthetic construct
  misc_feature 1..20: note = chemically synthesized
  source 1..20: mol_type = other DNA
tggatcacctagtgtttcac

SEQ ID NO: 357 - DNA, 20 bp, synthetic construct
  misc_feature 1..20: note = chemically synthesized
  source 1..20: mol_type = other DNA
atcacctagtgtttcacaag

SEQ ID NO: 358 - DNA, 20 bp, synthetic construct
  misc_feature 1..20: note = chemically synthesized
  source 1..20: mol_type = other DNA
tcacctagtgtttcacaagc

SEQ ID NO: 359 - DNA, 20 bp, synthetic construct
  misc_feature 1..20: note = chemically synthesized
  source 1..20: mol_type = other DNA
caagcaggtaccttctgctg

SEQ ID NO: 360 - DNA, 20 bp, synthetic construct
  misc_feature 1..20: note = chemically synthesized
  source 1..20: mol_type = other DNA
aagcaggtaccttctgctgt

SEQ ID NO: 361 - DNA, 20 bp, synthetic construct
  misc_feature 1..20: note = chemically synthesized
  source 1..20: mol_type = other DNA
gcaggtaccttctgctgtag

SEQ ID NO: 362 - DNA, 20 bp, synthetic construct
  misc_feature 1..20: note = chemically synthesized
  source 1..20: mol_type = other DNA
aggtaccttctgctgtagga

SEQ ID NO: 363 - DNA, 20 bp, synthetic construct
  misc_feature 1..20: note = chemically synthesized
  source 1..20: mol_type = other DNA
gtaccttctgctgtaggaga

SEQ ID NO: 364 - DNA, 20 bp, synthetic construct
  misc_feature 1..20: note = chemically synthesized
  source 1..20: mol_type = other DNA
accttctgctgtaggagaga

SEQ ID NO: 365 - DNA, 20 bp, synthetic construct
  misc_feature 1..20: note = chemically synthesized
  source 1..20: mol_type = other DNA
ctgtaggagagagagaacta

SEQ ID NO: 366 - DNA, 20 bp, synthetic construct
  misc_feature 1..20: note = chemically synthesized
  source 1..20: mol_type = other DNA
agagagaactaaagttctga

SEQ ID NO: 367 - DNA, 20 bp, synthetic construct
  misc_feature 1..20: note = chemically synthesized
  source 1..20: mol_type = other DNA
aaagacctgttgcttttcac

SEQ ID NO: 368 - DNA, 20 bp, synthetic construct
  misc_feature 1..20: note = chemically synthesized
  source 1..20: mol_type = other DNA
aagacctgttgcttttcacc

SEQ ID NO: 369 - DNA, 20 bp, synthetic construct
  misc_feature 1..20: note = chemically synthesized
  source 1..20: mol_type = other DNA
acctgttgcttttcaccagg

SEQ ID NO: 370 - DNA, 20 bp, synthetic construct
  misc_feature 1..20: note = chemically synthesized
  source 1..20: mol_type = other DNA
ttttcaccaggaagttttac

SEQ ID NO: 371 - DNA, 20 bp, synthetic construct
  misc_feature 1..20: note = chemically synthesized
  source 1..20: mol_type = other DNA
tttcaccaggaagttttact

SEQ ID NO: 372 - DNA, 20 bp, synthetic construct
  misc_feature 1..20: note = chemically synthesized
  source 1..20: mol_type = other DNA
agttttactgggcatctcct

SEQ ID NO: 373 - DNA, 20 bp, synthetic construct
  misc_feature 1..20: note = chemically synthesized
  source 1..20: mol_type = other DNA
tactgggcatctcctgagcc

SEQ ID NO: 374 - DNA, 20 bp, synthetic construct
  misc_feature 1..20: note = chemically synthesized
  source 1..20: mol_type = other DNA
actgggcatctcctgagcct

SEQ ID NO: 375 - DNA, 20 bp, synthetic construct
  misc_feature 1..20: note = chemically synthesized
  source 1..20: mol_type = other DNA
catctcctgagcctaggcaa

SEQ ID NO: 376 - DNA, 20 bp, synthetic construct
  misc_feature 1..20: note = chemically synthesized
  source 1..20: mol_type = other DNA
ctgagcctaggcaatagctg

SEQ ID NO: 377 - DNA, 20 bp, synthetic construct
  misc_feature 1..20: note = chemically synthesized
  source 1..20: mol_type = other DNA
tgagcctaggcaatagctgt

SEQ ID NO: 378 - DNA, 20 bp, synthetic construct
  misc_feature 1..20: note = chemically synthesized
  source 1..20: mol_type = other DNA
gagcctaggcaatagctgta

SEQ ID NO: 379 - DNA, 20 bp, synthetic construct
  misc_feature 1..20: note = chemically synthesized
  source 1..20: mol_type = other DNA
aatagctgtagggtgacttc

SEQ ID NO: 380 - DNA, 20 bp, synthetic construct
  misc_feature 1..20: note = chemically synthesized
  source 1..20: mol_type = other DNA
tagctgtagggtgacttctg

SEQ ID NO: 381 - DNA, 20 bp, synthetic construct
  misc_feature 1..20: note = chemically synthesized
  source 1..20: mol_type = other DNA
cccgtttccccgccccccaa

SEQ ID NO: 382 - DNA, 20 bp, synthetic construct
  misc_feature 1..20: note = chemically synthesized
  source 1..20: mol_type = other DNA
gtttccccgccccccaaaag

SEQ ID NO: 383 - DNA, 20 bp, synthetic construct
  misc_feature 1..20: note = chemically synthesized
  source 1..20: mol_type = other DNA
tccccgccccccaaaagaag

SEQ ID NO: 384 - DNA, 20 bp, synthetic construct
  misc_feature 1..20: note = chemically synthesized
  source 1..20: mol_type = other DNA
cccgccccccaaaagaagcg

SEQ ID NO: 385 - DNA, 20 bp, synthetic construct
  misc_feature 1..20: note = chemically synthesized
  source 1..20: mol_type = other DNA
caaaagaagcggagatttaa

SEQ ID NO: 386 - DNA, 20 bp, synthetic construct
  misc_feature 1..20: note = chemically synthesized
  source 1..20: mol_type = other DNA
aaaagaagcggagatttaac

SEQ ID NO: 387 - DNA, 20 bp, synthetic construct
  misc_feature 1..20: note = chemically synthesized
  source 1..20: mol_type = other DNA
aaagaagcggagatttaacg

SEQ ID NO: 388 - DNA, 20 bp, synthetic construct
  misc_feature 1..20: note = chemically synthesized
  source 1..20: mol_type = other DNA
ggagatttaacggggacgtg

SEQ ID NO: 389 - DNA, 20 bp, synthetic construct
  misc_feature 1..20: note = chemically synthesized
  source 1..20: mol_type = other DNA
atttaacggggacgtgcggc

SEQ ID NO: 390 - DNA, 20 bp, synthetic construct
  misc_feature 1..20: note = chemically synthesized
  source 1..20: mol_type = other DNA
ttaacggggacgtgcggcca

SEQ ID NO: 391 - DNA, 20 bp, synthetic construct
  misc_feature 1..20: note = chemically synthesized
  source 1..20: mol_type = other DNA
cggggacgtgcggccagagc

SEQ ID NO: 392 - DNA, 20 bp, synthetic construct
  misc_feature 1..20: note = chemically synthesized
  source 1..20: mol_type = other DNA
ggggacgtgcggccagagct

SEQ ID NO: 393 - DNA, 20 bp, synthetic construct
  misc_feature 1..20: note = chemically synthesized
  source 1..20: mol_type = other DNA
gggacgtgcggccagagctg

SEQ ID NO: 394 - DNA, 20 bp, synthetic construct
  misc_feature 1..20: note = chemically synthesized
  source 1..20: mol_type = other DNA
tgcggccagagctggggaaa

SEQ ID NO: 395 - DNA, 20 bp, synthetic construct
  misc_feature 1..20: note = chemically synthesized
  source 1..20: mol_type = other DNA
gcggccagagctggggaaat

SEQ ID NO: 396 - DNA, 20 bp, synthetic construct
  misc_feature 1..20: note = chemically synthesized
  source 1..20: mol_type = other DNA
agctggggaaatgggcccgc

SEQ ID NO: 397 - DNA, 20 bp, synthetic construct
  misc_feature 1..20: note = chemically synthesized
  source 1..20: mol_type = other DNA
ggggaaatgggcccgcgagc

SEQ ID NO: 398 - DNA, 20 bp, synthetic construct
  misc_feature 1..20: note = chemically synthesized
  source 1..20: mol_type = other DNA
gggaaatgggcccgcgagcc

SEQ ID NO: 399 - DNA, 20 bp, synthetic construct
  misc_feature 1..20: note = chemically synthesized
  source 1..20: mol_type = other DNA
aatgggcccgcgagccaggc

SEQ ID NO: 400 - DNA, 20 bp, synthetic construct
  misc_feature 1..20: note = chemically synthesized
  source 1..20: mol_type = other DNA
ttctcctcctgatgcttttg

SEQ ID NO: 401 - DNA, 20 bp, synthetic construct
  misc_feature 1..20: note = chemically synthesized
  source 1..20: mol_type = other DNA
cctgatgcttttgcagaccg

SEQ ID NO: 402 - DNA, 20 bp, synthetic construct
  misc_feature 1..20: note = chemically synthesized
  source 1..20: mol_type = other DNA
ttttgcagaccgcggtcctg

SEQ ID NO: 403 - DNA, 20 bp, synthetic construct
  misc_feature 1..20: note = chemically synthesized
  source 1..20: mol_type = other DNA
tttgcagaccgcggtcctgc

SEQ ID NO: 404 - DNA, 20 bp, synthetic construct
  misc_feature 1..20: note = chemically synthesized
  source 1..20: mol_type = other DNA
ttgcagaccgcggtcctgca

SEQ ID NO: 405 - DNA, 20 bp, synthetic construct
  misc_feature 1..20: note = chemically synthesized
  source 1..20: mol_type = other DNA
tgcagaccgcggtcctgcag

SEQ ID NO: 406 - DNA, 20 bp, synthetic construct
  misc_feature 1..20: note = chemically synthesized
  source 1..20: mol_type = other DNA
tgcaggggcgcttgctgcgt

SEQ ID NO: 407 - DNA, 20 bp, synthetic construct
  misc_feature 1..20: note = chemically synthesized
  source 1..20: mol_type = other DNA
ggcgcttgctgcgtgagtcc

SEQ ID NO: 408 - DNA, 20 bp, synthetic construct
  misc_feature 1..20: note = chemically synthesized
  source 1..20: mol_type = other DNA
gcgcttgctgcgtgagtccg

SEQ ID NO: 409 - DNA, 20 bp, synthetic construct
  misc_feature 1..20: note = chemically synthesized
  source 1..20: mol_type = other DNA
cgcttgctgcgtgagtccga

SEQ ID NO: 410 - DNA, 20 bp, synthetic construct
  misc_feature 1..20: note = chemically synthesized
  source 1..20: mol_type = other DNA
ctgcgtgagtccgagggctg

SEQ ID NO: 411 - DNA, 20 bp, synthetic construct
  misc_feature 1..20: note = chemically synthesized
  source 1..20: mol_type = other DNA
tgcgtgagtccgagggctgc

SEQ ID NO: 412 - DNA, 20 bp, synthetic construct
  misc_feature 1..20: note = chemically synthesized
  source 1..20: mol_type = other DNA
tccgagggctgcgggcgaac

SEQ ID NO: 413 - DNA, 20 bp, synthetic construct
  misc_feature 1..20: note = chemically synthesized
  source 1..20: mol_type = other DNA
ccgagggctgcgggcgaact

SEQ ID NO: 414 - DNA, 20 bp, synthetic construct
  misc_feature 1..20: note = chemically synthesized
  source 1..20: mol_type = other DNA
cgagggctgcgggcgaacta

SEQ ID NO: 415 - DNA, 20 bp, synthetic construct
  misc_feature 1..20: note = chemically synthesized
  source 1..20: mol_type = other DNA
gagggctgcgggcgaactag

SEQ ID NO: 416 - DNA, 20 bp, synthetic construct
  misc_feature 1..20: note = chemically synthesized
  source 1..20: mol_type = other DNA
ctgcgggcgaactaggggcg

SEQ ID NO: 417 - DNA, 20 bp, synthetic construct
  misc_feature 1..20: note = chemically synthesized
  source 1..20: mol_type = other DNA
cgggcgaactaggggcgcgg

SEQ ID NO: 418 - DNA, 20 bp, synthetic construct
  misc_feature 1..20: note = chemically synthesized
  source 1..20: mol_type = other DNA
gggcgaactaggggcgcggc

SEQ ID NO: 419 - DNA, 20 bp, synthetic construct
  misc_feature 1..20: note = chemically synthesized
  source 1..20: mol_type = other DNA
ggcgaactaggggcgcggcg

SEQ ID NO: 420 - DNA, 20 bp, synthetic construct
  misc_feature 1..20: note = chemically synthesized
  source 1..20: mol_type = other DNA
gcgaactaggggcgcggcgg

SEQ ID NO: 421 - DNA, 20 bp, synthetic construct
  misc_feature 1..20: note = chemically synthesized
  source 1..20: mol_type = other DNA
aactaggggcgcggcggggg

SEQ ID NO: 422 - DNA, 20 bp, synthetic construct
  misc_feature 1..20: note = chemically synthesized
  source 1..20: mol_type = other DNA
gggggtggaaaaatcgaaac

SEQ ID NO: 423 - DNA, 20 bp, synthetic construct
  misc_feature 1..20: note = chemically synthesized
  source 1..20: mol_type = other DNA
actagctttttctttgcgct

SEQ ID NO: 424 - DNA, 20 bp, synthetic construct
  misc_feature 1..20: note = chemically synthesized
  source 1..20: mol_type = other DNA
ctagctttttctttgcgctt

SEQ ID NO: 425 - DNA, 20 bp, synthetic construct
  misc_feature 1..20: note = chemically synthesized
  source 1..20: mol_type = other DNA
agctttttctttgcgcttgg

SEQ ID NO: 426 - DNA, 20 bp, synthetic construct
  misc_feature 1..20: note = chemically synthesized
  source 1..20: mol_type = other DNA
gcttgggagtttgctaactt

SEQ ID NO: 427 - DNA, 20 bp, synthetic construct
  misc_feature 1..20: note = chemically synthesized
  source 1..20: mol_type = other DNA
ttgggagtttgctaactttg

SEQ ID NO: 428 - DNA, 20 bp, synthetic construct
  misc_feature 1..20: note = chemically synthesized
  source 1..20: mol_type = other DNA
tgggagtttgctaactttgg

SEQ ID NO: 429 - DNA, 20 bp, synthetic construct
  misc_feature 1..20: note = chemically synthesized
  source 1..20: mol_type = other DNA
acctgctcaaccctatccgc

SEQ ID NO: 430 - DNA, 20 bp, synthetic construct
  misc_feature 1..20: note = chemically synthesized
  source 1..20: mol_type = other DNA
ctctccctactttctgcgtc

SEQ ID NO: 431 - DNA, 20 bp, synthetic construct
  misc_feature 1..20: note = chemically synthesized
  source 1..20: mol_type = other DNA
tttctgcgtccagaccccgt

SEQ ID NO: 432 - DNA, 20 bp, synthetic construct
  misc_feature 1..20: note = chemically synthesized
  source 1..20: mol_type = other DNA
ttctgcgtccagaccccgtg

SEQ ID NO: 433 - DNA, 20 bp, synthetic construct
  misc_feature 1..20: note = chemically synthesized
  source 1..20: mol_type = other DNA
tctgcgtccagaccccgtga

SEQ ID NO: 434 - DNA, 20 bp, synthetic construct
  misc_feature 1..20: note = chemically synthesized
  source 1..20: mol_type = other DNA
tgcgtccagaccccgtgagg

SEQ ID NO: 435 - DNA, 20 bp, synthetic construct
  misc_feature 1..20: note = chemically synthesized
  source 1..20: mol_type = other DNA
gagtgcctaccactgaactg

SEQ ID NO: 436 - DNA, 20 bp, synthetic construct
  misc_feature 1..20: note = chemically synthesized
  source 1..20: mol_type = other DNA
gcctaccactgaactgcaga

SEQ ID NO: 437 - DNA, 20 bp, synthetic construct
  misc_feature 1..20: note = chemically synthesized
  source 1..20: mol_type = other DNA
cctaccactgaactgcagat

SEQ ID NO: 438 - DNA, 20 bp, synthetic construct
  misc_feature 1..20: note = chemically synthesized
  source 1..20: mol_type = other DNA
ctaccactgaactgcagata

SEQ ID NO: 439 - DNA, 20 bp, synthetic construct
  misc_feature 1..20: note = chemically synthesized
  source 1..20: mol_type = other DNA
taccactgaactgcagatag

SEQ ID NO: 440 - DNA, 20 bp, synthetic construct
  misc_feature 1..20: note = chemically synthesized
  source 1..20: mol_type = other DNA
cagataggggtccctcgccc

SEQ ID NO: 441 - DNA, 20 bp, synthetic construct
  misc_feature 1..20: note = chemically synthesized
  source 1..20: mol_type = other DNA
agataggggtccctcgcccc

SEQ ID NO: 442 - DNA, 20 bp, synthetic construct
  misc_feature 1..20: note = chemically synthesized
  source 1..20: mol_type = other DNA
ccaggacctgccccctcccc

SEQ ID NO: 443 - DNA, 20 bp, synthetic construct
  misc_feature 1..20: note = chemically synthesized
  source 1..20: mol_type = other DNA
gccccctcccccggctgtcc

SEQ ID NO: 444 - DNA, 20 bp, synthetic construct
  misc_feature 1..20: note = chemically synthesized
  source 1..20: mol_type = other DNA
ccccggctgtcccggctctg

SEQ ID NO: 445 - DNA, 20 bp, synthetic construct
  misc_feature 1..20: note = chemically synthesized
  source 1..20: mol_type = other DNA
ccggctgtcccggctctgcg

SEQ ID NO: 446 - DNA, 20 bp, synthetic construct
  misc_feature 1..20: note = chemically synthesized
  source 1..20: mol_type = other DNA
cggctctgcggagtgacttt

SEQ ID NO: 447 - DNA, 20 bp, synthetic construct
  misc_feature 1..20: note = chemically synthesized
  source 1..20: mol_type = other DNA
gcccactcccttcccccaac

SEQ ID NO: 448 - DNA, 20 bp, synthetic construct
  misc_feature 1..20: note = chemically synthesized
  source 1..20: mol_type = other DNA
atgcttttaaataaatctcg

SEQ ID NO: 449 - DNA, 20 bp, synthetic construct
  misc_feature 1..20: note = chemically synthesized
  source 1..20: mol_type = other DNA
aatctcgtagttcctcactt

SEQ ID NO: 450 - DNA, 20 bp, synthetic construct
  misc_feature 1..20: note = chemically synthesized
  source 1..20: mol_type = other DNA
cgtagttcctcacttgagct

SEQ ID NO: 451 - DNA, 20 bp, synthetic construct
  misc_feature 1..20: note = chemically synthesized
  source 1..20: mol_type = other DNA
ttcctcacttgagctgagct

SEQ ID NO: 452 - DNA, 20 bp, synthetic construct
  misc_feature 1..20: note = chemically synthesized
  source 1..20: mol_type = other DNA
cacttgagctgagctaagcc

SEQ ID NO: 453 - DNA, 20 bp, synthetic construct
  misc_feature 1..20: note = chemically synthesized
  source 1..20: mol_type = other DNA
acttgagctgagctaagcct

SEQ ID NO: 454 - DNA, 20 bp, synthetic construct
  misc_feature 1..20: note = chemically synthesized
  source 1..20: mol_type = other DNA
cttgagctgagctaagcctg

SEQ ID NO: 455 - DNA, 20 bp, synthetic construct
  misc_feature 1..20: note = chemically synthesized
  source 1..20: mol_type = other DNA
agcctggggctccttgaacc

SEQ ID NO: 456 - DNA, 20 bp, synthetic construct
  misc_feature 1..20: note = chemically synthesized
  source 1..20: mol_type = other DNA
ggctccttgaacctggaact

SEQ ID NO: 457 - DNA, 20 bp, synthetic construct
  misc_feature 1..20: note = chemically synthesized
  source 1..20: mol_type = other DNA
gctccttgaacctggaactc

SEQ ID NO: 458 - DNA, 20 bp, synthetic construct
  misc_feature 1..20: note = chemically synthesized
  source 1..20: mol_type = other DNA
ctcgggtttatttccaatgt

SEQ ID NO: 459 - DNA, 20 bp, synthetic construct
  misc_feature 1..20: note = chemically synthesized
  source 1..20: mol_type = other DNA
tatttccaatgtcagctgtg

SEQ ID NO: 460 - DNA, 20 bp, synthetic construct
  misc_feature 1..20: note = chemically synthesized
  source 1..20: mol_type = other DNA
cagctgtgcagttttttccc

SEQ ID NO: 461 - DNA, 20 bp, synthetic construct
  misc_feature 1..20: note = chemically synthesized
  source 1..20: mol_type = other DNA
tttccccagtcatctccaaa

SEQ ID NO: 462 - DNA, 20 bp, synthetic construct
  misc_feature 1..20: note = chemically synthesized
  source 1..20: mol_type = other DNA
ttccccagtcatctccaaac

SEQ ID NO: 463 - DNA, 20 bp, synthetic construct
  misc_feature 1..20: note = chemically synthesized
  source 1..20: mol_type = other DNA
cccagtcatctccaaacagg

SEQ ID NO: 464 - DNA, 20 bp, synthetic construct
  misc_feature 1..20: note = chemically synthesized
  source 1..20: mol_type = other DNA
caaacaggaagttcttccct

SEQ ID NO: 465 - DNA, 20 bp, synthetic construct
  misc_feature 1..20: note = chemically synthesized
  source 1..20: mol_type = other DNA
ttcttccctgagtgcttgcc

SEQ ID NO: 466 - DNA, 20 bp, synthetic construct
  misc_feature 1..20: note = chemically synthesized
  source 1..20: mol_type = other DNA
ttccctgagtgcttgccgag

SEQ ID NO: 467 - DNA, 20 bp, synthetic construct
  misc_feature 1..20: note = chemically synthesized
  source 1..20: mol_type = other DNA
tccctgagtgcttgccgaga

SEQ ID NO: 468 - DNA, 20 bp, synthetic construct
  misc_feature 1..20: note = chemically synthesized
  source 1..20: mol_type = other DNA
gagtgcttgccgagaaggct

SEQ ID NO: 469 - DNA, 20 bp, synthetic construct
  misc_feature 1..20: note = chemically synthesized
  source 1..20: mol_type = other DNA
gagaaggctgagcaaaccca

SEQ ID NO: 470 - DNA, 20 bp, synthetic construct
  misc_feature 1..20: note = chemically synthesized
  source 1..20: mol_type = other DNA
aaggctgagcaaacccacag

SEQ ID NO: 471 - DNA, 20 bp, synthetic construct
  misc_feature 1..20: note = chemically synthesized
  source 1..20: mol_type = other DNA
aggctgagcaaacccacagc

SEQ ID NO: 472 - DNA, 20 bp, synthetic construct
  misc_feature 1..20: note = chemically synthesized
  source 1..20: mol_type = other DNA
aacccacagcaggatccgca

SEQ ID NO: 473 - DNA, 20 bp, synthetic construct
  misc_feature 1..20: note = chemically synthesized
  source 1..20: mol_type = other DNA
acccacagcaggatccgcac

SEQ ID NO: 474 - DNA, 20 bp, synthetic construct
  misc_feature 1..20: note = chemically synthesized
  source 1..20: mol_type = other DNA
cccacagcaggatccgcacg

SEQ ID NO: 475 - DNA, 20 bp, synthetic construct
  misc_feature 1..20: note = chemically synthesized
  source 1..20: mol_type = other DNA
tccgcacggggtttccacct

SEQ ID NO: 476 - DNA, 20 bp, synthetic construct
  misc_feature 1..20: note = chemically synthesized
  source 1..20: mol_type = other DNA
ccacctcagaacgaatgcgt

SEQ ID NO: 477 - DNA, 20 bp, synthetic construct
  misc_feature 1..20: note = chemically synthesized
  source 1..20: mol_type = other DNA
cacctcagaacgaatgcgtt

SEQ ID NO: 478 - DNA, 20 bp, synthetic construct
  misc_feature 1..20: note = chemically synthesized
  source 1..20: mol_type = other DNA
ctcagaacgaatgcgttggg

SEQ ID NO: 479 - DNA, 20 bp, synthetic construct
  misc_feature 1..20: note = chemically synthesized
  source 1..20: mol_type = other DNA
agaacgaatgcgttgggcgg

SEQ ID NO: 480 - DNA, 20 bp, synthetic construct
  misc_feature 1..20: note = chemically synthesized
  source 1..20: mol_type = other DNA
gaacgaatgcgttgggcggt

SEQ ID NO: 481 - DNA, 20 bp, synthetic construct
  misc_feature 1..20: note = chemically synthesized
  source 1..20: mol_type = other DNA
aacgaatgcgttgggcggtg

SEQ ID NO: 482 - DNA, 20 bp, synthetic construct
  misc_feature 1..20: note = chemically synthesized
  source 1..20: mol_type = other DNA
acgaatgcgttgggcggtgg

SEQ ID NO: 483 - DNA, 20 bp, synthetic construct
  misc_feature 1..20: note = chemically synthesized
  source 1..20: mol_type = other DNA
gttgggcggtgggggcgcga

SEQ ID NO: 484 - DNA, 20 bp, synthetic construct
  misc_feature 1..20: note = chemically synthesized
  source 1..20: mol_type = other DNA
tgggcggtgggggcgcgaaa

SEQ ID NO: 485 - DNA, 20 bp, synthetic construct
  misc_feature 1..20: note = chemically synthesized
  source 1..20: mol_type = other DNA
gcggtgggggcgcgaaagag

SEQ ID NO: 486 - DNA, 20 bp, synthetic construct
  misc_feature 1..20: note = chemically synthesized
  source 1..20: mol_type = other DNA
ggggcgcgaaagagtggcgt

SEQ ID NO: 487 - DNA, 20 bp, synthetic construct
  misc_feature 1..20: note = chemically synthesized
  source 1..20: mol_type = other DNA
gggcgcgaaagagtggcgtt

SEQ ID NO: 488 - DNA, 20 bp, synthetic construct
  misc_feature 1..20: note = chemically synthesized
  source 1..20: mol_type = other DNA
ggcgcgaaagagtggcgttg

SEQ ID NO: 489 - DNA, 20 bp, synthetic construct
  misc_feature 1..20: note = chemically synthesized
  source 1..20: mol_type = other DNA
ttcaccattccacccacttt

SEQ ID NO: 490 - DNA, 20 bp, synthetic construct
  misc_feature 1..20: note = chemically synthesized
  source 1..20: mol_type = other DNA
ccattccacccacttttggt

SEQ ID NO: 491 - DNA, 20 bp, synthetic construct
  misc_feature 1..20: note = chemically synthesized
  source 1..20: mol_type = other DNA
cacccacttttggtgagacc

SEQ ID NO: 492 - DNA, 20 bp, synthetic construct
  misc_feature 1..20: note = chemically synthesized
  source 1..20: mol_type = other DNA
acccacttttggtgagacct

SEQ ID NO: 493 - DNA, 20 bp, synthetic construct
  misc_feature 1..20: note = chemically synthesized
  source 1..20: mol_type = other DNA
cccacttttggtgagacctg

SEQ ID NO: 494 - DNA, 20 bp, synthetic construct
  misc_feature 1..20: note = chemically synthesized
  source 1..20: mol_type = other DNA
acttttggtgagacctgggg

SEQ ID NO: 495 - DNA, 20 bp, synthetic construct
  misc_feature 1..20: note = chemically synthesized
  source 1..20: mol_type = other DNA
ttttggtgagacctggggtg

SEQ ID NO: 496 - DNA, 20 bp, synthetic construct
  misc_feature 1..20: note = chemically synthesized
  source 1..20: mol_type = other DNA
tttggtgagacctggggtgg

SEQ ID NO: 497 - DNA, 20 bp, synthetic construct
  misc_feature 1..20: note = chemically synthesized
  source 1..20: mol_type = other DNA
agacctggggtggaggtctc

SEQ ID NO: 498 - DNA, 20 bp, synthetic construct
  misc_feature 1..20: note = chemically synthesized
  source 1..20: mol_type = other DNA
gacctggggtggaggtctct

SEQ ID NO: 499 - DNA, 20 bp, synthetic construct
  misc_feature 1..20: note = chemically synthesized
  source 1..20: mol_type = other DNA
acctggggtggaggtctcta

SEQ ID NO: 500 - DNA, 20 bp, synthetic construct
  misc_feature 1..20: note = chemically synthesized
  source 1..20: mol_type = other DNA
tggggtggaggtctctaggg

SEQ ID NO: 501 - DNA, 20 bp, synthetic construct
  misc_feature 1..20: note = chemically synthesized
  source 1..20: mol_type = other DNA
ggggtggaggtctctagggt

SEQ ID NO: 502 - DNA, 20 bp, synthetic construct
  misc_feature 1..20: note = chemically synthesized
  source 1..20: mol_type = other DNA
ggtggaggtctctagggtgg

SEQ ID NO: 503 - DNA, 20 bp, synthetic construct
  misc_feature 1..20: note = chemically synthesized
  source 1..20: mol_type = other DNA
gtggaggtctctagggtggg

SEQ ID NO: 504 - DNA, 20 bp, synthetic construct
  misc_feature 1..20: note = chemically synthesized
  source 1..20: mol_type = other DNA
ctctagggtgggaggctcct

SEQ ID NO: 505 - DNA, 20 bp, synthetic construct
  misc_feature 1..20: note = chemically synthesized
  source 1..20: mol_type = other DNA
ctagggtgggaggctcctga

SEQ ID NO: 506 - DNA, 20 bp, synthetic construct
  misc_feature 1..20: note = chemically synthesized
  source 1..20: mol_type = other DNA
agggtgggaggctcctgaga

SEQ ID NO: 507 - DNA, 20 bp, synthetic construct
  misc_feature 1..20: note = chemically synthesized
  source 1..20: mol_type = other DNA
gggtgggaggctcctgagag

SEQ ID NO: 508 - DNA, 20 bp, synthetic construct
  misc_feature 1..20: note = chemically synthesized
  source 1..20: mol_type = other DNA
ctcctgagagaggcctacct

SEQ ID NO: 509 - DNA, 20 bp, synthetic construct
  misc_feature 1..20: note = chemically synthesized
  source 1..20: mol_type = other DNA
tcctgagagaggcctacctc

SEQ ID NO: 510 - DNA, 20 bp, synthetic construct
  misc_feature 1..20: note = chemically synthesized
  source 1..20: mol_type = other DNA
ctcgggcctttccccactct

SEQ ID NO: 511 - DNA, 20 bp, synthetic construct
  misc_feature 1..20: note = chemically synthesized
  source 1..20: mol_type = other DNA
ttggcaattgttcttttgcc

SEQ ID NO: 512 - DNA, 20 bp, synthetic construct
  misc_feature 1..20: note = chemically synthesized
  source 1..20: mol_type = other DNA
gttcttttgcctggaaaatt

SEQ ID NO: 513 - DNA, 20 bp, synthetic construct
  misc_feature 1..20: note = chemically synthesized
  source 1..20: mol_type = other DNA
ctggaaaattaagtatatgt

SEQ ID NO: 514 - DNA, 20 bp, synthetic construct
  misc_feature 1..20: note = chemically synthesized
  source 1..20: mol_type = other DNA
gaactgaacaattctctttt

SEQ ID NO: 515 - DNA, 20 bp, synthetic construct
  misc_feature 1..20: note = chemically synthesized
  source 1..20: mol_type = other DNA
tgaacaattctcttttcggc

SEQ ID NO: 516 - DNA, 20 bp, synthetic construct
  misc_feature 1..20: note = chemically synthesized
  source 1..20: mol_type = other DNA
gaacaattctcttttcggct

SEQ ID NO: 517 - DNA, 20 bp, synthetic construct
  misc_feature 1..20: note = chemically synthesized
  source 1..20: mol_type = other DNA
ttgcaatgtgctgtgtaatt

SEQ ID NO: 518 - DNA, 20 bp, synthetic construct
  misc_feature 1..20: note = chemically synthesized
  source 1..20: mol_type = other DNA
gcaatgtgctgtgtaattaa

SEQ ID NO: 519 - DNA, 20 bp, synthetic construct
  misc_feature 1..20: note = chemically synthesized
  source 1..20: mol_type = other DNA
caatgtgctgtgtaattaag

SEQ ID NO: 520 - DNA, 20 bp, synthetic construct
  misc_feature 1..20: note = chemically synthesized
  source 1..20: mol_type = other DNA
aattaagaggcctctctaca

SEQ ID NO: 521 - DNA, 20 bp, synthetic construct
  misc_feature 1..20: note = chemically synthesized
  source 1..20: mol_type = other DNA
agtactgataatgaacatgt

SEQ ID NO: 522 - DNA, 20 bp, synthetic construct
  misc_feature 1..20: note = chemically synthesized
  source 1..20: mol_type = other DNA
taagcaatgcactcacttct

SEQ ID NO: 523 - DNA, 20 bp, synthetic construct
  misc_feature 1..20: note = chemically synthesized
  source 1..20: mol_type = other DNA
tgatcttatttgattttcac

SEQ ID NO: 524 - DNA, 20 bp, synthetic construct
  misc_feature 1..20: note = chemically synthesized
  source 1..20: mol_type = other DNA
gatcttatttgattttcact

SEQ ID NO: 525 - DNA, 20 bp, synthetic construct
  misc_feature 1..20: note = chemically synthesized
  source 1..20: mol_type = other DNA
tatttgattttcactaggca

SEQ ID NO: 526 - DNA, 20 bp, synthetic construct
  misc_feature 1..20: note = chemically synthesized
  source 1..20: mol_type = other DNA
atttgattttcactaggcat

SEQ ID NO: 527 - DNA, 20 bp, synthetic construct
  misc_feature 1..20: note = chemically synthesized
  source 1..20: mol_type = other DNA
tttgattttcactaggcata

SEQ ID NO: 528 - DNA, 20 bp, synthetic construct
  misc_feature 1..20: note = chemically synthesized
  source 1..20: mol_type = other DNA
tgattttcactaggcatagg

SEQ ID NO: 529 - DNA, 20 bp, synthetic construct
  misc_feature 1..20: note = chemically synthesized
  source 1..20: mol_type = other DNA
gattttcactaggcataggg

SEQ ID NO: 530 - DNA, 20 bp, synthetic construct
  misc_feature 1..20: note = chemically synthesized
  source 1..20: mol_type = other DNA
tttcactaggcatagggagg

SEQ ID NO: 531 - DNA, 20 bp, synthetic construct
  misc_feature 1..20: note = chemically synthesized
  source 1..20: mol_type = other DNA
ttcactaggcatagggaggt

SEQ ID NO: 532 - DNA, 20 bp, synthetic construct
  misc_feature 1..20: note = chemically synthesized
  source 1..20: mol_type = other DNA
cactaggcatagggaggtag

SEQ ID NO: 533 - DNA, 20 bp, synthetic construct
  misc_feature 1..20: note = chemically synthesized
  source 1..20: mol_type = other DNA
taataatacgtttattttac

SEQ ID NO: 534 - DNA, 20 bp, synthetic construct
  misc_feature 1..20: note = chemically synthesized
  source 1..20: mol_type = other DNA
taatacgtttattttactag

SEQ ID NO: 535 - DNA, 20 bp, synthetic construct
  misc_feature 1..20: note = chemically synthesized
  source 1..20: mol_type = other DNA
ttattttactagaagttaac

SEQ ID NO: 536 - DNA, 20 bp, synthetic construct
  misc_feature 1..20: note = chemically synthesized
  source 1..20: mol_type = other DNA
actagaagttaactggaatt

SEQ ID NO: 537 - DNA, 20 bp, synthetic construct
  misc_feature 1..20: note = chemically synthesized
  source 1..20: mol_type = other DNA
tcagattatataactctttt

SEQ ID NO: 538 - DNA, 20 bp, synthetic construct
  misc_feature 1..20: note = chemically synthesized
  source 1..20: mol_type = other DNA
cagattatataactcttttc

SEQ ID NO: 539 - DNA, 20 bp, synthetic construct
  misc_feature 1..20: note = chemically synthesized
  source 1..20: mol_type = other DNA
ataactcttttcaggttaca

SEQ ID NO: 540 - DNA, 20 bp, synthetic construct
  misc_feature 1..20: note = chemically synthesized
  source 1..20: mol_type = other DNA
tacaaagaacataaataatc

SEQ ID NO: 541 - DNA, 20 bp, synthetic construct
  misc_feature 1..20: note = chemically synthesized
  source 1..20: mol_type = other DNA
tggttttctgatgttatttc

SEQ ID NO: 542 - DNA, 20 bp, synthetic construct
  misc_feature 1..20: note = chemically synthesized
  source 1..20: mol_type = other DNA
tgatgttatttcaagtacta

SEQ ID NO: 543 - DNA, 20 bp, synthetic construct
  misc_feature 1..20: note = chemically synthesized
  source 1..20: mol_type = other DNA
actacagctgcttctaatct

SEQ ID NO: 544 - DNA, 20 bp, synthetic construct
  misc_feature 1..20: note = chemically synthesized
  source 1..20: mol_type = other DNA
ctgcttctaatcttagttga

SEQ ID NO: 545 - DNA, 20 bp, synthetic construct
  misc_feature 1..20: note = chemically synthesized
  source 1..20: mol_type = other DNA
ttgacagtgattttgccctg

SEQ ID NO: 546 - DNA, 20 bp, synthetic construct
  misc_feature 1..20: note = chemically synthesized
  source 1..20: mol_type = other DNA
agtgattttgccctgtagtg

SEQ ID NO: 547 - DNA, 20 bp, synthetic construct
  misc_feature 1..20: note = chemically synthesized
  source 1..20: mol_type = other DNA
ttttgccctgtagtgtagca

SEQ ID NO: 548 - DNA, 20 bp, synthetic construct
  misc_feature 1..20: note = chemically synthesized
  source 1..20: mol_type = other DNA
tagtgtagcacagtgttctg

SEQ ID NO: 549 - DNA, 20 bp, synthetic construct
  misc_feature 1..20: note = chemically synthesized
  source 1..20: mol_type = other DNA
agtgtagcacagtgttctgt

SEQ ID NO: 550 - DNA, 20 bp, synthetic construct
  misc_feature 1..20: note = chemically synthesized
  source 1..20: mol_type = other DNA
gtgttctgtgggtcacacgc

SEQ ID NO: 551 - DNA, 20 bp, synthetic construct
  misc_feature 1..20: note = chemically synthesized
  source 1..20: mol_type = other DNA
tgtgggtcacacgccggcct

SEQ ID NO: 552 - DNA, 20 bp, synthetic construct
  misc_feature 1..20: note = chemically synthesized
  source 1..20: mol_type = other DNA
gtcacacgccggcctcagca

SEQ ID NO: 553 - DNA, 20 bp, synthetic construct
  misc_feature 1..20: note = chemically synthesized
  source 1..20: mol_type = other DNA
cggcctcagcacagcacttt

SEQ ID NO: 554 - DNA, 20 bp, synthetic construct
  misc_feature 1..20: note = chemically synthesized
  source 1..20: mol_type = other DNA
cagcacagcactttgagttt

SEQ ID NO: 555 - DNA, 20 bp, synthetic construct
  misc_feature 1..20: note = chemically synthesized
  source 1..20: mol_type = other DNA
atccacattttacacatgac

SEQ ID NO: 556 - DNA, 20 bp, synthetic construct
  misc_feature 1..20: note = chemically synthesized
  source 1..20: mol_type = other DNA
attttacacatgacaagaat

SEQ ID NO: 557 - DNA, 20 bp, synthetic construct
  misc_feature 1..20: note = chemically synthesized
  source 1..20: mol_type = other DNA
ttttacacatgacaagaatg

SEQ ID NO: 558 - DNA, 20 bp, synthetic construct
  misc_feature 1..20: note = chemically synthesized
  source 1..20: mol_type = other DNA
cacatgacaagaatgaggca

SEQ ID NO: 559 - DNA, 20 bp, synthetic construct
  misc_feature 1..20: note = chemically synthesized
  source 1..20: mol_type = other DNA
gacaagaatgaggcatggca

SEQ ID NO: 560 - DNA, 20 bp, synthetic construct
  misc_feature 1..20: note = chemically synthesized
  source 1..20: mol_type = other DNA
gcatggcacggcctgcttcc

SEQ ID NO: 561 - DNA, 20 bp, synthetic construct
  misc_feature 1..20: note = chemically synthesized
  source 1..20: mol_type = other DNA
ttcctggcaaatttattcaa

SEQ ID NO: 562 - DNA, 20 bp, synthetic construct
  misc_feature 1..20: note = chemically synthesized
  source 1..20: mol_type = other DNA
aaatttattcaatggtacac

SEQ ID NO: 563 - DNA, 20 bp, synthetic construct
  misc_feature 1..20: note = chemically synthesized
  source 1..20: mol_type = other DNA
aatttattcaatggtacact

SEQ ID NO: 564 - DNA, 20 bp, synthetic construct
  misc_feature 1..20: note = chemically synthesized
  source 1..20: mol_type = other DNA
ttcaatggtacactgggctt

SEQ ID NO: 565 - DNA, 20 bp, synthetic construct
  misc_feature 1..20: note = chemically synthesized
  source 1..20: mol_type = other DNA
aatggtacactgggctttgg

SEQ ID NO: 566 - DNA, 20 bp, synthetic construct
  misc_feature 1..20: note = chemically synthesized
  source 1..20: mol_type = other DNA
ggtacactgggctttggtgg

SEQ ID NO: 567 - DNA, 20 bp, synthetic construct
  misc_feature 1..20: note = chemically synthesized
  source 1..20: mol_type = other DNA
tacactgggctttggtggca

SEQ ID NO: 568 - DNA, 20 bp, synthetic construct
  misc_feature 1..20: note = chemically synthesized
  source 1..20: mol_type = other DNA
gagctcatgtctccacttca

SEQ ID NO: 569 - DNA, 20 bp, synthetic construct
  misc_feature 1..20: note = chemically synthesized
  source 1..20: mol_type = other DNA
tcttaaacatcacactgcat

SEQ ID NO: 570 - DNA, 20 bp, synthetic construct
  misc_feature 1..20: note = chemically synthesized
  source 1..20: mol_type = other DNA
ttaaacatcacactgcatta

SEQ ID NO: 571 - DNA, 20 bp, synthetic construct
  misc_feature 1..20: note = chemically synthesized
  source 1..20: mol_type = other DNA
taaacatcacactgcattag

SEQ ID NO: 572 - DNA, 20 bp, synthetic construct
  misc_feature 1..20: note = chemically synthesized
  source 1..20: mol_type = other DNA
gaataataaaatttcatgtt

SEQ ID NO: 573 - DNA, 20 bp, synthetic construct
  misc_feature 1..20: note = chemically synthesized
  source 1..20: mol_type = other DNA
taataaaatttcatgttgag

SEQ ID NO: 574 - DNA, 20 bp, synthetic construct
  misc_feature 1..20: note = chemically synthesized
  source 1..20: mol_type = other DNA
cagaaatattcattgtttac

SEQ ID NO: 575 - DNA, 20 bp, synthetic construct
  misc_feature 1..20: note = chemically synthesized
  source 1..20: mol_type = other DNA
cattgtttacaagtgtaaat

SEQ ID NO: 576 - DNA, 20 bp, synthetic construct
  misc_feature 1..20: note = chemically synthesized
  source 1..20: mol_type = other DNA
ttacaagtgtaaatgagtcc

SEQ ID NO: 577 - DNA, 20 bp, synthetic construct
  misc_feature 1..20: note = chemically synthesized
  source 1..20: mol_type = other DNA
agccatgtgttgcactgttc

SEQ ID NO: 578 - DNA, 20 bp, synthetic construct
  misc_feature 1..20: note = chemically synthesized
  source 1..20: mol_type = other DNA
tgttgcactgttcaagcccc

SEQ ID NO: 579 - DNA, 20 bp, synthetic construct
  misc_feature 1..20: note = chemically synthesized
  source 1..20: mol_type = other DNA
gttgcactgttcaagcccca

SEQ ID NO: 580 - DNA, 20 bp, synthetic construct
  misc_feature 1..20: note = chemically synthesized
  source 1..20: mol_type = other DNA
ttgcactgttcaagccccaa

SEQ ID NO: 581 - DNA, 20 bp, synthetic construct
  misc_feature 1..20: note = chemically synthesized
  source 1..20: mol_type = other DNA
gcactgttcaagccccaagg

SEQ ID NO: 582 - DNA, 20 bp, synthetic construct
  misc_feature 1..20: note = chemically synthesized
  source 1..20: mol_type = other DNA
actgttcaagccccaaggga

SEQ ID NO: 583 - DNA, 20 bp, synthetic construct
  misc_feature 1..20: note = chemically synthesized
  source 1..20: mol_type = other DNA
tgttcaagccccaagggaga

SEQ ID NO: 584 - DNA, 20 bp, synthetic construct
  misc_feature 1..20: note = chemically synthesized
  source 1..20: mol_type = other DNA
tcaagccccaagggagagag

SEQ ID NO: 585 - DNA, 20 bp, synthetic construct
  misc_feature 1..20: note = chemically synthesized
  source 1..20: mol_type = other DNA
caagccccaagggagagagc

SEQ ID NO: 586 - DNA, 20 bp, synthetic construct
  misc_feature 1..20: note = chemically synthesized
  source 1..20: mol_type = other DNA
aagccccaagggagagagca

SEQ ID NO: 587 - DNA, 20 bp, synthetic construct
  misc_feature 1..20: note = chemically synthesized
  source 1..20: mol_type = other DNA
aagggagagagcagggaaac

SEQ ID NO: 588 - DNA, 20 bp, synthetic construct
  misc_feature 1..20: note = chemically synthesized
  source 1..20: mol_type = other DNA
ccctttgatattttgcattc

SEQ ID NO: 589 - DNA, 20 bp, synthetic construct
  misc_feature 1..20: note = chemically synthesized
  source 1..20: mol_type = other DNA
tttgatattttgcattctag

SEQ ID NO: 590 - DNA, 20 bp, synthetic construct
  misc_feature 1..20: note = chemically synthesized
  source 1..20: mol_type = other DNA
ttgatattttgcattctagt

SEQ ID NO: 591 - DNA, 20 bp, synthetic construct
  misc_feature 1..20: note = chemically synthesized
  source 1..20: mol_type = other DNA
gatattttgcattctagtgg

SEQ ID NO: 592 - DNA, 20 bp, synthetic construct
  misc_feature 1..20: note = chemically synthesized
  source 1..20: mol_type = other DNA
tattttgcattctagtggga

SEQ ID NO: 593 - DNA, 20 bp, synthetic construct
  misc_feature 1..20: note = chemically synthesized
  source 1..20: mol_type = other DNA
ctagtgggagagatgacaat

SEQ ID NO: 594 - DNA, 20 bp, synthetic construct
  misc_feature 1..20: note = chemically synthesized
  source 1..20: mol_type = other DNA
agagatgacaataagcaaat

SEQ ID NO: 595 - DNA, 20 bp, synthetic construct
  misc_feature 1..20: note = chemically synthesized
  source 1..20: mol_type = other DNA
gatgacaataagcaaatgag

SEQ ID NO: 596 - DNA, 20 bp, synthetic construct
  misc_feature 1..20: note = chemically synthesized
  source 1..20: mol_type = other DNA
acaataagcaaatgagcaga

SEQ ID NO: 597 - DNA, 20 bp, synthetic construct
  misc_feature 1..20: note = chemically synthesized
  source 1..20: mol_type = other DNA
agcagaaagatatacaacat

SEQ ID NO: 598 - DNA, 20 bp, synthetic construct
  misc_feature 1..20: note = chemically synthesized
  source 1..20: mol_type = other DNA
gcagaaagatatacaacatc

SEQ ID NO: 599 - DNA, 20 bp, synthetic construct
  misc_feature 1..20: note = chemically synthesized
  source 1..20: mol_type = other DNA
tatacaacatcaggaaatca

SEQ ID NO: 600 - DNA, 20 bp, synthetic construct
  misc_feature 1..20: note = chemically synthesized
  source 1..20: mol_type = other DNA
atacaacatcaggaaatcat

SEQ ID NO: 601 - DNA, 20 bp, synthetic construct
  misc_feature 1..20: note = chemically synthesized
  source 1..20: mol_type = other DNA
caggaaatcatgggtgttgt

SEQ ID NO: 602 - DNA, 20 bp, synthetic construct
  misc_feature 1..20: note = chemically synthesized
  source 1..20: mol_type = other DNA
gaaatcatgggtgttgtgag

SEQ ID NO: 603 - DNA, 20 bp, synthetic construct
  misc_feature 1..20: note = chemically synthesized
  source 1..20: mol_type = other DNA
atcatgggtgttgtgagaag

SEQ ID NO: 604 - DNA, 20 bp, synthetic construct
  misc_feature 1..20: note = chemically synthesized
  source 1..20: mol_type = other DNA
catgggtgttgtgagaagca

SEQ ID NO: 605 - DNA, 20 bp, synthetic construct
  misc_feature 1..20: note = chemically synthesized
  source 1..20: mol_type = other DNA
gggtgttgtgagaagcagag

SEQ ID NO: 606 - DNA, 20 bp, synthetic construct
  misc_feature 1..20: note = chemically synthesized
  source 1..20: mol_type = other DNA
gttgtgagaagcagagaagt

SEQ ID NO: 607 - DNA, 20 bp, synthetic construct
  misc_feature 1..20: note = chemically synthesized
  source 1..20: mol_type = other DNA
ttgtgagaagcagagaagtc

SEQ ID NO: 608 - DNA, 20 bp, synthetic construct
  misc_feature 1..20: note = chemically synthesized
  source 1..20: mol_type = other DNA
tgtgagaagcagagaagtca

SEQ ID NO: 609 - DNA, 20 bp, synthetic construct
  misc_feature 1..20: note = chemically synthesized
  source 1..20: mol_type = other DNA
agaagcagagaagtcagggc

SEQ ID NO: 610 - DNA, 20 bp, synthetic construct
  misc_feature 1..20: note = chemically synthesized
  source 1..20: mol_type = other DNA
gaagtcagggcaagtcactc

SEQ ID NO: 611 - DNA, 20 bp, synthetic construct
  misc_feature 1..20: note = chemically synthesized
  source 1..20: mol_type = other DNA
aagtcagggcaagtcactct

SEQ ID NO: 612 - DNA, 20 bp, synthetic construct
  misc_feature 1..20: note = chemically synthesized
  source 1..20: mol_type = other DNA
agtcagggcaagtcactctg

SEQ ID NO: 613 - DNA, 20 bp, synthetic construct
  misc_feature 1..20: note = chemically synthesized
  source 1..20: mol_type = other DNA
tcactctggggctgacactt

SEQ ID NO: 614 - DNA, 20 bp, synthetic construct
  misc_feature 1..20: note = chemically synthesized
  source 1..20: mol_type = other DNA
ctctggggctgacacttgag

SEQ ID NO: 615 - DNA, 20 bp, synthetic construct
  misc_feature 1..20: note = chemically synthesized
  source 1..20: mol_type = other DNA
ctggggctgacacttgagca

SEQ ID NO: 616 - DNA, 20 bp, synthetic construct
  misc_feature 1..20: note = chemically synthesized
  source 1..20: mol_type = other DNA
gacacttgagcagagacatg

SEQ ID NO: 617 - DNA, 20 bp, synthetic construct
  misc_feature 1..20: note = chemically synthesized
  source 1..20: mol_type = other DNA
acacttgagcagagacatga

SEQ ID NO: 618 - DNA, 20 bp, synthetic construct
  misc_feature 1..20: note = chemically synthesized
  source 1..20: mol_type = other DNA
agcagagacatgaaggaaat

SEQ ID NO: 619 - DNA, 20 bp, synthetic construct
  misc_feature 1..20: note = chemically synthesized
  source 1..20: mol_type = other DNA
gaaataagaatgatattgac

SEQ ID NO: 620 - DNA, 20 bp, synthetic construct
  misc_feature 1..20: note = chemically synthesized
  source 1..20: mol_type = other DNA
aaataagaatgatattgact

SEQ ID NO: 621 - DNA, 20 bp, synthetic construct
  misc_feature 1..20: note = chemically synthesized
  source 1..20: mol_type = other DNA
ataagaatgatattgactgg

SEQ ID NO: 622 - DNA, 20 bp, synthetic construct
  misc_feature 1..20: note = chemically synthesized
  source 1..20: mol_type = other DNA
agaatgatattgactgggag

SEQ ID NO: 623 - DNA, 20 bp, synthetic construct
  misc_feature 1..20: note = chemically synthesized
  source 1..20: mol_type = other DNA
tgactgggagcagtatttcc

SEQ ID NO: 624 - DNA, 20 bp, synthetic construct
  misc_feature 1..20: note = chemically synthesized
  source 1..20: mol_type = other DNA
gactgggagcagtatttccc

SEQ ID NO: 625 - DNA, 20 bp, synthetic construct
  misc_feature 1..20: note = chemically synthesized
  source 1..20: mol_type = other DNA
cagtatttcccaggcaaact

SEQ ID NO: 626 - DNA, 20 bp, synthetic construct
  misc_feature 1..20: note = chemically synthesized
  source 1..20: mol_type = other DNA
tatttcccaggcaaactgag

SEQ ID NO: 627 - DNA, 20 bp, synthetic construct
  misc_feature 1..20: note = chemically synthesized
  source 1..20: mol_type = other DNA
atttcccaggcaaactgagt

SEQ ID NO: 628 - DNA, 20 bp, synthetic construct
  misc_feature 1..20: note = chemically synthesized
  source 1..20: mol_type = other DNA
ccaggcaaactgagtgggcc

SEQ ID NO: 629 - DNA, 20 bp, synthetic construct
  misc_feature 1..20: note = chemically synthesized
  source 1..20: mol_type = other DNA
gcaaactgagtgggcctggc

SEQ ID NO: 630 - DNA, 20 bp, synthetic construct
  misc_feature 1..20: note = chemically synthesized
  source 1..20: mol_type = other DNA
actgagtgggcctggcaagt

SEQ ID NO: 631 - DNA, 20 bp, synthetic construct
  misc_feature 1..20: note = chemically synthesized
  source 1..20: mol_type = other DNA
gcctggcaagttggattaaa

SEQ ID NO: 632 - DNA, 20 bp, synthetic construct
  misc_feature 1..20: note = chemically synthesized
  source 1..20: mol_type = other DNA
tggcaagttggattaaaaag

SEQ ID NO: 633 - DNA, 20 bp, synthetic construct
  misc_feature 1..20: note = chemically synthesized
  source 1..20: mol_type = other DNA
ggcaagttggattaaaaagc

SEQ ID NO: 634 - DNA, 20 bp, synthetic construct
  misc_feature 1..20: note = chemically synthesized
  source 1..20: mol_type = other DNA
gattaaaaagcgggttttct

SEQ ID NO: 635 - DNA, 20 bp, synthetic construct
  misc_feature 1..20: note = chemically synthesized
  source 1..20: mol_type = other DNA
actactcatgtgtgtgtgtg

SEQ ID NO: 636 - DNA, 20 bp, synthetic construct
  misc_feature 1..20: note = chemically synthesized
  source 1..20: mol_type = other DNA
ctactcatgtgtgtgtgtgt

SEQ ID NO: 637 - DNA, 20 bp, synthetic construct
  misc_feature 1..20: note = chemically synthesized
  source 1..20: mol_type = other DNA
tactcatgtgtgtgtgtgtg

SEQ ID NO: 638 - DNA, 20 bp, synthetic construct
  misc_feature 1..20: note = chemically synthesized
  source 1..20: mol_type = other DNA
actcatgtgtgtgtgtgtgg

SEQ ID NO: 639 - DNA, 20 bp, synthetic construct
  misc_feature 1..20: note = chemically synthesized
  source 1..20: mol_type = other DNA
ctcatgtgtgtgtgtgtggg

SEQ ID NO: 640 - DNA, 20 bp, synthetic construct
  misc_feature 1..20: note = chemically synthesized
  source 1..20: mol_type = other DNA
tcatgtgtgtgtgtgtgggg

SEQ ID NO: 641 - DNA, 20 bp, synthetic construct
  misc_feature 1..20: note = chemically synthesized
  source 1..20: mol_type = other DNA
catgtgtgtgtgtgtggggg

SEQ ID NO: 642 - DNA, 20 bp, synthetic construct
  misc_feature 1..20: note = chemically synthesized
  source 1..20: mol_type = other DNA
atgtgtgtgtgtgtgggggg

SEQ ID NO: 643 - DNA, 20 bp, synthetic construct
  misc_feature 1..20: note = chemically synthesized
  source 1..20: mol_type = other DNA
tgtgtgtgtgtgtggggggg

SEQ ID NO: 644 - DNA, 20 bp, synthetic construct
  misc_feature 1..20: note = chemically synthesized
  source 1..20: mol_type = other DNA
gtgtgtgtgtgtgggggggg

SEQ ID NO: 645 - DNA, 20 bp, synthetic construct
  misc_feature 1..20: note = chemically synthesized
  source 1..20: mol_type = other DNA
tgtgtgtgtgtggggggggg

SEQ ID NO: 646 - DNA, 20 bp, synthetic construct
  misc_feature 1..20: note = chemically synthesized
  source 1..20: mol_type = other DNA
gtgtgtgtgggggggggggg

SEQ ID NO: 647 - DNA, 20 bp, synthetic construct
  misc_feature 1..20: note = chemically synthesized
  source 1..20: mol_type = other DNA
tgtggggggggggggcggcg

SEQ ID NO: 648 - DNA, 20 bp, synthetic construct
  misc_feature 1..20: note = chemically synthesized
  source 1..20: mol_type = other DNA
gtggggggggggggcggcgt

SEQ ID NO: 649 - DNA, 20 bp, synthetic construct
  misc_feature 1..20: note = chemically synthesized
  source 1..20: mol_type = other DNA
tggggggggggggcggcgtg

SEQ ID NO: 650 - DNA, 20 bp, synthetic construct
  misc_feature 1..20: note = chemically synthesized
  source 1..20: mol_type = other DNA
ggggggggggggcggcgtgg

SEQ ID NO: 651 - DNA, 20 bp, synthetic construct
  misc_feature 1..20: note = chemically synthesized
  source 1..20: mol_type = other DNA
gggggggggcggcgtggggg

SEQ ID NO: 652 - DNA, 20 bp, synthetic construct
  misc_feature 1..20: note = chemically synthesized
  source 1..20: mol_type = other DNA
ggggggggcggcgtgggggt

SEQ ID NO: 653 - DNA, 20 bp, synthetic construct
  misc_feature 1..20: note = chemically synthesized
  source 1..20: mol_type = other DNA
gggggcggcgtgggggtggg

SEQ ID NO: 654 - DNA, 20 bp, synthetic construct
  misc_feature 1..20: note = chemically synthesized
  source 1..20: mol_type = other DNA
ggggcggcgtgggggtggga

SEQ ID NO: 655 - DNA, 20 bp, synthetic construct
  misc_feature 1..20: note = chemically synthesized
  source 1..20: mol_type = other DNA
gggcggcgtgggggtgggaa

SEQ ID NO: 656 - DNA, 20 bp, synthetic construct
  misc_feature 1..20: note = chemically synthesized
  source 1..20: mol_type = other DNA
ggcggcgtgggggtgggaag

SEQ ID NO: 657 - DNA, 20 bp, synthetic construct
  misc_feature 1..20: note = chemically synthesized
  source 1..20: mol_type = other DNA
gcggcgtgggggtgggaagg

SEQ ID NO: 658 - DNA, 20 bp, synthetic construct
  misc_feature 1..20: note = chemically synthesized
  source 1..20: mol_type = other DNA
gggggactaccatctgcatg

SEQ ID NO: 659 - DNA, 20 bp, synthetic construct
  misc_feature 1..20: note = chemically synthesized
  source 1..20: mol_type = other DNA
ggggactaccatctgcatgt

SEQ ID NO: 660 - DNA, 20 bp, synthetic construct
  misc_feature 1..20: note = chemically synthesized
  source 1..20: mol_type = other DNA
ccatctgcatgtaggatgtc

SEQ ID NO: 661 - DNA, 20 bp, synthetic construct
  misc_feature 1..20: note = chemically synthesized
  source 1..20: mol_type = other DNA
tctgcatgtaggatgtctag

SEQ ID NO: 662 - DNA, 20 bp, synthetic construct
  misc_feature 1..20: note = chemically synthesized
  source 1..20: mol_type = other DNA
atcctgtcctccctactcac

SEQ ID NO: 663 - DNA, 20 bp, synthetic construct
  misc_feature 1..20: note = chemically synthesized
  source 1..20: mol_type = other DNA
tcctgtcctccctactcact

SEQ ID NO: 664 - DNA, 20 bp, synthetic construct
  misc_feature 1..20: note = chemically synthesized
  source 1..20: mol_type = other DNA
cctccctactcactaggtgc

SEQ ID NO: 665 - DNA, 20 bp, synthetic construct
  misc_feature 1..20: note = chemically synthesized
  source 1..20: mol_type = other DNA
ctccctactcactaggtgct

SEQ ID NO: 666 - DNA, 20 bp, synthetic construct
  misc_feature 1..20: note = chemically synthesized
  source 1..20: mol_type = other DNA
ccctactcactaggtgctag

SEQ ID NO: 667 - DNA, 20 bp, synthetic construct
  misc_feature 1..20: note = chemically synthesized
  source 1..20: mol_type = other DNA
aggtgctaggagcactcccc

SEQ ID NO: 668 - DNA, 20 bp, synthetic construct
  misc_feature 1..20: note = chemically synthesized
  source 1..20: mol_type = other DNA
aaactttgccacatgtcacc

SEQ ID NO: 669 - DNA, 20 bp, synthetic construct
  misc_feature 1..20: note = chemically synthesized
  source 1..20: mol_type = other DNA
ctttgccacatgtcacctag

SEQ ID NO: 670 - DNA, 20 bp, synthetic construct
  misc_feature 1..20: note = chemically synthesized
  source 1..20: mol_type = other DNA
tcacctagtagacaaactcc

SEQ ID NO: 671 - DNA, 20 bp, synthetic construct
  misc_feature 1..20: note = chemically synthesized
  source 1..20: mol_type = other DNA
tagtagacaaactcctggtt

SEQ ID NO: 672 - DNA, 20 bp, synthetic construct
  misc_feature 1..20: note = chemically synthesized
  source 1..20: mol_type = other DNA
tagacaaactcctggttaag

SEQ ID NO: 673 - DNA, 20 bp, synthetic construct
  misc_feature 1..20: note = chemically synthesized
  source 1..20: mol_type = other DNA
aaactcctggttaagaagct

SEQ ID NO: 674 - DNA, 20 bp, synthetic construct
  misc_feature 1..20: note = chemically synthesized
  source 1..20: mol_type = other DNA
aactcctggttaagaagctc

SEQ ID NO: 675 - DNA, 20 bp, synthetic construct
  misc_feature 1..20: note = chemically synthesized
  source 1..20: mol_type = other DNA
tcgggttgaaaaaaataaac

SEQ ID NO: 676 - DNA, 20 bp, synthetic construct
  misc_feature 1..20: note = chemically synthesized
  source 1..20: mol_type = other DNA
ggttgaaaaaaataaacaag

SEQ ID NO: 677 - DNA, 20 bp, synthetic construct
  misc_feature 1..20: note = chemically synthesized
  source 1..20: mol_type = other DNA
aaaaaataaacaagtagtgc

SEQ ID NO: 678 - DNA, 20 bp, synthetic construct
  misc_feature 1..20: note = chemically synthesized
  source 1..20: mol_type = other DNA
aaaaataaacaagtagtgct

SEQ ID NO: 679 - DNA, 20 bp, synthetic construct
  misc_feature 1..20: note = chemically synthesized
  source 1..20: mol_type = other DNA
aaaataaacaagtagtgctg

SEQ ID NO: 680 - DNA, 20 bp, synthetic construct
  misc_feature 1..20: note = chemically synthesized
  source 1..20: mol_type = other DNA
aataaacaagtagtgctggg

SEQ ID NO: 681 - DNA, 20 bp, synthetic construct
  misc_feature 1..20: note = chemically synthesized
  source 1..20: mol_type = other DNA
aaacaagtagtgctggggag

SEQ ID NO: 682 - DNA, 20 bp, synthetic construct
  misc_feature 1..20: note = chemically synthesized
  source 1..20: mol_type = other DNA
acaagtagtgctggggagta

SEQ ID NO: 683 - DNA, 20 bp, synthetic construct
  misc_feature 1..20: note = chemically synthesized
  source 1..20: mol_type = other DNA
caagtagtgctggggagtag

SEQ ID NO: 684 - DNA, 20 bp, synthetic construct
  misc_feature 1..20: note = chemically synthesized
  source 1..20: mol_type = other DNA
agtgctggggagtagaggcc

SEQ ID NO: 685 - DNA, 20 bp, synthetic construct
  misc_feature 1..20: note = chemically synthesized
  source 1..20: mol_type = other DNA
gctggggagtagaggccaag

SEQ ID NO: 686 - DNA, 20 bp, synthetic construct
  misc_feature 1..20: note = chemically synthesized
  source 1..20: mol_type = other DNA
ggggagtagaggccaagaag

SEQ ID NO: 687 - DNA, 20 bp, synthetic construct
  misc_feature 1..20: note = chemically synthesized
  source 1..20: mol_type = other DNA
gggagtagaggccaagaagt

SEQ ID NO: 688 - DNA, 20 bp, synthetic construct
  misc_feature 1..20: note = chemically synthesized
  source 1..20: mol_type = other DNA
agaggccaagaagtaggtaa

SEQ ID NO: 689 - DNA, 20 bp, synthetic construct
  misc_feature 1..20: note = chemically synthesized
  source 1..20: mol_type = other DNA
gaggccaagaagtaggtaat

SEQ ID NO: 690 - DNA, 20 bp, synthetic construct
  misc_feature 1..20: note = chemically synthesized
  source 1..20: mol_type = other DNA
caagaagtaggtaatgggct

SEQ ID NO: 691 - DNA, 20 bp, synthetic construct
  misc_feature 1..20: note = chemically synthesized
  source 1..20: mol_type = other DNA
gaagtaggtaatgggctcag

SEQ ID NO: 692 - DNA, 20 bp, synthetic construct
  misc_feature 1..20: note = chemically synthesized
  source 1..20: mol_type = other DNA
agtaggtaatgggctcagaa

SEQ ID NO: 693 - DNA, 20 bp, synthetic construct
  misc_feature 1..20: note = chemically synthesized
  source 1..20: mol_type = other DNA
gtaggtaatgggctcagaag

SEQ ID NO: 694 - DNA, 20 bp, synthetic construct
  misc_feature 1..20: note = chemically synthesized
  source 1..20: mol_type = other DNA
aggtaatgggctcagaagag

SEQ ID NO: 695 - DNA, 20 bp, synthetic construct
  misc_feature 1..20: note = chemically synthesized
  source 1..20: mol_type = other DNA
tcagaagaggagccacaaac

SEQ ID NO: 696 - DNA, 20 bp, synthetic construct
  misc_feature 1..20: note = chemically synthesized
  source 1..20: mol_type = other DNA
cagaagaggagccacaaaca

SEQ ID NO: 697 - DNA, 20 bp, synthetic construct
  misc_feature 1..20: note = chemically synthesized
  source 1..20: mol_type = other DNA
gagccacaaacaaggttgtg

SEQ ID NO: 698 - DNA, 20 bp, synthetic construct
  misc_feature 1..20: note = chemically synthesized
  source 1..20: mol_type = other DNA
agccacaaacaaggttgtgc

SEQ ID NO: 699 - DNA, 20 bp, synthetic construct
  misc_feature 1..20: note = chemically synthesized
  source 1..20: mol_type = other DNA
caaggttgtgcaggcgcctg

SEQ ID NO: 700 - DNA, 20 bp, synthetic construct
  misc_feature 1..20: note = chemically synthesized
  source 1..20: mol_type = other DNA
aaggttgtgcaggcgcctgt

SEQ ID NO: 701 - DNA, 20 bp, synthetic construct
  misc_feature 1..20: note = chemically synthesized
  source 1..20: mol_type = other DNA
gtgcaggcgcctgtaggctg

SEQ ID NO: 702 - DNA, 20 bp, synthetic construct
  misc_feature 1..20: note = chemically synthesized
  source 1..20: mol_type = other DNA
gtaggctgtggtgtgaattc

SEQ ID NO: 703 - DNA, 20 bp, synthetic construct
  misc_feature 1..20: note = chemically synthesized
  source 1..20: mol_type = other DNA
ctgtggtgtgaattctagcc

SEQ ID NO: 704 - DNA, 20 bp, synthetic construct
  misc_feature 1..20: note = chemically synthesized
  source 1..20: mol_type = other DNA
tgtggtgtgaattctagcca

SEQ ID NO: 705 - DNA, 20 bp, synthetic construct
  misc_feature 1..20: note = chemically synthesized
  source 1..20: mol_type = other DNA
tggtgtgaattctagccaag

SEQ ID NO: 706 - DNA, 20 bp, synthetic construct
  misc_feature 1..20: note = chemically synthesized
  source 1..20: mol_type = other DNA
gaattctagccaaggagtaa

SEQ ID NO: 707 - DNA, 20 bp, synthetic construct
  misc_feature 1..20: note = chemically synthesized
  source 1..20: mol_type = other DNA
ggagtaacagtgatctgtca

SEQ ID NO: 708 - DNA, 20 bp, synthetic construct
  misc_feature 1..20: note = chemically synthesized
  source 1..20: mol_type = other DNA
gagtaacagtgatctgtcac

SEQ ID NO: 709 - DNA, 20 bp, synthetic construct
  misc_feature 1..20: note = chemically synthesized
  source 1..20: mol_type = other DNA
gatctgtcacaggcttttaa

SEQ ID NO: 710 - DNA, 20 bp, synthetic construct
  misc_feature 1..20: note = chemically synthesized
  source 1..20: mol_type = other DNA
aggcttttaaaagattgctc

SEQ ID NO: 711 - DNA, 20 bp, synthetic construct
  misc_feature 1..20: note = chemically synthesized
  source 1..20: mol_type = other DNA
agattgctctggctgctatg

SEQ ID NO: 712 - DNA, 20 bp, synthetic construct
  misc_feature 1..20: note = chemically synthesized
  source 1..20: mol_type = other DNA
tgctctggctgctatgtgga

SEQ ID NO: 713 - DNA, 20 bp, synthetic construct
  misc_feature 1..20: note = chemically synthesized
  source 1..20: mol_type = other DNA
tctggctgctatgtggaaag

SEQ ID NO: 714 - DNA, 20 bp, synthetic construct
  misc_feature 1..20: note = chemically synthesized
  source 1..20: mol_type = other DNA
gctatgtggaaagcagaatg

SEQ ID NO: 715 - DNA, 20 bp, synthetic construct
  misc_feature 1..20: note = chemically synthesized
  source 1..20: mol_type = other DNA
ctatgtggaaagcagaatga

SEQ ID NO: 716 - DNA, 20 bp, synthetic construct
  misc_feature 1..20: note = chemically synthesized
  source 1..20: mol_type = other DNA
tatgtggaaagcagaatgaa

SEQ ID NO: 717 - DNA, 20 bp, synthetic construct
  misc_feature 1..20: note = chemically synthesized
  source 1..20: mol_type = other DNA
tgtggaaagcagaatgaagg

SEQ ID NO: 718 - DNA, 20 bp, synthetic construct
  misc_feature 1..20: note = chemically synthesized
  source 1..20: mol_type = other DNA
aagcagaatgaagggagcaa

SEQ ID NO: 719 - DNA, 20 bp, synthetic construct
  misc_feature 1..20: note = chemically synthesized
  source 1..20: mol_type = other DNA
aatgaagggagcaacagtaa

SEQ ID NO: 720 - DNA, 20 bp, synthetic construct
  misc_feature 1..20: note = chemically synthesized
  source 1..20: mol_type = other DNA
gaagggagcaacagtaaaag

SEQ ID NO: 721 - DNA, 20 bp, synthetic construct
  misc_feature 1..20: note = chemically synthesized
  source 1..20: mol_type = other DNA
aagggagcaacagtaaaagc

SEQ ID NO: 722 - DNA, 20 bp, synthetic construct
  misc_feature 1..20: note = chemically synthesized
  source 1..20: mol_type = other DNA
agggagcaacagtaaaagca

SEQ ID NO: 723 - DNA, 20 bp, synthetic construct
  misc_feature 1..20: note = chemically synthesized
  source 1..20: mol_type = other DNA
ggagcaacagtaaaagcagg

SEQ ID NO: 724 - DNA, 20 bp, synthetic construct
  misc_feature 1..20: note = chemically synthesized
  source 1..20: mol_type = other DNA
aacagtaaaagcagggagcc

SEQ ID NO: 725 - DNA, 20 bp, synthetic construct
  misc_feature 1..20: note = chemically synthesized
  source 1..20: mol_type = other DNA
gtaaaagcagggagcccagc

SEQ ID NO: 726 - DNA, 20 bp, synthetic construct
  misc_feature 1..20: note = chemically synthesized
  source 1..20: mol_type = other DNA
taaaagcagggagcccagcc

SEQ ID NO: 727 - DNA, 20 bp, synthetic construct
  misc_feature 1..20: note = chemically synthesized
  source 1..20: mol_type = other DNA
aagcagggagcccagccagg

SEQ ID NO: 728 - DNA, 20 bp, synthetic construct
  misc_feature 1..20: note = chemically synthesized
  source 1..20: mol_type = other DNA
ccagccaggaagctgttaca

SEQ ID NO: 729 - DNA, 20 bp, synthetic construct
  misc_feature 1..20: note = chemically synthesized
  source 1..20: mol_type = other DNA
caggaagctgttacacagtc

SEQ ID NO: 730 - DNA, 20 bp, synthetic construct
  misc_feature 1..20: note = chemically synthesized
  source 1..20: mol_type = other DNA
aggaagctgttacacagtcc

SEQ ID NO: 731 - DNA, 20 bp, synthetic construct
  misc_feature 1..20: note = chemically synthesized
  source 1..20: mol_type = other DNA
agctgttacacagtccaggc

SEQ ID NO: 732 - DNA, 20 bp, synthetic construct
  misc_feature 1..20: note = chemically synthesized
  source 1..20: mol_type = other DNA
ctgttacacagtccaggcaa

SEQ ID NO: 733 - DNA, 20 bp, synthetic construct
  misc_feature 1..20: note = chemically synthesized
  source 1..20: mol_type = other DNA
tgttacacagtccaggcaag

SEQ ID NO: 734 - DNA, 20 bp, synthetic construct
  misc_feature 1..20: note = chemically synthesized
  source 1..20: mol_type = other DNA
tacacagtccaggcaagagg

SEQ ID NO: 735 - DNA, 20 bp, synthetic construct
  misc_feature 1..20: note = chemically synthesized
  source 1..20: mol_type = other DNA
acagtccaggcaagaggtag

SEQ ID NO: 736 - DNA, 20 bp, synthetic construct
  misc_feature 1..20: note = chemically synthesized
  source 1..20: mol_type = other DNA
agtccaggcaagaggtagtg

SEQ ID NO: 737 - DNA, 20 bp, synthetic construct
  misc_feature 1..20: note = chemically synthesized
  source 1..20: mol_type = other DNA
ccaggcaagaggtagtggag

SEQ ID NO: 738 - DNA, 20 bp, synthetic construct
  misc_feature 1..20: note = chemically synthesized
  source 1..20: mol_type = other DNA
caggcaagaggtagtggagt

SEQ ID NO: 739 - DNA, 20 bp, synthetic construct
  misc_feature 1..20: note = chemically synthesized
  source 1..20: mol_type = other DNA
caagaggtagtggagtgggc

SEQ ID NO: 740 - DNA, 20 bp, synthetic construct
  misc_feature 1..20: note = chemically synthesized
  source 1..20: mol_type = other DNA
aagaggtagtggagtgggct

SEQ ID NO: 741 - DNA, 20 bp, synthetic construct
  misc_feature 1..20: note = chemically synthesized
  source 1..20: mol_type = other DNA
aggtagtggagtgggctggg

SEQ ID NO: 742 - DNA, 20 bp, synthetic construct
  misc_feature 1..20: note = chemically synthesized
  source 1..20: mol_type = other DNA
ggtagtggagtgggctgggt

SEQ ID NO: 743 - DNA, 20 bp, synthetic construct
  misc_feature 1..20: note = chemically synthesized
  source 1..20: mol_type = other DNA
tggagtgggctgggtgggaa

SEQ ID NO: 744 - DNA, 20 bp, synthetic construct
  misc_feature 1..20: note = chemically synthesized
  source 1..20: mol_type = other DNA
tgggctgggtgggaacagaa

SEQ ID NO: 745 - DNA, 20 bp, synthetic construct
  misc_feature 1..20: note = chemically synthesized
  source 1..20: mol_type = other DNA
gggctgggtgggaacagaaa

SEQ ID NO: 746 - DNA, 20 bp, synthetic construct
  misc_feature 1..20: note = chemically synthesized
  source 1..20: mol_type = other DNA
ggctgggtgggaacagaaaa

SEQ ID NO: 747 - DNA, 20 bp, synthetic construct
  misc_feature 1..20: note = chemically synthesized
  source 1..20: mol_type = other DNA
ctgggtgggaacagaaaagg

SEQ ID NO: 748 - DNA, 20 bp, synthetic construct
  misc_feature 1..20: note = chemically synthesized
  source 1..20: mol_type = other DNA
tgtctcctgaatatattctg

SEQ ID NO: 749 - DNA, 20 bp, synthetic construct
  misc_feature 1..20: note = chemically synthesized
  source 1..20: mol_type = other DNA
gtctcctgaatatattctga

SEQ ID NO: 750 - DNA, 20 bp, synthetic construct
  misc_feature 1..20: note = chemically synthesized
  source 1..20: mol_type = other DNA
tcctgaatatattctgaagg

SEQ ID NO: 751 - DNA, 20 bp, synthetic construct
  misc_feature 1..20: note = chemically synthesized
  source 1..20: mol_type = other DNA
tattctgaaggaagttgctg

SEQ ID NO: 752 - DNA, 20 bp, synthetic construct
  misc_feature 1..20: note = chemically synthesized
  source 1..20: mol_type = other DNA
attctgaaggaagttgctga

SEQ ID NO: 753 - DNA, 20 bp, synthetic construct
  misc_feature 1..20: note = chemically synthesized
  source 1..20: mol_type = other DNA
tgaaggattctatgttgtgt

SEQ ID NO: 754 - DNA, 20 bp, synthetic construct
  misc_feature 1..20: note = chemically synthesized
  source 1..20: mol_type = other DNA
aaggattctatgttgtgtga

SEQ ID NO: 755 - DNA, 20 bp, synthetic construct
  misc_feature 1..20: note = chemically synthesized
  source 1..20: mol_type = other DNA
attctatgttgtgtgagaga

SEQ ID NO: 756 - DNA, 20 bp, synthetic construct
  misc_feature 1..20: note = chemically synthesized
  source 1..20: mol_type = other DNA
tctatgttgtgtgagagaaa

SEQ ID NO: 757 - DNA, 20 bp, synthetic construct
  misc_feature 1..20: note = chemically synthesized
  source 1..20: mol_type = other DNA
atgttgtgtgagagaaagag

SEQ ID NO: 758 - DNA, 20 bp, synthetic construct
  misc_feature 1..20: note = chemically synthesized
  source 1..20: mol_type = other DNA
tgtgagagaaagagaagaat

SEQ ID NO: 759 - DNA, 20 bp, synthetic construct
  misc_feature 1..20: note = chemically synthesized
  source 1..20: mol_type = other DNA
agagaaagagaagaattggc

SEQ ID NO: 760 - DNA, 20 bp, synthetic construct
  misc_feature 1..20: note = chemically synthesized
  source 1..20: mol_type = other DNA
gagaaagagaagaattggct

SEQ ID NO: 761 - DNA, 20 bp, synthetic construct
  misc_feature 1..20: note = chemically synthesized
  source 1..20: mol_type = other DNA
agagaagaattggctgggtg

SEQ ID NO: 762 - DNA, 20 bp, synthetic construct
  misc_feature 1..20: note = chemically synthesized
  source 1..20: mol_type = other DNA
gaagaattggctgggtgtag

SEQ ID NO: 763 - DNA, 20 bp, synthetic construct
  misc_feature 1..20: note = chemically synthesized
  source 1..20: mol_type = other DNA
tgggtgtagtagctcatgcc

SEQ ID NO: 764 - DNA, 20 bp, synthetic construct
  misc_feature 1..20: note = chemically synthesized
  source 1..20: mol_type = other DNA
gggtgtagtagctcatgcca

SEQ ID NO: 765 - DNA, 20 bp, synthetic construct
  misc_feature 1..20: note = chemically synthesized
  source 1..20: mol_type = other DNA
gtgtagtagctcatgccaag

SEQ ID NO: 766 - DNA, 20 bp, synthetic construct
  misc_feature 1..20: note = chemically synthesized
  source 1..20: mol_type = other DNA
tgtagtagctcatgccaagg

SEQ ID NO: 767 - DNA, 20 bp, synthetic construct
  misc_feature 1..20: note = chemically synthesized
  source 1..20: mol_type = other DNA
tagtagctcatgccaaggag

SEQ ID NO: 768 - DNA, 20 bp, synthetic construct
  misc_feature 1..20: note = chemically synthesized
  source 1..20: mol_type = other DNA
agtagctcatgccaaggagg

SEQ ID NO: 769 - DNA, 20 bp, synthetic construct
  misc_feature 1..20: note = chemically synthesized
  source 1..20: mol_type = other DNA
ctcatgccaaggaggaggcc

SEQ ID NO: 770 - DNA, 20 bp, synthetic construct
  misc_feature 1..20: note = chemically synthesized
  source 1..20: mol_type = other DNA
tcatgccaaggaggaggcca

SEQ ID NO: 771 - DNA, 20 bp, synthetic construct
  misc_feature 1..20: note = chemically synthesized
  source 1..20: mol_type = other DNA
atgccaaggaggaggccaag

SEQ ID NO: 772 - DNA, 20 bp, synthetic construct
  misc_feature 1..20: note = chemically synthesized
  source 1..20: mol_type = other DNA
gccaaggaggaggccaagga

SEQ ID NO: 773 - DNA, 20 bp, synthetic construct
  misc_feature 1..20: note = chemically synthesized
  source 1..20: mol_type = other DNA
aaggaggaggccaaggagag

SEQ ID NO: 774 - DNA, 20 bp, synthetic construct
  misc_feature 1..20: note = chemically synthesized
  source 1..20: mol_type = other DNA
gccaaggagagcagattcct

SEQ ID NO: 775 - DNA, 20 bp, synthetic construct
  misc_feature 1..20: note = chemically synthesized
  source 1..20: mol_type = other DNA
ggagagcagattcctgagct

SEQ ID NO: 776 - DNA, 20 bp, synthetic construct
  misc_feature 1..20: note = chemically synthesized
  source 1..20: mol_type = other DNA
gagagcagattcctgagctc

SEQ ID NO: 777 - DNA, 20 bp, synthetic construct
  misc_feature 1..20: note = chemically synthesized
  source 1..20: mol_type = other DNA
gagcagattcctgagctcag

SEQ ID NO: 778 - DNA, 20 bp, synthetic construct
  misc_feature 1..20: note = chemically synthesized
  source 1..20: mol_type = other DNA
attcctgagctcaggagttc

SEQ ID NO: 779 - DNA, 20 bp, synthetic construct
  misc_feature 1..20: note = chemically synthesized
  source 1..20: mol_type = other DNA
tgagctcaggagttcaagac

SEQ ID NO: 780 - DNA, 20 bp, synthetic construct
  misc_feature 1..20: note = chemically synthesized
  source 1..20: mol_type = other DNA
tcaggagttcaagaccagcc

SEQ ID NO: 781 - DNA, 20 bp, synthetic construct
  misc_feature 1..20: note = chemically synthesized
  source 1..20: mol_type = other DNA
caggagttcaagaccagcct

SEQ ID NO: 782 - DNA, 20 bp, synthetic construct
  misc_feature 1..20: note = chemically synthesized
  source 1..20: mol_type = other DNA
caagaccagcctgggcaaca

SEQ ID NO: 783 - DNA, 20 bp, synthetic construct
  misc_feature 1..20: note = chemically synthesized
  source 1..20: mol_type = other DNA
tctacaaaaaatacaaaaat

SEQ ID NO: 784 - DNA, 20 bp, synthetic construct
  misc_feature 1..20: note = chemically synthesized
  source 1..20: mol_type = other DNA
caaaaaatacaaaaattagc

SEQ ID NO: 785 - DNA, 20 bp, synthetic construct
  misc_feature 1..20: note = chemically synthesized
  source 1..20: mol_type = other DNA
aaaaaatacaaaaattagct

SEQ ID NO: 786 - DNA, 20 bp, synthetic construct
  misc_feature 1..20: note = chemically synthesized
  source 1..20: mol_type = other DNA
atacaaaaattagctgggtg

SEQ ID NO: 787 - DNA, 20 bp, synthetic construct
  misc_feature 1..20: note = chemically synthesized
  source 1..20: mol_type = other DNA
caaaaattagctgggtgtgg

SEQ ID NO: 788 - DNA, 20 bp, synthetic construct
  misc_feature 1..20: note = chemically synthesized
  source 1..20: mol_type = other DNA
gtggcatgcacctgtgatcc

SEQ ID NO: 789 - DNA, 20 bp, synthetic construct
  misc_feature 1..20: note = chemically synthesized
  source 1..20: mol_type = other DNA
cacctgtgatcctagctact

SEQ ID NO: 790 - DNA, 20 bp, synthetic construct
  misc_feature 1..20: note = chemically synthesized
  source 1..20: mol_type = other DNA
acctgtgatcctagctactc

SEQ ID NO: 791 - DNA, 20 bp, synthetic construct
  misc_feature 1..20: note = chemically synthesized
  source 1..20: mol_type = other DNA
ctgtgatcctagctactcgg

SEQ ID NO: 792 - DNA, 20 bp, synthetic construct
  misc_feature 1..20: note = chemically synthesized
  source 1..20: mol_type = other DNA
tgtgatcctagctactcggg

SEQ ID NO: 793 - DNA, 20 bp, synthetic construct
  misc_feature 1..20: note = chemically synthesized
  source 1..20: mol_type = other DNA
tcctagctactcgggaggct

SEQ ID NO: 794 - DNA, 20 bp, synthetic construct
  misc_feature 1..20: note = chemically synthesized
  source 1..20: mol_type = other DNA
cctagctactcgggaggctg

SEQ ID NO: 795 - DNA, 20 bp, synthetic construct
  misc_feature 1..20: note = chemically synthesized
  source 1..20: mol_type = other DNA
agctactcgggaggctgagg

SEQ ID NO: 796 - DNA, 20 bp, synthetic construct
  misc_feature 1..20: note = chemically synthesized
  source 1..20: mol_type = other DNA
ctactcgggaggctgaggtg

SEQ ID NO: 797 - DNA, 20 bp, synthetic construct
  misc_feature 1..20: note = chemically synthesized
  source 1..20: mol_type = other DNA
tactcgggaggctgaggtgg

SEQ ID NO: 798 - DNA, 20 bp, synthetic construct
  misc_feature 1..20: note = chemically synthesized
  source 1..20: mol_type = other DNA
actcgggaggctgaggtgga

SEQ ID NO: 799 - DNA, 20 bp, synthetic construct
  misc_feature 1..20: note = chemically synthesized
  source 1..20: mol_type = other DNA
tgaggtggagggtattgctt

SEQ ID NO: 800 - DNA, 20 bp, synthetic construct
  misc_feature 1..20: note = chemically synthesized
  source 1..20: mol_type = other DNA
tggagggtattgcttgagcc

SEQ ID NO: 801 - DNA, 20 bp, synthetic construct
  misc_feature 1..20: note = chemically synthesized
  source 1..20: mol_type = other DNA
ggagggtattgcttgagccc

SEQ ID NO: 802 - DNA, 20 bp, synthetic construct
  misc_feature 1..20: note = chemically synthesized
  source 1..20: mol_type = other DNA
gggtattgcttgagcccagg

SEQ ID NO: 803 - DNA, 20 bp, synthetic construct
  misc_feature 1..20: note = chemically synthesized
  source 1..20: mol_type = other DNA
ttgcttgagcccaggaagtt

SEQ ID NO: 804 - DNA, 20 bp, synthetic construct
  misc_feature 1..20: note = chemically synthesized
  source 1..20: mol_type = other DNA
tgcttgagcccaggaagttg

SEQ ID NO: 805 - DNA, 20 bp, synthetic construct
  misc_feature 1..20: note = chemically synthesized
  source 1..20: mol_type = other DNA
agcccaggaagttgaggctg

SEQ ID NO: 806 - DNA, 20 bp, synthetic construct
  misc_feature 1..20: note = chemically synthesized
  source 1..20: mol_type = other DNA
caggaagttgaggctgcagt

SEQ ID NO: 807 - DNA, 20 bp, synthetic construct
  misc_feature 1..20: note = chemically synthesized
  source 1..20: mol_type = other DNA
atgactgtgccactgtactt

SEQ ID NO: 808 - DNA, 20 bp, synthetic construct
  misc_feature 1..20: note = chemically synthesized
  source 1..20: mol_type = other DNA
tgtgccactgtacttcagcc

SEQ ID NO: 809 - DNA, 20 bp, synthetic construct
  misc_feature 1..20: note = chemically synthesized
  source 1..20: mol_type = other DNA
gtgccactgtacttcagcct

SEQ ID NO: 810 - DNA, 20 bp, synthetic construct
  misc_feature 1..20: note = chemically synthesized
  source 1..20: mol_type = other DNA
ctgtacttcagcctaggtga

SEQ ID NO: 811 - DNA, 20 bp, synthetic construct
  misc_feature 1..20: note = chemically synthesized
  source 1..20: mol_type = other DNA
gtacttcagcctaggtgaca

SEQ ID NO: 812 - DNA, 20 bp, synthetic construct
  misc_feature 1..20: note = chemically synthesized
  source 1..20: mol_type = other DNA
ttcagcctaggtgacagagc

SEQ ID NO: 813 - DNA, 20 bp, synthetic construct
  misc_feature 1..20: note = chemically synthesized
  source 1..20: mol_type = other DNA
tctcccctgaccccctgaaa

SEQ ID NO: 814 - DNA, 20 bp, synthetic construct
  misc_feature 1..20: note = chemically synthesized
  source 1..20: mol_type = other DNA
tcccctgaccccctgaaaaa

SEQ ID NO: 815 - DNA, 20 bp, synthetic construct
  misc_feature 1..20: note = chemically synthesized
  source 1..20: mol_type = other DNA
cctgaccccctgaaaaagag

SEQ ID NO: 816 - DNA, 20 bp, synthetic construct
  misc_feature 1..20: note = chemically synthesized
  source 1..20: mol_type = other DNA
tgaccccctgaaaaagagaa

SEQ ID NO: 817 - DNA, 20 bp, synthetic construct
  misc_feature 1..20: note = chemically synthesized
  source 1..20: mol_type = other DNA
cctgaaaaagagaagagtta

SEQ ID NO: 818 - DNA, 20 bp, synthetic construct
  misc_feature 1..20: note = chemically synthesized
  source 1..20: mol_type = other DNA
gttctttattttaattttat

SEQ ID NO: 819 - DNA, 20 bp, synthetic construct
  misc_feature 1..20: note = chemically synthesized
  source 1..20: mol_type = other DNA
tattttaattttattggcct

SEQ ID NO: 820 - DNA, 20 bp, synthetic construct
  misc_feature 1..20: note = chemically synthesized
  source 1..20: mol_type = other DNA
tttaattttattggcctgag

SEQ ID NO: 821 - DNA, 20 bp, synthetic construct
  misc_feature 1..20: note = chemically synthesized
  source 1..20: mol_type = other DNA
aattttattggcctgagcag

SEQ ID NO: 822 - DNA, 20 bp, synthetic construct
  misc_feature 1..20: note = chemically synthesized
  source 1..20: mol_type = other DNA
attttattggcctgagcagt

SEQ ID NO: 823 - DNA, 20 bp, synthetic construct
  misc_feature 1..20: note = chemically synthesized
  source 1..20: mol_type = other DNA
ttttattggcctgagcagtg

SEQ ID NO: 824 - DNA, 20 bp, synthetic construct
  misc_feature 1..20: note = chemically synthesized
  source 1..20: mol_type = other DNA
ggcctgagcagtggggtaat

SEQ ID NO: 825 - DNA, 20 bp, synthetic construct
  misc_feature 1..20: note = chemically synthesized
  source 1..20: mol_type = other DNA
taattggcaatgccatttct

SEQ ID NO: 826 - DNA, 20 bp, synthetic construct
  misc_feature 1..20: note = chemically synthesized
  source 1..20: mol_type = other DNA
tggcaatgccatttctgaga

SEQ ID NO: 827 - DNA, 20 bp, synthetic construct
  misc_feature 1..20: note = chemically synthesized
  source 1..20: mol_type = other DNA
atgccatttctgagatggtg

SEQ ID NO: 828 - DNA, 20 bp, synthetic construct
  misc_feature 1..20: note = chemically synthesized
  source 1..20: mol_type = other DNA
tgccatttctgagatggtga

SEQ ID NO: 829 - DNA, 20 bp, synthetic construct
  misc_feature 1..20: note = chemically synthesized
  source 1..20: mol_type = other DNA
catttctgagatggtgaagg

SEQ ID NO: 830 - DNA, 20 bp, synthetic construct
  misc_feature 1..20: note = chemically synthesized
  source 1..20: mol_type = other DNA
tttctgagatggtgaaggca

SEQ ID NO: 831 - DNA, 20 bp, synthetic construct
  misc_feature 1..20: note = chemically synthesized
  source 1..20: mol_type = other DNA
ttctgagatggtgaaggcag

SEQ ID NO: 832 - DNA, 20 bp, synthetic construct
  misc_feature 1..20: note = chemically synthesized
  source 1..20: mol_type = other DNA
gagatggtgaaggcagagga

SEQ ID NO: 833 - DNA, 20 bp, synthetic construct
  misc_feature 1..20: note = chemically synthesized
  source 1..20: mol_type = other DNA
gatggtgaaggcagaggaaa

SEQ ID NO: 834 - DNA, 20 bp, synthetic construct
  misc_feature 1..20: note = chemically synthesized
  source 1..20: mol_type = other DNA
ggtgaaggcagaggaaagag

SEQ ID NO: 835 - DNA, 20 bp, synthetic construct
  misc_feature 1..20: note = chemically synthesized
  source 1..20: mol_type = other DNA
aggcagaggaaagagcagtt

SEQ ID NO: 836 - DNA, 20 bp, synthetic construct
  misc_feature 1..20: note = chemically synthesized
  source 1..20: mol_type = other DNA
ggcagaggaaagagcagttt

SEQ ID NO: 837 - DNA, 20 bp, synthetic construct
  misc_feature 1..20: note = chemically synthesized
  source 1..20: mol_type = other DNA
gcagaggaaagagcagtttg

SEQ ID NO: 838 - DNA, 20 bp, synthetic construct
  misc_feature 1..20: note = chemically synthesized
  source 1..20: mol_type = other DNA
agagcagtttggggtaaatc

SEQ ID NO: 839 - DNA, 20 bp, synthetic construct
  misc_feature 1..20: note = chemically synthesized
  source 1..20: mol_type = other DNA
gagcagtttggggtaaatca

SEQ ID NO: 840 - DNA, 20 bp, synthetic construct
  misc_feature 1..20: note = chemically synthesized
  source 1..20: mol_type = other DNA
gtaaatcaaggatctgcatt

SEQ ID NO: 841 - DNA, 20 bp, synthetic construct
  misc_feature 1..20: note = chemically synthesized
  source 1..20: mol_type = other DNA
gatctgcatttggacatgtt

SEQ ID NO: 842 - DNA, 20 bp, synthetic construct
  misc_feature 1..20: note = chemically synthesized
  source 1..20: mol_type = other DNA
catttggacatgttaagttt

SEQ ID NO: 843 - DNA, 20 bp, synthetic construct
  misc_feature 1..20: note = chemically synthesized
  source 1..20: mol_type = other DNA
acatgttaagtttgagattc

SEQ ID NO: 844 - DNA, 20 bp, synthetic construct
  misc_feature 1..20: note = chemically synthesized
  source 1..20: mol_type = other DNA
gttaagtttgagattccagt

SEQ ID NO: 845 - DNA, 20 bp, synthetic construct
  misc_feature 1..20: note = chemically synthesized
  source 1..20: mol_type = other DNA
ttaagtttgagattccagtc

SEQ ID NO: 846 - DNA, 20 bp, synthetic construct
  misc_feature 1..20: note = chemically synthesized
  source 1..20: mol_type = other DNA
gagattccagtcaggcttcc

SEQ ID NO: 847 - DNA, 20 bp, synthetic construct
  misc_feature 1..20: note = chemically synthesized
  source 1..20: mol_type = other DNA
attccagtcaggcttccaag

SEQ ID NO: 848 - DNA, 20 bp, synthetic construct
  misc_feature 1..20: note = chemically synthesized
  source 1..20: mol_type = other DNA
cagtcaggcttccaagtggt

SEQ ID NO: 849 - DNA, 20 bp, synthetic construct
  misc_feature 1..20: note = chemically synthesized
  source 1..20: mol_type = other DNA
agtcaggcttccaagtggtg

SEQ ID NO: 850 - DNA, 20 bp, synthetic construct
  misc_feature 1..20: note = chemically synthesized
  source 1..20: mol_type = other DNA
ttccaagtggtgaggccaca

SEQ ID NO: 851 - DNA, 20 bp, synthetic construct
  misc_feature 1..20: note = chemically synthesized
  source 1..20: mol_type = other DNA
tccaagtggtgaggccacat

SEQ ID NO: 852 - DNA, 20 bp, synthetic construct
  misc_feature 1..20: note = chemically synthesized
  source 1..20: mol_type = other DNA
aagtggtgaggccacatagg

SEQ ID NO: 853 - DNA, 20 bp, synthetic construct
  misc_feature 1..20: note = chemically synthesized
  source 1..20: mol_type = other DNA
gtgaggccacataggcagtt

SEQ ID NO: 854 - DNA, 20 bp, synthetic construct
  misc_feature 1..20: note = chemically synthesized
  source 1..20: mol_type = other DNA
ccacataggcagttcagtgt

SEQ ID NO: 855 - DNA, 20 bp, synthetic construct
  misc_feature 1..20: note = chemically synthesized
  source 1..20: mol_type = other DNA
ggcagttcagtgtaagaatt

SEQ ID NO: 856 - DNA, 20 bp, synthetic construct
  misc_feature 1..20: note = chemically synthesized
  source 1..20: mol_type = other DNA
gcagttcagtgtaagaattc

SEQ ID NO: 857 - DNA, 20 bp, synthetic construct
  misc_feature 1..20: note = chemically synthesized
  source 1..20: mol_type = other DNA
cagtgtaagaattcaggacc

SEQ ID NO: 858 - DNA, 20 bp, synthetic construct
  misc_feature 1..20: note = chemically synthesized
  source 1..20: mol_type = other DNA
agtgtaagaattcaggacca

SEQ ID NO: 859 - DNA, 20 bp, synthetic construct
  misc_feature 1..20: note = chemically synthesized
  source 1..20: mol_type = other DNA
taagaattcaggaccaaggc

SEQ ID NO: 860 - DNA, 20 bp, synthetic construct
  misc_feature 1..20: note = chemically synthesized
  source 1..20: mol_type = other DNA
aagaattcaggaccaaggct

SEQ ID NO: 861 - DNA, 20 bp, synthetic construct
  misc_feature 1..20: note = chemically synthesized
  source 1..20: mol_type = other DNA
ttcaggaccaaggctgggca

SEQ ID NO: 862 - DNA, 20 bp, synthetic construct
  misc_feature 1..20: note = chemically synthesized
  source 1..20: mol_type = other DNA
aggaccaaggctgggcacgg

SEQ ID NO: 863 - DNA, 20 bp, synthetic construct
  misc_feature 1..20: note = chemically synthesized
  source 1..20: mol_type = other DNA
gtggctcacttctgtaatcc

SEQ ID NO: 864 - DNA, 20 bp, synthetic construct
  misc_feature 1..20: note = chemically synthesized
  source 1..20: mol_type = other DNA
cttctgtaatcccagcactt

SEQ ID NO: 865 - DNA, 20 bp, synthetic construct
  misc_feature 1..20: note = chemically synthesized
  source 1..20: mol_type = other DNA
ctgtaatcccagcactttgg

SEQ ID NO: 866 - DNA, 20 bp, synthetic construct
  misc_feature 1..20: note = chemically synthesized
  source 1..20: mol_type = other DNA
atcccagcactttggtggct

SEQ ID NO: 867 - DNA, 20 bp, synthetic construct
  misc_feature 1..20: note = chemically synthesized
  source 1..20: mol_type = other DNA
tcccagcactttggtggctg

SEQ ID NO: 868 - DNA, 20 bp, synthetic construct
  misc_feature 1..20: note = chemically synthesized
  source 1..20: mol_type = other DNA
cagcactttggtggctgagg

SEQ ID NO: 869 - DNA, 20 bp, synthetic construct
  misc_feature 1..20: note = chemically synthesized
  source 1..20: mol_type = other DNA
agcactttggtggctgaggc

SEQ ID NO: 870 - DNA, 20 bp, synthetic construct
  misc_feature 1..20: note = chemically synthesized
  source 1..20: mol_type = other DNA
actttggtggctgaggcagg

SEQ ID NO: 871 - DNA, 20 bp, synthetic construct
  misc_feature 1..20: note = chemically synthesized
  source 1..20: mol_type = other DNA
ctgaggcaggtagatcattt

SEQ ID NO: 872 - DNA, 20 bp, synthetic construct
  misc_feature 1..20: note = chemically synthesized
  source 1..20: mol_type = other DNA
tgaggcaggtagatcatttg

SEQ ID NO: 873 - DNA, 20 bp, synthetic construct
  misc_feature 1..20: note = chemically synthesized
  source 1..20: mol_type = other DNA
gcaggtagatcatttgaggt

SEQ ID NO: 874 - DNA, 20 bp, synthetic construct
  misc_feature 1..20: note = chemically synthesized
  source 1..20: mol_type = other DNA
caggtagatcatttgaggtc

SEQ ID NO: 875 - DNA, 20 bp, synthetic construct
  misc_feature 1..20: note = chemically synthesized
  source 1..20: mol_type = other DNA
ggtagatcatttgaggtcag

SEQ ID NO: 876 - DNA, 20 bp, synthetic construct
  misc_feature 1..20: note = chemically synthesized
  source 1..20: mol_type = other DNA
tcatttgaggtcaggagttt

SEQ ID NO: 877 - DNA, 20 bp, synthetic construct
  misc_feature 1..20: note = chemically synthesized
  source 1..20: mol_type = other DNA
tgaggtcaggagtttgagac

SEQ ID NO: 878 - DNA, 20 bp, synthetic construct
  misc_feature 1..20: note = chemically synthesized
  source 1..20: mol_type = other DNA
tcaggagtttgagacaagct

SEQ ID NO: 879 - DNA, 20 bp, synthetic construct
  misc_feature 1..20: note = chemically synthesized
  source 1..20: mol_type = other DNA
tgagacaagcttggccaaca

SEQ ID NO: 880 - DNA, 20 bp, synthetic construct
  misc_feature 1..20: note = chemically synthesized
  source 1..20: mol_type = other DNA
tctactaaaaatacaaaaat

SEQ ID NO: 881 - DNA, 20 bp, synthetic construct
  misc_feature 1..20: note = chemically synthesized
  source 1..20: mol_type = other DNA
taaaaatacaaaaattagcc

SEQ ID NO: 882 - DNA, 20 bp, synthetic construct
  misc_feature 1..20: note = chemically synthesized
  source 1..20: mol_type = other DNA
atacaaaaattagcctggtg

SEQ ID NO: 883 - DNA, 20 bp, synthetic construct
  misc_feature 1..20: note = chemically synthesized
  source 1..20: mol_type = other DNA
caaaaattagcctggtgtgg

SEQ ID NO: 884 - DNA, 20 bp, synthetic construct
  misc_feature 1..20: note = chemically synthesized
  source 1..20: mol_type = other DNA
ggtgtggtggcgcacgccta

SEQ ID NO: 885 - DNA, 20 bp, synthetic construct
  misc_feature 1..20: note = chemically synthesized
  source 1..20: mol_type = other DNA
gtggcgcacgcctatagtcc

SEQ ID NO: 886 - DNA, 20 bp, synthetic construct
  misc_feature 1..20: note = chemically synthesized
  source 1..20: mol_type = other DNA
tggcgcacgcctatagtccc

SEQ ID NO: 887 - DNA, 20 bp, synthetic construct
  misc_feature 1..20: note = chemically synthesized
  source 1..20: mol_type = other DNA
cgcctatagtcccaggtttt

SEQ ID NO: 888 - DNA, 20 bp, synthetic construct
  misc_feature 1..20: note = chemically synthesized
  source 1..20: mol_type = other DNA
gcctatagtcccaggttttc

SEQ ID NO: 889 - DNA, 20 bp, synthetic construct
  misc_feature 1..20: note = chemically synthesized
  source 1..20: mol_type = other DNA
ctatagtcccaggttttcag

SEQ ID NO: 890 - DNA, 20 bp, synthetic construct
  misc_feature 1..20: note = chemically synthesized
  source 1..20: mol_type = other DNA
tatagtcccaggttttcagg

SEQ ID NO: 891 - DNA, 20 bp, synthetic construct
  misc_feature 1..20: note = chemically synthesized
  source 1..20: mol_type = other DNA
tcccaggttttcaggaggct

SEQ ID NO: 892 - DNA, 20 bp, synthetic construct
  misc_feature 1..20: note = chemically synthesized
  source 1..20: mol_type = other DNA
cccaggttttcaggaggctt

SEQ ID NO: 893 - DNA, 20 bp, synthetic construct
  misc_feature 1..20: note = chemically synthesized
  source 1..20: mol_type = other DNA
aggttttcaggaggcttagg

SEQ ID NO: 894 - DNA, 20 bp, synthetic construct
  misc_feature 1..20: note = chemically synthesized
  source 1..20: mol_type = other DNA
ggttttcaggaggcttaggt

SEQ ID NO: 895 - DNA, 20 bp, synthetic construct
  misc_feature 1..20: note = chemically synthesized
  source 1..20: mol_type = other DNA
ttttcaggaggcttaggtag

SEQ ID NO: 896 - DNA, 20 bp, synthetic construct
  misc_feature 1..20: note = chemically synthesized
  source 1..20: mol_type = other DNA
gtaggagaatcccttgaacc

SEQ ID NO: 897 - DNA, 20 bp, synthetic construct
  misc_feature 1..20: note = chemically synthesized
  source 1..20: mol_type = other DNA
taggagaatcccttgaaccc

SEQ ID NO: 898 - DNA, 20 bp, synthetic construct
  misc_feature 1..20: note = chemically synthesized
  source 1..20: mol_type = other DNA
ggagaatcccttgaacccag

SEQ ID NO: 899 - DNA, 20 bp, synthetic construct
  misc_feature 1..20: note = chemically synthesized
  source 1..20: mol_type = other DNA
gagaatcccttgaacccagg

SEQ ID NO: 900 - DNA, 20 bp, synthetic construct
  misc_feature 1..20: note = chemically synthesized
  source 1..20: mol_type = other DNA
tcccttgaacccaggaggtg

SEQ ID NO: 901 - DNA, 20 bp, synthetic construct
  misc_feature 1..20: note = chemically synthesized
  source 1..20: mol_type = other DNA
cccttgaacccaggaggtgc

SEQ ID NO: 902 - DNA, 20 bp, synthetic construct
  misc_feature 1..20: note = chemically synthesized
  source 1..20: mol_type = other DNA
aacccaggaggtgcaggttg

SEQ ID NO: 903 - DNA, 20 bp, synthetic construct
  misc_feature 1..20: note = chemically synthesized
  source 1..20: mol_type = other DNA
caggaggtgcaggttgcagt

SEQ ID NO: 904 - DNA, 20 bp, synthetic construct
  misc_feature 1..20: note = chemically synthesized
  source 1..20: mol_type = other DNA
ggtgcaggttgcagtgagct

SEQ ID NO: 905 - DNA, 20 bp, synthetic construct
  misc_feature 1..20: note = chemically synthesized
  source 1..20: mol_type = other DNA
gagattgtgccactgcactc

SEQ ID NO: 906 - DNA, 20 bp, synthetic construct
  misc_feature 1..20: note = chemically synthesized
  source 1..20: mol_type = other DNA
tgtgccactgcactccagcc

SEQ ID NO: 907 - DNA, 20 bp, synthetic construct
  misc_feature 1..20: note = chemically synthesized
  source 1..20: mol_type = other DNA
gtgccactgcactccagcct

SEQ ID NO: 908 - DNA, 20 bp, synthetic construct
  misc_feature 1..20: note = chemically synthesized
  source 1..20: mol_type = other DNA
ctgcactccagcctgggtga

SEQ ID NO: 909 - DNA, 20 bp, synthetic construct
  misc_feature 1..20: note = chemically synthesized
  source 1..20: mol_type = other DNA
gcactccagcctgggtgata

SEQ ID NO: 910 - DNA, 20 bp, synthetic construct
  misc_feature 1..20: note = chemically synthesized
  source 1..20: mol_type = other DNA
tccagcctgggtgatagagt

SEQ ID NO: 911 - DNA, 20 bp, synthetic construct
  misc_feature 1..20: note = chemically synthesized
  source 1..20: mol_type = other DNA
aaaaaaaaaaaaaaaaactg

SEQ ID NO: 912 - DNA, 20 bp, synthetic construct
  misc_feature 1..20: note = chemically synthesized
  source 1..20: mol_type = other DNA
aaaaaaaaaaaaaaaactga

SEQ ID NO: 913 - DNA, 20 bp, synthetic construct
  misc_feature 1..20: note = chemically synthesized
  source 1..20: mol_type = other DNA
aaactgaaggaattattcct

SEQ ID NO: 914 - DNA, 20 bp, synthetic construct
  misc_feature 1..20: note = chemically synthesized
  source 1..20: mol_type = other DNA
aactgaaggaattattcctc

SEQ ID NO: 915 - DNA, 20 bp, synthetic construct
  misc_feature 1..20: note = chemically synthesized
  source 1..20: mol_type = other DNA
aggaattattcctcaggatt

SEQ ID NO: 916 - DNA, 20 bp, synthetic construct
  misc_feature 1..20: note = chemically synthesized
  source 1..20: mol_type = other DNA
ggaattattcctcaggattt

SEQ ID NO: 917 - DNA, 20 bp, synthetic construct
  misc_feature 1..20: note = chemically synthesized
  source 1..20: mol_type = other DNA
atttgggtctaatttgccct

SEQ ID NO: 918 - DNA, 20 bp, synthetic construct
  misc_feature 1..20: note = chemically synthesized
  source 1..20: mol_type = other DNA
tgccctgagcaccaactcct

SEQ ID NO: 919 - DNA, 20 bp, synthetic construct
  misc_feature 1..20: note = chemically synthesized
  source 1..20: mol_type = other DNA
actcctgagttcaactacca

SEQ ID NO: 920 - DNA, 20 bp, synthetic construct
  misc_feature 1..20: note = chemically synthesized
  source 1..20: mol_type = other DNA
ctgagttcaactaccatggc

SEQ ID NO: 921 - DNA, 20 bp, synthetic construct
  misc_feature 1..20: note = chemically synthesized
  source 1..20: mol_type = other DNA
agacacaccttaacattttc

SEQ ID NO: 922 - DNA, 20 bp, synthetic construct
  misc_feature 1..20: note = chemically synthesized
  source 1..20: mol_type = other DNA
taacattttctagaatccac

SEQ ID NO: 923 - DNA, 20 bp, synthetic construct
  misc_feature 1..20: note = chemically synthesized
  source 1..20: mol_type = other DNA
tttctagaatccaccagctt

SEQ ID NO: 924 - DNA, 20 bp, synthetic construct
  misc_feature 1..20: note = chemically synthesized
  source 1..20: mol_type = other DNA
ctagaatccaccagctttag

SEQ ID NO: 925 - DNA, 20 bp, synthetic construct
  misc_feature 1..20: note = chemically synthesized
  source 1..20: mol_type = other DNA
agaatccaccagctttagtg

SEQ ID NO: 926 - DNA, 20 bp, synthetic construct
  misc_feature 1..20: note = chemically synthesized
  source 1..20: mol_type = other DNA
agtggagtctgtctaatcat

SEQ ID NO: 927 - DNA, 20 bp, synthetic construct
  misc_feature 1..20: note = chemically synthesized
  source 1..20: mol_type = other DNA
gtctgtctaatcatgagtat

SEQ ID NO: 928 - DNA, 20 bp, synthetic construct
  misc_feature 1..20: note = chemically synthesized
  source 1..20: mol_type = other DNA
tctaatcatgagtattggaa

SEQ ID NO: 929 - DNA, 20 bp, synthetic construct
  misc_feature 1..20: note = chemically synthesized
  source 1..20: mol_type = other DNA
ctaatcatgagtattggaat

SEQ ID NO: 930 - DNA, 20 bp, synthetic construct
  misc_feature 1..20: note = chemically synthesized
  source 1..20: mol_type = other DNA
atgagtattggaataggatc

SEQ ID NO: 931 - DNA, 20 bp, synthetic construct
  misc_feature 1..20: note = chemically synthesized
  source 1..20: mol_type = other DNA
tgagtattggaataggatct

SEQ ID NO: 932 - DNA, 20 bp, synthetic construct
  misc_feature 1..20: note = chemically synthesized
  source 1..20: mol_type = other DNA
gagtattggaataggatctg

SEQ ID NO: 933 - DNA, 20 bp, synthetic construct
  misc_feature 1..20: note = chemically synthesized
  source 1..20: mol_type = other DNA
agtattggaataggatctgg

SEQ ID NO: 934 - DNA, 20 bp, synthetic construct
  misc_feature 1..20: note = chemically synthesized
  source 1..20: mol_type = other DNA
attggaataggatctggggg

SEQ ID NO: 935 - DNA, 20 bp, synthetic construct
  misc_feature 1..20: note = chemically synthesized
  source 1..20: mol_type = other DNA
gaataggatctgggggcagt

SEQ ID NO: 936 - DNA, 20 bp, synthetic construct
  misc_feature 1..20: note = chemically synthesized
  source 1..20: mol_type = other DNA
aataggatctgggggcagtg

SEQ ID NO: 937 - DNA, 20 bp, synthetic construct
  misc_feature 1..20: note = chemically synthesized
  source 1..20: mol_type = other DNA
ataggatctgggggcagtga

SEQ ID NO: 938 - DNA, 20 bp, synthetic construct
  misc_feature 1..20: note = chemically synthesized
  source 1..20: mol_type = other DNA
taggatctgggggcagtgag

SEQ ID NO: 939 - DNA, 20 bp, synthetic construct
  misc_feature 1..20: note = chemically synthesized
  source 1..20: mol_type = other DNA
aggatctgggggcagtgagg

SEQ ID NO: 940 - DNA, 20 bp, synthetic construct
  misc_feature 1..20: note = chemically synthesized
  source 1..20: mol_type = other DNA
atctgggggcagtgaggggg

SEQ ID NO: 941 - DNA, 20 bp, synthetic construct
  misc_feature 1..20: note = chemically synthesized
  source 1..20: mol_type = other DNA
tgggggcagtgagggggtgg

SEQ ID NO: 942 - DNA, 20 bp, synthetic construct
  misc_feature 1..20: note = chemically synthesized
  source 1..20: mol_type = other DNA
gagggggtggcagccacgtg

SEQ ID NO: 943 - DNA, 20 bp, synthetic construct
  misc_feature 1..20: note = chemically synthesized
  source 1..20: mol_type = other DNA
ggggtggcagccacgtgtgg

SEQ ID NO: 944 - DNA, 20 bp, synthetic construct
  misc_feature 1..20: note = chemically synthesized
  source 1..20: mol_type = other DNA
ggtggcagccacgtgtggca

SEQ ID NO: 945 - DNA, 20 bp, synthetic construct
  misc_feature 1..20: note = chemically synthesized
  source 1..20: mol_type = other DNA
cagccacgtgtggcagagaa

SEQ ID NO: 946 - DNA, 20 bp, synthetic construct
  misc_feature 1..20: note = chemically synthesized
  source 1..20: mol_type = other DNA
tgtggcagagaaaagcacac

SEQ ID NO: 947 - DNA, 20 bp, synthetic construct
  misc_feature 1..20: note = chemically synthesized
  source 1..20: mol_type = other DNA
gtggcagagaaaagcacaca

SEQ ID NO: 948 - DNA, 20 bp, synthetic construct
  misc_feature 1..20: note = chemically synthesized
  source 1..20: mol_type = other DNA
cagagaaaagcacacaagga

SEQ ID NO: 949 - DNA, 20 bp, synthetic construct
  misc_feature 1..20: note = chemically synthesized
  source 1..20: mol_type = other DNA
gagaaaagcacacaaggaaa

SEQ ID NO: 950 - DNA, 20 bp, synthetic construct
  misc_feature 1..20: note = chemically synthesized
  source 1..20: mol_type = other DNA
gcacacaaggaaagagcacc

SEQ ID NO: 951 - DNA, 20 bp, synthetic construct
  misc_feature 1..20: note = chemically synthesized
  source 1..20: mol_type = other DNA
cacacaaggaaagagcaccc

SEQ ID NO: 952 - DNA, 20 bp, synthetic construct
  misc_feature 1..20: note = chemically synthesized
  source 1..20: mol_type = other DNA
gagcacccaggactgtcata

SEQ ID NO: 953 - DNA, 20 bp, synthetic construct
  misc_feature 1..20: note = chemically synthesized
  source 1..20: mol_type = other DNA
cacccaggactgtcatatgg

SEQ ID NO: 954 - DNA, 20 bp, synthetic construct
  misc_feature 1..20: note = chemically synthesized
  source 1..20: mol_type = other DNA
caggactgtcatatggaaga

SEQ ID NO: 955 - DNA, 20 bp, synthetic construct
  misc_feature 1..20: note = chemically synthesized
  source 1..20: mol_type = other DNA
actgtcatatggaagaaaga

SEQ ID NO: 956 - DNA, 20 bp, synthetic construct
  misc_feature 1..20: note = chemically synthesized
  source 1..20: mol_type = other DNA
ctgtcatatggaagaaagac

SEQ ID NO: 957 - DNA, 20 bp, synthetic construct
  misc_feature 1..20: note = chemically synthesized
  source 1..20: mol_type = other DNA
caactcacccttcacaaaat

SEQ ID NO: 958 - DNA, 20 bp, synthetic construct
  misc_feature 1..20: note = chemically synthesized
  source 1..20: mol_type = other DNA
aactcacccttcacaaaatg

SEQ ID NO: 959 - DNA, 20 bp, synthetic construct
  misc_feature 1..20: note = chemically synthesized
  source 1..20: mol_type = other DNA
acccttcacaaaatgaggac

SEQ ID NO: 960 - DNA, 20 bp, synthetic construct
  misc_feature 1..20: note = chemically synthesized
  source 1..20: mol_type = other DNA
cacaaaatgaggaccagaca

SEQ ID NO: 961 - DNA, 20 bp, synthetic construct
  misc_feature 1..20: note = chemically synthesized
  source 1..20: mol_type = other DNA
tgaggaccagacacagctga

SEQ ID NO: 962 - DNA, 20 bp, synthetic construct
  misc_feature 1..20: note = chemically synthesized
  source 1..20: mol_type = other DNA
ccagacacagctgatggtat

SEQ ID NO: 963 - DNA, 20 bp, synthetic construct
  misc_feature 1..20: note = chemically synthesized
  source 1..20: mol_type = other DNA
gctgatggtatgagttgatg

SEQ ID NO: 964 - DNA, 20 bp, synthetic construct
  misc_feature 1..20: note = chemically synthesized
  source 1..20: mol_type = other DNA
ctgatggtatgagttgatgc

SEQ ID NO: 965 - DNA, 20 bp, synthetic construct
  misc_feature 1..20: note = chemically synthesized
  source 1..20: mol_type = other DNA
tatgagttgatgcaggtgtg

SEQ ID NO: 966 - DNA, 20 bp, synthetic construct
  misc_feature 1..20: note = chemically synthesized
  source 1..20: mol_type = other DNA
tgagttgatgcaggtgtgtg

SEQ ID NO: 967 - DNA, 20 bp, synthetic construct
  misc_feature 1..20: note = chemically synthesized
  source 1..20: mol_type = other DNA
tgctcccctcctactacaca

SEQ ID NO: 968 - DNA, 20 bp, synthetic construct
  misc_feature 1..20: note = chemically synthesized
  source 1..20: mol_type = other DNA
ccctcctactacacatggtt

SEQ ID NO: 969 - DNA, 20 bp, synthetic construct
  misc_feature 1..20: note = chemically synthesized
  source 1..20: mol_type = other DNA
cctcctactacacatggtta

SEQ ID NO: 970 - DNA, 20 bp, synthetic construct
  misc_feature 1..20: note = chemically synthesized
  source 1..20: mol_type = other DNA
aaggcctgttgctctgtctc

SEQ ID NO: 971 - DNA, 20 bp, synthetic construct
  misc_feature 1..20: note = chemically synthesized
  source 1..20: mol_type = other DNA
aggcctgttgctctgtctcc

SEQ ID NO: 972 - DNA, 20 bp, synthetic construct
  misc_feature 1..20: note = chemically synthesized
  source 1..20: mol_type = other DNA
ctctctgcactacctcttca

SEQ ID NO: 973 - DNA, 20 bp, synthetic construct
  misc_feature 1..20: note = chemically synthesized
  source 1..20: mol_type = other DNA
tctctgcactacctcttcat

SEQ ID NO: 974 - DNA, 20 bp, synthetic construct
  misc_feature 1..20: note = chemically synthesized
  source 1..20: mol_type = other DNA
ctacctcttcatgggtgcct

SEQ ID NO: 975 - DNA, 20 bp, synthetic construct
  misc_feature 1..20: note = chemically synthesized
  source 1..20: mol_type = other DNA
acctcttcatgggtgcctca

SEQ ID NO: 976 - DNA, 20 bp, synthetic construct
  misc_feature 1..20: note = chemically synthesized
  source 1..20: mol_type = other DNA
tcttcatgggtgcctcagag

SEQ ID NO: 977 - DNA, 20 bp, synthetic construct
  misc_feature 1..20: note = chemically synthesized
  source 1..20: mol_type = other DNA
cttcatgggtgcctcagagc

SEQ ID NO: 978 - DNA, 20 bp, synthetic construct
  misc_feature 1..20: note = chemically synthesized
  source 1..20: mol_type = other DNA
ggtgcctcagagcaggacct

SEQ ID NO: 979 - DNA, 20 bp, synthetic construct
  misc_feature 1..20: note = chemically synthesized
  source 1..20: mol_type = other DNA
ccttggtctttccttgtttg

SEQ ID NO: 980 - DNA, 20 bp, synthetic construct
  misc_feature 1..20: note = chemically synthesized
  source 1..20: mol_type = other DNA
tctttccttgtttgaagctt

SEQ ID NO: 981 - DNA, 20 bp, synthetic construct
  misc_feature 1..20: note = chemically synthesized
  source 1..20: mol_type = other DNA
ctttccttgtttgaagcttt

SEQ ID NO: 982 - DNA, 20 bp, synthetic construct
  misc_feature 1..20: note = chemically synthesized
  source 1..20: mol_type = other DNA
gtttgaagctttgggctacg

SEQ ID NO: 983 - DNA, 20 bp, synthetic construct
  misc_feature 1..20: note = chemically synthesized
  source 1..20: mol_type = other DNA
ctttgggctacgtggatgac

SEQ ID NO: 984 - DNA, 20 bp, synthetic construct
  misc_feature 1..20: note = chemically synthesized
  source 1..20: mol_type = other DNA
tgttcgtgttctatgatcat

SEQ ID NO: 985 - DNA, 20 bp, synthetic construct
  misc_feature 1..20: note = chemically synthesized
  source 1..20: mol_type = other DNA
ttcgtgttctatgatcatga

SEQ ID NO: 986 - DNA, 20 bp, synthetic construct
  misc_feature 1..20: note = chemically synthesized
  source 1..20: mol_type = other DNA
tgatcatgagagtcgccgtg

SEQ ID NO: 987 - DNA, 20 bp, synthetic construct
  misc_feature 1..20: note = chemically synthesized
  source 1..20: mol_type = other DNA
atcatgagagtcgccgtgtg

SEQ ID NO: 988 - DNA, 20 bp, synthetic construct
  misc_feature 1..20: note = chemically synthesized
  source 1..20: mol_type = other DNA
gtgtggagccccgaactcca

SEQ ID NO: 989 - DNA, 20 bp, synthetic construct
  misc_feature 1..20: note = chemically synthesized
  source 1..20: mol_type = other DNA
tgtggagccccgaactccat

SEQ ID NO: 990 - DNA, 20 bp, synthetic construct
  misc_feature 1..20: note = chemically synthesized
  source 1..20: mol_type = other DNA
ccccgaactccatgggtttc

SEQ ID NO: 991 - DNA, 20 bp, synthetic construct
  misc_feature 1..20: note = chemically synthesized
  source 1..20: mol_type = other DNA
cgaactccatgggtttccag

SEQ ID NO: 992 - DNA, 20 bp, synthetic construct
  misc_feature 1..20: note = chemically synthesized
  source 1..20: mol_type = other DNA
tgggtttccagtagaatttc

SEQ ID NO: 993 - DNA, 20 bp, synthetic construct
  misc_feature 1..20: note = chemically synthesized
  source 1..20: mol_type = other DNA
tttccagtagaatttcaagc

SEQ ID NO: 994 - DNA, 20 bp, synthetic construct
  misc_feature 1..20: note = chemically synthesized
  source 1..20: mol_type = other DNA
gtagaatttcaagccagatg

SEQ ID NO: 995 - DNA, 20 bp, synthetic construct
  misc_feature 1..20: note = chemically synthesized
  source 1..20: mol_type = other DNA
tttcaagccagatgtggctg

SEQ ID NO: 996 - DNA, 20 bp, synthetic construct
  misc_feature 1..20: note = chemically synthesized
  source 1..20: mol_type = other DNA
agccagatgtggctgcagct

SEQ ID NO: 997 - DNA, 20 bp, synthetic construct
  misc_feature 1..20: note = chemically synthesized
  source 1..20: mol_type = other DNA
agatgtggctgcagctgagt

SEQ ID NO: 998 - DNA, 20 bp, synthetic construct
  misc_feature 1..20: note = chemically synthesized
  source 1..20: mol_type = other DNA
atgtggctgcagctgagtca

SEQ ID NO: 999 - DNA, 20 bp, synthetic construct
  misc_feature 1..20: note = chemically synthesized
  source 1..20: mol_type = other DNA
gcagctgagtcagagtctga

SEQ ID NO: 1000 - DNA, 20 bp, synthetic construct
  misc_feature 1..20: note = chemically synthesized
  source 1..20: mol_type = other DNA
cagctgagtcagagtctgaa

SEQ ID NO: 1001 - DNA, 20 bp, synthetic construct
  misc_feature 1..20: note = chemically synthesized
  source 1..20: mol_type = other DNA
agctgagtcagagtctgaaa

SEQ ID NO: 1002 - DNA, 20 bp, synthetic construct
  misc_feature 1..20: note = chemically synthesized
  source 1..20: mol_type = other DNA
tgagtcagagtctgaaaggg

SEQ ID NO: 1003 - DNA, 20 bp, synthetic construct
  misc_feature 1..20: note = chemically synthesized
  source 1..20: mol_type = other DNA
gagtcagagtctgaaagggt

SEQ ID NO: 1004 - DNA, 20 bp, synthetic construct
  misc_feature 1..20: note = chemically synthesized
  source 1..20: mol_type = other DNA
acatgttcactgttgacttc

SEQ ID NO: 1005 - DNA, 20 bp, synthetic construct
  misc_feature 1..20: note = chemically synthesized
  source 1..20: mol_type = other DNA
tgttgacttctggactatta

SEQ ID NO: 1006 - DNA, 20 bp, synthetic construct
  misc_feature 1..20: note = chemically synthesized
  source 1..20: mol_type = other DNA
attatggaaaatcacaacca

SEQ ID NO: 1007 - DNA, 20 bp, synthetic construct
  misc_feature 1..20: note = chemically synthesized
  source 1..20: mol_type = other DNA
tggaaaatcacaaccacagc

SEQ ID NO: 1008 - DNA, 20 bp, synthetic construct
  misc_feature 1..20: note = chemically synthesized
  source 1..20: mol_type = other DNA
ggaaaatcacaaccacagca

SEQ ID NO: 1009 - DNA, 20 bp, synthetic construct
  misc_feature 1..20: note = chemically synthesized
  source 1..20: mol_type = other DNA
gaaaatcacaaccacagcaa

SEQ ID NO: 1010 - DNA, 20 bp, synthetic construct
  misc_feature 1..20: note = chemically synthesized
  source 1..20: mol_type = other DNA
acaaccacagcaagggtatg

SEQ ID NO: 1011 - DNA, 20 bp, synthetic construct
  misc_feature 1..20: note = chemically synthesized
  source 1..20: mol_type = other DNA
aaccacagcaagggtatgtg

SEQ ID NO: 1012 - DNA, 20 bp, synthetic construct
  misc_feature 1..20: note = chemically synthesized
  source 1..20: mol_type = other DNA
ccacagcaagggtatgtgga

SEQ ID NO: 1013 - DNA, 20 bp, synthetic construct
  misc_feature 1..20: note = chemically synthesized
  source 1..20: mol_type = other DNA
cacagcaagggtatgtggag

SEQ ID NO: 1014 - DNA, 20 bp, synthetic construct
  misc_feature 1..20: note = chemically synthesized
  source 1..20: mol_type = other DNA
acagcaagggtatgtggaga

SEQ ID NO: 1015 - DNA, 20 bp, synthetic construct
  misc_feature 1..20: note = chemically synthesized
  source 1..20: mol_type = other DNA
cagcaagggtatgtggagag

SEQ ID NO: 1016 - DNA, 20 bp, synthetic construct
  misc_feature 1..20: note = chemically synthesized
  source 1..20: mol_type = other DNA
agcaagggtatgtggagagg

SEQ ID NO: 1017 - DNA, 20 bp, synthetic construct
  misc_feature 1..20: note = chemically synthesized
  source 1..20: mol_type = other DNA
agagggggcctcaccttcct

SEQ ID NO: 1018 - DNA, 20 bp, synthetic construct
  misc_feature 1..20: note = chemically synthesized
  source 1..20: mol_type = other DNA
gagggggcctcaccttcctg

SEQ ID NO: 1019 - DNA, 20 bp, synthetic construct
  misc_feature 1..20: note = chemically synthesized
  source 1..20: mol_type = other DNA
cctcaccttcctgaggttgt

SEQ ID NO: 1020 - DNA, 20 bp, synthetic construct
  misc_feature 1..20: note = chemically synthesized
  source 1..20: mol_type = other DNA
tcaccttcctgaggttgtca

SEQ ID NO: 1021 - DNA, 20 bp, synthetic construct
  misc_feature 1..20: note = chemically synthesized
  source 1..20: mol_type = other DNA
tcatcttttcatgcatcttg

SEQ ID NO: 1022 - DNA, 20 bp, synthetic construct
  misc_feature 1..20: note = chemically synthesized
  source 1..20: mol_type = other DNA
catcttttcatgcatcttga

SEQ ID NO: 1023 - DNA, 20 bp, synthetic construct
  misc_feature 1..20: note = chemically synthesized
  source 1..20: mol_type = other DNA
ttcatgcatcttgaaggaaa

SEQ ID NO: 1024 - DNA, 20 bp, synthetic construct
  misc_feature 1..20: note = chemically synthesized
  source 1..20: mol_type = other DNA
tgcatcttgaaggaaacagc

SEQ ID NO: 1025 - DNA, 20 bp, synthetic construct
  misc_feature 1..20: note = chemically synthesized
  source 1..20: mol_type = other DNA
atcttgaaggaaacagctgg

SEQ ID NO: 1026 - DNA, 20 bp, synthetic construct
  misc_feature 1..20: note = chemically synthesized
  source 1..20: mol_type = other DNA
aaggaaacagctggaagtct

SEQ ID NO: 1027 - DNA, 20 bp, synthetic construct
  misc_feature 1..20: note = chemically synthesized
  source 1..20: mol_type = other DNA
aggaaacagctggaagtctg

SEQ ID NO: 1028 - DNA, 20 bp, synthetic construct
  misc_feature 1..20: note = chemically synthesized
  source 1..20: mol_type = other DNA
gctggaagtctgaggtcttg

SEQ ID NO: 1029 - DNA, 20 bp, synthetic construct
  misc_feature 1..20: note = chemically synthesized
  source 1..20: mol_type = other DNA
ctggaagtctgaggtcttgt

SEQ ID NO: 1030 - DNA, 20 bp, synthetic construct
  misc_feature 1..20: note = chemically synthesized
  source 1..20: mol_type = other DNA
ggaagtctgaggtcttgtgg

SEQ ID NO: 1031 - DNA, 20 bp, synthetic construct
  misc_feature 1..20: note = chemically synthesized
  source 1..20: mol_type = other DNA
agtctgaggtcttgtgggag

SEQ ID NO: 1032 - DNA, 20 bp, synthetic construct
  misc_feature 1..20: note = chemically synthesized
  source 1..20: mol_type = other DNA
gtctgaggtcttgtgggagc

SEQ ID NO: 1033 - DNA, 20 bp, synthetic construct
  misc_feature 1..20: note = chemically synthesized
  source 1..20: mol_type = other DNA
tctgaggtcttgtgggagca

SEQ ID NO: 1034 - DNA, 20 bp, synthetic construct
  misc_feature 1..20: note = chemically synthesized
  source 1..20: mol_type = other DNA
gaggtcttgtgggagcaggg

SEQ ID NO: 1035 - DNA, 20 bp, synthetic construct
  misc_feature 1..20: note = chemically synthesized
  source 1..20: mol_type = other DNA
ggtcttgtgggagcagggaa

SEQ ID NO: 1036 - DNA, 20 bp, synthetic construct
  misc_feature 1..20: note = chemically synthesized
  source 1..20: mol_type = other DNA
gtcttgtgggagcagggaag

SEQ ID NO: 1037 - DNA, 20 bp, synthetic construct
  misc_feature 1..20: note = chemically synthesized
  source 1..20: mol_type = other DNA
tcttgtgggagcagggaaga

SEQ ID NO: 1038 - DNA, 20 bp, synthetic construct
  misc_feature 1..20: note = chemically synthesized
  source 1..20: mol_type = other DNA
tgtgggagcagggaagaggg

SEQ ID NO: 1039 - DNA, 20 bp, synthetic construct
  misc_feature 1..20: note = chemically synthesized
  source 1..20: mol_type = other DNA
gtgggagcagggaagaggga

SEQ ID NO: 1040 - DNA, 20 bp, synthetic construct
  misc_feature 1..20: note = chemically synthesized
  source 1..20: mol_type = other DNA
agggaaggaatttgcttcct

SEQ ID NO: 1041 - DNA, 20 bp, synthetic construct
  misc_feature 1..20: note = chemically synthesized
  source 1..20: mol_type = other DNA
atttgcttcctgagatcatt

SEQ ID NO: 1042 - DNA, 20 bp, synthetic construct
  misc_feature 1..20: note = chemically synthesized
  source 1..20: mol_type = other DNA
tcctgagatcatttggtcct

SEQ ID NO: 1043 - DNA, 20 bp, synthetic construct
  misc_feature 1..20: note = chemically synthesized
  source 1..20: mol_type = other DNA
cctgagatcatttggtcctt

SEQ ID NO: 1044 - DNA, 20 bp, synthetic construct
  misc_feature 1..20: note = chemically synthesized
  source 1..20: mol_type = other DNA
ctgagatcatttggtccttg

SEQ ID NO: 1045 - DNA, 20 bp, synthetic construct
  misc_feature 1..20: note = chemically synthesized
  source 1..20: mol_type = other DNA
gatcatttggtccttgggga

SEQ ID NO: 1046 - DNA, 20 bp, synthetic construct
  misc_feature 1..20: note = chemically synthesized
  source 1..20: mol_type = other DNA
catttggtccttggggatgg

SEQ ID NO: 1047 - DNA, 20 bp, synthetic construct
  misc_feature 1..20: note = chemically synthesized
  source 1..20: mol_type = other DNA
gtccttggggatggtggaaa

SEQ ID NO: 1048 - DNA, 20 bp, synthetic construct
  misc_feature 1..20: note = chemically synthesized
  source 1..20: mol_type = other DNA
tccttggggatggtggaaat

SEQ ID NO: 1049 - DNA, 20 bp, synthetic construct
  misc_feature 1..20: note = chemically synthesized
  source 1..20: mol_type = other DNA
ccttggggatggtggaaata

SEQ ID NO: 1050 - DNA, 20 bp, synthetic construct
  misc_feature 1..20: note = chemically synthesized
  source 1..20: mol_type = other DNA
gaaatagggacctattcctt

SEQ ID NO: 1051 - DNA, 20 bp, synthetic construct
  misc_feature 1..20: note = chemically synthesized
  source 1..20: mol_type = other DNA
gggacctattcctttggttg

SEQ ID NO: 1052 - DNA, 20 bp, synthetic construct
  misc_feature 1..20: note = chemically synthesized
  source 1..20: mol_type = other DNA
ttcctttggttgcagttaac

SEQ ID NO: 1053 - DNA, 20 bp, synthetic construct
  misc_feature 1..20: note = chemically synthesized
  source 1..20: mol_type = other DNA
tcctttggttgcagttaaca

SEQ ID NO: 1054 - DNA, 20 bp, synthetic construct
  misc_feature 1..20: note = chemically synthesized
  source 1..20: mol_type = other DNA
ttggttgcagttaacaaggc

SEQ ID NO: 1055 - DNA, 20 bp, synthetic construct
  misc_feature 1..20: note = chemically synthesized
  source 1..20: mol_type = other DNA
tggttgcagttaacaaggct

SEQ ID NO: 1056 - DNA, 20 bp, synthetic construct
  misc_feature 1..20: note = chemically synthesized
  source 1..20: mol_type = other DNA
ggttgcagttaacaaggctg

SEQ ID NO: 1057 - DNA, 20 bp, synthetic construct
  misc_feature 1..20: note = chemically synthesized
  source 1..20: mol_type = other DNA
aacaaggctggggatttttc

SEQ ID NO: 1058 - DNA, 20 bp, synthetic construct
  misc_feature 1..20: note = chemically synthesized
  source 1..20: mol_type = other DNA
caaggctggggatttttcca

SEQ ID NO: 1059 - DNA, 20 bp, synthetic construct
  misc_feature 1..20: note = chemically synthesized
  source 1..20: mol_type = other DNA
ttccagagtcccacaccctg

SEQ ID NO: 1060 - DNA, 20 bp, synthetic construct
  misc_feature 1..20: note = chemically synthesized
  source 1..20: mol_type = other DNA
tccagagtcccacaccctgc

SEQ ID NO: 1061 - DNA, 20 bp, synthetic construct
  misc_feature 1..20: note = chemically synthesized
  source 1..20: mol_type = other DNA
ccacaccctgcaggtcatcc

SEQ ID NO: 1062 - DNA, 20 bp, synthetic construct
  misc_feature 1..20: note = chemically synthesized
  source 1..20: mol_type = other DNA
cacaccctgcaggtcatcct

SEQ ID NO: 1063 - DNA, 20 bp, synthetic construct
  misc_feature 1..20: note = chemically synthesized
  source 1..20: mol_type = other DNA
catcctgggctgtgaaatgc

SEQ ID NO: 1064 - DNA, 20 bp, synthetic construct
  misc_feature 1..20: note = chemically synthesized
  source 1..20: mol_type = other DNA
cctgggctgtgaaatgcaag

SEQ ID NO: 1065 - DNA, 20 bp, synthetic construct
  misc_feature 1..20: note = chemically synthesized
  source 1..20: mol_type = other DNA
tgtgaaatgcaagaagacaa

SEQ ID NO: 1066 - DNA, 20 bp, synthetic construct
  misc_feature 1..20: note = chemically synthesized
  source 1..20: mol_type = other DNA
tgcaagaagacaacagtacc

SEQ ID NO: 1067 - DNA, 20 bp, synthetic construct
  misc_feature 1..20: note = chemically synthesized
  source 1..20: mol_type = other DNA
gcaagaagacaacagtaccg

SEQ ID NO: 1068 - DNA, 20 bp, synthetic construct
  misc_feature 1..20: note = chemically synthesized
  source 1..20: mol_type = other DNA
caagaagacaacagtaccga

SEQ ID NO: 1069 - DNA, 20 bp, synthetic construct
  misc_feature 1..20: note = chemically synthesized
  source 1..20: mol_type = other DNA
acaacagtaccgagggctac

SEQ ID NO: 1070 - DNA, 20 bp, synthetic construct
  misc_feature 1..20: note = chemically synthesized
  source 1..20: mol_type = other DNA
acagtaccgagggctactgg

SEQ ID NO: 1071 - DNA, 20 bp, synthetic construct
  misc_feature 1..20: note = chemically synthesized
  source 1..20: mol_type = other DNA
accgagggctactggaagta

SEQ ID NO: 1072 - DNA, 20 bp, synthetic construct
  misc_feature 1..20: note = chemically synthesized
  source 1..20: mol_type = other DNA
ccgagggctactggaagtac

SEQ ID NO: 1073 - DNA, 20 bp, synthetic construct
  misc_feature 1..20: note = chemically synthesized
  source 1..20: mol_type = other DNA
tactggaagtacgggtatga

SEQ ID NO: 1074 - DNA, 20 bp, synthetic construct
  misc_feature 1..20: note = chemically synthesized
  source 1..20: mol_type = other DNA
actggaagtacgggtatgat

SEQ ID NO: 1075 - DNA, 20 bp, synthetic construct
  misc_feature 1..20: note = chemically synthesized
  source 1..20: mol_type = other DNA
ggaagtacgggtatgatggg

SEQ ID NO: 1076 - DNA, 20 bp, synthetic construct
  misc_feature 1..20: note = chemically synthesized
  source 1..20: mol_type = other DNA
gaagtacgggtatgatgggc

SEQ ID NO: 1077 - DNA, 20 bp, synthetic construct
  misc_feature 1..20: note = chemically synthesized
  source 1..20: mol_type = other DNA
tgaattctgccctgacacac

SEQ ID NO: 1078 - DNA, 20 bp, synthetic construct
  misc_feature 1..20: note = chemically synthesized
  source 1..20: mol_type = other DNA
tctgccctgacacactggat

SEQ ID NO: 1079 - DNA, 20 bp, synthetic construct
  misc_feature 1..20: note = chemically synthesized
  source 1..20: mol_type = other DNA
tgccctgacacactggattg

SEQ ID NO: 1080 - DNA, 20 bp, synthetic construct
  misc_feature 1..20: note = chemically synthesized
  source 1..20: mol_type = other DNA
ccctgacacactggattgga

SEQ ID NO: 1081 - DNA, 20 bp, synthetic construct
  misc_feature 1..20: note = chemically synthesized
  source 1..20: mol_type = other DNA
tgacacactggattggagag

SEQ ID NO: 1082 - DNA, 20 bp, synthetic construct
  misc_feature 1..20: note = chemically synthesized
  source 1..20: mol_type = other DNA
cacactggattggagagcag

SEQ ID NO: 1083 - DNA, 20 bp, synthetic construct
  misc_feature 1..20: note = chemically synthesized
  source 1..20: mol_type = other DNA
gattggagagcagcagaacc

SEQ ID NO: 1084 - DNA, 20 bp, synthetic construct
  misc_feature 1..20: note = chemically synthesized
  source 1..20: mol_type = other DNA
attggagagcagcagaaccc

SEQ ID NO: 1085 - DNA, 20 bp, synthetic construct
  misc_feature 1..20: note = chemically synthesized
  source 1..20: mol_type = other DNA
ttggagagcagcagaaccca

SEQ ID NO: 1086 - DNA, 20 bp, synthetic construct
  misc_feature 1..20: note = chemically synthesized
  source 1..20: mol_type = other DNA
gagcagcagaacccagggcc

SEQ ID NO: 1087 - DNA, 20 bp, synthetic construct
  misc_feature 1..20: note = chemically synthesized
  source 1..20: mol_type = other DNA
aacccagggcctggcccacc

SEQ ID NO: 1088 - DNA, 20 bp, synthetic construct
  misc_feature 1..20: note = chemically synthesized
  source 1..20: mol_type = other DNA
cagggcctggcccaccaagc

SEQ ID NO: 1089 - DNA, 20 bp, synthetic construct
  misc_feature 1..20: note = chemically synthesized
  source 1..20: mol_type = other DNA
gggcctggcccaccaagctg

SEQ ID NO: 1090 - DNA, 20 bp, synthetic construct
  misc_feature 1..20: note = chemically synthesized
  source 1..20: mol_type = other DNA
cctggcccaccaagctggag

SEQ ID NO: 1091 - DNA, 20 bp, synthetic construct
  misc_feature 1..20: note = chemically synthesized
  source 1..20: mol_type = other DNA
ctggcccaccaagctggagt

SEQ ID NO: 1092 - DNA, 20 bp, synthetic construct
  misc_feature 1..20: note = chemically synthesized
  source 1..20: mol_type = other DNA
cccaccaagctggagtggga

SEQ ID NO: 1093 - DNA, 20 bp, synthetic construct
  misc_feature 1..20: note = chemically synthesized
  source 1..20: mol_type = other DNA
ccaccaagctggagtgggaa

SEQ ID NO: 1094 - DNA, 20 bp, synthetic construct
  misc_feature 1..20: note = chemically synthesized
  source 1..20: mol_type = other DNA
agctggagtgggaaaggcac

SEQ ID NO: 1095 - DNA, 20 bp, synthetic construct
  misc_feature 1..20: note = chemically synthesized
  source 1..20: mol_type = other DNA
agtgggaaaggcacaagatt

SEQ ID NO: 1096 - DNA, 20 bp, synthetic construct
  misc_feature 1..20: note = chemically synthesized
  source 1..20: mol_type = other DNA
gtgggaaaggcacaagattc

SEQ ID NO: 1097 - DNA, 20 bp, synthetic construct
  misc_feature 1..20: note = chemically synthesized
  source 1..20: mol_type = other DNA
gaaaggcacaagattcgggc

SEQ ID NO: 1098 - DNA, 20 bp, synthetic construct
  misc_feature 1..20: note = chemically synthesized
  source 1..20: mol_type = other DNA
aaaggcacaagattcgggcc

SEQ ID NO: 1099 - DNA, 20 bp, synthetic construct
  misc_feature 1..20: note = chemically synthesized
  source 1..20: mol_type = other DNA
ggcacaagattcgggccagg

SEQ ID NO: 1100 - DNA, 20 bp, synthetic construct
  misc_feature 1..20: note = chemically synthesized
  source 1..20: mol_type = other DNA
aagattcgggccaggcagaa

SEQ ID NO: 1101 - DNA, 20 bp, synthetic construct
  misc_feature 1..20: note = chemically synthesized
  source 1..20: mol_type = other DNA
agattcgggccaggcagaac

SEQ ID NO: 1102 - DNA, 20 bp, synthetic construct
  misc_feature 1..20: note = chemically synthesized
  source 1..20: mol_type = other DNA
gattcgggccaggcagaaca

SEQ ID NO: 1103 - DNA, 20 bp, synthetic construct
  misc_feature 1..20: note = chemically synthesized
  source 1..20: mol_type = other DNA
caggcagaacagggcctacc

SEQ ID NO: 1104 - DNA, 20 bp, synthetic construct
  misc_feature 1..20: note = chemically synthesized
  source 1..20: mol_type = other DNA
ggcagaacagggcctacctg

SEQ ID NO: 1105 - DNA, 20 bp, synthetic construct
  misc_feature 1..20: note = chemically synthesized
  source 1..20: mol_type = other DNA
cagaacagggcctacctgga

SEQ ID NO: 1106 - DNA, 20 bp, synthetic construct
  misc_feature 1..20: note = chemically synthesized
  source 1..20: mol_type = other DNA
agaacagggcctacctggag

SEQ ID NO: 1107 - DNA, 20 bp, synthetic construct
  misc_feature 1..20: note = chemically synthesized
  source 1..20: mol_type = other DNA
gaacagggcctacctggaga

SEQ ID NO: 1108 - DNA, 20 bp, synthetic construct
  misc_feature 1..20: note = chemically synthesized
  source 1..20: mol_type = other DNA
tggagagggactgccctgca

SEQ ID NO: 1109 - DNA, 20 bp, synthetic construct
  misc_feature 1..20: note = chemically synthesized
  source 1..20: mol_type = other DNA
gggactgccctgcacagctg

SEQ ID NO: 1110 - DNA, 20 bp, synthetic construct
  misc_feature 1..20: note = chemically synthesized
  source 1..20: mol_type = other DNA
actgccctgcacagctgcag

SEQ ID NO: 1111 - DNA, 20 bp, synthetic construct
  misc_feature 1..20: note = chemically synthesized
  source 1..20: mol_type = other DNA
tgcacagctgcagcagttgc

SEQ ID NO: 1112 - DNA, 20 bp, synthetic construct
  misc_feature 1..20: note = chemically synthesized
  source 1..20: mol_type = other DNA
cacagctgcagcagttgctg

SEQ ID NO: 1113 - DNA, 20 bp, synthetic construct
  misc_feature 1..20: note = chemically synthesized
  source 1..20: mol_type = other DNA
gctgcagcagttgctggagc

SEQ ID NO: 1114 - DNA, 20 bp, synthetic construct
  misc_feature 1..20: note = chemically synthesized
  source 1..20: mol_type = other DNA
ctgcagcagttgctggagct

SEQ ID NO: 1115 - DNA, 20 bp, synthetic construct
  misc_feature 1..20: note = chemically synthesized
  source 1..20: mol_type = other DNA
tgcagcagttgctggagctg

SEQ ID NO: 1116 - DNA, 20 bp, synthetic construct
  misc_feature 1..20: note = chemically synthesized
  source 1..20: mol_type = other DNA
cagcagttgctggagctggg

SEQ ID NO: 1117 - DNA, 20 bp, synthetic construct
  misc_feature 1..20: note = chemically synthesized
  source 1..20: mol_type = other DNA
gcagttgctggagctgggga

SEQ ID NO: 1118 - DNA, 20 bp, synthetic construct
  misc_feature 1..20: note = chemically synthesized
  source 1..20: mol_type = other DNA
cagttgctggagctggggag

SEQ ID NO: 1119 - DNA, 20 bp, synthetic construct
  misc_feature 1..20: note = chemically synthesized
  source 1..20: mol_type = other DNA
ggagctggggagaggtgttt

SEQ ID NO: 1120 - DNA, 20 bp, synthetic construct
  misc_feature 1..20: note = chemically synthesized
  source 1..20: mol_type = other DNA
gagaggtgttttggaccaac

SEQ ID NO: 1121 - DNA, 20 bp, synthetic construct
  misc_feature 1..20: note = chemically synthesized
  source 1..20: mol_type = other DNA
agaggtgttttggaccaaca

SEQ ID NO: 1122 - DNA, 20 bp, synthetic construct
  misc_feature 1..20: note = chemically synthesized
  source 1..20: mol_type = other DNA
tgttttggaccaacaaggta

SEQ ID NO: 1123 - DNA, 20 bp, synthetic construct
  misc_feature 1..20: note = chemically synthesized
  source 1..20: mol_type = other DNA
tttggaccaacaaggtatgg

SEQ ID NO: 1124 - DNA, 20 bp, synthetic construct
  misc_feature 1..20: note = chemically synthesized
  source 1..20: mol_type = other DNA
acacttctgcccctatactc

SEQ ID NO: 1125 - DNA, 20 bp, synthetic construct
  misc_feature 1..20: note = chemically synthesized
  source 1..20: mol_type = other DNA
cttctgcccctatactctag

SEQ ID NO: 1126 - DNA, 20 bp, synthetic construct
  misc_feature 1..20: note = chemically synthesized
  source 1..20: mol_type = other DNA
ctgcccctatactctagtgg

SEQ ID NO: 1127 - DNA, 20 bp, synthetic construct
  misc_feature 1..20: note = chemically synthesized
  source 1..20: mol_type = other DNA
gcccctatactctagtggca

SEQ ID NO: 1128 - DNA, 20 bp, synthetic construct
  misc_feature 1..20: note = chemically synthesized
  source 1..20: mol_type = other DNA
cctatactctagtggcagag

SEQ ID NO: 1129 - DNA, 20 bp, synthetic construct
  misc_feature 1..20: note = chemically synthesized
  source 1..20: mol_type = other DNA
tatactctagtggcagagtg

SEQ ID NO: 1130 - DNA, 20 bp, synthetic construct
  misc_feature 1..20: note = chemically synthesized
  source 1..20: mol_type = other DNA
atactctagtggcagagtgg

SEQ ID NO: 1131 - DNA, 20 bp, synthetic construct
  misc_feature 1..20: note = chemically synthesized
  source 1..20: mol_type = other DNA
actctagtggcagagtggag

SEQ ID NO: 1132 - DNA, 20 bp, synthetic construct
  misc_feature 1..20: note = chemically synthesized
  source 1..20: mol_type = other DNA
ctctagtggcagagtggagg

SEQ ID NO: 1133 - DNA, 20 bp, synthetic construct
  misc_feature 1..20: note = chemically synthesized
  source 1..20: mol_type = other DNA
tggcagagtggaggaggttg

SEQ ID NO: 1134 - DNA, 20 bp, synthetic construct
  misc_feature 1..20: note = chemically synthesized
  source 1..20: mol_type = other DNA
ggcagagtggaggaggttgc

SEQ ID NO: 1135 - DNA, 20 bp, synthetic construct
  misc_feature 1..20: note = chemically synthesized
  source 1..20: mol_type = other DNA
gcagagtggaggaggttgca

SEQ ID NO: 1136 - DNA, 20 bp, synthetic construct
  misc_feature 1..20: note = chemically synthesized
  source 1..20: mol_type = other DNA
gtggaggaggttgcagggca

SEQ ID NO: 1137 - DNA, 20 bp, synthetic construct
  misc_feature 1..20: note = chemically synthesized
  source 1..20: mol_type = other DNA
gttgcagggcacggaatccc

SEQ ID NO: 1138 - DNA, 20 bp, synthetic construct
  misc_feature 1..20: note = chemically synthesized
  source 1..20: mol_type = other DNA
cagggcacggaatccctggt

SEQ ID NO: 1139 - DNA, 20 bp, synthetic construct
  misc_feature 1..20: note = chemically synthesized
  source 1..20: mol_type = other DNA
gggcacggaatccctggttg

SEQ ID NO: 1140 - DNA, 20 bp, synthetic construct
  misc_feature 1..20: note = chemically synthesized
  source 1..20: mol_type = other DNA
ggaatccctggttggagttt

SEQ ID NO: 1141 - DNA, 20 bp, synthetic construct
  misc_feature 1..20: note = chemically synthesized
  source 1..20: mol_type = other DNA
aatccctggttggagtttca

SEQ ID NO: 1142 - DNA, 20 bp, synthetic construct
  misc_feature 1..20: note = chemically synthesized
  source 1..20: mol_type = other DNA
atccctggttggagtttcag

SEQ ID NO: 1143 - DNA, 20 bp, synthetic construct
  misc_feature 1..20: note = chemically synthesized
  source 1..20: mol_type = other DNA
cctggttggagtttcagagg

SEQ ID NO: 1144 - DNA, 20 bp, synthetic construct
  misc_feature 1..20: note = chemically synthesized
  source 1..20: mol_type = other DNA
ttggagtttcagaggtggct

SEQ ID NO: 1145 - DNA, 20 bp, synthetic construct
  misc_feature 1..20: note = chemically synthesized
  source 1..20: mol_type = other DNA
tggagtttcagaggtggctg

SEQ ID NO: 1146 - DNA, 20 bp, synthetic construct
  misc_feature 1..20: note = chemically synthesized
  source 1..20: mol_type = other DNA
ctgtgtgcctctccaaattc

SEQ ID NO: 1147 - DNA, 20 bp, synthetic construct
  misc_feature 1..20: note = chemically synthesized
  source 1..20: mol_type = other DNA
tgtgtgcctctccaaattct

SEQ ID NO: 1148 - DNA, 20 bp, synthetic construct
  misc_feature 1..20: note = chemically synthesized
  source 1..20: mol_type = other DNA
gtgcctctccaaattctggg

SEQ ID NO: 1149 - DNA, 20 bp, synthetic construct
  misc_feature 1..20: note = chemically synthesized
  source 1..20: mol_type = other DNA
tgcctctccaaattctggga

SEQ ID NO: 1150 - DNA, 20 bp, synthetic construct
  misc_feature 1..20: note = chemically synthesized
  source 1..20: mol_type = other DNA
gcctctccaaattctgggaa

SEQ ID NO: 1151 - DNA, 20 bp, synthetic construct
  misc_feature 1..20: note = chemically synthesized
  source 1..20: mol_type = other DNA
ggaagggactttctcaatcc

SEQ ID NO: 1152 - DNA, 20 bp, synthetic construct
  misc_feature 1..20: note = chemically synthesized
  source 1..20: mol_type = other DNA
aagggactttctcaatccta

SEQ ID NO: 1153 - DNA, 20 bp, synthetic construct
  misc_feature 1..20: note = chemically synthesized
  source 1..20: mol_type = other DNA
agagtctctaccttataatt

SEQ ID NO: 1154 - DNA, 20 bp, synthetic construct
  misc_feature 1..20: note = chemically synthesized
  source 1..20: mol_type = other DNA
accttataattgagatgtat

SEQ ID NO: 1155 - DNA, 20 bp, synthetic construct
  misc_feature 1..20: note = chemically synthesized
  source 1..20: mol_type = other DNA
tataattgagatgtatgaga

SEQ ID NO: 1156 - DNA, 20 bp, synthetic construct
  misc_feature 1..20: note = chemically synthesized
  source 1..20: mol_type = other DNA
gagatgtatgagacagccac

SEQ ID NO: 1157 - DNA, 20 bp, synthetic construct
  misc_feature 1..20: note = chemically synthesized
  source 1..20: mol_type = other DNA
tatgagacagccacaagtca

SEQ ID NO: 1158 - DNA, 20 bp, synthetic construct
  misc_feature 1..20: note = chemically synthesized
  source 1..20: mol_type = other DNA
atgagacagccacaagtcat

SEQ ID NO: 1159 - DNA, 20 bp, synthetic construct
  misc_feature 1..20: note = chemically synthesized
  source 1..20: mol_type = other DNA
atttcttttctccatgcata

SEQ ID NO: 1160 - DNA, 20 bp, synthetic construct
  misc_feature 1..20: note = chemically synthesized
  source 1..20: mol_type = other DNA
ttctccatgcatatggctca

SEQ ID NO: 1161 - DNA, 20 bp, synthetic construct
  misc_feature 1..20: note = chemically synthesized
  source 1..20: mol_type = other DNA
tctccatgcatatggctcaa

SEQ ID NO: 1162 - DNA, 20 bp, synthetic construct
  misc_feature 1..20: note = chemically synthesized
  source 1..20: mol_type = other DNA
ctccatgcatatggctcaaa

SEQ ID NO: 1163 - DNA, 20 bp, synthetic construct
  misc_feature 1..20: note = chemically synthesized
  source 1..20: mol_type = other DNA
catgcatatggctcaaaggg

SEQ ID NO: 1164 - DNA, 20 bp, synthetic construct
  misc_feature 1..20: note = chemically synthesized
  source 1..20: mol_type = other DNA
ggctcaaagggaagtgtcta

SEQ ID NO: 1165 - DNA, 20 bp, synthetic construct
  misc_feature 1..20: note = chemically synthesized
  source 1..20: mol_type = other DNA
atttatacctgttaaaaatt

SEQ ID NO: 1166 - DNA, 20 bp, synthetic construct
  misc_feature 1..20: note = chemically synthesized
  source 1..20: mol_type = other DNA
gttaaaaattcagaaatgtc

SEQ ID NO: 1167 - DNA, 20 bp, synthetic construct
  misc_feature 1..20: note = chemically synthesized
  source 1..20: mol_type = other DNA
ttaaaaattcagaaatgtca

SEQ ID NO: 1168 - DNA, 20 bp, synthetic construct
  misc_feature 1..20: note = chemically synthesized
  source 1..20: mol_type = other DNA
aaattcagaaatgtcaaggc

SEQ ID NO: 1169 - DNA, 20 bp, synthetic construct
  misc_feature 1..20: note = chemically synthesized
  source 1..20: mol_type = other DNA
aattcagaaatgtcaaggcc

SEQ ID NO: 1170 - DNA, 20 bp, synthetic construct
  misc_feature 1..20: note = chemically synthesized
  source 1..20: mol_type = other DNA
agaaatgtcaaggccgggca

SEQ ID NO: 1171 - DNA, 20 bp, synthetic construct
  misc_feature 1..20: note = chemically synthesized
  source 1..20: mol_type = other DNA
aatgtcaaggccgggcacgg

SEQ ID NO: 1172 - DNA, 20 bp, synthetic construct
  misc_feature 1..20: note = chemically synthesized
  source 1..20: mol_type = other DNA
gtggctcacccctgtaatcc

SEQ ID NO: 1173 - DNA, 20 bp, synthetic construct
  misc_feature 1..20: note = chemically synthesized
  source 1..20: mol_type = other DNA
cccctgtaatcccagcactt

SEQ ID NO: 1174 - DNA, 20 bp, synthetic construct
  misc_feature 1..20: note = chemically synthesized
  source 1..20: mol_type = other DNA
ccctgtaatcccagcacttt

SEQ ID NO: 1175 - DNA, 20 bp, synthetic construct
  misc_feature 1..20: note = chemically synthesized
  source 1..20: mol_type = other DNA
ctgtaatcccagcactttgg

SEQ ID NO: 1176 - DNA, 20 bp, synthetic construct
  misc_feature 1..20: note = chemically synthesized
  source 1..20: mol_type = other DNA
tgtaatcccagcactttggg

SEQ ID NO: 1177 - DNA, 20 bp, synthetic construct
  misc_feature 1..20: note = chemically synthesized
  source 1..20: mol_type = other DNA
tcccagcactttgggaggcc

SEQ ID NO: 1178 - DNA, 20 bp, synthetic construct
  misc_feature 1..20: note = chemically synthesized
  source 1..20: mol_type = other DNA
cccagcactttgggaggccg

SEQ ID NO: 1179 - DNA, 20 bp, synthetic construct
  misc_feature 1..20: note = chemically synthesized
  source 1..20: mol_type = other DNA
agcactttgggaggccgagg

SEQ ID NO: 1180 - DNA, 20 bp, synthetic construct
  misc_feature 1..20: note = chemically synthesized
  source 1..20: mol_type = other DNA
gcactttgggaggccgaggc

SEQ ID NO: 1181 - DNA, 20 bp, synthetic construct
  misc_feature 1..20: note = chemically synthesized
  source 1..20: mol_type = other DNA
ctttgggaggccgaggcggg

SEQ ID NO: 1182 - DNA, 20 bp, synthetic construct
  misc_feature 1..20: note = chemically synthesized
  source 1..20: mol_type = other DNA
aggccgaggcgggtggtcac

SEQ ID NO: 1183 - DNA, 20 bp, synthetic construct
  misc_feature 1..20: note = chemically synthesized
  source 1..20: mol_type = other DNA
ggccgaggcgggtggtcaca

SEQ ID NO: 1184 - DNA, 20 bp, synthetic construct
  misc_feature 1..20: note = chemically synthesized
  source 1..20: mol_type = other DNA
gaggcgggtggtcacaaggt

SEQ ID NO: 1185 - DNA, 20 bp, synthetic construct
  misc_feature 1..20: note = chemically synthesized
  source 1..20: mol_type = other DNA
aggcgggtggtcacaaggtc

SEQ ID NO: 1186 - DNA, 20 bp, synthetic construct
  misc_feature 1..20: note = chemically synthesized
  source 1..20: mol_type = other DNA
gcgggtggtcacaaggtcag

SEQ ID NO: 1187 - DNA, 20 bp, synthetic construct
  misc_feature 1..20: note = chemically synthesized
  source 1..20: mol_type = other DNA
ggtcacaaggtcaggagttt

SEQ ID NO: 1188 - DNA, 20 bp, synthetic construct
  misc_feature 1..20: note = chemically synthesized
  source 1..20: mol_type = other DNA
caaggtcaggagtttgagac

SEQ ID NO: 1189 - DNA, 20 bp, synthetic construct
  misc_feature 1..20: note = chemically synthesized
  source 1..20: mol_type = other DNA
tgagaccagcctgaccaaca

SEQ ID NO: 1190 - DNA, 20 bp, synthetic construct
  misc_feature 1..20: note = chemically synthesized
  source 1..20: mol_type = other DNA
ctctaaaaaaatacaaaaat

SEQ ID NO: 1191 - DNA, 20 bp, synthetic construct
  misc_feature 1..20: note = chemically synthesized
  source 1..20: mol_type = other DNA
aaaaaaatacaaaaattagc

SEQ ID NO: 1192 - DNA, 20 bp, synthetic construct
  misc_feature 1..20: note = chemically synthesized
  source 1..20: mol_type = other DNA
atacaaaaattagctggtca

SEQ ID NO: 1193 - DNA, 20 bp, synthetic construct
  misc_feature 1..20: note = chemically synthesized
  source 1..20: mol_type = other DNA
gtcacagtcatgcgcacctg

SEQ ID NO: 1194 - DNA, 20 bp, synthetic construct
  misc_feature 1..20: note = chemically synthesized
  source 1..20: mol_type = other DNA
gtcatgcgcacctgtagtcc

SEQ ID NO: 1195 - DNA, 20 bp, synthetic construct
  misc_feature 1..20: note = chemically synthesized
  source 1..20: mol_type = other DNA
cacctgtagtcccagctaat

SEQ ID NO: 1196 - DNA, 20 bp, synthetic construct
  misc_feature 1..20: note = chemically synthesized
  source 1..20: mol_type = other DNA
ctgtagtcccagctaattgg

SEQ ID NO: 1197 - DNA, 20 bp, synthetic construct
  misc_feature 1..20: note = chemically synthesized
  source 1..20: mol_type = other DNA
tgtagtcccagctaattgga

SEQ ID NO: 1198 - DNA, 20 bp, synthetic construct
  misc_feature 1..20: note = chemically synthesized
  source 1..20: mol_type = other DNA
tcccagctaattggaaggct

SEQ ID NO: 1199 - DNA, 20 bp, synthetic construct
  misc_feature 1..20: note = chemically synthesized
  source 1..20: mol_type = other DNA
cccagctaattggaaggctg

SEQ ID NO: 1200 - DNA, 20 bp, synthetic construct
  misc_feature 1..20: note = chemically synthesized
  source 1..20: mol_type = other DNA
agctaattggaaggctgagg

SEQ ID NO: 1201 - DNA, 20 bp, synthetic construct
  misc_feature 1..20: note = chemically synthesized
  source 1..20: mol_type = other DNA
gctaattggaaggctgaggc

SEQ ID NO: 1202 - DNA, 20 bp, synthetic construct
  misc_feature 1..20: note = chemically synthesized
  source 1..20: mol_type = other DNA
taattggaaggctgaggcag

SEQ ID NO: 1203 - DNA, 20 bp, synthetic construct
  misc_feature 1..20: note = chemically synthesized
  source 1..20: mol_type = other DNA
gcaggagcatcgcttgaacc

SEQ ID NO: 1204 - DNA, 20 bp, synthetic construct
  misc_feature 1..20: note = chemically synthesized
  source 1..20: mol_type = other DNA
caggagcatcgcttgaacct

SEQ ID NO: 1205 - DNA, 20 bp, synthetic construct
  misc_feature 1..20: note = chemically synthesized
  source 1..20: mol_type = other DNA
gagcatcgcttgaacctggg

SEQ ID NO: 1206 - DNA, 20 bp, synthetic construct
  misc_feature 1..20: note = chemically synthesized
  source 1..20: mol_type = other DNA
catcgcttgaacctgggaag

SEQ ID NO: 1207 - DNA, 20 bp, synthetic construct
  misc_feature 1..20: note = chemically synthesized
  source 1..20: mol_type = other DNA
cgcttgaacctgggaagcgg

SEQ ID NO: 1208 - DNA, 20 bp, synthetic construct
  misc_feature 1..20: note = chemically synthesized
  source 1..20: mol_type = other DNA
tgggaagcggaagttgcact

SEQ ID NO: 1209 - DNA, 20 bp, synthetic construct
  misc_feature 1..20: note = chemically synthesized
  source 1..20: mol_type = other DNA
agcggaagttgcactgagcc

SEQ ID NO: 1210 - DNA, 20 bp, synthetic construct
  misc_feature 1..20: note = chemically synthesized
  source 1..20: mol_type = other DNA
aagatcgcgccactgcactc

SEQ ID NO: 1211 - DNA, 20 bp, synthetic construct
  misc_feature 1..20: note = chemically synthesized
  source 1..20: mol_type = other DNA
cgcgccactgcactccagcc

SEQ ID NO: 1212 - DNA, 20 bp, synthetic construct
  misc_feature 1..20: note = chemically synthesized
  source 1..20: mol_type = other DNA
gcgccactgcactccagcct

SEQ ID NO: 1213 - DNA, 20 bp, synthetic construct
  misc_feature 1..20: note = chemically synthesized
  source 1..20: mol_type = other DNA
ccactgcactccagcctagg

SEQ ID NO: 1214 - DNA, 20 bp, synthetic construct
  misc_feature 1..20: note = chemically synthesized
  source 1..20: mol_type = other DNA
ctgcactccagcctaggcag

SEQ ID NO: 1215 - DNA, 20 bp, synthetic construct
  misc_feature 1..20: note = chemically synthesized
  source 1..20: mol_type = other DNA
gcactccagcctaggcagca

SEQ ID NO: 1216 - DNA, 20 bp, synthetic construct
  misc_feature 1..20: note = chemically synthesized
  source 1..20: mol_type = other DNA
tccagcctaggcagcagagt

SEQ ID NO: 1217 - DNA, 20 bp, synthetic construct
  misc_feature 1..20: note = chemically synthesized
  source 1..20: mol_type = other DNA
aaaaaaaaaaaaaaaaaaaa

SEQ ID NO: 1218 - DNA, 20 bp, synthetic construct
  misc_feature 1..20: note = chemically synthesized
  source 1..20: mol_type = other DNA
aaaaaaaaaaaaaaaaaaaa

SEQ ID NO: 1219 - DNA, 20 bp, synthetic construct
  misc_feature 1..20: note = chemically synthesized
  source 1..20: mol_type = other DNA
aaaaaaaaaaaaagagaatt

SEQ ID NO: 1220 - DNA, 20 bp, synthetic construct
  misc_feature 1..20: note = chemically synthesized
  source 1..20: mol_type = other DNA
aaaaaaaaaaagagaattca

SEQ ID NO: 1221 - DNA, 20 bp, synthetic construct
  misc_feature 1..20: note = chemically synthesized
  source 1..20: mol_type = other DNA
aaaagagaattcagagatct

SEQ ID NO: 1222 - DNA, 20 bp, synthetic construct
  misc_feature 1..20: note = chemically synthesized
  source 1..20: mol_type = other DNA
ctcagctatcatatgaatac

SEQ ID NO: 1223 - DNA, 20 bp, synthetic construct
  misc_feature 1..20: note = chemically synthesized
  source 1..20: mol_type = other DNA
tcagctatcatatgaatacc

SEQ ID NO: 1224 - DNA, 20 bp, synthetic construct
  misc_feature 1..20: note = chemically synthesized
  source 1..20: mol_type = other DNA
gaataccaggacaaaatatc

SEQ ID NO: 1225 - DNA, 20 bp, synthetic construct
  misc_feature 1..20: note = chemically synthesized
  source 1..20: mol_type = other DNA
accaggacaaaatatcaagt

SEQ ID NO: 1226 - DNA, 20 bp, synthetic construct
  misc_feature 1..20: note = chemically synthesized
  source 1..20: mol_type = other DNA
ccaggacaaaatatcaagtg

SEQ ID NO: 1227 - DNA, 20 bp, synthetic construct
  misc_feature 1..20: note = chemically synthesized
  source 1..20: mol_type = other DNA
tatcaagtgaggccacttat

SEQ ID NO: 1228 - DNA, 20 bp, synthetic construct
  misc_feature 1..20: note = chemically synthesized
  source 1..20: mol_type = other DNA
tcaagtgaggccacttatca

SEQ ID NO: 1229 - DNA, 20 bp, synthetic construct
  misc_feature 1..20: note = chemically synthesized
  source 1..20: mol_type = other DNA
agtgaggccacttatcagag

SEQ ID NO: 1230 - DNA, 20 bp, synthetic construct
  misc_feature 1..20: note = chemically synthesized
  source 1..20: mol_type = other DNA
gaggccacttatcagagtag

SEQ ID NO: 1231 - DNA, 20 bp, synthetic construct
  misc_feature 1..20: note = chemically synthesized
  source 1..20: mol_type = other DNA
atcagagtagaagaatcctt

SEQ ID NO: 1232 - DNA, 20 bp, synthetic construct
  misc_feature 1..20: note = chemically synthesized
  source 1..20: mol_type = other DNA
tcagagtagaagaatccttt

SEQ ID NO: 1233 - DNA, 20 bp, synthetic construct
  misc_feature 1..20: note = chemically synthesized
  source 1..20: mol_type = other DNA
agaagaatcctttaggttaa

SEQ ID NO: 1234 - DNA, 20 bp, synthetic construct
  misc_feature 1..20: note = chemically synthesized
  source 1..20: mol_type = other DNA
taggttaaaagtttctttca

SEQ ID NO: 1235 - DNA, 20 bp, synthetic construct
  misc_feature 1..20: note = chemically synthesized
  source 1..20: mol_type = other DNA
aaagtttctttcatagaaca

SEQ ID NO: 1236 - DNA, 20 bp, synthetic construct
  misc_feature 1..20: note = chemically synthesized
  source 1..20: mol_type = other DNA
gaacatagcaataatcactg

SEQ ID NO: 1237 - DNA, 20 bp, synthetic construct
  misc_feature 1..20: note = chemically synthesized
  source 1..20: mol_type = other DNA
actgaagctacctatcttac

SEQ ID NO: 1238 - DNA, 20 bp, synthetic construct
  misc_feature 1..20: note = chemically synthesized
  source 1..20: mol_type = other DNA
cttcttataacaatgcctcc

SEQ ID NO: 1239 - DNA, 20 bp, synthetic construct
  misc_feature 1..20: note = chemically synthesized
  source 1..20: mol_type = other DNA
ttcttataacaatgcctcct

SEQ ID NO: 1240 - DNA, 20 bp, synthetic construct
  misc_feature 1..20: note = chemically synthesized
  source 1..20: mol_type = other DNA
caatgcctcctaggttgacc

SEQ ID NO: 1241 - DNA, 20 bp, synthetic construct
  misc_feature 1..20: note = chemically synthesized
  source 1..20: mol_type = other DNA
aatgcctcctaggttgaccc

SEQ ID NO: 1242 - DNA, 20 bp, synthetic construct
  misc_feature 1..20: note = chemically synthesized
  source 1..20: mol_type = other DNA
aatcattttcaatgcacata

SEQ ID NO: 1243 - DNA, 20 bp, synthetic construct
  misc_feature 1..20: note = chemically synthesized
  source 1..20: mol_type = other DNA
atcattttcaatgcacataa

SEQ ID NO: 1244 - DNA, 20 bp, synthetic construct
  misc_feature 1..20: note = chemically synthesized
  source 1..20: mol_type = other DNA
tcattttcaatgcacataaa

SEQ ID NO: 1245 - DNA, 20 bp, synthetic construct
  misc_feature 1..20: note = chemically synthesized
  source 1..20: mol_type = other DNA
taaagggcaattttatctat

SEQ ID NO: 1246 - DNA, 20 bp, synthetic construct
  misc_feature 1..20: note = chemically synthesized
  source 1..20: mol_type = other DNA
caattttatctatcagaaca

SEQ ID NO: 1247 - DNA, 20 bp, synthetic construct
  misc_feature 1..20: note = chemically synthesized
  source 1..20: mol_type = other DNA
atctatcagaacaaagaaca

SEQ ID NO: 1248 - DNA, 20 bp, synthetic construct
  misc_feature 1..20: note = chemically synthesized
  source 1..20: mol_type = other DNA
tctatcagaacaaagaacat

SEQ ID NO: 1249 - DNA, 20 bp, synthetic construct
  misc_feature 1..20: note = chemically synthesized
  source 1..20: mol_type = other DNA
agaacaaagaacatgggtaa

SEQ ID NO: 1250 - DNA, 20 bp, synthetic construct
  misc_feature 1..20: note = chemically synthesized
  source 1..20: mol_type = other DNA
agatatgtatatttacatgt

SEQ ID NO: 1251 - DNA, 20 bp, synthetic construct
  misc_feature 1..20: note = chemically synthesized
  source 1..20: mol_type = other DNA
gatatgtatatttacatgtg

SEQ ID NO: 1252 - DNA, 20 bp, synthetic construct
  misc_feature 1..20: note = chemically synthesized
  source 1..20: mol_type = other DNA
tatgtatatttacatgtgag

SEQ ID NO: 1253 - DNA, 20 bp, synthetic construct
  misc_feature 1..20: note = chemically synthesized
  source 1..20: mol_type = other DNA
tatttacatgtgaggagaac

SEQ ID NO: 1254 - DNA, 20 bp, synthetic construct
  misc_feature 1..20: note = chemically synthesized
  source 1..20: mol_type = other DNA
agctgatctgactgctctcc

SEQ ID NO: 1255 - DNA, 20 bp, synthetic construct
  misc_feature 1..20: note = chemically synthesized
  source 1..20: mol_type = other DNA
ctctccaagtgacactgtgt

SEQ ID NO: 1256 - DNA, 20 bp, synthetic construct
  misc_feature 1..20: note = chemically synthesized
  source 1..20: mol_type = other DNA
ctccaagtgacactgtgtta

SEQ ID NO: 1257 - DNA, 20 bp, synthetic construct
  misc_feature 1..20: note = chemically synthesized
  source 1..20: mol_type = other DNA
actgtgttagagtccaatct

SEQ ID NO: 1258 - DNA, 20 bp, synthetic construct
  misc_feature 1..20: note = chemically synthesized
  source 1..20: mol_type = other DNA
ctgtgttagagtccaatctt

SEQ ID NO: 1259 - DNA, 20 bp, synthetic construct
  misc_feature 1..20: note = chemically synthesized
  source 1..20: mol_type = other DNA
tccaatcttaggacacaaaa

SEQ ID NO: 1260 - DNA, 20 bp, synthetic construct
  misc_feature 1..20: note = chemically synthesized
  source 1..20: mol_type = other DNA
acaaaatggtgtctctcctg

SEQ ID NO: 1261 - DNA, 20 bp, synthetic construct
  misc_feature 1..20: note = chemically synthesized
  source 1..20: mol_type = other DNA
gtagcttgtttttttctgaa

SEQ ID NO: 1262 - DNA, 20 bp, synthetic construct
  misc_feature 1..20: note = chemically synthesized
  source 1..20: mol_type = other DNA
tagcttgtttttttctgaaa

SEQ ID NO: 1263 - DNA, 20 bp, synthetic construct
  misc_feature 1..20: note = chemically synthesized
  source 1..20: mol_type = other DNA
agcttgtttttttctgaaaa

SEQ ID NO: 1264 - DNA, 20 bp, synthetic construct
  misc_feature 1..20: note = chemically synthesized
  source 1..20: mol_type = other DNA
tatttccttcctccaaccta

SEQ ID NO: 1265 - DNA, 20 bp, synthetic construct
  misc_feature 1..20: note = chemically synthesized
  source 1..20: mol_type = other DNA
ttccttcctccaacctatag

SEQ ID NO: 1266 - DNA, 20 bp, synthetic construct
  misc_feature 1..20: note = chemically synthesized
  source 1..20: mol_type = other DNA
tccttcctccaacctataga

SEQ ID NO: 1267 - DNA, 20 bp, synthetic construct
  misc_feature 1..20: note = chemically synthesized
  source 1..20: mol_type = other DNA
ttcctccaacctatagaagg

SEQ ID NO: 1268 - DNA, 20 bp, synthetic construct
  misc_feature 1..20: note = chemically synthesized
  source 1..20: mol_type = other DNA
caacctatagaaggaagtga

SEQ ID NO: 1269 - DNA, 20 bp, synthetic construct
  misc_feature 1..20: note = chemically synthesized
  source 1..20: mol_type = other DNA
atagaaggaagtgaaagttc

SEQ ID NO: 1270 - DNA, 20 bp, synthetic construct
  misc_feature 1..20: note = chemically synthesized
  source 1..20: mol_type = other DNA
agtgaaagttccagtcttcc

SEQ ID NO: 1271 - DNA, 20 bp, synthetic construct
  misc_feature 1..20: note = chemically synthesized
  source 1..20: mol_type = other DNA
aaagttccagtcttcctggc

SEQ ID NO: 1272 - DNA, 20 bp, synthetic construct
  misc_feature 1..20: note = chemically synthesized
  source 1..20: mol_type = other DNA
aagttccagtcttcctggca

SEQ ID NO: 1273 - DNA, 20 bp, synthetic construct
  misc_feature 1..20: note = chemically synthesized
  source 1..20: mol_type = other DNA
agttccagtcttcctggcaa

SEQ ID NO: 1274 - DNA, 20 bp, synthetic construct
  misc_feature 1..20: note = chemically synthesized
  source 1..20: mol_type = other DNA
gtcttcctggcaagggtaaa

SEQ ID NO: 1275 - DNA, 20 bp, synthetic construct
  misc_feature 1..20: note = chemically synthesized
  source 1..20: mol_type = other DNA
catccttcctctttcctgtc

SEQ ID NO: 1276 - DNA, 20 bp, synthetic construct
  misc_feature 1..20: note = chemically synthesized
  source 1..20: mol_type = other DNA
ttcctgtcaagtgcctcctt

SEQ ID NO: 1277 - DNA, 20 bp, synthetic construct
  misc_feature 1..20: note = chemically synthesized
  source 1..20: mol_type = other DNA
gtcaagtgcctcctttggtg

SEQ ID NO: 1278 - DNA, 20 bp, synthetic construct
  misc_feature 1..20: note = chemically synthesized
  source 1..20: mol_type = other DNA
tcaagtgcctcctttggtga

SEQ ID NO: 1279 - DNA, 20 bp, synthetic construct
  misc_feature 1..20: note = chemically synthesized
  source 1..20: mol_type = other DNA
gacacatcatgtgacctctt

SEQ ID NO: 1280 - DNA, 20 bp, synthetic construct
  misc_feature 1..20: note = chemically synthesized
  source 1..20: mol_type = other DNA
cctcttcagtgaccactcta

SEQ ID NO: 1281 - DNA, 20 bp, synthetic construct
  misc_feature 1..20: note = chemically synthesized
  source 1..20: mol_type = other DNA
cagtgaccactctacggtgt

SEQ ID NO: 1282 - DNA, 20 bp, synthetic construct
  misc_feature 1..20: note = chemically synthesized
  source 1..20: mol_type = other DNA
agtgaccactctacggtgtc

SEQ ID NO: 1283 - DNA, 20 bp, synthetic construct
  misc_feature 1..20: note = chemically synthesized
  source 1..20: mol_type = other DNA
gggccttgaactactacccc

SEQ ID NO: 1284 - DNA, 20 bp, synthetic construct
  misc_feature 1..20: note = chemically synthesized
  source 1..20: mol_type = other DNA
acccccagaacatcaccatg

SEQ ID NO: 1285 - DNA, 20 bp, synthetic construct
  misc_feature 1..20: note = chemically synthesized
  source 1..20: mol_type = other DNA
cccagaacatcaccatgaag

SEQ ID NO: 1286 - DNA, 20 bp, synthetic construct
  misc_feature 1..20: note = chemically synthesized
  source 1..20: mol_type = other DNA
acatcaccatgaagtggctg

SEQ ID NO: 1287 - DNA, 20 bp, synthetic construct
  misc_feature 1..20: note = chemically synthesized
  source 1..20: mol_type = other DNA
catcaccatgaagtggctga

SEQ ID NO: 1288 - DNA, 20 bp, synthetic construct
  misc_feature 1..20: note = chemically synthesized
  source 1..20: mol_type = other DNA
ccatgaagtggctgaaggat

SEQ ID NO: 1289 - DNA, 20 bp, synthetic construct
  misc_feature 1..20: note = chemically synthesized
  source 1..20: mol_type = other DNA
tgaagtggctgaaggataag

SEQ ID NO: 1290 - DNA, 20 bp, synthetic construct
  misc_feature 1..20: note = chemically synthesized
  source 1..20: mol_type = other DNA
gctgaaggataagcagccaa

SEQ ID NO: 1291 - DNA, 20 bp, synthetic construct
  misc_feature 1..20: note = chemically synthesized
  source 1..20: mol_type = other DNA
ataagcagccaatggatgcc

SEQ ID NO: 1292 - DNA, 20 bp, synthetic construct
  misc_feature 1..20: note = chemically synthesized
  source 1..20: mol_type = other DNA
taagcagccaatggatgcca

SEQ ID NO: 1293 - DNA, 20 bp, synthetic construct
  misc_feature 1..20: note = chemically synthesized
  source 1..20: mol_type = other DNA
agcagccaatggatgccaag

SEQ ID NO: 1294 - DNA, 20 bp, synthetic construct
  misc_feature 1..20: note = chemically synthesized
  source 1..20: mol_type = other DNA
tgccaaggagttcgaaccta

SEQ ID NO: 1295 - DNA, 20 bp, synthetic construct
  misc_feature 1..20: note = chemically synthesized
  source 1..20: mol_type = other DNA
cctaaagacgtattgcccaa

SEQ ID NO: 1296 - DNA, 20 bp, synthetic construct
  misc_feature 1..20: note = chemically synthesized
  source 1..20: mol_type = other DNA
ctaaagacgtattgcccaat

SEQ ID NO: 1297 - DNA, 20 bp, synthetic construct
  misc_feature 1..20: note = chemically synthesized
  source 1..20: mol_type = other DNA
taaagacgtattgcccaatg

SEQ ID NO: 1298 - DNA, 20 bp, synthetic construct
  misc_feature 1..20: note = chemically synthesized
  source 1..20: mol_type = other DNA
gacgtattgcccaatgggga

SEQ ID NO: 1299 - DNA, 20 bp, synthetic construct
  misc_feature 1..20: note = chemically synthesized
  source 1..20: mol_type = other DNA
acgtattgcccaatggggat

SEQ ID NO: 1300 - DNA, 20 bp, synthetic construct
  misc_feature 1..20: note = chemically synthesized
  source 1..20: mol_type = other DNA
ccaatggggatgggacctac

SEQ ID NO: 1301 - DNA, 20 bp, synthetic construct
  misc_feature 1..20: note = chemically synthesized
  source 1..20: mol_type = other DNA
caatggggatgggacctacc

SEQ ID NO: 1302 - DNA, 20 bp, synthetic construct
  misc_feature 1..20: note = chemically synthesized
  source 1..20: mol_type = other DNA
aatggggatgggacctacca

SEQ ID NO: 1303 - DNA, 20 bp, synthetic construct
  misc_feature 1..20: note = chemically synthesized
  source 1..20: mol_type = other DNA
gggatgggacctaccagggc

SEQ ID NO: 1304 - DNA, 20 bp, synthetic construct
  misc_feature 1..20: note = chemically synthesized
  source 1..20: mol_type = other DNA
ctaccagggctggataacct

SEQ ID NO: 1305 - DNA, 20 bp, synthetic construct
  misc_feature 1..20: note = chemically synthesized
  source 1..20: mol_type = other DNA
ataaccttggctgtaccccc

SEQ ID NO: 1306 - DNA, 20 bp, synthetic construct
  misc_feature 1..20: note = chemically synthesized
  source 1..20: mol_type = other DNA
taaccttggctgtaccccct

SEQ ID NO: 1307 - DNA, 20 bp, synthetic construct
  misc_feature 1..20: note = chemically synthesized
  source 1..20: mol_type = other DNA
aaccttggctgtaccccctg

SEQ ID NO: 1308 - DNA, 20 bp, synthetic construct
  misc_feature 1..20: note = chemically synthesized
  source 1..20: mol_type = other DNA
cttggctgtaccccctgggg

SEQ ID NO: 1309 - DNA, 20 bp, synthetic construct
  misc_feature 1..20: note = chemically synthesized
  source 1..20: mol_type = other DNA
tggctgtaccccctggggaa

SEQ ID NO: 1310 - DNA, 20 bp, synthetic construct
  misc_feature 1..20: note = chemically synthesized
  source 1..20: mol_type = other DNA
ctgtaccccctggggaagag

SEQ ID NO: 1311 - DNA, 20 bp, synthetic construct
  misc_feature 1..20: note = chemically synthesized
  source 1..20: mol_type = other DNA
gtaccccctggggaagagca

SEQ ID NO: 1312 - DNA, 20 bp, synthetic construct
  misc_feature 1..20: note = chemically synthesized
  source 1..20: mol_type = other DNA
aagagcagagatatacgtgc

SEQ ID NO: 1313 - DNA, 20 bp, synthetic construct
  misc_feature 1..20: note = chemically synthesized
  source 1..20: mol_type = other DNA
agagcagagatatacgtgcc

SEQ ID NO: 1314 - DNA, 20 bp, synthetic construct
  misc_feature 1..20: note = chemically synthesized
  source 1..20: mol_type = other DNA
gcagagatatacgtgccagg

SEQ ID NO: 1315 - DNA, 20 bp, synthetic construct
  misc_feature 1..20: note = chemically synthesized
  source 1..20: mol_type = other DNA
agagatatacgtgccaggtg

SEQ ID NO: 1316 - DNA, 20 bp, synthetic construct
  misc_feature 1..20: note = chemically synthesized
  source 1..20: mol_type = other DNA
tacgtgccaggtggagcacc

SEQ ID NO: 1317 - DNA, 20 bp, synthetic construct
  misc_feature 1..20: note = chemically synthesized
  source 1..20: mol_type = other DNA
acgtgccaggtggagcaccc

SEQ ID NO: 1318 - DNA, 20 bp, synthetic construct
  misc_feature 1..20: note = chemically synthesized
  source 1..20: mol_type = other DNA
ccaggtggagcacccaggcc

SEQ ID NO: 1319 - DNA, 20 bp, synthetic construct
  misc_feature 1..20: note = chemically synthesized
  source 1..20: mol_type = other DNA
tggagcacccaggcctggat

SEQ ID NO: 1320 - DNA, 20 bp, synthetic construct
  misc_feature 1..20: note = chemically synthesized
  source 1..20: mol_type = other DNA
atcagcccctcattgtgatc

SEQ ID NO: 1321 - DNA, 20 bp, synthetic construct
  misc_feature 1..20: note = chemically synthesized
  source 1..20: mol_type = other DNA
tcagcccctcattgtgatct

SEQ ID NO: 1322 - DNA, 20 bp, synthetic construct
  misc_feature 1..20: note = chemically synthesized
  source 1..20: mol_type = other DNA
cagcccctcattgtgatctg

SEQ ID NO: 1323 - DNA, 20 bp, synthetic construct
  misc_feature 1..20: note = chemically synthesized
  source 1..20: mol_type = other DNA
atctggggtatgtgactgat

SEQ ID NO: 1324 - DNA, 20 bp, synthetic construct
  misc_feature 1..20: note = chemically synthesized
  source 1..20: mol_type = other DNA
ctggggtatgtgactgatga

SEQ ID NO: 1325 - DNA, 20 bp, synthetic construct
  misc_feature 1..20: note = chemically synthesized
  source 1..20: mol_type = other DNA
ggtatgtgactgatgagagc

SEQ ID NO: 1326 - DNA, 20 bp, synthetic construct
  misc_feature 1..20: note = chemically synthesized
  source 1..20: mol_type = other DNA
gtatgtgactgatgagagcc

SEQ ID NO: 1327 - DNA, 20 bp, synthetic construct
  misc_feature 1..20: note = chemically synthesized
  source 1..20: mol_type = other DNA
atgtgactgatgagagccag

SEQ ID NO: 1328 - DNA, 20 bp, synthetic construct
  misc_feature 1..20: note = chemically synthesized
  source 1..20: mol_type = other DNA
actgatgagagccaggagct

SEQ ID NO: 1329 - DNA, 20 bp, synthetic construct
  misc_feature 1..20: note = chemically synthesized
  source 1..20: mol_type = other DNA
caggagctgagaaaatctat

SEQ ID NO: 1330 - DNA, 20 bp, synthetic construct
  misc_feature 1..20: note = chemically synthesized
  source 1..20: mol_type = other DNA
aggagctgagaaaatctatt

SEQ ID NO: 1331 - DNA, 20 bp, synthetic construct
  misc_feature 1..20: note = chemically synthesized
  source 1..20: mol_type = other DNA
ggagctgagaaaatctattg

SEQ ID NO: 1332 - DNA, 20 bp, synthetic construct
  misc_feature 1..20: note = chemically synthesized
  source 1..20: mol_type = other DNA
gagctgagaaaatctattgg

SEQ ID NO: 1333 - DNA, 20 bp, synthetic construct
  misc_feature 1..20: note = chemically synthesized
  source 1..20: mol_type = other DNA
gagaaaatctattgggggtt

SEQ ID NO: 1334 - DNA, 20 bp, synthetic construct
  misc_feature 1..20: note = chemically synthesized
  source 1..20: mol_type = other DNA
gaaaatctattgggggttga

SEQ ID NO: 1335 - DNA, 20 bp, synthetic construct
  misc_feature 1..20: note = chemically synthesized
  source 1..20: mol_type = other DNA
aaaatctattgggggttgag

SEQ ID NO: 1336 - DNA, 20 bp, synthetic construct
  misc_feature 1..20: note = chemically synthesized
  source 1..20: mol_type = other DNA
aatctattgggggttgagag

SEQ ID NO: 1337 - DNA, 20 bp, synthetic construct
  misc_feature 1..20: note = chemically synthesized
  source 1..20: mol_type = other DNA
gggggttgagaggagtgcct

SEQ ID NO: 1338 - DNA, 20 bp, synthetic construct
  misc_feature 1..20: note = chemically synthesized
  source 1..20: mol_type = other DNA
ggggttgagaggagtgcctg

SEQ ID NO: 1339 - DNA, 20 bp, synthetic construct
  misc_feature 1..20: note = chemically synthesized
  source 1..20: mol_type = other DNA
ggttgagaggagtgcctgag

SEQ ID NO: 1340 - DNA, 20 bp, synthetic construct
  misc_feature 1..20: note = chemically synthesized
  source 1..20: mol_type = other DNA
gttgagaggagtgcctgagg

SEQ ID NO: 1341 - DNA, 20 bp, synthetic construct
  misc_feature 1..20: note = chemically synthesized
  source 1..20: mol_type = other DNA
agtgcctgaggaggtaatta

SEQ ID NO: 1342 - DNA, 20 bp, synthetic construct
  misc_feature 1..20: note = chemically synthesized
  source 1..20: mol_type = other DNA
gcctgaggaggtaattatgg

SEQ ID NO: 1343 - DNA, 20 bp, synthetic construct
  misc_feature 1..20: note = chemically synthesized
  source 1..20: mol_type = other DNA
gaggaggtaattatggcagt

SEQ ID NO: 1344 - DNA, 20 bp, synthetic construct
  misc_feature 1..20: note = chemically synthesized
  source 1..20: mol_type = other DNA
ggtaattatggcagtgagat

SEQ ID NO: 1345 - DNA, 20 bp, synthetic construct
  misc_feature 1..20: note = chemically synthesized
  source 1..20: mol_type = other DNA
gtaattatggcagtgagatg

SEQ ID NO: 1346 - DNA, 20 bp, synthetic construct
  misc_feature 1..20: note = chemically synthesized
  source 1..20: mol_type = other DNA
gatgaggatctgctctttgt

SEQ ID NO: 1347 - DNA, 20 bp, synthetic construct
  misc_feature 1..20: note = chemically synthesized
  source 1..20: mol_type = other DNA
atgaggatctgctctttgtt

SEQ ID NO: 1348 - DNA, 20 bp, synthetic construct
  misc_feature 1..20: note = chemically synthesized
  source 1..20: mol_type = other DNA
tgaggatctgctctttgtta

SEQ ID NO: 1349 - DNA, 20 bp, synthetic construct
  misc_feature 1..20: note = chemically synthesized
  source 1..20: mol_type = other DNA
gaggatctgctctttgttag

SEQ ID NO: 1350 - DNA, 20 bp, synthetic construct
  misc_feature 1..20: note = chemically synthesized
  source 1..20: mol_type = other DNA
aggatctgctctttgttagg

SEQ ID NO: 1351 - DNA, 20 bp, synthetic construct
  misc_feature 1..20: note = chemically synthesized
  source 1..20: mol_type = other DNA
atctgctctttgttaggggg

SEQ ID NO: 1352 - DNA, 20 bp, synthetic construct
  misc_feature 1..20: note = chemically synthesized
  source 1..20: mol_type = other DNA
tctgctctttgttagggggt

SEQ ID NO: 1353 - DNA, 20 bp, synthetic construct
  misc_feature 1..20: note = chemically synthesized
  source 1..20: mol_type = other DNA
tctttgttagggggtgggct

SEQ ID NO: 1354 - DNA, 20 bp, synthetic construct
  misc_feature 1..20: note = chemically synthesized
  source 1..20: mol_type = other DNA
ctttgttagggggtgggctg

SEQ ID NO: 1355 - DNA, 20 bp, synthetic construct
  misc_feature 1..20: note = chemically synthesized
  source 1..20: mol_type = other DNA
tttgttagggggtgggctga

SEQ ID NO: 1356 - DNA, 20 bp, synthetic construct
  misc_feature 1..20: note = chemically synthesized
  source 1..20: mol_type = other DNA
gttagggggtgggctgaggg

SEQ ID NO: 1357 - DNA, 20 bp, synthetic construct
  misc_feature 1..20: note = chemically synthesized
  source 1..20: mol_type = other DNA
tgggctgagggtggcaatca

SEQ ID NO: 1358 - DNA, 20 bp, synthetic construct
  misc_feature 1..20: note = chemically synthesized
  source 1..20: mol_type = other DNA
gggctgagggtggcaatcaa

SEQ ID NO: 1359 - DNA, 20 bp, synthetic construct
  misc_feature 1..20: note = chemically synthesized
  source 1..20: mol_type = other DNA
ttaacttgctttttctgttt

SEQ ID NO: 1360 - DNA, 20 bp, synthetic construct
  misc_feature 1..20: note = chemically synthesized
  source 1..20: mol_type = other DNA
aacttgctttttctgtttta

SEQ ID NO: 1361 - DNA, 20 bp, synthetic construct
  misc_feature 1..20: note = chemically synthesized
  source 1..20: mol_type = other DNA
gttttagagccctcaccgtc

SEQ ID NO: 1362 - DNA, 20 bp, synthetic construct
  misc_feature 1..20: note = chemically synthesized
  source 1..20: mol_type = other DNA
gccctcaccgtctggcaccc

SEQ ID NO: 1363 - DNA, 20 bp, synthetic construct
  misc_feature 1..20: note = chemically synthesized
  source 1..20: mol_type = other DNA
ccgtctggcaccctagtcat

SEQ ID NO: 1364 - DNA, 20 bp, synthetic construct
  misc_feature 1..20: note = chemically synthesized
  source 1..20: mol_type = other DNA
gtctggcaccctagtcattg

SEQ ID NO: 1365 - DNA, 20 bp, synthetic construct
  misc_feature 1..20: note = chemically synthesized
  source 1..20: mol_type = other DNA
accctagtcattggagtcat

SEQ ID NO: 1366 - DNA, 20 bp, synthetic construct
  misc_feature 1..20: note = chemically synthesized
  source 1..20: mol_type = other DNA
ctagtcattggagtcatcag

SEQ ID NO: 1367 - DNA, 20 bp, synthetic construct
  misc_feature 1..20: note = chemically synthesized
  source 1..20: mol_type = other DNA
tttgtcgtcatcttgttcat

SEQ ID NO: 1368 - DNA, 20 bp, synthetic construct
  misc_feature 1..20: note = chemically synthesized
  source 1..20: mol_type = other DNA
ggaattttgttcataatatt

SEQ ID NO: 1369 - DNA, 20 bp, synthetic construct
  misc_feature 1..20: note = chemically synthesized
  source 1..20: mol_type = other DNA
gaattttgttcataatatta

SEQ ID NO: 1370 - DNA, 20 bp, synthetic construct
  misc_feature 1..20: note = chemically synthesized
  source 1..20: mol_type = other DNA
ttttgttcataatattaagg

SEQ ID NO: 1371 - DNA, 20 bp, synthetic construct
  misc_feature 1..20: note = chemically synthesized
  source 1..20: mol_type = other DNA
ttgttcataatattaaggaa

SEQ ID NO: 1372 - DNA, 20 bp, synthetic construct
  misc_feature 1..20: note = chemically synthesized
  source 1..20: mol_type = other DNA
tgttcataatattaaggaag

SEQ ID NO: 1373 - DNA, 20 bp, synthetic construct
  misc_feature 1..20: note = chemically synthesized
  source 1..20: mol_type = other DNA
tcataatattaaggaagagg

SEQ ID NO: 1374 - DNA, 20 bp, synthetic construct
  misc_feature 1..20: note = chemically synthesized
  source 1..20: mol_type = other DNA
cataatattaaggaagaggc

SEQ ID NO: 1375 - DNA, 20 bp, synthetic construct
  misc_feature 1..20: note = chemically synthesized
  source 1..20: mol_type = other DNA
ataatattaaggaagaggca

SEQ ID NO: 1376 - DNA, 20 bp, synthetic construct
  misc_feature 1..20: note = chemically synthesized
  source 1..20: mol_type = other DNA
ttaaggaagaggcagggttc

SEQ ID NO: 1377 - DNA, 20 bp, synthetic construct
  misc_feature 1..20: note = chemically synthesized
  source 1..20: mol_type = other DNA
ggaagaggcagggttcaagt

SEQ ID NO: 1378 - DNA, 20 bp, synthetic construct
  misc_feature 1..20: note = chemically synthesized
  source 1..20: mol_type = other DNA
agaggcagggttcaagtgag

SEQ ID NO: 1379 - DNA, 20 bp, synthetic construct
  misc_feature 1..20: note = chemically synthesized
  source 1..20: mol_type = other DNA
gaggcagggttcaagtgagt

SEQ ID NO: 1380 - DNA, 20 bp, synthetic construct
  misc_feature 1..20: note = chemically synthesized
  source 1..20: mol_type = other DNA
gggttcaagtgagtaggaac

SEQ ID NO: 1381 - DNA, 20 bp, synthetic construct
  misc_feature 1..20: note = chemically synthesized
  source 1..20: mol_type = other DNA
ggttcaagtgagtaggaaca

SEQ ID NO: 1382 - DNA, 20 bp, synthetic construct
  misc_feature 1..20: note = chemically synthesized
  source 1..20: mol_type = other DNA
gttcaagtgagtaggaacaa

SEQ ID NO: 1383 - DNA, 20 bp, synthetic construct
  misc_feature 1..20: note = chemically synthesized
  source 1..20: mol_type = other DNA
ttcaagtgagtaggaacaag

SEQ ID NO: 1384 - DNA, 20 bp, synthetic construct
  misc_feature 1..20: note = chemically synthesized
  source 1..20: mol_type = other DNA
tcaagtgagtaggaacaagg

SEQ ID NO: 1385 - DNA, 20 bp, synthetic construct
  misc_feature 1..20: note = chemically synthesized
  source 1..20: mol_type = other DNA
agtgagtaggaacaaggggg

SEQ ID NO: 1386 - DNA, 20 bp, synthetic construct
  misc_feature 1..20: note = chemically synthesized
  source 1..20: mol_type = other DNA
ggaacaagggggaagtctct

SEQ ID NO: 1387 - DNA, 20 bp, synthetic construct
  misc_feature 1..20: note = chemically synthesized
  source 1..20: mol_type = other DNA
gtctcttagtacctctgccc

SEQ ID NO: 1388 - DNA, 20 bp, synthetic construct
  misc_feature 1..20: note = chemically synthesized
  source 1..20: mol_type = other DNA
tctcttagtacctctgcccc

SEQ ID NO: 1389 - DNA, 20 bp, synthetic construct
  misc_feature 1..20: note = chemically synthesized
  source 1..20: mol_type = other DNA
ctcttagtacctctgcccca

SEQ ID NO: 1390 - DNA, 20 bp, synthetic construct
  misc_feature 1..20: note = chemically synthesized
  source 1..20: mol_type = other DNA
agtacctctgccccagggca

SEQ ID NO: 1391 - DNA, 20 bp, synthetic construct
  misc_feature 1..20: note = chemically synthesized
  source 1..20: mol_type = other DNA
acctctgccccagggcacag

SEQ ID NO: 1392 - DNA, 20 bp, synthetic construct
  misc_feature 1..20: note = chemically synthesized
  source 1..20: mol_type = other DNA
cctctgccccagggcacagt

SEQ ID NO: 1393 - DNA, 20 bp, synthetic construct
  misc_feature 1..20: note = chemically synthesized
  source 1..20: mol_type = other DNA
ctgccccagggcacagtggg

SEQ ID NO: 1394 - DNA, 20 bp, synthetic construct
  misc_feature 1..20: note = chemically synthesized
  source 1..20: mol_type = other DNA
gccccagggcacagtgggaa

SEQ ID NO: 1395 - DNA, 20 bp, synthetic construct
  misc_feature 1..20: note = chemically synthesized
  source 1..20: mol_type = other DNA
ccccagggcacagtgggaag

SEQ ID NO: 1396 - DNA, 20 bp, synthetic construct
  misc_feature 1..20: note = chemically synthesized
  source 1..20: mol_type = other DNA
cccagggcacagtgggaaga

SEQ ID NO: 1397 - DNA, 20 bp, synthetic construct
  misc_feature 1..20: note = chemically synthesized
  source 1..20: mol_type = other DNA
ccagggcacagtgggaagag

SEQ ID NO: 1398 - DNA, 20 bp, synthetic construct
  misc_feature 1..20: note = chemically synthesized
  source 1..20: mol_type = other DNA
gggcacagtgggaagagggg

SEQ ID NO: 1399 - DNA, 20 bp, synthetic construct
  misc_feature 1..20: note = chemically synthesized
  source 1..20: mol_type = other DNA
gcacagtgggaagaggggca

SEQ ID NO: 1400 - DNA, 20 bp, synthetic construct
  misc_feature 1..20: note = chemically synthesized
  source 1..20: mol_type = other DNA
cacagtgggaagaggggcag

SEQ ID NO: 1401 - DNA, 20 bp, synthetic construct
  misc_feature 1..20: note = chemically synthesized
  source 1..20: mol_type = other DNA
acagtgggaagaggggcaga

SEQ ID NO: 1402 - DNA, 20 bp, synthetic construct
  misc_feature 1..20: note = chemically synthesized
  source 1..20: mol_type = other DNA
cagtgggaagaggggcagag

SEQ ID NO: 1403 - DNA, 20 bp, synthetic construct
  misc_feature 1..20: note = chemically synthesized
  source 1..20: mol_type = other DNA
gaagaggggcagaggggatc

SEQ ID NO: 1404 - DNA, 20 bp, synthetic construct
  misc_feature 1..20: note = chemically synthesized
  source 1..20: mol_type = other DNA
cagaggggatctggcatcca

SEQ ID NO: 1405 - DNA, 20 bp, synthetic construct
  misc_feature 1..20: note = chemically synthesized
  source 1..20: mol_type = other DNA
agaggggatctggcatccat

SEQ ID NO: 1406 - DNA, 20 bp, synthetic construct
  misc_feature 1..20: note = chemically synthesized
  source 1..20: mol_type = other DNA
ggggatctggcatccatggg

SEQ ID NO: 1407 - DNA, 20 bp, synthetic construct
  misc_feature 1..20: note = chemically synthesized
  source 1..20: mol_type = other DNA
tttttctcatttatattctt

SEQ ID NO: 1408 - DNA, 20 bp, synthetic construct
  misc_feature 1..20: note = chemically synthesized
  source 1..20: mol_type = other DNA
ttttctcatttatattcttt

SEQ ID NO: 1409 - DNA, 20 bp, synthetic construct
  misc_feature 1..20: note = chemically synthesized
  source 1..20: mol_type = other DNA
tttctcatttatattctttg

SEQ ID NO: 1410 - DNA, 20 bp, synthetic construct
  misc_feature 1..20: note = chemically synthesized
  source 1..20: mol_type = other DNA
tttatattctttggggacac

SEQ ID NO: 1411 - DNA, 20 bp, synthetic construct
  misc_feature 1..20: note = chemically synthesized
  source 1..20: mol_type = other DNA
atattctttggggacaccag

SEQ ID NO: 1412 - DNA, 20 bp, synthetic construct
  misc_feature 1..20: note = chemically synthesized
  source 1..20: mol_type = other DNA
tggggacaccagcagctccc

SEQ ID NO: 1413 - DNA, 20 bp, synthetic construct
  misc_feature 1..20: note = chemically synthesized
  source 1..20: mol_type = other DNA
ggggacaccagcagctccct

SEQ ID NO: 1414 - DNA, 20 bp, synthetic construct
  misc_feature 1..20: note = chemically synthesized
  source 1..20: mol_type = other DNA
ggacaccagcagctccctgg

SEQ ID NO: 1415 - DNA, 20 bp, synthetic construct
  misc_feature 1..20: note = chemically synthesized
  source 1..20: mol_type = other DNA
accagcagctccctgggaga

SEQ ID NO: 1416 - DNA, 20 bp, synthetic construct
  misc_feature 1..20: note = chemically synthesized
  source 1..20: mol_type = other DNA
ccctgggagacagaaaataa

SEQ ID NO: 1417 - DNA, 20 bp, synthetic construct
  misc_feature 1..20: note = chemically synthesized
  source 1..20: mol_type = other DNA
cagaaaataatggttctccc

SEQ ID NO: 1418 - DNA, 20 bp, synthetic construct
  misc_feature 1..20: note = chemically synthesized
  source 1..20: mol_type = other DNA
aatggttctccccagaatga

SEQ ID NO: 1419 - DNA, 20 bp, synthetic construct
  misc_feature 1..20: note = chemically synthesized
  source 1..20: mol_type = other DNA
tctaattcaacaaacatctt

SEQ ID NO: 1420 - DNA, 20 bp, synthetic construct
  misc_feature 1..20: note = chemically synthesized
  source 1..20: mol_type = other DNA
taattcaacaaacatcttca

SEQ ID NO: 1421 - DNA, 20 bp, synthetic construct
  misc_feature 1..20: note = chemically synthesized
  source 1..20: mol_type = other DNA
cagagcacctactattttgc

SEQ ID NO: 1422 - DNA, 20 bp, synthetic construct
  misc_feature 1..20: note = chemically synthesized
  source 1..20: mol_type = other DNA
gagcacctactattttgcaa

SEQ ID NO: 1423 - DNA, 20 bp, synthetic construct
  misc_feature 1..20: note = chemically synthesized
  source 1..20: mol_type = other DNA
ctattttgcaagagctgttt

SEQ ID NO: 1424 - DNA, 20 bp, synthetic construct
  misc_feature 1..20: note = chemically synthesized
  source 1..20: mol_type = other DNA
tattttgcaagagctgttta

SEQ ID NO: 1425 - DNA, 20 bp, synthetic construct
  misc_feature 1..20: note = chemically synthesized
  source 1..20: mol_type = other DNA
tttgcaagagctgtttaagg

SEQ ID NO: 1426 - DNA, 20 bp, synthetic construct
  misc_feature 1..20: note = chemically synthesized
  source 1..20: mol_type = other DNA
aagagctgtttaaggtagta

SEQ ID NO: 1427 - DNA, 20 bp, synthetic construct
  misc_feature 1..20: note = chemically synthesized
  source 1..20: mol_type = other DNA
agagctgtttaaggtagtac

SEQ ID NO: 1428 - DNA, 20 bp, synthetic construct
  misc_feature 1..20: note = chemically synthesized
  source 1..20: mol_type = other DNA
gagctgtttaaggtagtaca

SEQ ID NO: 1429 - DNA, 20 bp, synthetic construct
  misc_feature 1..20: note = chemically synthesized
  source 1..20: mol_type = other DNA
agctgtttaaggtagtacag

SEQ ID NO: 1430 - DNA, 20 bp, synthetic construct
  misc_feature 1..20: note = chemically synthesized
  source 1..20: mol_type = other DNA
taaggtagtacaggggcttt

SEQ ID NO: 1431 - DNA, 20 bp, synthetic construct
  misc_feature 1..20: note = chemically synthesized
  source 1..20: mol_type = other DNA
aaggtagtacaggggctttg

SEQ ID NO: 1432 - DNA, 20 bp, synthetic construct
  misc_feature 1..20: note = chemically synthesized
  source 1..20: mol_type = other DNA
agtacaggggctttgaggtt

SEQ ID NO: 1433 - DNA, 20 bp, synthetic construct
  misc_feature 1..20: note = chemically synthesized
  source 1..20: mol_type = other DNA
acaggggctttgaggttgag

SEQ ID NO: 1434 - DNA, 20 bp, synthetic construct
  misc_feature 1..20: note = chemically synthesized
  source 1..20: mol_type = other DNA
ttgaggttgagaagtcactg

SEQ ID NO: 1435 - DNA, 20 bp, synthetic construct
  misc_feature 1..20: note = chemically synthesized
  source 1..20: mol_type = other DNA
gaagtcactgtggctattct

SEQ ID NO: 1436 - DNA, 20 bp, synthetic construct
  misc_feature 1..20: note = chemically synthesized
  source 1..20: mol_type = other DNA
ctattctcagaacccaaatc

SEQ ID NO: 1437 - DNA, 20 bp, synthetic construct
  misc_feature 1..20: note = chemically synthesized
  source 1..20: mol_type = other DNA
ttctcagaacccaaatctgg

SEQ ID NO: 1438 - DNA, 20 bp, synthetic construct
  misc_feature 1..20: note = chemically synthesized
  source 1..20: mol_type = other DNA
tctcagaacccaaatctggt

SEQ ID NO: 1439 - DNA, 20 bp, synthetic construct
  misc_feature 1..20: note = chemically synthesized
  source 1..20: mol_type = other DNA
ctcagaacccaaatctggta

SEQ ID NO: 1440 - DNA, 20 bp, synthetic construct
  misc_feature 1..20: note = chemically synthesized
  source 1..20: mol_type = other DNA
ctggtagggaatgaaattga

SEQ ID NO: 1441 - DNA, 20 bp, synthetic construct
  misc_feature 1..20: note = chemically synthesized
  source 1..20: mol_type = other DNA
tagggaatgaaattgatagc

SEQ ID NO: 1442 - DNA, 20 bp, synthetic construct
  misc_feature 1..20: note = chemically synthesized
  source 1..20: mol_type = other DNA
aaattgatagcaagtaaatg

SEQ ID NO: 1443 - DNA, 20 bp, synthetic construct
  misc_feature 1..20: note = chemically synthesized
  source 1..20: mol_type = other DNA
atagcaagtaaatgtagtta

SEQ ID NO: 1444 - DNA, 20 bp, synthetic construct
  misc_feature 1..20: note = chemically synthesized
  source 1..20: mol_type = other DNA
gcaagtaaatgtagttaaag

SEQ ID NO: 1445 - DNA, 20 bp, synthetic construct
  misc_feature 1..20: note = chemically synthesized
  source 1..20: mol_type = other DNA
gtagttaaagaagaccccat

SEQ ID NO: 1446 - DNA, 20 bp, synthetic construct
  misc_feature 1..20: note = chemically synthesized
  source 1..20: mol_type = other DNA
tagttaaagaagaccccatg

SEQ ID NO: 1447 - DNA, 20 bp, synthetic construct
  misc_feature 1..20: note = chemically synthesized
  source 1..20: mol_type = other DNA
gaagaccccatgaggtccta

SEQ ID NO: 1448 - DNA, 20 bp, synthetic construct
  misc_feature 1..20: note = chemically synthesized
  source 1..20: mol_type = other DNA
gaccccatgaggtcctaaag

SEQ ID NO: 1449 - DNA, 20 bp, synthetic construct
  misc_feature 1..20: note = chemically synthesized
  source 1..20: mol_type = other DNA
accccatgaggtcctaaagc

SEQ ID NO: 1450 - DNA, 20 bp, synthetic construct
  misc_feature 1..20: note = chemically synthesized
  source 1..20: mol_type = other DNA
ccatgaggtcctaaagcagg

SEQ ID NO: 1451 - DNA, 20 bp, synthetic construct
  misc_feature 1..20: note = chemically synthesized
  source 1..20: mol_type = other DNA
catgaggtcctaaagcaggc

SEQ ID NO: 1452 - DNA, 20 bp, synthetic construct
  misc_feature 1..20: note = chemically synthesized
  source 1..20: mol_type = other DNA
gaggtcctaaagcaggcagg

SEQ ID NO: 1453 - DNA, 20 bp, synthetic construct
  misc_feature 1..20: note = chemically synthesized
  source 1..20: mol_type = other DNA
gcaggcaggaagcaaatgct

SEQ ID NO: 1454 - DNA, 20 bp, synthetic construct
  misc_feature 1..20: note = chemically synthesized
  source 1..20: mol_type = other DNA
caggcaggaagcaaatgctt

SEQ ID NO: 1455 - DNA, 20 bp, synthetic construct
  misc_feature 1..20: note = chemically synthesized
  source 1..20: mol_type = other DNA
aggcaggaagcaaatgctta

SEQ ID NO: 1456 - DNA, 20 bp, synthetic construct
  misc_feature 1..20: note = chemically synthesized
  source 1..20: mol_type = other DNA
agcaaatgcttagggtgtca

SEQ ID NO: 1457 - DNA, 20 bp, synthetic construct
  misc_feature 1..20: note = chemically synthesized
  source 1..20: mol_type = other DNA
gcaaatgcttagggtgtcaa

SEQ ID NO: 1458 - DNA, 20 bp, synthetic construct
  misc_feature 1..20: note = chemically synthesized
  source 1..20: mol_type = other DNA
atgcttagggtgtcaaagga

SEQ ID NO: 1459 - DNA, 20 bp, synthetic construct
  misc_feature 1..20: note = chemically synthesized
  source 1..20: mol_type = other DNA
aaggaaagaatgatcacatt

SEQ ID NO: 1460 - DNA, 20 bp, synthetic construct
  misc_feature 1..20: note = chemically synthesized
  source 1..20: mol_type = other DNA
aaagaatgatcacattcagc

SEQ ID NO: 1461 - DNA, 20 bp, synthetic construct
  misc_feature 1..20: note = chemically synthesized
  source 1..20: mol_type = other DNA
aagaatgatcacattcagct

SEQ ID NO: 1462 - DNA, 20 bp, synthetic construct
  misc_feature 1..20: note = chemically synthesized
  source 1..20: mol_type = other DNA
agaatgatcacattcagctg

SEQ ID NO: 1463 - DNA, 20 bp, synthetic construct
  misc_feature 1..20: note = chemically synthesized
  source 1..20: mol_type = other DNA
atcacattcagctggggatc

SEQ ID NO: 1464 - DNA, 20 bp, synthetic construct
  misc_feature 1..20: note = chemically synthesized
  source 1..20: mol_type = other DNA
cattcagctggggatcaaga

SEQ ID NO: 1465 - DNA, 20 bp, synthetic construct
  misc_feature 1..20: note = chemically synthesized
  source 1..20: mol_type = other DNA
tggggatcaagatagccttc

SEQ ID NO: 1466 - DNA, 20 bp, synthetic construct
  misc_feature 1..20: note = chemically synthesized
  source 1..20: mol_type = other DNA
agatagccttctggatcttg

SEQ ID NO: 1467 - DNA, 20 bp, synthetic construct
  misc_feature 1..20: note = chemically synthesized
  source 1..20: mol_type = other DNA
gatagccttctggatcttga

SEQ ID NO: 1468 - DNA, 20 bp, synthetic construct
  misc_feature 1..20: note = chemically synthesized
  source 1..20: mol_type = other DNA
tagccttctggatcttgaag

SEQ ID NO: 1469 - DNA, 20 bp, synthetic construct
  misc_feature 1..20: note = chemically synthesized
  source 1..20: mol_type = other DNA
ccttctggatcttgaaggag

SEQ ID NO: 1470 - DNA, 20 bp, synthetic construct
  misc_feature 1..20: note = chemically synthesized
  source 1..20: mol_type = other DNA
ctggatcttgaaggagaagc

SEQ ID NO: 1471 - DNA, 20 bp, synthetic construct
  misc_feature 1..20: note = chemically synthesized
  source 1..20: mol_type = other DNA
aaggagaagctggattccat

SEQ ID NO: 1472 - DNA, 20 bp, synthetic construct
  misc_feature 1..20: note = chemically synthesized
  source 1..20: mol_type = other DNA
aggagaagctggattccatt

SEQ ID NO: 1473 - DNA, 20 bp, synthetic construct
  misc_feature 1..20: note = chemically synthesized
  source 1..20: mol_type = other DNA
gaagctggattccattaggt

SEQ ID NO: 1474 - DNA, 20 bp, synthetic construct
  misc_feature 1..20: note = chemically synthesized
  source 1..20: mol_type = other DNA
aagctggattccattaggtg

SEQ ID NO: 1475 - DNA, 20 bp, synthetic construct
  misc_feature 1..20: note = chemically synthesized
  source 1..20: mol_type = other DNA
gattccattaggtgaggttg

SEQ ID NO: 1476 - DNA, 20 bp, synthetic construct
  misc_feature 1..20: note = chemically synthesized
  source 1..20: mol_type = other DNA
ttaggtgaggttgaagatga

SEQ ID NO: 1477 - DNA, 20 bp, synthetic construct
  misc_feature 1..20: note = chemically synthesized
  source 1..20: mol_type = other DNA
taggtgaggttgaagatgat

SEQ ID NO: 1478 - DNA, 20 bp, synthetic construct
  misc_feature 1..20: note = chemically synthesized
  source 1..20: mol_type = other DNA
ggtgaggttgaagatgatgg

SEQ ID NO: 1479 - DNA, 20 bp, synthetic construct
  misc_feature 1..20: note = chemically synthesized
  source 1..20: mol_type = other DNA
gtgaggttgaagatgatggg

SEQ ID NO: 1480 - DNA, 20 bp, synthetic construct
  misc_feature 1..20: note = chemically synthesized
  source 1..20: mol_type = other DNA
aagatgatgggaggtctaca

SEQ ID NO: 1481 - DNA, 20 bp, synthetic construct
  misc_feature 1..20: note = chemically synthesized
  source 1..20: mol_type = other DNA
tgatgggaggtctacacaga

SEQ ID NO: 1482 - DNA, 20 bp, synthetic construct
  misc_feature 1..20: note = chemically synthesized
  source 1..20: mol_type = other DNA
atgggaggtctacacagacg

SEQ ID NO: 1483 - DNA, 20 bp, synthetic construct
  misc_feature 1..20: note = chemically synthesized
  source 1..20: mol_type = other DNA
acagacggagcaaccatgcc

SEQ ID NO: 1484 - DNA, 20 bp, synthetic construct
  misc_feature 1..20: note = chemically synthesized
  source 1..20: mol_type = other DNA
gacggagcaaccatgccaag

SEQ ID NO: 1485 - DNA, 20 bp, synthetic construct
  misc_feature 1..20: note = chemically synthesized
  source 1..20: mol_type = other DNA
acggagcaaccatgccaagt

SEQ ID NO: 1486 - DNA, 20 bp, synthetic construct
  misc_feature 1..20: note = chemically synthesized
  source 1..20: mol_type = other DNA
ggagcaaccatgccaagtag

SEQ ID NO: 1487 - DNA, 20 bp, synthetic construct
  misc_feature 1..20: note = chemically synthesized
  source 1..20: mol_type = other DNA
agcaaccatgccaagtagga

SEQ ID NO: 1488 - DNA, 20 bp, synthetic construct
  misc_feature 1..20: note = chemically synthesized
  source 1..20: mol_type = other DNA
catgccaagtaggagagtat

SEQ ID NO: 1489 - DNA, 20 bp, synthetic construct
  misc_feature 1..20: note = chemically synthesized
  source 1..20: mol_type = other DNA
atgccaagtaggagagtata

SEQ ID NO: 1490 - DNA, 20 bp, synthetic construct
  misc_feature 1..20: note = chemically synthesized
  source 1..20: mol_type = other DNA
taggagagtataaggcatac

SEQ ID NO: 1491 - DNA, 20 bp, synthetic construct
  misc_feature 1..20: note = chemically synthesized
  source 1..20: mol_type = other DNA
aggagagtataaggcatact

SEQ ID NO: 1492 - DNA, 20 bp, synthetic construct
  misc_feature 1..20: note = chemically synthesized
  source 1..20: mol_type = other DNA
gagagtataaggcatactgg

SEQ ID NO: 1493 - DNA, 20 bp, synthetic construct
  misc_feature 1..20: note = chemically synthesized
  source 1..20: mol_type = other DNA
tataaggcatactgggagat

SEQ ID NO: 1494 - DNA, 20 bp, synthetic construct
  misc_feature 1..20: note = chemically synthesized
  source 1..20: mol_type = other DNA
aattactgtaccttaaccct

SEQ ID NO: 1495 - DNA, 20 bp, synthetic construct
  misc_feature 1..20: note = chemically synthesized
  source 1..20: mol_type = other DNA
accttaaccctgagtttgcg

SEQ ID NO: 1496 - DNA, 20 bp, synthetic construct
  misc_feature 1..20: note = chemically synthesized
  source 1..20: mol_type = other DNA
ttctaccccctgaacatctg

SEQ ID NO: 1497 - DNA, 20 bp, synthetic construct
  misc_feature 1..20: note = chemically synthesized
  source 1..20: mol_type = other DNA
ccccctgaacatctgtggtg

SEQ ID NO: 1498 - DNA, 20 bp, synthetic construct
  misc_feature 1..20: note = chemically synthesized
  source 1..20: mol_type = other DNA
cccctgaacatctgtggtgt

SEQ ID NO: 1499 - DNA, 20 bp, synthetic construct
  misc_feature 1..20: note = chemically synthesized
  source 1..20: mol_type = other DNA
ccctgaacatctgtggtgta

SEQ ID NO: 1500 - DNA, 20 bp, synthetic construct
  misc_feature 1..20: note = chemically synthesized
  source 1..20: mol_type = other DNA
aacatctgtggtgtagggaa

SEQ ID NO: 1501 - DNA, 20 bp, synthetic construct
  misc_feature 1..20: note = chemically synthesized
  source 1..20: mol_type = other DNA
catctgtggtgtagggaaaa

SEQ ID NO: 1502 - DNA, 20 bp, synthetic construct
  misc_feature 1..20: note = chemically synthesized
  source 1..20: mol_type = other DNA
tggtgtagggaaaagagaat

SEQ ID NO: 1503 - DNA, 20 bp, synthetic construct
  misc_feature 1..20: note = chemically synthesized
  source 1..20: mol_type = other DNA
gtagggaaaagagaatcaga

SEQ ID NO: 1504 - DNA, 20 bp, synthetic construct
  misc_feature 1..20: note = chemically synthesized
  source 1..20: mol_type = other DNA
gggaaaagagaatcagaaag

SEQ ID NO: 1505 - DNA, 20 bp, synthetic construct
  misc_feature 1..20: note = chemically synthesized
  source 1..20: mol_type = other DNA
aaagagaatcagaaagaagc

SEQ ID NO: 1506 - DNA, 20 bp, synthetic construct
  misc_feature 1..20: note = chemically synthesized
  source 1..20: mol_type = other DNA
cagaaagaagccagctcata

SEQ ID NO: 1507 - DNA, 20 bp, synthetic construct
  misc_feature 1..20: note = chemically synthesized
  source 1..20: mol_type = other DNA
gaaagaagccagctcataca

SEQ ID NO: 1508 - DNA, 20 bp, synthetic construct
  misc_feature 1..20: note = chemically synthesized
  source 1..20: mol_type = other DNA
agccagctcatacagagtcc

SEQ ID NO: 1509 - DNA, 20 bp, synthetic construct
  misc_feature 1..20: note = chemically synthesized
  source 1..20: mol_type = other DNA
gccagctcatacagagtcca

SEQ ID NO: 1510 - DNA, 20 bp, synthetic construct
  misc_feature 1..20: note = chemically synthesized
  source 1..20: mol_type = other DNA
ccagctcatacagagtccaa

SEQ ID NO: 1511 - DNA, 20 bp, synthetic construct
  misc_feature 1..20: note = chemically synthesized
  source 1..20: mol_type = other DNA
tacagagtccaagggtcttt

SEQ ID NO: 1512 - DNA, 20 bp, synthetic construct
  misc_feature 1..20: note = chemically synthesized
  source 1..20: mol_type = other DNA
acagagtccaagggtctttt

SEQ ID NO: 1513 - DNA, 20 bp, synthetic construct
  misc_feature 1..20: note = chemically synthesized
  source 1..20: mol_type = other DNA
ccaagggtcttttgggatat

SEQ ID NO: 1514 - DNA, 20 bp, synthetic construct
  misc_feature 1..20: note = chemically synthesized
  source 1..20: mol_type = other DNA
caagggtcttttgggatatt

SEQ ID NO: 1515 - DNA, 20 bp, synthetic construct
  misc_feature 1..20: note = chemically synthesized
  source 1..20: mol_type = other DNA
ggatattgggttatgatcac

SEQ ID NO: 1516 - DNA, 20 bp, synthetic construct
  misc_feature 1..20: note = chemically synthesized
  source 1..20: mol_type = other DNA
gatattgggttatgatcact

SEQ ID NO: 1517 - DNA, 20 bp, synthetic construct
  misc_feature 1..20: note = chemically synthesized
  source 1..20: mol_type = other DNA
atattgggttatgatcactg

SEQ ID NO: 1518 - DNA, 20 bp, synthetic construct
  misc_feature 1..20: note = chemically synthesized
  source 1..20: mol_type = other DNA
tgatcactggggtgtcattg

SEQ ID NO: 1519 - DNA, 20 bp, synthetic construct
  misc_feature 1..20: note = chemically synthesized
  source 1..20: mol_type = other DNA
gatcactggggtgtcattga

SEQ ID NO: 1520 - DNA, 20 bp, synthetic construct
  misc_feature 1..20: note = chemically synthesized
  source 1..20: mol_type = other DNA
gggtgtcattgaaggatcct

SEQ ID NO: 1521 - DNA, 20 bp, synthetic construct
  misc_feature 1..20: note = chemically synthesized
  source 1..20: mol_type = other DNA
gtcattgaaggatcctaaga

SEQ ID NO: 1522 - DNA, 20 bp, synthetic construct
  misc_feature 1..20: note = chemically synthesized
  source 1..20: mol_type = other DNA
tcattgaaggatcctaagaa

SEQ ID NO: 1523 - DNA, 20 bp, synthetic construct
  misc_feature 1..20: note = chemically synthesized
  source 1..20: mol_type = other DNA
attgaaggatcctaagaaag

SEQ ID NO: 1524 - DNA, 20 bp, synthetic construct
  misc_feature 1..20: note = chemically synthesized
  source 1..20: mol_type = other DNA
ttgaaggatcctaagaaagg

SEQ ID NO: 1525 - DNA, 20 bp, synthetic construct
  misc_feature 1..20: note = chemically synthesized
  source 1..20: mol_type = other DNA
ggaccacgatctcccttata

SEQ ID NO: 1526 - DNA, 20 bp, synthetic construct
  misc_feature 1..20: note = chemically synthesized
  source 1..20: mol_type = other DNA
tatatggtgaatgtgttgtt

SEQ ID NO: 1527 - DNA, 20 bp, synthetic construct
  misc_feature 1..20: note = chemically synthesized
  source 1..20: mol_type = other DNA
atggtgaatgtgttgttaag

SEQ ID NO: 1528 - DNA, 20 bp, synthetic construct
  misc_feature 1..20: note = chemically synthesized
  source 1..20: mol_type = other DNA
tgaatgtgttgttaagaagt

SEQ ID NO: 1529 - DNA, 20 bp, synthetic construct
  misc_feature 1..20: note = chemically synthesized
  source 1..20: mol_type = other DNA
gtgttgttaagaagttagat

SEQ ID NO: 1530 - DNA, 20 bp, synthetic construct
  misc_feature 1..20: note = chemically synthesized
  source 1..20: mol_type = other DNA
gttgttaagaagttagatga

SEQ ID NO: 1531 - DNA, 20 bp, synthetic construct
  misc_feature 1..20: note = chemically synthesized
  source 1..20: mol_type = other DNA
ttgttaagaagttagatgag

SEQ ID NO: 1532 - DNA, 20 bp, synthetic construct
  misc_feature 1..20: note = chemically synthesized
  source 1..20: mol_type = other DNA
taagaagttagatgagaggt

SEQ ID NO: 1533 - DNA, 20 bp, synthetic construct
  misc_feature 1..20: note = chemically synthesized
  source 1..20: mol_type = other DNA
aagaagttagatgagaggtg

SEQ ID NO: 1534 - DNA, 20 bp, synthetic construct
  misc_feature 1..20: note = chemically synthesized
  source 1..20: mol_type = other DNA
gaagttagatgagaggtgag

SEQ ID NO: 1535 - DNA, 20 bp, synthetic construct
  misc_feature 1..20: note = chemically synthesized
  source 1..20: mol_type = other DNA
tagatgagaggtgaggagac

SEQ ID NO: 1536 - DNA, 20 bp, synthetic construct
  misc_feature 1..20: note = chemically synthesized
  source 1..20: mol_type = other DNA
tgagaggtgaggagaccagt

SEQ ID NO: 1537 - DNA, 20 bp, synthetic construct
  misc_feature 1..20: note = chemically synthesized
  source 1..20: mol_type = other DNA
aggtgaggagaccagttaga

SEQ ID NO: 1538 - DNA, 20 bp, synthetic construct
  misc_feature 1..20: note = chemically synthesized
  source 1..20: mol_type = other DNA
agaccagttagaaagccaat

SEQ ID NO: 1539 - DNA, 20 bp, synthetic construct
  misc_feature 1..20: note = chemically synthesized
  source 1..20: mol_type = other DNA
agaaagccaataagcatttc

SEQ ID NO: 1540 - DNA, 20 bp, synthetic construct
  misc_feature 1..20: note = chemically synthesized
  source 1..20: mol_type = other DNA
gccaataagcatttccagat

SEQ ID NO: 1541 - DNA, 20 bp, synthetic construct
  misc_feature 1..20: note = chemically synthesized
  source 1..20: mol_type = other DNA
caataagcatttccagatga

SEQ ID NO: 1542 - DNA, 20 bp, synthetic construct
  misc_feature 1..20: note = chemically synthesized
  source 1..20: mol_type = other DNA
catttccagatgagagataa

SEQ ID NO: 1543 - DNA, 20 bp, synthetic construct
  misc_feature 1..20: note = chemically synthesized
  source 1..20: mol_type = other DNA
taatggttcttgaaatccaa

SEQ ID NO: 1544 - DNA, 20 bp, synthetic construct
  misc_feature 1..20: note = chemically synthesized
  source 1..20: mol_type = other DNA
tcttgaaatccaatagtgcc

SEQ ID NO: 1545 - DNA, 20 bp, synthetic construct
  misc_feature 1..20: note = chemically synthesized
  source 1..20: mol_type = other DNA
cttgaaatccaatagtgccc

SEQ ID NO: 1546 - DNA, 20 bp, synthetic construct
  misc_feature 1..20: note = chemically synthesized
  source 1..20: mol_type = other DNA
atagtgcccaggtctaaatt

SEQ ID NO: 1547 - DNA, 20 bp, synthetic construct
  misc_feature 1..20: note = chemically synthesized
  source 1..20: mol_type = other DNA
tgcccaggtctaaattgaga

SEQ ID NO: 1548 - DNA, 20 bp, synthetic construct
  misc_feature 1..20: note = chemically synthesized
  source 1..20: mol_type = other DNA
gcccaggtctaaattgagat

SEQ ID NO: 1549 - DNA, 20 bp, synthetic construct
  misc_feature 1..20: note = chemically synthesized
  source 1..20: mol_type = other DNA
ctaaattgagatgggtgaat

SEQ ID NO: 1550 - DNA, 20 bp, synthetic construct
  misc_feature 1..20: note = chemically synthesized
  source 1..20: mol_type = other DNA
taaattgagatgggtgaatg

SEQ ID NO: 1551 - DNA, 20 bp, synthetic construct
  misc_feature 1..20: note = chemically synthesized
  source 1..20: mol_type = other DNA
gatgggtgaatgaggaaaat

SEQ ID NO: 1552 - DNA, 20 bp, synthetic construct
  misc_feature 1..20: note = chemically synthesized
  source 1..20: mol_type = other DNA
atgggtgaatgaggaaaata

SEQ ID NO: 1553 - DNA, 20 bp, synthetic construct
  misc_feature 1..20: note = chemically synthesized
  source 1..20: mol_type = other DNA
ggtgaatgaggaaaataagg

SEQ ID NO: 1554 - DNA, 20 bp, synthetic construct
  misc_feature 1..20: note = chemically synthesized
  source 1..20: mol_type = other DNA
tgaatgaggaaaataaggaa

SEQ ID NO: 1555 - DNA, 20 bp, synthetic construct
  misc_feature 1..20: note = chemically synthesized
  source 1..20: mol_type = other DNA
aatgaggaaaataaggaaga

SEQ ID NO: 1556 - DNA, 20 bp, synthetic construct
  misc_feature 1..20: note = chemically synthesized
  source 1..20: mol_type = other DNA
gaggaaaataaggaagagag

SEQ ID NO: 1557 - DNA, 20 bp, synthetic construct
  misc_feature 1..20: note = chemically synthesized
  source 1..20: mol_type = other DNA
ggaaaataaggaagagagaa

SEQ ID NO: 1558 - DNA, 20 bp, synthetic construct
  misc_feature 1..20: note = chemically synthesized
  source 1..20: mol_type = other DNA
gaaaataaggaagagagaag

SEQ ID NO: 1559 - DNA, 20 bp, synthetic construct
  misc_feature 1..20: note = chemically synthesized
  source 1..20: mol_type = other DNA
ataaggaagagagaagaggc

SEQ ID NO: 1560 - DNA, 20 bp, synthetic construct
  misc_feature 1..20: note = chemically synthesized
  source 1..20: mol_type = other DNA
ggaagagagaagaggcaaga

SEQ ID NO: 1561 - DNA, 20 bp, synthetic construct
  misc_feature 1..20: note = chemically synthesized
  source 1..20: mol_type = other DNA
agaagaggcaagatggtgcc

SEQ ID NO: 1562 - DNA, 20 bp, synthetic construct
  misc_feature 1..20: note = chemically synthesized
  source 1..20: mol_type = other DNA
gaagaggcaagatggtgcct

SEQ ID NO: 1563 - DNA, 20 bp, synthetic construct
  misc_feature 1..20: note = chemically synthesized
  source 1..20: mol_type = other DNA
ggtttgtgatgcctctttcc

SEQ ID NO: 1564 - DNA, 20 bp, synthetic construct
  misc_feature 1..20: note = chemically synthesized
  source 1..20: mol_type = other DNA
gtttgtgatgcctctttcct

SEQ ID NO: 1565 - DNA, 20 bp, synthetic construct
  misc_feature 1..20: note = chemically synthesized
  source 1..20: mol_type = other DNA
tcctgggtctcttgtctcca

SEQ ID NO: 1566 - DNA, 20 bp, synthetic construct
  misc_feature 1..20: note = chemically synthesized
  source 1..20: mol_type = other DNA
cctgggtctcttgtctccac

SEQ ID NO: 1567 - DNA, 20 bp, synthetic construct
  misc_feature 1..20: note = chemically synthesized
  source 1..20: mol_type = other DNA
tgggtctcttgtctccacag

SEQ ID NO: 1568 - DNA, 20 bp, synthetic construct
  misc_feature 1..20: note = chemically synthesized
  source 1..20: mol_type = other DNA
gggtctcttgtctccacagg

SEQ ID NO: 1569 - DNA, 20 bp, synthetic construct
  misc_feature 1..20: note = chemically synthesized
  source 1..20: mol_type = other DNA
gtctcttgtctccacaggag

SEQ ID NO: 1570 - DNA, 20 bp, synthetic construct
  misc_feature 1..20: note = chemically synthesized
  source 1..20: mol_type = other DNA
tgtctccacaggaggagcca

SEQ ID NO: 1571 - DNA, 20 bp, synthetic construct
  misc_feature 1..20: note = chemically synthesized
  source 1..20: mol_type = other DNA
gtctccacaggaggagccat

SEQ ID NO: 1572 - DNA, 20 bp, synthetic construct
  misc_feature 1..20: note = chemically synthesized
  source 1..20: mol_type = other DNA
tctccacaggaggagccatg

SEQ ID NO: 1573 - DNA, 20 bp, synthetic construct
  misc_feature 1..20: note = chemically synthesized
  source 1..20: mol_type = other DNA
agccatggggcactacgtct

SEQ ID NO: 1574 - DNA, 20 bp, synthetic construct
  misc_feature 1..20: note = chemically synthesized
  source 1..20: mol_type = other DNA
actacgtcttagctgaacgt

SEQ ID NO: 1575 - DNA, 20 bp, synthetic construct
  misc_feature 1..20: note = chemically synthesized
  source 1..20: mol_type = other DNA
agctgaacgtgagtgacacg

SEQ ID NO: 1576 - DNA, 20 bp, synthetic construct
  misc_feature 1..20: note = chemically synthesized
  source 1..20: mol_type = other DNA
cgtgagtgacacgcagcctg

SEQ ID NO: 1577 - DNA, 20 bp, synthetic construct
  misc_feature 1..20: note = chemically synthesized
  source 1..20: mol_type = other DNA
cgcagcctgcagactcactg

SEQ ID NO: 1578 - DNA, 20 bp, synthetic construct
  misc_feature 1..20: note = chemically synthesized
  source 1..20: mol_type = other DNA
gcagcctgcagactcactgt

SEQ ID NO: 1579 - DNA, 20 bp, synthetic construct
  misc_feature 1..20: note = chemically synthesized
  source 1..20: mol_type = other DNA
gcctgcagactcactgtggg

SEQ ID NO: 1580 - DNA, 20 bp, synthetic construct
  misc_feature 1..20: note = chemically synthesized
  source 1..20: mol_type = other DNA
cctgcagactcactgtggga

SEQ ID NO: 1581 - DNA, 20 bp, synthetic construct
  misc_feature 1..20: note = chemically synthesized
  source 1..20: mol_type = other DNA
tgcagactcactgtgggaag

SEQ ID NO: 1582 - DNA, 20 bp, synthetic construct
  misc_feature 1..20: note = chemically synthesized
  source 1..20: mol_type = other DNA
ctgtgggaaggagacaaaac

SEQ ID NO: 1583 - DNA, 20 bp, synthetic construct
  misc_feature 1..20: note = chemically synthesized
  source 1..20: mol_type = other DNA
gtgggaaggagacaaaacta

SEQ ID NO: 1584 - DNA, 20 bp, synthetic construct
  misc_feature 1..20: note = chemically synthesized
  source 1..20: mol_type = other DNA
gagacaaaactagagactca

SEQ ID NO: 1585 - DNA, 20 bp, synthetic construct
  misc_feature 1..20: note = chemically synthesized
  source 1..20: mol_type = other DNA
gacaaaactagagactcaaa

SEQ ID NO: 1586 - DNA, 20 bp, synthetic construct
  misc_feature 1..20: note = chemically synthesized
  source 1..20: mol_type = other DNA
acaaaactagagactcaaag

SEQ ID NO: 1587 - DNA, 20 bp, synthetic construct
  misc_feature 1..20: note = chemically synthesized
  source 1..20: mol_type = other DNA
caaaactagagactcaaaga

SEQ ID NO: 1588 - DNA, 20 bp, synthetic construct
  misc_feature 1..20: note = chemically synthesized
  source 1..20: mol_type = other DNA
aaactagagactcaaagagg

SEQ ID NO: 1589 - DNA, 20 bp, synthetic construct
  misc_feature 1..20: note = chemically synthesized
  source 1..20: mol_type = other DNA
caaagagggagtgcatttat

SEQ ID NO: 1590 - DNA, 20 bp, synthetic construct
  misc_feature 1..20: note = chemically synthesized
  source 1..20: mol_type = other DNA
tttatgagctcttcatgttt

SEQ ID NO: 1591 - DNA, 20 bp, synthetic construct
  misc_feature 1..20: note = chemically synthesized
  source 1..20: mol_type = other DNA
ttatgagctcttcatgtttc

SEQ ID NO: 1592 - DNA, 20 bp, synthetic construct
  misc_feature 1..20: note = chemically synthesized
  source 1..20: mol_type = other DNA
atgagctcttcatgtttcag

SEQ ID NO: 1593 - DNA, 20 bp, synthetic construct
  misc_feature 1..20: note = chemically synthesized
  source 1..20: mol_type = other DNA
gagctcttcatgtttcagga

SEQ ID NO: 1594 - DNA, 20 bp, synthetic construct
  misc_feature 1..20: note = chemically synthesized
  source 1..20: mol_type = other DNA
gctcttcatgtttcaggaga

SEQ ID NO: 1595 - DNA, 20 bp, synthetic construct
  misc_feature 1..20: note = chemically synthesized
  source 1..20: mol_type = other DNA
gagagagttgaacctaaaca

SEQ ID NO: 1596 - DNA, 20 bp, synthetic construct
  misc_feature 1..20: note = chemically synthesized
  source 1..20: mol_type = other DNA
cctgacgaactccttgattt

SEQ ID NO: 1597 - DNA, 20 bp, synthetic construct
  misc_feature 1..20: note = chemically synthesized
  source 1..20: mol_type = other DNA
tctctgttcatttcctcaaa

SEQ ID NO: 1598 - DNA, 20 bp, synthetic construct
  misc_feature 1..20: note = chemically synthesized
  source 1..20: mol_type = other DNA
ctcaaaaagatttccccatt

SEQ ID NO: 1599 - DNA, 20 bp, synthetic construct
  misc_feature 1..20: note = chemically synthesized
  source 1..20: mol_type = other DNA
tcaaaaagatttccccattt

SEQ ID NO: 1600 - DNA, 20 bp, synthetic construct
  misc_feature 1..20: note = chemically synthesized
  source 1..20: mol_type = other DNA
atttccccatttaggtttct

SEQ ID NO: 1601 - DNA, 20 bp, synthetic construct
  misc_feature 1..20: note = chemically synthesized
  source 1..20: mol_type = other DNA
gtttctgagttcctgcatgc

SEQ ID NO: 1602 - DNA, 20 bp, synthetic construct
  misc_feature 1..20: note = chemically synthesized
  source 1..20: mol_type = other DNA
tcctgcatgccggtgatccc

SEQ ID NO: 1603 - DNA, 20 bp, synthetic construct
  misc_feature 1..20: note = chemically synthesized
  source 1..20: mol_type = other DNA
cctagctgtgacctctcccc

SEQ ID NO: 1604 - DNA, 20 bp, synthetic construct
  misc_feature 1..20: note = chemically synthesized
  source 1..20: mol_type = other DNA
aactgtctctcatgaacctc

SEQ ID NO: 1605 - DNA, 20 bp, synthetic construct
  misc_feature 1..20: note = chemically synthesized
  source 1..20: mol_type = other DNA
catgaacctcaagctgcatc

SEQ ID NO: 1606 - DNA, 20 bp, synthetic construct
  misc_feature 1..20: note = chemically synthesized
  source 1..20: mol_type = other DNA
tgaacctcaagctgcatcta

SEQ ID NO: 1607 - DNA, 20 bp, synthetic construct
  misc_feature 1..20: note = chemically synthesized
  source 1..20: mol_type = other DNA
gaacctcaagctgcatctag

SEQ ID NO: 1608 - DNA, 20 bp, synthetic construct
  misc_feature 1..20: note = chemically synthesized
  source 1..20: mol_type = other DNA
cttcatttcctccgtcacct

SEQ ID NO: 1609 - DNA, 20 bp, synthetic construct
  misc_feature 1..20: note = chemically synthesized
  source 1..20: mol_type = other DNA
tcatttcctccgtcacctca

SEQ ID NO: 1610 - DNA, 20 bp, synthetic construct
  misc_feature 1..20: note = chemically synthesized
  source 1..20: mol_type = other DNA
gtcatttcatttcctatttt

SEQ ID NO: 1611 - DNA, 20 bp, synthetic construct
  misc_feature 1..20: note = chemically synthesized
  source 1..20: mol_type = other DNA
atttcatttcctatttttgg

SEQ ID NO: 1612 - DNA, 20 bp, synthetic construct
  misc_feature 1..20: note = chemically synthesized
  source 1..20: mol_type = other DNA
ttcatttcctatttttggaa

SEQ ID NO: 1613 - DNA, 20 bp, synthetic construct
  misc_feature 1..20: note = chemically synthesized
  source 1..20: mol_type = other DNA
tcatttcctatttttggaag

SEQ ID NO: 1614 - DNA, 20 bp, synthetic construct
  misc_feature 1..20: note = chemically synthesized
  source 1..20: mol_type = other DNA
ggaagaggactccttaaatt

SEQ ID NO: 1615 - DNA, 20 bp, synthetic construct
  misc_feature 1..20: note = chemically synthesized
  source 1..20: mol_type = other DNA
gaagaggactccttaaattt

SEQ ID NO: 1616 - DNA, 20 bp, synthetic construct
  misc_feature 1..20: note = chemically synthesized
  source 1..20: mol_type = other DNA
aagaggactccttaaatttg

SEQ ID NO: 1617 - DNA, 20 bp, synthetic construct
  misc_feature 1..20: note = chemically synthesized
  source 1..20: mol_type = other DNA
agaggactccttaaatttgg

SEQ ID NO: 1618 - DNA, 20 bp, synthetic construct
  misc_feature 1..20: note = chemically synthesized
  source 1..20: mol_type = other DNA
catgattcattttaacatct

SEQ ID NO: 1619 - DNA, 20 bp, synthetic construct
  misc_feature 1..20: note = chemically synthesized
  source 1..20: mol_type = other DNA
ttcattttaacatctgagaa

SEQ ID NO: 1620 - DNA, 20 bp, synthetic construct
  misc_feature 1..20: note = chemically synthesized
  source 1..20: mol_type = other DNA
ctgagaaaagctttgaaccc

SEQ ID NO: 1621 - DNA, 20 bp, synthetic construct
  misc_feature 1..20: note = chemically synthesized
  source 1..20: mol_type = other DNA
tgagaaaagctttgaaccct

SEQ ID NO: 1622 - DNA, 20 bp, synthetic construct
  misc_feature 1..20: note = chemically synthesized
  source 1..20: mol_type = other DNA
aagctttgaaccctgggacg

SEQ ID NO: 1623 - DNA, 20 bp, synthetic construct
  misc_feature 1..20: note = chemically synthesized
  source 1..20: mol_type = other DNA
tttgaaccctgggacgtggc

SEQ ID NO: 1624 - DNA, 20 bp, synthetic construct
  misc_feature 1..20: note = chemically synthesized
  source 1..20: mol_type = other DNA
gtggctagtcataaccttac

SEQ ID NO: 1625 - DNA, 20 bp, synthetic construct
  misc_feature 1..20: note = chemically synthesized
  source 1..20: mol_type = other DNA
acatgtatctatgcattttc

SEQ ID NO: 1626 - DNA, 20 bp, synthetic construct
  misc_feature 1..20: note = chemically synthesized
  source 1..20: mol_type = other DNA
aatcctctctctgtgttacc

SEQ ID NO: 1627 - DNA, 20 bp, synthetic construct
  misc_feature 1..20: note = chemically synthesized
  source 1..20: mol_type = other DNA
ccagtaactcatctgtcacc

SEQ ID NO: 1628 - DNA, 20 bp, synthetic construct
  misc_feature 1..20: note = chemically synthesized
  source 1..20: mol_type = other DNA
actcatctgtcaccaagcct

SEQ ID NO: 1629 - DNA, 20 bp, synthetic construct
  misc_feature 1..20: note = chemically synthesized
  source 1..20: mol_type = other DNA
ctcatctgtcaccaagcctt

SEQ ID NO: 1630 - DNA, 20 bp, synthetic construct
  misc_feature 1..20: note = chemically synthesized
  source 1..20: mol_type = other DNA
tcatctgtcaccaagccttg

SEQ ID NO: 1631 - DNA, 20 bp, synthetic construct
  misc_feature 1..20: note = chemically synthesized
  source 1..20: mol_type = other DNA
cttccatctgattgtgatgt

SEQ ID NO: 1632 - DNA, 20 bp, synthetic construct
  misc_feature 1..20: note = chemically synthesized
  source 1..20: mol_type = other DNA
tgattgtgatgtgagttgca

SEQ ID NO: 1633 - DNA, 20 bp, synthetic construct
  misc_feature 1..20: note = chemically synthesized
  source 1..20: mol_type = other DNA
atgtgagttgcacagctatg

SEQ ID NO: 1634 - DNA, 20 bp, synthetic construct
  misc_feature 1..20: note = chemically synthesized
  source 1..20: mol_type = other DNA
tgtgagttgcacagctatga

SEQ ID NO: 1635 - DNA, 20 bp, synthetic construct
  misc_feature 1..20: note = chemically synthesized
  source 1..20: mol_type = other DNA
aaggctgtacactgcacgaa

SEQ ID NO: 1636 - DNA, 20 bp, synthetic construct
  misc_feature 1..20: note = chemically synthesized
  source 1..20: mol_type = other DNA
gctgtacactgcacgaatgg

SEQ ID NO: 1637 - DNA, 20 bp, synthetic construct
  misc_feature 1..20: note = chemically synthesized
  source 1..20: mol_type = other DNA
tgtacactgcacgaatggaa

SEQ ID NO: 1638 - DNA, 20 bp, synthetic construct
  misc_feature 1..20: note = chemically synthesized
  source 1..20: mol_type = other DNA
gtacactgcacgaatggaag

SEQ ID NO: 1639 - DNA, 20 bp, synthetic construct
  misc_feature 1..20: note = chemically synthesized
  source 1..20: mol_type = other DNA
aatggaagaggcacctgtcc

SEQ ID NO: 1640 - DNA, 20 bp, synthetic construct
  misc_feature 1..20: note = chemically synthesized
  source 1..20: mol_type = other DNA
agaggcacctgtcccagaaa

SEQ ID NO: 1641 - DNA, 20 bp, synthetic construct
  misc_feature 1..20: note = chemically synthesized
  source 1..20: mol_type = other DNA
ctgtcccagaaaaagcatca

SEQ ID NO: 1642 - DNA, 20 bp, synthetic construct
  misc_feature 1..20: note = chemically synthesized
  source 1..20: mol_type = other DNA
aaaagcatcatggctatctg

SEQ ID NO: 1643 - DNA, 20 bp, synthetic construct
  misc_feature 1..20: note = chemically synthesized
  source 1..20: mol_type = other DNA
aaagcatcatggctatctgt

SEQ ID NO: 1644 - DNA, 20 bp, synthetic construct
  misc_feature 1..20: note = chemically synthesized
  source 1..20: mol_type = other DNA
gcatcatggctatctgtggg

SEQ ID NO: 1645 - DNA, 20 bp, synthetic construct
  misc_feature 1..20: note = chemically synthesized
  source 1..20: mol_type = other DNA
gctatctgtgggtagtatga

SEQ ID NO: 1646 - DNA, 20 bp, synthetic construct
  misc_feature 1..20: note = chemically synthesized
  source 1..20: mol_type = other DNA
ctatctgtgggtagtatgat

SEQ ID NO: 1647 - DNA, 20 bp, synthetic construct
  misc_feature 1..20: note = chemically synthesized
  source 1..20: mol_type = other DNA
ggtagtatgatgggtgtttt

SEQ ID NO: 1648 - DNA, 20 bp, synthetic construct
  misc_feature 1..20: note = chemically synthesized
  source 1..20: mol_type = other DNA
agtatgatgggtgtttttag

SEQ ID NO: 1649 - DNA, 20 bp, synthetic construct
  misc_feature 1..20: note = chemically synthesized
  source 1..20: mol_type = other DNA
gtatgatgggtgtttttagc

SEQ ID NO: 1650 - DNA, 20 bp, synthetic construct
  misc_feature 1..20: note = chemically synthesized
  source 1..20: mol_type = other DNA
tgatgggtgtttttagcagg

SEQ ID NO: 1651 - DNA, 20 bp, synthetic construct
  misc_feature 1..20: note = chemically synthesized
  source 1..20: mol_type = other DNA
gatgggtgtttttagcaggt

SEQ ID NO: 1652 - DNA, 20 bp, synthetic construct
  misc_feature 1..20: note = chemically synthesized
  source 1..20: mol_type = other DNA
tgggtgtttttagcaggtag

SEQ ID NO: 1653 - DNA, 20 bp, synthetic construct
  misc_feature 1..20: note = chemically synthesized
  source 1..20: mol_type = other DNA
gggtgtttttagcaggtagg

SEQ ID NO: 1654 - DNA, 20 bp, synthetic construct
  misc_feature 1..20: note = chemically synthesized
  source 1..20: mol_type = other DNA
gtaggaggcaaatatcttga

SEQ ID NO: 1655 - DNA, 20 bp, synthetic construct
  misc_feature 1..20: note = chemically synthesized
  source 1..20: mol_type = other DNA
taggaggcaaatatcttgaa

SEQ ID NO: 1656 - DNA, 20 bp, synthetic construct
  misc_feature 1..20: note = chemically synthesized
  source 1..20: mol_type = other DNA
aggaggcaaatatcttgaaa

SEQ ID NO: 1657 - DNA, 20 bp, synthetic construct
  misc_feature 1..20: note = chemically synthesized
  source 1..20: mol_type = other DNA
ggaggcaaatatcttgaaag

SEQ ID NO: 1658 - DNA, 20 bp, synthetic construct
  misc_feature 1..20: note = chemically synthesized
  source 1..20: mol_type = other DNA
atatcttgaaaggggttgtg

SEQ ID NO: 1659 - DNA, 20 bp, synthetic construct
  misc_feature 1..20: note = chemically synthesized
  source 1..20: mol_type = other DNA
atcttgaaaggggttgtgaa

SEQ ID NO: 1660 - DNA, 20 bp, synthetic construct
  misc_feature 1..20: note = chemically synthesized
  source 1..20: mol_type = other DNA
tcttgaaaggggttgtgaag

SEQ ID NO: 1661 - DNA, 20 bp, synthetic construct
  misc_feature 1..20: note = chemically synthesized
  source 1..20: mol_type = other DNA
gaagaggtgttttttctaat

SEQ ID NO: 1662 - DNA, 20 bp, synthetic construct
  misc_feature 1..20: note = chemically synthesized
  source 1..20: mol_type = other DNA
tgttttttctaattggcatg

SEQ ID NO: 1663 - DNA, 20 bp, synthetic construct
  misc_feature 1..20: note = chemically synthesized
  source 1..20: mol_type = other DNA
gttttttctaattggcatga

SEQ ID NO: 1664 - DNA, 20 bp, synthetic construct
  misc_feature 1..20: note = chemically synthesized
  source 1..20: mol_type = other DNA
attggcatgaaggtgtcata

SEQ ID NO: 1665 - DNA, 20 bp, synthetic construct
  misc_feature 1..20: note = chemically synthesized
  source 1..20: mol_type = other DNA
aggtgtcatacagatttgca

SEQ ID NO: 1666 - DNA, 20 bp, synthetic construct
  misc_feature 1..20: note = chemically synthesized
  source 1..20: mol_type = other DNA
tacagatttgcaaagtttaa

SEQ ID NO: 1667 - DNA, 20 bp, synthetic construct
  misc_feature 1..20: note = chemically synthesized
  source 1..20: mol_type = other DNA
agtttaatggtgccttcatt

SEQ ID NO: 1668 - DNA, 20 bp, synthetic construct
  misc_feature 1..20: note = chemically synthesized
  source 1..20: mol_type = other DNA
gtttaatggtgccttcattt

SEQ ID NO: 1669 - DNA, 20 bp, synthetic construct
  misc_feature 1..20: note = chemically synthesized
  source 1..20: mol_type = other DNA
cttcatttgggatgctactc

SEQ ID NO: 1670 - DNA, 20 bp, synthetic construct
  misc_feature 1..20: note = chemically synthesized
  source 1..20: mol_type = other DNA
gggatgctactctagtattc

SEQ ID NO: 1671 - DNA, 20 bp, synthetic construct
  misc_feature 1..20: note = chemically synthesized
  source 1..20: mol_type = other DNA
actctagtattccagacctg

SEQ ID NO: 1672 - DNA, 20 bp, synthetic construct
  misc_feature 1..20: note = chemically synthesized
  source 1..20: mol_type = other DNA
aatcacaataattttctacc

SEQ ID NO: 1673 - DNA, 20 bp, synthetic construct
  misc_feature 1..20: note = chemically synthesized
  source 1..20: mol_type = other DNA
ctgataatgaaaattatgat

SEQ ID NO: 1674 - DNA, 20 bp, synthetic construct
  misc_feature 1..20: note = chemically synthesized
  source 1..20: mol_type = other DNA
tgataatgaaaattatgata

SEQ ID NO: 1675 - DNA, 20 bp, synthetic construct
  misc_feature 1..20: note = chemically synthesized
  source 1..20: mol_type = other DNA
aattatgataaggatgataa

SEQ ID NO: 1676 - DNA, 20 bp, synthetic construct
  misc_feature 1..20: note = chemically synthesized
  source 1..20: mol_type = other DNA
acttcgtgtccgactcttct

SEQ ID NO: 1677 - DNA, 20 bp, synthetic construct
  misc_feature 1..20: note = chemically synthesized
  source 1..20: mol_type = other DNA
acttcttacaataattctat

SEQ ID NO: 1678 - DNA, 20 bp, synthetic construct
  misc_feature 1..20: note = chemically synthesized
  source 1..20: mol_type = other DNA
cttacaataattctatgaga

SEQ ID NO: 1679 - DNA, 20 bp, synthetic construct
  misc_feature 1..20: note = chemically synthesized
  source 1..20: mol_type = other DNA
ttacaataattctatgagat

SEQ ID NO: 1680 - DNA, 20 bp, synthetic construct
  misc_feature 1..20: note = chemically synthesized
  source 1..20: mol_type = other DNA
ccccatttcttttttaaatg

SEQ ID NO: 1681 - DNA, 20 bp, synthetic construct
  misc_feature 1..20: note = chemically synthesized
  source 1..20: mol_type = other DNA
atttcttttttaaatgaaga

SEQ ID NO: 1682 - DNA, 20 bp, synthetic construct
  misc_feature 1..20: note = chemically synthesized
  source 1..20: mol_type = other DNA
ttttttaaatgaagaaagtg

SEQ ID NO: 1683 - DNA, 20 bp, synthetic construct
  misc_feature 1..20: note = chemically synthesized
  source 1..20: mol_type = other DNA
tttaaatgaagaaagtgaag

SEQ ID NO: 1684 - DNA, 20 bp, synthetic construct
  misc_feature 1..20: note = chemically synthesized
  source 1..20: mol_type = other DNA
ttaaatgaagaaagtgaagt

SEQ ID NO: 1685 - DNA, 20 bp, synthetic construct
  misc_feature 1..20: note = chemically synthesized
  source 1..20: mol_type = other DNA
atgaagaaagtgaagtaggc

SEQ ID NO: 1686 - DNA, 20 bp, synthetic construct
  misc_feature 1..20: note = chemically synthesized
  source 1..20: mol_type = other DNA
tgaagaaagtgaagtaggcc

SEQ ID NO: 1687 - DNA, 20 bp, synthetic construct
  misc_feature 1..20: note = chemically synthesized
  source 1..20: mol_type = other DNA
aaagtgaagtaggccgggca

SEQ ID NO: 1688 - DNA, 20 bp, synthetic construct
  misc_feature 1..20: note = chemically synthesized
  source 1..20: mol_type = other DNA
gtgaagtaggccgggcacgg

SEQ ID NO: 1689 - DNA, 20 bp, synthetic construct
  misc_feature 1..20: note = chemically synthesized
  source 1..20: mol_type = other DNA
gtggctcacgcctgtaatcc

SEQ ID NO: 1690 - DNA, 20 bp, synthetic construct
  misc_feature 1..20: note = chemically synthesized
  source 1..20: mol_type = other DNA
cgcctgtaatcccagcactt

SEQ ID NO: 1691 - DNA, 20 bp, synthetic construct
  misc_feature 1..20: note = chemically synthesized
  source 1..20: mol_type = other DNA
gcctgtaatcccagcacttt

SEQ ID NO: 1692 - DNA, 20 bp, synthetic construct
  misc_feature 1..20: note = chemically synthesized
  source 1..20: mol_type = other DNA
ctgtaatcccagcactttgg

SEQ ID NO: 1693 - DNA, 20 bp, synthetic construct
  misc_feature 1..20: note = chemically synthesized
  source 1..20: mol_type = other DNA
tgtaatcccagcactttggg

SEQ ID NO: 1694 - DNA, 20 bp, synthetic construct
  misc_feature 1..20: note = chemically synthesized
  source 1..20: mol_type = other DNA
cccagcactttgggaggcca

SEQ ID NO: 1695 - DNA, 20 bp, synthetic construct
  misc_feature 1..20: note = chemically synthesized
  source 1..20: mol_type = other DNA
agcactttgggaggccaaag

SEQ ID NO: 1696 - DNA, 20 bp, synthetic construct
  misc_feature 1..20: note = chemically synthesized
  source 1..20: mol_type = other DNA
gcactttgggaggccaaagc

SEQ ID NO: 1697 - DNA, 20 bp, synthetic construct
  misc_feature 1..20: note = chemically synthesized
  source 1..20: mol_type = other DNA
ctttgggaggccaaagcggg

SEQ ID NO: 1698 - DNA, 20 bp, synthetic construct
  misc_feature 1..20: note = chemically synthesized
  source 1..20: mol_type = other DNA
ggccaaagcgggtggatcac

SEQ ID NO: 1699 - DNA, 20 bp, synthetic construct
  misc_feature 1..20: note = chemically synthesized
  source 1..20: mol_type = other DNA
gccaaagcgggtggatcacg

SEQ ID NO: 1700 - DNA, 20 bp, synthetic construct
  misc_feature 1..20: note = chemically synthesized
  source 1..20: mol_type = other DNA
aagcgggtggatcacgaggt

SEQ ID NO: 1701 - DNA, 20 bp, synthetic construct
  misc_feature 1..20: note = chemically synthesized
  source 1..20: mol_type = other DNA
agcgggtggatcacgaggtc

SEQ ID NO: 1702 - DNA, 20 bp, synthetic construct
  misc_feature 1..20: note = chemically synthesized
  source 1..20: mol_type = other DNA
cgggtggatcacgaggtcag

SEQ ID NO: 1703 - DNA, 20 bp, synthetic construct
  misc_feature 1..20: note = chemically synthesized
  source 1..20: mol_type = other DNA
gatcacgaggtcaggagatc

SEQ ID NO: 1704 - DNA, 20 bp, synthetic construct
  misc_feature 1..20: note = chemically synthesized
  source 1..20: mol_type = other DNA
tcaggagatcgagaccatcc

SEQ ID NO: 1705 - DNA, 20 bp, synthetic construct
  misc_feature 1..20: note = chemically synthesized
  source 1..20: mol_type = other DNA
cgagaccatcctggctaaca

SEQ ID NO: 1706 - DNA, 20 bp, synthetic construct
  misc_feature 1..20: note = chemically synthesized
  source 1..20: mol_type = other DNA
ctaataaaaatacaaaaaat

SEQ ID NO: 1707 - DNA, 20 bp, synthetic construct
  misc_feature 1..20: note = chemically synthesized
  source 1..20: mol_type = other DNA
taaaaatacaaaaaattagc

SEQ ID NO: 1708 - DNA, 20 bp, synthetic construct
  misc_feature 1..20: note = chemically synthesized
  source 1..20: mol_type = other DNA
aaaaatacaaaaaattagct

SEQ ID NO: 1709 - DNA, 20 bp, synthetic construct
  misc_feature 1..20: note = chemically synthesized
  source 1..20: mol_type = other DNA
tacaaaaaattagctgggcg

SEQ ID NO: 1710 - DNA, 20 bp, synthetic construct
  misc_feature 1..20: note = chemically synthesized
  source 1..20: mol_type = other DNA
aaaaaattagctgggcgtgg

SEQ ID NO: 1711 - DNA, 20 bp, synthetic construct
  misc_feature 1..20: note = chemically synthesized
  source 1..20: mol_type = other DNA
aaattagctgggcgtggtgg

SEQ ID NO: 1712 - DNA, 20 bp, synthetic construct
  misc_feature 1..20: note = chemically synthesized
  source 1..20: mol_type = other DNA
ggcgtggtggcagacgcctg

SEQ ID NO: 1713 - DNA, 20 bp, synthetic construct
  misc_feature 1..20: note = chemically synthesized
  source 1..20: mol_type = other DNA
gtggcagacgcctgtagtcc

SEQ ID NO: 1714 - DNA, 20 bp, synthetic construct
  misc_feature 1..20: note = chemically synthesized
  source 1..20: mol_type = other DNA
cgcctgtagtcccagctact

SEQ ID NO: 1715 - DNA, 20 bp, synthetic construct
  misc_feature 1..20: note = chemically synthesized
  source 1..20: mol_type = other DNA
ctgtagtcccagctactcgg

SEQ ID NO: 1716 - DNA, 20 bp, synthetic construct
  misc_feature 1..20: note = chemically synthesized
  source 1..20: mol_type = other DNA
tgtagtcccagctactcgga

SEQ ID NO: 1717 - DNA, 20 bp, synthetic construct
  misc_feature 1..20: note = chemically synthesized
  source 1..20: mol_type = other DNA
tcccagctactcggaaggct

SEQ ID NO: 1718 - DNA, 20 bp, synthetic construct
  misc_feature 1..20: note = chemically synthesized
  source 1..20: mol_type = other DNA
cccagctactcggaaggctg

SEQ ID NO: 1719 - DNA, 20 bp, synthetic construct
  misc_feature 1..20: note = chemically synthesized
  source 1..20: mol_type = other DNA
agctactcggaaggctgagg

SEQ ID NO: 1720 - DNA, 20 bp, synthetic construct
  misc_feature 1..20: note = chemically synthesized
  source 1..20: mol_type = other DNA
gctactcggaaggctgaggc

SEQ ID NO: 1721 - DNA, 20 bp, synthetic construct
  misc_feature 1..20: note = chemically synthesized
  source 1..20: mol_type = other DNA
tactcggaaggctgaggcag

SEQ ID NO: 1722 - DNA, 20 bp, synthetic construct
  misc_feature 1..20: note = chemically synthesized
  source 1..20: mol_type = other DNA
ggaaggctgaggcaggagaa

SEQ ID NO: 1723 - DNA, 20 bp, synthetic construct
  misc_feature 1..20: note = chemically synthesized
  source 1..20: mol_type = other DNA
gcaggagaatggcatgaacc

SEQ ID NO: 1724 - DNA, 20 bp, synthetic construct
  misc_feature 1..20: note = chemically synthesized
  source 1..20: mol_type = other DNA
caggagaatggcatgaaccc

SEQ ID NO: 1725 - DNA, 20 bp, synthetic construct
  misc_feature 1..20: note = chemically synthesized
  source 1..20: mol_type = other DNA
ggagaatggcatgaacccag

SEQ ID NO: 1726 - DNA, 20 bp, synthetic construct
  misc_feature 1..20: note = chemically synthesized
  source 1..20: mol_type = other DNA
gagaatggcatgaacccagg

SEQ ID NO: 1727 - DNA, 20 bp, synthetic construct
  misc_feature 1..20: note = chemically synthesized
  source 1..20: mol_type = other DNA
aatggcatgaacccaggagg

SEQ ID NO: 1728 - DNA, 20 bp, synthetic construct
  misc_feature 1..20: note = chemically synthesized
  source 1..20: mol_type = other DNA
tggcatgaacccaggaggca

SEQ ID NO: 1729 - DNA, 20 bp, synthetic construct
  misc_feature 1..20: note = chemically synthesized
  source 1..20: mol_type = other DNA
aacccaggaggcagagcttg

SEQ ID NO: 1730 - DNA, 20 bp, synthetic construct
  misc_feature 1..20: note = chemically synthesized
  source 1..20: mol_type = other DNA
caggaggcagagcttgcagt

SEQ ID NO: 1731 - DNA, 20 bp, synthetic construct
  misc_feature 1..20: note = chemically synthesized
  source 1..20: mol_type = other DNA
ggcagagcttgcagtgagcc

SEQ ID NO: 1732 - DNA, 20 bp, synthetic construct
  misc_feature 1..20: note = chemically synthesized
  source 1..20: mol_type = other DNA
gagtttgcgccactgcactc

SEQ ID NO: 1733 - DNA, 20 bp, synthetic construct
  misc_feature 1..20: note = chemically synthesized
  source 1..20: mol_type = other DNA
tgcgccactgcactccagcc

SEQ ID NO: 1734 - DNA, 20 bp, synthetic construct
  misc_feature 1..20: note = chemically synthesized
  source 1..20: mol_type = other DNA
gcgccactgcactccagcct

SEQ ID NO: 1735 - DNA, 20 bp, synthetic construct
  misc_feature 1..20: note = chemically synthesized
  source 1..20: mol_type = other DNA
ctgcactccagcctaggtga

SEQ ID NO: 1736 - DNA, 20 bp, synthetic construct
  misc_feature 1..20: note = chemically synthesized
  source 1..20: mol_type = other DNA
gcactccagcctaggtgaca

SEQ ID NO: 1737 - DNA, 20 bp, synthetic construct
  misc_feature 1..20: note = chemically synthesized
  source 1..20: mol_type = other DNA
tccagcctaggtgacagagt

SEQ ID NO: 1738 - DNA, 20 bp, synthetic construct
  misc_feature 1..20: note = chemically synthesized
  source 1..20: mol_type = other DNA
aataaaaaaatgaaaaaaaa

SEQ ID NO: 1739 - DNA, 20 bp, synthetic construct
  misc_feature 1..20: note = chemically synthesized
  source 1..20: mol_type = other DNA
aaaaaatgaaaaaaaaaaga

SEQ ID NO: 1740 - DNA, 20 bp, synthetic construct
  misc_feature 1..20: note = chemically synthesized
  source 1..20: mol_type = other DNA
atgaaaaaaaaaagaaagtg

SEQ ID NO: 1741 - DNA, 20 bp, synthetic construct
  misc_feature 1..20: note = chemically synthesized
  source 1..20: mol_type = other DNA
aaaaaaaagaaagtgaagta

SEQ ID NO: 1742 - DNA, 20 bp, synthetic construct
  misc_feature 1..20: note = chemically synthesized
  source 1..20: mol_type = other DNA
aaaaaagaaagtgaagtata

SEQ ID NO: 1743 - DNA, 20 bp, synthetic construct
  misc_feature 1..20: note = chemically synthesized
  source 1..20: mol_type = other DNA
gtgaagtatagagtatctca

SEQ ID NO: 1744 - DNA, 20 bp, synthetic construct
  misc_feature 1..20: note = chemically synthesized
  source 1..20: mol_type = other DNA
tagagtatctcatagtttgt

SEQ ID NO: 1745 - DNA, 20 bp, synthetic construct
  misc_feature 1..20: note = chemically synthesized
  source 1..20: mol_type = other DNA
atctcatagtttgtcagtga

SEQ ID NO: 1746 - DNA, 20 bp, synthetic construct
  misc_feature 1..20: note = chemically synthesized
  source 1..20: mol_type = other DNA
tagtttgtcagtgatagaaa

SEQ ID NO: 1747 - DNA, 20 bp, synthetic construct
  misc_feature 1..20: note = chemically synthesized
  source 1..20: mol_type = other DNA
agtttgtcagtgatagaaac

SEQ ID NO: 1748 - DNA, 20 bp, synthetic construct
  misc_feature 1..20: note = chemically synthesized
  source 1..20: mol_type = other DNA
atagaaacaggtttcaaact

SEQ ID NO: 1749 - DNA, 20 bp, synthetic construct
  misc_feature 1..20: note = chemically synthesized
  source 1..20: mol_type = other DNA
tctgaccgtttgatacatct

SEQ ID NO: 1750 - DNA, 20 bp, synthetic construct
  misc_feature 1..20: note = chemically synthesized
  source 1..20: mol_type = other DNA
atctcagacaccactacatt

SEQ ID NO: 1751 - DNA, 20 bp, synthetic construct
  misc_feature 1..20: note = chemically synthesized
  source 1..20: mol_type = other DNA
tcagacaccactacattcag

SEQ ID NO: 1752 - DNA, 20 bp, synthetic construct
  misc_feature 1..20: note = chemically synthesized
  source 1..20: mol_type = other DNA
caccactacattcagtagtt

SEQ ID NO: 1753 - DNA, 20 bp, synthetic construct
  misc_feature 1..20: note = chemically synthesized
  source 1..20: mol_type = other DNA
cattcagtagtttagatgcc

SEQ ID NO: 1754 - DNA, 20 bp, synthetic construct
  misc_feature 1..20: note = chemically synthesized
  source 1..20: mol_type = other DNA
gtttagatgcctagaataaa

SEQ ID NO: 1755 - DNA, 20 bp, synthetic construct
  misc_feature 1..20: note = chemically synthesized
  source 1..20: mol_type = other DNA
ttagatgcctagaataaata

SEQ ID NO: 1756 - DNA, 20 bp, synthetic construct
  misc_feature 1..20: note = chemically synthesized
  source 1..20: mol_type = other DNA
gatgcctagaataaatagag

SEQ ID NO: 1757 - DNA, 20 bp, synthetic construct
  misc_feature 1..20: note = chemically synthesized
  source 1..20: mol_type = other DNA
atgcctagaataaatagaga

SEQ ID NO: 1758 - DNA, 20 bp, synthetic construct
  misc_feature 1..20: note = chemically synthesized
  source 1..20: mol_type = other DNA
cctagaataaatagagaagg

SEQ ID NO: 1759 - DNA, 20 bp, synthetic construct
  misc_feature 1..20: note = chemically synthesized
  source 1..20: mol_type = other DNA
ctagaataaatagagaagga

SEQ ID NO: 1760 - DNA, 20 bp, synthetic construct
  misc_feature 1..20: note = chemically synthesized
  source 1..20: mol_type = other DNA
agaataaatagagaaggaag

SEQ ID NO: 1761 - DNA, 20 bp, synthetic construct
  misc_feature 1..20: note = chemically synthesized
  source 1..20: mol_type = other DNA
taaatagagaaggaaggaga

SEQ ID NO: 1762 - DNA, 20 bp, synthetic construct
  misc_feature 1..20: note = chemically synthesized
  source 1..20: mol_type = other DNA
tgtctcattgtgtttcttct

SEQ ID NO: 1763 - DNA, 20 bp, synthetic construct
  misc_feature 1..20: note = chemically synthesized
  source 1..20: mol_type = other DNA
tcattgtgtttcttctgagt

SEQ ID NO: 1764 - DNA, 20 bp, synthetic construct
  misc_feature 1..20: note = chemically synthesized
  source 1..20: mol_type = other DNA
gagtgagcttgaatcacatg

SEQ ID NO: 1765 - DNA, 20 bp, synthetic construct
  misc_feature 1..20: note = chemically synthesized
  source 1..20: mol_type = other DNA
agtgagcttgaatcacatga

SEQ ID NO: 1766 - DNA, 20 bp, synthetic construct
  misc_feature 1..20: note = chemically synthesized
  source 1..20: mol_type = other DNA
gtgagcttgaatcacatgaa

SEQ ID NO: 1767 - DNA, 20 bp, synthetic construct
  misc_feature 1..20: note = chemically synthesized
  source 1..20: mol_type = other DNA
tgagcttgaatcacatgaag

SEQ ID NO: 1768 - DNA, 20 bp, synthetic construct
  misc_feature 1..20: note = chemically synthesized
  source 1..20: mol_type = other DNA
ttgaatcacatgaaggggaa

SEQ ID NO: 1769 - DNA, 20 bp, synthetic construct
  misc_feature 1..20: note = chemically synthesized
  source 1..20: mol_type = other DNA
aatcacatgaaggggaacag

SEQ ID NO: 1770 - DNA, 20 bp, synthetic construct
  misc_feature 1..20: note = chemically synthesized
  source 1..20: mol_type = other DNA
gaaaacaaccaactgatcct

SEQ ID NO: 1771 - DNA, 20 bp, synthetic construct
  misc_feature 1..20: note = chemically synthesized
  source 1..20: mol_type = other DNA
agctgtcatgtttcctttaa

SEQ ID NO: 1772 - DNA, 20 bp, synthetic construct
  misc_feature 1..20: note = chemically synthesized
  source 1..20: mol_type = other DNA
gtttcctttaaaagtccctg

SEQ ID NO: 1773 - DNA, 20 bp, synthetic construct
  misc_feature 1..20: note = chemically synthesized
  source 1..20: mol_type = other DNA
tttcctttaaaagtccctga

SEQ ID NO: 1774 - DNA, 20 bp, synthetic construct
  misc_feature 1..20: note = chemically synthesized
  source 1..20: mol_type = other DNA
cctttaaaagtccctgaagg

SEQ ID NO: 1775 - DNA, 20 bp, synthetic construct
  misc_feature 1..20: note = chemically synthesized
  source 1..20: mol_type = other DNA
ctttaaaagtccctgaagga

SEQ ID NO: 1776 - DNA, 20 bp, synthetic construct
  misc_feature 1..20: note = chemically synthesized
  source 1..20: mol_type = other DNA
aagtccctgaaggaaggtcc

SEQ ID NO: 1777 - DNA, 20 bp, synthetic construct
  misc_feature 1..20: note = chemically synthesized
  source 1..20: mol_type = other DNA
tgctcctctgttgctctctt

SEQ ID NO: 1778 - DNA, 20 bp, synthetic construct
  misc_feature 1..20: note = chemically synthesized
  source 1..20: mol_type = other DNA
ctctttggcattcatttctt

SEQ ID NO: 1779 - DNA, 20 bp, synthetic construct
  misc_feature 1..20: note = chemically synthesized
  source 1..20: mol_type = other DNA
catttctttggaccctacgc

SEQ ID NO: 1780 - DNA, 20 bp, synthetic construct
  misc_feature 1..20: note = chemically synthesized
  source 1..20: mol_type = other DNA
atttctttggaccctacgca

SEQ ID NO: 1781 - DNA, 20 bp, synthetic construct
  misc_feature 1..20: note = chemically synthesized
  source 1..20: mol_type = other DNA
ccctacgcaaggactgtaat

SEQ ID NO: 1782 - DNA, 20 bp, synthetic construct
  misc_feature 1..20: note = chemically synthesized
  source 1..20: mol_type = other DNA
tacgcaaggactgtaattgg

SEQ ID NO: 1783 - DNA, 20 bp, synthetic construct
  misc_feature 1..20: note = chemically synthesized
  source 1..20: mol_type = other DNA
acgcaaggactgtaattggt

SEQ ID NO: 1784 - DNA, 20 bp, synthetic construct
  misc_feature 1..20: note = chemically synthesized
  source 1..20: mol_type = other DNA
cgcaaggactgtaattggtg

SEQ ID NO: 1785 - DNA, 20 bp, synthetic construct
  misc_feature 1..20: note = chemically synthesized
  source 1..20: mol_type = other DNA
aggactgtaattggtgggga

SEQ ID NO: 1786 - DNA, 20 bp, synthetic construct
  misc_feature 1..20: note = chemically synthesized
  source 1..20: mol_type = other DNA
ctgtaattggtggggacagc

SEQ ID NO: 1787 - DNA, 20 bp, synthetic construct
  misc_feature 1..20: note = chemically synthesized
  source 1..20: mol_type = other DNA
taattggtggggacagctag

SEQ ID NO: 1788 - DNA, 20 bp, synthetic construct
  misc_feature 1..20: note = chemically synthesized
  source 1..20: mol_type = other DNA
gggacagctagtggccctgc

SEQ ID NO: 1789 - DNA, 20 bp, synthetic construct
  misc_feature 1..20: note = chemically synthesized
  source 1..20: mol_type = other DNA
ggacagctagtggccctgct

SEQ ID NO: 1790 - DNA, 20 bp, synthetic construct
  misc_feature 1..20: note = chemically synthesized
  source 1..20: mol_type = other DNA
gccctgctgggcttcacaca

SEQ ID NO: 1791 - DNA, 20 bp, synthetic construct
  misc_feature 1..20: note = chemically synthesized
  source 1..20: mol_type = other DNA
ttcacacacggtgtcctccc

SEQ ID NO: 1792 - DNA, 20 bp, synthetic construct
  misc_feature 1..20: note = chemically synthesized
  source 1..20: mol_type = other DNA
tcacacacggtgtcctccct

SEQ ID NO: 1793 - DNA, 20 bp, synthetic construct
  misc_feature 1..20: note = chemically synthesized
  source 1..20: mol_type = other DNA
acacggtgtcctccctaggc

SEQ ID NO: 1794 - DNA, 20 bp, synthetic construct
  misc_feature 1..20: note = chemically synthesized
  source 1..20: mol_type = other DNA
cctccctaggccagtgcctc

SEQ ID NO: 1795 - DNA, 20 bp, synthetic construct
  misc_feature 1..20: note = chemically synthesized
  source 1..20: mol_type = other DNA
tccctaggccagtgcctctg

SEQ ID NO: 1796 - DNA, 20 bp, synthetic construct
  misc_feature 1..20: note = chemically synthesized
  source 1..20: mol_type = other DNA
taggccagtgcctctggagt

SEQ ID NO: 1797 - DNA, 20 bp, synthetic construct
  misc_feature 1..20: note = chemically synthesized
  source 1..20: mol_type = other DNA
tgcctctggagtcagaactc

SEQ ID NO: 1798 - DNA, 20 bp, synthetic construct
  misc_feature 1..20: note = chemically synthesized
  source 1..20: mol_type = other DNA
ctctggagtcagaactctgg

SEQ ID NO: 1799 - DNA, 20 bp, synthetic construct
  misc_feature 1..20: note = chemically synthesized
  source 1..20: mol_type = other DNA
tggtggtatttccctcaatg

SEQ ID NO: 1800 - DNA, 20 bp, synthetic construct
  misc_feature 1..20: note = chemically synthesized
  source 1..20: mol_type = other DNA
tggtatttccctcaatgaag

SEQ ID NO: 1801 - DNA, 20 bp, synthetic construct
  misc_feature 1..20: note = chemically synthesized
  source 1..20: mol_type = other DNA
gtatttccctcaatgaagtg

SEQ ID NO: 1802 - DNA, 20 bp, synthetic construct
  misc_feature 1..20: note = chemically synthesized
  source 1..20: mol_type = other DNA
ttccctcaatgaagtggagt

SEQ ID NO: 1803 - DNA, 20 bp, synthetic construct
  misc_feature 1..20: note = chemically synthesized
  source 1..20: mol_type = other DNA
ggagtaagctctctcatttt

SEQ ID NO: 1804 - DNA, 20 bp, synthetic construct
  misc_feature 1..20: note = chemically synthesized
  source 1..20: mol_type = other DNA
taagctctctcattttgaga

SEQ ID NO: 1805 - DNA, 20 bp, synthetic construct
  misc_feature 1..20: note = chemically synthesized
  source 1..20: mol_type = other DNA
ctcattttgagatggtataa

SEQ ID NO: 1806 - DNA, 20 bp, synthetic construct
  misc_feature 1..20: note = chemically synthesized
  source 1..20: mol_type = other DNA
attttgagatggtataatgg

SEQ ID NO: 1807 - DNA, 20 bp, synthetic construct
  misc_feature 1..20: note = chemically synthesized
  source 1..20: mol_type = other DNA
atggtataatggaagccacc

SEQ ID NO: 1808 - DNA, 20 bp, synthetic construct
  misc_feature 1..20: note = chemically synthesized
  source 1..20: mol_type = other DNA
gtataatggaagccaccaag

SEQ ID NO: 1809 - DNA, 20 bp, synthetic construct
  misc_feature 1..20: note = chemically synthesized
  source 1..20: mol_type = other DNA
atggaagccaccaagtggct

SEQ ID NO: 1810 - DNA, 20 bp, synthetic construct
  misc_feature 1..20: note = chemically synthesized
  source 1..20: mol_type = other DNA
ggaagccaccaagtggctta

SEQ ID NO: 1811 - DNA, 20 bp, synthetic construct
  misc_feature 1..20: note = chemically synthesized
  source 1..20: mol_type = other DNA
gaagccaccaagtggcttag

SEQ ID NO: 1812 - DNA, 20 bp, synthetic construct
  misc_feature 1..20: note = chemically synthesized
  source 1..20: mol_type = other DNA
caagtggcttagaggatgcc

SEQ ID NO: 1813 - DNA, 20 bp, synthetic construct
  misc_feature 1..20: note = chemically synthesized
  source 1..20: mol_type = other DNA
aagtggcttagaggatgccc

SEQ ID NO: 1814 - DNA, 20 bp, synthetic construct
  misc_feature 1..20: note = chemically synthesized
  source 1..20: mol_type = other DNA
aggatgcccaggtccttcca

SEQ ID NO: 1815 - DNA, 20 bp, synthetic construct
  misc_feature 1..20: note = chemically synthesized
  source 1..20: mol_type = other DNA
gatgcccaggtccttccatg

SEQ ID NO: 1816 - DNA, 20 bp, synthetic construct
  misc_feature 1..20: note = chemically synthesized
  source 1..20: mol_type = other DNA
aggtccttccatggagccac

SEQ ID NO: 1817 - DNA, 20 bp, synthetic construct
  misc_feature 1..20: note = chemically synthesized
  source 1..20: mol_type = other DNA
ggtccttccatggagccact

SEQ ID NO: 1818 - DNA, 20 bp, synthetic construct
  misc_feature 1..20: note = chemically synthesized
  source 1..20: mol_type = other DNA
gtccttccatggagccactg

SEQ ID NO: 1819 - DNA, 20 bp, synthetic construct
  misc_feature 1..20: note = chemically synthesized
  source 1..20: mol_type = other DNA
ccatggagccactggggttc

SEQ ID NO: 1820 - DNA, 20 bp, synthetic construct
  misc_feature 1..20: note = chemically synthesized
  source 1..20: mol_type = other DNA
cattaaaaaaaaaatctaac

SEQ ID NO: 1821 - DNA, 20 bp, synthetic construct
  misc_feature 1..20: note = chemically synthesized
  source 1..20: mol_type = other DNA
attaaaaaaaaaatctaacc

SEQ ID NO: 1822 - DNA, 20 bp, synthetic construct
  misc_feature 1..20: note = chemically synthesized
  source 1..20: mol_type = other DNA
aaaaatctaaccaggacatt

SEQ ID NO: 1823 - DNA, 20 bp, synthetic construct
  misc_feature 1..20: note = chemically synthesized
  source 1..20: mol_type = other DNA
aaaatctaaccaggacattc

SEQ ID NO: 1824 - DNA, 20 bp, synthetic construct
  misc_feature 1..20: note = chemically synthesized
  source 1..20: mol_type = other DNA
ccaggacattcaggaattgc

SEQ ID NO: 1825 - DNA, 20 bp, synthetic construct
  misc_feature 1..20: note = chemically synthesized
  source 1..20: mol_type = other DNA
attcaggaattgctagattc

SEQ ID NO: 1826 - DNA, 20 bp, synthetic construct
  misc_feature 1..20: note = chemically synthesized
  source 1..20: mol_type = other DNA
ttcaggaattgctagattct

SEQ ID NO: 1827 - DNA, 20 bp, synthetic construct
  misc_feature 1..20: note = chemically synthesized
  source 1..20: mol_type = other DNA
attgctagattctgggaaat

SEQ ID NO: 1828 - DNA, 20 bp, synthetic construct
  misc_feature 1..20: note = chemically synthesized
  source 1..20: mol_type = other DNA
aatcagttcaccatgttcaa

SEQ ID NO: 1829 - DNA, 20 bp, synthetic construct
  misc_feature 1..20: note = chemically synthesized
  source 1..20: mol_type = other DNA
tcagttcaccatgttcaaaa

SEQ ID NO: 1830 - DNA, 20 bp, synthetic construct
  misc_feature 1..20: note = chemically synthesized
  source 1..20: mol_type = other DNA
agagtctttttttttttttt

SEQ ID NO: 1831 - DNA, 20 bp, synthetic construct
  misc_feature 1..20: note = chemically synthesized
  source 1..20: mol_type = other DNA
ttttttgagactctattgcc

SEQ ID NO: 1832 - DNA, 20 bp, synthetic construct
  misc_feature 1..20: note = chemically synthesized
  source 1..20: mol_type = other DNA
tttttgagactctattgccc

SEQ ID NO: 1833 - DNA, 20 bp, synthetic construct
  misc_feature 1..20: note = chemically synthesized
  source 1..20: mol_type = other DNA
tgagactctattgcccaggc

SEQ ID NO: 1834 - DNA, 20 bp, synthetic construct
  misc_feature 1..20: note = chemically synthesized
  source 1..20: mol_type = other DNA
agactctattgcccaggctg

SEQ ID NO: 1835 - DNA, 20 bp, synthetic construct
  misc_feature 1..20: note = chemically synthesized
  source 1..20: mol_type = other DNA
ttgcccaggctggagtgcaa

SEQ ID NO: 1836 - DNA, 20 bp, synthetic construct
  misc_feature 1..20: note = chemically synthesized
  source 1..20: mol_type = other DNA
ggagtgcaatggcatgatct

SEQ ID NO: 1837 - DNA, 20 bp, synthetic construct
  misc_feature 1..20: note = chemically synthesized
  source 1..20: mol_type = other DNA
tcactgtaacctctgcctcc

SEQ ID NO: 1838 - DNA, 20 bp, synthetic construct
  misc_feature 1..20: note = chemically synthesized
  source 1..20: mol_type = other DNA
cactgtaacctctgcctccc

SEQ ID NO: 1839 - DNA, 20 bp, synthetic construct
  misc_feature 1..20: note = chemically synthesized
  source 1..20: mol_type = other DNA
aacctctgcctcccaggttc

SEQ ID NO: 1840 - DNA, 20 bp, synthetic construct
  misc_feature 1..20: note = chemically synthesized
  source 1..20: mol_type = other DNA
ttcaagcgattctcctgtct

SEQ ID NO: 1841 - DNA, 20 bp, synthetic construct
  misc_feature 1..20: note = chemically synthesized
  source 1..20: mol_type = other DNA
ttctcctgtctcagcctccc

SEQ ID NO: 1842 - DNA, 20 bp, synthetic construct
  misc_feature 1..20: note = chemically synthesized
  source 1..20: mol_type = other DNA
tcctgtctcagcctcccaag

SEQ ID NO: 1843 - DNA, 20 bp, synthetic construct
  misc_feature 1..20: note = chemically synthesized
  source 1..20: mol_type = other DNA
gtctcagcctcccaagtagc

SEQ ID NO: 1844 - DNA, 20 bp, synthetic construct
  misc_feature 1..20: note = chemically synthesized
  source 1..20: mol_type = other DNA
tctcagcctcccaagtagct

SEQ ID NO: 1845 - DNA, 20 bp, synthetic construct
  misc_feature 1..20: note = chemically synthesized
  source 1..20: mol_type = other DNA
ctcccaagtagctgggatta

SEQ ID NO: 1846 - DNA, 20 bp, synthetic construct
  misc_feature 1..20: note = chemically synthesized
  source 1..20: mol_type = other DNA
tcccaagtagctgggattac

SEQ ID NO: 1847 - DNA, 20 bp, synthetic construct
  misc_feature 1..20: note = chemically synthesized
  source 1..20: mol_type = other DNA
caggcgtgcaccaccatgcc

SEQ ID NO: 1848 - DNA, 20 bp, synthetic construct
  misc_feature 1..20: note = chemically synthesized
  source 1..20: mol_type = other DNA
ccggctaatttttgtatttt

SEQ ID NO: 1849 - DNA, 20 bp, synthetic construct
  misc_feature 1..20: note = chemically synthesized
  source 1..20: mol_type = other DNA
gctaatttttgtatttttag

SEQ ID NO: 1850 - DNA, 20 bp, synthetic construct
  misc_feature 1..20: note = chemically synthesized
  source 1..20: mol_type = other DNA
taatttttgtatttttagta

SEQ ID NO: 1851 - DNA, 20 bp, synthetic construct
  misc_feature 1..20: note = chemically synthesized
  source 1..20: mol_type = other DNA
ttttgtatttttagtagaga

SEQ ID NO: 1852 - DNA, 20 bp, synthetic construct
  misc_feature 1..20: note = chemically synthesized
  source 1..20: mol_type = other DNA
tttgtatttttagtagagac

SEQ ID NO: 1853 - DNA, 20 bp, synthetic construct
  misc_feature 1..20: note = chemically synthesized
  source 1..20: mol_type = other DNA
ttgtatttttagtagagaca

SEQ ID NO: 1854 - DNA, 20 bp, synthetic construct
  misc_feature 1..20: note = chemically synthesized
  source 1..20: mol_type = other DNA
gagacagggtttcaccatgt

SEQ ID NO: 1855 - DNA, 20 bp, synthetic construct
  misc_feature 1..20: note = chemically synthesized
  source 1..20: mol_type = other DNA
cagggtttcaccatgttggc

SEQ ID NO: 1856 - DNA, 20 bp, synthetic construct
  misc_feature 1..20: note = chemically synthesized
  source 1..20: mol_type = other DNA
agggtttcaccatgttggcc

SEQ ID NO: 1857 - DNA, 20 bp, synthetic construct
  misc_feature 1..20: note = chemically synthesized
  source 1..20: mol_type = other DNA
tttcaccatgttggccaggc

SEQ ID NO: 1858 - DNA, 20 bp, synthetic construct
  misc_feature 1..20: note = chemically synthesized
  source 1..20: mol_type = other DNA
acctcgtgatccgcctgcct

SEQ ID NO: 1859 - DNA, 20 bp, synthetic construct
  misc_feature 1..20: note = chemically synthesized
  source 1..20: mol_type = other DNA
ccgcctgcctcggcctccca

SEQ ID NO: 1860 - DNA, 20 bp, synthetic construct
  misc_feature 1..20: note = chemically synthesized
  source 1..20: mol_type = other DNA
cctcggcctcccaaagtgct

SEQ ID NO: 1861 - DNA, 20 bp, synthetic construct
  misc_feature 1..20: note = chemically synthesized
  source 1..20: mol_type = other DNA
ctcccaaagtgctgagatta

SEQ ID NO: 1862 - DNA, 20 bp, synthetic construct
  misc_feature 1..20: note = chemically synthesized
  source 1..20: mol_type = other DNA
tcccaaagtgctgagattac

SEQ ID NO: 1863 - DNA, 20 bp, synthetic construct
  misc_feature 1..20: note = chemically synthesized
  source 1..20: mol_type = other DNA
agtgctgagattacaggtgt

SEQ ID NO: 1864 - DNA, 20 bp, synthetic construct
  misc_feature 1..20: note = chemically synthesized
  source 1..20: mol_type = other DNA
caggtgtgagccaccctgcc

SEQ ID NO: 1865 - DNA, 20 bp, synthetic construct
  misc_feature 1..20: note = chemically synthesized
  source 1..20: mol_type = other DNA
ccaccctgcccagccgtcaa

SEQ ID NO: 1866 - DNA, 20 bp, synthetic construct
  misc_feature 1..20: note = chemically synthesized
  source 1..20: mol_type = other DNA
accctgcccagccgtcaaaa

SEQ ID NO: 1867 - DNA, 20 bp, synthetic construct
  misc_feature 1..20: note = chemically synthesized
  source 1..20: mol_type = other DNA
agagtcttaatatatatatc

SEQ ID NO: 1868 - DNA, 20 bp, synthetic construct
  misc_feature 1..20: note = chemically synthesized
  source 1..20: mol_type = other DNA
tcttaatatatatatccaga

SEQ ID NO: 1869 - DNA, 20 bp, synthetic construct
  misc_feature 1..20: note = chemically synthesized
  source 1..20: mol_type = other DNA
tttatgttactacatgcact

SEQ ID NO: 1870 - DNA, 20 bp, synthetic construct
  misc_feature 1..20: note = chemically synthesized
  source 1..20: mol_type = other DNA
tgcacttggctgcataaatg

SEQ ID NO: 1871 - DNA, 20 bp, synthetic construct
  misc_feature 1..20: note = chemically synthesized
  source 1..20: mol_type = other DNA
tggctgcataaatgtggtac

SEQ ID NO: 1872 - DNA, 20 bp, synthetic construct
  misc_feature 1..20: note = chemically synthesized
  source 1..20: mol_type = other DNA
ggtacaagcattctgtcttg

SEQ ID NO: 1873 - DNA, 20 bp, synthetic construct
  misc_feature 1..20: note = chemically synthesized
  source 1..20: mol_type = other DNA
gtacaagcattctgtcttga

SEQ ID NO: 1874 - DNA, 20 bp, synthetic construct
  misc_feature 1..20: note = chemically synthesized
  source 1..20: mol_type = other DNA
tacaagcattctgtcttgaa

SEQ ID NO: 1875 - DNA, 20 bp, synthetic construct
  misc_feature 1..20: note = chemically synthesized
  source 1..20: mol_type = other DNA
aagcattctgtcttgaaggg

SEQ ID NO: 1876 - DNA, 20 bp, synthetic construct
  misc_feature 1..20: note = chemically synthesized
  source 1..20: mol_type = other DNA
agcattctgtcttgaagggc

SEQ ID NO: 1877 - DNA, 20 bp, synthetic construct
  misc_feature 1..20: note = chemically synthesized
  source 1..20: mol_type = other DNA
gtcttgaagggcaggtgctt

SEQ ID NO: 1878 - DNA, 20 bp, synthetic construct
  misc_feature 1..20: note = chemically synthesized
  source 1..20: mol_type = other DNA
tcttgaagggcaggtgcttc

SEQ ID NO: 1879 - DNA, 20 bp, synthetic construct
  misc_feature 1..20: note = chemically synthesized
  source 1..20: mol_type = other DNA
gtgcttcaggataccatata

SEQ ID NO: 1880 - DNA, 20 bp, synthetic construct
  misc_feature 1..20: note = chemically synthesized
  source 1..20: mol_type = other DNA
tcaggataccatatacagct

SEQ ID NO: 1881 - DNA, 20 bp, synthetic construct
  misc_feature 1..20: note = chemically synthesized
  source 1..20: mol_type = other DNA
ggataccatatacagctcag

SEQ ID NO: 1882 - DNA, 20 bp, synthetic construct
  misc_feature 1..20: note = chemically synthesized
  source 1..20: mol_type = other DNA
cagctcagaagtttcttctt

SEQ ID NO: 1883 - DNA, 20 bp, synthetic construct
  misc_feature 1..20: note = chemically synthesized
  source 1..20: mol_type = other DNA
agctcagaagtttcttcttt

SEQ ID NO: 1884 - DNA, 20 bp, synthetic construct
  misc_feature 1..20: note = chemically synthesized
  source 1..20: mol_type = other DNA
cttctttaggcattaaattt

SEQ ID NO: 1885 - DNA, 20 bp, synthetic construct
  misc_feature 1..20: note = chemically synthesized
  source 1..20: mol_type = other DNA
ttaggcattaaattttagca

SEQ ID NO: 1886 - DNA, 20 bp, synthetic construct
  misc_feature 1..20: note = chemically synthesized
  source 1..20: mol_type = other DNA
taaaccattttctttttttg

SEQ ID NO: 1887 - DNA, 20 bp, synthetic construct
  misc_feature 1..20: note = chemically synthesized
  source 1..20: mol_type = other DNA
ccattttctttttttgtggt

SEQ ID NO: 1888 - DNA, 20 bp, synthetic construct
  misc_feature 1..20: note = chemically synthesized
  source 1..20: mol_type = other DNA
ttctttttttgtggttagaa

SEQ ID NO: 1889 - DNA, 20 bp, synthetic construct
  misc_feature 1..20: note = chemically synthesized
  source 1..20: mol_type = other DNA
ttgtggttagaaaagttatg

SEQ ID NO: 1890 - DNA, 20 bp, synthetic construct
  misc_feature 1..20: note = chemically synthesized
  source 1..20: mol_type = other DNA
tagaaaagttatgtagaaaa

SEQ ID NO: 1891 - DNA, 20 bp, synthetic construct
  misc_feature 1..20: note = chemically synthesized
  source 1..20: mol_type = other DNA
aatgtgatttacgctcattg

SEQ ID NO: 1892 - DNA, 20 bp, synthetic construct
  misc_feature 1..20: note = chemically synthesized
  source 1..20: mol_type = other DNA
gatttacgctcattgtagaa

SEQ ID NO: 1893 - DNA, 20 bp, synthetic construct
  misc_feature 1..20: note = chemically synthesized
  source 1..20: mol_type = other DNA
ctataaaatgaatacaatta

SEQ ID NO: 1894 - DNA, 20 bp, synthetic construct
  misc_feature 1..20: note = chemically synthesized
  source 1..20: mol_type = other DNA
aattaaagctgttatttaat

SEQ ID NO: 1895 - DNA, 20 bp, synthetic construct
  misc_feature 1..20: note = chemically synthesized
  source 1..20: mol_type = other DNA
aaagctgttatttaattagc

SEQ ID NO: 1896 - DNA, 20 bp, synthetic construct
  misc_feature 1..20: note = chemically synthesized
  source 1..20: mol_type = other DNA
acaacttgtctattacctgt

SEQ ID NO: 1897 - DNA, 20 bp, synthetic construct
  misc_feature 1..20: note = chemically synthesized
  source 1..20: mol_type = other DNA
tatactgcatgattttattg

SEQ ID NO: 1898 - DNA, 20 bp, synthetic construct
  misc_feature 1..20: note = chemically synthesized
  source 1..20: mol_type = other DNA
acttaatcgctttgtcattt

SEQ ID NO: 1899 - DNA, 20 bp, synthetic construct
  misc_feature 1..20: note = chemically synthesized
  source 1..20: mol_type = other DNA
ttaatcgctttgtcattttg

SEQ ID NO: 1900 - DNA, 20 bp, synthetic construct
  misc_feature 1..20: note = chemically synthesized
  source 1..20: mol_type = other DNA
tttctttacattttgtctta

SEQ ID NO: 1901 - DNA, 20 bp, synthetic construct
  misc_feature 1..20: note = chemically synthesized
  source 1..20: mol_type = other DNA
ggaatattttcattcaactg

SEQ ID NO: 1902 - DNA, 20 bp, synthetic construct
  misc_feature 1..20: note = chemically synthesized
  source 1..20: mol_type = other DNA
atattttcattcaactgtgg

SEQ ID NO: 1903 - DNA, 20 bp, synthetic construct
  misc_feature 1..20: note = chemically synthesized
  source 1..20: mol_type = other DNA
ttaatcgtgtttcttcactc

SEQ ID NO: 1904 - DNA, 20 bp, synthetic construct
  misc_feature 1..20: note = chemically synthesized
  source 1..20: mol_type = other DNA
taatcgtgtttcttcactct

SEQ ID NO: 1905 - DNA, 20 bp, synthetic construct
  misc_feature 1..20: note = chemically synthesized
  source 1..20: mol_type = other DNA
aatcgtgtttcttcactcta

SEQ ID NO: 1906 - DNA, 20 bp, synthetic construct
  misc_feature 1..20: note = chemically synthesized
  source 1..20: mol_type = other DNA
ctctagggacattgtcgtct

SEQ ID NO: 1907 - DNA, 20 bp, synthetic construct
  misc_feature 1..20: note = chemically synthesized
  source 1..20: mol_type = other DNA
gacattgtcgtctaagttgt

SEQ ID NO: 1908 - DNA, 20 bp, synthetic construct
  misc_feature 1..20: note = chemically synthesized
  source 1..20: mol_type = other DNA
tcgtctaagttgtaagacat

SEQ ID NO: 1909 - DNA, 20 bp, synthetic construct
  misc_feature 1..20: note = chemically synthesized
  source 1..20: mol_type = other DNA
taagacattggttattttac

SEQ ID NO: 1910 - DNA, 20 bp, synthetic construct
  misc_feature 1..20: note = chemically synthesized
  source 1..20: mol_type = other DNA
ttaccagcaaaccattctga

SEQ ID NO: 1911 - DNA, 20 bp, synthetic construct
  misc_feature 1..20: note = chemically synthesized
  source 1..20: mol_type = other DNA
ttaatatcttactatactga

SEQ ID NO: 1912 - DNA, 20 bp, synthetic construct
  misc_feature 1..20: note = chemically synthesized
  source 1..20: mol_type = other DNA
atatcttactatactgaaag

SEQ ID NO: 1913 - DNA, 20 bp, synthetic construct
  misc_feature 1..20: note = chemically synthesized
  source 1..20: mol_type = other DNA
tactgaaagcagactgctat

SEQ ID NO: 1914 - DNA, 20 bp, synthetic construct
  misc_feature 1..20: note = chemically synthesized
  source 1..20: mol_type = other DNA
actgaaagcagactgctata

SEQ ID NO: 1915 - DNA, 20 bp, synthetic construct
  misc_feature 1..20: note = chemically synthesized
  source 1..20: mol_type = other DNA
cacttactcttctacctcat

SEQ ID NO: 1916 - DNA, 20 bp, synthetic construct
  misc_feature 1..20: note = chemically synthesized
  source 1..20: mol_type = other DNA
acttactcttctacctcata

SEQ ID NO: 1917 - DNA, 20 bp, synthetic construct
  misc_feature 1..20: note = chemically synthesized
  source 1..20: mol_type = other DNA
atatgttacaattaatttat

SEQ ID NO: 1918 - DNA, 20 bp, synthetic construct
  misc_feature 1..20: note = chemically synthesized
  source 1..20: mol_type = other DNA
tatgttacaattaatttatt

SEQ ID NO: 1919 - DNA, 20 bp, synthetic construct
  misc_feature 1..20: note = chemically synthesized
  source 1..20: mol_type = other DNA
ttacaattaatttattaggt

SEQ ID NO: 1920 - DNA, 20 bp, synthetic construct
  misc_feature 1..20: note = chemically synthesized
  source 1..20: mol_type = other DNA
ggtaagcatttgttttatat

SEQ ID NO: 1921 - DNA, 20 bp, synthetic construct
  misc_feature 1..20: note = chemically synthesized
  source 1..20: mol_type = other DNA
tatattggttttatttcacc

SEQ ID NO: 1922 - DNA, 20 bp, synthetic construct
  misc_feature 1..20: note = chemically synthesized
  source 1..20: mol_type = other DNA
atattggttttatttcacct

SEQ ID NO: 1923 - DNA, 20 bp, synthetic construct
  misc_feature 1..20: note = chemically synthesized
  source 1..20: mol_type = other DNA
ggttttatttcacctgggct

SEQ ID NO: 1924 - DNA, 20 bp, synthetic construct
  misc_feature 1..20: note = chemically synthesized
  source 1..20: mol_type = other DNA
ttcacctgggctgagatttc

SEQ ID NO: 1925 - DNA, 20 bp, synthetic construct
  misc_feature 1..20: note = chemically synthesized
  source 1..20: mol_type = other DNA
tgagatttcaagaaacaccc

SEQ ID NO: 1926 - DNA, 20 bp, synthetic construct
  misc_feature 1..20: note = chemically synthesized
  source 1..20: mol_type = other DNA
aagaaacaccccagtcttca

SEQ ID NO: 1927 - DNA, 20 bp, synthetic construct
  misc_feature 1..20: note = chemically synthesized
  source 1..20: mol_type = other DNA
ctaacacatttactaaacat

SEQ ID NO: 1928 - DNA, 20 bp, synthetic construct
  misc_feature 1..20: note = chemically synthesized
  source 1..20: mol_type = other DNA
ttactaaacatcagcaactg

SEQ ID NO: 1929 - DNA, 20 bp, synthetic construct
  misc_feature 1..20: note = chemically synthesized
  source 1..20: mol_type = other DNA
tggcctgttaatttttttaa

SEQ ID NO: 1930 - DNA, 20 bp, synthetic construct
  misc_feature 1..20: note = chemically synthesized
  source 1..20: mol_type = other DNA
atttttttaatagaaatttt

SEQ ID NO: 1931 - DNA, 20 bp, synthetic construct
  misc_feature 1..20: note = chemically synthesized
  source 1..20: mol_type = other DNA
tttaagtcctcattttcttt

SEQ ID NO: 1932 - DNA, 20 bp, synthetic construct
  misc_feature 1..20: note = chemically synthesized
  source 1..20: mol_type = other DNA
attttctttcggtgtttttt

SEQ ID NO: 1933 - DNA, 20 bp, synthetic construct
  misc_feature 1..20: note = chemically synthesized
  source 1..20: mol_type = other DNA
ttttttaagcttaatttttc

SEQ ID NO: 1934 - DNA, 20 bp, synthetic construct
  misc_feature 1..20: note = chemically synthesized
  source 1..20: mol_type = other DNA
ggctttattcataaattctt

SEQ ID NO: 1935 - DNA, 20 bp, synthetic construct
  misc_feature 1..20: note = chemically synthesized
  source 1..20: mol_type = other DNA
gctttattcataaattctta

SEQ ID NO: 1936 - DNA, 20 bp, synthetic construct
  misc_feature 1..20: note = chemically synthesized
  source 1..20: mol_type = other DNA
caactacatttgaaaaatca

SEQ ID NO: 1937 - DNA, 20 bp, synthetic construct
  misc_feature 1..20: note = chemically synthesized
  source 1..20: mol_type = other DNA
tttaaattcttattcacctc

SEQ ID NO: 1938 - DNA, 20 bp, synthetic construct
  misc_feature 1..20: note = chemically synthesized
  source 1..20: mol_type = other DNA
gcaaaaccattcacaaacca

SEQ ID NO: 1939 - DNA, 20 bp, synthetic construct
  misc_feature 1..20: note = chemically synthesized
  source 1..20: mol_type = other DNA
aaaccattcacaaaccatgg

SEQ ID NO: 1940 - DNA, 20 bp, synthetic construct
  misc_feature 1..20: note = chemically synthesized
  source 1..20: mol_type = other DNA
attcacaaaccatggtagta

SEQ ID NO: 1941 - DNA, 20 bp, synthetic construct
  misc_feature 1..20: note = chemically synthesized
  source 1..20: mol_type = other DNA
tcacaaaccatggtagtaaa

SEQ ID NO: 1942 - DNA, 20 bp, synthetic construct
  misc_feature 1..20: note = chemically synthesized
  source 1..20: mol_type = other DNA
caaaccatggtagtaaagag

SEQ ID NO: 1943 - DNA, 20 bp, synthetic construct
  misc_feature 1..20: note = chemically synthesized
  source 1..20: mol_type = other DNA
aaaccatggtagtaaagaga

SEQ ID NO: 1944 - DNA, 20 bp, synthetic construct
  misc_feature 1..20: note = chemically synthesized
  source 1..20: mol_type = other DNA
aaccatggtagtaaagagaa

SEQ ID NO: 1945 - DNA, 20 bp, synthetic construct
  misc_feature 1..20: note = chemically synthesized
  source 1..20: mol_type = other DNA
gtaaagagaagggtgacacc

SEQ ID NO: 1946 - DNA, 20 bp, synthetic construct
  misc_feature 1..20: note = chemically synthesized
  source 1..20: mol_type = other DNA
aagagaagggtgacacctgg

SEQ ID NO: 1947 - DNA, 20 bp, synthetic construct
  misc_feature 1..20: note = chemically synthesized
  source 1..20: mol_type = other DNA
agggtgacacctggtggcca

SEQ ID NO: 1948 - DNA, 20 bp, synthetic construct
  misc_feature 1..20: note = chemically synthesized
  source 1..20: mol_type = other DNA
gggtgacacctggtggccat

SEQ ID NO: 1949 - DNA, 20 bp, synthetic construct
  misc_feature 1..20: note = chemically synthesized
  source 1..20: mol_type = other DNA
ggccataggtaaatgtacca

SEQ ID NO: 1950 - DNA, 20 bp, synthetic construct
  misc_feature 1..20: note = chemically synthesized
  source 1..20: mol_type = other DNA
cataggtaaatgtaccacgg

SEQ ID NO: 1951 - DNA, 20 bp, synthetic construct
  misc_feature 1..20: note = chemically synthesized
  source 1..20: mol_type = other DNA
gtaaatgtaccacggtggtc

SEQ ID NO: 1952 - DNA, 20 bp, synthetic construct
  misc_feature 1..20: note = chemically synthesized
  source 1..20: mol_type = other DNA
taccacggtggtccggtgac

SEQ ID NO: 1953 - DNA, 20 bp, synthetic construct
  misc_feature 1..20: note = chemically synthesized
  source 1..20: mol_type = other DNA
ccacggtggtccggtgacca

SEQ ID NO: 1954 - DNA, 20 bp, synthetic construct
  misc_feature 1..20: note = chemically synthesized
  source 1..20: mol_type = other DNA
tggtccggtgaccagagatg

SEQ ID NO: 1955 - DNA, 20 bp, synthetic construct
  misc_feature 1..20: note = chemically synthesized
  source 1..20: mol_type = other DNA
gtgaccagagatgcagcgct

SEQ ID NO: 1956 - DNA, 20 bp, synthetic construct
  misc_feature 1..20: note = chemically synthesized
  source 1..20: mol_type = other DNA
tgaccagagatgcagcgctg

SEQ ID NO: 1957 - DNA, 20 bp, synthetic construct
  misc_feature 1..20: note = chemically synthesized
  source 1..20: mol_type = other DNA
gaccagagatgcagcgctga

SEQ ID NO: 1958 - DNA, 20 bp, synthetic construct
  misc_feature 1..20: note = chemically synthesized
  source 1..20: mol_type = other DNA
cagcgctgagggttttcctg

SEQ ID NO: 1959 - DNA, 20 bp, synthetic construct
  misc_feature 1..20: note = chemically synthesized
  source 1..20: mol_type = other DNA
agcgctgagggttttcctga

SEQ ID NO: 1960 - DNA, 20 bp, synthetic construct
  misc_feature 1..20: note = chemically synthesized
  source 1..20: mol_type = other DNA
tgagggttttcctgaaggta

SEQ ID NO: 1961 - DNA, 20 bp, synthetic construct
  misc_feature 1..20: note = chemically synthesized
  source 1..20: mol_type = other DNA
gagggttttcctgaaggtaa

SEQ ID NO: 1962 - DNA, 20 bp, synthetic construct
  misc_feature 1..20: note = chemically synthesized
  source 1..20: mol_type = other DNA
ttcctgaaggtaaaggaata

SEQ ID NO: 1963 - DNA, 20 bp, synthetic construct
  misc_feature 1..20: note = chemically synthesized
  source 1..20: mol_type = other DNA
gaaggtaaaggaataaagaa

SEQ ID NO: 1964 - DNA, 20 bp, synthetic construct
  misc_feature 1..20: note = chemically synthesized
  source 1..20: mol_type = other DNA
aaggtaaaggaataaagaat

SEQ ID NO: 1965 - DNA, 20 bp, synthetic construct
  misc_feature 1..20: note = chemically synthesized
  source 1..20: mol_type = other DNA
gtaaaggaataaagaatggg

SEQ ID NO: 1966 - DNA, 20 bp, synthetic construct
  misc_feature 1..20: note = chemically synthesized
  source 1..20: mol_type = other DNA
aaaggaataaagaatgggtg

SEQ ID NO: 1967 - DNA, 20 bp, synthetic construct
  misc_feature 1..20: note = chemically synthesized
  source 1..20: mol_type = other DNA
aaggaataaagaatgggtgg

SEQ ID NO: 1968 - DNA, 20 bp, synthetic construct
  misc_feature 1..20: note = chemically synthesized
  source 1..20: mol_type = other DNA
aggaataaagaatgggtgga

SEQ ID NO: 1969 - DNA, 20 bp, synthetic construct
  misc_feature 1..20: note = chemically synthesized
  source 1..20: mol_type = other DNA
ggaataaagaatgggtggag

SEQ ID NO: 1970 - DNA, 20 bp, synthetic construct
  misc_feature 1..20: note = chemically synthesized
  source 1..20: mol_type = other DNA
atgggtggaggggcgtgcac

SEQ ID NO: 1971 - DNA, 20 bp, synthetic construct
  misc_feature 1..20: note = chemically synthesized
  source 1..20: mol_type = other DNA
cgtgcactggaaatcacttg

SEQ ID NO: 1972 - DNA, 20 bp, synthetic construct
  misc_feature 1..20: note = chemically synthesized
  source 1..20: mol_type = other DNA
tgcactggaaatcacttgta

SEQ ID NO: 1973 - DNA, 20 bp, synthetic construct
  misc_feature 1..20: note = chemically synthesized
  source 1..20: mol_type = other DNA
tggaaatcacttgtagagaa

SEQ ID NO: 1974 - DNA, 20 bp, synthetic construct
  misc_feature 1..20: note = chemically synthesized
  source 1..20: mol_type = other DNA
agaaaagcccctgaaaattt

SEQ ID NO: 1975 - DNA, 20 bp, synthetic construct
  misc_feature 1..20: note = chemically synthesized
  source 1..20: mol_type = other DNA
gaaaatttgagaaaacaaac

SEQ ID NO: 1976 - DNA, 20 bp, synthetic construct
  misc_feature 1..20: note = chemically synthesized
  source 1..20: mol_type = other DNA
acaaacaagaaactacttac

SEQ ID NO: 1977 - DNA, 20 bp, synthetic construct
  misc_feature 1..20: note = chemically synthesized
  source 1..20: mol_type = other DNA
ttaccagctatttgaattgc

SEQ ID NO: 1978 - DNA, 20 bp, synthetic construct
  misc_feature 1..20: note = chemically synthesized
  source 1..20: mol_type = other DNA
tatttgaattgctggaatca

SEQ ID NO: 1979 - DNA, 20 bp, synthetic construct
  misc_feature 1..20: note = chemically synthesized
  source 1..20: mol_type = other DNA
atttgaattgctggaatcac

SEQ ID NO: 1980 - DNA, 20 bp, synthetic construct
  misc_feature 1..20: note = chemically synthesized
  source 1..20: mol_type = other DNA
tggaatcacaggccattgct

SEQ ID NO: 1981 - DNA, 20 bp, synthetic construct
  misc_feature 1..20: note = chemically synthesized
  source 1..20: mol_type = other DNA
cattgctgagctgcctgaac

SEQ ID NO: 1982 - DNA, 20 bp, synthetic construct
  misc_feature 1..20: note = chemically synthesized
  source 1..20: mol_type = other DNA
attgctgagctgcctgaact

SEQ ID NO: 1983 - DNA, 20 bp, synthetic construct
  misc_feature 1..20: note = chemically synthesized
  source 1..20: mol_type = other DNA
tgcctgaactgggaacacaa

SEQ ID NO: 1984 - DNA, 20 bp, synthetic construct
  misc_feature 1..20: note = chemically synthesized
  source 1..20: mol_type = other DNA
ctgaactgggaacacaacag

SEQ ID NO: 1985 - DNA, 20 bp, synthetic construct
  misc_feature 1..20: note = chemically synthesized
  source 1..20: mol_type = other DNA
tgaactgggaacacaacaga

SEQ ID NO: 1986 - DNA, 20 bp, synthetic construct
  misc_feature 1..20: note = chemically synthesized
  source 1..20: mol_type = other DNA
aaaccactctgataatcatt

SEQ ID NO: 1987 - DNA, 20 bp, synthetic construct
  misc_feature 1..20: note = chemically synthesized
  source 1..20: mol_type = other DNA
actctgataatcattgagtc

SEQ ID NO: 1988 - DNA, 20 bp, synthetic construct
  misc_feature 1..20: note = chemically synthesized
  source 1..20: mol_type = other DNA
gataatcattgagtcaagta

SEQ ID NO: 1989 - DNA, 20 bp, synthetic construct
  misc_feature 1..20: note = chemically synthesized
  source 1..20: mol_type = other DNA
aatcattgagtcaagtacag

SEQ ID NO: 1990 - DNA, 20 bp, synthetic construct
  misc_feature 1..20: note = chemically synthesized
  source 1..20: mol_type = other DNA
atcattgagtcaagtacagc

SEQ ID NO: 1991 - DNA, 20 bp, synthetic construct
  misc_feature 1..20: note = chemically synthesized
  source 1..20: mol_type = other DNA
gtcaagtacagcaggtgatt

SEQ ID NO: 1992 - DNA, 20 bp, synthetic construct
  misc_feature 1..20: note = chemically synthesized
  source 1..20: mol_type = other DNA
tcaagtacagcaggtgattg

SEQ ID NO: 1993 - DNA, 20 bp, synthetic construct
  misc_feature 1..20: note = chemically synthesized
  source 1..20: mol_type = other DNA
gcaggtgattgaggactgct

SEQ ID NO: 1994 - DNA, 20 bp, synthetic construct
  misc_feature 1..20: note = chemically synthesized
  source 1..20: mol_type = other DNA
aggtgattgaggactgctga

SEQ ID NO: 1995 - DNA, 20 bp, synthetic construct
  misc_feature 1..20: note = chemically synthesized
  source 1..20: mol_type = other DNA
ggtgattgaggactgctgag

SEQ ID NO: 1996 - DNA, 20 bp, synthetic construct
  misc_feature 1..20: note = chemically synthesized
  source 1..20: mol_type = other DNA
ttgaggactgctgagaggta

SEQ ID NO: 1997 - DNA, 20 bp, synthetic construct
  misc_feature 1..20: note = chemically synthesized
  source 1..20: mol_type = other DNA
tgaggactgctgagaggtac

SEQ ID NO: 1998 - DNA, 20 bp, synthetic construct
  misc_feature 1..20: note = chemically synthesized
  source 1..20: mol_type = other DNA
atgtcatcttataatactgt

SEQ ID NO: 1999 - DNA, 20 bp, synthetic construct
  misc_feature 1..20: note = chemically synthesized
  source 1..20: mol_type = other DNA
ccccaaatttttcataaact

SEQ ID NO: 2000 - DNA, 20 bp, synthetic construct
  misc_feature 1..20: note = chemically synthesized
  source 1..20: mol_type = other DNA
tatttctgactttcaaatta

SEQ ID NO: 2001 - DNA, 20 bp, synthetic construct
  misc_feature 1..20: note = chemically synthesized
  source 1..20: mol_type = other DNA
aaattaaagattttcacatg

SEQ ID NO: 2002 - DNA, 20 bp, synthetic construct
  misc_feature 1..20: note = chemically synthesized
  source 1..20: mol_type = other DNA
aattaaagattttcacatgc

SEQ ID NO: 2003 - DNA, 20 bp, synthetic construct
  misc_feature 1..20: note = chemically synthesized
  source 1..20: mol_type = other DNA
tgtaattgtgattctctctg

SEQ ID NO: 2004 - DNA, 20 bp, synthetic construct
  misc_feature 1..20: note = chemically synthesized
  source 1..20: mol_type = other DNA
gtaattgtgattctctctgt

SEQ ID NO: 2005 - DNA, 20 bp, synthetic construct
  misc_feature 1..20: note = chemically synthesized
  source 1..20: mol_type = other DNA
gtgattctctctgtaggctt

SEQ ID NO: 2006 - DNA, 20 bp, synthetic construct
  misc_feature 1..20: note = chemically synthesized
  source 1..20: mol_type = other DNA
tgattctctctgtaggcttt

SEQ ID NO: 2007 - DNA, 20 bp, synthetic construct
  misc_feature 1..20: note = chemically synthesized
  source 1..20: mol_type = other DNA
gttcttttccttttttgcat

SEQ ID NO: 2008 - DNA, 20 bp, synthetic construct
  misc_feature 1..20: note = chemically synthesized
  source 1..20: mol_type = other DNA
aacttctacactctaacatg

SEQ ID NO: 2009 - DNA, 20 bp, synthetic construct
  misc_feature 1..20: note = chemically synthesized
  source 1..20: mol_type = other DNA
agaatgttactacaatatta

SEQ ID NO: 2010 - DNA, 20 bp, synthetic construct
  misc_feature 1..20: note = chemically synthesized
  source 1..20: mol_type = other DNA
tgtatgacaattttatttga

SEQ ID NO: 2011 - DNA, 20 bp, synthetic construct
  misc_feature 1..20: note = chemically synthesized
  source 1..20: mol_type = other DNA
gacaattttatttgaaagcc

SEQ ID NO: 2012 - DNA, 20 bp, synthetic construct
  misc_feature 1..20: note = chemically synthesized
  source 1..20: mol_type = other DNA
acaattttatttgaaagcct

SEQ ID NO: 2013 - DNA, 20 bp, synthetic construct
  misc_feature 1..20: note = chemically synthesized
  source 1..20: mol_type = other DNA
tacttgatatgcatgcattc

SEQ ID NO: 2014 - DNA, 20 bp, synthetic construct
  misc_feature 1..20: note = chemically synthesized
  source 1..20: mol_type = other DNA
tgcatgcattctggtatctc

SEQ ID NO: 2015 - DNA, 20 bp, synthetic construct
  misc_feature 1..20: note = chemically synthesized
  source 1..20: mol_type = other DNA
atctcaagcattctatttct

SEQ ID NO: 2016 - DNA, 20 bp, synthetic construct
  misc_feature 1..20: note = chemically synthesized
  source 1..20: mol_type = other DNA
ctatttctgagtaattgttt

SEQ ID NO: 2017 - DNA, 20 bp, synthetic construct
  misc_feature 1..20: note = chemically synthesized
  source 1..20: mol_type = other DNA
tatttctgagtaattgttta

SEQ ID NO: 2018 - DNA, 20 bp, synthetic construct
  misc_feature 1..20: note = chemically synthesized
  source 1..20: mol_type = other DNA
ctgagtaattgtttaaggtg

SEQ ID NO: 2019 - DNA, 20 bp, synthetic construct
  misc_feature 1..20: note = chemically synthesized
  source 1..20: mol_type = other DNA
agtaattgtttaaggtgtag

SEQ ID NO: 2020 - DNA, 20 bp, synthetic construct
  misc_feature 1..20: note = chemically synthesized
  source 1..20: mol_type = other DNA
taattgtttaaggtgtagaa

SEQ ID NO: 2021 - DNA, 20 bp, synthetic construct
  misc_feature 1..20: note = chemically synthesized
  source 1..20: mol_type = other DNA
tgtttaaggtgtagaagaga

SEQ ID NO: 2022 - DNA, 20 bp, synthetic construct
  misc_feature 1..20: note = chemically synthesized
  source 1..20: mol_type = other DNA
aggtgtagaagagatagata

SEQ ID NO: 2023 - DNA, 20 bp, synthetic construct
  misc_feature 1..20: note = chemically synthesized
  source 1..20: mol_type = other DNA
tgtagaagagatagatatgg

SEQ ID NO: 2024 - DNA, 20 bp, synthetic construct
  misc_feature 1..20: note = chemically synthesized
  source 1..20: mol_type = other DNA
agagatagatatggtggatt

SEQ ID NO: 2025 - DNA, 20 bp, synthetic construct
  misc_feature 1..20: note = chemically synthesized
  source 1..20: mol_type = other DNA
agatagatatggtggatttg

SEQ ID NO: 2026 - DNA, 20 bp, synthetic construct
  misc_feature 1..20: note = chemically synthesized
  source 1..20: mol_type = other DNA
cttatatattttctatttct

SEQ ID NO: 2027 - DNA, 20 bp, synthetic construct
  misc_feature 1..20: note = chemically synthesized
  source 1..20: mol_type = other DNA
tatattttctatttcttgga

SEQ ID NO: 2028 - DNA, 20 bp, synthetic construct
  misc_feature 1..20: note = chemically synthesized
  source 1..20: mol_type = other DNA
tggatgaatttgtacattaa

SEQ ID NO: 2029 - DNA, 20 bp, synthetic construct
  misc_feature 1..20: note = chemically synthesized
  source 1..20: mol_type = other DNA
tgtacattaaaagttttcca

SEQ ID NO: 2030 - DNA, 20 bp, synthetic construct
  misc_feature 1..20: note = chemically synthesized
  source 1..20: mol_type = other DNA
acattaaaagttttccatgg

SEQ ID NO: 2031 - DNA, 20 bp, synthetic construct
  misc_feature 1..20: note = chemically synthesized
  source 1..20: mol_type = other DNA
tttcaaaaactttttttttc

SEQ ID NO: 2032 - DNA, 20 bp, synthetic construct
  misc_feature 1..20: note = chemically synthesized
  source 1..20: mol_type = other DNA
ttcaaaaactttttttttcc

SEQ ID NO: 2033 - DNA, 20 bp, synthetic construct
  misc_feature 1..20: note = chemically synthesized
  source 1..20: mol_type = other DNA
aaaactttttttttccggga

SEQ ID NO: 2034 - DNA, 20 bp, synthetic construct
  misc_feature 1..20: note = chemically synthesized
  source 1..20: mol_type = other DNA
tttttttccgggatggattg

SEQ ID NO: 2035 - DNA, 20 bp, synthetic construct
  misc_feature 1..20: note = chemically synthesized
  source 1..20: mol_type = other DNA
ttttttccgggatggattga

SEQ ID NO: 2036 - DNA, 20 bp, synthetic construct
  misc_feature 1..20: note = chemically synthesized
  source 1..20: mol_type = other DNA
cacaatgcaatatattaatg

SEQ ID NO: 2037 - DNA, 20 bp, synthetic construct
  misc_feature 1..20: note = chemically synthesized
  source 1..20: mol_type = other DNA
ccatgaatatatataatctt

SEQ ID NO: 2038 - DNA, 20 bp, synthetic construct
  misc_feature 1..20: note = chemically synthesized
  source 1..20: mol_type = other DNA
taatcttaagaaaatttttt

SEQ ID NO: 2039 - DNA, 20 bp, synthetic construct
  misc_feature 1..20: note = chemically synthesized
  source 1..20: mol_type = other DNA
agccaattattattacttac

SEQ ID NO: 2040 - DNA, 20 bp, synthetic construct
  misc_feature 1..20: note = chemically synthesized
  source 1..20: mol_type = other DNA
tattattacttactagatat

SEQ ID NO: 2041 - DNA, 20 bp, synthetic construct
  misc_feature 1..20: note = chemically synthesized
  source 1..20: mol_type = other DNA
attattacttactagatatt

SEQ ID NO: 2042 - DNA, 20 bp, synthetic construct
  misc_feature 1..20: note = chemically synthesized
  source 1..20: mol_type = other DNA
atcttaatttaattcctcca

SEQ ID NO: 2043 - DNA, 20 bp, synthetic construct
  misc_feature 1..20: note = chemically synthesized
  source 1..20: mol_type = other DNA
attcctccaaagaatcttat

SEQ ID NO: 2044 - DNA, 20 bp, synthetic construct
  misc_feature 1..20: note = chemically synthesized
  source 1..20: mol_type = other DNA
ttcctccaaagaatcttatg

SEQ ID NO: 2045 - DNA, 20 bp, synthetic construct
  misc_feature 1..20: note = chemically synthesized
  source 1..20: mol_type = other DNA
ctccaaagaatcttatgagg

SEQ ID NO: 2046 - DNA, 20 bp, synthetic construct
  misc_feature 1..20: note = chemically synthesized
  source 1..20: mol_type = other DNA
tccaaagaatcttatgaggt

SEQ ID NO: 2047 - DNA, 20 bp, synthetic construct
  misc_feature 1..20: note = chemically synthesized
  source 1..20: mol_type = other DNA
aaagaatcttatgaggtagg

SEQ ID NO: 2048 - DNA, 20 bp, synthetic construct
  misc_feature 1..20: note = chemically synthesized
  source 1..20: mol_type = other DNA
aagaatcttatgaggtaggt

SEQ ID NO: 2049 - DNA, 20 bp, synthetic construct
  misc_feature 1..20: note = chemically synthesized
  source 1..20: mol_type = other DNA
gaatcttatgaggtaggtag

SEQ ID NO: 2050 - DNA, 20 bp, synthetic construct
  misc_feature 1..20: note = chemically synthesized
  source 1..20: mol_type = other DNA
tatgttgctgttatgaaacc

SEQ ID NO: 2051 - DNA, 20 bp, synthetic construct
  misc_feature 1..20: note = chemically synthesized
  source 1..20: mol_type = other DNA
atgttgctgttatgaaacca

SEQ ID NO: 2052 - DNA, 20 bp, synthetic construct
  misc_feature 1..20: note = chemically synthesized
  source 1..20: mol_type = other DNA
gctgttatgaaaccaaggca

SEQ ID NO: 2053 - DNA, 20 bp, synthetic construct
  misc_feature 1..20: note = chemically synthesized
  source 1..20: mol_type = other DNA
tgttatgaaaccaaggcaca

SEQ ID NO: 2054 - DNA, 20 bp, synthetic construct
  misc_feature 1..20: note = chemically synthesized
  source 1..20: mol_type = other DNA
ttatgaaaccaaggcacaga

SEQ ID NO: 2055 - DNA, 20 bp, synthetic construct
  misc_feature 1..20: note = chemically synthesized
  source 1..20: mol_type = other DNA
tatgaaaccaaggcacagag

SEQ ID NO: 2056 - DNA, 20 bp, synthetic construct
  misc_feature 1..20: note = chemically synthesized
  source 1..20: mol_type = other DNA
aaaccaaggcacagagaggt

SEQ ID NO: 2057 - DNA, 20 bp, synthetic construct
  misc_feature 1..20: note = chemically synthesized
  source 1..20: mol_type = other DNA
agaggttagttaacttgctg

SEQ ID NO: 2058 - DNA, 20 bp, synthetic construct
  misc_feature 1..20: note = chemically synthesized
  source 1..20: mol_type = other DNA
tgctgaagaaaatgatgtgc

SEQ ID NO: 2059 - DNA, 20 bp, synthetic construct
  misc_feature 1..20: note = chemically synthesized
  source 1..20: mol_type = other DNA
gatgtgctggatttttattc

SEQ ID NO: 2060 - DNA, 20 bp, synthetic construct
  misc_feature 1..20: note = chemically synthesized
  source 1..20: mol_type = other DNA
gatttttattctagctattc

SEQ ID NO: 2061 - DNA, 20 bp, synthetic construct
  misc_feature 1..20: note = chemically synthesized
  source 1..20: mol_type = other DNA
aactacacaaccttatgtct

SEQ ID NO: 2062 - DNA, 20 bp, synthetic construct
  misc_feature 1..20: note = chemically synthesized
  source 1..20: mol_type = other DNA
cacaaccttatgtctgagcc

SEQ ID NO: 2063 - DNA, 20 bp, synthetic construct
  misc_feature 1..20: note = chemically synthesized
  source 1..20: mol_type = other DNA
acaaccttatgtctgagcca

SEQ ID NO: 2064 - DNA, 20 bp, synthetic construct
  misc_feature 1..20: note = chemically synthesized
  source 1..20: mol_type = other DNA
gtctgagccaaggaaacata

SEQ ID NO: 2065 - DNA, 20 bp, synthetic construct
  misc_feature 1..20: note = chemically synthesized
  source 1..20: mol_type = other DNA
agccaaggaaacatacggtg

SEQ ID NO: 2066 - DNA, 20 bp, synthetic construct
  misc_feature 1..20: note = chemically synthesized
  source 1..20: mol_type = other DNA
ggaaacatacggtgtggcaa

SEQ ID NO: 2067 - DNA, 20 bp, synthetic construct
  misc_feature 1..20: note = chemically synthesized
  source 1..20: mol_type = other DNA
ggcaacagttaccatgtttt

SEQ ID NO: 2068 - DNA, 20 bp, synthetic construct
  misc_feature 1..20: note = chemically synthesized
  source 1..20: mol_type = other DNA
gcaacagttaccatgttttt

SEQ ID NO: 2069 - DNA, 20 bp, synthetic construct
  misc_feature 1..20: note = chemically synthesized
  source 1..20: mol_type = other DNA
agttaccatgtttttaggaa

SEQ ID NO: 2070 - DNA, 20 bp, synthetic construct
  misc_feature 1..20: note = chemically synthesized
  source 1..20: mol_type = other DNA
taccatgtttttaggaacag

SEQ ID NO: 2071 - DNA, 20 bp, synthetic construct
  misc_feature 1..20: note = chemically synthesized
  source 1..20: mol_type = other DNA
agcactcctaatgtttgctg

SEQ ID NO: 2072 - DNA, 20 bp, synthetic construct
  misc_feature 1..20: note = chemically synthesized
  source 1..20: mol_type = other DNA
gcactcctaatgtttgctgc

SEQ ID NO: 2073 - DNA, 20 bp, synthetic construct
  misc_feature 1..20: note = chemically synthesized
  source 1..20: mol_type = other DNA
cactcctaatgtttgctgca

SEQ ID NO: 2074 - DNA, 20 bp, synthetic construct
  misc_feature 1..20: note = chemically synthesized
  source 1..20: mol_type = other DNA
taatgtttgctgcagggaaa

SEQ ID NO: 2075 - DNA, 20 bp, synthetic construct
  misc_feature 1..20: note = chemically synthesized
  source 1..20: mol_type = other DNA
aatgtttgctgcagggaaaa

SEQ ID NO: 2076 - DNA, 20 bp, synthetic construct
  misc_feature 1..20: note = chemically synthesized
  source 1..20: mol_type = other DNA
ctgcagggaaaaaggaatct

SEQ ID NO: 2077 - DNA, 20 bp, synthetic construct
  misc_feature 1..20: note = chemically synthesized
  source 1..20: mol_type = other DNA
aaatattttgaaatatcttt

SEQ ID NO: 2078 - DNA, 20 bp, synthetic construct
  misc_feature 1..20: note = chemically synthesized
  source 1..20: mol_type = other DNA
tcagatgtattttaaaattt

SEQ ID NO: 2079 - DNA, 20 bp, synthetic construct
  misc_feature 1..20: note = chemically synthesized
  source 1..20: mol_type = other DNA
cagatgtattttaaaattta

SEQ ID NO: 2080 - DNA, 20 bp, synthetic construct
  misc_feature 1..20: note = chemically synthesized
  source 1..20: mol_type = other DNA
aaatttaaggatattttgtt

SEQ ID NO: 2081 - DNA, 20 bp, synthetic construct
  misc_feature 1..20: note = chemically synthesized
  source 1..20: mol_type = other DNA
gatattttgttcagttcata

SEQ ID NO: 2082 - DNA, 20 bp, synthetic construct
  misc_feature 1..20: note = chemically synthesized
  source 1..20: mol_type = other DNA
agaatttttttttttttctc

SEQ ID NO: 2083 - DNA, 20 bp, synthetic construct
  misc_feature 1..20: note = chemically synthesized
  source 1..20: mol_type = other DNA
tttttttttttttctcgaga

SEQ ID NO: 2084 - DNA, 20 bp, synthetic construct
  misc_feature 1..20: note = chemically synthesized
  source 1..20: mol_type = other DNA
tttttttttttctcgagatg

SEQ ID NO: 2085 - DNA, 20 bp, synthetic construct
  misc_feature 1..20: note = chemically synthesized
  source 1..20: mol_type = other DNA
tggagtctcactctatcacc

SEQ ID NO: 2086 - DNA, 20 bp, synthetic construct
  misc_feature 1..20: note = chemically synthesized
  source 1..20: mol_type = other DNA
ggagtctcactctatcaccc

SEQ ID NO: 2087 - DNA, 20 bp, synthetic construct
  misc_feature 1..20: note = chemically synthesized
  source 1..20: mol_type = other DNA
tctcactctatcacccaggc

SEQ ID NO: 2088 - DNA, 20 bp, synthetic construct
  misc_feature 1..20: note = chemically synthesized
  source 1..20: mol_type = other DNA
ctatcacccaggctggaatg

SEQ ID NO: 2089 - DNA, 20 bp, synthetic construct
  misc_feature 1..20: note = chemically synthesized
  source 1..20: mol_type = other DNA
tcacccaggctggaatgcag

SEQ ID NO: 2090 - DNA, 20 bp, synthetic construct
  misc_feature 1..20: note = chemically synthesized
  source 1..20: mol_type = other DNA
ggaatgcagtggcatgatct

SEQ ID NO: 2091 - DNA, 20 bp, synthetic construct
  misc_feature 1..20: note = chemically synthesized
  source 1..20: mol_type = other DNA
tcactgcaacctctgcctcc

SEQ ID NO: 2092 - DNA, 20 bp, synthetic construct
  misc_feature 1..20: note = chemically synthesized
  source 1..20: mol_type = other DNA
cactgcaacctctgcctcct

SEQ ID NO: 2093 - DNA, 20 bp, synthetic construct
  misc_feature 1..20: note = chemically synthesized
  source 1..20: mol_type = other DNA
aacctctgcctcctgggttc

SEQ ID NO: 2094 - DNA, 20 bp, synthetic construct
  misc_feature 1..20: note = chemically synthesized
  source 1..20: mol_type = other DNA
ttcaagcaattttcctgcct

SEQ ID NO: 2095 - DNA, 20 bp, synthetic construct
  misc_feature 1..20: note = chemically synthesized
  source 1..20: mol_type = other DNA
ttttcctgcctcagcctccc

SEQ ID NO: 2096 - DNA, 20 bp, synthetic construct
  misc_feature 1..20: note = chemically synthesized
  source 1..20: mol_type = other DNA
tcctgcctcagcctcccaag

SEQ ID NO: 2097 - DNA, 20 bp, synthetic construct
  misc_feature 1..20: note = chemically synthesized
  source 1..20: mol_type = other DNA
cctcagcctcccaagtggct

SEQ ID NO: 2098 - DNA, 20 bp, synthetic construct
  misc_feature 1..20: note = chemically synthesized
  source 1..20: mol_type = other DNA
ctcccaagtggctgagacta

SEQ ID NO: 2099 - DNA, 20 bp, synthetic construct
  misc_feature 1..20: note = chemically synthesized
  source 1..20: mol_type = other DNA
tcccaagtggctgagactac

SEQ ID NO: 2100 - DNA, 20 bp, synthetic construct
  misc_feature 1..20: note = chemically synthesized
  source 1..20: mol_type = other DNA
caggcgcatgccaccatgca

SEQ ID NO: 2101 - DNA, 20 bp, synthetic construct
  misc_feature 1..20: note = chemically synthesized
  source 1..20: mol_type = other DNA
gctaattttttttgtatttt

SEQ ID NO: 2102 - DNA, 20 bp, synthetic construct
  misc_feature 1..20: note = chemically synthesized
  source 1..20: mol_type = other DNA
aattttttttgtatttttag

SEQ ID NO: 2103 - DNA, 20 bp, synthetic construct
  misc_feature 1..20: note = chemically synthesized
  source 1..20: mol_type = other DNA
ttttttttgtatttttagta

SEQ ID NO: 2104 - DNA, 20 bp, synthetic construct
  misc_feature 1..20: note = chemically synthesized
  source 1..20: mol_type = other DNA
ttttgtatttttagtagaga

SEQ ID NO: 2105 - DNA, 20 bp, synthetic construct
  misc_feature 1..20: note = chemically synthesized
  source 1..20: mol_type = other DNA
ttgtatttttagtagagatg

SEQ ID NO: 2106 - DNA, 20 bp, synthetic construct
  misc_feature 1..20: note = chemically synthesized
  source 1..20: mol_type = other DNA
gagatggagtttcaccatgt

SEQ ID NO: 2107 - DNA, 20 bp, synthetic construct
  misc_feature 1..20: note = chemically synthesized
  source 1..20: mol_type = other DNA
tggagtttcaccatgttggc

SEQ ID NO: 2108 - DNA, 20 bp, synthetic construct
  misc_feature 1..20: note = chemically synthesized
  source 1..20: mol_type = other DNA
ggagtttcaccatgttggcc

SEQ ID NO: 2109 - DNA, 20 bp, synthetic construct
  misc_feature 1..20: note = chemically synthesized
  source 1..20: mol_type = other DNA
tttcaccatgttggccaggc

SEQ ID NO: 2110 - DNA, 20 bp, synthetic construct
  misc_feature 1..20: note = chemically synthesized
  source 1..20: mol_type = other DNA
ctcaaatgatccgccctttt

SEQ ID NO: 2111 - DNA, 20 bp, synthetic construct
  misc_feature 1..20: note = chemically synthesized
  source 1..20: mol_type = other DNA
ccgccctttttggcctccca

SEQ ID NO: 2112 - DNA, 20 bp, synthetic construct
  misc_feature 1..20: note = chemically synthesized
  source 1..20: mol_type = other DNA
tttttggcctcccaaagtgc

SEQ ID NO: 2113 - DNA, 20 bp, synthetic construct
  misc_feature 1..20: note = chemically synthesized
  source 1..20: mol_type = other DNA
ttttggcctcccaaagtgct

SEQ ID NO: 2114 - DNA, 20 bp, synthetic construct
  misc_feature 1..20: note = chemically synthesized
  source 1..20: mol_type = other DNA
ctcccaaagtgctgggatta

SEQ ID NO: 2115 - DNA, 20 bp, synthetic construct
  misc_feature 1..20: note = chemically synthesized
  source 1..20: mol_type = other DNA
tcccaaagtgctgggattac

SEQ ID NO: 2116 - DNA, 20 bp, synthetic construct
  misc_feature 1..20: note = chemically synthesized
  source 1..20: mol_type = other DNA
agtgctgggattacaggcgt

SEQ ID NO: 2117 - DNA, 20 bp, synthetic construct
  misc_feature 1..20: note = chemically synthesized
  source 1..20: mol_type = other DNA
caggcgtgagctaccgcgcc

SEQ ID NO: 2118 - DNA, 20 bp, synthetic construct
  misc_feature 1..20: note = chemically synthesized
  source 1..20: mol_type = other DNA
taacttgttttgttgttgtt

SEQ ID NO: 2119 - DNA, 20 bp, synthetic construct
  misc_feature 1..20: note = chemically synthesized
  source 1..20: mol_type = other DNA
ttgttttgttgttgttgaga

SEQ ID NO: 2120 - DNA, 20 bp, synthetic construct
  misc_feature 1..20: note = chemically synthesized
  source 1..20: mol_type = other DNA
tgttttgttgttgttgagac

SEQ ID NO: 2121 - DNA, 20 bp, synthetic construct
  misc_feature 1..20: note = chemically synthesized
  source 1..20: mol_type = other DNA
gttttgttgttgttgagaca

SEQ ID NO: 2122 - DNA, 20 bp, synthetic construct
  misc_feature 1..20: note = chemically synthesized
  source 1..20: mol_type = other DNA
ttgttgttgagacagggtct

SEQ ID NO: 2123 - DNA, 20 bp, synthetic construct
  misc_feature 1..20: note = chemically synthesized
  source 1..20: mol_type = other DNA
cagggtctcagtctgacacc

SEQ ID NO: 2124 - DNA, 20 bp, synthetic construct
  misc_feature 1..20: note = chemically synthesized
  source 1..20: mol_type = other DNA
agggtctcagtctgacacca

SEQ ID NO: 2125 - DNA, 20 bp, synthetic construct
  misc_feature 1..20: note = chemically synthesized
  source 1..20: mol_type = other DNA
tctcagtctgacaccaaggc

SEQ ID NO: 2126 - DNA, 20 bp, synthetic construct
  misc_feature 1..20: note = chemically synthesized
  source 1..20: mol_type = other DNA
ctgacaccaaggctggtgtg

SEQ ID NO: 2127 - DNA, 20 bp, synthetic construct
  misc_feature 1..20: note = chemically synthesized
  source 1..20: mol_type = other DNA
ggtgtgcagtactgcgatca

SEQ ID NO: 2128 - DNA, 20 bp, synthetic construct
  misc_feature 1..20: note = chemically synthesized
  source 1..20: mol_type = other DNA
actgcgatcacggctcactg

SEQ ID NO: 2129 - DNA, 20 bp, synthetic construct
  misc_feature 1..20: note = chemically synthesized
  source 1..20: mol_type = other DNA
cactgcagtctcgacctcct

SEQ ID NO: 2130 - DNA, 20 bp, synthetic construct
  misc_feature 1..20: note = chemically synthesized
  source 1..20: mol_type = other DNA
agtctcgacctcctgagctc

SEQ ID NO: 2131 - DNA, 20 bp, synthetic construct
  misc_feature 1..20: note = chemically synthesized
  source 1..20: mol_type = other DNA
ctcaagtgatcctcccacct

SEQ ID NO: 2132 - DNA, 20 bp, synthetic construct
  misc_feature 1..20: note = chemically synthesized
  source 1..20: mol_type = other DNA
tcctcccacctcagcctact

SEQ ID NO: 2133 - DNA, 20 bp, synthetic construct
  misc_feature 1..20: note = chemically synthesized
  source 1..20: mol_type = other DNA
tcccacctcagcctactgag

SEQ ID NO: 2134 - DNA, 20 bp, synthetic construct
  misc_feature 1..20: note = chemically synthesized
  source 1..20: mol_type = other DNA
acctcagcctactgagtagc

SEQ ID NO: 2135 - DNA, 20 bp, synthetic construct
  misc_feature 1..20: note = chemically synthesized
  source 1..20: mol_type = other DNA
cctcagcctactgagtagct

SEQ ID NO: 2136 - DNA, 20 bp, synthetic construct
  misc_feature 1..20: note = chemically synthesized
  source 1..20: mol_type = other DNA
gtagctgggaccaccacgcc

SEQ ID NO: 2137 - DNA, 20 bp, synthetic construct
  misc_feature 1..20: note = chemically synthesized
  source 1..20: mol_type = other DNA
ttttctattatttattgaaa

SEQ ID NO: 2138 - DNA, 20 bp, synthetic construct
  misc_feature 1..20: note = chemically synthesized
  source 1..20: mol_type = other DNA
tttctattatttattgaaac

SEQ ID NO: 2139 - DNA, 20 bp, synthetic construct
  misc_feature 1..20: note = chemically synthesized
  source 1..20: mol_type = other DNA
ttatttattgaaacgggttc

SEQ ID NO: 2140 - DNA, 20 bp, synthetic construct
  misc_feature 1..20: note = chemically synthesized
  source 1..20: mol_type = other DNA
cgggttctggctatgttgcc

SEQ ID NO: 2141 - DNA, 20 bp, synthetic construct
  misc_feature 1..20: note = chemically synthesized
  source 1..20: mol_type = other DNA
gggttctggctatgttgccc

SEQ ID NO: 2142 - DNA, 20 bp, synthetic construct
  misc_feature 1..20: note = chemically synthesized
  source 1..20: mol_type = other DNA
tctggctatgttgcccaggt

SEQ ID NO: 2143 - DNA, 20 bp, synthetic construct
  misc_feature 1..20: note = chemically synthesized
  source 1..20: mol_type = other DNA
cccaggttggtcttgaactc

SEQ ID NO: 2144 - DNA, 20 bp, synthetic construct
  misc_feature 1..20: note = chemically synthesized
  source 1..20: mol_type = other DNA
caggttggtcttgaactccg

SEQ ID NO: 2145 - DNA, 20 bp, synthetic construct
  misc_feature 1..20: note = chemically synthesized
  source 1..20: mol_type = other DNA
ctcatgcgatccacccacct

SEQ ID NO: 2146 - DNA, 20 bp, synthetic construct
  misc_feature 1..20: note = chemically synthesized
  source 1..20: mol_type = other DNA
ccacccacctcagcgtccga

SEQ ID NO: 2147 - DNA, 20 bp, synthetic construct
  misc_feature 1..20: note = chemically synthesized
  source 1..20: mol_type = other DNA
cacccacctcagcgtccgaa

SEQ ID NO: 2148 - DNA, 20 bp, synthetic construct
  misc_feature 1..20: note = chemically synthesized
  source 1..20: mol_type = other DNA
tcagcgtccgaaaggattat

SEQ ID NO: 2149 - DNA, 20 bp, synthetic construct
  misc_feature 1..20: note = chemically synthesized
  source 1..20: mol_type = other DNA
cagcgtccgaaaggattatc

SEQ ID NO: 2150 - DNA, 20 bp, synthetic construct
  misc_feature 1..20: note = chemically synthesized
  source 1..20: mol_type = other DNA
gcgtccgaaaggattatcag

SEQ ID NO: 2151 - DNA, 20 bp, synthetic construct
  misc_feature 1..20: note = chemically synthesized
  source 1..20: mol_type = other DNA
ccgaaaggattatcaggagt

SEQ ID NO: 2152 - DNA, 20 bp, synthetic construct
  misc_feature 1..20: note = chemically synthesized
  source 1..20: mol_type = other DNA
caggagtgagccaccgtgcc

SEQ ID NO: 2153 - DNA, 20 bp, synthetic construct
  misc_feature 1..20: note = chemically synthesized
  source 1..20: mol_type = other DNA
catttattctctttatcatt

SEQ ID NO: 2154 - DNA, 20 bp, synthetic construct
  misc_feature 1..20: note = chemically synthesized
  source 1..20: mol_type = other DNA
atttattctctttatcattc

SEQ ID NO: 2155 - DNA, 20 bp, synthetic construct
  misc_feature 1..20: note = chemically synthesized
  source 1..20: mol_type = other DNA
tttattctctttatcattca

SEQ ID NO: 2156 - DNA, 20 bp, synthetic construct
  misc_feature 1..20: note = chemically synthesized
  source 1..20: mol_type = other DNA
tattctctttatcattcagg

SEQ ID NO: 2157 - DNA, 20 bp, synthetic construct
  misc_feature 1..20: note = chemically synthesized
  source 1..20: mol_type = other DNA
ttatcattcagggagaaatt

SEQ ID NO: 2158 - DNA, 20 bp, synthetic construct
  misc_feature 1..20: note = chemically synthesized
  source 1..20: mol_type = other DNA
tatcattcagggagaaattt

SEQ ID NO: 2159 - DNA, 20 bp, synthetic construct
  misc_feature 1..20: note = chemically synthesized
  source 1..20: mol_type = other DNA
atcattcagggagaaatttg

SEQ ID NO: 2160 - DNA, 20 bp, synthetic construct
  misc_feature 1..20: note = chemically synthesized
  source 1..20: mol_type = other DNA
ttcagggagaaatttgggga

SEQ ID NO: 2161 - DNA, 20 bp, synthetic construct
  misc_feature 1..20: note = chemically synthesized
  source 1..20: mol_type = other DNA
gggagaaatttggggatgga

SEQ ID NO: 2162 - DNA, 20 bp, synthetic construct
  misc_feature 1..20: note = chemically synthesized
  source 1..20: mol_type = other DNA
tttggggatggatagccttg

SEQ ID NO: 2163 - DNA, 20 bp, synthetic construct
  misc_feature 1..20: note = chemically synthesized
  source 1..20: mol_type = other DNA
gccttgaagcatcatccacc

SEQ ID NO: 2164 - DNA, 20 bp, synthetic construct
  misc_feature 1..20: note = chemically synthesized
  source 1..20: mol_type = other DNA
caccaagttattttatacac

SEQ ID NO: 2165 - DNA, 20 bp, synthetic construct
  misc_feature 1..20: note = chemically synthesized
  source 1..20: mol_type = other DNA
gttattttatacaccagatt

SEQ ID NO: 2166 - DNA, 20 bp, synthetic construct
  misc_feature 1..20: note = chemically synthesized
  source 1..20: mol_type = other DNA
atacaccagatttagataca

SEQ ID NO: 2167 - DNA, 20 bp, synthetic construct
  misc_feature 1..20: note = chemically synthesized
  source 1..20: mol_type = other DNA
tatttaaaaaaatcaaattc

SEQ ID NO: 2168 - DNA, 20 bp, synthetic construct
  misc_feature 1..20: note = chemically synthesized
  source 1..20: mol_type = other DNA
aaattctagcttttactctg

SEQ ID NO: 2169 - DNA, 20 bp, synthetic construct
  misc_feature 1..20: note = chemically synthesized
  source 1..20: mol_type = other DNA
tttactctgaagattctaaa

SEQ ID NO: 2170 - DNA, 20 bp, synthetic construct
  misc_feature 1..20: note = chemically synthesized
  source 1..20: mol_type = other DNA
gaagattctaaaaagaattt

SEQ ID NO: 2171 - DNA, 20 bp, synthetic construct
  misc_feature 1..20: note = chemically synthesized
  source 1..20: mol_type = other DNA
agattctaaaaagaattttg

SEQ ID NO: 2172 - DNA, 20 bp, synthetic construct
  misc_feature 1..20: note = chemically synthesized
  source 1..20: mol_type = other DNA
ggagtctttaattcatactt

SEQ ID NO: 2173 - DNA, 20 bp, synthetic construct
  misc_feature 1..20: note = chemically synthesized
  source 1..20: mol_type = other DNA
gagtctttaattcatacttc

SEQ ID NO: 2174 - DNA, 20 bp, synthetic construct
  misc_feature 1..20: note = chemically synthesized
  source 1..20: mol_type = other DNA
agtctttaattcatacttca

SEQ ID NO: 2175 - DNA, 20 bp, synthetic construct
  misc_feature 1..20: note = chemically synthesized
  source 1..20: mol_type = other DNA
gtctttaattcatacttcag

SEQ ID NO: 2176 - DNA, 20 bp, synthetic construct
  misc_feature 1..20: note = chemically synthesized
  source 1..20: mol_type = other DNA
tttaattcatacttcagggg

SEQ ID NO: 2177 - DNA, 20 bp, synthetic construct
  misc_feature 1..20: note = chemically synthesized
  source 1..20: mol_type = other DNA
ttaattcatacttcaggggc

SEQ ID NO: 2178 - DNA, 20 bp, synthetic construct
  misc_feature 1..20: note = chemically synthesized
  source 1..20: mol_type = other DNA
taattcatacttcaggggca

SEQ ID NO: 2179 - DNA, 20 bp, synthetic construct
  misc_feature 1..20: note = chemically synthesized
  source 1..20: mol_type = other DNA
aattcatacttcaggggcag

SEQ ID NO: 2180 - DNA, 20 bp, synthetic construct
  misc_feature 1..20: note = chemically synthesized
  source 1..20: mol_type = other DNA
tacttcaggggcaggggaat

SEQ ID NO: 2181 - DNA, 20 bp, synthetic construct
  misc_feature 1..20: note = chemically synthesized
  source 1..20: mol_type = other DNA
accaatattcgtataacttt

SEQ ID NO: 2182 - DNA, 20 bp, synthetic construct
  misc_feature 1..20: note = chemically synthesized
  source 1..20: mol_type = other DNA
attcgtataactttcagtgc

SEQ ID NO: 2183 - DNA, 20 bp, synthetic construct
  misc_feature 1..20: note = chemically synthesized
  source 1..20: mol_type = other DNA
actttcagtgcaagtcacgt

SEQ ID NO: 2184 - DNA, 20 bp, synthetic construct
  misc_feature 1..20: note = chemically synthesized
  source 1..20: mol_type = other DNA
caagtcacgttagctaactg

SEQ ID NO: 2185 - DNA, 20 bp, synthetic construct
  misc_feature 1..20: note = chemically synthesized
  source 1..20: mol_type = other DNA
ttagctaactgtagtctatt

SEQ ID NO: 2186 - DNA, 20 bp, synthetic construct
  misc_feature 1..20: note = chemically synthesized
  source 1..20: mol_type = other DNA
ttgatttattccttaaaact

SEQ ID NO: 2187 - DNA, 20 bp, synthetic construct
  misc_feature 1..20: note = chemically synthesized
  source 1..20: mol_type = other DNA
ttaaaactgagtcactatga

SEQ ID NO: 2188 - DNA, 20 bp, synthetic construct
  misc_feature 1..20: note = chemically synthesized
  source 1..20: mol_type = other DNA
cttttttgtttttttttttc

SEQ ID NO: 2189 - DNA, 20 bp, synthetic construct
  misc_feature 1..20: note = chemically synthesized
  source 1..20: mol_type = other DNA
tttgtttttttttttcgaga

SEQ ID NO: 2190 - DNA, 20 bp, synthetic construct
  misc_feature 1..20: note = chemically synthesized
  source 1..20: mol_type = other DNA
tgtttttttttttcgagacg

SEQ ID NO: 2191 - DNA, 20 bp, synthetic construct
  misc_feature 1..20: note = chemically synthesized
  source 1..20: mol_type = other DNA
acggagctcgccctgtctcc

SEQ ID NO: 2192 - DNA, 20 bp, synthetic construct
  misc_feature 1..20: note = chemically synthesized
  source 1..20: mol_type = other DNA
cggagctcgccctgtctccc

SEQ ID NO: 2193 - DNA, 20 bp, synthetic construct
  misc_feature 1..20: note = chemically synthesized
  source 1..20: mol_type = other DNA
gctcgccctgtctcccaggc

SEQ ID NO: 2194 - DNA, 20 bp, synthetic construct
  misc_feature 1..20: note = chemically synthesized
  source 1..20: mol_type = other DNA
tcgccctgtctcccaggctg

SEQ ID NO: 2195 - DNA, 20 bp, synthetic construct
  misc_feature 1..20: note = chemically synthesized
  source 1..20: mol_type = other DNA
ctgtctcccaggctggagtg

SEQ ID NO: 2196 - DNA, 20 bp, synthetic construct
  misc_feature 1..20: note = chemically synthesized
  source 1..20: mol_type = other DNA
tctcccaggctggagtgcgg

SEQ ID NO: 2197 - DNA, 20 bp, synthetic construct
  misc_feature 1..20: note = chemically synthesized
  source 1..20: mol_type = other DNA
ggagtgcggtggtgcgatct

SEQ ID NO: 2198 - DNA, 20 bp, synthetic construct
  misc_feature 1..20: note = chemically synthesized
  source 1..20: mol_type = other DNA
tcactgcaatctccgcctcc

SEQ ID NO: 2199 - DNA, 20 bp, synthetic construct
  misc_feature 1..20: note = chemically synthesized
  source 1..20: mol_type = other DNA
cactgcaatctccgcctccc

SEQ ID NO: 2200 - DNA, 20 bp, synthetic construct
  misc_feature 1..20: note = chemically synthesized
  source 1..20: mol_type = other DNA
aatctccgcctcccaggttc

SEQ ID NO: 2201 - DNA, 20 bp, synthetic construct
  misc_feature 1..20: note = chemically synthesized
  source 1..20: mol_type = other DNA
ttcaagcgattctcctgccc

SEQ ID NO: 2202 - DNA, 20 bp, synthetic construct
  misc_feature 1..20: note = chemically synthesized
  source 1..20: mol_type = other DNA
ttctcctgccccagcctcct

SEQ ID NO: 2203 - DNA, 20 bp, synthetic construct
  misc_feature 1..20: note = chemically synthesized
  source 1..20: mol_type = other DNA
tcctgccccagcctcctgag

SEQ ID NO: 2204 - DNA, 20 bp, synthetic construct
  misc_feature 1..20: note = chemically synthesized
  source 1..20: mol_type = other DNA
gccccagcctcctgagtagc

SEQ ID NO: 2205 - DNA, 20 bp, synthetic construct
  misc_feature 1..20: note = chemically synthesized
  source 1..20: mol_type = other DNA
ccccagcctcctgagtagct

SEQ ID NO: 2206 - DNA, 20 bp, synthetic construct
  misc_feature 1..20: note = chemically synthesized
  source 1..20: mol_type = other DNA
ctcctgagtagctgggacta

SEQ ID NO: 2207 - DNA, 20 bp, synthetic construct
  misc_feature 1..20: note = chemically synthesized
  source 1..20: mol_type = other DNA
tcctgagtagctgggactac

SEQ ID NO: 2208 - DNA, 20 bp, synthetic construct
  misc_feature 1..20: note = chemically synthesized
  source 1..20: mol_type = other DNA
caggcacacaccaccacgcc

SEQ ID NO: 2209 - DNA, 20 bp, synthetic construct
  misc_feature 1..20: note = chemically synthesized
  source 1..20: mol_type = other DNA
ccagctaatgtttgtatttt

SEQ ID NO: 2210 - DNA, 20 bp, synthetic construct
  misc_feature 1..20: note = chemically synthesized
  source 1..20: mol_type = other DNA
gctaatgtttgtatttttag

SEQ ID NO: 2211 - DNA, 20 bp, synthetic construct
  misc_feature 1..20: note = chemically synthesized
  source 1..20: mol_type = other DNA
taatgtttgtatttttagta

SEQ ID NO: 2212 - DNA, 20 bp, synthetic construct
  misc_feature 1..20: note = chemically synthesized
  source 1..20: mol_type = other DNA
gtttgtatttttagtagaga

SEQ ID NO: 2213 - DNA, 20 bp, synthetic construct
  misc_feature 1..20: note = chemically synthesized
  source 1..20: mol_type = other DNA
tttgtatttttagtagagac

SEQ ID NO: 2214 - DNA, 20 bp, synthetic construct
  misc_feature 1..20: note = chemically synthesized
  source 1..20: mol_type = other DNA
ttgtatttttagtagagaca

SEQ ID NO: 2215 - DNA, 20 bp, synthetic construct
  misc_feature 1..20: note = chemically synthesized
  source 1..20: mol_type = other DNA
gagacagggtttcatcattt

SEQ ID NO: 2216 - DNA, 20 bp, synthetic construct
  misc_feature 1..20: note = chemically synthesized
  source 1..20: mol_type = other DNA
cagggtttcatcattttggt

SEQ ID NO: 2217 - DNA, 20 bp, synthetic construct
  misc_feature 1..20: note = chemically synthesized
  source 1..20: mol_type = other DNA
agggtttcatcattttggtc

SEQ ID NO: 2218 - DNA, 20 bp, synthetic construct
  misc_feature 1..20: note = chemically synthesized
  source 1..20: mol_type = other DNA
tttcatcattttggtcaggc

SEQ ID NO: 2219 - DNA, 20 bp, synthetic construct
  misc_feature 1..20: note = chemically synthesized
  source 1..20: mol_type = other DNA
tgaactcctgacctcgtgat

SEQ ID NO: 2220 - DNA, 20 bp, synthetic construct
  misc_feature 1..20: note = chemically synthesized
  source 1..20: mol_type = other DNA
cagcctgcctcgacctccca

SEQ ID NO: 2221 - DNA, 20 bp, synthetic construct
  misc_feature 1..20: note = chemically synthesized
  source 1..20: mol_type = other DNA
gcctcgacctcccaaagtgc

SEQ ID NO: 2222 - DNA, 20 bp, synthetic construct
  misc_feature 1..20: note = chemically synthesized
  source 1..20: mol_type = other DNA
cctcgacctcccaaagtgct

SEQ ID NO: 2223 - DNA, 20 bp, synthetic construct
  misc_feature 1..20: note = chemically synthesized
  source 1..20: mol_type = other DNA
ctcccaaagtgctgggatta

SEQ ID NO: 2224 - DNA, 20 bp, synthetic construct
  misc_feature 1..20: note = chemically synthesized
  source 1..20: mol_type = other DNA
agtgctgggattacagtcat

SEQ ID NO: 2225 - DNA, 20 bp, synthetic construct
  misc_feature 1..20: note = chemically synthesized
  source 1..20: mol_type = other DNA
cagtcatgagccactgcacc

SEQ ID NO: 2226 - DNA, 20 bp, synthetic construct
  misc_feature 1..20: note = chemically synthesized
  source 1..20: mol_type = other DNA
agccactgcacccggctgaa

SEQ ID NO: 2227 - DNA, 20 bp, synthetic construct
  misc_feature 1..20: note = chemically synthesized
  source 1..20: mol_type = other DNA
tgaatggcactttcataaaa

SEQ ID NO: 2228 - DNA, 20 bp, synthetic construct
  misc_feature 1..20: note = chemically synthesized
  source 1..20: mol_type = other DNA
ccaacttcactactgccccc

SEQ ID NO: 2229 - DNA, 20 bp, synthetic construct
  misc_feature 1..20: note = chemically synthesized
  source 1..20: mol_type = other DNA
aacttcactactgcccccaa

SEQ ID NO: 2230 - DNA, 20 bp, synthetic construct
  misc_feature 1..20: note = chemically synthesized
  source 1..20: mol_type = other DNA
aagagttttactatgtatat

SEQ ID NO: 2231 - DNA, 20 bp, synthetic construct
  misc_feature 1..20: note = chemically synthesized
  source 1..20: mol_type = other DNA
agagttttactatgtatatg

SEQ ID NO: 2232 - DNA, 20 bp, synthetic construct
  misc_feature 1..20: note = chemically synthesized
  source 1..20: mol_type = other DNA
gagttttactatgtatatga

SEQ ID NO: 2233 - DNA, 20 bp, synthetic construct
  misc_feature 1..20: note = chemically synthesized
  source 1..20: mol_type = other DNA
tatatgagggcatctgtttt

SEQ ID NO: 2234 - DNA, 20 bp, synthetic construct
  misc_feature 1..20: note = chemically synthesized
  source 1..20: mol_type = other DNA
gagggcatctgttttaagta

SEQ ID NO: 2235 - DNA, 20 bp, synthetic construct
  misc_feature 1..20: note = chemically synthesized
  source 1..20: mol_type = other DNA
agggcatctgttttaagtat

SEQ ID NO: 2236 - DNA, 20 bp, synthetic construct
  misc_feature 1..20: note = chemically synthesized
  source 1..20: mol_type = other DNA
taagtatgggtataatgtta

SEQ ID NO: 2237 - DNA, 20 bp, synthetic construct
  misc_feature 1..20: note = chemically synthesized
  source 1..20: mol_type = other DNA
aagtatgggtataatgttac

SEQ ID NO: 2238 - DNA, 20 bp, synthetic construct
  misc_feature 1..20: note = chemically synthesized
  source 1..20: mol_type = other DNA
ttacgggtttttctttgtgt

SEQ ID NO: 2239 - DNA, 20 bp, synthetic construct
  misc_feature 1..20: note = chemically synthesized
  source 1..20: mol_type = other DNA
ggtttttctttgtgtaagtt

SEQ ID NO: 2240 - DNA, 20 bp, synthetic construct
  misc_feature 1..20: note = chemically synthesized
  source 1..20: mol_type = other DNA
gtttttctttgtgtaagttt

SEQ ID NO: 2241 - DNA, 20 bp, synthetic construct
  misc_feature 1..20: note = chemically synthesized
  source 1..20: mol_type = other DNA
tgtgctttctgtgtgctatt

SEQ ID NO: 2242 - DNA, 20 bp, synthetic construct
  misc_feature 1..20: note = chemically synthesized
  source 1..20: mol_type = other DNA
ctttctgtgtgctattaaga

SEQ ID NO: 2243 - DNA, 20 bp, synthetic construct
  misc_feature 1..20: note = chemically synthesized
  source 1..20: mol_type = other DNA
gtgctattaagaaagtattc

SEQ ID NO: 2244 - DNA, 20 bp, synthetic construct
  misc_feature 1..20: note = chemically synthesized
  source 1..20: mol_type = other DNA
tgctattaagaaagtattca

SEQ ID NO: 2245 - DNA, 20 bp, synthetic construct
  misc_feature 1..20: note = chemically synthesized
  source 1..20: mol_type = other DNA
gctattaagaaagtattcaa

SEQ ID NO: 2246 - DNA, 20 bp, synthetic construct
  misc_feature 1..20: note = chemically synthesized
  source 1..20: mol_type = other DNA
aatttttgaaacaaatgttt

SEQ ID NO: 2247 - DNA, 20 bp, synthetic construct
  misc_feature 1..20: note = chemically synthesized
  source 1..20: mol_type = other DNA
tttttgaaacaaatgtttaa

SEQ ID NO: 2248 - DNA, 20 bp, synthetic construct
  misc_feature 1..20: note = chemically synthesized
  source 1..20: mol_type = other DNA
tttgaaacaaatgtttaaga

SEQ ID NO: 2249 - DNA, 20 bp, synthetic construct
  misc_feature 1..20: note = chemically synthesized
  source 1..20: mol_type = other DNA
ttgaaacaaatgtttaagag

SEQ ID NO: 2250 - DNA, 20 bp, synthetic construct
  misc_feature 1..20: note = chemically synthesized
  source 1..20: mol_type = other DNA
tgtttaagagaggataatgt

SEQ ID NO: 2251 - DNA, 20 bp, synthetic construct
  misc_feature 1..20: note = chemically synthesized
  source 1..20: mol_type = other DNA
aatgttagaaattatctttc

SEQ ID NO: 2252 - DNA, 20 bp, synthetic construct
  misc_feature 1..20: note = chemically synthesized
  source 1..20: mol_type = other DNA
ttagaaattatctttccagc

SEQ ID NO: 2253 - DNA, 20 bp, synthetic construct
  misc_feature 1..20: note = chemically synthesized
  source 1..20: mol_type = other DNA
attatctttccagccagacc

SEQ ID NO: 2254 - DNA, 20 bp, synthetic construct
  misc_feature 1..20: note = chemically synthesized
  source 1..20: mol_type = other DNA
atctttccagccagacctgg

SEQ ID NO: 2255 - DNA, 20 bp, synthetic construct
  misc_feature 1..20: note = chemically synthesized
  source 1..20: mol_type = other DNA
ccagacctggtggctcacgc

SEQ ID NO: 2256 - DNA, 20 bp, synthetic construct
  misc_feature 1..20: note = chemically synthesized
  source 1..20: mol_type = other DNA
gtggctcacgccagtaatcc

SEQ ID NO: 2257 - DNA, 20 bp, synthetic construct
  misc_feature 1..20: note = chemically synthesized
  source 1..20: mol_type = other DNA
cgccagtaatcctagcattt

SEQ ID NO: 2258 - DNA, 20 bp, synthetic construct
  misc_feature 1..20: note = chemically synthesized
  source 1..20: mol_type = other DNA
gccagtaatcctagcatttt

SEQ ID NO: 2259 - DNA, 20 bp, synthetic construct
  misc_feature 1..20: note = chemically synthesized
  source 1..20: mol_type = other DNA
cagtaatcctagcattttgg

SEQ ID NO: 2260 - DNA, 20 bp, synthetic construct
  misc_feature 1..20: note = chemically synthesized
  source 1..20: mol_type = other DNA
agtaatcctagcattttggg

SEQ ID NO: 2261 - DNA, 20 bp, synthetic construct
  misc_feature 1..20: note = chemically synthesized
  source 1..20: mol_type = other DNA
tcctagcattttgggaggac

SEQ ID NO: 2262 - DNA, 20 bp, synthetic construct
  misc_feature 1..20: note = chemically synthesized
  source 1..20: mol_type = other DNA
cctagcattttgggaggaca

SEQ ID NO: 2263 - DNA, 20 bp, synthetic construct
  misc_feature 1..20: note = chemically synthesized
  source 1..20: mol_type = other DNA
agcattttgggaggacaagg

SEQ ID NO: 2264 - DNA, 20 bp, synthetic construct
  misc_feature 1..20: note = chemically synthesized
  source 1..20: mol_type = other DNA
gcattttgggaggacaaggt

SEQ ID NO: 2265 - DNA, 20 bp, synthetic construct
  misc_feature 1..20: note = chemically synthesized
  source 1..20: mol_type = other DNA
ttttgggaggacaaggtggg

SEQ ID NO: 2266 - DNA, 20 bp, synthetic construct
  misc_feature 1..20: note = chemically synthesized
  source 1..20: mol_type = other DNA
acaaggtgggcagatcactt

SEQ ID NO: 2267 - DNA, 20 bp, synthetic construct
  misc_feature 1..20: note = chemically synthesized
  source 1..20: mol_type = other DNA
gtgggcagatcacttaagcc

SEQ ID NO: 2268 - DNA, 20 bp, synthetic construct
  misc_feature 1..20: note = chemically synthesized
  source 1..20: mol_type = other DNA
tgggcagatcacttaagccc

SEQ ID NO: 2269 - DNA, 20 bp, synthetic construct
  misc_feature 1..20: note = chemically synthesized
  source 1..20: mol_type = other DNA
tcacttaagcccaggaattc

SEQ ID NO: 2270 - DNA, 20 bp, synthetic construct
  misc_feature 1..20: note = chemically synthesized
  source 1..20: mol_type = other DNA
taagcccaggaattcaagac

SEQ ID NO: 2271 - DNA, 20 bp, synthetic construct
  misc_feature 1..20: note = chemically synthesized
  source 1..20: mol_type = other DNA
ccaggaattcaagaccagcc

SEQ ID NO: 2272 - DNA, 20 bp, synthetic construct
  misc_feature 1..20: note = chemically synthesized
  source 1..20: mol_type = other DNA
caagaccagcctggacaaca

SEQ ID NO: 2273 - DNA, 20 bp, synthetic construct
  misc_feature 1..20: note = chemically synthesized
  source 1..20: mol_type = other DNA
aagaccagcctggacaacac

SEQ ID NO: 2274 - DNA, 20 bp, synthetic construct
  misc_feature 1..20: note = chemically synthesized
  source 1..20: mol_type = other DNA
agaccagcctggacaacaca

SEQ ID NO: 2275 - DNA, 20 bp, synthetic construct
  misc_feature 1..20: note = chemically synthesized
  source 1..20: mol_type = other DNA
cagcctggacaacacaggga

SEQ ID NO: 2276 - DNA, 20 bp, synthetic construct
  misc_feature 1..20: note = chemically synthesized
  source 1..20: mol_type = other DNA
ctctacaaaatatacaaaat

SEQ ID NO: 2277 - DNA, 20 bp, synthetic construct
  misc_feature 1..20: note = chemically synthesized
  source 1..20: mol_type = other DNA
tacaaaatatacaaaattag

SEQ ID NO: 2278 - DNA, 20 bp, synthetic construct
  misc_feature 1..20: note = chemically synthesized
  source 1..20: mol_type = other DNA
aatatacaaaattagtggcc

SEQ ID NO: 2279 - DNA, 20 bp, synthetic construct
  misc_feature 1..20: note = chemically synthesized
  source 1..20: mol_type = other DNA
acaaaattagtggccgagcg

SEQ ID NO: 2280 - DNA, 20 bp, synthetic construct
  misc_feature 1..20: note = chemically synthesized
  source 1..20: mol_type = other DNA
aaattagtggccgagcgtgg

SEQ ID NO: 2281 - DNA, 20 bp, synthetic construct
  misc_feature 1..20: note = chemically synthesized
  source 1..20: mol_type = other DNA
gtggctcacgcctgtaatcc

SEQ ID NO: 2282 - DNA, 20 bp, synthetic construct
  misc_feature 1..20: note = chemically synthesized
  source 1..20: mol_type = other DNA
cgcctgtaatcccagcactt

SEQ ID NO: 2283 - DNA, 20 bp, synthetic construct
  misc_feature 1..20: note = chemically synthesized
  source 1..20: mol_type = other DNA
gcctgtaatcccagcacttt

SEQ ID NO: 2284 - DNA, 20 bp, synthetic construct
  misc_feature 1..20: note = chemically synthesized
  source 1..20: mol_type = other DNA
ctgtaatcccagcactttgg

SEQ ID NO: 2285 - DNA, 20 bp, synthetic construct
  misc_feature 1..20: note = chemically synthesized
  source 1..20: mol_type = other DNA
tgtaatcccagcactttggg

SEQ ID NO: 2286 - DNA, 20 bp, synthetic construct
  misc_feature 1..20: note = chemically synthesized
  source 1..20: mol_type = other DNA
tcccagcactttgggaggcc

SEQ ID NO: 2287 - DNA, 20 bp, synthetic construct
  misc_feature 1..20: note = chemically synthesized
  source 1..20: mol_type = other DNA
cccagcactttgggaggccg

SEQ ID NO: 2288 - DNA, 20 bp, synthetic construct
  misc_feature 1..20: note = chemically synthesized
  source 1..20: mol_type = other DNA
agcactttgggaggccgagg

SEQ ID NO: 2289 - DNA, 20 bp, synthetic construct
  misc_feature 1..20: note = chemically synthesized
  source 1..20: mol_type = other DNA
gcactttgggaggccgaggc

SEQ ID NO: 2290 - DNA, 20 bp, synthetic construct
  misc_feature 1..20: note = chemically synthesized
  source 1..20: mol_type = other DNA
ctttgggaggccgaggcggg

SEQ ID NO: 2291 - DNA, 20 bp, synthetic construct
  misc_feature 1..20: note = chemically synthesized
  source 1..20: mol_type = other DNA
ccgaggcgggcagatcacct

SEQ ID NO: 2292 - DNA, 20 bp, synthetic construct
  misc_feature 1..20: note = chemically synthesized
  source 1..20: mol_type = other DNA
cgaggcgggcagatcacctg

SEQ ID NO: 2293 - DNA, 20 bp, synthetic construct
  misc_feature 1..20: note = chemically synthesized
  source 1..20: mol_type = other DNA
gcgggcagatcacctgaggt

SEQ ID NO: 2294 - DNA, 20 bp, synthetic construct
  misc_feature 1..20: note = chemically synthesized
  source 1..20: mol_type = other DNA
cgggcagatcacctgaggtc

SEQ ID NO: 2295 - DNA, 20 bp, synthetic construct
  misc_feature 1..20: note = chemically synthesized
  source 1..20: mol_type = other DNA
ggcagatcacctgaggtcag

SEQ ID NO: 2296 - DNA, 20 bp, synthetic construct
  misc_feature 1..20: note = chemically synthesized
  source 1..20: mol_type = other DNA
tcacctgaggtcaggagttc

SEQ ID NO: 2297 - DNA, 20 bp, synthetic construct
  misc_feature 1..20: note = chemically synthesized
  source 1..20: mol_type = other DNA
tgaggtcaggagttccagac

SEQ ID NO: 2298 - DNA, 20 bp, synthetic construct
  misc_feature 1..20: note = chemically synthesized
  source 1..20: mol_type = other DNA
gttccagaccagcctcaaca

SEQ ID NO: 2299 - DNA, 20 bp, synthetic construct
  misc_feature 1..20: note = chemically synthesized
  source 1..20: mol_type = other DNA
tccagaccagcctcaacatg

SEQ ID NO: 2300 - DNA, 20 bp, synthetic construct
  misc_feature 1..20: note = chemically synthesized
  source 1..20: mol_type = other DNA
ctctactaaaaatacaaaat

SEQ ID NO: 2301 - DNA, 20 bp, synthetic construct
  misc_feature 1..20: note = chemically synthesized
  source 1..20: mol_type = other DNA
actaaaaatacaaaattagc

SEQ ID NO: 2302 - DNA, 20 bp, synthetic construct
  misc_feature 1..20: note = chemically synthesized
  source 1..20: mol_type = other DNA
ctaaaaatacaaaattagct

SEQ ID NO: 2303 - DNA, 20 bp, synthetic construct
  misc_feature 1..20: note = chemically synthesized
  source 1..20: mol_type = other DNA
aatacaaaattagctgggcg

SEQ ID NO: 2304 - DNA, 20 bp, synthetic construct
  misc_feature 1..20: note = chemically synthesized
  source 1..20: mol_type = other DNA
gtgatgcatgcctgtaatcc

SEQ ID NO: 2305 - DNA, 20 bp, synthetic construct
  misc_feature 1..20: note = chemically synthesized
  source 1..20: mol_type = other DNA
tgcctgtaatcccagctact

SEQ ID NO: 2306 - DNA, 20 bp, synthetic construct
  misc_feature 1..20: note = chemically synthesized
  source 1..20: mol_type = other DNA
gcctgtaatcccagctactc

SEQ ID NO: 2307 - DNA, 20 bp, synthetic construct
  misc_feature 1..20: note = chemically synthesized
  source 1..20: mol_type = other DNA
ctgtaatcccagctactcgg

SEQ ID NO: 2308 - DNA, 20 bp, synthetic construct
  misc_feature 1..20: note = chemically synthesized
  source 1..20: mol_type = other DNA
tgtaatcccagctactcggg

SEQ ID NO: 2309 - DNA, 20 bp, synthetic construct
  misc_feature 1..20: note = chemically synthesized
  source 1..20: mol_type = other DNA
tcccagctactcgggaggct

SEQ ID NO: 2310 - DNA, 20 bp, synthetic construct
  misc_feature 1..20: note = chemically synthesized
  source 1..20: mol_type = other DNA
cccagctactcgggaggctg

SEQ ID NO: 2311 - DNA, 20 bp, synthetic construct
  misc_feature 1..20: note = chemically synthesized
  source 1..20: mol_type = other DNA
agctactcgggaggctgagg

SEQ ID NO: 2312 - DNA, 20 bp, synthetic construct
  misc_feature 1..20: note = chemically synthesized
  source 1..20: mol_type = other DNA
gctactcgggaggctgaggc

SEQ ID NO: 2313 - DNA, 20 bp, synthetic construct
  misc_feature 1..20: note = chemically synthesized
  source 1..20: mol_type = other DNA
tactcgggaggctgaggcag

SEQ ID NO: 2314 - DNA, 20 bp, synthetic construct
  misc_feature 1..20: note = chemically synthesized
  source 1..20: mol_type = other DNA
gcaggagaattgcttgaacc

SEQ ID NO: 2315 - DNA, 20 bp, synthetic construct
  misc_feature 1..20: note = chemically synthesized
  source 1..20: mol_type = other DNA
caggagaattgcttgaacct

SEQ ID NO: 2316 - DNA, 20 bp, synthetic construct
  misc_feature 1..20: note = chemically synthesized
  source 1..20: mol_type = other DNA
ggagaattgcttgaacctgg

SEQ ID NO: 2317 - DNA, 20 bp, synthetic construct
  misc_feature 1..20: note = chemically synthesized
  source 1..20: mol_type = other DNA
gagaattgcttgaacctggg

SEQ ID NO: 2318 - DNA, 20 bp, synthetic construct
  misc_feature 1..20: note = chemically synthesized
  source 1..20: mol_type = other DNA
aattgcttgaacctgggagg

SEQ ID NO: 2319 - DNA, 20 bp, synthetic construct
  misc_feature 1..20: note = chemically synthesized
  source 1..20: mol_type = other DNA
ttgcttgaacctgggaggta

SEQ ID NO: 2320 - DNA, 20 bp, synthetic construct
  misc_feature 1..20: note = chemically synthesized
  source 1..20: mol_type = other DNA
tgcttgaacctgggaggtag

SEQ ID NO: 2321 - DNA, 20 bp, synthetic construct
  misc_feature 1..20: note = chemically synthesized
  source 1..20: mol_type = other DNA
aacctgggaggtagaggttg

SEQ ID NO: 2322 - DNA, 20 bp, synthetic construct
  misc_feature 1..20: note = chemically synthesized
  source 1..20: mol_type = other DNA
tgggaggtagaggttgcggt

SEQ ID NO: 2323 - DNA, 20 bp, synthetic construct
  misc_feature 1..20: note = chemically synthesized
  source 1..20: mol_type = other DNA
ggtagaggttgcggtgagcc

SEQ ID NO: 2324 - DNA, 20 bp, synthetic construct
  misc_feature 1..20: note = chemically synthesized
  source 1..20: mol_type = other DNA
gagatcccgccattgcactc

SEQ ID NO: 2325 - DNA, 20 bp, synthetic construct
  misc_feature 1..20: note = chemically synthesized
  source 1..20: mol_type = other DNA
cccgccattgcactccagcc

SEQ ID NO: 2326 - DNA, 20 bp, synthetic construct
  misc_feature 1..20: note = chemically synthesized
  source 1..20: mol_type = other DNA
ccgccattgcactccagcct

SEQ ID NO: 2327 - DNA, 20 bp, synthetic construct
  misc_feature 1..20: note = chemically synthesized
  source 1..20: mol_type = other DNA
tgcactccagcctgggcaac

SEQ ID NO: 2328 - DNA, 20 bp, synthetic construct
  misc_feature 1..20: note = chemically synthesized
  source 1..20: mol_type = other DNA
cactccagcctgggcaacaa

SEQ ID NO: 2329 - DNA, 20 bp, synthetic construct
  misc_feature 1..20: note = chemically synthesized
  source 1..20: mol_type = other DNA
aacaaacaaataaacaaaat

SEQ ID NO: 2330 - DNA, 20 bp, synthetic construct
  misc_feature 1..20: note = chemically synthesized
  source 1..20: mol_type = other DNA
aacaaataaacaaaattagt

SEQ ID NO: 2331 - DNA, 20 bp, synthetic construct
  misc_feature 1..20: note = chemically synthesized
  source 1..20: mol_type = other DNA
acaaataaacaaaattagtc

SEQ ID NO: 2332 - DNA, 20 bp, synthetic construct
  misc_feature 1..20: note = chemically synthesized
  source 1..20: mol_type = other DNA
taaacaaaattagtcaggtg

SEQ ID NO: 2333 - DNA, 20 bp, synthetic construct
  misc_feature 1..20: note = chemically synthesized
  source 1..20: mol_type = other DNA
ggtgtggttgtgcacacctg

SEQ ID NO: 2334 - DNA, 20 bp, synthetic construct
  misc_feature 1..20: note = chemically synthesized
  source 1..20: mol_type = other DNA
gttgtgcacacctgtagtcc

SEQ ID NO: 2335 - DNA, 20 bp, synthetic construct
  misc_feature 1..20: note = chemically synthesized
  source 1..20: mol_type = other DNA
cacctgtagtcccagctact

SEQ ID NO: 2336 - DNA, 20 bp, synthetic construct
  misc_feature 1..20: note = chemically synthesized
  source 1..20: mol_type = other DNA
acctgtagtcccagctactt

SEQ ID NO: 2337 - DNA, 20 bp, synthetic construct
  misc_feature 1..20: note = chemically synthesized
  source 1..20: mol_type = other DNA
ctgtagtcccagctacttgg

SEQ ID NO: 2338 - DNA, 20 bp, synthetic construct
  misc_feature 1..20: note = chemically synthesized
  source 1..20: mol_type = other DNA
tgtagtcccagctacttggg

SEQ ID NO: 2339 - DNA, 20 bp, synthetic construct
  misc_feature 1..20: note = chemically synthesized
  source 1..20: mol_type = other DNA
tcccagctacttgggaggct

SEQ ID NO: 2340 - DNA, 20 bp, synthetic construct
  misc_feature 1..20: note = chemically synthesized
  source 1..20: mol_type = other DNA
cccagctacttgggaggctg

SEQ ID NO: 2341 - DNA, 20 bp, synthetic construct
  misc_feature 1..20: note = chemically synthesized
  source 1..20: mol_type = other DNA
agctacttgggaggctgagg

SEQ ID NO: 2342 - DNA, 20 bp, synthetic construct
  misc_feature 1..20: note = chemically synthesized
  source 1..20: mol_type = other DNA
gctacttgggaggctgaggt

SEQ ID NO: 2343 - DNA, 20 bp, synthetic construct
  misc_feature 1..20: note = chemically synthesized
  source 1..20: mol_type = other DNA
tacttgggaggctgaggtgg

SEQ ID NO: 2344 - DNA, 20 bp, synthetic construct
  misc_feature 1..20: note = chemically synthesized
  source 1..20: mol_type = other DNA
acttgggaggctgaggtggg

SEQ ID NO: 2345 - DNA, 20 bp, synthetic construct
  misc_feature 1..20: note = chemically synthesized
  source 1..20: mol_type = other DNA
ctgaggtgggaggatcactt

SEQ ID NO: 2346 - DNA, 20 bp, synthetic construct
  misc_feature 1..20: note = chemically synthesized
  source 1..20: mol_type = other DNA
gtgggaggatcacttgagcc

SEQ ID NO: 2347 - DNA, 20 bp, synthetic construct
  misc_feature 1..20: note = chemically synthesized
  source 1..20: mol_type = other DNA
tgggaggatcacttgagccc

SEQ ID NO: 2348 - DNA, 20 bp, synthetic construct
  misc_feature 1..20: note = chemically synthesized
  source 1..20: mol_type = other DNA
gggaggatcacttgagcccg

SEQ ID NO: 2349 - DNA, 20 bp, synthetic construct
  misc_feature 1..20: note = chemically synthesized
  source 1..20: mol_type = other DNA
aggatcacttgagcccgggg

SEQ ID NO: 2350 - DNA, 20 bp, synthetic construct
  misc_feature 1..20: note = chemically synthesized
  source 1..20: mol_type = other DNA
cacttgagcccggggaagtg

SEQ ID NO: 2351 - DNA, 20 bp, synthetic construct
  misc_feature 1..20: note = chemically synthesized
  source 1..20: mol_type = other DNA
acttgagcccggggaagtgt

SEQ ID NO: 2352 - DNA, 20 bp, synthetic construct
  misc_feature 1..20: note = chemically synthesized
  source 1..20: mol_type = other DNA
ggggaagtgtaggctaccat

SEQ ID NO: 2353 - DNA, 20 bp, synthetic construct
  misc_feature 1..20: note = chemically synthesized
  source 1..20: mol_type = other DNA
taggctaccatgagccatca

SEQ ID NO: 2354 - DNA, 20 bp, synthetic construct
  misc_feature 1..20: note = chemically synthesized
  source 1..20: mol_type = other DNA
atcatggtgccactgtactc

SEQ ID NO: 2355 - DNA, 20 bp, synthetic construct
  misc_feature 1..20: note = chemically synthesized
  source 1..20: mol_type = other DNA
ggtgccactgtactccagtc

SEQ ID NO: 2356 - DNA, 20 bp, synthetic construct
  misc_feature 1..20: note = chemically synthesized
  source 1..20: mol_type = other DNA
gtgccactgtactccagtct

SEQ ID NO: 2357 - DNA, 20 bp, synthetic construct
  misc_feature 1..20: note = chemically synthesized
  source 1..20: mol_type = other DNA
aaattttaaaatcttaaaaa

SEQ ID NO: 2358 - DNA, 20 bp, synthetic construct
  misc_feature 1..20: note = chemically synthesized
  source 1..20: mol_type = other DNA
ttaaaatcttaaaaaaagaa

SEQ ID NO: 2359 - DNA, 20 bp, synthetic construct
  misc_feature 1..20: note = chemically synthesized
  source 1..20: mol_type = other DNA
aagaaaagaaattttctgtc

SEQ ID NO: 2360 - DNA, 20 bp, synthetic construct
  misc_feature 1..20: note = chemically synthesized
  source 1..20: mol_type = other DNA
tctttatttttaacaaatcg

SEQ ID NO: 2361 - DNA, 20 bp, synthetic construct
  misc_feature 1..20: note = chemically synthesized
  source 1..20: mol_type = other DNA
aacaaatcgaagtgtattaa

SEQ ID NO: 2362 - DNA, 20 bp, synthetic construct
  misc_feature 1..20: note = chemically synthesized
  source 1..20: mol_type = other DNA
aagtgtattaatagtgttta

SEQ ID NO: 2363 - DNA, 20 bp, synthetic construct
  misc_feature 1..20: note = chemically synthesized
  source 1..20: mol_type = other DNA
agtgtattaatagtgtttat

SEQ ID NO: 2364 - DNA, 20 bp, synthetic construct
  misc_feature 1..20: note = chemically synthesized
  source 1..20: mol_type = other DNA
tgtattaatagtgtttatgg

SEQ ID NO: 2365 - DNA, 20 bp, synthetic construct
  misc_feature 1..20: note = chemically synthesized
  source 1..20: mol_type = other DNA
ttatgggagcgtgcccacac

SEQ ID NO: 2366 - DNA, 20 bp, synthetic construct
  misc_feature 1..20: note = chemically synthesized
  source 1..20: mol_type = other DNA
tatgggagcgtgcccacaca

SEQ ID NO: 2367 - DNA, 20 bp, synthetic construct
  misc_feature 1..20: note = chemically synthesized
  source 1..20: mol_type = other DNA
ggagcgtgcccacacaagga

SEQ ID NO: 2368 - DNA, 20 bp, synthetic construct
  misc_feature 1..20: note = chemically synthesized
  source 1..20: mol_type = other DNA
cgtgcccacacaaggacagc

SEQ ID NO: 2369 - DNA, 20 bp, synthetic construct
  misc_feature 1..20: note = chemically synthesized
  source 1..20: mol_type = other DNA
ccacacaaggacagcaagcc

SEQ ID NO: 2370 - DNA, 20 bp, synthetic construct
  misc_feature 1..20: note = chemically synthesized
  source 1..20: mol_type = other DNA
cacacaaggacagcaagcct

SEQ ID NO: 2371 - DNA, 20 bp, synthetic construct
  misc_feature 1..20: note = chemically synthesized
  source 1..20: mol_type = other DNA
acaaggacagcaagcctagg

SEQ ID NO: 2372 - DNA, 20 bp, synthetic construct
  misc_feature 1..20: note = chemically synthesized
  source 1..20: mol_type = other DNA
acagcaagcctaggaagtgc

SEQ ID NO: 2373 - DNA, 20 bp, synthetic construct
  misc_feature 1..20: note = chemically synthesized
  source 1..20: mol_type = other DNA
aagcctaggaagtgcaagtc

SEQ ID NO: 2374 - DNA, 20 bp, synthetic construct
  misc_feature 1..20: note = chemically synthesized
  source 1..20: mol_type = other DNA
gtgaaataatttaaactgaa

SEQ ID NO: 2375 - DNA, 20 bp, synthetic construct
  misc_feature 1..20: note = chemically synthesized
  source 1..20: mol_type = other DNA
taatttaaactgaaaagaaa

SEQ ID NO: 2376 - DNA, 20 bp, synthetic construct
  misc_feature 1..20: note = chemically synthesized
  source 1..20: mol_type = other DNA
tttaaactgaaaagaaaaag

SEQ ID NO: 2377 - DNA, 20 bp, synthetic construct
  misc_feature 1..20: note = chemically synthesized
  source 1..20: mol_type = other DNA
taaactgaaaagaaaaagca

SEQ ID NO: 2378 - DNA, 20 bp, synthetic construct
  misc_feature 1..20: note = chemically synthesized
  source 1..20: mol_type = other DNA
aaaaagcagagatttttttc

SEQ ID NO: 2379 - DNA, 20 bp, synthetic construct
  misc_feature 1..20: note = chemically synthesized
  source 1..20: mol_type = other DNA
gcagagatttttttctagaa

SEQ ID NO: 2380 - DNA, 20 bp, synthetic construct
  misc_feature 1..20: note = chemically synthesized
  source 1..20: mol_type = other DNA
agatttttttctagaaaagt

SEQ ID NO: 2381 - DNA, 20 bp, synthetic construct
  misc_feature 1..20: note = chemically synthesized
  source 1..20: mol_type = other DNA
gatttttttctagaaaagta

SEQ ID NO: 2382 - DNA, 20 bp, synthetic construct
  misc_feature 1..20: note = chemically synthesized
  source 1..20: mol_type = other DNA
tttttttctagaaaagtaag

SEQ ID NO: 2383 - DNA, 20 bp, synthetic construct
  misc_feature 1..20: note = chemically synthesized
  source 1..20: mol_type = other DNA
ttttctagaaaagtaaggag

SEQ ID NO: 2384 - DNA, 20 bp, synthetic construct
  misc_feature 1..20: note = chemically synthesized
  source 1..20: mol_type = other DNA
ttctagaaaagtaaggagtg

SEQ ID NO: 2385 - DNA, 20 bp, synthetic construct
  misc_feature 1..20: note = chemically synthesized
  source 1..20: mol_type = other DNA
tctagaaaagtaaggagtgg

SEQ ID NO: 2386 - DNA, 20 bp, synthetic construct
  misc_feature 1..20: note = chemically synthesized
  source 1..20: mol_type = other DNA
gtggaggtaaaaaaaaaaca

SEQ ID NO: 2387 - DNA, 20 bp, synthetic construct
  misc_feature 1..20: note = chemically synthesized
  source 1..20: mol_type = other DNA
gaggtaaaaaaaaaacacag

SEQ ID NO: 2388 - DNA, 20 bp, synthetic construct
  misc_feature 1..20: note = chemically synthesized
  source 1..20: mol_type = other DNA
ggtaaaaaaaaaacacagca

SEQ ID NO: 2389 - DNA, 20 bp, synthetic construct
  misc_feature 1..20: note = chemically synthesized
  source 1..20: mol_type = other DNA
aaaaaaacacagcagagaca

SEQ ID NO: 2390 - DNA, 20 bp, synthetic construct
  misc_feature 1..20: note = chemically synthesized
  source 1..20: mol_type = other DNA
aaaaaacacagcagagacac

SEQ ID NO: 2391 - DNA, 20 bp, synthetic construct
  misc_feature 1..20: note = chemically synthesized
  source 1..20: mol_type = other DNA
gcagagacacaggtatgcta

SEQ ID NO: 2392 - DNA, 20 bp, synthetic construct
  misc_feature 1..20: note = chemically synthesized
  source 1..20: mol_type = other DNA
acaggtatgctacggaacca

SEQ ID NO: 2393 - DNA, 20 bp, synthetic construct
  misc_feature 1..20: note = chemically synthesized
  source 1..20: mol_type = other DNA
caggtatgctacggaaccaa

SEQ ID NO: 2394 - DNA, 20 bp, synthetic construct
  misc_feature 1..20: note = chemically synthesized
  source 1..20: mol_type = other DNA
cggaaccaaaggtgtgccaa

SEQ ID NO: 2395 - DNA, 20 bp, synthetic construct
  misc_feature 1..20: note = chemically synthesized
  source 1..20: mol_type = other DNA
aggtgtgccaatggtactga

SEQ ID NO: 2396 - DNA, 20 bp, synthetic construct
  misc_feature 1..20: note = chemically synthesized
  source 1..20: mol_type = other DNA
atggtactgacagtttaatt

SEQ ID NO: 2397 - DNA, 20 bp, synthetic construct
  misc_feature 1..20: note = chemically synthesized
  source 1..20: mol_type = other DNA
taattcagaaaaaaatgaat

SEQ ID NO: 2398 - DNA, 20 bp, synthetic construct
  misc_feature 1..20: note = chemically synthesized
  source 1..20: mol_type = other DNA
gaaaaaaatgaatcagaaaa

SEQ ID NO: 2399 - DNA, 20 bp, synthetic construct
  misc_feature 1..20: note = chemically synthesized
  source 1..20: mol_type = other DNA
gaaaatggatatttttaaat

SEQ ID NO: 2400 - DNA, 20 bp, synthetic construct
  misc_feature 1..20: note = chemically synthesized
  source 1..20: mol_type = other DNA
atggatatttttaaataagt

SEQ ID NO: 2401 - DNA, 20 bp, synthetic construct
  misc_feature 1..20: note = chemically synthesized
  source 1..20: mol_type = other DNA
tggatatttttaaataagtt

SEQ ID NO: 2402 - DNA, 20 bp, synthetic construct
  misc_feature 1..20: note = chemically synthesized
  source 1..20: mol_type = other DNA
aataagttaggttgctgaaa

SEQ ID NO: 2403 - DNA, 20 bp, synthetic construct
  misc_feature 1..20: note = chemically synthesized
  source 1..20: mol_type = other DNA
taagttaggttgctgaaaaa

SEQ ID NO: 2404 - DNA, 20 bp, synthetic construct
  misc_feature 1..20: note = chemically synthesized
  source 1..20: mol_type = other DNA
gttgctgaaaaagagaaatg

SEQ ID NO: 2405 - DNA, 20 bp, synthetic construct
  misc_feature 1..20: note = chemically synthesized
  source 1..20: mol_type = other DNA
ttttttctgaattaaactgt

SEQ ID NO: 2406 - DNA, 20 bp, synthetic construct
  misc_feature 1..20: note = chemically synthesized
  source 1..20: mol_type = other DNA
aattaaactgtcagtaccat

SEQ ID NO: 2407 - DNA, 20 bp, synthetic construct
  misc_feature 1..20: note = chemically synthesized
  source 1..20: mol_type = other DNA
cagtaccattggcacacctt

SEQ ID NO: 2408 - DNA, 20 bp, synthetic construct
  misc_feature 1..20: note = chemically synthesized
  source 1..20: mol_type = other DNA
ttggcacacctttggttccg

SEQ ID NO: 2409 - DNA, 20 bp, synthetic construct
  misc_feature 1..20: note = chemically synthesized
  source 1..20: mol_type = other DNA
acctccactccttacttttc

SEQ ID NO: 2410 - DNA, 20 bp, synthetic construct
  misc_feature 1..20: note = chemically synthesized
  source 1..20: mol_type = other DNA
aaatctctgctttttctttt

SEQ ID NO: 2411 - DNA, 20 bp, synthetic construct
  misc_feature 1..20: note = chemically synthesized
  source 1..20: mol_type = other DNA
agtttaaattatttcacaaa

SEQ ID NO: 2412 - DNA, 20 bp, synthetic construct
  misc_feature 1..20: note = chemically synthesized
  source 1..20: mol_type = other DNA
ttttcttgacttgcacttcc

SEQ ID NO: 2413 - DNA, 20 bp, synthetic construct
  misc_feature 1..20: note = chemically synthesized
  source 1..20: mol_type = other DNA
tttcttgacttgcacttcct

SEQ ID NO: 2414 - DNA, 20 bp, synthetic construct
  misc_feature 1..20: note = chemically synthesized
  source 1..20: mol_type = other DNA
ctaggcttgctgtccttgtg

SEQ ID NO: 2415 - DNA, 20 bp, synthetic construct
  misc_feature 1..20: note = chemically synthesized
  source 1..20: mol_type = other DNA
taggcttgctgtccttgtgt

SEQ ID NO: 2416 - DNA, 20 bp, synthetic construct
  misc_feature 1..20: note = chemically synthesized
  source 1..20: mol_type = other DNA
acttcgatttgttaaaaata

SEQ ID NO: 2417 - DNA, 20 bp, synthetic construct
  misc_feature 1..20: note = chemically synthesized
  source 1..20: mol_type = other DNA
ttgttaaaaataaagatatc

SEQ ID NO: 2418 - DNA, 20 bp, synthetic construct
  misc_feature 1..20: note = chemically synthesized
  source 1..20: mol_type = other DNA
taaaaataaagatatctgga

SEQ ID NO: 2419 - DNA, 20 bp, synthetic construct
  misc_feature 1..20: note = chemically synthesized
  source 1..20: mol_type = other DNA
aaaatttcttttcttttttt

SEQ ID NO: 2420 - DNA, 20 bp, synthetic construct
  misc_feature 1..20: note = chemically synthesized
  source 1..20: mol_type = other DNA
tttaatgtttatttttttcc

SEQ ID NO: 2421 - DNA, 20 bp, synthetic construct
  misc_feature 1..20: note = chemically synthesized
  source 1..20: mol_type = other DNA
tgtttatttttttcctagac

SEQ ID NO: 2422 - DNA, 20 bp, synthetic construct
  misc_feature 1..20: note = chemically synthesized
  source 1..20: mol_type = other DNA
tttatttttttcctagactg

SEQ ID NO: 2423 - DNA, 20 bp, synthetic construct
  misc_feature 1..20: note = chemically synthesized
  source 1..20: mol_type = other DNA
ttttttcctagactggagta

SEQ ID NO: 2424 - DNA, 20 bp, synthetic construct
  misc_feature 1..20: note = chemically synthesized
  source 1..20: mol_type = other DNA
tttcctagactggagtacag

SEQ ID NO: 2425 - DNA, 20 bp, synthetic construct
  misc_feature 1..20: note = chemically synthesized
  source 1..20: mol_type = other DNA
ggagtacagtggcaccatga

SEQ ID NO: 2426 - DNA, 20 bp, synthetic construct
  misc_feature 1..20: note = chemically synthesized
  source 1..20: mol_type = other DNA
agtggcaccatgatggctca

SEQ ID NO: 2427 - DNA, 20 bp, synthetic construct
  misc_feature 1..20: note = chemically synthesized
  source 1..20: mol_type = other DNA
ggcaccatgatggctcatgg

SEQ ID NO: 2428 - DNA, 20 bp, synthetic construct
  misc_feature 1..20: note = chemically synthesized
  source 1..20: mol_type = other DNA
catggtagcctacacttccc

SEQ ID NO: 2429 - DNA, 20 bp, synthetic construct
  misc_feature 1..20: note = chemically synthesized
  source 1..20: mol_type = other DNA
atggtagcctacacttcccc

SEQ ID NO: 2430 - DNA, 20 bp, synthetic construct
  misc_feature 1..20: note = chemically synthesized
  source 1..20: mol_type = other DNA
gcctacacttccccgggctc

SEQ ID NO: 2431 - DNA, 20 bp, synthetic construct
  misc_feature 1..20: note = chemically synthesized
  source 1..20: mol_type = other DNA
ctcaagtgatcctcccacct

SEQ ID NO: 2432 - DNA, 20 bp, synthetic construct
  misc_feature 1..20: note = chemically synthesized
  source 1..20: mol_type = other DNA
tcctcccacctcagcctccc

SEQ ID NO: 2433 - DNA, 20 bp, synthetic construct
  misc_feature 1..20: note = chemically synthesized
  source 1..20: mol_type = other DNA
tcccacctcagcctcccaag

SEQ ID NO: 2434 - DNA, 20 bp, synthetic construct
  misc_feature 1..20: note = chemically synthesized
  source 1..20: mol_type = other DNA
acctcagcctcccaagtagc

SEQ ID NO: 2435 - DNA, 20 bp, synthetic construct
  misc_feature 1..20: note = chemically synthesized
  source 1..20: mol_type = other DNA
cctcagcctcccaagtagct

SEQ ID NO: 2436 - DNA, 20 bp, synthetic construct
  misc_feature 1..20: note = chemically synthesized
  source 1..20: mol_type = other DNA
ctcccaagtagctgggacta

SEQ ID NO: 2437 - DNA, 20 bp, synthetic construct
  misc_feature 1..20: note = chemically synthesized
  source 1..20: mol_type = other DNA
tcccaagtagctgggactac

SEQ ID NO: 2438 - DNA, 20 bp, synthetic construct
  misc_feature 1..20: note = chemically synthesized
  source 1..20: mol_type = other DNA
atttgtttgttttgtttttt

SEQ ID NO: 2439 - DNA, 20 bp, synthetic construct
  misc_feature 1..20: note = chemically synthesized
  source 1..20: mol_type = other DNA
gtttgttttgttttttgaga

SEQ ID NO: 2440 - DNA, 20 bp, synthetic construct
  misc_feature 1..20: note = chemically synthesized
  source 1..20: mol_type = other DNA
ttgttttgttttttgagatg

SEQ ID NO: 2441 - DNA, 20 bp, synthetic construct
  misc_feature 1..20: note = chemically synthesized
  source 1..20: mol_type = other DNA
ggagtttcgctcttgttgcc

SEQ ID NO: 2442 - DNA, 20 bp, synthetic construct
  misc_feature 1..20: note = chemically synthesized
  source 1..20: mol_type = other DNA
gagtttcgctcttgttgccc

SEQ ID NO: 2443 - DNA, 20 bp, synthetic construct
  misc_feature 1..20: note = chemically synthesized
  source 1..20: mol_type = other DNA
ttcgctcttgttgcccaggc

SEQ ID NO: 2444 - DNA, 20 bp, synthetic construct
  misc_feature 1..20: note = chemically synthesized
  source 1..20: mol_type = other DNA
cgctcttgttgcccaggctg

SEQ ID NO: 2445 - DNA, 20 bp, synthetic construct
  misc_feature 1..20: note = chemically synthesized
  source 1..20: mol_type = other DNA
ttgcccaggctggagtgcaa

SEQ ID NO: 2446 - DNA, 20 bp, synthetic construct
  misc_feature 1..20: note = chemically synthesized
  source 1..20: mol_type = other DNA
cccaggctggagtgcaatgg

SEQ ID NO: 2447 - DNA, 20 bp, synthetic construct
  misc_feature 1..20: note = chemically synthesized
  source 1..20: mol_type = other DNA
ccaggctggagtgcaatggc

SEQ ID NO: 2448 - DNA, 20 bp, synthetic construct
  misc_feature 1..20: note = chemically synthesized
  source 1..20: mol_type = other DNA
ggagtgcaatggcgggatct

SEQ ID NO: 2449 - DNA, 20 bp, synthetic construct
  misc_feature 1..20: note = chemically synthesized
  source 1..20: mol_type = other DNA
tcaccgcaacctctacctcc

SEQ ID NO: 2450 - DNA, 20 bp, synthetic construct
  misc_feature 1..20: note = chemically synthesized
  source 1..20: mol_type = other DNA
caccgcaacctctacctccc

SEQ ID NO: 2451 - DNA, 20 bp, synthetic construct
  misc_feature 1..20: note = chemically synthesized
  source 1..20: mol_type = other DNA
aacctctacctcccaggttc

SEQ ID NO: 2452 - DNA, 20 bp, synthetic construct
  misc_feature 1..20: note = chemically synthesized
  source 1..20: mol_type = other DNA
ttcaagcaattctcctgcct

SEQ ID NO: 2453 - DNA, 20 bp, synthetic construct
  misc_feature 1..20: note = chemically synthesized
  source 1..20: mol_type = other DNA
ttctcctgcctcagcctccc

SEQ ID NO: 2454 - DNA, 20 bp, synthetic construct
  misc_feature 1..20: note = chemically synthesized
  source 1..20: mol_type = other DNA
tcctgcctcagcctcccgag

SEQ ID NO: 2455 - DNA, 20 bp, synthetic construct
  misc_feature 1..20: note = chemically synthesized
  source 1..20: mol_type = other DNA
gcctcagcctcccgagtagc

SEQ ID NO: 2456 - DNA, 20 bp, synthetic construct
  misc_feature 1..20: note = chemically synthesized
  source 1..20: mol_type = other DNA
cctcagcctcccgagtagct

SEQ ID NO: 2457 - DNA, 20 bp, synthetic construct
  misc_feature 1..20: note = chemically synthesized
  source 1..20: mol_type = other DNA
ctcccgagtagctgggatta

SEQ ID NO: 2458 - DNA, 20 bp, synthetic construct
  misc_feature 1..20: note = chemically synthesized
  source 1..20: mol_type = other DNA
tcccgagtagctgggattac

SEQ ID NO: 2459 - DNA, 20 bp, synthetic construct
  misc_feature 1..20: note = chemically synthesized
  source 1..20: mol_type = other DNA
caggcatgcatcaccacgcc

SEQ ID NO: 2460 - DNA, 20 bp, synthetic construct
  misc_feature 1..20: note = chemically synthesized
  source 1..20: mol_type = other DNA
cccagctaattttgtatttt

SEQ ID NO: 2461 - DNA, 20 bp, synthetic construct
  misc_feature 1..20: note = chemically synthesized
  source 1..20: mol_type = other DNA
agctaattttgtatttttag

SEQ ID NO: 2462 - DNA, 20 bp, synthetic construct
  misc_feature 1..20: note = chemically synthesized
  source 1..20: mol_type = other DNA
ctaattttgtatttttagta

SEQ ID NO: 2463 - DNA, 20 bp, synthetic construct
  misc_feature 1..20: note = chemically synthesized
  source 1..20: mol_type = other DNA
ttttgtatttttagtagaga

SEQ ID NO: 2464 - DNA, 20 bp, synthetic construct
  misc_feature 1..20: note = chemically synthesized
  source 1..20: mol_type = other DNA
tttgtatttttagtagagac

SEQ ID NO: 2465 - DNA, 20 bp, synthetic construct
  misc_feature 1..20: note = chemically synthesized
  source 1..20: mol_type = other DNA
ttgtatttttagtagagacg

SEQ ID NO: 2466 - DNA, 20 bp, synthetic construct
  misc_feature 1..20: note = chemically synthesized
  source 1..20: mol_type = other DNA
agacggggtttctccatgtt

SEQ ID NO: 2467 - DNA, 20 bp, synthetic construct
  misc_feature 1..20: note = chemically synthesized
  source 1..20: mol_type = other DNA
gacggggtttctccatgttg

SEQ ID NO: 2468 - DNA, 20 bp, synthetic construct
  misc_feature 1..20: note = chemically synthesized
  source 1..20: mol_type = other DNA
gggtttctccatgttgaggc

SEQ ID NO: 2469 - DNA, 20 bp, synthetic construct
  misc_feature 1..20: note = chemically synthesized
  source 1..20: mol_type = other DNA
tctccatgttgaggctggtc

SEQ ID NO: 2470 - DNA, 20 bp, synthetic construct
  misc_feature 1..20: note = chemically synthesized
  source 1..20: mol_type = other DNA
tggtctggaactcctgacct

SEQ ID NO: 2471 - DNA, 20 bp, synthetic construct
  misc_feature 1..20: note = chemically synthesized
  source 1..20: mol_type = other DNA
ggtctggaactcctgacctc

SEQ ID NO: 2472 - DNA, 20 bp, synthetic construct
  misc_feature 1..20: note = chemically synthesized
  source 1..20: mol_type = other DNA
ctcaggtgatctgcccgcct

SEQ ID NO: 2473 - DNA, 20 bp, synthetic construct
  misc_feature 1..20: note = chemically synthesized
  source 1..20: mol_type = other DNA
ctgcccgcctcggcctccca

SEQ ID NO: 2474 - DNA, 20 bp, synthetic construct
  misc_feature 1..20: note = chemically synthesized
  source 1..20: mol_type = other DNA
gcctcggcctcccaaagtgc

SEQ ID NO: 2475 - DNA, 20 bp, synthetic construct
  misc_feature 1..20: note = chemically synthesized
  source 1..20: mol_type = other DNA
cctcggcctcccaaagtgct

SEQ ID NO: 2476 - DNA, 20 bp, synthetic construct
  misc_feature 1..20: note = chemically synthesized
  source 1..20: mol_type = other DNA
ctcccaaagtgctgggatta

SEQ ID NO: 2477 - DNA, 20 bp, synthetic construct
  misc_feature 1..20: note = chemically synthesized
  source 1..20: mol_type = other DNA
tcccaaagtgctgggattac

SEQ ID NO: 2478 - DNA, 20 bp, synthetic construct
  misc_feature 1..20: note = chemically synthesized
  source 1..20: mol_type = other DNA
agtgctgggattacaggcgt

SEQ ID NO: 2479 - DNA, 20 bp, synthetic construct
  misc_feature 1..20: note = chemically synthesized
  source 1..20: mol_type = other DNA
caggcgtgagccaccacgct

SEQ ID NO: 2480 - DNA, 20 bp, synthetic construct
  misc_feature 1..20: note = chemically synthesized
  source 1..20: mol_type = other DNA
cactaattttgtatattttg

SEQ ID NO: 2481 - DNA, 20 bp, synthetic construct
  misc_feature 1..20: note = chemically synthesized
  source 1..20: mol_type = other DNA
ctaattttgtatattttgta

SEQ ID NO: 2482 - DNA, 20 bp, synthetic construct
  misc_feature 1..20: note = chemically synthesized
  source 1..20: mol_type = other DNA
ttttgtatattttgtagaga

SEQ ID NO: 2483 - DNA, 20 bp, synthetic construct
  misc_feature 1..20: note = chemically synthesized
  source 1..20: mol_type = other DNA
tttgtatattttgtagagat

SEQ ID NO: 2484 - DNA, 20 bp, synthetic construct
  misc_feature 1..20: note = chemically synthesized
  source 1..20: mol_type = other DNA
tgggctttccctgtgttgtc

SEQ ID NO: 2485 - DNA, 20 bp, synthetic construct
  misc_feature 1..20: note = chemically synthesized
  source 1..20: mol_type = other DNA
gggctttccctgtgttgtcc

SEQ ID NO: 2486 - DNA, 20 bp, synthetic construct
  misc_feature 1..20: note = chemically synthesized
  source 1..20: mol_type = other DNA
tttccctgtgttgtccaggc

SEQ ID NO: 2487 - DNA, 20 bp, synthetic construct
  misc_feature 1..20: note = chemically synthesized
  source 1..20: mol_type = other DNA
ccaggctggtcttgaattcc

SEQ ID NO: 2488 - DNA, 20 bp, synthetic construct
  misc_feature 1..20: note = chemically synthesized
  source 1..20: mol_type = other DNA
caggctggtcttgaattcct

SEQ ID NO: 2489 - DNA, 20 bp, synthetic construct
  misc_feature 1..20: note = chemically synthesized
  source 1..20: mol_type = other DNA
ggtcttgaattcctgggctt

SEQ ID NO: 2490 - DNA, 20 bp, synthetic construct
  misc_feature 1..20: note = chemically synthesized
  source 1..20: mol_type = other DNA
accttgtcctcccaaaatgc

SEQ ID NO: 2491 - DNA, 20 bp, synthetic construct
  misc_feature 1..20: note = chemically synthesized
  source 1..20: mol_type = other DNA
ccttgtcctcccaaaatgct

SEQ ID NO: 2492 - DNA, 20 bp, synthetic construct
  misc_feature 1..20: note = chemically synthesized
  source 1..20: mol_type = other DNA
tcccaaaatgctaggattac

SEQ ID NO: 2493 - DNA, 20 bp, synthetic construct
  misc_feature 1..20: note = chemically synthesized
  source 1..20: mol_type = other DNA
aatgctaggattactggcgt

SEQ ID NO: 2494 - DNA, 20 bp, synthetic construct
  misc_feature 1..20: note = chemically synthesized
  source 1..20: mol_type = other DNA
ggattactggcgtgagccac

SEQ ID NO: 2495 - DNA, 20 bp, synthetic construct
  misc_feature 1..20: note = chemically synthesized
  source 1..20: mol_type = other DNA
gattactggcgtgagccacc

SEQ ID NO: 2496 - DNA, 20 bp, synthetic construct
  misc_feature 1..20: note = chemically synthesized
  source 1..20: mol_type = other DNA
ctggcgtgagccaccaggtc

SEQ ID NO: 2497 - DNA, 20 bp, synthetic construct
  misc_feature 1..20: note = chemically synthesized
  source 1..20: mol_type = other DNA
cgtgagccaccaggtctggc

SEQ ID NO: 2498 - DNA, 20 bp, synthetic construct
  misc_feature 1..20: note = chemically synthesized
  source 1..20: mol_type = other DNA
agccaccaggtctggctgga

SEQ ID NO: 2499 - DNA, 20 bp, synthetic construct
  misc_feature 1..20: note = chemically synthesized
  source 1..20: mol_type = other DNA
ttcaaaaattttacaaacat

SEQ ID NO: 2500 - DNA, 20 bp, synthetic construct
  misc_feature 1..20: note = chemically synthesized
  source 1..20: mol_type = other DNA
caaaaattttacaaacatga

SEQ ID NO: 2501 - DNA, 20 bp, synthetic construct
  misc_feature 1..20: note = chemically synthesized
  source 1..20: mol_type = other DNA
tcccttgaatactttcttaa

SEQ ID NO: 2502 - DNA, 20 bp, synthetic construct
  misc_feature 1..20: note = chemically synthesized
  source 1..20: mol_type = other DNA
aatactttcttaatagcaca

SEQ ID NO: 2503 - DNA, 20 bp, synthetic construct
  misc_feature 1..20: note = chemically synthesized
  source 1..20: mol_type = other DNA
ctttcttaatagcacacaga

SEQ ID NO: 2504 - DNA, 20 bp, synthetic construct
  misc_feature 1..20: note = chemically synthesized
  source 1..20: mol_type = other DNA
aatagcacacagaaagcaca

SEQ ID NO: 2505 - DNA, 20 bp, synthetic construct
  misc_feature 1..20: note = chemically synthesized
  source 1..20: mol_type = other DNA
tgtgaacccaaacttacaca

SEQ ID NO: 2506 - DNA, 20 bp, synthetic construct
  misc_feature 1..20: note = chemically synthesized
  source 1..20: mol_type = other DNA
cattatacccatacttaaaa

SEQ ID NO: 2507 - DNA, 20 bp, synthetic construct
  misc_feature 1..20: note = chemically synthesized
  source 1..20: mol_type = other DNA
aacagatgccctcatataca

SEQ ID NO: 2508 - DNA, 20 bp, synthetic construct
  misc_feature 1..20: note = chemically synthesized
  source 1..20: mol_type = other DNA
catatacatagtaaaactct

SEQ ID NO: 2509 - DNA, 20 bp, synthetic construct
  misc_feature 1..20: note = chemically synthesized
  source 1..20: mol_type = other DNA
atatacatagtaaaactctt

SEQ ID NO: 2510 - DNA, 20 bp, synthetic construct
  misc_feature 1..20: note = chemically synthesized
  source 1..20: mol_type = other DNA
tatacatagtaaaactcttg

SEQ ID NO: 2511 - DNA, 20 bp, synthetic construct
  misc_feature 1..20: note = chemically synthesized
  source 1..20: mol_type = other DNA
atacatagtaaaactcttgg

SEQ ID NO: 2512 - DNA, 20 bp, synthetic construct
  misc_feature 1..20: note = chemically synthesized
  source 1..20: mol_type = other DNA
catagtaaaactcttggggg

SEQ ID NO: 2513 - DNA, 20 bp, synthetic construct
  misc_feature 1..20: note = chemically synthesized
  source 1..20: mol_type = other DNA
agtaaaactcttgggggcag

SEQ ID NO: 2514 - DNA, 20 bp, synthetic construct
  misc_feature 1..20: note = chemically synthesized
  source 1..20: mol_type = other DNA
aactcttgggggcagtagtg

SEQ ID NO: 2515 - DNA, 20 bp, synthetic construct
  misc_feature 1..20: note = chemically synthesized
  source 1..20: mol_type = other DNA
cttgggggcagtagtgaagt

SEQ ID NO: 2516 - DNA, 20 bp, synthetic construct
  misc_feature 1..20: note = chemically synthesized
  source 1..20: mol_type = other DNA
ggttatttactgttttatga

SEQ ID NO: 2517 - DNA, 20 bp, synthetic construct
  misc_feature 1..20: note = chemically synthesized
  source 1..20: mol_type = other DNA
tgttttatgaaagtgccatt

SEQ ID NO: 2518 - DNA, 20 bp, synthetic construct
  misc_feature 1..20: note = chemically synthesized
  source 1..20: mol_type = other DNA
ttatgaaagtgccattcagc

SEQ ID NO: 2519 - DNA, 20 bp, synthetic construct
  misc_feature 1..20: note = chemically synthesized
  source 1..20: mol_type = other DNA
tatgaaagtgccattcagcc

SEQ ID NO: 2520 - DNA, 20 bp, synthetic construct
  misc_feature 1..20: note = chemically synthesized
  source 1..20: mol_type = other DNA
aagtgccattcagccgggtg

SEQ ID NO: 2521 - DNA, 20 bp, synthetic construct
  misc_feature 1..20: note = chemically synthesized
  source 1..20: mol_type = other DNA
tgccattcagccgggtgcag

SEQ ID NO: 2522 - DNA, 20 bp, synthetic construct
  misc_feature 1..20: note = chemically synthesized
  source 1..20: mol_type = other DNA
gtggctcatgactgtaatcc

SEQ ID NO: 2523 - DNA, 20 bp, synthetic construct
  misc_feature 1..20: note = chemically synthesized
  source 1..20: mol_type = other DNA
tgactgtaatcccagcactt

SEQ ID NO: 2524 - DNA, 20 bp, synthetic construct
  misc_feature 1..20: note = chemically synthesized
  source 1..20: mol_type = other DNA
gactgtaatcccagcacttt

SEQ ID NO: 2525 - DNA, 20 bp, synthetic construct
  misc_feature 1..20: note = chemically synthesized
  source 1..20: mol_type = other DNA
ctgtaatcccagcactttgg

SEQ ID NO: 2526 - DNA, 20 bp, synthetic construct
  misc_feature 1..20: note = chemically synthesized
  source 1..20: mol_type = other DNA
tgtaatcccagcactttggg

SEQ ID NO: 2527 - DNA, 20 bp, synthetic construct
  misc_feature 1..20: note = chemically synthesized
  source 1..20: mol_type = other DNA
tcccagcactttgggaggtc

SEQ ID NO: 2528 - DNA, 20 bp, synthetic construct
  misc_feature 1..20: note = chemically synthesized
  source 1..20: mol_type = other DNA
cccagcactttgggaggtcg

SEQ ID NO: 2529 - DNA, 20 bp, synthetic construct
  misc_feature 1..20: note = chemically synthesized
  source 1..20: mol_type = other DNA
agcactttgggaggtcgagg

SEQ ID NO: 2530 - DNA, 20 bp, synthetic construct
  misc_feature 1..20: note = chemically synthesized
  source 1..20: mol_type = other DNA
gcactttgggaggtcgaggc

SEQ ID NO: 2531 - DNA, 20 bp, synthetic construct
  misc_feature 1..20: note = chemically synthesized
  source 1..20: mol_type = other DNA
ggtcgaggcaggctgatcac

SEQ ID NO: 2532 - DNA, 20 bp, synthetic construct
  misc_feature 1..20: note = chemically synthesized
  source 1..20: mol_type = other DNA
gtcgaggcaggctgatcacg

SEQ ID NO: 2533 - DNA, 20 bp, synthetic construct
  misc_feature 1..20: note = chemically synthesized
  source 1..20: mol_type = other DNA
aggcaggctgatcacgaggt

SEQ ID NO: 2534 - DNA, 20 bp, synthetic construct
  misc_feature 1..20: note = chemically synthesized
  source 1..20: mol_type = other DNA
ggcaggctgatcacgaggtc

SEQ ID NO: 2535 - DNA, 20 bp, synthetic construct
  misc_feature 1..20: note = chemically synthesized
  source 1..20: mol_type = other DNA
caggctgatcacgaggtcag

SEQ ID NO: 2536 - DNA, 20 bp, synthetic construct
  misc_feature 1..20: note = chemically synthesized
  source 1..20: mol_type = other DNA
gatcacgaggtcaggagttc

SEQ ID NO: 2537 - DNA, 20 bp, synthetic construct
  misc_feature 1..20: note = chemically synthesized
  source 1..20: mol_type = other DNA
cgaggtcaggagttcaagac

SEQ ID NO: 2538 - DNA, 20 bp, synthetic construct
  misc_feature 1..20: note = chemically synthesized
  source 1..20: mol_type = other DNA
tctactaaaaatacaaacat

SEQ ID NO: 2539 - DNA, 20 bp, synthetic construct
  misc_feature 1..20: note = chemically synthesized
  source 1..20: mol_type = other DNA
ctaaaaatacaaacattagc

SEQ ID NO: 2540 - DNA, 20 bp, synthetic construct
  misc_feature 1..20: note = chemically synthesized
  source 1..20: mol_type = other DNA
taaaaatacaaacattagct

SEQ ID NO: 2541 - DNA, 20 bp, synthetic construct
  misc_feature 1..20: note = chemically synthesized
  source 1..20: mol_type = other DNA
atacaaacattagctgggcg

SEQ ID NO: 2542 - DNA, 20 bp, synthetic construct
  misc_feature 1..20: note = chemically synthesized
  source 1..20: mol_type = other DNA
caaacattagctgggcgtgg

SEQ ID NO: 2543 - DNA, 20 bp, synthetic construct
  misc_feature 1..20: note = chemically synthesized
  source 1..20: mol_type = other DNA
ggcgtggtggtgtgtgcctg

SEQ ID NO: 2544 - DNA, 20 bp, synthetic construct
  misc_feature 1..20: note = chemically synthesized
  source 1..20: mol_type = other DNA
gtggtgtgtgcctgtagtcc

SEQ ID NO: 2545 - DNA, 20 bp, synthetic construct
  misc_feature 1..20: note = chemically synthesized
  source 1..20: mol_type = other DNA
tgcctgtagtcccagctact

SEQ ID NO: 2546 - DNA, 20 bp, synthetic construct
  misc_feature 1..20: note = chemically synthesized
  source 1..20: mol_type = other DNA
gcctgtagtcccagctactc

SEQ ID NO: 2547 - DNA, 20 bp, synthetic construct
  misc_feature 1..20: note = chemically synthesized
  source 1..20: mol_type = other DNA
ctgtagtcccagctactcag

SEQ ID NO: 2548 - DNA, 20 bp, synthetic construct
  misc_feature 1..20: note = chemically synthesized
  source 1..20: mol_type = other DNA
tgtagtcccagctactcagg

SEQ ID NO: 2549 - DNA, 20 bp, synthetic construct
  misc_feature 1..20: note = chemically synthesized
  source 1..20: mol_type = other DNA
gtcccagctactcaggaggc

SEQ ID NO: 2550 - DNA, 20 bp, synthetic construct
  misc_feature 1..20: note = chemically synthesized
  source 1..20: mol_type = other DNA
tcccagctactcaggaggct

SEQ ID NO: 2551 - DNA, 20 bp, synthetic construct
  misc_feature 1..20: note = chemically synthesized
  source 1..20: mol_type = other DNA
cccagctactcaggaggctg

SEQ ID NO: 2552 - DNA, 20 bp, synthetic construct
  misc_feature 1..20: note = chemically synthesized
  source 1..20: mol_type = other DNA
agctactcaggaggctgggg

SEQ ID NO: 2553 - DNA, 20 bp, synthetic construct
  misc_feature 1..20: note = chemically synthesized
  source 1..20: mol_type = other DNA
gctactcaggaggctggggc

SEQ ID NO: 2554 - DNA, 20 bp, synthetic construct
  misc_feature 1..20: note = chemically synthesized
  source 1..20: mol_type = other DNA
tactcaggaggctggggcag

SEQ ID NO: 2555 - DNA, 20 bp, synthetic construct
  misc_feature 1..20: note = chemically synthesized
  source 1..20: mol_type = other DNA
gcaggagaatcgcttgaacc

SEQ ID NO: 2556 - DNA, 20 bp, synthetic construct
  misc_feature 1..20: note = chemically synthesized
  source 1..20: mol_type = other DNA
caggagaatcgcttgaacct

SEQ ID NO: 2557 - DNA, 20 bp, synthetic construct
  misc_feature 1..20: note = chemically synthesized
  source 1..20: mol_type = other DNA
ggagaatcgcttgaacctgg

SEQ ID NO: 2558 - DNA, 20 bp, synthetic construct
  misc_feature 1..20: note = chemically synthesized
  source 1..20: mol_type = other DNA
gagaatcgcttgaacctggg

SEQ ID NO: 2559 - DNA, 20 bp, synthetic construct
  misc_feature 1..20: note = chemically synthesized
  source 1..20: mol_type = other DNA
aatcgcttgaacctgggagg

SEQ ID NO: 2560 - DNA, 20 bp, synthetic construct
  misc_feature 1..20: note = chemically synthesized
  source 1..20: mol_type = other DNA
tcgcttgaacctgggaggcg

SEQ ID NO: 2561 - DNA, 20 bp, synthetic construct
  misc_feature 1..20: note = chemically synthesized
  source 1..20: mol_type = other DNA
aacctgggaggcggagattg

SEQ ID NO: 2562 - DNA, 20 bp, synthetic construct
  misc_feature 1..20: note = chemically synthesized
  source 1..20: mol_type = other DNA
tgggaggcggagattgcagt

SEQ ID NO: 2563 - DNA, 20 bp, synthetic construct
  misc_feature 1..20: note = chemically synthesized
  source 1..20: mol_type = other DNA
ggcggagattgcagtgagcc

SEQ ID NO: 2564 - DNA, 20 bp, synthetic construct
  misc_feature 1..20: note = chemically synthesized
  source 1..20: mol_type = other DNA
gagatcgcaccaccgcactc

SEQ ID NO: 2565 - DNA, 20 bp, synthetic construct
  misc_feature 1..20: note = chemically synthesized
  source 1..20: mol_type = other DNA
cgcaccaccgcactccagcc

SEQ ID NO: 2566 - DNA, 20 bp, synthetic construct
  misc_feature 1..20: note = chemically synthesized
  source 1..20: mol_type = other DNA
gcaccaccgcactccagcct

SEQ ID NO: 2567 - DNA, 20 bp, synthetic construct
  misc_feature 1..20: note = chemically synthesized
  source 1..20: mol_type = other DNA
accaccgcactccagcctgg

SEQ ID NO: 2568 - DNA, 20 bp, synthetic construct
  misc_feature 1..20: note = chemically synthesized
  source 1..20: mol_type = other DNA
ccgcactccagcctgggaga

SEQ ID NO: 2569 - DNA, 20 bp, synthetic construct
  misc_feature 1..20: note = chemically synthesized
  source 1..20: mol_type = other DNA
cgcactccagcctgggagac

SEQ ID NO: 2570 - DNA, 20 bp, synthetic construct
  misc_feature 1..20: note = chemically synthesized
  source 1..20: mol_type = other DNA
gcactccagcctgggagaca

SEQ ID NO: 2571 - DNA, 20 bp, synthetic construct
  misc_feature 1..20: note = chemically synthesized
  source 1..20: mol_type = other DNA
tccagcctgggagacagggc

SEQ ID NO: 2572 - DNA, 20 bp, synthetic construct
  misc_feature 1..20: note = chemically synthesized
  source 1..20: mol_type = other DNA
ctcgaaaaaaaaaaacaaaa

SEQ ID NO: 2573 - DNA, 20 bp, synthetic construct
  misc_feature 1..20: note = chemically synthesized
  source 1..20: mol_type = other DNA
aaaacaaaaaagtgccgtca

SEQ ID NO: 2574 - DNA, 20 bp, synthetic construct
  misc_feature 1..20: note = chemically synthesized
  source 1..20: mol_type = other DNA
aaagtgccgtcatagtgact

SEQ ID NO: 2575 - DNA, 20 bp, synthetic construct
  misc_feature 1..20: note = chemically synthesized
  source 1..20: mol_type = other DNA
cgtcatagtgactcagtttt

SEQ ID NO: 2576 - DNA, 20 bp, synthetic construct
  misc_feature 1..20: note = chemically synthesized
  source 1..20: mol_type = other DNA
gtcatagtgactcagtttta

SEQ ID NO: 2577 - DNA, 20 bp, synthetic construct
  misc_feature 1..20: note = chemically synthesized
  source 1..20: mol_type = other DNA
tcagttttaaggaataaatc

SEQ ID NO: 2578 - DNA, 20 bp, synthetic construct
  misc_feature 1..20: note = chemically synthesized
  source 1..20: mol_type = other DNA
cagttttaaggaataaatca

SEQ ID NO: 2579 - DNA, 20 bp, synthetic construct
  misc_feature 1..20: note = chemically synthesized
  source 1..20: mol_type = other DNA
atcaaggatatttaactcaa

SEQ ID NO: 2580 - DNA, 20 bp, synthetic construct
  misc_feature 1..20: note = chemically synthesized
  source 1..20: mol_type = other DNA
atatttaactcaatagacta

SEQ ID NO: 2581 - DNA, 20 bp, synthetic construct
  misc_feature 1..20: note = chemically synthesized
  source 1..20: mol_type = other DNA
ttaactcaatagactacagt

SEQ ID NO: 2582 - DNA, 20 bp, synthetic construct
  misc_feature 1..20: note = chemically synthesized
  source 1..20: mol_type = other DNA
gctaacgtgacttgcactga

SEQ ID NO: 2583 - DNA, 20 bp, synthetic construct
  misc_feature 1..20: note = chemically synthesized
  source 1..20: mol_type = other DNA
actgaaagttatacgaatat

SEQ ID NO: 2584 - DNA, 20 bp, synthetic construct
  misc_feature 1..20: note = chemically synthesized
  source 1..20: mol_type = other DNA
tacttattcccctgcccctg

SEQ ID NO: 2585 - DNA, 20 bp, synthetic construct
  misc_feature 1..20: note = chemically synthesized
  source 1..20: mol_type = other DNA
tgcccctgaagtatgaatta

SEQ ID NO: 2586 - DNA, 20 bp, synthetic construct
  misc_feature 1..20: note = chemically synthesized
  source 1..20: mol_type = other DNA
aaagactccaaaattctttt

SEQ ID NO: 2587 - DNA, 20 bp, synthetic construct
  misc_feature 1..20: note = chemically synthesized
  source 1..20: mol_type = other DNA
aaaattctttttagaatctt

SEQ ID NO: 2588 - DNA, 20 bp, synthetic construct
  misc_feature 1..20: note = chemically synthesized
  source 1..20: mol_type = other DNA
aattctttttagaatcttca

SEQ ID NO: 2589 - DNA, 20 bp, synthetic construct
  misc_feature 1..20: note = chemically synthesized
  source 1..20: mol_type = other DNA
ttttagaatcttcagagtaa

SEQ ID NO: 2590 - DNA, 20 bp, synthetic construct
  misc_feature 1..20: note = chemically synthesized
  source 1..20: mol_type = other DNA
agaatcttcagagtaaaagc

SEQ ID NO: 2591 - DNA, 20 bp, synthetic construct
  misc_feature 1..20: note = chemically synthesized
  source 1..20: mol_type = other DNA
aaatactttgtatctaaatc

SEQ ID NO: 2592 - DNA, 20 bp, synthetic construct
  misc_feature 1..20: note = chemically synthesized
  source 1..20: mol_type = other DNA
atctggtgtataaaataact

SEQ ID NO: 2593 - DNA, 20 bp, synthetic construct
  misc_feature 1..20: note = chemically synthesized
  source 1..20: mol_type = other DNA
tggtgtataaaataacttgg

SEQ ID NO: 2594 - DNA, 20 bp, synthetic construct
  misc_feature 1..20: note = chemically synthesized
  source 1..20: mol_type = other DNA
aacttggtggatgatgcttc

SEQ ID NO: 2595 - DNA, 20 bp, synthetic construct
  misc_feature 1..20: note = chemically synthesized
  source 1..20: mol_type = other DNA
acttggtggatgatgcttca

SEQ ID NO: 2596 - DNA, 20 bp, synthetic construct
  misc_feature 1..20: note = chemically synthesized
  source 1..20: mol_type = other DNA
aaatttctccctgaatgata

SEQ ID NO: 2597 - DNA, 20 bp, synthetic construct
  misc_feature 1..20: note = chemically synthesized
  source 1..20: mol_type = other DNA
atttctccctgaatgataaa

SEQ ID NO: 2598 - DNA, 20 bp, synthetic construct
  misc_feature 1..20: note = chemically synthesized
  source 1..20: mol_type = other DNA
aaatgaatatgtcaattcaa

SEQ ID NO: 2599 - DNA, 20 bp, synthetic construct
  misc_feature 1..20: note = chemically synthesized
  source 1..20: mol_type = other DNA
gaatatgtcaattcaaaagt

SEQ ID NO: 2600 - DNA, 20 bp, synthetic construct
  misc_feature 1..20: note = chemically synthesized
  source 1..20: mol_type = other DNA
caattcaaaagttagaaatt

SEQ ID NO: 2601 - DNA, 20 bp, synthetic construct
  misc_feature 1..20: note = chemically synthesized
  source 1..20: mol_type = other DNA
tcaaaagttagaaatttggc

SEQ ID NO: 2602 - DNA, 20 bp, synthetic construct
  misc_feature 1..20: note = chemically synthesized
  source 1..20: mol_type = other DNA
caaaagttagaaatttggcc

SEQ ID NO: 2603 - DNA, 20 bp, synthetic construct
  misc_feature 1..20: note = chemically synthesized
  source 1..20: mol_type = other DNA
gttagaaatttggccgggca

SEQ ID NO: 2604 - DNA, 20 bp, synthetic construct
  misc_feature 1..20: note = chemically synthesized
  source 1..20: mol_type = other DNA
agaaatttggccgggcacgg

SEQ ID NO: 2605 - DNA, 20 bp, synthetic construct
  misc_feature 1..20: note = chemically synthesized
  source 1..20: mol_type = other DNA
ctcactcctgataatccttt

SEQ ID NO: 2606 - DNA, 20 bp, synthetic construct
  misc_feature 1..20: note = chemically synthesized
  source 1..20: mol_type = other DNA
tgataatcctttcggacgct

SEQ ID NO: 2607 - DNA, 20 bp, synthetic construct
  misc_feature 1..20: note = chemically synthesized
  source 1..20: mol_type = other DNA
gataatcctttcggacgctg

SEQ ID NO: 2608 - DNA, 20 bp, synthetic construct
  misc_feature 1..20: note = chemically synthesized
  source 1..20: mol_type = other DNA
aatcctttcggacgctgagg

SEQ ID NO: 2609 - DNA, 20 bp, synthetic construct
  misc_feature 1..20: note = chemically synthesized
  source 1..20: mol_type = other DNA
atcctttcggacgctgaggt

SEQ ID NO: 2610 - DNA, 20 bp, synthetic construct
  misc_feature 1..20: note = chemically synthesized
  source 1..20: mol_type = other DNA
ctttcggacgctgaggtggg

SEQ ID NO: 2611 - DNA, 20 bp, synthetic construct
  misc_feature 1..20: note = chemically synthesized
  source 1..20: mol_type = other DNA
ctgaggtgggtggatcgcat

SEQ ID NO: 2612 - DNA, 20 bp, synthetic construct
  misc_feature 1..20: note = chemically synthesized
  source 1..20: mol_type = other DNA
tgggtggatcgcatgagctc

SEQ ID NO: 2613 - DNA, 20 bp, synthetic construct
  misc_feature 1..20: note = chemically synthesized
  source 1..20: mol_type = other DNA
ggtggatcgcatgagctccg

SEQ ID NO: 2614 - DNA, 20 bp, synthetic construct
  misc_feature 1..20: note = chemically synthesized
  source 1..20: mol_type = other DNA
tcgcatgagctccggagttc

SEQ ID NO: 2615 - DNA, 20 bp, synthetic construct
  misc_feature 1..20: note = chemically synthesized
  source 1..20: mol_type = other DNA
tccggagttcaagaccaacc

SEQ ID NO: 2616 - DNA, 20 bp, synthetic construct
  misc_feature 1..20: note = chemically synthesized
  source 1..20: mol_type = other DNA
ccggagttcaagaccaacct

SEQ ID NO: 2617 - DNA, 20 bp, synthetic construct
  misc_feature 1..20: note = chemically synthesized
  source 1..20: mol_type = other DNA
caagaccaacctgggcaaca

SEQ ID NO: 2618 - DNA, 20 bp, synthetic construct
  misc_feature 1..20: note = chemically synthesized
  source 1..20: mol_type = other DNA
accaacctgggcaacatagc

SEQ ID NO: 2619 - DNA, 20 bp, synthetic construct
  misc_feature 1..20: note = chemically synthesized
  source 1..20: mol_type = other DNA
gaacccgtttcaataaataa

SEQ ID NO: 2620 - DNA, 20 bp, synthetic construct
  misc_feature 1..20: note = chemically synthesized
  source 1..20: mol_type = other DNA
aataaataatagaaaaaaat

SEQ ID NO: 2621 - DNA, 20 bp, synthetic construct
  misc_feature 1..20: note = chemically synthesized
  source 1..20: mol_type = other DNA
aataatagaaaaaaatgagc

SEQ ID NO: 2622 - DNA, 20 bp, synthetic construct
  misc_feature 1..20: note = chemically synthesized
  source 1..20: mol_type = other DNA
ataatagaaaaaaatgagcc

SEQ ID NO: 2623 - DNA, 20 bp, synthetic construct
  misc_feature 1..20: note = chemically synthesized
  source 1..20: mol_type = other DNA
agaaaaaaatgagccaggcg

SEQ ID NO: 2624 - DNA, 20 bp, synthetic construct
  misc_feature 1..20: note = chemically synthesized
  source 1..20: mol_type = other DNA
aaaaaatgagccaggcgtgg

SEQ ID NO: 2625 - DNA, 20 bp, synthetic construct
  misc_feature 1..20: note = chemically synthesized
  source 1..20: mol_type = other DNA
tgagccaggcgtggtggtcc

SEQ ID NO: 2626 - DNA, 20 bp, synthetic construct
  misc_feature 1..20: note = chemically synthesized
  source 1..20: mol_type = other DNA
gcgtggtggtcccagctact

SEQ ID NO: 2627 - DNA, 20 bp, synthetic construct
  misc_feature 1..20: note = chemically synthesized
  source 1..20: mol_type = other DNA
tggtggtcccagctactcag

SEQ ID NO: 2628 - DNA, 20 bp, synthetic construct
  misc_feature 1..20: note = chemically synthesized
  source 1..20: mol_type = other DNA
ggtggtcccagctactcagt

SEQ ID NO: 2629 - DNA, 20 bp, synthetic construct
  misc_feature 1..20: note = chemically synthesized
  source 1..20: mol_type = other DNA
tcccagctactcagtaggct

SEQ ID NO: 2630 - DNA, 20 bp, synthetic construct
  misc_feature 1..20: note = chemically synthesized
  source 1..20: mol_type = other DNA
cccagctactcagtaggctg

SEQ ID NO: 2631 - DNA, 20 bp, synthetic construct
  misc_feature 1..20: note = chemically synthesized
  source 1..20: mol_type = other DNA
agctactcagtaggctgagg

SEQ ID NO: 2632 - DNA, 20 bp, synthetic construct
  misc_feature 1..20: note = chemically synthesized
  source 1..20: mol_type = other DNA
gctactcagtaggctgaggt

SEQ ID NO: 2633 - DNA, 20 bp, synthetic construct
  misc_feature 1..20: note = chemically synthesized
  source 1..20: mol_type = other DNA
tactcagtaggctgaggtgg

SEQ ID NO: 2634 - DNA, 20 bp, synthetic construct
  misc_feature 1..20: note = chemically synthesized
  source 1..20: mol_type = other DNA
actcagtaggctgaggtggg

SEQ ID NO: 2635 - DNA, 20 bp, synthetic construct
  misc_feature 1..20: note = chemically synthesized
  source 1..20: mol_type = other DNA
ctgaggtgggaggatcactt

SEQ ID NO: 2636 - DNA, 20 bp, synthetic construct
  misc_feature 1..20: note = chemically synthesized
  source 1..20: mol_type = other DNA
gtgggaggatcacttgagct

SEQ ID NO: 2637 - DNA, 20 bp, synthetic construct
  misc_feature 1..20: note = chemically synthesized
  source 1..20: mol_type = other DNA
tgggaggatcacttgagctc

SEQ ID NO: 2638 - DNA, 20 bp, synthetic construct
  misc_feature 1..20: note = chemically synthesized
  source 1..20: mol_type = other DNA
ggaggatcacttgagctcag

SEQ ID NO: 2639 - DNA, 20 bp, synthetic construct
  misc_feature 1..20: note = chemically synthesized
  source 1..20: mol_type = other DNA
gaggatcacttgagctcagg

SEQ ID NO: 2640 - DNA, 20 bp, synthetic construct
  misc_feature 1..20: note = chemically synthesized
  source 1..20: mol_type = other DNA
tcacttgagctcaggaggtc

SEQ ID NO: 2641 - DNA, 20 bp, synthetic construct
  misc_feature 1..20: note = chemically synthesized
  source 1..20: mol_type = other DNA
agctcaggaggtcgagactg

SEQ ID NO: 2642 - DNA, 20 bp, synthetic construct
  misc_feature 1..20: note = chemically synthesized
  source 1..20: mol_type = other DNA
caggaggtcgagactgcagt

SEQ ID NO: 2643 - DNA, 20 bp, synthetic construct
  misc_feature 1..20: note = chemically synthesized
  source 1..20: mol_type = other DNA
actgcagtgagccgtgatcg

SEQ ID NO: 2644 - DNA, 20 bp, synthetic construct
  misc_feature 1..20: note = chemically synthesized
  source 1..20: mol_type = other DNA
gtgatcgcagtactgcacac

SEQ ID NO: 2645 - DNA, 20 bp, synthetic construct
  misc_feature 1..20: note = chemically synthesized
  source 1..20: mol_type = other DNA
gcagtactgcacaccagcct

SEQ ID NO: 2646 - DNA, 20 bp, synthetic construct
  misc_feature 1..20: note = chemically synthesized
  source 1..20: mol_type = other DNA
ctgcacaccagccttggtgt

SEQ ID NO: 2647 - DNA, 20 bp, synthetic construct
  misc_feature 1..20: note = chemically synthesized
  source 1..20: mol_type = other DNA
accagccttggtgtcagact

SEQ ID NO: 2648 - DNA, 20 bp, synthetic construct
  misc_feature 1..20: note = chemically synthesized
  source 1..20: mol_type = other DNA
tgtctcaacaacaacaaaac

SEQ ID NO: 2649 - DNA, 20 bp, synthetic construct
  misc_feature 1..20: note = chemically synthesized
  source 1..20: mol_type = other DNA
tcaacaacaacaaaacaagt

SEQ ID NO: 2650 - DNA, 20 bp, synthetic construct
  misc_feature 1..20: note = chemically synthesized
  source 1..20: mol_type = other DNA
aacaaaacaagttagaaatt

SEQ ID NO: 2651 - DNA, 20 bp, synthetic construct
  misc_feature 1..20: note = chemically synthesized
  source 1..20: mol_type = other DNA
aaacaagttagaaatttggc

SEQ ID NO: 2652 - DNA, 20 bp, synthetic construct
  misc_feature 1..20: note = chemically synthesized
  source 1..20: mol_type = other DNA
aacaagttagaaatttggct

SEQ ID NO: 2653 - DNA, 20 bp, synthetic construct
  misc_feature 1..20: note = chemically synthesized
  source 1..20: mol_type = other DNA
gttagaaatttggctgggcg

SEQ ID NO: 2654 - DNA, 20 bp, synthetic construct
  misc_feature 1..20: note = chemically synthesized
  source 1..20: mol_type = other DNA
agaaatttggctgggcgcgg

SEQ ID NO: 2655 - DNA, 20 bp, synthetic construct
  misc_feature 1..20: note = chemically synthesized
  source 1..20: mol_type = other DNA
gtagctcacgcctgtaatcc

SEQ ID NO: 2656 - DNA, 20 bp, synthetic construct
  misc_feature 1..20: note = chemically synthesized
  source 1..20: mol_type = other DNA
cgcctgtaatcccagcactt

SEQ ID NO: 2657 - DNA, 20 bp, synthetic construct
  misc_feature 1..20: note = chemically synthesized
  source 1..20: mol_type = other DNA
gcctgtaatcccagcacttt

SEQ ID NO: 2658 - DNA, 20 bp, synthetic construct
  misc_feature 1..20: note = chemically synthesized
  source 1..20: mol_type = other DNA
ctgtaatcccagcactttgg

SEQ ID NO: 2659 - DNA, 20 bp, synthetic construct
  misc_feature 1..20: note = chemically synthesized
  source 1..20: mol_type = other DNA
tgtaatcccagcactttggg

SEQ ID NO: 2660 - DNA, 20 bp, synthetic construct
  misc_feature 1..20: note = chemically synthesized
  source 1..20: mol_type = other DNA
cagcactttgggaggccaaa

SEQ ID NO: 2661 - DNA, 20 bp, synthetic construct
  misc_feature 1..20: note = chemically synthesized
  source 1..20: mol_type = other DNA
agcactttgggaggccaaaa

SEQ ID NO: 2662 - DNA, 20 bp, synthetic construct
  misc_feature 1..20: note = chemically synthesized
  source 1..20: mol_type = other DNA
gcactttgggaggccaaaaa

SEQ ID NO: 2663 - DNA, 20 bp, synthetic construct
  misc_feature 1..20: note = chemically synthesized
  source 1..20: mol_type = other DNA
ctttgggaggccaaaaaggg

SEQ ID NO: 2664 - DNA, 20 bp, synthetic construct
  misc_feature 1..20: note = chemically synthesized
  source 1..20: mol_type = other DNA
ccaaaaagggcggatcattt

SEQ ID NO: 2665 - DNA, 20 bp, synthetic construct
  misc_feature 1..20: note = chemically synthesized
  source 1..20: mol_type = other DNA
caaaaagggcggatcatttg

SEQ ID NO: 2666 - DNA, 20 bp, synthetic construct
  misc_feature 1..20: note = chemically synthesized
  source 1..20: mol_type = other DNA
aagggcggatcatttgaggt

SEQ ID NO: 2667 - DNA, 20 bp, synthetic construct
  misc_feature 1..20: note = chemically synthesized
  source 1..20: mol_type = other DNA
agggcggatcatttgaggtc

SEQ ID NO: 2668 - DNA, 20 bp, synthetic construct
  misc_feature 1..20: note = chemically synthesized
  source 1..20: mol_type = other DNA
ggcggatcatttgaggtcag

SEQ ID NO: 2669 - DNA, 20 bp, synthetic construct
  misc_feature 1..20: note = chemically synthesized
  source 1..20: mol_type = other DNA
tcatttgaggtcaggagttc

SEQ ID NO: 2670 - DNA, 20 bp, synthetic construct
  misc_feature 1..20: note = chemically synthesized
  source 1..20: mol_type = other DNA
tgaggtcaggagttcgagac

SEQ ID NO: 2671 - DNA, 20 bp, synthetic construct
  misc_feature 1..20: note = chemically synthesized
  source 1..20: mol_type = other DNA
tcaggagttcgagaccagcc

SEQ ID NO: 2672 - DNA, 20 bp, synthetic construct
  misc_feature 1..20: note = chemically synthesized
  source 1..20: mol_type = other DNA
cgagaccagcctggccaaca

SEQ ID NO: 2673 - DNA, 20 bp, synthetic construct
  misc_feature 1..20: note = chemically synthesized
  source 1..20: mol_type = other DNA
actaaaaatacaaaaaaaat

SEQ ID NO: 2674 - DNA, 20 bp, synthetic construct
  misc_feature 1..20: note = chemically synthesized
  source 1..20: mol_type = other DNA
caaaaaaaattagccgtgca

SEQ ID NO: 2675 - DNA, 20 bp, synthetic construct
  misc_feature 1..20: note = chemically synthesized
  source 1..20: mol_type = other DNA
aaaaaattagccgtgcatgg

SEQ ID NO: 2676 - DNA, 20 bp, synthetic construct
  misc_feature 1..20: note = chemically synthesized
  source 1..20: mol_type = other DNA
tgcatggtggcatgcgcctg

SEQ ID NO: 2677 - DNA, 20 bp, synthetic construct
  misc_feature 1..20: note = chemically synthesized
  source 1..20: mol_type = other DNA
gtggcatgcgcctgtagtct

SEQ ID NO: 2678 - DNA, 20 bp, synthetic construct
  misc_feature 1..20: note = chemically synthesized
  source 1..20: mol_type = other DNA
cgcctgtagtctcagccact

SEQ ID NO: 2679 - DNA, 20 bp, synthetic construct
  misc_feature 1..20: note = chemically synthesized
  source 1..20: mol_type = other DNA
gcctgtagtctcagccactt

SEQ ID NO: 2680 - DNA, 20 bp, synthetic construct
  misc_feature 1..20: note = chemically synthesized
  source 1..20: mol_type = other DNA
ctgtagtctcagccacttgg

SEQ ID NO: 2681 - DNA, 20 bp, synthetic construct
  misc_feature 1..20: note = chemically synthesized
  source 1..20: mol_type = other DNA
tgtagtctcagccacttggg

SEQ ID NO: 2682 - DNA, 20 bp, synthetic construct
  misc_feature 1..20: note = chemically synthesized
  source 1..20: mol_type = other DNA
tctcagccacttgggaggct

SEQ ID NO: 2683 - DNA, 20 bp, synthetic construct
  misc_feature 1..20: note = chemically synthesized
  source 1..20: mol_type = other DNA
ctcagccacttgggaggctg

SEQ ID NO: 2684 - DNA, 20 bp, synthetic construct
  misc_feature 1..20: note = chemically synthesized
  source 1..20: mol_type = other DNA
agccacttgggaggctgagg

SEQ ID NO: 2685 - DNA, 20 bp, synthetic construct
  misc_feature 1..20: note = chemically synthesized
  source 1..20: mol_type = other DNA
gccacttgggaggctgaggc

SEQ ID NO: 2686 - DNA, 20 bp, synthetic construct
  misc_feature 1..20: note = chemically synthesized
  source 1..20: mol_type = other DNA
gcaggaaaattgcttgaacc

SEQ ID NO: 2687 - DNA, 20 bp, synthetic construct
  misc_feature 1..20: note = chemically synthesized
  source 1..20: mol_type = other DNA
caggaaaattgcttgaaccc

SEQ ID NO: 2688 - DNA, 20 bp, synthetic construct
  misc_feature 1..20: note = chemically synthesized
  source 1..20: mol_type = other DNA
ggaaaattgcttgaacccag

SEQ ID NO: 2689 - DNA, 20 bp, synthetic construct
  misc_feature 1..20: note = chemically synthesized
  source 1..20: mol_type = other DNA
gaaaattgcttgaacccagg

SEQ ID NO: 2690 - DNA, 20 bp, synthetic construct
  misc_feature 1..20: note = chemically synthesized
  source 1..20: mol_type = other DNA
aattgcttgaacccaggagg

SEQ ID NO: 2691 - DNA, 20 bp, synthetic construct
  misc_feature 1..20: note = chemically synthesized
  source 1..20: mol_type = other DNA
ttgcttgaacccaggaggca

SEQ ID NO: 2692 - DNA, 20 bp, synthetic construct
  misc_feature 1..20: note = chemically synthesized
  source 1..20: mol_type = other DNA
tgcttgaacccaggaggcag

SEQ ID NO: 2693 - DNA, 20 bp, synthetic construct
  misc_feature 1..20: note = chemically synthesized
  source 1..20: mol_type = other DNA
aacccaggaggcagaggttg

SEQ ID NO: 2694 - DNA, 20 bp, synthetic construct
  misc_feature 1..20: note = chemically synthesized
  source 1..20: mol_type = other DNA
caggaggcagaggttgcagt

SEQ ID NO: 2695 - DNA, 20 bp, synthetic construct
  misc_feature 1..20: note = chemically synthesized
  source 1..20: mol_type = other DNA
ggcagaggttgcagtgagcc

SEQ ID NO: 2696 - DNA, 20 bp, synthetic construct
  misc_feature 1..20: note = chemically synthesized
  source 1..20: mol_type = other DNA
gagatcatgccactgcattc

SEQ ID NO: 2697 - DNA, 20 bp, synthetic construct
  misc_feature 1..20: note = chemically synthesized
  source 1..20: mol_type = other DNA
catgccactgcattccagcc

SEQ ID NO: 2698 - DNA, 20 bp, synthetic construct
  misc_feature 1..20: note = chemically synthesized
  source 1..20: mol_type = other DNA
atgccactgcattccagcct

SEQ ID NO: 2699 - DNA, 20 bp, synthetic construct
  misc_feature 1..20: note = chemically synthesized
  source 1..20: mol_type = other DNA
ctgcattccagcctgggtga

SEQ ID NO: 2700 - DNA, 20 bp, synthetic construct
  misc_feature 1..20: note = chemically synthesized
  source 1..20: mol_type = other DNA
gcattccagcctgggtgata

SEQ ID NO: 2701 - DNA, 20 bp, synthetic construct
  misc_feature 1..20: note = chemically synthesized
  source 1..20: mol_type = other DNA
tccagcctgggtgatagagt

SEQ ID NO: 2702 - DNA, 20 bp, synthetic construct
  misc_feature 1..20: note = chemically synthesized
  source 1..20: mol_type = other DNA
atagagtgagactccatctc

SEQ ID NO: 2703 - DNA, 20 bp, synthetic construct
  misc_feature 1..20: note = chemically synthesized
  source 1..20: mol_type = other DNA
aaattttaaaatacatctga

SEQ ID NO: 2704 - DNA, 20 bp, synthetic construct
  misc_feature 1..20: note = chemically synthesized
  source 1..20: mol_type = other DNA
gaaagatatttcaaaatatt

SEQ ID NO: 2705 - DNA, 20 bp, synthetic construct
  misc_feature 1..20: note = chemically synthesized
  source 1..20: mol_type = other DNA
aaagatatttcaaaatattt

SEQ ID NO: 2706 - DNA, 20 bp, synthetic construct
  misc_feature 1..20: note = chemically synthesized
  source 1..20: mol_type = other DNA
aatatttaggaaaaaaatta

SEQ ID NO: 2707 - DNA, 20 bp, synthetic construct
  misc_feature 1..20: note = chemically synthesized
  source 1..20: mol_type = other DNA
atatttaggaaaaaaattat

SEQ ID NO: 2708 - DNA, 20 bp, synthetic construct
  misc_feature 1..20: note = chemically synthesized
  source 1..20: mol_type = other DNA
tatttaggaaaaaaattata

SEQ ID NO: 2709 - DNA, 20 bp, synthetic construct
  misc_feature 1..20: note = chemically synthesized
  source 1..20: mol_type = other DNA
aggaaaaaaattatagggat

SEQ ID NO: 2710 - DNA, 20 bp, synthetic construct
  misc_feature 1..20: note = chemically synthesized
  source 1..20: mol_type = other DNA
ggaaaaaaattatagggatc

SEQ ID NO: 2711 - DNA, 20 bp, synthetic construct
  misc_feature 1..20: note = chemically synthesized
  source 1..20: mol_type = other DNA
atagggatcaggcaaattct

SEQ ID NO: 2712 - DNA, 20 bp, synthetic construct
  misc_feature 1..20: note = chemically synthesized
  source 1..20: mol_type = other DNA
ctgagattcctttttccctg

SEQ ID NO: 2713 - DNA, 20 bp, synthetic construct
  misc_feature 1..20: note = chemically synthesized
  source 1..20: mol_type = other DNA
tttttccctgcagcaaacat

SEQ ID NO: 2714 - DNA, 20 bp, synthetic construct
  misc_feature 1..20: note = chemically synthesized
  source 1..20: mol_type = other DNA
ttttccctgcagcaaacatt

SEQ ID NO: 2715 - DNA, 20 bp, synthetic construct
  misc_feature 1..20: note = chemically synthesized
  source 1..20: mol_type = other DNA
ttccctgcagcaaacattag

SEQ ID NO: 2716 - DNA, 20 bp, synthetic construct
  misc_feature 1..20: note = chemically synthesized
  source 1..20: mol_type = other DNA
tgctgctgttcctaaaaaca

SEQ ID NO: 2717 - DNA, 20 bp, synthetic construct
  misc_feature 1..20: note = chemically synthesized
  source 1..20: mol_type = other DNA
tgccacaccgtatgtttcct

SEQ ID NO: 2718 - DNA, 20 bp, synthetic construct
  misc_feature 1..20: note = chemically synthesized
  source 1..20: mol_type = other DNA
caccgtatgtttccttggct

SEQ ID NO: 2719 - DNA, 20 bp, synthetic construct
  misc_feature 1..20: note = chemically synthesized
  source 1..20: mol_type = other DNA
tgtttccttggctcagacat

SEQ ID NO: 2720 - DNA, 20 bp, synthetic construct
  misc_feature 1..20: note = chemically synthesized
  source 1..20: mol_type = other DNA
gtttccttggctcagacata

SEQ ID NO: 2721 - DNA, 20 bp, synthetic construct
  misc_feature 1..20: note = chemically synthesized
  source 1..20: mol_type = other DNA
ggctcagacataaggttgtg

SEQ ID NO: 2722 - DNA, 20 bp, synthetic construct
  misc_feature 1..20: note = chemically synthesized
  source 1..20: mol_type = other DNA
aggttgtgtagttgttattc

SEQ ID NO: 2723 - DNA, 20 bp, synthetic construct
  misc_feature 1..20: note = chemically synthesized
  source 1..20: mol_type = other DNA
gtgtagttgttattccagaa

SEQ ID NO: 2724 - DNA, 20 bp, synthetic construct
  misc_feature 1..20: note = chemically synthesized
  source 1..20: mol_type = other DNA
agttgttattccagaatagc

SEQ ID NO: 2725 - DNA, 20 bp, synthetic construct
  misc_feature 1..20: note = chemically synthesized
  source 1..20: mol_type = other DNA
gaatagctagaataaaaatc

SEQ ID NO: 2726 - DNA, 20 bp, synthetic construct
  misc_feature 1..20: note = chemically synthesized
  source 1..20: mol_type = other DNA
atccagcacatcattttctt

SEQ ID NO: 2727 - DNA, 20 bp, synthetic construct
  misc_feature 1..20: note = chemically synthesized
  source 1..20: mol_type = other DNA
agcacatcattttcttcagc

SEQ ID NO: 2728 - DNA, 20 bp, synthetic construct
  misc_feature 1..20: note = chemically synthesized
  source 1..20: mol_type = other DNA
taactaacctctctgtgcct

SEQ ID NO: 2729 - DNA, 20 bp, synthetic construct
  misc_feature 1..20: note = chemically synthesized
  source 1..20: mol_type = other DNA
tctgtgccttggtttcataa

SEQ ID NO: 2730 - DNA, 20 bp, synthetic construct
  misc_feature 1..20: note = chemically synthesized
  source 1..20: mol_type = other DNA
tggtttcataacagcaacat

SEQ ID NO: 2731 - DNA, 20 bp, synthetic construct
  misc_feature 1..20: note = chemically synthesized
  source 1..20: mol_type = other DNA
taacagcaacataagcataa

SEQ ID NO: 2732 - DNA, 20 bp, synthetic construct
  misc_feature 1..20: note = chemically synthesized
  source 1..20: mol_type = other DNA
gcaacataagcataacagaa

SEQ ID NO: 2733 - DNA, 20 bp, synthetic construct
  misc_feature 1..20: note = chemically synthesized
  source 1..20: mol_type = other DNA
acataagcataacagaatag

SEQ ID NO: 2734 - DNA, 20 bp, synthetic construct
  misc_feature 1..20: note = chemically synthesized
  source 1..20: mol_type = other DNA
gcataacagaatagcagcaa

SEQ ID NO: 2735 - DNA, 20 bp, synthetic construct
  misc_feature 1..20: note = chemically synthesized
  source 1..20: mol_type = other DNA
atagctcctacctacctcat

SEQ ID NO: 2736 - DNA, 20 bp, synthetic construct
  misc_feature 1..20: note = chemically synthesized
  source 1..20: mol_type = other DNA
acctacctcataagattctt

SEQ ID NO: 2737 - DNA, 20 bp, synthetic construct
  misc_feature 1..20: note = chemically synthesized
  source 1..20: mol_type = other DNA
ctacctcataagattctttg

SEQ ID NO: 2738 - DNA, 20 bp, synthetic construct
  misc_feature 1..20: note = chemically synthesized
  source 1..20: mol_type = other DNA
tacctcataagattctttgg

SEQ ID NO: 2739 - DNA, 20 bp, synthetic construct
  misc_feature 1..20: note = chemically synthesized
  source 1..20: mol_type = other DNA
ttctttggaggaattaaatt

SEQ ID NO: 2740 - DNA, 20 bp, synthetic construct
  misc_feature 1..20: note = chemically synthesized
  source 1..20: mol_type = other DNA
ggaggaattaaattaagatt

SEQ ID NO: 2741 - DNA, 20 bp, synthetic construct
  misc_feature 1..20: note = chemically synthesized
  source 1..20: mol_type = other DNA
ttaaattaagattcagaaca

SEQ ID NO: 2742 - DNA, 20 bp, synthetic construct
  misc_feature 1..20: note = chemically synthesized
  source 1..20: mol_type = other DNA
tcagaacacagcctaatatc

SEQ ID NO: 2743 - DNA, 20 bp, synthetic construct
  misc_feature 1..20: note = chemically synthesized
  source 1..20: mol_type = other DNA
aacacagcctaatatctagt

SEQ ID NO: 2744 - DNA, 20 bp, synthetic construct
  misc_feature 1..20: note = chemically synthesized
  source 1..20: mol_type = other DNA
atctagtaagtaataataat

SEQ ID NO: 2745 - DNA, 20 bp, synthetic construct
  misc_feature 1..20: note = chemically synthesized
  source 1..20: mol_type = other DNA
ttggctaaaaaaattttctt

SEQ ID NO: 2746 - DNA, 20 bp, synthetic construct
  misc_feature 1..20: note = chemically synthesized
  source 1..20: mol_type = other DNA
cttaagattatatatattca

SEQ ID NO: 2747 - DNA, 20 bp, synthetic construct
  misc_feature 1..20: note = chemically synthesized
  source 1..20: mol_type = other DNA
ttaagattatatatattcat

SEQ ID NO: 2748 - DNA, 20 bp, synthetic construct
  misc_feature 1..20: note = chemically synthesized
  source 1..20: mol_type = other DNA
taagattatatatattcatg

SEQ ID NO: 2749 - DNA, 20 bp, synthetic construct
  misc_feature 1..20: note = chemically synthesized
  source 1..20: mol_type = other DNA
tatatatattcatggggtac

SEQ ID NO: 2750 - DNA, 20 bp, synthetic construct
  misc_feature 1..20: note = chemically synthesized
  source 1..20: mol_type = other DNA
tacattaatatattgcattg

SEQ ID NO: 2751 - DNA, 20 bp, synthetic construct
  misc_feature 1..20: note = chemically synthesized
  source 1..20: mol_type = other DNA
atattgcattgtggtgaaat

SEQ ID NO: 2752 - DNA, 20 bp, synthetic construct
  misc_feature 1..20: note = chemically synthesized
  source 1..20: mol_type = other DNA
tattgcattgtggtgaaatc

SEQ ID NO: 2753 - DNA, 20 bp, synthetic construct
  misc_feature 1..20: note = chemically synthesized
  source 1..20: mol_type = other DNA
attgcattgtggtgaaatca

SEQ ID NO: 2754 - DNA, 20 bp, synthetic construct
  misc_feature 1..20: note = chemically synthesized
  source 1..20: mol_type = other DNA
tcagggccttcaatccatcc

SEQ ID NO: 2755 - DNA, 20 bp, synthetic construct
  misc_feature 1..20: note = chemically synthesized
  source 1..20: mol_type = other DNA
caatccatcccggaaaaaaa

SEQ ID NO: 2756 - DNA, 20 bp, synthetic construct
  misc_feature 1..20: note = chemically synthesized
  source 1..20: mol_type = other DNA
ggaaaaaaaaagtttttgaa

SEQ ID NO: 2757 - DNA, 20 bp, synthetic construct
  misc_feature 1..20: note = chemically synthesized
  source 1..20: mol_type = other DNA
ttttgaaaagatttctgcca

SEQ ID NO: 2758 - DNA, 20 bp, synthetic construct
  misc_feature 1..20: note = chemically synthesized
  source 1..20: mol_type = other DNA
atgtacaaattcatccatcc

SEQ ID NO: 2759 - DNA, 20 bp, synthetic construct
  misc_feature 1..20: note = chemically synthesized
  source 1..20: mol_type = other DNA
aaattcatccatccaagaaa

SEQ ID NO: 2760 - DNA, 20 bp, synthetic construct
  misc_feature 1..20: note = chemically synthesized
  source 1..20: mol_type = other DNA
ccaagaaatagaaaatatat

SEQ ID NO: 2761 - DNA, 20 bp, synthetic construct
  misc_feature 1..20: note = chemically synthesized
  source 1..20: mol_type = other DNA
ctacaccttaaacaattact

SEQ ID NO: 2762 - DNA, 20 bp, synthetic construct
  misc_feature 1..20: note = chemically synthesized
  source 1..20: mol_type = other DNA
cttaaacaattactcagaaa

SEQ ID NO: 2763 - DNA, 20 bp, synthetic construct
  misc_feature 1..20: note = chemically synthesized
  source 1..20: mol_type = other DNA
tactcagaaatagaatgctt

SEQ ID NO: 2764 - DNA, 20 bp, synthetic construct
  misc_feature 1..20: note = chemically synthesized
  source 1..20: mol_type = other DNA
aaatagaatgcttgagatac

SEQ ID NO: 2765 - DNA, 20 bp, synthetic construct
  misc_feature 1..20: note = chemically synthesized
  source 1..20: mol_type = other DNA
taccagaatgcatgcatatc

SEQ ID NO: 2766 - DNA, 20 bp, synthetic construct
  misc_feature 1..20: note = chemically synthesized
  source 1..20: mol_type = other DNA
tatcaagtaataaatgcatg

SEQ ID NO: 2767 - DNA, 20 bp, synthetic construct
  misc_feature 1..20: note = chemically synthesized
  source 1..20: mol_type = other DNA
atcaagtaataaatgcatgc

SEQ ID NO: 2768 - DNA, 20 bp, synthetic construct
  misc_feature 1..20: note = chemically synthesized
  source 1..20: mol_type = other DNA
tgcaggatgtcaacgcatcc

SEQ ID NO: 2769 - DNA, 20 bp, synthetic construct
  misc_feature 1..20: note = chemically synthesized
  source 1..20: mol_type = other DNA
gcaggatgtcaacgcatcct

SEQ ID NO: 2770 - DNA, 20 bp, synthetic construct
  misc_feature 1..20: note = chemically synthesized
  source 1..20: mol_type = other DNA
tacaaaatactttaatattg

SEQ ID NO: 2771 - DNA, 20 bp, synthetic construct
  misc_feature 1..20: note = chemically synthesized
  source 1..20: mol_type = other DNA
tgtagtaacattctacatgt

SEQ ID NO: 2772 - DNA, 20 bp, synthetic construct
  misc_feature 1..20: note = chemically synthesized
  source 1..20: mol_type = other DNA
tagtaacattctacatgtta

SEQ ID NO: 2773 - DNA, 20 bp, synthetic construct
  misc_feature 1..20: note = chemically synthesized
  source 1..20: mol_type = other DNA
acattctacatgttagagtg

SEQ ID NO: 2774 - DNA, 20 bp, synthetic construct
  misc_feature 1..20: note = chemically synthesized
  source 1..20: mol_type = other DNA
ttctacatgttagagtgtag

SEQ ID NO: 2775 - DNA, 20 bp, synthetic construct
  misc_feature 1..20: note = chemically synthesized
  source 1..20: mol_type = other DNA
agttaatcgctgatgcaaaa

SEQ ID NO: 2776 - DNA, 20 bp, synthetic construct
  misc_feature 1..20: note = chemically synthesized
  source 1..20: mol_type = other DNA
gttaatcgctgatgcaaaaa

SEQ ID NO: 2777 - DNA, 20 bp, synthetic construct
  misc_feature 1..20: note = chemically synthesized
  source 1..20: mol_type = other DNA
tcgctgatgcaaaaaaggaa

SEQ ID NO: 2778 - DNA, 20 bp, synthetic construct
  misc_feature 1..20: note = chemically synthesized
  source 1..20: mol_type = other DNA
aaaagaacacattataccca

SEQ ID NO: 2779 - DNA, 20 bp, synthetic construct
  misc_feature 1..20: note = chemically synthesized
  source 1..20: mol_type = other DNA
cacattatacccaaagccta

SEQ ID NO: 2780 - DNA, 20 bp, synthetic construct
  misc_feature 1..20: note = chemically synthesized
  source 1..20: mol_type = other DNA
cattatacccaaagcctaca

SEQ ID NO: 2781 - DNA, 20 bp, synthetic construct
  misc_feature 1..20: note = chemically synthesized
  source 1..20: mol_type = other DNA
ttatacccaaagcctacaga

SEQ ID NO: 2782 - DNA, 20 bp, synthetic construct
  misc_feature 1..20: note = chemically synthesized
  source 1..20: mol_type = other DNA
agaatcacaattacaaatat

SEQ ID NO: 2783 - DNA, 20 bp, synthetic construct
  misc_feature 1..20: note = chemically synthesized
  source 1..20: mol_type = other DNA
tgtgaaaatctttaatttga

SEQ ID NO: 2784 - DNA, 20 bp, synthetic construct
  misc_feature 1..20: note = chemically synthesized
  source 1..20: mol_type = other DNA
aaaatctttaatttgaaagt

SEQ ID NO: 2785 - DNA, 20 bp, synthetic construct
  misc_feature 1..20: note = chemically synthesized
  source 1..20: mol_type = other DNA
agtcagaaatatttaaatga

SEQ ID NO: 2786 - DNA, 20 bp, synthetic construct
  misc_feature 1..20: note = chemically synthesized
  source 1..20: mol_type = other DNA
aatgatagtcattgttaaat

SEQ ID NO: 2787 - DNA, 20 bp, synthetic construct
  misc_feature 1..20: note = chemically synthesized
  source 1..20: mol_type = other DNA
gtcattgttaaatcagattg

SEQ ID NO: 2788 - DNA, 20 bp, synthetic construct
  misc_feature 1..20: note = chemically synthesized
  source 1..20: mol_type = other DNA
tcagattgtggtttgaaaaa

SEQ ID NO: 2789 - DNA, 20 bp, synthetic construct
  misc_feature 1..20: note = chemically synthesized
  source 1..20: mol_type = other DNA
attgtggtttgaaaaaaagt

SEQ ID NO: 2790 - DNA, 20 bp, synthetic construct
  misc_feature 1..20: note = chemically synthesized
  source 1..20: mol_type = other DNA
aaaaaagttagtttaaaact

SEQ ID NO: 2791 - DNA, 20 bp, synthetic construct
  misc_feature 1..20: note = chemically synthesized
  source 1..20: mol_type = other DNA
aactgagtttatgaaaaatt

SEQ ID NO: 2792 - DNA, 20 bp, synthetic construct
  misc_feature 1..20: note = chemically synthesized
  source 1..20: mol_type = other DNA
actgagtttatgaaaaattt

SEQ ID NO: 2793 - DNA, 20 bp, synthetic construct
  misc_feature 1..20: note = chemically synthesized
  source 1..20: mol_type = other DNA
ctgagtttatgaaaaatttg

SEQ ID NO: 2794 - DNA, 20 bp, synthetic construct
  misc_feature 1..20: note = chemically synthesized
  source 1..20: mol_type = other DNA
tatgaaaaatttggggattt

SEQ ID NO: 2795 - DNA, 20 bp, synthetic construct
  misc_feature 1..20: note = chemically synthesized
  source 1..20: mol_type = other DNA
tgaaaaatttggggatttta

SEQ ID NO: 2796 - DNA, 20 bp, synthetic construct
  misc_feature 1..20: note = chemically synthesized
  source 1..20: mol_type = other DNA
aaatttggggattttagaga

SEQ ID NO: 2797 - DNA, 20 bp, synthetic construct
  misc_feature 1..20: note = chemically synthesized
  source 1..20: mol_type = other DNA
ttttgtttttaaatgtgtgt

SEQ ID NO: 2798 - DNA, 20 bp, synthetic construct
  misc_feature 1..20: note = chemically synthesized
  source 1..20: mol_type = other DNA
taaatgtgtgtgagtttgtg

SEQ ID NO: 2799 - DNA, 20 bp, synthetic construct
  misc_feature 1..20: note = chemically synthesized
  source 1..20: mol_type = other DNA
aatgttttataaaatactga

SEQ ID NO: 2800 - DNA, 20 bp, synthetic construct
  misc_feature 1..20: note = chemically synthesized
  source 1..20: mol_type = other DNA
taaaatactgacagtattat

SEQ ID NO: 2801 - DNA, 20 bp, synthetic construct
  misc_feature 1..20: note = chemically synthesized
  source 1..20: mol_type = other DNA
acattattataatacaacat

SEQ ID NO: 2802 - DNA, 20 bp, synthetic construct
  misc_feature 1..20: note = chemically synthesized
  source 1..20: mol_type = other DNA
ataatacaacataagaattt

SEQ ID NO: 2803 - DNA, 20 bp, synthetic construct
  misc_feature 1..20: note = chemically synthesized
  source 1..20: mol_type = other DNA
gaattttggcctgtacctct

SEQ ID NO: 2804 - DNA, 20 bp, synthetic construct
  misc_feature 1..20: note = chemically synthesized
  source 1..20: mol_type = other DNA
ttttggcctgtacctctcag

SEQ ID NO: 2805 - DNA, 20 bp, synthetic construct
  misc_feature 1..20: note = chemically synthesized
  source 1..20: mol_type = other DNA
gtacttgactcaatgattat

SEQ ID NO: 2806 - DNA, 20 bp, synthetic construct
  misc_feature 1..20: note = chemically synthesized
  source 1..20: mol_type = other DNA
acttgactcaatgattatca

SEQ ID NO: 2807 - DNA, 20 bp, synthetic construct
  misc_feature 1..20: note = chemically synthesized
  source 1..20: mol_type = other DNA
tgactcaatgattatcagag

SEQ ID NO: 2808 - DNA, 20 bp, synthetic construct
  misc_feature 1..20: note = chemically synthesized
  source 1..20: mol_type = other DNA
ttttccttctgttgtgttcc

SEQ ID NO: 2809 - DNA, 20 bp, synthetic construct
  misc_feature 1..20: note = chemically synthesized
  source 1..20: mol_type = other DNA
cttctgttgtgttcccagtt

SEQ ID NO: 2810 - DNA, 20 bp, synthetic construct
  misc_feature 1..20: note = chemically synthesized
  source 1..20: mol_type = other DNA
ttctgttgtgttcccagttc

SEQ ID NO: 2811 - DNA, 20 bp, synthetic construct
  misc_feature 1..20: note = chemically synthesized
  source 1..20: mol_type = other DNA
tgttgtgttcccagttcagg

SEQ ID NO: 2812 - DNA, 20 bp, synthetic construct
  misc_feature 1..20: note = chemically synthesized
  source 1..20: mol_type = other DNA
tgttcccagttcaggcagct

SEQ ID NO: 2813 - DNA, 20 bp, synthetic construct
  misc_feature 1..20: note = chemically synthesized
  source 1..20: mol_type = other DNA
cagttcaggcagctcagcaa

SEQ ID NO: 2814 - DNA, 20 bp, synthetic construct
  misc_feature 1..20: note = chemically synthesized
  source 1..20: mol_type = other DNA
tcagcaatggcctgtgattc

SEQ ID NO: 2815 - DNA, 20 bp, synthetic construct
  misc_feature 1..20: note = chemically synthesized
  source 1..20: mol_type = other DNA
tgtgattccagcaattcaaa

SEQ ID NO: 2816 - DNA, 20 bp, synthetic construct
  misc_feature 1..20: note = chemically synthesized
  source 1..20: mol_type = other DNA
attccagcaattcaaatagc

SEQ ID NO: 2817 - DNA, 20 bp, synthetic construct
  misc_feature 1..20: note = chemically synthesized
  source 1..20: mol_type = other DNA
cagcaattcaaatagctggt

SEQ ID NO: 2818 - DNA, 20 bp, synthetic construct
  misc_feature 1..20: note = chemically synthesized
  source 1..20: mol_type = other DNA
caattcaaatagctggtaag

SEQ ID NO: 2819 - DNA, 20 bp, synthetic construct
  misc_feature 1..20: note = chemically synthesized
  source 1..20: mol_type = other DNA
tgtttgttttctcaaatttt

SEQ ID NO: 2820 - DNA, 20 bp, synthetic construct
  misc_feature 1..20: note = chemically synthesized
  source 1..20: mol_type = other DNA
gtttgttttctcaaattttc

SEQ ID NO: 2821 - DNA, 20 bp, synthetic construct
  misc_feature 1..20: note = chemically synthesized
  source 1..20: mol_type = other DNA
tttgttttctcaaattttca

SEQ ID NO: 2822 - DNA, 20 bp, synthetic construct
  misc_feature 1..20: note = chemically synthesized
  source 1..20: mol_type = other DNA
ttgttttctcaaattttcag

SEQ ID NO: 2823 - DNA, 20 bp, synthetic construct
  misc_feature 1..20: note = chemically synthesized
  source 1..20: mol_type = other DNA
tttcaggggcttttctctac

SEQ ID NO: 2824 - DNA, 20 bp, synthetic construct
  misc_feature 1..20: note = chemically synthesized
  source 1..20: mol_type = other DNA
ttttctctacaagtgatttc

SEQ ID NO: 2825 - DNA, 20 bp, synthetic construct
  misc_feature 1..20: note = chemically synthesized
  source 1..20: mol_type = other DNA
attctttattcctttacctt

SEQ ID NO: 2826 - DNA, 20 bp, synthetic construct
  misc_feature 1..20: note = chemically synthesized
  source 1..20: mol_type = other DNA
ttctttattcctttaccttc

SEQ ID NO: 2827 - DNA, 20 bp, synthetic construct
  misc_feature 1..20: note = chemically synthesized
  source 1..20: mol_type = other DNA
tttaccttcaggaaaaccct

SEQ ID NO: 2828 - DNA, 20 bp, synthetic construct
  misc_feature 1..20: note = chemically synthesized
  source 1..20: mol_type = other DNA
aaccctcagcgctgcatctc

SEQ ID NO: 2829 - DNA, 20 bp, synthetic construct
  misc_feature 1..20: note = chemically synthesized
  source 1..20: mol_type = other DNA
agcgctgcatctctggtcac

SEQ ID NO: 2830 - DNA, 20 bp, synthetic construct
  misc_feature 1..20: note = chemically synthesized
  source 1..20: mol_type = other DNA
ctctggtcaccggaccaccg

SEQ ID NO: 2831 - DNA, 20 bp, synthetic construct
  misc_feature 1..20: note = chemically synthesized
  source 1..20: mol_type = other DNA
caccgtggtacatttaccta

SEQ ID NO: 2832 - DNA, 20 bp, synthetic construct
  misc_feature 1..20: note = chemically synthesized
  source 1..20: mol_type = other DNA
gtacatttacctatggccac

SEQ ID NO: 2833 - DNA, 20 bp, synthetic construct
  misc_feature 1..20: note = chemically synthesized
  source 1..20: mol_type = other DNA
tacatttacctatggccacc

SEQ ID NO: 2834 - DNA, 20 bp, synthetic construct
  misc_feature 1..20: note = chemically synthesized
  source 1..20: mol_type = other DNA
cacccttctctttactacca

SEQ ID NO: 2835 - DNA, 20 bp, synthetic construct
  misc_feature 1..20: note = chemically synthesized
  source 1..20: mol_type = other DNA
ttactaccatggtttgtgaa

SEQ ID NO: 2836 - DNA, 20 bp, synthetic construct
  misc_feature 1..20: note = chemically synthesized
  source 1..20: mol_type = other DNA
tggtttgtgaatggttttgc

SEQ ID NO: 2837 - DNA, 20 bp, synthetic construct
  misc_feature 1..20: note = chemically synthesized
  source 1..20: mol_type = other DNA
gtttgtgaatggttttgcca

SEQ ID NO: 2838 - DNA, 20 bp, synthetic construct
  misc_feature 1..20: note = chemically synthesized
  source 1..20: mol_type = other DNA
tttgtgaatggttttgccag

SEQ ID NO: 2839 - DNA, 20 bp, synthetic construct
  misc_feature 1..20: note = chemically synthesized
  source 1..20: mol_type = other DNA
tggttttgccagaggtgaat

SEQ ID NO: 2840 - DNA, 20 bp, synthetic construct
  misc_feature 1..20: note = chemically synthesized
  source 1..20: mol_type = other DNA
gtgaataagaatttaaaatg

SEQ ID NO: 2841 - DNA, 20 bp, synthetic construct
  misc_feature 1..20: note = chemically synthesized
  source 1..20: mol_type = other DNA
tgaataagaatttaaaatgc

SEQ ID NO: 2842 - DNA, 20 bp, synthetic construct
  misc_feature 1..20: note = chemically synthesized
  source 1..20: mol_type = other DNA
ggtctttgatttttcaaatg

SEQ ID NO: 2843 - DNA, 20 bp, synthetic construct
  misc_feature 1..20: note = chemically synthesized
  source 1..20: mol_type = other DNA
tttcaaatgtagttgacctt

SEQ ID NO: 2844 - DNA, 20 bp, synthetic construct
  misc_feature 1..20: note = chemically synthesized
  source 1..20: mol_type = other DNA
accttaagaatttatgaata

SEQ ID NO: 2845 - DNA, 20 bp, synthetic construct
  misc_feature 1..20: note = chemically synthesized
  source 1..20: mol_type = other DNA
taagaatttatgaataaagc

SEQ ID NO: 2846 - DNA, 20 bp, synthetic construct
  misc_feature 1..20: note = chemically synthesized
  source 1..20: mol_type = other DNA
tgaataaagccagaaaaatt

SEQ ID NO: 2847 - DNA, 20 bp, synthetic construct
  misc_feature 1..20: note = chemically synthesized
  source 1..20: mol_type = other DNA
ttaagcttaaaaaacaccga

SEQ ID NO: 2848 - DNA, 20 bp, synthetic construct
  misc_feature 1..20: note = chemically synthesized
  source 1..20: mol_type = other DNA
aaaaaacaccgaaagaaaat

SEQ ID NO: 2849 - DNA, 20 bp, synthetic construct
  misc_feature 1..20: note = chemically synthesized
  source 1..20: mol_type = other DNA
aaaaacaccgaaagaaaatg

SEQ ID NO: 2850 - DNA, 20 bp, synthetic construct
  misc_feature 1..20: note = chemically synthesized
  source 1..20: mol_type = other DNA
atttctattaaaaaaattaa

SEQ ID NO: 2851 - DNA, 20 bp, synthetic construct
  misc_feature 1..20: note = chemically synthesized
  source 1..20: mol_type = other DNA
tttctattaaaaaaattaac

SEQ ID NO: 2852 - DNA, 20 bp, synthetic construct
  misc_feature 1..20: note = chemically synthesized
  source 1..20: mol_type = other DNA
ttaaaaaaattaacaggcca

SEQ ID NO: 2853 - DNA, 20 bp, synthetic construct
  misc_feature 1..20: note = chemically synthesized
  source 1..20: mol_type = other DNA
aggccacagttgctgatgtt

SEQ ID NO: 2854 - DNA, 20 bp, synthetic construct
  misc_feature 1..20: note = chemically synthesized
  source 1..20: mol_type = other DNA
ctgatgtttagtaaatgtgt

SEQ ID NO: 2855 - DNA, 20 bp, synthetic construct
  misc_feature 1..20: note = chemically synthesized
  source 1..20: mol_type = other DNA
tagtgaaatgtgttactgtg

SEQ ID NO: 2856 - DNA, 20 bp, synthetic construct
  misc_feature 1..20: note = chemically synthesized
  source 1..20: mol_type = other DNA
aaatgtgttactgtgaagac

SEQ ID NO: 2857 - DNA, 20 bp, synthetic construct
  misc_feature 1..20: note = chemically synthesized
  source 1..20: mol_type = other DNA
aatgtgttactgtgaagact

SEQ ID NO: 2858 - DNA, 20 bp, synthetic construct
  misc_feature 1..20: note = chemically synthesized
  source 1..20: mol_type = other DNA
atgtgttactgtgaagactg

SEQ ID NO: 2859 - DNA, 20 bp, synthetic construct
  misc_feature 1..20: note = chemically synthesized
  source 1..20: mol_type = other DNA
tggggtgtttcttgaaatct

SEQ ID NO: 2860 - DNA, 20 bp, synthetic construct
  misc_feature 1..20: note = chemically synthesized
  source 1..20: mol_type = other DNA
tgtttcttgaaatctcagcc

SEQ ID NO: 2861 - DNA, 20 bp, synthetic construct
  misc_feature 1..20: note = chemically synthesized
  source 1..20: mol_type = other DNA
gtttcttgaaatctcagccc

SEQ ID NO: 2862 - DNA, 20 bp, synthetic construct
  misc_feature 1..20: note = chemically synthesized
  source 1..20: mol_type = other DNA
aattgtaacatattccttat

SEQ ID NO: 2863 - DNA, 20 bp, synthetic construct
  misc_feature 1..20: note = chemically synthesized
  source 1..20: mol_type = other DNA
attgtaacatattccttatg

SEQ ID NO: 2864 - DNA, 20 bp, synthetic construct
  misc_feature 1..20: note = chemically synthesized
  source 1..20: mol_type = other DNA
gtaacatattccttatgagg

SEQ ID NO: 2865 - DNA, 20 bp, synthetic construct
  misc_feature 1..20: note = chemically synthesized
  source 1..20: mol_type = other DNA
acatattccttatgaggtag

SEQ ID NO: 2866 - DNA, 20 bp, synthetic construct
  misc_feature 1..20: note = chemically synthesized
  source 1..20: mol_type = other DNA
atattccttatgaggtagaa

SEQ ID NO: 2867 - DNA, 20 bp, synthetic construct
  misc_feature 1..20: note = chemically synthesized
  source 1..20: mol_type = other DNA
tccttatgaggtagaagagt

SEQ ID NO: 2868 - DNA, 20 bp, synthetic construct
  misc_feature 1..20: note = chemically synthesized
  source 1..20: mol_type = other DNA
atgaggtagaagagtaagtg

SEQ ID NO: 2869 - DNA, 20 bp, synthetic construct
  misc_feature 1..20: note = chemically synthesized
  source 1..20: mol_type = other DNA
gaagagtaagtgaagcctta

SEQ ID NO: 2870 - DNA, 20 bp, synthetic construct
  misc_feature 1..20: note = chemically synthesized
  source 1..20: mol_type = other DNA
gagtaagtgaagccttatag

SEQ ID NO: 2871 - DNA, 20 bp, synthetic construct
  misc_feature 1..20: note = chemically synthesized
  source 1..20: mol_type = other DNA
gccttatagcagtctgcttt

SEQ ID NO: 2872 - DNA, 20 bp, synthetic construct
  misc_feature 1..20: note = chemically synthesized
  source 1..20: mol_type = other DNA
atagcagtctgctttcagta

SEQ ID NO: 2873 - DNA, 20 bp, synthetic construct
  misc_feature 1..20: note = chemically synthesized
  source 1..20: mol_type = other DNA
cagtctgctttcagtatagt

SEQ ID NO: 2874 - DNA, 20 bp, synthetic construct
  misc_feature 1..20: note = chemically synthesized
  source 1..20: mol_type = other DNA
tttcagtatagtaagatatt

SEQ ID NO: 2875 - DNA, 20 bp, synthetic construct
  misc_feature 1..20: note = chemically synthesized
  source 1..20: mol_type = other DNA
tcagtatagtaagatattaa

SEQ ID NO: 2876 - DNA, 20 bp, synthetic construct
  misc_feature 1..20: note = chemically synthesized
  source 1..20: mol_type = other DNA
agtatagtaagatattaaga

SEQ ID NO: 2877 - DNA, 20 bp, synthetic construct
  misc_feature 1..20: note = chemically synthesized
  source 1..20: mol_type = other DNA
aataatttgtcatatgcttt

SEQ ID NO: 2878 - DNA, 20 bp, synthetic construct
  misc_feature 1..20: note = chemically synthesized
  source 1..20: mol_type = other DNA
tttgtcatatgctttcagaa

SEQ ID NO: 2879 - DNA, 20 bp, synthetic construct
  misc_feature 1..20: note = chemically synthesized
  source 1..20: mol_type = other DNA
atgctttcagaatggtttgc

SEQ ID NO: 2880 - DNA, 20 bp, synthetic construct
  misc_feature 1..20: note = chemically synthesized
  source 1..20: mol_type = other DNA
ataaccaatgtcttacaact

SEQ ID NO: 2881 - DNA, 20 bp, synthetic construct
  misc_feature 1..20: note = chemically synthesized
  source 1..20: mol_type = other DNA
aacttagacgacaatgtccc

SEQ ID NO: 2882 - DNA, 20 bp, synthetic construct
  misc_feature 1..20: note = chemically synthesized
  source 1..20: mol_type = other DNA
cttagacgacaatgtcccta

SEQ ID NO: 2883 - DNA, 20 bp, synthetic construct
  misc_feature 1..20: note = chemically synthesized
  source 1..20: mol_type = other DNA
acgacaatgtccctagagtg

SEQ ID NO: 2884 - DNA, 20 bp, synthetic construct
  misc_feature 1..20: note = chemically synthesized
  source 1..20: mol_type = other DNA
gtgaagaaacacgattaatt

SEQ ID NO: 2885 - DNA, 20 bp, synthetic construct
  misc_feature 1..20: note = chemically synthesized
  source 1..20: mol_type = other DNA
cacgattaattcggctacca

SEQ ID NO: 2886 - DNA, 20 bp, synthetic construct
  misc_feature 1..20: note = chemically synthesized
  source 1..20: mol_type = other DNA
gttgaatgaaaatattccgt

SEQ ID NO: 2887 - DNA, 20 bp, synthetic construct
  misc_feature 1..20: note = chemically synthesized
  source 1..20: mol_type = other DNA
attccgtaagacaaaatgta

SEQ ID NO: 2888 - DNA, 20 bp, synthetic construct
  misc_feature 1..20: note = chemically synthesized
  source 1..20: mol_type = other DNA
aagacaaaatgtaaagaaat

SEQ ID NO: 2889 - DNA, 20 bp, synthetic construct
  misc_feature 1..20: note = chemically synthesized
  source 1..20: mol_type = other DNA
acaaaatgtaaagaaattag

SEQ ID NO: 2890 - DNA, 20 bp, synthetic construct
  misc_feature 1..20: note = chemically synthesized
  source 1..20: mol_type = other DNA
taaatgtctccaaaatgaca

SEQ ID NO: 2891 - DNA, 20 bp, synthetic construct
  misc_feature 1..20: note = chemically synthesized
  source 1..20: mol_type = other DNA
tccaaaatgacaaagcgatt

SEQ ID NO: 2892 - DNA, 20 bp, synthetic construct
  misc_feature 1..20: note = chemically synthesized
  source 1..20: mol_type = other DNA
aagcgattaagtatatacac

SEQ ID NO: 2893 - DNA, 20 bp, synthetic construct
  misc_feature 1..20: note = chemically synthesized
  source 1..20: mol_type = other DNA
agtatatacacaagatgaac

SEQ ID NO: 2894 - DNA, 20 bp, synthetic construct
  misc_feature 1..20: note = chemically synthesized
  source 1..20: mol_type = other DNA
agaacttcaataaaatcatg

SEQ ID NO: 2895 - DNA, 20 bp, synthetic construct
  misc_feature 1..20: note = chemically synthesized
  source 1..20: mol_type = other DNA
aatacaatatacatttatta

SEQ ID NO: 2896 - DNA, 20 bp, synthetic construct
  misc_feature 1..20: note = chemically synthesized
  source 1..20: mol_type = other DNA
taatgcaacaataatactaa

SEQ ID NO: 2897 - DNA, 20 bp, synthetic construct
  misc_feature 1..20: note = chemically synthesized
  source 1..20: mol_type = other DNA
aatgcaacaataatactaac

SEQ ID NO: 2898 - DNA, 20 bp, synthetic construct
  misc_feature 1..20: note = chemically synthesized
  source 1..20: mol_type = other DNA
acaataatactaacaggtaa

SEQ ID NO: 2899 - DNA, 20 bp, synthetic construct
  misc_feature 1..20: note = chemically synthesized
  source 1..20: mol_type = other DNA
aatactaacaggtaatagac

SEQ ID NO: 2900 - DNA, 20 bp, synthetic construct
  misc_feature 1..20: note = chemically synthesized
  source 1..20: mol_type = other DNA
ggtaatagacaagttgttaa

SEQ ID NO: 2901 - DNA, 20 bp, synthetic construct
  misc_feature 1..20: note = chemically synthesized
  source 1..20: mol_type = other DNA
agttgttaatagtttttcac

SEQ ID NO: 2902 - DNA, 20 bp, synthetic construct
  misc_feature 1..20: note = chemically synthesized
  source 1..20: mol_type = other DNA
ttcactggctaattaaataa

SEQ ID NO: 2903 - DNA, 20 bp, synthetic construct
  misc_feature 1..20: note = chemically synthesized
  source 1..20: mol_type = other DNA
ctttaattgtattcatttta

SEQ ID NO: 2904 - DNA, 20 bp, synthetic construct
  misc_feature 1..20: note = chemically synthesized
  source 1..20: mol_type = other DNA
ttttatagcttttctacaat

SEQ ID NO: 2905 - DNA, 20 bp, synthetic construct
  misc_feature 1..20: note = chemically synthesized
  source 1..20: mol_type = other DNA
aacttttctaaccacaaaaa

SEQ ID NO: 2906 - DNA, 20 bp, synthetic construct
  misc_feature 1..20: note = chemically synthesized
  source 1..20: mol_type = other DNA
ctaaccacaaaaaaagaaaa

SEQ ID NO: 2907 - DNA, 20 bp, synthetic construct
  misc_feature 1..20: note = chemically synthesized
  source 1..20: mol_type = other DNA
aaaaaaagaaaatggtttaa

SEQ ID NO: 2908 - DNA, 20 bp, synthetic construct
  misc_feature 1..20: note = chemically synthesized
  source 1..20: mol_type = other DNA
aaaagaaaatggtttaaaag

SEQ ID NO: 2909 - DNA, 20 bp, synthetic construct
  misc_feature 1..20: note = chemically synthesized
  source 1..20: mol_type = other DNA
aagaaaatggtttaaaagaa

SEQ ID NO: 2910 - DNA, 20 bp, synthetic construct
  misc_feature 1..20: note = chemically synthesized
  source 1..20: mol_type = other DNA
aatggtttaaaagaagagat

SEQ ID NO: 2911 - DNA, 20 bp, synthetic construct
  misc_feature 1..20: note = chemically synthesized
  source 1..20: mol_type = other DNA
ttgctaaaatttaatgccta

SEQ ID NO: 2912 - DNA, 20 bp, synthetic construct
  misc_feature 1..20: note = chemically synthesized
  source 1..20: mol_type = other DNA
ctaaaatttaatgcctaaag

SEQ ID NO: 2913 - DNA, 20 bp, synthetic construct
  misc_feature 1..20: note = chemically synthesized
  source 1..20: mol_type = other DNA
tgcctaaagaagaaacttct

SEQ ID NO: 2914 - DNA, 20 bp, synthetic construct
  misc_feature 1..20: note = chemically synthesized
  source 1..20: mol_type = other DNA
agaaacttctgagctgtata

SEQ ID NO: 2915 - DNA, 20 bp, synthetic construct
  misc_feature 1..20: note = chemically synthesized
  source 1..20: mol_type = other DNA
gagctgtatatggtatcctg

SEQ ID NO: 2916 - DNA, 20 bp, synthetic construct
  misc_feature 1..20: note = chemically synthesized
  source 1..20: mol_type = other DNA
tcctgaagcacctgcccttc

SEQ ID NO: 2917 - DNA, 20 bp, synthetic construct
  misc_feature 1..20: note = chemically synthesized
  source 1..20: mol_type = other DNA
gaagcacctgcccttcaaga

SEQ ID NO: 2918 - DNA, 20 bp, synthetic construct
  misc_feature 1..20: note = chemically synthesized
  source 1..20: mol_type = other DNA
atgcttgtaccacatttatg

SEQ ID NO: 2919 - DNA, 20 bp, synthetic construct
  misc_feature 1..20: note = chemically synthesized
  source 1..20: mol_type = other DNA
tgtaccacatttatgcagcc

SEQ ID NO: 2920 - DNA, 20 bp, synthetic construct
  misc_feature 1..20: note = chemically synthesized
  source 1..20: mol_type = other DNA
tttatgcagccaagtgcatg

SEQ ID NO: 2921 - DNA, 20 bp, synthetic construct
  misc_feature 1..20: note = chemically synthesized
  source 1..20: mol_type = other DNA
caagtgcatgtagtaacata

SEQ ID NO: 2922 - DNA, 20 bp, synthetic construct
  misc_feature 1..20: note = chemically synthesized
  source 1..20: mol_type = other DNA
taaagtaaacacatgccatc

SEQ ID NO: 2923 - DNA, 20 bp, synthetic construct
  misc_feature 1..20: note = chemically synthesized
  source 1..20: mol_type = other DNA
gccatctggatatatatatt

SEQ ID NO: 2924 - DNA, 20 bp, synthetic construct
  misc_feature 1..20: note = chemically synthesized
  source 1..20: mol_type = other DNA
atatattaagactcttttga

SEQ ID NO: 2925 - DNA, 20 bp, synthetic construct
  misc_feature 1..20: note = chemically synthesized
  source 1..20: mol_type = other DNA
attaagactcttttgacggc

SEQ ID NO: 2926 - DNA, 20 bp, synthetic construct
  misc_feature 1..20: note = chemically synthesized
  source 1..20: mol_type = other DNA
ttaagactcttttgacggct

SEQ ID NO: 2927 - DNA, 20 bp, synthetic construct
  misc_feature 1..20: note = chemically synthesized
  source 1..20: mol_type = other DNA
agactcttttgacggctggg

SEQ ID NO: 2928 - DNA, 20 bp, synthetic construct
  misc_feature 1..20: note = chemically synthesized
  source 1..20: mol_type = other DNA
gactcttttgacggctgggc

SEQ ID NO: 2929 - DNA, 20 bp, synthetic construct
  misc_feature 1..20: note = chemically synthesized
  source 1..20: mol_type = other DNA
actcttttgacggctgggca

SEQ ID NO: 2930 - DNA, 20 bp, synthetic construct
  misc_feature 1..20: note = chemically synthesized
  source 1..20: mol_type = other DNA
cttttgacggctgggcaggg

SEQ ID NO: 2931 - DNA, 20 bp, synthetic construct
  misc_feature 1..20: note = chemically synthesized
  source 1..20: mol_type = other DNA
gtggctcacacctgtaatct

SEQ ID NO: 2932 - DNA, 20 bp, synthetic construct
  misc_feature 1..20: note = chemically synthesized
  source 1..20: mol_type = other DNA
cacctgtaatctcagcactt

SEQ ID NO: 2933 - DNA, 20 bp, synthetic construct
  misc_feature 1..20: note = chemically synthesized
  source 1..20: mol_type = other DNA
acctgtaatctcagcacttt

SEQ ID NO: 2934 - DNA, 20 bp, synthetic construct
  misc_feature 1..20: note = chemically synthesized
  source 1..20: mol_type = other DNA
ctgtaatctcagcactttgg

SEQ ID NO: 2935 - DNA, 20 bp, synthetic construct
  misc_feature 1..20: note = chemically synthesized
  source 1..20: mol_type = other DNA
tgtaatctcagcactttggg

SEQ ID NO: 2936 - DNA, 20 bp, synthetic construct
  misc_feature 1..20: note = chemically synthesized
  source 1..20: mol_type = other DNA
tctcagcactttgggaggcc

SEQ ID NO: 2937 - DNA, 20 bp, synthetic construct
  misc_feature 1..20: note = chemically synthesized
  source 1..20: mol_type = other DNA
ctcagcactttgggaggccg

SEQ ID NO: 2938 - DNA, 20 bp, synthetic construct
  misc_feature 1..20: note = chemically synthesized
  source 1..20: mol_type = other DNA
agcactttgggaggccgagg

SEQ ID NO: 2939 - DNA, 20 bp, synthetic construct
  misc_feature 1..20: note = chemically synthesized
  source 1..20: mol_type = other DNA
gcactttgggaggccgaggc

SEQ ID NO: 2940 - DNA, 20 bp, synthetic construct
  misc_feature 1..20: note = chemically synthesized
  source 1..20: mol_type = other DNA
ctttgggaggccgaggcagg

SEQ ID NO: 2941 - DNA, 20 bp, synthetic construct
  misc_feature 1..20: note = chemically synthesized
  source 1..20: mol_type = other DNA
ggccgaggcaggcggatcac

SEQ ID NO: 2942 - DNA, 20 bp, synthetic construct
  misc_feature 1..20: note = chemically synthesized
  source 1..20: mol_type = other DNA
gccgaggcaggcggatcacg

SEQ ID NO: 2943 - DNA, 20 bp, synthetic construct
  misc_feature 1..20: note = chemically synthesized
  source 1..20: mol_type = other DNA
aggcaggcggatcacgaggt

SEQ ID NO: 2944 - DNA, 20 bp, synthetic construct
  misc_feature 1..20: note = chemically synthesized
  source 1..20: mol_type = other DNA
ggcaggcggatcacgaggtc

SEQ ID NO: 2945 - DNA, 20 bp, synthetic construct
  misc_feature 1..20: note = chemically synthesized
  source 1..20: mol_type = other DNA
caggcggatcacgaggtcag

SEQ ID NO: 2946 - DNA, 20 bp, synthetic construct
  misc_feature 1..20: note = chemically synthesized
  source 1..20: mol_type = other DNA
ggcggatcacgaggtcagga

SEQ ID NO: 2947 - DNA, 20 bp, synthetic construct
  misc_feature 1..20: note = chemically synthesized
  source 1..20: mol_type = other DNA
tcacgaggtcaggagagttc

SEQ ID NO: 2948 - DNA, 20 bp, synthetic construct
  misc_feature 1..20: note = chemically synthesized
  source 1..20: mol_type = other DNA
aggtcaggagagttcgagac

SEQ ID NO: 2949 - DNA, 20 bp, synthetic construct
  misc_feature 1..20: note = chemically synthesized
  source 1..20: mol_type = other DNA
aggagagttcgagaccagcc

SEQ ID NO: 2950 - DNA, 20 bp, synthetic construct
  misc_feature 1..20: note = chemically synthesized
  source 1..20: mol_type = other DNA
cgagaccagcctggccaaca

SEQ ID NO: 2951 - DNA, 20 bp, synthetic construct
  misc_feature 1..20: note = chemically synthesized
  source 1..20: mol_type = other DNA
tctactaaaaatacaaaaat

SEQ ID NO: 2952 - DNA, 20 bp, synthetic construct
  misc_feature 1..20: note = chemically synthesized
  source 1..20: mol_type = other DNA
ctaaaaatacaaaaattagc

SEQ ID NO: 2953 - DNA, 20 bp, synthetic construct
  misc_feature 1..20: note = chemically synthesized
  source 1..20: mol_type = other DNA
taaaaatacaaaaattagcc

SEQ ID NO: 2954 - DNA, 20 bp, synthetic construct
  misc_feature 1..20: note = chemically synthesized
  source 1..20: mol_type = other DNA
atacaaaaattagccgggca

SEQ ID NO: 2955 - DNA, 20 bp, synthetic construct
  misc_feature 1..20: note = chemically synthesized
  source 1..20: mol_type = other DNA
caaaaattagccgggcatgg

SEQ ID NO: 2956 - DNA, 20 bp, synthetic construct
  misc_feature 1..20: note = chemically synthesized
  source 1..20: mol_type = other DNA
gtggtgcacgcctgtaatcc

SEQ ID NO: 2957 - DNA, 20 bp, synthetic construct
  misc_feature 1..20: note = chemically synthesized
  source 1..20: mol_type = other DNA
cgcctgtaatcccagctact

SEQ ID NO: 2958 - DNA, 20 bp, synthetic construct
  misc_feature 1..20: note = chemically synthesized
  source 1..20: mol_type = other DNA
gcctgtaatcccagctactt

SEQ ID NO: 2959 - DNA, 20 bp, synthetic construct
  misc_feature 1..20: note = chemically synthesized
  source 1..20: mol_type = other DNA
ctgtaatcccagctacttgg

SEQ ID NO: 2960 - DNA, 20 bp, synthetic construct
  misc_feature 1..20: note = chemically synthesized
  source 1..20: mol_type = other DNA
tgtaatcccagctacttggg

SEQ ID NO: 2961 - DNA, 20 bp, synthetic construct
  misc_feature 1..20: note = chemically synthesized
  source 1..20: mol_type = other DNA
tcccagctacttgggaggct

SEQ ID NO: 2962 - DNA, 20 bp, synthetic construct
  misc_feature 1..20: note = chemically synthesized
  source 1..20: mol_type = other DNA
agctacttgggaggctgaga

SEQ ID NO: 2963 - DNA, 20 bp, synthetic construct
  misc_feature 1..20: note = chemically synthesized
  source 1..20: mol_type = other DNA
gctacttgggaggctgagac

SEQ ID NO: 2964 - DNA, 20 bp, synthetic construct
  misc_feature 1..20: note = chemically synthesized
  source 1..20: mol_type = other DNA
tacttgggaggctgagacag

SEQ ID NO: 2965 - DNA, 20 bp, synthetic construct
  misc_feature 1..20: note = chemically synthesized
  source 1..20: mol_type = other DNA
acaggagaatcgcttgaacc

SEQ ID NO: 2966 - DNA, 20 bp, synthetic construct
  misc_feature 1..20: note = chemically synthesized
  source 1..20: mol_type = other DNA
caggagaatcgcttgaacct

SEQ ID NO: 2967 - DNA, 20 bp, synthetic construct
  misc_feature 1..20: note = chemically synthesized
  source 1..20: mol_type = other DNA
ggagaatcgcttgaacctgg

SEQ ID NO: 2968 - DNA, 20 bp, synthetic construct
  misc_feature 1..20: note = chemically synthesized
  source 1..20: mol_type = other DNA
gagaatcgcttgaacctggg

SEQ ID NO: 2969 - DNA, 20 bp, synthetic construct
  misc_feature 1..20: note = chemically synthesized
  source 1..20: mol_type = other DNA
aatcgcttgaacctgggagg

SEQ ID NO: 2970 - DNA, 20 bp, synthetic construct
  misc_feature 1..20: note = chemically synthesized
  source 1..20: mol_type = other DNA
tcgcttgaacctgggaggca

SEQ ID NO: 2971 - DNA, 20 bp, synthetic construct
  misc_feature 1..20: note = chemically synthesized
  source 1..20: mol_type = other DNA
cgcttgaacctgggaggcag

SEQ ID NO: 2972 - DNA, 20 bp, synthetic construct
  misc_feature 1..20: note = chemically synthesized
  source 1..20: mol_type = other DNA
aacctgggaggcagaggtta

SEQ ID NO: 2973 - DNA, 20 bp, synthetic construct
  misc_feature 1..20: note = chemically synthesized
  source 1..20: mol_type = other DNA
tgggaggcagaggttacagt

SEQ ID NO: 2974 - DNA, 20 bp, synthetic construct
  misc_feature 1..20: note = chemically synthesized
  source 1..20: mol_type = other DNA
ggcagaggttacagtgagcc

SEQ ID NO: 2975 - DNA, 20 bp, synthetic construct
  misc_feature 1..20: note = chemically synthesized
  source 1..20: mol_type = other DNA
gagatcatgccattgcactc

SEQ ID NO: 2976 - DNA, 20 bp, synthetic construct
  misc_feature 1..20: note = chemically synthesized
  source 1..20: mol_type = other DNA
catgccattgcactccagcc

SEQ ID NO: 2977 - DNA, 20 bp, synthetic construct
  misc_feature 1..20: note = chemically synthesized
  source 1..20: mol_type = other DNA
atgccattgcactccagcct

SEQ ID NO: 2978 - DNA, 20 bp, synthetic construct
  misc_feature 1..20: note = chemically synthesized
  source 1..20: mol_type = other DNA
ttgcactccagcctgggcaa

SEQ ID NO: 2979 - DNA, 20 bp, synthetic construct
  misc_feature 1..20: note = chemically synthesized
  source 1..20: mol_type = other DNA
gcactccagcctgggcaata

SEQ ID NO: 2980 - DNA, 20 bp, synthetic construct
  misc_feature 1..20: note = chemically synthesized
  source 1..20: mol_type = other DNA
agagtctcaaaaaaaaaaaa

SEQ ID NO: 2981 - DNA, 20 bp, synthetic construct
  misc_feature 1..20: note = chemically synthesized
  source 1..20: mol_type = other DNA
aaaaaagactcttttgaaca

SEQ ID NO: 2982 - DNA, 20 bp, synthetic construct
  misc_feature 1..20: note = chemically synthesized
  source 1..20: mol_type = other DNA
aacatggtgaactgatttcc

SEQ ID NO: 2983 - DNA, 20 bp, synthetic construct
  misc_feature 1..20: note = chemically synthesized
  source 1..20: mol_type = other DNA
tgaactgatttcccagaatc

SEQ ID NO: 2984 - DNA, 20 bp, synthetic construct
  misc_feature 1..20: note = chemically synthesized
  source 1..20: mol_type = other DNA
ctagcaattcctgaatgtcc

SEQ ID NO: 2985 - DNA, 20 bp, synthetic construct
  misc_feature 1..20: note = chemically synthesized
  source 1..20: mol_type = other DNA
caattcctgaatgtcctggt

SEQ ID NO: 2986 - DNA, 20 bp, synthetic construct
  misc_feature 1..20: note = chemically synthesized
  source 1..20: mol_type = other DNA
attttttttttaatgtgcac

SEQ ID NO: 2987 - DNA, 20 bp, synthetic construct
  misc_feature 1..20: note = chemically synthesized
  source 1..20: mol_type = other DNA
tttaatgtgcaccggaaccc

SEQ ID NO: 2988 - DNA, 20 bp, synthetic construct
  misc_feature 1..20: note = chemically synthesized
  source 1..20: mol_type = other DNA
aatgtgcaccggaaccccag

SEQ ID NO: 2989 - DNA, 20 bp, synthetic construct
  misc_feature 1..20: note = chemically synthesized
  source 1..20: mol_type = other DNA
ccggaaccccagtggctcca

SEQ ID NO: 2990 - DNA, 20 bp, synthetic construct
  misc_feature 1..20: note = chemically synthesized
  source 1..20: mol_type = other DNA
gaaccccagtggctccatgg

SEQ ID NO: 2991 - DNA, 20 bp, synthetic construct
  misc_feature 1..20: note = chemically synthesized
  source 1..20: mol_type = other DNA
aaccccagtggctccatgga

SEQ ID NO: 2992 - DNA, 20 bp, synthetic construct
  misc_feature 1..20: note = chemically synthesized
  source 1..20: mol_type = other DNA
agtggctccatggaaggacc

SEQ ID NO: 2993 - DNA, 20 bp, synthetic construct
  misc_feature 1..20: note = chemically synthesized
  source 1..20: mol_type = other DNA
gtggctccatggaaggacct

SEQ ID NO: 2994 - DNA, 20 bp, synthetic construct
  misc_feature 1..20: note = chemically synthesized
  source 1..20: mol_type = other DNA
gaaggacctgggcatcctct

SEQ ID NO: 2995 - DNA, 20 bp, synthetic construct
  misc_feature 1..20: note = chemically synthesized
  source 1..20: mol_type = other DNA
tgggcatcctctaagccact

SEQ ID NO: 2996 - DNA, 20 bp, synthetic construct
  misc_feature 1..20: note = chemically synthesized
  source 1..20: mol_type = other DNA
gcatcctctaagccacttgg

SEQ ID NO: 2997 - DNA, 20 bp, synthetic construct
  misc_feature 1..20: note = chemically synthesized
  source 1..20: mol_type = other DNA
ccattataccatctcaaaat

SEQ ID NO: 2998 - DNA, 20 bp, synthetic construct
  misc_feature 1..20: note = chemically synthesized
  source 1..20: mol_type = other DNA
attataccatctcaaaatga

SEQ ID NO: 2999 - DNA, 20 bp, synthetic construct
  misc_feature 1..20: note = chemically synthesized
  source 1..20: mol_type = other DNA
tataccatctcaaaatgaga

SEQ ID NO: 3000 - DNA, 20 bp, synthetic construct
  misc_feature 1..20: note = chemically synthesized
  source 1..20: mol_type = other DNA
agagcttactccacttcatt

SEQ ID NO: 3001 - DNA, 20 bp, synthetic construct
  misc_feature 1..20: note = chemically synthesized
  source 1..20: mol_type = other DNA
gagcttactccacttcattg

SEQ ID NO: 3002 - DNA, 20 bp, synthetic construct
  misc_feature 1..20: note = chemically synthesized
  source 1..20: mol_type = other DNA
agcttactccacttcattga

SEQ ID NO: 3003 - DNA, 20 bp, synthetic construct
  misc_feature 1..20: note = chemically synthesized
  source 1..20: mol_type = other DNA
ttcattgagggaaataccac

SEQ ID NO: 3004 - DNA, 20 bp, synthetic construct
  misc_feature 1..20: note = chemically synthesized
  source 1..20: mol_type = other DNA
cattgagggaaataccacca

SEQ ID NO: 3005 - DNA, 20 bp, synthetic construct
  misc_feature 1..20: note = chemically synthesized
  source 1..20: mol_type = other DNA
taccaccagagttctgactc

SEQ ID NO: 3006 - DNA, 20 bp, synthetic construct
  misc_feature 1..20: note = chemically synthesized
  source 1..20: mol_type = other DNA
ccaccagagttctgactcca

SEQ ID NO: 3007 - DNA, 20 bp, synthetic construct
  misc_feature 1..20: note = chemically synthesized
  source 1..20: mol_type = other DNA
caccagagttctgactccag

SEQ ID NO: 3008 - DNA, 20 bp, synthetic construct
  misc_feature 1..20: note = chemically synthesized
  source 1..20: mol_type = other DNA
agttctgactccagaggcac

SEQ ID NO: 3009 - DNA, 20 bp, synthetic construct
  misc_feature 1..20: note = chemically synthesized
  source 1..20: mol_type = other DNA
tgactccagaggcactggcc

SEQ ID NO: 3010 - DNA, 20 bp, synthetic construct
  misc_feature 1..20: note = chemically synthesized
  source 1..20: mol_type = other DNA
gactccagaggcactggcct

SEQ ID NO: 3011 - DNA, 20 bp, synthetic construct
  misc_feature 1..20: note = chemically synthesized
  source 1..20: mol_type = other DNA
actccagaggcactggccta

SEQ ID NO: 3012 - DNA, 20 bp, synthetic construct
  misc_feature 1..20: note = chemically synthesized
  source 1..20: mol_type = other DNA
tccagaggcactggcctagg

SEQ ID NO: 3013 - DNA, 20 bp, synthetic construct
  misc_feature 1..20: note = chemically synthesized
  source 1..20: mol_type = other DNA
ccagaggcactggcctaggg

SEQ ID NO: 3014 - DNA, 20 bp, synthetic construct
  misc_feature 1..20: note = chemically synthesized
  source 1..20: mol_type = other DNA
tagggaggacaccgtgtgtg

SEQ ID NO: 3015 - DNA, 20 bp, synthetic construct
  misc_feature 1..20: note = chemically synthesized
  source 1..20: mol_type = other DNA
aggacaccgtgtgtgaagcc

SEQ ID NO: 3016 - DNA, 20 bp, synthetic construct
  misc_feature 1..20: note = chemically synthesized
  source 1..20: mol_type = other DNA
acaccgtgtgtgaagcccag

SEQ ID NO: 3017 - DNA, 20 bp, synthetic construct
  misc_feature 1..20: note = chemically synthesized
  source 1..20: mol_type = other DNA
caccgtgtgtgaagcccagc

SEQ ID NO: 3018 - DNA, 20 bp, synthetic construct
  misc_feature 1..20: note = chemically synthesized
  source 1..20: mol_type = other DNA
accgtgtgtgaagcccagca

SEQ ID NO: 3019 - DNA, 20 bp, synthetic construct
  misc_feature 1..20: note = chemically synthesized
  source 1..20: mol_type = other DNA
gtgaagcccagcagggccac

SEQ ID NO: 3020 - DNA, 20 bp, synthetic construct
  misc_feature 1..20: note = chemically synthesized
  source 1..20: mol_type = other DNA
ctagctgtccccaccaatta

SEQ ID NO: 3021 - DNA, 20 bp, synthetic construct
  misc_feature 1..20: note = chemically synthesized
  source 1..20: mol_type = other DNA
caccaattacagtccttgcg

SEQ ID NO: 3022 - DNA, 20 bp, synthetic construct
  misc_feature 1..20: note = chemically synthesized
  source 1..20: mol_type = other DNA
accaattacagtccttgcgt

SEQ ID NO: 3023 - DNA, 20 bp, synthetic construct
  misc_feature 1..20: note = chemically synthesized
  source 1..20: mol_type = other DNA
ccaattacagtccttgcgta

SEQ ID NO: 3024 - DNA, 20 bp, synthetic construct
  misc_feature 1..20: note = chemically synthesized
  source 1..20: mol_type = other DNA
cagtccttgcgtagggtcca

SEQ ID NO: 3025 - DNA, 20 bp, synthetic construct
  misc_feature 1..20: note = chemically synthesized
  source 1..20: mol_type = other DNA
gtccaaagaaatgaatgcca

SEQ ID NO: 3026 - DNA, 20 bp, synthetic construct
  misc_feature 1..20: note = chemically synthesized
  source 1..20: mol_type = other DNA
ccaaagaaatgaatgccaaa

SEQ ID NO: 3027 - DNA, 20 bp, synthetic construct
  misc_feature 1..20: note = chemically synthesized
  source 1..20: mol_type = other DNA
aaagaaatgaatgccaaaga

SEQ ID NO: 3028 - DNA, 20 bp, synthetic construct
  misc_feature 1..20: note = chemically synthesized
  source 1..20: mol_type = other DNA
atgaatgccaaagagagcaa

SEQ ID NO: 3029 - DNA, 20 bp, synthetic construct
  misc_feature 1..20: note = chemically synthesized
  source 1..20: mol_type = other DNA
gaatgccaaagagagcaaca

SEQ ID NO: 3030 - DNA, 20 bp, synthetic construct
  misc_feature 1..20: note = chemically synthesized
  source 1..20: mol_type = other DNA
aatgccaaagagagcaacag

SEQ ID NO: 3031 - DNA, 20 bp, synthetic construct
  misc_feature 1..20: note = chemically synthesized
  source 1..20: mol_type = other DNA
tgccaaagagagcaacagag

SEQ ID NO: 3032 - DNA, 20 bp, synthetic construct
  misc_feature 1..20: note = chemically synthesized
  source 1..20: mol_type = other DNA
aaagagagcaacagaggagc

SEQ ID NO: 3033 - DNA, 20 bp, synthetic construct
  misc_feature 1..20: note = chemically synthesized
  source 1..20: mol_type = other DNA
aagagagcaacagaggagca

SEQ ID NO: 3034 - DNA, 20 bp, synthetic construct
  misc_feature 1..20: note = chemically synthesized
  source 1..20: mol_type = other DNA
agagagcaacagaggagcaa

SEQ ID NO: 3035 - DNA, 20 bp, synthetic construct
  misc_feature 1..20: note = chemically synthesized
  source 1..20: mol_type = other DNA
agagcaacagaggagcaagg

SEQ ID NO: 3036 - DNA, 20 bp, synthetic construct
  misc_feature 1..20: note = chemically synthesized
  source 1..20: mol_type = other DNA
ggagcaagggagtcacattc

SEQ ID NO: 3037 - DNA, 20 bp, synthetic construct
  misc_feature 1..20: note = chemically synthesized
  source 1..20: mol_type = other DNA
gagcaagggagtcacattcc

SEQ ID NO: 3038 - DNA, 20 bp, synthetic construct
  misc_feature 1..20: note = chemically synthesized
  source 1..20: mol_type = other DNA
cacattccaggaccttcctt

SEQ ID NO: 3039 - DNA, 20 bp, synthetic construct
  misc_feature 1..20: note = chemically synthesized
  source 1..20: mol_type = other DNA
acattccaggaccttccttc

SEQ ID NO: 3040 - DNA, 20 bp, synthetic construct
  misc_feature 1..20: note = chemically synthesized
  source 1..20: mol_type = other DNA
cattccaggaccttccttca

SEQ ID NO: 3041 - DNA, 20 bp, synthetic construct
  misc_feature 1..20: note = chemically synthesized
  source 1..20: mol_type = other DNA
ccttccttcagggactttta

SEQ ID NO: 3042 - DNA, 20 bp, synthetic construct
  misc_feature 1..20: note = chemically synthesized
  source 1..20: mol_type = other DNA
cttccttcagggacttttaa

SEQ ID NO: 3043 - DNA, 20 bp, synthetic construct
  misc_feature 1..20: note = chemically synthesized
  source 1..20: mol_type = other DNA
gacttttaaaggaaacatga

SEQ ID NO: 3044 - DNA, 20 bp, synthetic construct
  misc_feature 1..20: note = chemically synthesized
  source 1..20: mol_type = other DNA
ttaaaggaaacatgacagct

SEQ ID NO: 3045 - DNA, 20 bp, synthetic construct
  misc_feature 1..20: note = chemically synthesized
  source 1..20: mol_type = other DNA
taaaggaaacatgacagctg

SEQ ID NO: 3046 - DNA, 20 bp, synthetic construct
  misc_feature 1..20: note = chemically synthesized
  source 1..20: mol_type = other DNA
gaaacatgacagctgaggat

SEQ ID NO: 3047 - DNA, 20 bp, synthetic construct
  misc_feature 1..20: note = chemically synthesized
  source 1..20: mol_type = other DNA
catgacagctgaggatcagt

SEQ ID NO: 3048 - DNA, 20 bp, synthetic construct
  misc_feature 1..20: note = chemically synthesized
  source 1..20: mol_type = other DNA
tgttccccttcatgtgattc

SEQ ID NO: 3049 - DNA, 20 bp, synthetic construct
  misc_feature 1..20: note = chemically synthesized
  source 1..20: mol_type = other DNA
tcatgtgattcaagctcact

SEQ ID NO: 3050 - DNA, 20 bp, synthetic construct
  misc_feature 1..20: note = chemically synthesized
  source 1..20: mol_type = other DNA
tgtgattcaagctcactcag

SEQ ID NO: 3051 - DNA, 20 bp, synthetic construct
  misc_feature 1..20: note = chemically synthesized
  source 1..20: mol_type = other DNA
tcactcagaagaaacacaat

SEQ ID NO: 3052 - DNA, 20 bp, synthetic construct
  misc_feature 1..20: note = chemically synthesized
  source 1..20: mol_type = other DNA
cagaagaaacacaatgagac

SEQ ID NO: 3053 - DNA, 20 bp, synthetic construct
  misc_feature 1..20: note = chemically synthesized
  source 1..20: mol_type = other DNA
gaagaaacacaatgagacaa

SEQ ID NO: 3054 - DNA, 20 bp, synthetic construct
  misc_feature 1..20: note = chemically synthesized
  source 1..20: mol_type = other DNA
gaaacacaatgagacaagag

SEQ ID NO: 3055 - DNA, 20 bp, synthetic construct
  misc_feature 1..20: note = chemically synthesized
  source 1..20: mol_type = other DNA
aacacaatgagacaagagaa

SEQ ID NO: 3056 - DNA, 20 bp, synthetic construct
  misc_feature 1..20: note = chemically synthesized
  source 1..20: mol_type = other DNA
ccttccttctctatttattc

SEQ ID NO: 3057 - DNA, 20 bp, synthetic construct
  misc_feature 1..20: note = chemically synthesized
  source 1..20: mol_type = other DNA
cttccttctctatttattct

SEQ ID NO: 3058 - DNA, 20 bp, synthetic construct
  misc_feature 1..20: note = chemically synthesized
  source 1..20: mol_type = other DNA
ggcatctaaactactgaatg

SEQ ID NO: 3059 - DNA, 20 bp, synthetic construct
  misc_feature 1..20: note = chemically synthesized
  source 1..20: mol_type = other DNA
atctaaactactgaatgtag

SEQ ID NO: 3060 - DNA, 20 bp, synthetic construct
  misc_feature 1..20: note = chemically synthesized
  source 1..20: mol_type = other DNA
tactgaatgtagtggtgtct

SEQ ID NO: 3061 - DNA, 20 bp, synthetic construct
  misc_feature 1..20: note = chemically synthesized
  source 1..20: mol_type = other DNA
ggtgtctgagatgtatcaaa

SEQ ID NO: 3062 - DNA, 20 bp, synthetic construct
  misc_feature 1..20: note = chemically synthesized
  source 1..20: mol_type = other DNA
tctgagatgtatcaaacggt

SEQ ID NO: 3063 - DNA, 20 bp, synthetic construct
  misc_feature 1..20: note = chemically synthesized
  source 1..20: mol_type = other DNA
atcaaacggtcagattgact

SEQ ID NO: 3064 - DNA, 20 bp, synthetic construct
  misc_feature 1..20: note = chemically synthesized
  source 1..20: mol_type = other DNA
ttctatcactgacaaactat

SEQ ID NO: 3065 - DNA, 20 bp, synthetic construct
  misc_feature 1..20: note = chemically synthesized
  source 1..20: mol_type = other DNA
atttttatttttattttttt

SEQ ID NO: 3066 - DNA, 20 bp, synthetic construct
  misc_feature 1..20: note = chemically synthesized
  source 1..20: mol_type = other DNA
ttatttttatttttttgaga

SEQ ID NO: 3067 - DNA, 20 bp, synthetic construct
  misc_feature 1..20: note = chemically synthesized
  source 1..20: mol_type = other DNA
atttttatttttttgagatg

SEQ ID NO: 3068 - DNA, 20 bp, synthetic construct
  misc_feature 1..20: note = chemically synthesized
  source 1..20: mol_type = other DNA
tggagtctcactctgtcacc

SEQ ID NO: 3069 - DNA, 20 bp, synthetic construct
  misc_feature 1..20: note = chemically synthesized
  source 1..20: mol_type = other DNA
ggagtctcactctgtcacct

SEQ ID NO: 3070 - DNA, 20 bp, synthetic construct
  misc_feature 1..20: note = chemically synthesized
  source 1..20: mol_type = other DNA
tctcactctgtcacctaggc

SEQ ID NO: 3071 - DNA, 20 bp, synthetic construct
  misc_feature 1..20: note = chemically synthesized
  source 1..20: mol_type = other DNA
tcactctgtcacctaggctg

SEQ ID NO: 3072 - DNA, 20 bp, synthetic construct
  misc_feature 1..20: note = chemically synthesized
  source 1..20: mol_type = other DNA
ctgtcacctaggctggagtg

SEQ ID NO: 3073 - DNA, 20 bp, synthetic construct
  misc_feature 1..20: note = chemically synthesized
  source 1..20: mol_type = other DNA
tcacctaggctggagtgcag

SEQ ID NO: 3074 - DNA, 20 bp, synthetic construct
  misc_feature 1..20: note = chemically synthesized
  source 1..20: mol_type = other DNA
ggagtgcagtggcgcaaact

SEQ ID NO: 3075 - DNA, 20 bp, synthetic construct
  misc_feature 1..20: note = chemically synthesized
  source 1..20: mol_type = other DNA
gcgcaaactcggctcactgc

SEQ ID NO: 3076 - DNA, 20 bp, synthetic construct
  misc_feature 1..20: note = chemically synthesized
  source 1..20: mol_type = other DNA
tcactgcaagctctgcctcc

SEQ ID NO: 3077 - DNA, 20 bp, synthetic construct
  misc_feature 1..20: note = chemically synthesized
  source 1..20: mol_type = other DNA
cactgcaagctctgcctcct

SEQ ID NO: 3078 - DNA, 20 bp, synthetic construct
  misc_feature 1..20: note = chemically synthesized
  source 1..20: mol_type = other DNA
ttcatgccattctcctgcct

SEQ ID NO: 3079 - DNA, 20 bp, synthetic construct
  misc_feature 1..20: note = chemically synthesized
  source 1..20: mol_type = other DNA
ttctcctgcctcagccttcc

SEQ ID NO: 3080 - DNA, 20 bp, synthetic construct
  misc_feature 1..20: note = chemically synthesized
  source 1..20: mol_type = other DNA
tcctgcctcagccttccgag

SEQ ID NO: 3081 - DNA, 20 bp, synthetic construct
  misc_feature 1..20: note = chemically synthesized
  source 1..20: mol_type = other DNA
gcctcagccttccgagtagc

SEQ ID NO: 3082 - DNA, 20 bp, synthetic construct
  misc_feature 1..20: note = chemically synthesized
  source 1..20: mol_type = other DNA
cctcagccttccgagtagct

SEQ ID NO: 3083 - DNA, 20 bp, synthetic construct
  misc_feature 1..20: note = chemically synthesized
  source 1..20: mol_type = other DNA
cttccgagtagctgggacta

SEQ ID NO: 3084 - DNA, 20 bp, synthetic construct
  misc_feature 1..20: note = chemically synthesized
  source 1..20: mol_type = other DNA
ttccgagtagctgggactac

SEQ ID NO: 3085 - DNA, 20 bp, synthetic construct
  misc_feature 1..20: note = chemically synthesized
  source 1..20: mol_type = other DNA
caggcgtctgccaccacgcc

SEQ ID NO: 3086 - DNA, 20 bp, synthetic construct
  misc_feature 1..20: note = chemically synthesized
  source 1..20: mol_type = other DNA
ctaattttttgtatttttat

SEQ ID NO: 3087 - DNA, 20 bp, synthetic construct
  misc_feature 1..20: note = chemically synthesized
  source 1..20: mol_type = other DNA
aattttttgtatttttatta

SEQ ID NO: 3088 - DNA, 20 bp, synthetic construct
  misc_feature 1..20: note = chemically synthesized
  source 1..20: mol_type = other DNA
ttttgtatttttattagaga

SEQ ID NO: 3089 - DNA, 20 bp, synthetic construct
  misc_feature 1..20: note = chemically synthesized
  source 1..20: mol_type = other DNA
tttgtatttttattagagat

SEQ ID NO: 3090 - DNA, 20 bp, synthetic construct
  misc_feature 1..20: note = chemically synthesized
  source 1..20: mol_type = other DNA
ttgtatttttattagagatg

SEQ ID NO: 3091 - DNA, 20 bp, synthetic construct
  misc_feature 1..20: note = chemically synthesized
  source 1..20: mol_type = other DNA
gagatggggtttcaccatgt

SEQ ID NO: 3092 - DNA, 20 bp, synthetic construct
  misc_feature 1..20: note = chemically synthesized
  source 1..20: mol_type = other DNA
tggggtttcaccatgttagc

SEQ ID NO: 3093 - DNA, 20 bp, synthetic construct
  misc_feature 1..20: note = chemically synthesized
  source 1..20: mol_type = other DNA
ggggtttcaccatgttagcc

SEQ ID NO: 3094 - DNA, 20 bp, synthetic construct
  misc_feature 1..20: note = chemically synthesized
  source 1..20: mol_type = other DNA
tttcaccatgttagccagga

SEQ ID NO: 3095 - DNA, 20 bp, synthetic construct
  misc_feature 1..20: note = chemically synthesized
  source 1..20: mol_type = other DNA
acctcgtgatccacccgctt

SEQ ID NO: 3096 - DNA, 20 bp, synthetic construct
  misc_feature 1..20: note = chemically synthesized
  source 1..20: mol_type = other DNA
ccacccgctttggcctccca

SEQ ID NO: 3097 - DNA, 20 bp, synthetic construct
  misc_feature 1..20: note = chemically synthesized
  source 1..20: mol_type = other DNA
gctttggcctcccaaagtgc

SEQ ID NO: 3098 - DNA, 20 bp, synthetic construct
  misc_feature 1..20: note = chemically synthesized
  source 1..20: mol_type = other DNA
ctttggcctcccaaagtgct

SEQ ID NO: 3099 - DNA, 20 bp, synthetic construct
  misc_feature 1..20: note = chemically synthesized
  source 1..20: mol_type = other DNA
ctcccaaagtgctgggatta

SEQ ID NO: 3100 - DNA, 20 bp, synthetic construct
  misc_feature 1..20: note = chemically synthesized
  source 1..20: mol_type = other DNA
tcccaaagtgctgggattac

SEQ ID NO: 3101 - DNA, 20 bp, synthetic construct
  misc_feature 1..20: note = chemically synthesized
  source 1..20: mol_type = other DNA
agtgctgggattacaggcgt

SEQ ID NO: 3102 - DNA, 20 bp, synthetic construct
  misc_feature 1..20: note = chemically synthesized
  source 1..20: mol_type = other DNA
caggcgtgagccaccgtgcc

SEQ ID NO: 3103 - DNA, 20 bp, synthetic construct
  misc_feature 1..20: note = chemically synthesized
  source 1..20: mol_type = other DNA
ttcactttcttcatttaaaa

SEQ ID NO: 3104 - DNA, 20 bp, synthetic construct
  misc_feature 1..20: note = chemically synthesized
  source 1..20: mol_type = other DNA
ttcttcatttaaaaaagaaa

SEQ ID NO: 3105 - DNA, 20 bp, synthetic construct
  misc_feature 1..20: note = chemically synthesized
  source 1..20: mol_type = other DNA
tcttcatttaaaaaagaaat

SEQ ID NO: 3106 - DNA, 20 bp, synthetic construct
  misc_feature 1..20: note = chemically synthesized
  source 1..20: mol_type = other DNA
cttcatttaaaaaagaaatg

SEQ ID NO: 3107 - DNA, 20 bp, synthetic construct
  misc_feature 1..20: note = chemically synthesized
  source 1..20: mol_type = other DNA
taaaaaagaaatggggataa

SEQ ID NO: 3108 - DNA, 20 bp, synthetic construct
  misc_feature 1..20: note = chemically synthesized
  source 1..20: mol_type = other DNA
ggataatagtacctatctca

SEQ ID NO: 3109 - DNA, 20 bp, synthetic construct
  misc_feature 1..20: note = chemically synthesized
  source 1..20: mol_type = other DNA
ctatctcatagaattattgt

SEQ ID NO: 3110 - DNA, 20 bp, synthetic construct
  misc_feature 1..20: note = chemically synthesized
  source 1..20: mol_type = other DNA
tctcatagaattattgtaag

SEQ ID NO: 3111 - DNA, 20 bp, synthetic construct
  misc_feature 1..20: note = chemically synthesized
  source 1..20: mol_type = other DNA
attattgtaagaagtgcatg

SEQ ID NO: 3112 - DNA, 20 bp, synthetic construct
  misc_feature 1..20: note = chemically synthesized
  source 1..20: mol_type = other DNA
gtgcatgcagtaatgcatgt

SEQ ID NO: 3113 - DNA, 20 bp, synthetic construct
  misc_feature 1..20: note = chemically synthesized
  source 1..20: mol_type = other DNA
catgcagtaatgcatgtaag

SEQ ID NO: 3114 - DNA, 20 bp, synthetic construct
  misc_feature 1..20: note = chemically synthesized
  source 1..20: mol_type = other DNA
atgcagtaatgcatgtaagt

SEQ ID NO: 3115 - DNA, 20 bp, synthetic construct
  misc_feature 1..20: note = chemically synthesized
  source 1..20: mol_type = other DNA
aatgcatgtaagtaggtgct

SEQ ID NO: 3116 - DNA, 20 bp, synthetic construct
  misc_feature 1..20: note = chemically synthesized
  source 1..20: mol_type = other DNA
gcatgtaagtaggtgctcag

SEQ ID NO: 3117 - DNA, 20 bp, synthetic construct
  misc_feature 1..20: note = chemically synthesized
  source 1..20: mol_type = other DNA
atgtaagtaggtgctcagaa

SEQ ID NO: 3118 - DNA, 20 bp, synthetic construct
  misc_feature 1..20: note = chemically synthesized
  source 1..20: mol_type = other DNA
aagtaggtgctcagaagagt

SEQ ID NO: 3119 - DNA, 20 bp, synthetic construct
  misc_feature 1..20: note = chemically synthesized
  source 1..20: mol_type = other DNA
gctcagaagagtcggacacg

SEQ ID NO: 3120 - DNA, 20 bp, synthetic construct
  misc_feature 1..20: note = chemically synthesized
  source 1..20: mol_type = other DNA
agaagagtcggacacgaagt

SEQ ID NO: 3121 - DNA, 20 bp, synthetic construct
  misc_feature 1..20: note = chemically synthesized
  source 1..20: mol_type = other DNA
cttatcataattttcattat

SEQ ID NO: 3122 - DNA, 20 bp, synthetic construct
  misc_feature 1..20: note = chemically synthesized
  source 1..20: mol_type = other DNA
ataattttcattatcagaac

SEQ ID NO: 3123 - DNA, 20 bp, synthetic construct
  misc_feature 1..20: note = chemically synthesized
  source 1..20: mol_type = other DNA
taattttcattatcagaaca

SEQ ID NO: 3124 - DNA, 20 bp, synthetic construct
  misc_feature 1..20: note = chemically synthesized
  source 1..20: mol_type = other DNA
attttcattatcagaacaag

SEQ ID NO: 3125 - DNA, 20 bp, synthetic construct
  misc_feature 1..20: note = chemically synthesized
  source 1..20: mol_type = other DNA
tttcattatcagaacaagga

SEQ ID NO: 3126 - DNA, 20 bp, synthetic construct
  misc_feature 1..20: note = chemically synthesized
  source 1..20: mol_type = other DNA
ttatcagaacaaggagagac

SEQ ID NO: 3127 - DNA, 20 bp, synthetic construct
  misc_feature 1..20: note = chemically synthesized
  source 1..20: mol_type = other DNA
tatcagaacaaggagagacc

SEQ ID NO: 3128 - DNA, 20 bp, synthetic construct
  misc_feature 1..20: note = chemically synthesized
  source 1..20: mol_type = other DNA
cagaacaaggagagaccagg

SEQ ID NO: 3129 - DNA, 20 bp, synthetic construct
  misc_feature 1..20: note = chemically synthesized
  source 1..20: mol_type = other DNA
agaaaattattgtgattctt

SEQ ID NO: 3130 - DNA, 20 bp, synthetic construct
  misc_feature 1..20: note = chemically synthesized
  source 1..20: mol_type = other DNA
gaaaattattgtgattcttc

SEQ ID NO: 3131 - DNA, 20 bp, synthetic construct
  misc_feature 1..20: note = chemically synthesized
  source 1..20: mol_type = other DNA
ttattgtgattcttcaggtc

SEQ ID NO: 3132 - DNA, 20 bp, synthetic construct
  misc_feature 1..20: note = chemically synthesized
  source 1..20: mol_type = other DNA
attcttcaggtctggaatac

SEQ ID NO: 3133 - DNA, 20 bp, synthetic construct
  misc_feature 1..20: note = chemically synthesized
  source 1..20: mol_type = other DNA
tcttcaggtctggaatacta

SEQ ID NO: 3134 - DNA, 20 bp, synthetic construct
  misc_feature 1..20: note = chemically synthesized
  source 1..20: mol_type = other DNA
tcaggtctggaatactagag

SEQ ID NO: 3135 - DNA, 20 bp, synthetic construct
  misc_feature 1..20: note = chemically synthesized
  source 1..20: mol_type = other DNA
ctagagtagcatcccaaatg

SEQ ID NO: 3136 - DNA, 20 bp, synthetic construct
  misc_feature 1..20: note = chemically synthesized
  source 1..20: mol_type = other DNA
tagagtagcatcccaaatga

SEQ ID NO: 3137 - DNA, 20 bp, synthetic construct
  misc_feature 1..20: note = chemically synthesized
  source 1..20: mol_type = other DNA
tatgacaccttcatgccaat

SEQ ID NO: 3138 - DNA, 20 bp, synthetic construct
  misc_feature 1..20: note = chemically synthesized
  source 1..20: mol_type = other DNA
acctcttcacaacccctttc

SEQ ID NO: 3139 - DNA, 20 bp, synthetic construct
  misc_feature 1..20: note = chemically synthesized
  source 1..20: mol_type = other DNA
aacacccatcatactaccca

SEQ ID NO: 3140 - DNA, 20 bp, synthetic construct
  misc_feature 1..20: note = chemically synthesized
  source 1..20: mol_type = other DNA
cccatcatactacccacaga

SEQ ID NO: 3141 - DNA, 20 bp, synthetic construct
  misc_feature 1..20: note = chemically synthesized
  source 1..20: mol_type = other DNA
gatagccatgatgctttttc

SEQ ID NO: 3142 - DNA, 20 bp, synthetic construct
  misc_feature 1..20: note = chemically synthesized
  source 1..20: mol_type = other DNA
atagccatgatgctttttct

SEQ ID NO: 3143 - DNA, 20 bp, synthetic construct
  misc_feature 1..20: note = chemically synthesized
  source 1..20: mol_type = other DNA
ccatgatgctttttctggga

SEQ ID NO: 3144 - DNA, 20 bp, synthetic construct
  misc_feature 1..20: note = chemically synthesized
  source 1..20: mol_type = other DNA
catgatgctttttctgggac

SEQ ID NO: 3145 - DNA, 20 bp, synthetic construct
  misc_feature 1..20: note = chemically synthesized
  source 1..20: mol_type = other DNA
aggtgcctcttccattcgtg

SEQ ID NO: 3146 - DNA, 20 bp, synthetic construct
  misc_feature 1..20: note = chemically synthesized
  source 1..20: mol_type = other DNA
tcttccattcgtgcagtgta

SEQ ID NO: 3147 - DNA, 20 bp, synthetic construct
  misc_feature 1..20: note = chemically synthesized
  source 1..20: mol_type = other DNA
cgtgcagtgtacagccttca

SEQ ID NO: 3148 - DNA, 20 bp, synthetic construct
  misc_feature 1..20: note = chemically synthesized
  source 1..20: mol_type = other DNA
tgtgcaactcacatcacaat

SEQ ID NO: 3149 - DNA, 20 bp, synthetic construct
  misc_feature 1..20: note = chemically synthesized
  source 1..20: mol_type = other DNA
caactcacatcacaatcaga

SEQ ID NO: 3150 - DNA, 20 bp, synthetic construct
  misc_feature 1..20: note = chemically synthesized
  source 1..20: mol_type = other DNA
ctcacatcacaatcagatgg

SEQ ID NO: 3151 - DNA, 20 bp, synthetic construct
  misc_feature 1..20: note = chemically synthesized
  source 1..20: mol_type = other DNA
aatcagatggaagaatcccc

SEQ ID NO: 3152 - DNA, 20 bp, synthetic construct
  misc_feature 1..20: note = chemically synthesized
  source 1..20: mol_type = other DNA
atcagatggaagaatcccca

SEQ ID NO: 3153 - DNA, 20 bp, synthetic construct
  misc_feature 1..20: note = chemically synthesized
  source 1..20: mol_type = other DNA
atggaagaatccccaaggct

SEQ ID NO: 3154 - DNA, 20 bp, synthetic construct
  misc_feature 1..20: note = chemically synthesized
  source 1..20: mol_type = other DNA
gaatccccaaggcttggtga

SEQ ID NO: 3155 - DNA, 20 bp, synthetic construct
  misc_feature 1..20: note = chemically synthesized
  source 1..20: mol_type = other DNA
cccaaggcttggtgacagat

SEQ ID NO: 3156 - DNA, 20 bp, synthetic construct
  misc_feature 1..20: note = chemically synthesized
  source 1..20: mol_type = other DNA
cttggtgacagatgagttac

SEQ ID NO: 3157 - DNA, 20 bp, synthetic construct
  misc_feature 1..20: note = chemically synthesized
  source 1..20: mol_type = other DNA
ttggtgacagatgagttact

SEQ ID NO: 3158 - DNA, 20 bp, synthetic construct
  misc_feature 1..20: note = chemically synthesized
  source 1..20: mol_type = other DNA
agatgagttactgggtaaca

SEQ ID NO: 3159 - DNA, 20 bp, synthetic construct
  misc_feature 1..20: note = chemically synthesized
  source 1..20: mol_type = other DNA
atgagttactgggtaacaca

SEQ ID NO: 3160 - DNA, 20 bp, synthetic construct
  misc_feature 1..20: note = chemically synthesized
  source 1..20: mol_type = other DNA
gagttactgggtaacacaga

SEQ ID NO: 3161 - DNA, 20 bp, synthetic construct
  misc_feature 1..20: note = chemically synthesized
  source 1..20: mol_type = other DNA
gttactgggtaacacagaga

SEQ ID NO: 3162 - DNA, 20 bp, synthetic construct
  misc_feature 1..20: note = chemically synthesized
  source 1..20: mol_type = other DNA
ttactgggtaacacagagag

SEQ ID NO: 3163 - DNA, 20 bp, synthetic construct
  misc_feature 1..20: note = chemically synthesized
  source 1..20: mol_type = other DNA
taacacagagagaggattca

SEQ ID NO: 3164 - DNA, 20 bp, synthetic construct
  misc_feature 1..20: note = chemically synthesized
  source 1..20: mol_type = other DNA
aacacagagagaggattcaa

SEQ ID NO: 3165 - DNA, 20 bp, synthetic construct
  misc_feature 1..20: note = chemically synthesized
  source 1..20: mol_type = other DNA
agagagaggattcaaaggaa

SEQ ID NO: 3166 - DNA, 20 bp, synthetic construct
  misc_feature 1..20: note = chemically synthesized
  source 1..20: mol_type = other DNA
gattcaaaggaaaagttgaa

SEQ ID NO: 3167 - DNA, 20 bp, synthetic construct
  misc_feature 1..20: note = chemically synthesized
  source 1..20: mol_type = other DNA
attcaaaggaaaagttgaac

SEQ ID NO: 3168 - DNA, 20 bp, synthetic construct
  misc_feature 1..20: note = chemically synthesized
  source 1..20: mol_type = other DNA
aaggaaaagttgaacgggtc

SEQ ID NO: 3169 - DNA, 20 bp, synthetic construct
  misc_feature 1..20: note = chemically synthesized
  source 1..20: mol_type = other DNA
gaacgggtccagaaaatgca

SEQ ID NO: 3170 - DNA, 20 bp, synthetic construct
  misc_feature 1..20: note = chemically synthesized
  source 1..20: mol_type = other DNA
tagatacatgtgtaaaaatc

SEQ ID NO: 3171 - DNA, 20 bp, synthetic construct
  misc_feature 1..20: note = chemically synthesized
  source 1..20: mol_type = other DNA
tacatgtgtaaaaatctggt

SEQ ID NO: 3172 - DNA, 20 bp, synthetic construct
  misc_feature 1..20: note = chemically synthesized
  source 1..20: mol_type = other DNA
acatgtgtaaaaatctggta

SEQ ID NO: 3173 - DNA, 20 bp, synthetic construct
  misc_feature 1..20: note = chemically synthesized
  source 1..20: mol_type = other DNA
aaatctggtaaggttatgac

SEQ ID NO: 3174 - DNA, 20 bp, synthetic construct
  misc_feature 1..20: note = chemically synthesized
  source 1..20: mol_type = other DNA
ggttatgactagccacgtcc

SEQ ID NO: 3175 - DNA, 20 bp, synthetic construct
  misc_feature 1..20: note = chemically synthesized
  source 1..20: mol_type = other DNA
gttatgactagccacgtccc

SEQ ID NO: 3176 - DNA, 20 bp, synthetic construct
  misc_feature 1..20: note = chemically synthesized
  source 1..20: mol_type = other DNA
ttatgactagccacgtccca

SEQ ID NO: 3177 - DNA, 20 bp, synthetic construct
  misc_feature 1..20: note = chemically synthesized
  source 1..20: mol_type = other DNA
tagccacgtcccagggttca

SEQ ID NO: 3178 - DNA, 20 bp, synthetic construct
  misc_feature 1..20: note = chemically synthesized
  source 1..20: mol_type = other DNA
ccagggttcaaagcttttct

SEQ ID NO: 3179 - DNA, 20 bp, synthetic construct
  misc_feature 1..20: note = chemically synthesized
  source 1..20: mol_type = other DNA
gatgttaaaatgaatcatgt

SEQ ID NO: 3180 - DNA, 20 bp, synthetic construct
  misc_feature 1..20: note = chemically synthesized
  source 1..20: mol_type = other DNA
catgtaagtcccccaaattt

SEQ ID NO: 3181 - DNA, 20 bp, synthetic construct
  misc_feature 1..20: note = chemically synthesized
  source 1..20: mol_type = other DNA
atgtaagtcccccaaattta

SEQ ID NO: 3182 - DNA, 20 bp, synthetic construct
  misc_feature 1..20: note = chemically synthesized
  source 1..20: mol_type = other DNA
gtaagtcccccaaatttaag

SEQ ID NO: 3183 - DNA, 20 bp, synthetic construct
  misc_feature 1..20: note = chemically synthesized
  source 1..20: mol_type = other DNA
aaggagtcctcttccaaaaa

SEQ ID NO: 3184 - DNA, 20 bp, synthetic construct
  misc_feature 1..20: note = chemically synthesized
  source 1..20: mol_type = other DNA
aggagtcctcttccaaaaat

SEQ ID NO: 3185 - DNA, 20 bp, synthetic construct
  misc_feature 1..20: note = chemically synthesized
  source 1..20: mol_type = other DNA
aaataggaaatgaaatgaca

SEQ ID NO: 3186 - DNA, 20 bp, synthetic construct
  misc_feature 1..20: note = chemically synthesized
  source 1..20: mol_type = other DNA
aataggaaatgaaatgacat

SEQ ID NO: 3187 - DNA, 20 bp, synthetic construct
  misc_feature 1..20: note = chemically synthesized
  source 1..20: mol_type = other DNA
tgacataggtgtatgtctct

SEQ ID NO: 3188 - DNA, 20 bp, synthetic construct
  misc_feature 1..20: note = chemically synthesized
  source 1..20: mol_type = other DNA
gacataggtgtatgtctctg

SEQ ID NO: 3189 - DNA, 20 bp, synthetic construct
  misc_feature 1..20: note = chemically synthesized
  source 1..20: mol_type = other DNA
ggtgtatgtctctgaggtga

SEQ ID NO: 3190 - DNA, 20 bp, synthetic construct
  misc_feature 1..20: note = chemically synthesized
  source 1..20: mol_type = other DNA
tgtatgtctctgaggtgacg

SEQ ID NO: 3191 - DNA, 20 bp, synthetic construct
  misc_feature 1..20: note = chemically synthesized
  source 1..20: mol_type = other DNA
gtatgtctctgaggtgacgg

SEQ ID NO: 3192 - DNA, 20 bp, synthetic construct
  misc_feature 1..20: note = chemically synthesized
  source 1..20: mol_type = other DNA
ctgaggtgacggaggaaatg

SEQ ID NO: 3193 - DNA, 20 bp, synthetic construct
  misc_feature 1..20: note = chemically synthesized
  source 1..20: mol_type = other DNA
tgaggtgacggaggaaatga

SEQ ID NO: 3194 - DNA, 20 bp, synthetic construct
  misc_feature 1..20: note = chemically synthesized
  source 1..20: mol_type = other DNA
ggtgacggaggaaatgaagg

SEQ ID NO: 3195 - DNA, 20 bp, synthetic construct
  misc_feature 1..20: note = chemically synthesized
  source 1..20: mol_type = other DNA
gaggaaatgaaggaagcctc

SEQ ID NO: 3196 - DNA, 20 bp, synthetic construct
  misc_feature 1..20: note = chemically synthesized
  source 1..20: mol_type = other DNA
atgaaggaagcctctagatg

SEQ ID NO: 3197 - DNA, 20 bp, synthetic construct
  misc_feature 1..20: note = chemically synthesized
  source 1..20: mol_type = other DNA
gaagcctctagatgcagctt

SEQ ID NO: 3198 - DNA, 20 bp, synthetic construct
  misc_feature 1..20: note = chemically synthesized
  source 1..20: mol_type = other DNA
aagcctctagatgcagcttg

SEQ ID NO: 3199 - DNA, 20 bp, synthetic construct
  misc_feature 1..20: note = chemically synthesized
  source 1..20: mol_type = other DNA
agatgcagcttgaggttcat

SEQ ID NO: 3200 - DNA, 20 bp, synthetic construct
  misc_feature 1..20: note = chemically synthesized
  source 1..20: mol_type = other DNA
atgcagcttgaggttcatga

SEQ ID NO: 3201 - DNA, 20 bp, synthetic construct
  misc_feature 1..20: note = chemically synthesized
  source 1..20: mol_type = other DNA
agcttgaggttcatgagaga

SEQ ID NO: 3202 - DNA, 20 bp, synthetic construct
  misc_feature 1..20: note = chemically synthesized
  source 1..20: mol_type = other DNA
aggttcatgagagacagttc

SEQ ID NO: 3203 - DNA, 20 bp, synthetic construct
  misc_feature 1..20: note = chemically synthesized
  source 1..20: mol_type = other DNA
ggttcatgagagacagttcc

SEQ ID NO: 3204 - DNA, 20 bp, synthetic construct
  misc_feature 1..20: note = chemically synthesized
  source 1..20: mol_type = other DNA
gttcatgagagacagttcca

SEQ ID NO: 3205 - DNA, 20 bp, synthetic construct
  misc_feature 1..20: note = chemically synthesized
  source 1..20: mol_type = other DNA
ttcatgagagacagttccag

SEQ ID NO: 3206 - DNA, 20 bp, synthetic construct
  misc_feature 1..20: note = chemically synthesized
  source 1..20: mol_type = other DNA
catgagagacagttccaggg

SEQ ID NO: 3207 - DNA, 20 bp, synthetic construct
  misc_feature 1..20: note = chemically synthesized
  source 1..20: mol_type = other DNA
tgagagacagttccagggga

SEQ ID NO: 3208 - DNA, 20 bp, synthetic construct
  misc_feature 1..20: note = chemically synthesized
  source 1..20: mol_type = other DNA
gagagacagttccaggggag

SEQ ID NO: 3209 - DNA, 20 bp, synthetic construct
  misc_feature 1..20: note = chemically synthesized
  source 1..20: mol_type = other DNA
cagttccaggggagaggtca

SEQ ID NO: 3210 - DNA, 20 bp, synthetic construct
  misc_feature 1..20: note = chemically synthesized
  source 1..20: mol_type = other DNA
tccaggggagaggtcacagc

SEQ ID NO: 3211 - DNA, 20 bp, synthetic construct
  misc_feature 1..20: note = chemically synthesized
  source 1..20: mol_type = other DNA
ccaggggagaggtcacagct

SEQ ID NO: 3212 - DNA, 20 bp, synthetic construct
  misc_feature 1..20: note = chemically synthesized
  source 1..20: mol_type = other DNA
caggggagaggtcacagcta

SEQ ID NO: 3213 - DNA, 20 bp, synthetic construct
  misc_feature 1..20: note = chemically synthesized
  source 1..20: mol_type = other DNA
aggtcacagctagggatcac

SEQ ID NO: 3214 - DNA, 20 bp, synthetic construct
  misc_feature 1..20: note = chemically synthesized
  source 1..20: mol_type = other DNA
agctagggatcaccggcatg

SEQ ID NO: 3215 - DNA, 20 bp, synthetic construct
  misc_feature 1..20: note = chemically synthesized
  source 1..20: mol_type = other DNA
gctagggatcaccggcatgc

SEQ ID NO: 3216 - DNA, 20 bp, synthetic construct
  misc_feature 1..20: note = chemically synthesized
  source 1..20: mol_type = other DNA
atcaccggcatgcaggaact

SEQ ID NO: 3217 - DNA, 20 bp, synthetic construct
  misc_feature 1..20: note = chemically synthesized
  source 1..20: mol_type = other DNA
caggaactcagaaacctaaa

SEQ ID NO: 3218 - DNA, 20 bp, synthetic construct
  misc_feature 1..20: note = chemically synthesized
  source 1..20: mol_type = other DNA
aggaactcagaaacctaaat

SEQ ID NO: 3219 - DNA, 20 bp, synthetic construct
  misc_feature 1..20: note = chemically synthesized
  source 1..20: mol_type = other DNA
ggaactcagaaacctaaatg

SEQ ID NO: 3220 - DNA, 20 bp, synthetic construct
  misc_feature 1..20: note = chemically synthesized
  source 1..20: mol_type = other DNA
ctaaatggggaaatcttttt

SEQ ID NO: 3221 - DNA, 20 bp, synthetic construct
  misc_feature 1..20: note = chemically synthesized
  source 1..20: mol_type = other DNA
taaatggggaaatctttttg

SEQ ID NO: 3222 - DNA, 20 bp, synthetic construct
  misc_feature 1..20: note = chemically synthesized
  source 1..20: mol_type = other DNA
aatctttttgaggaaatgaa

SEQ ID NO: 3223 - DNA, 20 bp, synthetic construct
  misc_feature 1..20: note = chemically synthesized
  source 1..20: mol_type = other DNA
tctttttgaggaaatgaaca

SEQ ID NO: 3224 - DNA, 20 bp, synthetic construct
  misc_feature 1..20: note = chemically synthesized
  source 1..20: mol_type = other DNA
ttttgaggaaatgaacagag

SEQ ID NO: 3225 - DNA, 20 bp, synthetic construct
  misc_feature 1..20: note = chemically synthesized
  source 1..20: mol_type = other DNA
tttgaggaaatgaacagaga

SEQ ID NO: 3226 - DNA, 20 bp, synthetic construct
  misc_feature 1..20: note = chemically synthesized
  source 1..20: mol_type = other DNA
gaacagagaaggctaaaatc

SEQ ID NO: 3227 - DNA, 20 bp, synthetic construct
  misc_feature 1..20: note = chemically synthesized
  source 1..20: mol_type = other DNA
aacagagaaggctaaaatca

SEQ ID NO: 3228 - DNA, 20 bp, synthetic construct
  misc_feature 1..20: note = chemically synthesized
  source 1..20: mol_type = other DNA
cagagaaggctaaaatcaag

SEQ ID NO: 3229 - DNA, 20 bp, synthetic construct
  misc_feature 1..20: note = chemically synthesized
  source 1..20: mol_type = other DNA
gctaaaatcaaggagttcgt

SEQ ID NO: 3230 - DNA, 20 bp, synthetic construct
  misc_feature 1..20: note = chemically synthesized
  source 1..20: mol_type = other DNA
ctaaaatcaaggagttcgtc

SEQ ID NO: 3231 - DNA, 20 bp, synthetic construct
  misc_feature 1..20: note = chemically synthesized
  source 1..20: mol_type = other DNA
cgtcaggcaatttctatgtt

SEQ ID NO: 3232 - DNA, 20 bp, synthetic construct
  misc_feature 1..20: note = chemically synthesized
  source 1..20: mol_type = other DNA
gtcaggcaatttctatgttt

SEQ ID NO: 3233 - DNA, 20 bp, synthetic construct
  misc_feature 1..20: note = chemically synthesized
  source 1..20: mol_type = other DNA
caactctctcctgaaacatg

SEQ ID NO: 3234 - DNA, 20 bp, synthetic construct
  misc_feature 1..20: note = chemically synthesized
  source 1..20: mol_type = other DNA
actctctcctgaaacatgaa

SEQ ID NO: 3235 - DNA, 20 bp, synthetic construct
  misc_feature 1..20: note = chemically synthesized
  source 1..20: mol_type = other DNA
cataaatgcactccctcttt

SEQ ID NO: 3236 - DNA, 20 bp, synthetic construct
  misc_feature 1..20: note = chemically synthesized
  source 1..20: mol_type = other DNA
gcactccctctttgagtctc

SEQ ID NO: 3237 - DNA, 20 bp, synthetic construct
  misc_feature 1..20: note = chemically synthesized
  source 1..20: mol_type = other DNA
ctagttttgtctccttccca

SEQ ID NO: 3238 - DNA, 20 bp, synthetic construct
  misc_feature 1..20: note = chemically synthesized
  source 1..20: mol_type = other DNA
ttttgtctccttcccacagt

SEQ ID NO: 3239 - DNA, 20 bp, synthetic construct
  misc_feature 1..20: note = chemically synthesized
  source 1..20: mol_type = other DNA
tccttcccacagtgagtctg

SEQ ID NO: 3240 - DNA, 20 bp, synthetic construct
  misc_feature 1..20: note = chemically synthesized
  source 1..20: mol_type = other DNA
ccttcccacagtgagtctgc

SEQ ID NO: 3241 - DNA, 20 bp, synthetic construct
  misc_feature 1..20: note = chemically synthesized
  source 1..20: mol_type = other DNA
ggctgcgtgtcactcacgtt

SEQ ID NO: 3242 - DNA, 20 bp, synthetic construct
  misc_feature 1..20: note = chemically synthesized
  source 1..20: mol_type = other DNA
cgtgtcactcacgttcagct

SEQ ID NO: 3243 - DNA, 20 bp, synthetic construct
  misc_feature 1..20: note = chemically synthesized
  source 1..20: mol_type = other DNA
actcacgttcagctaagacg

SEQ ID NO: 3244 - DNA, 20 bp, synthetic construct
  misc_feature 1..20: note = chemically synthesized
  source 1..20: mol_type = other DNA
agctaagacgtagtgcccca

SEQ ID NO: 3245 - DNA, 20 bp, synthetic construct
  misc_feature 1..20: note = chemically synthesized
  source 1..20: mol_type = other DNA
gtgccccatggctcctcctg

SEQ ID NO: 3246 - DNA, 20 bp, synthetic construct
  misc_feature 1..20: note = chemically synthesized
  source 1..20: mol_type = other DNA
gccccatggctcctcctgtg

SEQ ID NO: 3247 - DNA, 20 bp, synthetic construct
  misc_feature 1..20: note = chemically synthesized
  source 1..20: mol_type = other DNA
atggctcctcctgtggagac

SEQ ID NO: 3248 - DNA, 20 bp, synthetic construct
  misc_feature 1..20: note = chemically synthesized
  source 1..20: mol_type = other DNA
ggctcctcctgtggagacaa

SEQ ID NO: 3249 - DNA, 20 bp, synthetic construct
  misc_feature 1..20: note = chemically synthesized
  source 1..20: mol_type = other DNA
tcctgtggagacaagagacc

SEQ ID NO: 3250 - DNA, 20 bp, synthetic construct
  misc_feature 1..20: note = chemically synthesized
  source 1..20: mol_type = other DNA
cctgtggagacaagagaccc

SEQ ID NO: 3251 - DNA, 20 bp, synthetic construct
  misc_feature 1..20: note = chemically synthesized
  source 1..20: mol_type = other DNA
tggagacaagagacccagga

SEQ ID NO: 3252 - DNA, 20 bp, synthetic construct
  misc_feature 1..20: note = chemically synthesized
  source 1..20: mol_type = other DNA
gagacaagagacccaggaaa

SEQ ID NO: 3253 - DNA, 20 bp, synthetic construct
  misc_feature 1..20: note = chemically synthesized
  source 1..20: mol_type = other DNA
agacaagagacccaggaaag

SEQ ID NO: 3254 - DNA, 20 bp, synthetic construct
  misc_feature 1..20: note = chemically synthesized
  source 1..20: mol_type = other DNA
ggaaagaggcatcacaaacc

SEQ ID NO: 3255 - DNA, 20 bp, synthetic construct
  misc_feature 1..20: note = chemically synthesized
  source 1..20: mol_type = other DNA
gaaagaggcatcacaaacct

SEQ ID NO: 3256 - DNA, 20 bp, synthetic construct
  misc_feature 1..20: note = chemically synthesized
  source 1..20: mol_type = other DNA
ctcattcacccatctcaatt

SEQ ID NO: 3257 - DNA, 20 bp, synthetic construct
  misc_feature 1..20: note = chemically synthesized
  source 1..20: mol_type = other DNA
cacccatctcaatttagacc

SEQ ID NO: 3258 - DNA, 20 bp, synthetic construct
  misc_feature 1..20: note = chemically synthesized
  source 1..20: mol_type = other DNA
acccatctcaatttagacct

SEQ ID NO: 3259 - DNA, 20 bp, synthetic construct
  misc_feature 1..20: note = chemically synthesized
  source 1..20: mol_type = other DNA
aatttagacctgggcactat

SEQ ID NO: 3260 - DNA, 20 bp, synthetic construct
  misc_feature 1..20: note = chemically synthesized
  source 1..20: mol_type = other DNA
cctgggcactattggatttc

SEQ ID NO: 3261 - DNA, 20 bp, synthetic construct
  misc_feature 1..20: note = chemically synthesized
  source 1..20: mol_type = other DNA
aagaaccattatctctcatc

SEQ ID NO: 3262 - DNA, 20 bp, synthetic construct
  misc_feature 1..20: note = chemically synthesized
  source 1..20: mol_type = other DNA
tctcatctggaaatgcttat

SEQ ID NO: 3263 - DNA, 20 bp, synthetic construct
  misc_feature 1..20: note = chemically synthesized
  source 1..20: mol_type = other DNA
atgcttattggctttctaac

SEQ ID NO: 3264 - DNA, 20 bp, synthetic construct
  misc_feature 1..20: note = chemically synthesized
  source 1..20: mol_type = other DNA
taacaacacattcaccatat

SEQ ID NO: 3265 - DNA, 20 bp, synthetic construct
  misc_feature 1..20: note = chemically synthesized
  source 1..20: mol_type = other DNA
aacaacacattcaccatata

SEQ ID NO: 3266 - DNA, 20 bp, synthetic construct
  misc_feature 1..20: note = chemically synthesized
  source 1..20: mol_type = other DNA
acaacacattcaccatataa

SEQ ID NO: 3267 - DNA, 20 bp, synthetic construct
  misc_feature 1..20: note = chemically synthesized
  source 1..20: mol_type = other DNA
aacacattcaccatataagg

SEQ ID NO: 3268 - DNA, 20 bp, synthetic construct
  misc_feature 1..20: note = chemically synthesized
  source 1..20: mol_type = other DNA
tcaccatataagggagatcg

SEQ ID NO: 3269 - DNA, 20 bp, synthetic construct
  misc_feature 1..20: note = chemically synthesized
  source 1..20: mol_type = other DNA
agatcgtggtcctcctttct

SEQ ID NO: 3270 - DNA, 20 bp, synthetic construct
  misc_feature 1..20: note = chemically synthesized
  source 1..20: mol_type = other DNA
gatcgtggtcctcctttctt

SEQ ID NO: 3271 - DNA, 20 bp, synthetic construct
  misc_feature 1..20: note = chemically synthesized
  source 1..20: mol_type = other DNA
aggatccttcaatgacaccc

SEQ ID NO: 3272 - DNA, 20 bp, synthetic construct
  misc_feature 1..20: note = chemically synthesized
  source 1..20: mol_type = other DNA
atcataacccaatatcccaa

SEQ ID NO: 3273 - DNA, 20 bp, synthetic construct
  misc_feature 1..20: note = chemically synthesized
  source 1..20: mol_type = other DNA
ccaatatcccaaaagaccct

SEQ ID NO: 3274 - DNA, 20 bp, synthetic construct
  misc_feature 1..20: note = chemically synthesized
  source 1..20: mol_type = other DNA
aagacccttggactctgtat

SEQ ID NO: 3275 - DNA, 20 bp, synthetic construct
  misc_feature 1..20: note = chemically synthesized
  source 1..20: mol_type = other DNA
cccttggactctgtatgagc

SEQ ID NO: 3276 - DNA, 20 bp, synthetic construct
  misc_feature 1..20: note = chemically synthesized
  source 1..20: mol_type = other DNA
attctcttttccctacacca

SEQ ID NO: 3277 - DNA, 20 bp, synthetic construct
  misc_feature 1..20: note = chemically synthesized
  source 1..20: mol_type = other DNA
ttccctacaccacagatgtt

SEQ ID NO: 3278 - DNA, 20 bp, synthetic construct
  misc_feature 1..20: note = chemically synthesized
  source 1..20: mol_type = other DNA
tccctacaccacagatgttc

SEQ ID NO: 3279 - DNA, 20 bp, synthetic construct
  misc_feature 1..20: note = chemically synthesized
  source 1..20: mol_type = other DNA
ccctacaccacagatgttca

SEQ ID NO: 3280 - DNA, 20 bp, synthetic construct
  misc_feature 1..20: note = chemically synthesized
  source 1..20: mol_type = other DNA
cctacaccacagatgttcag

SEQ ID NO: 3281 - DNA, 20 bp, synthetic construct
  misc_feature 1..20: note = chemically synthesized
  source 1..20: mol_type = other DNA
ctacaccacagatgttcagg

SEQ ID NO: 3282 - DNA, 20 bp, synthetic construct
  misc_feature 1..20: note = chemically synthesized
  source 1..20: mol_type = other DNA
caccacagatgttcaggggg

SEQ ID NO: 3283 - DNA, 20 bp, synthetic construct
  misc_feature 1..20: note = chemically synthesized
  source 1..20: mol_type = other DNA
agggggtagaaatgcataat

SEQ ID NO: 3284 - DNA, 20 bp, synthetic construct
  misc_feature 1..20: note = chemically synthesized
  source 1..20: mol_type = other DNA
ggtagaaatgcataattggt

SEQ ID NO: 3285 - DNA, 20 bp, synthetic construct
  misc_feature 1..20: note = chemically synthesized
  source 1..20: mol_type = other DNA
aatgcataattggtgagtga

SEQ ID NO: 3286 - DNA, 20 bp, synthetic construct
  misc_feature 1..20: note = chemically synthesized
  source 1..20: mol_type = other DNA
gagtgatagctacgcaaact

SEQ ID NO: 3287 - DNA, 20 bp, synthetic construct
  misc_feature 1..20: note = chemically synthesized
  source 1..20: mol_type = other DNA
agtgatagctacgcaaactc

SEQ ID NO: 3288 - DNA, 20 bp, synthetic construct
  misc_feature 1..20: note = chemically synthesized
  source 1..20: mol_type = other DNA
gtgatagctacgcaaactca

SEQ ID NO: 3289 - DNA, 20 bp, synthetic construct
  misc_feature 1..20: note = chemically synthesized
  source 1..20: mol_type = other DNA
agctacgcaaactcagggtt

SEQ ID NO: 3290 - DNA, 20 bp, synthetic construct
  misc_feature 1..20: note = chemically synthesized
  source 1..20: mol_type = other DNA
gctacgcaaactcagggtta

SEQ ID NO: 3291 - DNA, 20 bp, synthetic construct
  misc_feature 1..20: note = chemically synthesized
  source 1..20: mol_type = other DNA
gcaaactcagggttaaggta

SEQ ID NO: 3292 - DNA, 20 bp, synthetic construct
  misc_feature 1..20: note = chemically synthesized
  source 1..20: mol_type = other DNA
agtaattatttctaatctcc

SEQ ID NO: 3293 - DNA, 20 bp, synthetic construct
  misc_feature 1..20: note = chemically synthesized
  source 1..20: mol_type = other DNA
atgccttatactctcctact

SEQ ID NO: 3294 - DNA, 20 bp, synthetic construct
  misc_feature 1..20: note = chemically synthesized
  source 1..20: mol_type = other DNA
ttatactctcctacttggca

SEQ ID NO: 3295 - DNA, 20 bp, synthetic construct
  misc_feature 1..20: note = chemically synthesized
  source 1..20: mol_type = other DNA
gcatggttgctccgtctgtg

SEQ ID NO: 3296 - DNA, 20 bp, synthetic construct
  misc_feature 1..20: note = chemically synthesized
  source 1..20: mol_type = other DNA
tcatcttcaacctcacctaa

SEQ ID NO: 3297 - DNA, 20 bp, synthetic construct
  misc_feature 1..20: note = chemically synthesized
  source 1..20: mol_type = other DNA
caacctcacctaatggaatc

SEQ ID NO: 3298 - DNA, 20 bp, synthetic construct
  misc_feature 1..20: note = chemically synthesized
  source 1..20: mol_type = other DNA
tggaatccagcttctccttc

SEQ ID NO: 3299 - DNA, 20 bp, synthetic construct
  misc_feature 1..20: note = chemically synthesized
  source 1..20: mol_type = other DNA
ccagcttctccttcaagatc

SEQ ID NO: 3300 - DNA, 20 bp, synthetic construct
  misc_feature 1..20: note = chemically synthesized
  source 1..20: mol_type = other DNA
gcttctccttcaagatccag

SEQ ID NO: 3301 - DNA, 20 bp, synthetic construct
  misc_feature 1..20: note = chemically synthesized
  source 1..20: mol_type = other DNA
cttctccttcaagatccaga

SEQ ID NO: 3302 - DNA, 20 bp, synthetic construct
  misc_feature 1..20: note = chemically synthesized
  source 1..20: mol_type = other DNA
cagaaggctatcttgatccc

SEQ ID NO: 3303 - DNA, 20 bp, synthetic construct
  misc_feature 1..20: note = chemically synthesized
  source 1..20: mol_type = other DNA
attctttcctttgacaccct

SEQ ID NO: 3304 - DNA, 20 bp, synthetic construct
  misc_feature 1..20: note = chemically synthesized
  source 1..20: mol_type = other DNA
catttgcttcctgcctgctt

SEQ ID NO: 3305 - DNA, 20 bp, synthetic construct
  misc_feature 1..20: note = chemically synthesized
  source 1..20: mol_type = other DNA
atttgcttcctgcctgcttt

SEQ ID NO: 3306 - DNA, 20 bp, synthetic construct
  misc_feature 1..20: note = chemically synthesized
  source 1..20: mol_type = other DNA
ctgcctgctttaggacctca

SEQ ID NO: 3307 - DNA, 20 bp, synthetic construct
  misc_feature 1..20: note = chemically synthesized
  source 1..20: mol_type = other DNA
tgcctgctttaggacctcat

SEQ ID NO: 3308 - DNA, 20 bp, synthetic construct
  misc_feature 1..20: note = chemically synthesized
  source 1..20: mol_type = other DNA
gcctgctttaggacctcatg

SEQ ID NO: 3309 - DNA, 20 bp, synthetic construct
  misc_feature 1..20: note = chemically synthesized
  source 1..20: mol_type = other DNA
ctatcaatttcattccctac

SEQ ID NO: 3310 - DNA, 20 bp, synthetic construct
  misc_feature 1..20: note = chemically synthesized
  source 1..20: mol_type = other DNA
atttcattccctaccagatt

SEQ ID NO: 3311 - DNA, 20 bp, synthetic construct
  misc_feature 1..20: note = chemically synthesized
  source 1..20: mol_type = other DNA
tttcattccctaccagattt

SEQ ID NO: 3312 - DNA, 20 bp, synthetic construct
  misc_feature 1..20: note = chemically synthesized
  source 1..20: mol_type = other DNA
ccctaccagatttgggttct

SEQ ID NO: 3313 - DNA, 20 bp, synthetic construct
  misc_feature 1..20: note = chemically synthesized
  source 1..20: mol_type = other DNA
ccagatttgggttctgagaa

SEQ ID NO: 3314 - DNA, 20 bp, synthetic construct
  misc_feature 1..20: note = chemically synthesized
  source 1..20: mol_type = other DNA
ttgggttctgagaatagcca

SEQ ID NO: 3315 - DNA, 20 bp, synthetic construct
  misc_feature 1..20: note = chemically synthesized
  source 1..20: mol_type = other DNA
acagtgacttctcaacctca

SEQ ID NO: 3316 - DNA, 20 bp, synthetic construct
  misc_feature 1..20: note = chemically synthesized
  source 1..20: mol_type = other DNA
agcccctgtactaccttaaa

SEQ ID NO: 3317 - DNA, 20 bp, synthetic construct
  misc_feature 1..20: note = chemically synthesized
  source 1..20: mol_type = other DNA
cttaaacagctcttgcaaaa

SEQ ID NO: 3318 - DNA, 20 bp, synthetic construct
  misc_feature 1..20: note = chemically synthesized
  source 1..20: mol_type = other DNA
aaacagctcttgcaaaatag

SEQ ID NO: 3319 - DNA, 20 bp, synthetic construct
  misc_feature 1..20: note = chemically synthesized
  source 1..20: mol_type = other DNA
aacagctcttgcaaaatagt

SEQ ID NO: 3320 - DNA, 20 bp, synthetic construct
  misc_feature 1..20: note = chemically synthesized
  source 1..20: mol_type = other DNA
gcaaaatagtaggtgctctg

SEQ ID NO: 3321 - DNA, 20 bp, synthetic construct
  misc_feature 1..20: note = chemically synthesized
  source 1..20: mol_type = other DNA
tctgaagatgtttgttgaat

SEQ ID NO: 3322 - DNA, 20 bp, synthetic construct
  misc_feature 1..20: note = chemically synthesized
  source 1..20: mol_type = other DNA
tgaagatgtttgttgaatta

SEQ ID NO: 3323 - DNA, 20 bp, synthetic construct
  misc_feature 1..20: note = chemically synthesized
  source 1..20: mol_type = other DNA
tgaattagagactttcattc

SEQ ID NO: 3324 - DNA, 20 bp, synthetic construct
  misc_feature 1..20: note = chemically synthesized
  source 1..20: mol_type = other DNA
gaattagagactttcattct

SEQ ID NO: 3325 - DNA, 20 bp, synthetic construct
  misc_feature 1..20: note = chemically synthesized
  source 1..20: mol_type = other DNA
aattagagactttcattctg

SEQ ID NO: 3326 - DNA, 20 bp, synthetic construct
  misc_feature 1..20: note = chemically synthesized
  source 1..20: mol_type = other DNA
ttagagactttcattctggg

SEQ ID NO: 3327 - DNA, 20 bp, synthetic construct
  misc_feature 1..20: note = chemically synthesized
  source 1..20: mol_type = other DNA
aaccattattttctgtctcc

SEQ ID NO: 3328 - DNA, 20 bp, synthetic construct
  misc_feature 1..20: note = chemically synthesized
  source 1..20: mol_type = other DNA
accattattttctgtctccc

SEQ ID NO: 3329 - DNA, 20 bp, synthetic construct
  misc_feature 1..20: note = chemically synthesized
  source 1..20: mol_type = other DNA
ccattattttctgtctccca

SEQ ID NO: 3330 - DNA, 20 bp, synthetic construct
  misc_feature 1..20: note = chemically synthesized
  source 1..20: mol_type = other DNA
attattttctgtctcccagg

SEQ ID NO: 3331 - DNA, 20 bp, synthetic construct
  misc_feature 1..20: note = chemically synthesized
  source 1..20: mol_type = other DNA
tctgtctcccagggagctgc

SEQ ID NO: 3332 - DNA, 20 bp, synthetic construct
  misc_feature 1..20: note = chemically synthesized
  source 1..20: mol_type = other DNA
gggagctgctggtgtcccca

SEQ ID NO: 3333 - DNA, 20 bp, synthetic construct
  misc_feature 1..20: note = chemically synthesized
  source 1..20: mol_type = other DNA
tgtccccaaagaatataaat

SEQ ID NO: 3334 - DNA, 20 bp, synthetic construct
  misc_feature 1..20: note = chemically synthesized
  source 1..20: mol_type = other DNA
aatgagaaaaatgcttccca

SEQ ID NO: 3335 - DNA, 20 bp, synthetic construct
  misc_feature 1..20: note = chemically synthesized
  source 1..20: mol_type = other DNA
aaaatgcttcccatggatgc

SEQ ID NO: 3336 - DNA, 20 bp, synthetic construct
  misc_feature 1..20: note = chemically synthesized
  source 1..20: mol_type = other DNA
cccctcttcccactgtgccc

SEQ ID NO: 3337 - DNA, 20 bp, synthetic construct
  misc_feature 1..20: note = chemically synthesized
  source 1..20: mol_type = other DNA
ccctcttcccactgtgccct

SEQ ID NO: 3338 - DNA, 20 bp, synthetic construct
  misc_feature 1..20: note = chemically synthesized
  source 1..20: mol_type = other DNA
cctcttcccactgtgccctg

SEQ ID NO: 3339 - DNA, 20 bp, synthetic construct
  misc_feature 1..20: note = chemically synthesized
  source 1..20: mol_type = other DNA
cttcccactgtgccctgggg

SEQ ID NO: 3340 - DNA, 20 bp, synthetic construct
  misc_feature 1..20: note = chemically synthesized
  source 1..20: mol_type = other DNA
tcccactgtgccctggggca

SEQ ID NO: 3341 - DNA, 20 bp, synthetic construct
  misc_feature 1..20: note = chemically synthesized
  source 1..20: mol_type = other DNA
cccactgtgccctggggcag

SEQ ID NO: 3342 - DNA, 20 bp, synthetic construct
  misc_feature 1..20: note = chemically synthesized
  source 1..20: mol_type = other DNA
tgccctggggcagaggtact

SEQ ID NO: 3343 - DNA, 20 bp, synthetic construct
  misc_feature 1..20: note = chemically synthesized
  source 1..20: mol_type = other DNA
ccctggggcagaggtactaa

SEQ ID NO: 3344 - DNA, 20 bp, synthetic construct
  misc_feature 1..20: note = chemically synthesized
  source 1..20: mol_type = other DNA
tgaacaaaattccaatgaac

SEQ ID NO: 3345 - DNA, 20 bp, synthetic construct
  misc_feature 1..20: note = chemically synthesized
  source 1..20: mol_type = other DNA
gaacaagatgacgacaaaaa

SEQ ID NO: 3346 - DNA, 20 bp, synthetic construct
  misc_feature 1..20: note = chemically synthesized
  source 1..20: mol_type = other DNA
ccactgatgactccaatgac

SEQ ID NO: 3347 - DNA, 20 bp, synthetic construct
  misc_feature 1..20: note = chemically synthesized
  source 1..20: mol_type = other DNA
cactgatgactccaatgact

SEQ ID NO: 3348 - DNA, 20 bp, synthetic construct
  misc_feature 1..20: note = chemically synthesized
  source 1..20: mol_type = other DNA
actgatgactccaatgacta

SEQ ID NO: 3349 - DNA, 20 bp, synthetic construct
  misc_feature 1..20: note = chemically synthesized
  source 1..20: mol_type = other DNA
gactccaatgactagggtgc

SEQ ID NO: 3350 - DNA, 20 bp, synthetic construct
  misc_feature 1..20: note = chemically synthesized
  source 1..20: mol_type = other DNA
ccaatgactagggtgccaga

SEQ ID NO: 3351 - DNA, 20 bp, synthetic construct
  misc_feature 1..20: note = chemically synthesized
  source 1..20: mol_type = other DNA
tgactagggtgccagacggt

SEQ ID NO: 3352 - DNA, 20 bp, synthetic construct
  misc_feature 1..20: note = chemically synthesized
  source 1..20: mol_type = other DNA
gactagggtgccagacggtg

SEQ ID NO: 3353 - DNA, 20 bp, synthetic construct
  misc_feature 1..20: note = chemically synthesized
  source 1..20: mol_type = other DNA
actagggtgccagacggtga

SEQ ID NO: 3354 - DNA, 20 bp, synthetic construct
  misc_feature 1..20: note = chemically synthesized
  source 1..20: mol_type = other DNA
agacggtgagggctctaaaa

SEQ ID NO: 3355 - DNA, 20 bp, synthetic construct
  misc_feature 1..20: note = chemically synthesized
  source 1..20: mol_type = other DNA
tgagggctctaaaacagaaa

SEQ ID NO: 3356 - DNA, 20 bp, synthetic construct
  misc_feature 1..20: note = chemically synthesized
  source 1..20: mol_type = other DNA
ggctctaaaacagaaaaagc

SEQ ID NO: 3357 - DNA, 20 bp, synthetic construct
  misc_feature 1..20: note = chemically synthesized
  source 1..20: mol_type = other DNA
aaaacagaaaaagcaagtta

SEQ ID NO: 3358 - DNA, 20 bp, synthetic construct
  misc_feature 1..20: note = chemically synthesized
  source 1..20: mol_type = other DNA
aagcctttgattgccaccct

SEQ ID NO: 3359 - DNA, 20 bp, synthetic construct
  misc_feature 1..20: note = chemically synthesized
  source 1..20: mol_type = other DNA
cctcagcccaccccctaaca

SEQ ID NO: 3360 - DNA, 20 bp, synthetic construct
  misc_feature 1..20: note = chemically synthesized
  source 1..20: mol_type = other DNA
tcagcccaccccctaacaaa

SEQ ID NO: 3361 - DNA, 20 bp, synthetic construct
  misc_feature 1..20: note = chemically synthesized
  source 1..20: mol_type = other DNA
gcccaccccctaacaaagag

SEQ ID NO: 3362 - DNA, 20 bp, synthetic construct
  misc_feature 1..20: note = chemically synthesized
  source 1..20: mol_type = other DNA
cactgccataattacctcct

SEQ ID NO: 3363 - DNA, 20 bp, synthetic construct
  misc_feature 1..20: note = chemically synthesized
  source 1..20: mol_type = other DNA
actgccataattacctcctc

SEQ ID NO: 3364 - DNA, 20 bp, synthetic construct
  misc_feature 1..20: note = chemically synthesized
  source 1..20: mol_type = other DNA
gcactcctctcaacccccaa

SEQ ID NO: 3365 - DNA, 20 bp, synthetic construct
  misc_feature 1..20: note = chemically synthesized
  source 1..20: mol_type = other DNA
caacccccaatagattttct

SEQ ID NO: 3366 - DNA, 20 bp, synthetic construct
  misc_feature 1..20: note = chemically synthesized
  source 1..20: mol_type = other DNA
caatagattttctcagctcc

SEQ ID NO: 3367 - DNA, 20 bp, synthetic construct
  misc_feature 1..20: note = chemically synthesized
  source 1..20: mol_type = other DNA
tctcagctcctggctctcat

SEQ ID NO: 3368 - DNA, 20 bp, synthetic construct
  misc_feature 1..20: note = chemically synthesized
  source 1..20: mol_type = other DNA
ctctcatcagtcacataccc

SEQ ID NO: 3369 - DNA, 20 bp, synthetic construct
  misc_feature 1..20: note = chemically synthesized
  source 1..20: mol_type = other DNA
cacataccccagatcacaat

SEQ ID NO: 3370 - DNA, 20 bp, synthetic construct
  misc_feature 1..20: note = chemically synthesized
  source 1..20: mol_type = other DNA
acataccccagatcacaatg

SEQ ID NO: 3371 - DNA, 20 bp, synthetic construct
  misc_feature 1..20: note = chemically synthesized
  source 1..20: mol_type = other DNA
cataccccagatcacaatga

SEQ ID NO: 3372 - DNA, 20 bp, synthetic construct
  misc_feature 1..20: note = chemically synthesized
  source 1..20: mol_type = other DNA
ataccccagatcacaatgag

SEQ ID NO: 3373 - DNA, 20 bp, synthetic construct
  misc_feature 1..20: note = chemically synthesized
  source 1..20: mol_type = other DNA
atcacaatgaggggctgatc

SEQ ID NO: 3374 - DNA, 20 bp, synthetic construct
  misc_feature 1..20: note = chemically synthesized
  source 1..20: mol_type = other DNA
tcacaatgaggggctgatcc

SEQ ID NO: 3375 - DNA, 20 bp, synthetic construct
  misc_feature 1..20: note = chemically synthesized
  source 1..20: mol_type = other DNA
atgaggggctgatccaggcc

SEQ ID NO: 3376 - DNA, 20 bp, synthetic construct
  misc_feature 1..20: note = chemically synthesized
  source 1..20: mol_type = other DNA
tgaggggctgatccaggcct

SEQ ID NO: 3377 - DNA, 20 bp, synthetic construct
  misc_feature 1..20: note = chemically synthesized
  source 1..20: mol_type = other DNA
ccaggcctgggtgctccacc

SEQ ID NO: 3378 - DNA, 20 bp, synthetic construct
  misc_feature 1..20: note = chemically synthesized
  source 1..20: mol_type = other DNA
cgtatatctctgctcttccc

SEQ ID NO: 3379 - DNA, 20 bp, synthetic construct
  misc_feature 1..20: note = chemically synthesized
  source 1..20: mol_type = other DNA
gtatatctctgctcttcccc

SEQ ID NO: 3380 - DNA, 20 bp, synthetic construct
  misc_feature 1..20: note = chemically synthesized
  source 1..20: mol_type = other DNA
tatatctctgctcttcccca

SEQ ID NO: 3381 - DNA, 20 bp, synthetic construct
  misc_feature 1..20: note = chemically synthesized
  source 1..20: mol_type = other DNA
atatctctgctcttccccag

SEQ ID NO: 3382 - DNA, 20 bp, synthetic construct
  misc_feature 1..20: note = chemically synthesized
  source 1..20: mol_type = other DNA
tatctctgctcttccccagg

SEQ ID NO: 3383 - DNA, 20 bp, synthetic construct
  misc_feature 1..20: note = chemically synthesized
  source 1..20: mol_type = other DNA
ctgctcttccccagggggta

SEQ ID NO: 3384 - DNA, 20 bp, synthetic construct
  misc_feature 1..20: note = chemically synthesized
  source 1..20: mol_type = other DNA
cttccccagggggtacagcc

SEQ ID NO: 3385 - DNA, 20 bp, synthetic construct
  misc_feature 1..20: note = chemically synthesized
  source 1..20: mol_type = other DNA
ttccccagggggtacagcca

SEQ ID NO: 3386 - DNA, 20 bp, synthetic construct
  misc_feature 1..20: note = chemically synthesized
  source 1..20: mol_type = other DNA
ggggtacagccaaggttatc

SEQ ID NO: 3387 - DNA, 20 bp, synthetic construct
  misc_feature 1..20: note = chemically synthesized
  source 1..20: mol_type = other DNA
cagccaaggttatccagccc

SEQ ID NO: 3388 - DNA, 20 bp, synthetic construct
  misc_feature 1..20: note = chemically synthesized
  source 1..20: mol_type = other DNA
ccaaggttatccagccctgg

SEQ ID NO: 3389 - DNA, 20 bp, synthetic construct
  misc_feature 1..20: note = chemically synthesized
  source 1..20: mol_type = other DNA
caaggttatccagccctggt

SEQ ID NO: 3390 - DNA, 20 bp, synthetic construct
  misc_feature 1..20: note = chemically synthesized
  source 1..20: mol_type = other DNA
ctggtaggtcccatccccat

SEQ ID NO: 3391 - DNA, 20 bp, synthetic construct
  misc_feature 1..20: note = chemically synthesized
  source 1..20: mol_type = other DNA
tggtaggtcccatccccatt

SEQ ID NO: 3392 - DNA, 20 bp, synthetic construct
  misc_feature 1..20: note = chemically synthesized
  source 1..20: mol_type = other DNA
cccattgggcaatacgtctt

SEQ ID NO: 3393 - DNA, 20 bp, synthetic construct
  misc_feature 1..20: note = chemically synthesized
  source 1..20: mol_type = other DNA
ccattgggcaatacgtcttt

SEQ ID NO: 3394 - DNA, 20 bp, synthetic construct
  misc_feature 1..20: note = chemically synthesized
  source 1..20: mol_type = other DNA
gtctttaggttcgaactcct

SEQ ID NO: 3395 - DNA, 20 bp, synthetic construct
  misc_feature 1..20: note = chemically synthesized
  source 1..20: mol_type = other DNA
tcgaactccttggcatccat

SEQ ID NO: 3396 - DNA, 20 bp, synthetic construct
  misc_feature 1..20: note = chemically synthesized
  source 1..20: mol_type = other DNA
tccattggctgcttatcctt

SEQ ID NO: 3397 - DNA, 20 bp, synthetic construct
  misc_feature 1..20: note = chemically synthesized
  source 1..20: mol_type = other DNA
cttatccttcagccacttca

SEQ ID NO: 3398 - DNA, 20 bp, synthetic construct
  misc_feature 1..20: note = chemically synthesized
  source 1..20: mol_type = other DNA
gccacttcatggtgatgttc

SEQ ID NO: 3399 - DNA, 20 bp, synthetic construct
  misc_feature 1..20: note = chemically synthesized
  source 1..20: mol_type = other DNA
ccacttcatggtgatgttct

SEQ ID NO: 3400 - DNA, 20 bp, synthetic construct
  misc_feature 1..20: note = chemically synthesized
  source 1..20: mol_type = other DNA
cacttcatggtgatgttctg

SEQ ID NO: 3401 - DNA, 20 bp, synthetic construct
  misc_feature 1..20: note = chemically synthesized
  source 1..20: mol_type = other DNA
acttcatggtgatgttctgg

SEQ ID NO: 3402 - DNA, 20 bp, synthetic construct
  misc_feature 1..20: note = chemically synthesized
  source 1..20: mol_type = other DNA
tcatggtgatgttctggggg

SEQ ID NO: 3403 - DNA, 20 bp, synthetic construct
  misc_feature 1..20: note = chemically synthesized
  source 1..20: mol_type = other DNA
tggtgatgttctgggggtag

SEQ ID NO: 3404 - DNA, 20 bp, synthetic construct
  misc_feature 1..20: note = chemically synthesized
  source 1..20: mol_type = other DNA
tgttctgggggtagtagttc

SEQ ID NO: 3405 - DNA, 20 bp, synthetic construct
  misc_feature 1..20: note = chemically synthesized
  source 1..20: mol_type = other DNA
gttctgggggtagtagttca

SEQ ID NO: 3406 - DNA, 20 bp, synthetic construct
  misc_feature 1..20: note = chemically synthesized
  source 1..20: mol_type = other DNA
tagttcaaggcccgacaccg

SEQ ID NO: 3407 - DNA, 20 bp, synthetic construct
  misc_feature 1..20: note = chemically synthesized
  source 1..20: mol_type = other DNA
gttcaaggcccgacaccgta

SEQ ID NO: 3408 - DNA, 20 bp, synthetic construct
  misc_feature 1..20: note = chemically synthesized
  source 1..20: mol_type = other DNA
caaggcccgacaccgtagag

SEQ ID NO: 3409 - DNA, 20 bp, synthetic construct
  misc_feature 1..20: note = chemically synthesized
  source 1..20: mol_type = other DNA
acaccgtagagtggtcactg

SEQ ID NO: 3410 - DNA, 20 bp, synthetic construct
  misc_feature 1..20: note = chemically synthesized
  source 1..20: mol_type = other DNA
accgtagagtggtcactgaa

SEQ ID NO: 3411 - DNA, 20 bp, synthetic construct
  misc_feature 1..20: note = chemically synthesized
  source 1..20: mol_type = other DNA
ccgtagagtggtcactgaag

SEQ ID NO: 3412 - DNA, 20 bp, synthetic construct
  misc_feature 1..20: note = chemically synthesized
  source 1..20: mol_type = other DNA
atgatgtgtcaccttcacca

SEQ ID NO: 3413 - DNA, 20 bp, synthetic construct
  misc_feature 1..20: note = chemically synthesized
  source 1..20: mol_type = other DNA
tgatgtgtcaccttcaccaa

SEQ ID NO: 3414 - DNA, 20 bp, synthetic construct
  misc_feature 1..20: note = chemically synthesized
  source 1..20: mol_type = other DNA
atgtgtcaccttcaccaaag

SEQ ID NO: 3415 - DNA, 20 bp, synthetic construct
  misc_feature 1..20: note = chemically synthesized
  source 1..20: mol_type = other DNA
tgtgtcaccttcaccaaagg

SEQ ID NO: 3416 - DNA, 20 bp, synthetic construct
  misc_feature 1..20: note = chemically synthesized
  source 1..20: mol_type = other DNA
tcaccaaaggaggcacttga

SEQ ID NO: 3417 - DNA, 20 bp, synthetic construct
  misc_feature 1..20: note = chemically synthesized
  source 1..20: mol_type = other DNA
caccaaaggaggcacttgac

SEQ ID NO: 3418 - DNA, 20 bp, synthetic construct
  misc_feature 1..20: note = chemically synthesized
  source 1..20: mol_type = other DNA
aaaggaggcacttgacagga

SEQ ID NO: 3419 - DNA, 20 bp, synthetic construct
  misc_feature 1..20: note = chemically synthesized
  source 1..20: mol_type = other DNA
aggaggcacttgacaggaaa

SEQ ID NO: 3420 - DNA, 20 bp, synthetic construct
  misc_feature 1..20: note = chemically synthesized
  source 1..20: mol_type = other DNA
ggaggcacttgacaggaaag

SEQ ID NO: 3421 - DNA, 20 bp, synthetic construct
  misc_feature 1..20: note = chemically synthesized
  source 1..20: mol_type = other DNA
ggcacttgacaggaaagagg

SEQ ID NO: 3422 - DNA, 20 bp, synthetic construct
  misc_feature 1..20: note = chemically synthesized
  source 1..20: mol_type = other DNA
gcacttgacaggaaagagga

SEQ ID NO: 3423 - DNA, 20 bp, synthetic construct
  misc_feature 1..20: note = chemically synthesized
  source 1..20: mol_type = other DNA
tgacaggaaagaggaaggat

SEQ ID NO: 3424 - DNA, 20 bp, synthetic construct
  misc_feature 1..20: note = chemically synthesized
  source 1..20: mol_type = other DNA
gacaggaaagaggaaggatg

SEQ ID NO: 3425 - DNA, 20 bp, synthetic construct
  misc_feature 1..20: note = chemically synthesized
  source 1..20: mol_type = other DNA
caggaaagaggaaggatgag

SEQ ID NO: 3426 - DNA, 20 bp, synthetic construct
  misc_feature 1..20: note = chemically synthesized
  source 1..20: mol_type = other DNA
ggaaagaggaaggatgagga

SEQ ID NO: 3427 - DNA, 20 bp, synthetic construct
  misc_feature 1..20: note = chemically synthesized
  source 1..20: mol_type = other DNA
gaaagaggaaggatgaggag

SEQ ID NO: 3428 - DNA, 20 bp, synthetic construct
  misc_feature 1..20: note = chemically synthesized
  source 1..20: mol_type = other DNA
aaagaggaaggatgaggaga

SEQ ID NO: 3429 - DNA, 20 bp, synthetic construct
  misc_feature 1..20: note = chemically synthesized
  source 1..20: mol_type = other DNA
aagaggaaggatgaggagag

SEQ ID NO: 3430 - DNA, 20 bp, synthetic construct
  misc_feature 1..20: note = chemically synthesized
  source 1..20: mol_type = other DNA
ggggatctgtttacccttgc

SEQ ID NO: 3431 - DNA, 20 bp, synthetic construct
  misc_feature 1..20: note = chemically synthesized
  source 1..20: mol_type = other DNA
gggatctgtttacccttgcc

SEQ ID NO: 3432 - DNA, 20 bp, synthetic construct
  misc_feature 1..20: note = chemically synthesized
  source 1..20: mol_type = other DNA
atctgtttacccttgccagg

SEQ ID NO: 3433 - DNA, 20 bp, synthetic construct
  misc_feature 1..20: note = chemically synthesized
  source 1..20: mol_type = other DNA
tttacccttgccaggaagac

SEQ ID NO: 3434 - DNA, 20 bp, synthetic construct
  misc_feature 1..20: note = chemically synthesized
  source 1..20: mol_type = other DNA
ggaactttcacttccttcta

SEQ ID NO: 3435 - DNA, 20 bp, synthetic construct
  misc_feature 1..20: note = chemically synthesized
  source 1..20: mol_type = other DNA
gaactttcacttccttctat

SEQ ID NO: 3436 - DNA, 20 bp, synthetic construct
  misc_feature 1..20: note = chemically synthesized
  source 1..20: mol_type = other DNA
tttcacttccttctataggt

SEQ ID NO: 3437 - DNA, 20 bp, synthetic construct
  misc_feature 1..20: note = chemically synthesized
  source 1..20: mol_type = other DNA
tcacttccttctataggttg

SEQ ID NO: 3438 - DNA, 20 bp, synthetic construct
  misc_feature 1..20: note = chemically synthesized
  source 1..20: mol_type = other DNA
cacttccttctataggttgg

SEQ ID NO: 3439 - DNA, 20 bp, synthetic construct
  misc_feature 1..20: note = chemically synthesized
  source 1..20: mol_type = other DNA
ttccttctataggttggagg

SEQ ID NO: 3440 - DNA, 20 bp, synthetic construct
  misc_feature 1..20: note = chemically synthesized
  source 1..20: mol_type = other DNA
tccttctataggttggagga

SEQ ID NO: 3441 - DNA, 20 bp, synthetic construct
  misc_feature 1..20: note = chemically synthesized
  source 1..20: mol_type = other DNA
gaggaaggaaataccctttt

SEQ ID NO: 3442 - DNA, 20 bp, synthetic construct
  misc_feature 1..20: note = chemically synthesized
  source 1..20: mol_type = other DNA
tacccttttcagaaaaaaac

SEQ ID NO: 3443 - DNA, 20 bp, synthetic construct
  misc_feature 1..20: note = chemically synthesized
  source 1..20: mol_type = other DNA
tttcagaaaaaaacaagcta

SEQ ID NO: 3444 - DNA, 20 bp, synthetic construct
  misc_feature 1..20: note = chemically synthesized
  source 1..20: mol_type = other DNA
ttcagaaaaaaacaagctac

SEQ ID NO: 3445 - DNA, 20 bp, synthetic construct
  misc_feature 1..20: note = chemically synthesized
  source 1..20: mol_type = other DNA
cagaaaaaaacaagctacag

SEQ ID NO: 3446 - DNA, 20 bp, synthetic construct
  misc_feature 1..20: note = chemically synthesized
  source 1..20: mol_type = other DNA
gaaaaaaacaagctacagga

SEQ ID NO: 3447 - DNA, 20 bp, synthetic construct
  misc_feature 1..20: note = chemically synthesized
  source 1..20: mol_type = other DNA
gagacaccattttgtgtcct

SEQ ID NO: 3448 - DNA, 20 bp, synthetic construct
  misc_feature 1..20: note = chemically synthesized
  source 1..20: mol_type = other DNA
accattttgtgtcctaagat

SEQ ID NO: 3449 - DNA, 20 bp, synthetic construct
  misc_feature 1..20: note = chemically synthesized
  source 1..20: mol_type = other DNA
cctaagattggactctaaca

SEQ ID NO: 3450 - DNA, 20 bp, synthetic construct
  misc_feature 1..20: note = chemically synthesized
  source 1..20: mol_type = other DNA
gactctaacacagtgtcact

SEQ ID NO: 3451 - DNA, 20 bp, synthetic construct
  misc_feature 1..20: note = chemically synthesized
  source 1..20: mol_type = other DNA
ctctaacacagtgtcacttg

SEQ ID NO: 3452 - DNA, 20 bp, synthetic construct
  misc_feature 1..20: note = chemically synthesized
  source 1..20: mol_type = other DNA
ctaacacagtgtcacttgga

SEQ ID NO: 3453 - DNA, 20 bp, synthetic construct
  misc_feature 1..20: note = chemically synthesized
  source 1..20: mol_type = other DNA
acacagtgtcacttggagag

SEQ ID NO: 3454 - DNA, 20 bp, synthetic construct
  misc_feature 1..20: note = chemically synthesized
  source 1..20: mol_type = other DNA
agtgtcacttggagagcagt

SEQ ID NO: 3455 - DNA, 20 bp, synthetic construct
  misc_feature 1..20: note = chemically synthesized
  source 1..20: mol_type = other DNA
cacttggagagcagtcagat

SEQ ID NO: 3456 - DNA, 20 bp, synthetic construct
  misc_feature 1..20: note = chemically synthesized
  source 1..20: mol_type = other DNA
acccatgttctttgttctga

SEQ ID NO: 3457 - DNA, 20 bp, synthetic construct
  misc_feature 1..20: note = chemically synthesized
  source 1..20: mol_type = other DNA
gcattgaaaatgattgaata

SEQ ID NO: 3458 - DNA, 20 bp, synthetic construct
  misc_feature 1..20: note = chemically synthesized
  source 1..20: mol_type = other DNA
tgaaaatgattgaatacaga

SEQ ID NO: 3459 - DNA, 20 bp, synthetic construct
  misc_feature 1..20: note = chemically synthesized
  source 1..20: mol_type = other DNA
aatgattgaatacagatggt

SEQ ID NO: 3460 - DNA, 20 bp, synthetic construct
  misc_feature 1..20: note = chemically synthesized
  source 1..20: mol_type = other DNA
tacagatggtcagtttcacc

SEQ ID NO: 3461 - DNA, 20 bp, synthetic construct
  misc_feature 1..20: note = chemically synthesized
  source 1..20: mol_type = other DNA
acagatggtcagtttcacct

SEQ ID NO: 3462 - DNA, 20 bp, synthetic construct
  misc_feature 1..20: note = chemically synthesized
  source 1..20: mol_type = other DNA
cagtttcacctgggtcaacc

SEQ ID NO: 3463 - DNA, 20 bp, synthetic construct
  misc_feature 1..20: note = chemically synthesized
  source 1..20: mol_type = other DNA
agtttcacctgggtcaacct

SEQ ID NO: 3464 - DNA, 20 bp, synthetic construct
  misc_feature 1..20: note = chemically synthesized
  source 1..20: mol_type = other DNA
tttcacctgggtcaacctag

SEQ ID NO: 3465 - DNA, 20 bp, synthetic construct
  misc_feature 1..20: note = chemically synthesized
  source 1..20: mol_type = other DNA
ttcacctgggtcaacctagg

SEQ ID NO: 3466 - DNA, 20 bp, synthetic construct
  misc_feature 1..20: note = chemically synthesized
  source 1..20: mol_type = other DNA
aacctaggaggcattgttat

SEQ ID NO: 3467 - DNA, 20 bp, synthetic construct
  misc_feature 1..20: note = chemically synthesized
  source 1..20: mol_type = other DNA
ctaggaggcattgttataag

SEQ ID NO: 3468 - DNA, 20 bp, synthetic construct
  misc_feature 1..20: note = chemically synthesized
  source 1..20: mol_type = other DNA
ggaggcattgttataagaag

SEQ ID NO: 3469 - DNA, 20 bp, synthetic construct
  misc_feature 1..20: note = chemically synthesized
  source 1..20: mol_type = other DNA
gttataagaagcggacttgt

SEQ ID NO: 3470 - DNA, 20 bp, synthetic construct
  misc_feature 1..20: note = chemically synthesized
  source 1..20: mol_type = other DNA
taagaagcggacttgtaaga

SEQ ID NO: 3471 - DNA, 20 bp, synthetic construct
  misc_feature 1..20: note = chemically synthesized
  source 1..20: mol_type = other DNA
aagaagcggacttgtaagat

SEQ ID NO: 3472 - DNA, 20 bp, synthetic construct
  misc_feature 1..20: note = chemically synthesized
  source 1..20: mol_type = other DNA
aagcggacttgtaagatagg

SEQ ID NO: 3473 - DNA, 20 bp, synthetic construct
  misc_feature 1..20: note = chemically synthesized
  source 1..20: mol_type = other DNA
acttgtaagataggtagctt

SEQ ID NO: 3474 - DNA, 20 bp, synthetic construct
  misc_feature 1..20: note = chemically synthesized
  source 1..20: mol_type = other DNA
attattgctatgttctatga

SEQ ID NO: 3475 - DNA, 20 bp, synthetic construct
  misc_feature 1..20: note = chemically synthesized
  source 1..20: mol_type = other DNA
tgaaagaaacttttaaccta

SEQ ID NO: 3476 - DNA, 20 bp, synthetic construct
  misc_feature 1..20: note = chemically synthesized
  source 1..20: mol_type = other DNA
gaaagaaacttttaacctaa

SEQ ID NO: 3477 - DNA, 20 bp, synthetic construct
  misc_feature 1..20: note = chemically synthesized
  source 1..20: mol_type = other DNA
aaggattcttctactctgat

SEQ ID NO: 3478 - DNA, 20 bp, synthetic construct
  misc_feature 1..20: note = chemically synthesized
  source 1..20: mol_type = other DNA
gattcttctactctgataag

SEQ ID NO: 3479 - DNA, 20 bp, synthetic construct
  misc_feature 1..20: note = chemically synthesized
  source 1..20: mol_type = other DNA
cctcacttgatattttgtcc

SEQ ID NO: 3480 - DNA, 20 bp, synthetic construct
  misc_feature 1..20: note = chemically synthesized
  source 1..20: mol_type = other DNA
ttgtcctggtattcatatga

SEQ ID NO: 3481 - DNA, 20 bp, synthetic construct
  misc_feature 1..20: note = chemically synthesized
  source 1..20: mol_type = other DNA
ctggtattcatatgatagct

SEQ ID NO: 3482 - DNA, 20 bp, synthetic construct
  misc_feature 1..20: note = chemically synthesized
  source 1..20: mol_type = other DNA
tttttttttttttttttttt

SEQ ID NO: 3483 - DNA, 20 bp, synthetic construct
  misc_feature 1..20: note = chemically synthesized
  source 1..20: mol_type = other DNA
ttttttttttttttttaaga

SEQ ID NO: 3484 - DNA, 20 bp, synthetic construct
  misc_feature 1..20: note = chemically synthesized
  source 1..20: mol_type = other DNA
ttttttttttttttaagatg

SEQ ID NO: 3485 - DNA, 20 bp, synthetic construct
  misc_feature 1..20: note = chemically synthesized
  source 1..20: mol_type = other DNA
tggagtctcactctgctgcc

SEQ ID NO: 3486 - DNA, 20 bp, synthetic construct
  misc_feature 1..20: note = chemically synthesized
  source 1..20: mol_type = other DNA
ggagtctcactctgctgcct

SEQ ID NO: 3487 - DNA, 20 bp, synthetic construct
  misc_feature 1..20: note = chemically synthesized
  source 1..20: mol_type = other DNA
tctcactctgctgcctaggc

SEQ ID NO: 3488 - DNA, 20 bp, synthetic construct
  misc_feature 1..20: note = chemically synthesized
  source 1..20: mol_type = other DNA
tcactctgctgcctaggctg

SEQ ID NO: 3489 - DNA, 20 bp, synthetic construct
  misc_feature 1..20: note = chemically synthesized
  source 1..20: mol_type = other DNA
ctgctgcctaggctggagtg

SEQ ID NO: 3490 - DNA, 20 bp, synthetic construct
  misc_feature 1..20: note = chemically synthesized
  source 1..20: mol_type = other DNA
ctgcctaggctggagtgcag

SEQ ID NO: 3491 - DNA, 20 bp, synthetic construct
  misc_feature 1..20: note = chemically synthesized
  source 1..20: mol_type = other DNA
ggagtgcagtggcgcgatct

SEQ ID NO: 3492 - DNA, 20 bp, synthetic construct
  misc_feature 1..20: note = chemically synthesized
  source 1..20: mol_type = other DNA
gcagtggcgcgatcttggct

SEQ ID NO: 3493 - DNA, 20 bp, synthetic construct
  misc_feature 1..20: note = chemically synthesized
  source 1..20: mol_type = other DNA
tcagtgcaacttccgcttcc

SEQ ID NO: 3494 - DNA, 20 bp, synthetic construct
  misc_feature 1..20: note = chemically synthesized
  source 1..20: mol_type = other DNA
cagtgcaacttccgcttccc

SEQ ID NO: 3495 - DNA, 20 bp, synthetic construct
  misc_feature 1..20: note = chemically synthesized
  source 1..20: mol_type = other DNA
aacttccgcttcccaggttc

SEQ ID NO: 3496 - DNA, 20 bp, synthetic construct
  misc_feature 1..20: note = chemically synthesized
  source 1..20: mol_type = other DNA
ttcaagcgatgctcctgcct

SEQ ID NO: 3497 - DNA, 20 bp, synthetic construct
  misc_feature 1..20: note = chemically synthesized
  source 1..20: mol_type = other DNA
tcctgcctcagccttccaat

SEQ ID NO: 3498 - DNA, 20 bp, synthetic construct
  misc_feature 1..20: note = chemically synthesized
  source 1..20: mol_type = other DNA
gcctcagccttccaattagc

SEQ ID NO: 3499 - DNA, 20 bp, synthetic construct
  misc_feature 1..20: note = chemically synthesized
  source 1..20: mol_type = other DNA
cctcagccttccaattagct

SEQ ID NO: 3500 - DNA, 20 bp, synthetic construct
  misc_feature 1..20: note = chemically synthesized
  source 1..20: mol_type = other DNA
cttccaattagctgggacta

SEQ ID NO: 3501 - DNA, 20 bp, synthetic construct
  misc_feature 1..20: note = chemically synthesized
  source 1..20: mol_type = other DNA
ttccaattagctgggactac

SEQ ID NO: 3502 - DNA, 20 bp, synthetic construct
  misc_feature 1..20: note = chemically synthesized
  source 1..20: mol_type = other DNA
caggtgcgcatgactgtgac

SEQ ID NO: 3503 - DNA, 20 bp, synthetic construct
  misc_feature 1..20: note = chemically synthesized
  source 1..20: mol_type = other DNA
agctaatttttgtatttttt

SEQ ID NO: 3504 - DNA, 20 bp, synthetic construct
  misc_feature 1..20: note = chemically synthesized
  source 1..20: mol_type = other DNA
ctaatttttgtattttttta

SEQ ID NO: 3505 - DNA, 20 bp, synthetic construct
  misc_feature 1..20: note = chemically synthesized
  source 1..20: mol_type = other DNA
tttttgtatttttttagaga

SEQ ID NO: 3506 - DNA, 20 bp, synthetic construct
  misc_feature 1..20: note = chemically synthesized
  source 1..20: mol_type = other DNA
ttttgtatttttttagagac

SEQ ID NO: 3507 - DNA, 20 bp, synthetic construct
  misc_feature 1..20: note = chemically synthesized
  source 1..20: mol_type = other DNA
agagacgggtttcaccatgt

SEQ ID NO: 3508 - DNA, 20 bp, synthetic construct
  misc_feature 1..20: note = chemically synthesized
  source 1..20: mol_type = other DNA
acgggtttcaccatgttggt

SEQ ID NO: 3509 - DNA, 20 bp, synthetic construct
  misc_feature 1..20: note = chemically synthesized
  source 1..20: mol_type = other DNA
cgggtttcaccatgttggtc

SEQ ID NO: 3510 - DNA, 20 bp, synthetic construct
  misc_feature 1..20: note = chemically synthesized
  source 1..20: mol_type = other DNA
tttcaccatgttggtcaggc

SEQ ID NO: 3511 - DNA, 20 bp, synthetic construct
  misc_feature 1..20: note = chemically synthesized
  source 1..20: mol_type = other DNA
gaccttgtgaccacccgcct

SEQ ID NO: 3512 - DNA, 20 bp, synthetic construct
  misc_feature 1..20: note = chemically synthesized
  source 1..20: mol_type = other DNA
ccacccgcctcggcctccca

SEQ ID NO: 3513 - DNA, 20 bp, synthetic construct
  misc_feature 1..20: note = chemically synthesized
  source 1..20: mol_type = other DNA
gcctcggcctcccaaagtgc

SEQ ID NO: 3514 - DNA, 20 bp, synthetic construct
  misc_feature 1..20: note = chemically synthesized
  source 1..20: mol_type = other DNA
cctcggcctcccaaagtgct

SEQ ID NO: 3515 - DNA, 20 bp, synthetic construct
  misc_feature 1..20: note = chemically synthesized
  source 1..20: mol_type = other DNA
ctcccaaagtgctgggatta

SEQ ID NO: 3516 - DNA, 20 bp, synthetic construct
  misc_feature 1..20: note = chemically synthesized
  source 1..20: mol_type = other DNA
tcccaaagtgctgggattac

SEQ ID NO: 3517 - DNA, 20 bp, synthetic construct
  misc_feature 1..20: note = chemically synthesized
  source 1..20: mol_type = other DNA
cccaaagtgctgggattaca

SEQ ID NO: 3518 - DNA, 20 bp, synthetic construct
  misc_feature 1..20: note = chemically synthesized
  source 1..20: mol_type = other DNA
ccaaagtgctgggattacag

SEQ ID NO: 3519 - DNA, 20 bp, synthetic construct
  misc_feature 1..20: note = chemically synthesized
  source 1..20: mol_type = other DNA
agtgctgggattacaggggt

SEQ ID NO: 3520 - DNA, 20 bp, synthetic construct
  misc_feature 1..20: note = chemically synthesized
  source 1..20: mol_type = other DNA
caggggtgagccaccgtgcc

SEQ ID NO: 3521 - DNA, 20 bp, synthetic construct
  misc_feature 1..20: note = chemically synthesized
  source 1..20: mol_type = other DNA
tgacatttctgaatttttaa

SEQ ID NO: 3522 - DNA, 20 bp, synthetic construct
  misc_feature 1..20: note = chemically synthesized
  source 1..20: mol_type = other DNA
gacatttctgaatttttaac

SEQ ID NO: 3523 - DNA, 20 bp, synthetic construct
  misc_feature 1..20: note = chemically synthesized
  source 1..20: mol_type = other DNA
taacaggtataaatatacaa

SEQ ID NO: 3524 - DNA, 20 bp, synthetic construct
  misc_feature 1..20: note = chemically synthesized
  source 1..20: mol_type = other DNA
ataaatatacaaaagattat

SEQ ID NO: 3525 - DNA, 20 bp, synthetic construct
  misc_feature 1..20: note = chemically synthesized
  source 1..20: mol_type = other DNA
aagattattggttaaataaa

SEQ ID NO: 3526 - DNA, 20 bp, synthetic construct
  misc_feature 1..20: note = chemically synthesized
  source 1..20: mol_type = other DNA
ttattggttaaataaaaagc

SEQ ID NO: 3527 - DNA, 20 bp, synthetic construct
  misc_feature 1..20: note = chemically synthesized
  source 1..20: mol_type = other DNA
tattggttaaataaaaagca

SEQ ID NO: 3528 - DNA, 20 bp, synthetic construct
  misc_feature 1..20: note = chemically synthesized
  source 1..20: mol_type = other DNA
attggttaaataaaaagcaa

SEQ ID NO: 3529 - DNA, 20 bp, synthetic construct
  misc_feature 1..20: note = chemically synthesized
  source 1..20: mol_type = other DNA
taaataaaaagcaagggcca

SEQ ID NO: 3530 - DNA, 20 bp, synthetic construct
  misc_feature 1..20: note = chemically synthesized
  source 1..20: mol_type = other DNA
ggccatagacacttcccttt

SEQ ID NO: 3531 - DNA, 20 bp, synthetic construct
  misc_feature 1..20: note = chemically synthesized
  source 1..20: mol_type = other DNA
ttccctttgagccatatgca

SEQ ID NO: 3532 - DNA, 20 bp, synthetic construct
  misc_feature 1..20: note = chemically synthesized
  source 1..20: mol_type = other DNA
ccctttgagccatatgcatg

SEQ ID NO: 3533 - DNA, 20 bp, synthetic construct
  misc_feature 1..20: note = chemically synthesized
  source 1..20: mol_type = other DNA
tgagccatatgcatggagaa

SEQ ID NO: 3534 - DNA, 20 bp, synthetic construct
  misc_feature 1..20: note = chemically synthesized
  source 1..20: mol_type = other DNA
gaaattaaacccatgacttg

SEQ ID NO: 3535 - DNA, 20 bp, synthetic construct
  misc_feature 1..20: note = chemically synthesized
  source 1..20: mol_type = other DNA
gtctcatacatctcaattat

SEQ ID NO: 3536 - DNA, 20 bp, synthetic construct
  misc_feature 1..20: note = chemically synthesized
  source 1..20: mol_type = other DNA
tctcatacatctcaattata

SEQ ID NO: 3537 - DNA, 20 bp, synthetic construct
  misc_feature 1..20: note = chemically synthesized
  source 1..20: mol_type = other DNA
catacatctcaattataagg

SEQ ID NO: 3538 - DNA, 20 bp, synthetic construct
  misc_feature 1..20: note = chemically synthesized
  source 1..20: mol_type = other DNA
tacatctcaattataaggta

SEQ ID NO: 3539 - DNA, 20 bp, synthetic construct
  misc_feature 1..20: note = chemically synthesized
  source 1..20: mol_type = other DNA
caattataaggtagagactc

SEQ ID NO: 3540 - DNA, 20 bp, synthetic construct
  misc_feature 1..20: note = chemically synthesized
  source 1..20: mol_type = other DNA
aattataaggtagagactct

SEQ ID NO: 3541 - DNA, 20 bp, synthetic construct
  misc_feature 1..20: note = chemically synthesized
  source 1..20: mol_type = other DNA
aaggtagagactctaggatt

SEQ ID NO: 3542 - DNA, 20 bp, synthetic construct
  misc_feature 1..20: note = chemically synthesized
  source 1..20: mol_type = other DNA
tagagactctaggattgaga

SEQ ID NO: 3543 - DNA, 20 bp, synthetic construct
  misc_feature 1..20: note = chemically synthesized
  source 1..20: mol_type = other DNA
ggattgagaaagtcccttcc

SEQ ID NO: 3544 - DNA, 20 bp, synthetic construct
  misc_feature 1..20: note = chemically synthesized
  source 1..20: mol_type = other DNA
gaaagtcccttcccagaatt

SEQ ID NO: 3545 - DNA, 20 bp, synthetic construct
  misc_feature 1..20: note = chemically synthesized
  source 1..20: mol_type = other DNA
aagtcccttcccagaatttg

SEQ ID NO: 3546 - DNA, 20 bp, synthetic construct
  misc_feature 1..20: note = chemically synthesized
  source 1..20: mol_type = other DNA
gtcccttcccagaatttgga

SEQ ID NO: 3547 - DNA, 20 bp, synthetic construct
  misc_feature 1..20: note = chemically synthesized
  source 1..20: mol_type = other DNA
tcccttcccagaatttggag

SEQ ID NO: 3548 - DNA, 20 bp, synthetic construct
  misc_feature 1..20: note = chemically synthesized
  source 1..20: mol_type = other DNA
ccagaatttggagaggcaca

SEQ ID NO: 3549 - DNA, 20 bp, synthetic construct
  misc_feature 1..20: note = chemically synthesized
  source 1..20: mol_type = other DNA
tttggagaggcacacagcct

SEQ ID NO: 3550 - DNA, 20 bp, synthetic construct
  misc_feature 1..20: note = chemically synthesized
  source 1..20: mol_type = other DNA
gccacctctgaaactccaac

SEQ ID NO: 3551 - DNA, 20 bp, synthetic construct
  misc_feature 1..20: note = chemically synthesized
  source 1..20: mol_type = other DNA
ccacctctgaaactccaacc

SEQ ID NO: 3552 - DNA, 20 bp, synthetic construct
  misc_feature 1..20: note = chemically synthesized
  source 1..20: mol_type = other DNA
cacctctgaaactccaacca

SEQ ID NO: 3553 - DNA, 20 bp, synthetic construct
  misc_feature 1..20: note = chemically synthesized
  source 1..20: mol_type = other DNA
aacctcctccactctgccac

SEQ ID NO: 3554 - DNA, 20 bp, synthetic construct
  misc_feature 1..20: note = chemically synthesized
  source 1..20: mol_type = other DNA
cctcctccactctgccacta

SEQ ID NO: 3555 - DNA, 20 bp, synthetic construct
  misc_feature 1..20: note = chemically synthesized
  source 1..20: mol_type = other DNA
tccactctgccactagagta

SEQ ID NO: 3556 - DNA, 20 bp, synthetic construct
  misc_feature 1..20: note = chemically synthesized
  source 1..20: mol_type = other DNA
ccactctgccactagagtat

SEQ ID NO: 3557 - DNA, 20 bp, synthetic construct
  misc_feature 1..20: note = chemically synthesized
  source 1..20: mol_type = other DNA
cactctgccactagagtata

SEQ ID NO: 3558 - DNA, 20 bp, synthetic construct
  misc_feature 1..20: note = chemically synthesized
  source 1..20: mol_type = other DNA
actctgccactagagtatag

SEQ ID NO: 3559 - DNA, 20 bp, synthetic construct
  misc_feature 1..20: note = chemically synthesized
  source 1..20: mol_type = other DNA
ctgccactagagtatagggg

SEQ ID NO: 3560 - DNA, 20 bp, synthetic construct
  misc_feature 1..20: note = chemically synthesized
  source 1..20: mol_type = other DNA
ccactagagtataggggcag

SEQ ID NO: 3561 - DNA, 20 bp, synthetic construct
  misc_feature 1..20: note = chemically synthesized
  source 1..20: mol_type = other DNA
gtgtttccaccataccttgt

SEQ ID NO: 3562 - DNA, 20 bp, synthetic construct
  misc_feature 1..20: note = chemically synthesized
  source 1..20: mol_type = other DNA
tggtccaaaacacctctccc

SEQ ID NO: 3563 - DNA, 20 bp, synthetic construct
  misc_feature 1..20: note = chemically synthesized
  source 1..20: mol_type = other DNA
aaaacacctctccccagctc

SEQ ID NO: 3564 - DNA, 20 bp, synthetic construct
  misc_feature 1..20: note = chemically synthesized
  source 1..20: mol_type = other DNA
cccagctccagcaactgctg

SEQ ID NO: 3565 - DNA, 20 bp, synthetic construct
  misc_feature 1..20: note = chemically synthesized
  source 1..20: mol_type = other DNA
cagcaactgctgcagctgtg

SEQ ID NO: 3566 - DNA, 20 bp, synthetic construct
  misc_feature 1..20: note = chemically synthesized
  source 1..20: mol_type = other DNA
agcaactgctgcagctgtgc

SEQ ID NO: 3567 - DNA, 20 bp, synthetic construct
  misc_feature 1..20: note = chemically synthesized
  source 1..20: mol_type = other DNA
gcaactgctgcagctgtgca

SEQ ID NO: 3568 - DNA, 20 bp, synthetic construct
  misc_feature 1..20: note = chemically synthesized
  source 1..20: mol_type = other DNA
actgctgcagctgtgcaggg

SEQ ID NO: 3569 - DNA, 20 bp, synthetic construct
  misc_feature 1..20: note = chemically synthesized
  source 1..20: mol_type = other DNA
tgtgcagggcagtccctctc

SEQ ID NO: 3570 - DNA, 20 bp, synthetic construct
  misc_feature 1..20: note = chemically synthesized
  source 1..20: mol_type = other DNA
gtgcagggcagtccctctcc

SEQ ID NO: 3571 - DNA, 20 bp, synthetic construct
  misc_feature 1..20: note = chemically synthesized
  source 1..20: mol_type = other DNA
cagggcagtccctctccagg

SEQ ID NO: 3572 - DNA, 20 bp, synthetic construct
  misc_feature 1..20: note = chemically synthesized
  source 1..20: mol_type = other DNA
agggcagtccctctccaggt

SEQ ID NO: 3573 - DNA, 20 bp, synthetic construct
  misc_feature 1..20: note = chemically synthesized
  source 1..20: mol_type = other DNA
caggtaggccctgttctgcc

SEQ ID NO: 3574 - DNA, 20 bp, synthetic construct
  misc_feature 1..20: note = chemically synthesized
  source 1..20: mol_type = other DNA
atcttgtgcctttcccactc

SEQ ID NO: 3575 - DNA, 20 bp, synthetic construct
  misc_feature 1..20: note = chemically synthesized
  source 1..20: mol_type = other DNA
gtgcctttcccactccagct

SEQ ID NO: 3576 - DNA, 20 bp, synthetic construct
  misc_feature 1..20: note = chemically synthesized
  source 1..20: mol_type = other DNA
cctttcccactccagcttgg

SEQ ID NO: 3577 - DNA, 20 bp, synthetic construct
  misc_feature 1..20: note = chemically synthesized
  source 1..20: mol_type = other DNA
ctttcccactccagcttggt

SEQ ID NO: 3578 - DNA, 20 bp, synthetic construct
  misc_feature 1..20: note = chemically synthesized
  source 1..20: mol_type = other DNA
cccactccagcttggtgggc

SEQ ID NO: 3579 - DNA, 20 bp, synthetic construct
  misc_feature 1..20: note = chemically synthesized
  source 1..20: mol_type = other DNA
ccactccagcttggtgggcc

SEQ ID NO: 3580 - DNA, 20 bp, synthetic construct
  misc_feature 1..20: note = chemically synthesized
  source 1..20: mol_type = other DNA
cagcttggtgggccaggccc

SEQ ID NO: 3581 - DNA, 20 bp, synthetic construct
  misc_feature 1..20: note = chemically synthesized
  source 1..20: mol_type = other DNA
agcttggtgggccaggccct

SEQ ID NO: 3582 - DNA, 20 bp, synthetic construct
  misc_feature 1..20: note = chemically synthesized
  source 1..20: mol_type = other DNA
ggttctgctgctctccaatc

SEQ ID NO: 3583 - DNA, 20 bp, synthetic construct
  misc_feature 1..20: note = chemically synthesized
  source 1..20: mol_type = other DNA
tgctctccaatccagtgtgt

SEQ ID NO: 3584 - DNA, 20 bp, synthetic construct
  misc_feature 1..20: note = chemically synthesized
  source 1..20: mol_type = other DNA
gctctccaatccagtgtgtc

SEQ ID NO: 3585 - DNA, 20 bp, synthetic construct
  misc_feature 1..20: note = chemically synthesized
  source 1..20: mol_type = other DNA
ctctccaatccagtgtgtca

SEQ ID NO: 3586 - DNA, 20 bp, synthetic construct
  misc_feature 1..20: note = chemically synthesized
  source 1..20: mol_type = other DNA
tccaatccagtgtgtcaggg

SEQ ID NO: 3587 - DNA, 20 bp, synthetic construct
  misc_feature 1..20: note = chemically synthesized
  source 1..20: mol_type = other DNA
agtgtgtcagggcagaattc

SEQ ID NO: 3588 - DNA, 20 bp, synthetic construct
  misc_feature 1..20: note = chemically synthesized
  source 1..20: mol_type = other DNA
gtgtgtcagggcagaattca

SEQ ID NO: 3589 - DNA, 20 bp, synthetic construct
  misc_feature 1..20: note = chemically synthesized
  source 1..20: mol_type = other DNA
tgtcagggcagaattcaagg

SEQ ID NO: 3590 - DNA, 20 bp, synthetic construct
  misc_feature 1..20: note = chemically synthesized
  source 1..20: mol_type = other DNA
gcccatcatacccgtacttc

SEQ ID NO: 3591 - DNA, 20 bp, synthetic construct
  misc_feature 1..20: note = chemically synthesized
  source 1..20: mol_type = other DNA
catcatacccgtacttccag

SEQ ID NO: 3592 - DNA, 20 bp, synthetic construct
  misc_feature 1..20: note = chemically synthesized
  source 1..20: mol_type = other DNA
cccgtacttccagtagccct

SEQ ID NO: 3593 - DNA, 20 bp, synthetic construct
  misc_feature 1..20: note = chemically synthesized
  source 1..20: mol_type = other DNA
tgttgtcttcttgcatttca

SEQ ID NO: 3594 - DNA, 20 bp, synthetic construct
  misc_feature 1..20: note = chemically synthesized
  source 1..20: mol_type = other DNA
tcttcttgcatttcacagcc

SEQ ID NO: 3595 - DNA, 20 bp, synthetic construct
  misc_feature 1..20: note = chemically synthesized
  source 1..20: mol_type = other DNA
cttcttgcatttcacagccc

SEQ ID NO: 3596 - DNA, 20 bp, synthetic construct
  misc_feature 1..20: note = chemically synthesized
  source 1..20: mol_type = other DNA
tcacagcccaggatgacctg

SEQ ID NO: 3597 - DNA, 20 bp, synthetic construct
  misc_feature 1..20: note = chemically synthesized
  source 1..20: mol_type = other DNA
cacagcccaggatgacctgc

SEQ ID NO: 3598 - DNA, 20 bp, synthetic construct
  misc_feature 1..20: note = chemically synthesized
  source 1..20: mol_type = other DNA
acagcccaggatgacctgca

SEQ ID NO: 3599 - DNA, 20 bp, synthetic construct
  misc_feature 1..20: note = chemically synthesized
  source 1..20: mol_type = other DNA
ccaggatgacctgcagggtg

SEQ ID NO: 3600 - DNA, 20 bp, synthetic construct
  misc_feature 1..20: note = chemically synthesized
  source 1..20: mol_type = other DNA
caggatgacctgcagggtgt

SEQ ID NO: 3601 - DNA, 20 bp, synthetic construct
  misc_feature 1..20: note = chemically synthesized
  source 1..20: mol_type = other DNA
acctgcagggtgtgggactc

SEQ ID NO: 3602 - DNA, 20 bp, synthetic construct
  misc_feature 1..20: note = chemically synthesized
  source 1..20: mol_type = other DNA
tgggactctggaaaaatccc

SEQ ID NO: 3603 - DNA, 20 bp, synthetic construct
  misc_feature 1..20: note = chemically synthesized
  source 1..20: mol_type = other DNA
agccttgttaactgcaacca

SEQ ID NO: 3604 - DNA, 20 bp, synthetic construct
  misc_feature 1..20: note = chemically synthesized
  source 1..20: mol_type = other DNA
gccttgttaactgcaaccaa

SEQ ID NO: 3605 - DNA, 20 bp, synthetic construct
  misc_feature 1..20: note = chemically synthesized
  source 1..20: mol_type = other DNA
gttaactgcaaccaaaggaa

SEQ ID NO: 3606 - DNA, 20 bp, synthetic construct
  misc_feature 1..20: note = chemically synthesized
  source 1..20: mol_type = other DNA
ttaactgcaaccaaaggaat

SEQ ID NO: 3607 - DNA, 20 bp, synthetic construct
  misc_feature 1..20: note = chemically synthesized
  source 1..20: mol_type = other DNA
tccctatttccaccatcccc

SEQ ID NO: 3608 - DNA, 20 bp, synthetic construct
  misc_feature 1..20: note = chemically synthesized
  source 1..20: mol_type = other DNA
ccctatttccaccatcccca

SEQ ID NO: 3609 - DNA, 20 bp, synthetic construct
  misc_feature 1..20: note = chemically synthesized
  source 1..20: mol_type = other DNA
ccccaaggaccaaatgatct

SEQ ID NO: 3610 - DNA, 20 bp, synthetic construct
  misc_feature 1..20: note = chemically synthesized
  source 1..20: mol_type = other DNA
cccaaggaccaaatgatctc

SEQ ID NO: 3611 - DNA, 20 bp, synthetic construct
  misc_feature 1..20: note = chemically synthesized
  source 1..20: mol_type = other DNA
aaggaccaaatgatctcagg

SEQ ID NO: 3612 - DNA, 20 bp, synthetic construct
  misc_feature 1..20: note = chemically synthesized
  source 1..20: mol_type = other DNA
tccctcttccctgctcccac

SEQ ID NO: 3613 - DNA, 20 bp, synthetic construct
  misc_feature 1..20: note = chemically synthesized
  source 1..20: mol_type = other DNA
tccctgctcccacaagacct

SEQ ID NO: 3614 - DNA, 20 bp, synthetic construct
  misc_feature 1..20: note = chemically synthesized
  source 1..20: mol_type = other DNA
cccacaagacctcagacttc

SEQ ID NO: 3615 - DNA, 20 bp, synthetic construct
  misc_feature 1..20: note = chemically synthesized
  source 1..20: mol_type = other DNA
gacttccagctgtttccttc

SEQ ID NO: 3616 - DNA, 20 bp, synthetic construct
  misc_feature 1..20: note = chemically synthesized
  source 1..20: mol_type = other DNA
tttccttcaagatgcatgaa

SEQ ID NO: 3617 - DNA, 20 bp, synthetic construct
  misc_feature 1..20: note = chemically synthesized
  source 1..20: mol_type = other DNA
aagatgcatgaaaagatgaa

SEQ ID NO: 3618 - DNA, 20 bp, synthetic construct
  misc_feature 1..20: note = chemically synthesized
  source 1..20: mol_type = other DNA
atgaaaagctctgacaacct

SEQ ID NO: 3619 - DNA, 20 bp, synthetic construct
  misc_feature 1..20: note = chemically synthesized
  source 1..20: mol_type = other DNA
tgaaaagctctgacaacctc

SEQ ID NO: 3620 - DNA, 20 bp, synthetic construct
  misc_feature 1..20: note = chemically synthesized
  source 1..20: mol_type = other DNA
aaagctctgacaacctcagg

SEQ ID NO: 3621 - DNA, 20 bp, synthetic construct
  misc_feature 1..20: note = chemically synthesized
  source 1..20: mol_type = other DNA
aagctctgacaacctcagga

SEQ ID NO: 3622 - DNA, 20 bp, synthetic construct
  misc_feature 1..20: note = chemically synthesized
  source 1..20: mol_type = other DNA
tctgacaacctcaggaaggt

SEQ ID NO: 3623 - DNA, 20 bp, synthetic construct
  misc_feature 1..20: note = chemically synthesized
  source 1..20: mol_type = other DNA
ctgacaacctcaggaaggtg

SEQ ID NO: 3624 - DNA, 20 bp, synthetic construct
  misc_feature 1..20: note = chemically synthesized
  source 1..20: mol_type = other DNA
ctctccacatacccttgctg

SEQ ID NO: 3625 - DNA, 20 bp, synthetic construct
  misc_feature 1..20: note = chemically synthesized
  source 1..20: mol_type = other DNA
gtggttgtgattttccataa

SEQ ID NO: 3626 - DNA, 20 bp, synthetic construct
  misc_feature 1..20: note = chemically synthesized
  source 1..20: mol_type = other DNA
tgtgattttccataatagtc

SEQ ID NO: 3627 - DNA, 20 bp, synthetic construct
  misc_feature 1..20: note = chemically synthesized
  source 1..20: mol_type = other DNA
gattttccataatagtccag

SEQ ID NO: 3628 - DNA, 20 bp, synthetic construct
  misc_feature 1..20: note = chemically synthesized
  source 1..20: mol_type = other DNA
cataatagtccagaagtcaa

SEQ ID NO: 3629 - DNA, 20 bp, synthetic construct
  misc_feature 1..20: note = chemically synthesized
  source 1..20: mol_type = other DNA
aacatgtgatcccacccttt

SEQ ID NO: 3630 - DNA, 20 bp, synthetic construct
  misc_feature 1..20: note = chemically synthesized
  source 1..20: mol_type = other DNA
caccctttcagactctgact

SEQ ID NO: 3631 - DNA, 20 bp, synthetic construct
  misc_feature 1..20: note = chemically synthesized
  source 1..20: mol_type = other DNA
ttcagactctgactcagctg

SEQ ID NO: 3632 - DNA, 20 bp, synthetic construct
  misc_feature 1..20: note = chemically synthesized
  source 1..20: mol_type = other DNA
gactcagctgcagccacatc

SEQ ID NO: 3633 - DNA, 20 bp, synthetic construct
  misc_feature 1..20: note = chemically synthesized
  source 1..20: mol_type = other DNA
catctggcttgaaattctac

SEQ ID NO: 3634 - DNA, 20 bp, synthetic construct
  misc_feature 1..20: note = chemically synthesized
  source 1..20: mol_type = other DNA
gaaattctactggaaaccca

SEQ ID NO: 3635 - DNA, 20 bp, synthetic construct
  misc_feature 1..20: note = chemically synthesized
  source 1..20: mol_type = other DNA
aattctactggaaacccatg

SEQ ID NO: 3636 - DNA, 20 bp, synthetic construct
  misc_feature 1..20: note = chemically synthesized
  source 1..20: mol_type = other DNA
tactggaaacccatggagtt

SEQ ID NO: 3637 - DNA, 20 bp, synthetic construct
  misc_feature 1..20: note = chemically synthesized
  source 1..20: mol_type = other DNA
actggaaacccatggagttc

SEQ ID NO: 3638 - DNA, 20 bp, synthetic construct
  misc_feature 1..20: note = chemically synthesized
  source 1..20: mol_type = other DNA
ctggaaacccatggagttcg

SEQ ID NO: 3639 - DNA, 20 bp, synthetic construct
  misc_feature 1..20: note = chemically synthesized
  source 1..20: mol_type = other DNA
atggagttcggggctccaca

SEQ ID NO: 3640 - DNA, 20 bp, synthetic construct
  misc_feature 1..20: note = chemically synthesized
  source 1..20: mol_type = other DNA
cacggcgactctcatgatca

SEQ ID NO: 3641 - DNA, 20 bp, synthetic construct
  misc_feature 1..20: note = chemically synthesized
  source 1..20: mol_type = other DNA
tcatgatcatagaacacgaa

SEQ ID NO: 3642 - DNA, 20 bp, synthetic construct
  misc_feature 1..20: note = chemically synthesized
  source 1..20: mol_type = other DNA
gatcatagaacacgaacagc

SEQ ID NO: 3643 - DNA, 20 bp, synthetic construct
  misc_feature 1..20: note = chemically synthesized
  source 1..20: mol_type = other DNA
cgaacagctggtcatccacg

SEQ ID NO: 3644 - DNA, 20 bp, synthetic construct
  misc_feature 1..20: note = chemically synthesized
  source 1..20: mol_type = other DNA
ctggtcatccacgtagccca

SEQ ID NO: 3645 - DNA, 20 bp, synthetic construct
  misc_feature 1..20: note = chemically synthesized
  source 1..20: mol_type = other DNA
cgtagcccaaagcttcaaac

SEQ ID NO: 3646 - DNA, 20 bp, synthetic construct
  misc_feature 1..20: note = chemically synthesized
  source 1..20: mol_type = other DNA
gtagcccaaagcttcaaaca

SEQ ID NO: 3647 - DNA, 20 bp, synthetic construct
  misc_feature 1..20: note = chemically synthesized
  source 1..20: mol_type = other DNA
cccaaagcttcaaacaagga

SEQ ID NO: 3648 - DNA, 20 bp, synthetic construct
  misc_feature 1..20: note = chemically synthesized
  source 1..20: mol_type = other DNA
gcttcaaacaaggaaagacc

SEQ ID NO: 3649 - DNA, 20 bp, synthetic construct
  misc_feature 1..20: note = chemically synthesized
  source 1..20: mol_type = other DNA
cttcaaacaaggaaagacca

SEQ ID NO: 3650 - DNA, 20 bp, synthetic construct
  misc_feature 1..20: note = chemically synthesized
  source 1..20: mol_type = other DNA
aaagaccaaggtcctgctct

SEQ ID NO: 3651 - DNA, 20 bp, synthetic construct
  misc_feature 1..20: note = chemically synthesized
  source 1..20: mol_type = other DNA
aagaccaaggtcctgctctg

SEQ ID NO: 3652 - DNA, 20 bp, synthetic construct
  misc_feature 1..20: note = chemically synthesized
  source 1..20: mol_type = other DNA
cctgctctgaggcacccatg

SEQ ID NO: 3653 - DNA, 20 bp, synthetic construct
  misc_feature 1..20: note = chemically synthesized
  source 1..20: mol_type = other DNA
tgctctgaggcacccatgaa

SEQ ID NO: 3654 - DNA, 20 bp, synthetic construct
  misc_feature 1..20: note = chemically synthesized
  source 1..20: mol_type = other DNA
gctctgaggcacccatgaag

SEQ ID NO: 3655 - DNA, 20 bp, synthetic construct
  misc_feature 1..20: note = chemically synthesized
  source 1..20: mol_type = other DNA
ctgaggcacccatgaagagg

SEQ ID NO: 3656 - DNA, 20 bp, synthetic construct
  misc_feature 1..20: note = chemically synthesized
  source 1..20: mol_type = other DNA
gcacccatgaagaggtagtg

SEQ ID NO: 3657 - DNA, 20 bp, synthetic construct
  misc_feature 1..20: note = chemically synthesized
  source 1..20: mol_type = other DNA
acccatgaagaggtagtgca

SEQ ID NO: 3658 - DNA, 20 bp, synthetic construct
  misc_feature 1..20: note = chemically synthesized
  source 1..20: mol_type = other DNA
ccatgaagaggtagtgcaga

SEQ ID NO: 3659 - DNA, 20 bp, synthetic construct
  misc_feature 1..20: note = chemically synthesized
  source 1..20: mol_type = other DNA
tagtgcagagagtgtgaacc

SEQ ID NO: 3660 - DNA, 20 bp, synthetic construct
  misc_feature 1..20: note = chemically synthesized
  source 1..20: mol_type = other DNA
gtgcagagagtgtgaacctg

SEQ ID NO: 3661 - DNA, 20 bp, synthetic construct
  misc_feature 1..20: note = chemically synthesized
  source 1..20: mol_type = other DNA
agagagtgtgaacctggaga

SEQ ID NO: 3662 - DNA, 20 bp, synthetic construct
  misc_feature 1..20: note = chemically synthesized
  source 1..20: mol_type = other DNA
agagtgtgaacctggagaca

SEQ ID NO: 3663 - DNA, 20 bp, synthetic construct
  misc_feature 1..20: note = chemically synthesized
  source 1..20: mol_type = other DNA
tgaacctggagacagagcaa

SEQ ID NO: 3664 - DNA, 20 bp, synthetic construct
  misc_feature 1..20: note = chemically synthesized
  source 1..20: mol_type = other DNA
gaacctggagacagagcaac

SEQ ID NO: 3665 - DNA, 20 bp, synthetic construct
  misc_feature 1..20: note = chemically synthesized
  source 1..20: mol_type = other DNA
caacaggccttaaccatgtg

SEQ ID NO: 3666 - DNA, 20 bp, synthetic construct
  misc_feature 1..20: note = chemically synthesized
  source 1..20: mol_type = other DNA
caggccttaaccatgtgtag

SEQ ID NO: 3667 - DNA, 20 bp, synthetic construct
  misc_feature 1..20: note = chemically synthesized
  source 1..20: mol_type = other DNA
aggccttaaccatgtgtagt

SEQ ID NO: 3668 - DNA, 20 bp, synthetic construct
  misc_feature 1..20: note = chemically synthesized
  source 1..20: mol_type = other DNA
gccttaaccatgtgtagtag

SEQ ID NO: 3669 - DNA, 20 bp, synthetic construct
  misc_feature 1..20: note = chemically synthesized
  source 1..20: mol_type = other DNA
ccttaaccatgtgtagtagg

SEQ ID NO: 3670 - DNA, 20 bp, synthetic construct
  misc_feature 1..20: note = chemically synthesized
  source 1..20: mol_type = other DNA
cttaaccatgtgtagtagga

SEQ ID NO: 3671 - DNA, 20 bp, synthetic construct
  misc_feature 1..20: note = chemically synthesized
  source 1..20: mol_type = other DNA
ttaaccatgtgtagtaggag

SEQ ID NO: 3672 - DNA, 20 bp, synthetic construct
  misc_feature 1..20: note = chemically synthesized
  source 1..20: mol_type = other DNA
aaccatgtgtagtaggaggg

SEQ ID NO: 3673 - DNA, 20 bp, synthetic construct
  misc_feature 1..20: note = chemically synthesized
  source 1..20: mol_type = other DNA
catgtgtagtaggaggggag

SEQ ID NO: 3674 - DNA, 20 bp, synthetic construct
  misc_feature 1..20: note = chemically synthesized
  source 1..20: mol_type = other DNA
atgtgtagtaggaggggagc

SEQ ID NO: 3675 - DNA, 20 bp, synthetic construct
  misc_feature 1..20: note = chemically synthesized
  source 1..20: mol_type = other DNA
taggaggggagcaggatgtt

SEQ ID NO: 3676 - DNA, 20 bp, synthetic construct
  misc_feature 1..20: note = chemically synthesized
  source 1..20: mol_type = other DNA
aggaggggagcaggatgttg

SEQ ID NO: 3677 - DNA, 20 bp, synthetic construct
  misc_feature 1..20: note = chemically synthesized
  source 1..20: mol_type = other DNA
cctgcatcaactcataccat

SEQ ID NO: 3678 - DNA, 20 bp, synthetic construct
  misc_feature 1..20: note = chemically synthesized
  source 1..20: mol_type = other DNA
ctcataccatcagctgtgtc

SEQ ID NO: 3679 - DNA, 20 bp, synthetic construct
  misc_feature 1..20: note = chemically synthesized
  source 1..20: mol_type = other DNA
tgtctggtcctcattttgtg

SEQ ID NO: 3680 - DNA, 20 bp, synthetic construct
  misc_feature 1..20: note = chemically synthesized
  source 1..20: mol_type = other DNA
gtctggtcctcattttgtga

SEQ ID NO: 3681 - DNA, 20 bp, synthetic construct
  misc_feature 1..20: note = chemically synthesized
  source 1..20: mol_type = other DNA
tctggtcctcattttgtgaa

SEQ ID NO: 3682 - DNA, 20 bp, synthetic construct
  misc_feature 1..20: note = chemically synthesized
  source 1..20: mol_type = other DNA
gtcctcattttgtgaagggt

SEQ ID NO: 3683 - DNA, 20 bp, synthetic construct
  misc_feature 1..20: note = chemically synthesized
  source 1..20: mol_type = other DNA
attttgtgaagggtgagttg

SEQ ID NO: 3684 - DNA, 20 bp, synthetic construct
  misc_feature 1..20: note = chemically synthesized
  source 1..20: mol_type = other DNA
cctgtctttcttccatatga

SEQ ID NO: 3685 - DNA, 20 bp, synthetic construct
  misc_feature 1..20: note = chemically synthesized
  source 1..20: mol_type = other DNA
tttcttccatatgacagtcc

SEQ ID NO: 3686 - DNA, 20 bp, synthetic construct
  misc_feature 1..20: note = chemically synthesized
  source 1..20: mol_type = other DNA
ttcttccatatgacagtcct

SEQ ID NO: 3687 - DNA, 20 bp, synthetic construct
  misc_feature 1..20: note = chemically synthesized
  source 1..20: mol_type = other DNA
gtgcttttctctgccacacg

SEQ ID NO: 3688 - DNA, 20 bp, synthetic construct
  misc_feature 1..20: note = chemically synthesized
  source 1..20: mol_type = other DNA
tgccaccccctcactgcccc

SEQ ID NO: 3689 - DNA, 20 bp, synthetic construct
  misc_feature 1..20: note = chemically synthesized
  source 1..20: mol_type = other DNA
cctattccaatactcatgat

SEQ ID NO: 3690 - DNA, 20 bp, synthetic construct
  misc_feature 1..20: note = chemically synthesized
  source 1..20: mol_type = other DNA
ttccaatactcatgattaga

SEQ ID NO: 3691 - DNA, 20 bp, synthetic construct
  misc_feature 1..20: note = chemically synthesized
  source 1..20: mol_type = other DNA
tgattagacagactccacta

SEQ ID NO: 3692 - DNA, 20 bp, synthetic construct
  misc_feature 1..20: note = chemically synthesized
  source 1..20: mol_type = other DNA
tagacagactccactaaagc

SEQ ID NO: 3693 - DNA, 20 bp, synthetic construct
  misc_feature 1..20: note = chemically synthesized
  source 1..20: mol_type = other DNA
acagactccactaaagctgg

SEQ ID NO: 3694 - DNA, 20 bp, synthetic construct
  misc_feature 1..20: note = chemically synthesized
  source 1..20: mol_type = other DNA
ccactaaagctggtggattc

SEQ ID NO: 3695 - DNA, 20 bp, synthetic construct
  misc_feature 1..20: note = chemically synthesized
  source 1..20: mol_type = other DNA
ggtggattctagaaaatgtt

SEQ ID NO: 3696 - DNA, 20 bp, synthetic construct
  misc_feature 1..20: note = chemically synthesized
  source 1..20: mol_type = other DNA
gtggattctagaaaatgtta

SEQ ID NO: 3697 - DNA, 20 bp, synthetic construct
  misc_feature 1..20: note = chemically synthesized
  source 1..20: mol_type = other DNA
agaaaatgttaaggtgtgtc

SEQ ID NO: 3698 - DNA, 20 bp, synthetic construct
  misc_feature 1..20: note = chemically synthesized
  source 1..20: mol_type = other DNA
tgttaaggtgtgtctagcca

SEQ ID NO: 3699 - DNA, 20 bp, synthetic construct
  misc_feature 1..20: note = chemically synthesized
  source 1..20: mol_type = other DNA
taaggtgtgtctagccatgg

SEQ ID NO: 3700 - DNA, 20 bp, synthetic construct
  misc_feature 1..20: note = chemically synthesized
  source 1..20: mol_type = other DNA
ctagccatggtagttgaact

SEQ ID NO: 3701 - DNA, 20 bp, synthetic construct
  misc_feature 1..20: note = chemically synthesized
  source 1..20: mol_type = other DNA
tagccatggtagttgaactc

SEQ ID NO: 3702 - DNA, 20 bp, synthetic construct
  misc_feature 1..20: note = chemically synthesized
  source 1..20: mol_type = other DNA
gccatggtagttgaactcag

SEQ ID NO: 3703 - DNA, 20 bp, synthetic construct
  misc_feature 1..20: note = chemically synthesized
  source 1..20: mol_type = other DNA
tggtagttgaactcaggagt

SEQ ID NO: 3704 - DNA, 20 bp, synthetic construct
  misc_feature 1..20: note = chemically synthesized
  source 1..20: mol_type = other DNA
tgaactcaggagttggtgct

SEQ ID NO: 3705 - DNA, 20 bp, synthetic construct
  misc_feature 1..20: note = chemically synthesized
  source 1..20: mol_type = other DNA
gaactcaggagttggtgctc

SEQ ID NO: 3706 - DNA, 20 bp, synthetic construct
  misc_feature 1..20: note = chemically synthesized
  source 1..20: mol_type = other DNA
aactcaggagttggtgctca

SEQ ID NO: 3707 - DNA, 20 bp, synthetic construct
  misc_feature 1..20: note = chemically synthesized
  source 1..20: mol_type = other DNA
agttggtgctcagggcaaat

SEQ ID NO: 3708 - DNA, 20 bp, synthetic construct
  misc_feature 1..20: note = chemically synthesized
  source 1..20: mol_type = other DNA
gcaaattagacccaaatcct

SEQ ID NO: 3709 - DNA, 20 bp, synthetic construct
  misc_feature 1..20: note = chemically synthesized
  source 1..20: mol_type = other DNA
caaattagacccaaatcctg

SEQ ID NO: 3710 - DNA, 20 bp, synthetic construct
  misc_feature 1..20: note = chemically synthesized
  source 1..20: mol_type = other DNA
atcctgaggaataattcctt

SEQ ID NO: 3711 - DNA, 20 bp, synthetic construct
  misc_feature 1..20: note = chemically synthesized
  source 1..20: mol_type = other DNA
tttttttttttttttttttt

SEQ ID NO: 3712 - DNA, 20 bp, synthetic construct
  misc_feature 1..20: note = chemically synthesized
  source 1..20: mol_type = other DNA
ttttttttttttttttgaga

SEQ ID NO: 3713 - DNA, 20 bp, synthetic construct
  misc_feature 1..20: note = chemically synthesized
  source 1..20: mol_type = other DNA
ttttttttttttttgagaca

SEQ ID NO: 3714 - DNA, 20 bp, synthetic construct
  misc_feature 1..20: note = chemically synthesized
  source 1..20: mol_type = other DNA
cagagtctcactctatcacc

SEQ ID NO: 3715 - DNA, 20 bp, synthetic construct
  misc_feature 1..20: note = chemically synthesized
  source 1..20: mol_type = other DNA
agagtctcactctatcaccc

SEQ ID NO: 3716 - DNA, 20 bp, synthetic construct
  misc_feature 1..20: note = chemically synthesized
  source 1..20: mol_type = other DNA
tctcactctatcacccaggc

SEQ ID NO: 3717 - DNA, 20 bp, synthetic construct
  misc_feature 1..20: note = chemically synthesized
  source 1..20: mol_type = other DNA
tcactctatcacccaggctg

SEQ ID NO: 3718 - DNA, 20 bp, synthetic construct
  misc_feature 1..20: note = chemically synthesized
  source 1..20: mol_type = other DNA
ctatcacccaggctggagtg

SEQ ID NO: 3719 - DNA, 20 bp, synthetic construct
  misc_feature 1..20: note = chemically synthesized
  source 1..20: mol_type = other DNA
tcacccaggctggagtgcag

SEQ ID NO: 3720 - DNA, 20 bp, synthetic construct
  misc_feature 1..20: note = chemically synthesized
  source 1..20: mol_type = other DNA
ggagtgcagtggcacaatct

SEQ ID NO: 3721 - DNA, 20 bp, synthetic construct
  misc_feature 1..20: note = chemically synthesized
  source 1..20: mol_type = other DNA
tcactgcaacctgcacctcc

SEQ ID NO: 3722 - DNA, 20 bp, synthetic construct
  misc_feature 1..20: note = chemically synthesized
  source 1..20: mol_type = other DNA
cactgcaacctgcacctcct

SEQ ID NO: 3723 - DNA, 20 bp, synthetic construct
  misc_feature 1..20: note = chemically synthesized
  source 1..20: mol_type = other DNA
aacctgcacctcctgggttc

SEQ ID NO: 3724 - DNA, 20 bp, synthetic construct
  misc_feature 1..20: note = chemically synthesized
  source 1..20: mol_type = other DNA
acctgcacctcctgggttca

SEQ ID NO: 3725 - DNA, 20 bp, synthetic construct
  misc_feature 1..20: note = chemically synthesized
  source 1..20: mol_type = other DNA
cctgcacctcctgggttcaa

SEQ ID NO: 3726 - DNA, 20 bp, synthetic construct
  misc_feature 1..20: note = chemically synthesized
  source 1..20: mol_type = other DNA
ttcaagggattctcctacct

SEQ ID NO: 3727 - DNA, 20 bp, synthetic construct
  misc_feature 1..20: note = chemically synthesized
  source 1..20: mol_type = other DNA
acctaagcctcctgaaaacc

SEQ ID NO: 3728 - DNA, 20 bp, synthetic construct
  misc_feature 1..20: note = chemically synthesized
  source 1..20: mol_type = other DNA
cctaagcctcctgaaaacct

SEQ ID NO: 3729 - DNA, 20 bp, synthetic construct
  misc_feature 1..20: note = chemically synthesized
  source 1..20: mol_type = other DNA
ctcctgaaaacctgggacta

SEQ ID NO: 3730 - DNA, 20 bp, synthetic construct
  misc_feature 1..20: note = chemically synthesized
  source 1..20: mol_type = other DNA
tcctgaaaacctgggactat

SEQ ID NO: 3731 - DNA, 20 bp, synthetic construct
  misc_feature 1..20: note = chemically synthesized
  source 1..20: mol_type = other DNA
ataggcgtgcgccaccacac

SEQ ID NO: 3732 - DNA, 20 bp, synthetic construct
  misc_feature 1..20: note = chemically synthesized
  source 1..20: mol_type = other DNA
taggcgtgcgccaccacacc

SEQ ID NO: 3733 - DNA, 20 bp, synthetic construct
  misc_feature 1..20: note = chemically synthesized
  source 1..20: mol_type = other DNA
caggctaatttttgtatttt

SEQ ID NO: 3734 - DNA, 20 bp, synthetic construct
  misc_feature 1..20: note = chemically synthesized
  source 1..20: mol_type = other DNA
gctaatttttgtatttttag

SEQ ID NO: 3735 - DNA, 20 bp, synthetic construct
  misc_feature 1..20: note = chemically synthesized
  source 1..20: mol_type = other DNA
ttttgtatttttagtagaca

SEQ ID NO: 3736 - DNA, 20 bp, synthetic construct
  misc_feature 1..20: note = chemically synthesized
  source 1..20: mol_type = other DNA
tttgtatttttagtagacat

SEQ ID NO: 3737 - DNA, 20 bp, synthetic construct
  misc_feature 1..20: note = chemically synthesized
  source 1..20: mol_type = other DNA
ttgtatttttagtagacatg

SEQ ID NO: 3738 - DNA, 20 bp, synthetic construct
  misc_feature 1..20: note = chemically synthesized
  source 1..20: mol_type = other DNA
gacatggggtttcaccatgt

SEQ ID NO: 3739 - DNA, 20 bp, synthetic construct
  misc_feature 1..20: note = chemically synthesized
  source 1..20: mol_type = other DNA
ggggtttcaccatgttggcc

SEQ ID NO: 3740 - DNA, 20 bp, synthetic construct
  misc_feature 1..20: note = chemically synthesized
  source 1..20: mol_type = other DNA
ctcaaatgatctacctgcct

SEQ ID NO: 3741 - DNA, 20 bp, synthetic construct
  misc_feature 1..20: note = chemically synthesized
  source 1..20: mol_type = other DNA
tctacctgcctcagccacca

SEQ ID NO: 3742 - DNA, 20 bp, synthetic construct
  misc_feature 1..20: note = chemically synthesized
  source 1..20: mol_type = other DNA
tgcctcagccaccaaagtgc

SEQ ID NO: 3743 - DNA, 20 bp, synthetic construct
  misc_feature 1..20: note = chemically synthesized
  source 1..20: mol_type = other DNA
gcctcagccaccaaagtgct

SEQ ID NO: 3744 - DNA, 20 bp, synthetic construct
  misc_feature 1..20: note = chemically synthesized
  source 1..20: mol_type = other DNA
ccaccaaagtgctgggatta

SEQ ID NO: 3745 - DNA, 20 bp, synthetic construct
  misc_feature 1..20: note = chemically synthesized
  source 1..20: mol_type = other DNA
ccaaagtgctgggattacag

SEQ ID NO: 3746 - DNA, 20 bp, synthetic construct
  misc_feature 1..20: note = chemically synthesized
  source 1..20: mol_type = other DNA
agtgctgggattacagaagt

SEQ ID NO: 3747 - DNA, 20 bp, synthetic construct
  misc_feature 1..20: note = chemically synthesized
  source 1..20: mol_type = other DNA
cagaagtgagccaccgtgcc

SEQ ID NO: 3748 - DNA, 20 bp, synthetic construct
  misc_feature 1..20: note = chemically synthesized
  source 1..20: mol_type = other DNA
tgagccaccgtgcccagcct

SEQ ID NO: 3749 - DNA, 20 bp, synthetic construct
  misc_feature 1..20: note = chemically synthesized
  source 1..20: mol_type = other DNA
cttacactgaactgcctatg

SEQ ID NO: 3750 - DNA, 20 bp, synthetic construct
  misc_feature 1..20: note = chemically synthesized
  source 1..20: mol_type = other DNA
gcctatgtggcctcaccact

SEQ ID NO: 3751 - DNA, 20 bp, synthetic construct
  misc_feature 1..20: note = chemically synthesized
  source 1..20: mol_type = other DNA
tatgtggcctcaccacttgg

SEQ ID NO: 3752 - DNA, 20 bp, synthetic construct
  misc_feature 1..20: note = chemically synthesized
  source 1..20: mol_type = other DNA
tcaccacttggaagcctgac

SEQ ID NO: 3753 - DNA, 20 bp, synthetic construct
  misc_feature 1..20: note = chemically synthesized
  source 1..20: mol_type = other DNA
aaacttaacatgtccaaatg

SEQ ID NO: 3754 - DNA, 20 bp, synthetic construct
  misc_feature 1..20: note = chemically synthesized
  source 1..20: mol_type = other DNA
ttcctctgccttcaccatct

SEQ ID NO: 3755 - DNA, 20 bp, synthetic construct
  misc_feature 1..20: note = chemically synthesized
  source 1..20: mol_type = other DNA
tgccttcaccatctcagaaa

SEQ ID NO: 3756 - DNA, 20 bp, synthetic construct
  misc_feature 1..20: note = chemically synthesized
  source 1..20: mol_type = other DNA
ttgccaattaccccactgct

SEQ ID NO: 3757 - DNA, 20 bp, synthetic construct
  misc_feature 1..20: note = chemically synthesized
  source 1..20: mol_type = other DNA
tgccaattaccccactgctc

SEQ ID NO: 3758 - DNA, 20 bp, synthetic construct
  misc_feature 1..20: note = chemically synthesized
  source 1..20: mol_type = other DNA
aggccaataaaattaaaata

SEQ ID NO: 3759 - DNA, 20 bp, synthetic construct
  misc_feature 1..20: note = chemically synthesized
  source 1..20: mol_type = other DNA
taaaattaaaataaagaaca

SEQ ID NO: 3760 - DNA, 20 bp, synthetic construct
  misc_feature 1..20: note = chemically synthesized
  source 1..20: mol_type = other DNA
actttaactcttctcttttt

SEQ ID NO: 3761 - DNA, 20 bp, synthetic construct
  misc_feature 1..20: note = chemically synthesized
  source 1..20: mol_type = other DNA
ctttaactcttctctttttc

SEQ ID NO: 3762 - DNA, 20 bp, synthetic construct
  misc_feature 1..20: note = chemically synthesized
  source 1..20: mol_type = other DNA
tttaactcttctctttttca

SEQ ID NO: 3763 - DNA, 20 bp, synthetic construct
  misc_feature 1..20: note = chemically synthesized
  source 1..20: mol_type = other DNA
ttaactcttctctttttcag

SEQ ID NO: 3764 - DNA, 20 bp, synthetic construct
  misc_feature 1..20: note = chemically synthesized
  source 1..20: mol_type = other DNA
taactcttctctttttcagg

SEQ ID NO: 3765 - DNA, 20 bp, synthetic construct
  misc_feature 1..20: note = chemically synthesized
  source 1..20: mol_type = other DNA
tcttctctttttcagggggt

SEQ ID NO: 3766 - DNA, 20 bp, synthetic construct
  misc_feature 1..20: note = chemically synthesized
  source 1..20: mol_type = other DNA
cttctctttttcagggggtc

SEQ ID NO: 3767 - DNA, 20 bp, synthetic construct
  misc_feature 1..20: note = chemically synthesized
  source 1..20: mol_type = other DNA
ttctctttttcagggggtca

SEQ ID NO: 3768 - DNA, 20 bp, synthetic construct
  misc_feature 1..20: note = chemically synthesized
  source 1..20: mol_type = other DNA
tctctttttcagggggtcag

SEQ ID NO: 3769 - DNA, 20 bp, synthetic construct
  misc_feature 1..20: note = chemically synthesized
  source 1..20: mol_type = other DNA
tctttttcagggggtcaggg

SEQ ID NO: 3770 - DNA, 20 bp, synthetic construct
  misc_feature 1..20: note = chemically synthesized
  source 1..20: mol_type = other DNA
tttcagggggtcaggggaga

SEQ ID NO: 3771 - DNA, 20 bp, synthetic construct
  misc_feature 1..20: note = chemically synthesized
  source 1..20: mol_type = other DNA
ttcagggggtcaggggagac

SEQ ID NO: 3772 - DNA, 20 bp, synthetic construct
  misc_feature 1..20: note = chemically synthesized
  source 1..20: mol_type = other DNA
tcagggggtcaggggagaca

SEQ ID NO: 3773 - DNA, 20 bp, synthetic construct
  misc_feature 1..20: note = chemically synthesized
  source 1..20: mol_type = other DNA
cagggtcttgctctgtcacc

SEQ ID NO: 3774 - DNA, 20 bp, synthetic construct
  misc_feature 1..20: note = chemically synthesized
  source 1..20: mol_type = other DNA
agggtcttgctctgtcacct

SEQ ID NO: 3775 - DNA, 20 bp, synthetic construct
  misc_feature 1..20: note = chemically synthesized
  source 1..20: mol_type = other DNA
ttgctctgtcacctaggctg

SEQ ID NO: 3776 - DNA, 20 bp, synthetic construct
  misc_feature 1..20: note = chemically synthesized
  source 1..20: mol_type = other DNA
ctgtcacctaggctgaagta

SEQ ID NO: 3777 - DNA, 20 bp, synthetic construct
  misc_feature 1..20: note = chemically synthesized
  source 1..20: mol_type = other DNA
tcacctaggctgaagtacag

SEQ ID NO: 3778 - DNA, 20 bp, synthetic construct
  misc_feature 1..20: note = chemically synthesized
  source 1..20: mol_type = other DNA
taggctgaagtacagtggca

SEQ ID NO: 3779 - DNA, 20 bp, synthetic construct
  misc_feature 1..20: note = chemically synthesized
  source 1..20: mol_type = other DNA
gaagtacagtggcacagtca

SEQ ID NO: 3780 - DNA, 20 bp, synthetic construct
  misc_feature 1..20: note = chemically synthesized
  source 1..20: mol_type = other DNA
ggcacagtcatggctcactg

SEQ ID NO: 3781 - DNA, 20 bp, synthetic construct
  misc_feature 1..20: note = chemically synthesized
  source 1..20: mol_type = other DNA
tcactgcagcctcaacttcc

SEQ ID NO: 3782 - DNA, 20 bp, synthetic construct
  misc_feature 1..20: note = chemically synthesized
  source 1..20: mol_type = other DNA
cactgcagcctcaacttcct

SEQ ID NO: 3783 - DNA, 20 bp, synthetic construct
  misc_feature 1..20: note = chemically synthesized
  source 1..20: mol_type = other DNA
agcctcaacttcctgggctc

SEQ ID NO: 3784 - DNA, 20 bp, synthetic construct
  misc_feature 1..20: note = chemically synthesized
  source 1..20: mol_type = other DNA
tcaagcaataccctccacct

SEQ ID NO: 3785 - DNA, 20 bp, synthetic construct
  misc_feature 1..20: note = chemically synthesized
  source 1..20: mol_type = other DNA
accctccacctcagcctccc

SEQ ID NO: 3786 - DNA, 20 bp, synthetic construct
  misc_feature 1..20: note = chemically synthesized
  source 1..20: mol_type = other DNA
ctccacctcagcctcccgag

SEQ ID NO: 3787 - DNA, 20 bp, synthetic construct
  misc_feature 1..20: note = chemically synthesized
  source 1..20: mol_type = other DNA
acctcagcctcccgagtagc

SEQ ID NO: 3788 - DNA, 20 bp, synthetic construct
  misc_feature 1..20: note = chemically synthesized
  source 1..20: mol_type = other DNA
cctcagcctcccgagtagct

SEQ ID NO: 3789 - DNA, 20 bp, synthetic construct
  misc_feature 1..20: note = chemically synthesized
  source 1..20: mol_type = other DNA
ctcccgagtagctaggatca

SEQ ID NO: 3790 - DNA, 20 bp, synthetic construct
  misc_feature 1..20: note = chemically synthesized
  source 1..20: mol_type = other DNA
tcccgagtagctaggatcac

SEQ ID NO: 3791 - DNA, 20 bp, synthetic construct
  misc_feature 1..20: note = chemically synthesized
  source 1..20: mol_type = other DNA
caggtgcatgccaccacacc

SEQ ID NO: 3792 - DNA, 20 bp, synthetic construct
  misc_feature 1..20: note = chemically synthesized
  source 1..20: mol_type = other DNA
gctaatttttgtattttttg

SEQ ID NO: 3793 - DNA, 20 bp, synthetic construct
  misc_feature 1..20: note = chemically synthesized
  source 1..20: mol_type = other DNA
taatttttgtattttttgta

SEQ ID NO: 3794 - DNA, 20 bp, synthetic construct
  misc_feature 1..20: note = chemically synthesized
  source 1..20: mol_type = other DNA
tttttgtattttttgtagag

SEQ ID NO: 3795 - DNA, 20 bp, synthetic construct
  misc_feature 1..20: note = chemically synthesized
  source 1..20: mol_type = other DNA
ttttgtattttttgtagaga

SEQ ID NO: 3796 - DNA, 20 bp, synthetic construct
  misc_feature 1..20: note = chemically synthesized
  source 1..20: mol_type = other DNA
tttgtattttttgtagagaa

SEQ ID NO: 3797 - DNA, 20 bp, synthetic construct
  misc_feature 1..20: note = chemically synthesized
  source 1..20: mol_type = other DNA
ttgtattttttgtagagaag

SEQ ID NO: 3798 - DNA, 20 bp, synthetic construct
  misc_feature 1..20: note = chemically synthesized
  source 1..20: mol_type = other DNA
aggggttttgctgtgttgcc

SEQ ID NO: 3799 - DNA, 20 bp, synthetic construct
  misc_feature 1..20: note = chemically synthesized
  source 1..20: mol_type = other DNA
ggggttttgctgtgttgccc

SEQ ID NO: 3800 - DNA, 20 bp, synthetic construct
  misc_feature 1..20: note = chemically synthesized
  source 1..20: mol_type = other DNA
ttttgctgtgttgcccaggc

SEQ ID NO: 3801 - DNA, 20 bp, synthetic construct
  misc_feature 1..20: note = chemically synthesized
  source 1..20: mol_type = other DNA
caggctggtcttgaactcct

SEQ ID NO: 3802 - DNA, 20 bp, synthetic construct
  misc_feature 1..20: note = chemically synthesized
  source 1..20: mol_type = other DNA
tggtcttgaactcctgagct

SEQ ID NO: 3803 - DNA, 20 bp, synthetic construct
  misc_feature 1..20: note = chemically synthesized
  source 1..20: mol_type = other DNA
ggtcttgaactcctgagctc

SEQ ID NO: 3804 - DNA, 20 bp, synthetic construct
  misc_feature 1..20: note = chemically synthesized
  source 1..20: mol_type = other DNA
gctcaggaatctgctctcct

SEQ ID NO: 3805 - DNA, 20 bp, synthetic construct
  misc_feature 1..20: note = chemically synthesized
  source 1..20: mol_type = other DNA
gctctccttggcctcctcct

SEQ ID NO: 3806 - DNA, 20 bp, synthetic construct
  misc_feature 1..20: note = chemically synthesized
  source 1..20: mol_type = other DNA
cttggcctcctccttggcat

SEQ ID NO: 3807 - DNA, 20 bp, synthetic construct
  misc_feature 1..20: note = chemically synthesized
  source 1..20: mol_type = other DNA
ttggcatgagctactacacc

SEQ ID NO: 3808 - DNA, 20 bp, synthetic construct
  misc_feature 1..20: note = chemically synthesized
  source 1..20: mol_type = other DNA
tctctttctctcacacaaca

SEQ ID NO: 3809 - DNA, 20 bp, synthetic construct
  misc_feature 1..20: note = chemically synthesized
  source 1..20: mol_type = other DNA
tcacacaacatagaatcctt

SEQ ID NO: 3810 - DNA, 20 bp, synthetic construct
  misc_feature 1..20: note = chemically synthesized
  source 1..20: mol_type = other DNA
aatccttcagcaacttcctt

SEQ ID NO: 3811 - DNA, 20 bp, synthetic construct
  misc_feature 1..20: note = chemically synthesized
  source 1..20: mol_type = other DNA
aacttccttcagaatatatt

SEQ ID NO: 3812 - DNA, 20 bp, synthetic construct
  misc_feature 1..20: note = chemically synthesized
  source 1..20: mol_type = other DNA
acttccttcagaatatattc

SEQ ID NO: 3813 - DNA, 20 bp, synthetic construct
  misc_feature 1..20: note = chemically synthesized
  source 1..20: mol_type = other DNA
ttccttcagaatatattcag

SEQ ID NO: 3814 - DNA, 20 bp, synthetic construct
  misc_feature 1..20: note = chemically synthesized
  source 1..20: mol_type = other DNA
agaatatattcaggagacaa

SEQ ID NO: 3815 - DNA, 20 bp, synthetic construct
  misc_feature 1..20: note = chemically synthesized
  source 1..20: mol_type = other DNA
ctcccttttctgttcccacc

SEQ ID NO: 3816 - DNA, 20 bp, synthetic construct
  misc_feature 1..20: note = chemically synthesized
  source 1..20: mol_type = other DNA
ccactccactacctcttgcc

SEQ ID NO: 3817 - DNA, 20 bp, synthetic construct
  misc_feature 1..20: note = chemically synthesized
  source 1..20: mol_type = other DNA
ctcttgcctggactgtgtaa

SEQ ID NO: 3818 - DNA, 20 bp, synthetic construct
  misc_feature 1..20: note = chemically synthesized
  source 1..20: mol_type = other DNA
tggactgtgtaacagcttcc

SEQ ID NO: 3819 - DNA, 20 bp, synthetic construct
  misc_feature 1..20: note = chemically synthesized
  source 1..20: mol_type = other DNA
ctgtgtaacagcttcctggc

SEQ ID NO: 3820 - DNA, 20 bp, synthetic construct
  misc_feature 1..20: note = chemically synthesized
  source 1..20: mol_type = other DNA
tgtgtaacagcttcctggct

SEQ ID NO: 3821 - DNA, 20 bp, synthetic construct
  misc_feature 1..20: note = chemically synthesized
  source 1..20: mol_type = other DNA
ccttcattctgctttccaca

SEQ ID NO: 3822 - DNA, 20 bp, synthetic construct
  misc_feature 1..20: note = chemically synthesized
  source 1..20: mol_type = other DNA
tcattctgctttccacatag

SEQ ID NO: 3823 - DNA, 20 bp, synthetic construct
  misc_feature 1..20: note = chemically synthesized
  source 1..20: mol_type = other DNA
tctgctttccacatagcagc

SEQ ID NO: 3824 - DNA, 20 bp, synthetic construct
  misc_feature 1..20: note = chemically synthesized
  source 1..20: mol_type = other DNA
tgctttccacatagcagcca

SEQ ID NO: 3825 - DNA, 20 bp, synthetic construct
  misc_feature 1..20: note = chemically synthesized
  source 1..20: mol_type = other DNA
cagccagagcaatcttttaa

SEQ ID NO: 3826 - DNA, 20 bp, synthetic construct
  misc_feature 1..20: note = chemically synthesized
  source 1..20: mol_type = other DNA
aatcttttaaaagcctgtga

SEQ ID NO: 3827 - DNA, 20 bp, synthetic construct
  misc_feature 1..20: note = chemically synthesized
  source 1..20: mol_type = other DNA
gacagatcactgttactcct

SEQ ID NO: 3828 - DNA, 20 bp, synthetic construct
  misc_feature 1..20: note = chemically synthesized
  source 1..20: mol_type = other DNA
gatcactgttactccttggc

SEQ ID NO: 3829 - DNA, 20 bp, synthetic construct
  misc_feature 1..20: note = chemically synthesized
  source 1..20: mol_type = other DNA
cttggctagaattcacacca

SEQ ID NO: 3830 - DNA, 20 bp, synthetic construct
  misc_feature 1..20: note = chemically synthesized
  source 1..20: mol_type = other DNA
agaattcacaccacagccta

SEQ ID NO: 3831 - DNA, 20 bp, synthetic construct
  misc_feature 1..20: note = chemically synthesized
  source 1..20: mol_type = other DNA
gaattcacaccacagcctac

SEQ ID NO: 3832 - DNA, 20 bp, synthetic construct
  misc_feature 1..20: note = chemically synthesized
  source 1..20: mol_type = other DNA
cgcctgcacaaccttgtttg

SEQ ID NO: 3833 - DNA, 20 bp, synthetic construct
  misc_feature 1..20: note = chemically synthesized
  source 1..20: mol_type = other DNA
ttgtttgtggctcctcttct

SEQ ID NO: 3834 - DNA, 20 bp, synthetic construct
  misc_feature 1..20: note = chemically synthesized
  source 1..20: mol_type = other DNA
tgagcccattacctacttct

SEQ ID NO: 3835 - DNA, 20 bp, synthetic construct
  misc_feature 1..20: note = chemically synthesized
  source 1..20: mol_type = other DNA
acttcttggcctctactccc

SEQ ID NO: 3836 - DNA, 20 bp, synthetic construct
  misc_feature 1..20: note = chemically synthesized
  source 1..20: mol_type = other DNA
ttgtttatttttttcaaccc

SEQ ID NO: 3837 - DNA, 20 bp, synthetic construct
  misc_feature 1..20: note = chemically synthesized
  source 1..20: mol_type = other DNA
ttcaacccgagcttcttaac

SEQ ID NO: 3838 - DNA, 20 bp, synthetic construct
  misc_feature 1..20: note = chemically synthesized
  source 1..20: mol_type = other DNA
tcaacccgagcttcttaacc

SEQ ID NO: 3839 - DNA, 20 bp, synthetic construct
  misc_feature 1..20: note = chemically synthesized
  source 1..20: mol_type = other DNA
aacccgagcttcttaaccag

SEQ ID NO: 3840 - DNA, 20 bp, synthetic construct
  misc_feature 1..20: note = chemically synthesized
  source 1..20: mol_type = other DNA
ttaaccaggagtttgtctac

SEQ ID NO: 3841 - DNA, 20 bp, synthetic construct
  misc_feature 1..20: note = chemically synthesized
  source 1..20: mol_type = other DNA
taaccaggagtttgtctact

SEQ ID NO: 3842 - DNA, 20 bp, synthetic construct
  misc_feature 1..20: note = chemically synthesized
  source 1..20: mol_type = other DNA
tttgtctactaggtgacatg

SEQ ID NO: 3843 - DNA, 20 bp, synthetic construct
  misc_feature 1..20: note = chemically synthesized
  source 1..20: mol_type = other DNA
ctactaggtgacatgtggca

SEQ ID NO: 3844 - DNA, 20 bp, synthetic construct
  misc_feature 1..20: note = chemically synthesized
  source 1..20: mol_type = other DNA
aggtgacatgtggcaaagtt

SEQ ID NO: 3845 - DNA, 20 bp, synthetic construct
  misc_feature 1..20: note = chemically synthesized
  source 1..20: mol_type = other DNA
gtgacatgtggcaaagttta

SEQ ID NO: 3846 - DNA, 20 bp, synthetic construct
  misc_feature 1..20: note = chemically synthesized
  source 1..20: mol_type = other DNA
gcaaagtttagagacatttt

SEQ ID NO: 3847 - DNA, 20 bp, synthetic construct
  misc_feature 1..20: note = chemically synthesized
  source 1..20: mol_type = other DNA
tagagacatttttggttgtc

SEQ ID NO: 3848 - DNA, 20 bp, synthetic construct
  misc_feature 1..20: note = chemically synthesized
  source 1..20: mol_type = other DNA
acatttttggttgtcaagac

SEQ ID NO: 3849 - DNA, 20 bp, synthetic construct
  misc_feature 1..20: note = chemically synthesized
  source 1..20: mol_type = other DNA
catttttggttgtcaagact

SEQ ID NO: 3850 - DNA, 20 bp, synthetic construct
  misc_feature 1..20: note = chemically synthesized
  source 1..20: mol_type = other DNA
atttttggttgtcaagactg

SEQ ID NO: 3851 - DNA, 20 bp, synthetic construct
  misc_feature 1..20: note = chemically synthesized
  source 1..20: mol_type = other DNA
tttttggttgtcaagactgg

SEQ ID NO: 3852 - DNA, 20 bp, synthetic construct
  misc_feature 1..20: note = chemically synthesized
  source 1..20: mol_type = other DNA
tttggttgtcaagactgggg

SEQ ID NO: 3853 - DNA, 20 bp, synthetic construct
  misc_feature 1..20: note = chemically synthesized
  source 1..20: mol_type = other DNA
caagactgggggagtgctcc

SEQ ID NO: 3854 - DNA, 20 bp, synthetic construct
  misc_feature 1..20: note = chemically synthesized
  source 1..20: mol_type = other DNA
gggggagtgctcctagcacc

SEQ ID NO: 3855 - DNA, 20 bp, synthetic construct
  misc_feature 1..20: note = chemically synthesized
  source 1..20: mol_type = other DNA
gagtgctcctagcacctagt

SEQ ID NO: 3856 - DNA, 20 bp, synthetic construct
  misc_feature 1..20: note = chemically synthesized
  source 1..20: mol_type = other DNA
tgctcctagcacctagtgag

SEQ ID NO: 3857 - DNA, 20 bp, synthetic construct
  misc_feature 1..20: note = chemically synthesized
  source 1..20: mol_type = other DNA
gctcctagcacctagtgagt

SEQ ID NO: 3858 - DNA, 20 bp, synthetic construct
  misc_feature 1..20: note = chemically synthesized
  source 1..20: mol_type = other DNA
ctcctagcacctagtgagta

SEQ ID NO: 3859 - DNA, 20 bp, synthetic construct
  misc_feature 1..20: note = chemically synthesized
  source 1..20: mol_type = other DNA
cctagcacctagtgagtagg

SEQ ID NO: 3860 - DNA, 20 bp, synthetic construct
  misc_feature 1..20: note = chemically synthesized
  source 1..20: mol_type = other DNA
ctagcacctagtgagtaggg

SEQ ID NO: 3861 - DNA, 20 bp, synthetic construct
  misc_feature 1..20: note = chemically synthesized
  source 1..20: mol_type = other DNA
cacctagtgagtagggagga

SEQ ID NO: 3862 - DNA, 20 bp, synthetic construct
  misc_feature 1..20: note = chemically synthesized
  source 1..20: mol_type = other DNA
acctagtgagtagggaggac

SEQ ID NO: 3863 - DNA, 20 bp, synthetic construct
  misc_feature 1..20: note = chemically synthesized
  source 1..20: mol_type = other DNA
tagggaggacaggatactgc

SEQ ID NO: 3864 - DNA, 20 bp, synthetic construct
  misc_feature 1..20: note = chemically synthesized
  source 1..20: mol_type = other DNA
actgctagacatcctacatg

SEQ ID NO: 3865 - DNA, 20 bp, synthetic construct
  misc_feature 1..20: note = chemically synthesized
  source 1..20: mol_type = other DNA
ctagacatcctacatgcaga

SEQ ID NO: 3866 - DNA, 20 bp, synthetic construct
  misc_feature 1..20: note = chemically synthesized
  source 1..20: mol_type = other DNA
gacatcctacatgcagatgg

SEQ ID NO: 3867 - DNA, 20 bp, synthetic construct
  misc_feature 1..20: note = chemically synthesized
  source 1..20: mol_type = other DNA
ccccccacacacacacacat

SEQ ID NO: 3868 - DNA, 20 bp, synthetic construct
  misc_feature 1..20: note = chemically synthesized
  source 1..20: mol_type = other DNA
cccacacacacacacatgag

SEQ ID NO: 3869 - DNA, 20 bp, synthetic construct
  misc_feature 1..20: note = chemically synthesized
  source 1..20: mol_type = other DNA
acacacacatgagtagtgct

SEQ ID NO: 3870 - DNA, 20 bp, synthetic construct
  misc_feature 1..20: note = chemically synthesized
  source 1..20: mol_type = other DNA
cgctttttaatccaacttgc

SEQ ID NO: 3871 - DNA, 20 bp, synthetic construct
  misc_feature 1..20: note = chemically synthesized
  source 1..20: mol_type = other DNA
gctttttaatccaacttgcc

SEQ ID NO: 3872 - DNA, 20 bp, synthetic construct
  misc_feature 1..20: note = chemically synthesized
  source 1..20: mol_type = other DNA
tccaacttgccaggcccact

SEQ ID NO: 3873 - DNA, 20 bp, synthetic construct
  misc_feature 1..20: note = chemically synthesized
  source 1..20: mol_type = other DNA
ccaggcccactcagtttgcc

SEQ ID NO: 3874 - DNA, 20 bp, synthetic construct
  misc_feature 1..20: note = chemically synthesized
  source 1..20: mol_type = other DNA
caggcccactcagtttgcct

SEQ ID NO: 3875 - DNA, 20 bp, synthetic construct
  misc_feature 1..20: note = chemically synthesized
  source 1..20: mol_type = other DNA
tgcctgggaaatactgctcc

SEQ ID NO: 3876 - DNA, 20 bp, synthetic construct
  misc_feature 1..20: note = chemically synthesized
  source 1..20: mol_type = other DNA
tttccttcatgtctctgctc

SEQ ID NO: 3877 - DNA, 20 bp, synthetic construct
  misc_feature 1..20: note = chemically synthesized
  source 1..20: mol_type = other DNA
tcatgtctctgctcaagtgt

SEQ ID NO: 3878 - DNA, 20 bp, synthetic construct
  misc_feature 1..20: note = chemically synthesized
  source 1..20: mol_type = other DNA
ctctgctcaagtgtcagccc

SEQ ID NO: 3879 - DNA, 20 bp, synthetic construct
  misc_feature 1..20: note = chemically synthesized
  source 1..20: mol_type = other DNA
ctgctcaagtgtcagcccca

SEQ ID NO: 3880 - DNA, 20 bp, synthetic construct
  misc_feature 1..20: note = chemically synthesized
  source 1..20: mol_type = other DNA
cttattgtcatctctcccac

SEQ ID NO: 3881 - DNA, 20 bp, synthetic construct
  misc_feature 1..20: note = chemically synthesized
  source 1..20: mol_type = other DNA
cactagaatgcaaaatatca

SEQ ID NO: 3882 - DNA, 20 bp, synthetic construct
  misc_feature 1..20: note = chemically synthesized
  source 1..20: mol_type = other DNA
actagaatgcaaaatatcaa

SEQ ID NO: 3883 - DNA, 20 bp, synthetic construct
  misc_feature 1..20: note = chemically synthesized
  source 1..20: mol_type = other DNA
ctagaatgcaaaatatcaaa

SEQ ID NO: 3884 - DNA, 20 bp, synthetic construct
  misc_feature 1..20: note = chemically synthesized
  source 1..20: mol_type = other DNA
atgcaaaatatcaaagggta

SEQ ID NO: 3885 - DNA, 20 bp, synthetic construct
  misc_feature 1..20: note = chemically synthesized
  source 1..20: mol_type = other DNA
tgtttccctgctctctccct

SEQ ID NO: 3886 - DNA, 20 bp, synthetic construct
  misc_feature 1..20: note = chemically synthesized
  source 1..20: mol_type = other DNA
gtttccctgctctctccctt

SEQ ID NO: 3887 - DNA, 20 bp, synthetic construct
  misc_feature 1..20: note = chemically synthesized
  source 1..20: mol_type = other DNA
tttccctgctctctcccttg

SEQ ID NO: 3888 - DNA, 20 bp, synthetic construct
  misc_feature 1..20: note = chemically synthesized
  source 1..20: mol_type = other DNA
tctctcccttggggcttgaa

SEQ ID NO: 3889 - DNA, 20 bp, synthetic construct
  misc_feature 1..20: note = chemically synthesized
  source 1..20: mol_type = other DNA
ggcttgaacagtgcaacaca

SEQ ID NO: 3890 - DNA, 20 bp, synthetic construct
  misc_feature 1..20: note = chemically synthesized
  source 1..20: mol_type = other DNA
tgaacagtgcaacacatggc

SEQ ID NO: 3891 - DNA, 20 bp, synthetic construct
  misc_feature 1..20: note = chemically synthesized
  source 1..20: mol_type = other DNA
gaacagtgcaacacatggct

SEQ ID NO: 3892 - DNA, 20 bp, synthetic construct
  misc_feature 1..20: note = chemically synthesized
  source 1..20: mol_type = other DNA
ttattattcaacctctaatg

SEQ ID NO: 3893 - DNA, 20 bp, synthetic construct
  misc_feature 1..20: note = chemically synthesized
  source 1..20: mol_type = other DNA
tctaatgcagtgtgatgttt

SEQ ID NO: 3894 - DNA, 20 bp, synthetic construct
  misc_feature 1..20: note = chemically synthesized
  source 1..20: mol_type = other DNA
agtgtgatgtttaagaatca

SEQ ID NO: 3895 - DNA, 20 bp, synthetic construct
  misc_feature 1..20: note = chemically synthesized
  source 1..20: mol_type = other DNA
gtttaagaatcatagctatg

SEQ ID NO: 3896 - DNA, 20 bp, synthetic construct
  misc_feature 1..20: note = chemically synthesized
  source 1..20: mol_type = other DNA
taagaatcatagctatgaag

SEQ ID NO: 3897 - DNA, 20 bp, synthetic construct
  misc_feature 1..20: note = chemically synthesized
  source 1..20: mol_type = other DNA
agaatcatagctatgaagtg

SEQ ID NO: 3898 - DNA, 20 bp, synthetic construct
  misc_feature 1..20: note = chemically synthesized
  source 1..20: mol_type = other DNA
tagctatgaagtggagacat

SEQ ID NO: 3899 - DNA, 20 bp, synthetic construct
  misc_feature 1..20: note = chemically synthesized
  source 1..20: mol_type = other DNA
agacatgagctctgccacca

SEQ ID NO: 3900 - DNA, 20 bp, synthetic construct
  misc_feature 1..20: note = chemically synthesized
  source 1..20: mol_type = other DNA
tgagctctgccaccaaagcc

SEQ ID NO: 3901 - DNA, 20 bp, synthetic construct
  misc_feature 1..20: note = chemically synthesized
  source 1..20: mol_type = other DNA
gtaccattgaataaatttgc

SEQ ID NO: 3902 - DNA, 20 bp, synthetic construct
  misc_feature 1..20: note = chemically synthesized
  source 1..20: mol_type = other DNA
taccattgaataaatttgcc

SEQ ID NO: 3903 - DNA, 20 bp, synthetic construct
  misc_feature 1..20: note = chemically synthesized
  source 1..20: mol_type = other DNA
cattgaataaatttgccagg

SEQ ID NO: 3904 - DNA, 20 bp, synthetic construct
  misc_feature 1..20: note = chemically synthesized
  source 1..20: mol_type = other DNA
tgaataaatttgccaggaag

SEQ ID NO: 3905 - DNA, 20 bp, synthetic construct
  misc_feature 1..20: note = chemically synthesized
  source 1..20: mol_type = other DNA
gaataaatttgccaggaagc

SEQ ID NO: 3906 - DNA, 20 bp, synthetic construct
  misc_feature 1..20: note = chemically synthesized
  source 1..20: mol_type = other DNA
ttcttgtcatgtgtaaaatg

SEQ ID NO: 3907 - DNA, 20 bp, synthetic construct
  misc_feature 1..20: note = chemically synthesized
  source 1..20: mol_type = other DNA
gtgtaaaatgtggatacacg

SEQ ID NO: 3908 - DNA, 20 bp, synthetic construct
  misc_feature 1..20: note = chemically synthesized
  source 1..20: mol_type = other DNA
acacgtagtaccaaaactca

SEQ ID NO: 3909 - DNA, 20 bp, synthetic construct
  misc_feature 1..20: note = chemically synthesized
  source 1..20: mol_type = other DNA
aaaactcaaagtgctgtgct

SEQ ID NO: 3910 - DNA, 20 bp, synthetic construct
  misc_feature 1..20: note = chemically synthesized
  source 1..20: mol_type = other DNA
aaactcaaagtgctgtgctg

SEQ ID NO: 3911 - DNA, 20 bp, synthetic construct
  misc_feature 1..20: note = chemically synthesized
  source 1..20: mol_type = other DNA
tcaaagtgctgtgctgaggc

SEQ ID NO: 3912 - DNA, 20 bp, synthetic construct
  misc_feature 1..20: note = chemically synthesized
  source 1..20: mol_type = other DNA
tgaggccggcgtgtgaccca

SEQ ID NO: 3913 - DNA, 20 bp, synthetic construct
  misc_feature 1..20: note = chemically synthesized
  source 1..20: mol_type = other DNA
cagaacactgtgctacacta

SEQ ID NO: 3914 - DNA, 20 bp, synthetic construct
  misc_feature 1..20: note = chemically synthesized
  source 1..20: mol_type = other DNA
agaacactgtgctacactac

SEQ ID NO: 3915 - DNA, 20 bp, synthetic construct
  misc_feature 1..20: note = chemically synthesized
  source 1..20: mol_type = other DNA
gaacactgtgctacactaca

SEQ ID NO: 3916 - DNA, 20 bp, synthetic construct
  misc_feature 1..20: note = chemically synthesized
  source 1..20: mol_type = other DNA
gggcaaaatcactgtcaact

SEQ ID NO: 3917 - DNA, 20 bp, synthetic construct
  misc_feature 1..20: note = chemically synthesized
  source 1..20: mol_type = other DNA
aaatcactgtcaactaagat

SEQ ID NO: 3918 - DNA, 20 bp, synthetic construct
  misc_feature 1..20: note = chemically synthesized
  source 1..20: mol_type = other DNA
tcactgtcaactaagattag

SEQ ID NO: 3919 - DNA, 20 bp, synthetic construct
  misc_feature 1..20: note = chemically synthesized
  source 1..20: mol_type = other DNA
ctgtcaactaagattagaag

SEQ ID NO: 3920 - DNA, 20 bp, synthetic construct
  misc_feature 1..20: note = chemically synthesized
  source 1..20: mol_type = other DNA
actaagattagaagcagctg

SEQ ID NO: 3921 - DNA, 20 bp, synthetic construct
  misc_feature 1..20: note = chemically synthesized
  source 1..20: mol_type = other DNA
tgtagtacttgaaataacat

SEQ ID NO: 3922 - DNA, 20 bp, synthetic construct
  misc_feature 1..20: note = chemically synthesized
  source 1..20: mol_type = other DNA
ttgaaataacatcagaaaac

SEQ ID NO: 3923 - DNA, 20 bp, synthetic construct
  misc_feature 1..20: note = chemically synthesized
  source 1..20: mol_type = other DNA
tatgttctttgtaacctgaa

SEQ ID NO: 3924 - DNA, 20 bp, synthetic construct
  misc_feature 1..20: note = chemically synthesized
  source 1..20: mol_type = other DNA
tgttctttgtaacctgaaaa

SEQ ID NO: 3925 - DNA, 20 bp, synthetic construct
  misc_feature 1..20: note = chemically synthesized
  source 1..20: mol_type = other DNA
gagttatataatctgaattc

SEQ ID NO: 3926 - DNA, 20 bp, synthetic construct
  misc_feature 1..20: note = chemically synthesized
  source 1..20: mol_type = other DNA
tctgaattccagttaacttc

SEQ ID NO: 3927 - DNA, 20 bp, synthetic construct
  misc_feature 1..20: note = chemically synthesized
  source 1..20: mol_type = other DNA
tagtaaaataaacgtattat

SEQ ID NO: 3928 - DNA, 20 bp, synthetic construct
  misc_feature 1..20: note = chemically synthesized
  source 1..20: mol_type = other DNA
agctcctacctccctatgcc

SEQ ID NO: 3929 - DNA, 20 bp, synthetic construct
  misc_feature 1..20: note = chemically synthesized
  source 1..20: mol_type = other DNA
atgcctagtgaaaatcaaat

SEQ ID NO: 3930 - DNA, 20 bp, synthetic construct
  misc_feature 1..20: note = chemically synthesized
  source 1..20: mol_type = other DNA
tagtgaaaatcaaataagat

SEQ ID NO: 3931 - DNA, 20 bp, synthetic construct
  misc_feature 1..20: note = chemically synthesized
  source 1..20: mol_type = other DNA
gatcagatatgaatgtaact

SEQ ID NO: 3932 - DNA, 20 bp, synthetic construct
  misc_feature 1..20: note = chemically synthesized
  source 1..20: mol_type = other DNA
cagatatgaatgtaacttag

SEQ ID NO: 3933 - DNA, 20 bp, synthetic construct
  misc_feature 1..20: note = chemically synthesized
  source 1..20: mol_type = other DNA
tatgaatgtaacttagaagt

SEQ ID NO: 3934 - DNA, 20 bp, synthetic construct
  misc_feature 1..20: note = chemically synthesized
  source 1..20: mol_type = other DNA
attgcttacatgttcattat

SEQ ID NO: 3935 - DNA, 20 bp, synthetic construct
  misc_feature 1..20: note = chemically synthesized
  source 1..20: mol_type = other DNA
tgttcattatcagtactttg

SEQ ID NO: 3936 - DNA, 20 bp, synthetic construct
  misc_feature 1..20: note = chemically synthesized
  source 1..20: mol_type = other DNA
ttcattatcagtactttgta

SEQ ID NO: 3937 - DNA, 20 bp, synthetic construct
  misc_feature 1..20: note = chemically synthesized
  source 1..20: mol_type = other DNA
cattatcagtactttgtaga

SEQ ID NO: 3938 - DNA, 20 bp, synthetic construct
  misc_feature 1..20: note = chemically synthesized
  source 1..20: mol_type = other DNA
attatcagtactttgtagag

SEQ ID NO: 3939 - DNA, 20 bp, synthetic construct
  misc_feature 1..20: note = chemically synthesized
  source 1..20: mol_type = other DNA
agagaggcctcttaattaca

SEQ ID NO: 3940 - DNA, 20 bp, synthetic construct
  misc_feature 1..20: note = chemically synthesized
  source 1..20: mol_type = other DNA
cagcacattgcaaatcaata

SEQ ID NO: 3941 - DNA, 20 bp, synthetic construct
  misc_feature 1..20: note = chemically synthesized
  source 1..20: mol_type = other DNA
cattgcaaatcaataaagcc

SEQ ID NO: 3942 - DNA, 20 bp, synthetic construct
  misc_feature 1..20: note = chemically synthesized
  source 1..20: mol_type = other DNA
atcaataaagcctagccgaa

SEQ ID NO: 3943 - DNA, 20 bp, synthetic construct
  misc_feature 1..20: note = chemically synthesized
  source 1..20: mol_type = other DNA
caataaagcctagccgaaaa

SEQ ID NO: 3944 - DNA, 20 bp, synthetic construct
  misc_feature 1..20: note = chemically synthesized
  source 1..20: mol_type = other DNA
tagccgaaaagagaattgtt

SEQ ID NO: 3945 - DNA, 20 bp, synthetic construct
  misc_feature 1..20: note = chemically synthesized
  source 1..20: mol_type = other DNA
ctaacatatacttaattttc

SEQ ID NO: 3946 - DNA, 20 bp, synthetic construct
  misc_feature 1..20: note = chemically synthesized
  source 1..20: mol_type = other DNA
taacatatacttaattttcc

SEQ ID NO: 3947 - DNA, 20 bp, synthetic construct
  misc_feature 1..20: note = chemically synthesized
  source 1..20: mol_type = other DNA
atacttaattttccaggcaa

SEQ ID NO: 3948 - DNA, 20 bp, synthetic construct
  misc_feature 1..20: note = chemically synthesized
  source 1..20: mol_type = other DNA
caggcaaaagaacaattgcc

SEQ ID NO: 3949 - DNA, 20 bp, synthetic construct
  misc_feature 1..20: note = chemically synthesized
  source 1..20: mol_type = other DNA
ggcaaaagaacaattgccaa

SEQ ID NO: 3950 - DNA, 20 bp, synthetic construct
  misc_feature 1..20: note = chemically synthesized
  source 1..20: mol_type = other DNA
aaaagaacaattgccaagag

SEQ ID NO: 3951 - DNA, 20 bp, synthetic construct
  misc_feature 1..20: note = chemically synthesized
  source 1..20: mol_type = other DNA
aaagaacaattgccaagagt

SEQ ID NO: 3952 - DNA, 20 bp, synthetic construct
  misc_feature 1..20: note = chemically synthesized
  source 1..20: mol_type = other DNA
aagaacaattgccaagagtg

SEQ ID NO: 3953 - DNA, 20 bp, synthetic construct
  misc_feature 1..20: note = chemically synthesized
  source 1..20: mol_type = other DNA
acaattgccaagagtgggga

SEQ ID NO: 3954 - DNA, 20 bp, synthetic construct
  misc_feature 1..20: note = chemically synthesized
  source 1..20: mol_type = other DNA
caattgccaagagtggggaa

SEQ ID NO: 3955 - DNA, 20 bp, synthetic construct
  misc_feature 1..20: note = chemically synthesized
  source 1..20: mol_type = other DNA
ccaagagtggggaaaggccc

SEQ ID NO: 3956 - DNA, 20 bp, synthetic construct
  misc_feature 1..20: note = chemically synthesized
  source 1..20: mol_type = other DNA
caagagtggggaaaggcccg

SEQ ID NO: 3957 - DNA, 20 bp, synthetic construct
  misc_feature 1..20: note = chemically synthesized
  source 1..20: mol_type = other DNA
gagtggggaaaggcccgagg

SEQ ID NO: 3958 - DNA, 20 bp, synthetic construct
  misc_feature 1..20: note = chemically synthesized
  source 1..20: mol_type = other DNA
agtggggaaaggcccgaggt

SEQ ID NO: 3959 - DNA, 20 bp, synthetic construct
  misc_feature 1..20: note = chemically synthesized
  source 1..20: mol_type = other DNA
ggcccgaggtaggcctctct

SEQ ID NO: 3960 - DNA, 20 bp, synthetic construct
  misc_feature 1..20: note = chemically synthesized
  source 1..20: mol_type = other DNA
gcccgaggtaggcctctctc

SEQ ID NO: 3961 - DNA, 20 bp, synthetic construct
  misc_feature 1..20: note = chemically synthesized
  source 1..20: mol_type = other DNA
ccgaggtaggcctctctcag

SEQ ID NO: 3962 - DNA, 20 bp, synthetic construct
  misc_feature 1..20: note = chemically synthesized
  source 1..20: mol_type = other DNA
ctctcaggagcctcccaccc

SEQ ID NO: 3963 - DNA, 20 bp, synthetic construct
  misc_feature 1..20: note = chemically synthesized
  source 1..20: mol_type = other DNA
ctcaggagcctcccacccta

SEQ ID NO: 3964 - DNA, 20 bp, synthetic construct
  misc_feature 1..20: note = chemically synthesized
  source 1..20: mol_type = other DNA
caccctagagacctccaccc

SEQ ID NO: 3965 - DNA, 20 bp, synthetic construct
  misc_feature 1..20: note = chemically synthesized
  source 1..20: mol_type = other DNA
accctagagacctccacccc

SEQ ID NO: 3966 - DNA, 20 bp, synthetic construct
  misc_feature 1..20: note = chemically synthesized
  source 1..20: mol_type = other DNA
tccaccccaggtctcaccaa

SEQ ID NO: 3967 - DNA, 20 bp, synthetic construct
  misc_feature 1..20: note = chemically synthesized
  source 1..20: mol_type = other DNA
accccaggtctcaccaaaag

SEQ ID NO: 3968 - DNA, 20 bp, synthetic construct
  misc_feature 1..20: note = chemically synthesized
  source 1..20: mol_type = other DNA
ccccaggtctcaccaaaagt

SEQ ID NO: 3969 - DNA, 20 bp, synthetic construct
  misc_feature 1..20: note = chemically synthesized
  source 1..20: mol_type = other DNA
caggtctcaccaaaagtggg

SEQ ID NO: 3970 - DNA, 20 bp, synthetic construct
  misc_feature 1..20: note = chemically synthesized
  source 1..20: mol_type = other DNA
ctcaccaaaagtgggtggaa

SEQ ID NO: 3971 - DNA, 20 bp, synthetic construct
  misc_feature 1..20: note = chemically synthesized
  source 1..20: mol_type = other DNA
caaaagtgggtggaatggtg

SEQ ID NO: 3972 - DNA, 20 bp, synthetic construct
  misc_feature 1..20: note = chemically synthesized
  source 1..20: mol_type = other DNA
gggtggaatggtgaagaatt

SEQ ID NO: 3973 - DNA, 20 bp, synthetic construct
  misc_feature 1..20: note = chemically synthesized
  source 1..20: mol_type = other DNA
ccgcccaacgcattcgttct

SEQ ID NO: 3974 - DNA, 20 bp, synthetic construct
  misc_feature 1..20: note = chemically synthesized
  source 1..20: mol_type = other DNA
cgcccaacgcattcgttctg

SEQ ID NO: 3975 - DNA, 20 bp, synthetic construct
  misc_feature 1..20: note = chemically synthesized
  source 1..20: mol_type = other DNA
ccaacgcattcgttctgagg

SEQ ID NO: 3976 - DNA, 20 bp, synthetic construct
  misc_feature 1..20: note = chemically synthesized
  source 1..20: mol_type = other DNA
tctgaggtggaaaccccgtg

SEQ ID NO: 3977 - DNA, 20 bp, synthetic construct
  misc_feature 1..20: note = chemically synthesized
  source 1..20: mol_type = other DNA
accccgtgcggatcctgctg

SEQ ID NO: 3978 - DNA, 20 bp, synthetic construct
  misc_feature 1..20: note = chemically synthesized
  source 1..20: mol_type = other DNA
ccccgtgcggatcctgctgt

SEQ ID NO: 3979 - DNA, 20 bp, synthetic construct
  misc_feature 1..20: note = chemically synthesized
  source 1..20: mol_type = other DNA
gatcctgctgtgggtttgct

SEQ ID NO: 3980 - DNA, 20 bp, synthetic construct
  misc_feature 1..20: note = chemically synthesized
  source 1..20: mol_type = other DNA
gtgggtttgctcagccttct

SEQ ID NO: 3981 - DNA, 20 bp, synthetic construct
  misc_feature 1..20: note = chemically synthesized
  source 1..20: mol_type = other DNA
gtttgctcagccttctcggc

SEQ ID NO: 3982 - DNA, 20 bp, synthetic construct
  misc_feature 1..20: note = chemically synthesized
  source 1..20: mol_type = other DNA
cagccttctcggcaagcact

SEQ ID NO: 3983 - DNA, 20 bp, synthetic construct
  misc_feature 1..20: note = chemically synthesized
  source 1..20: mol_type = other DNA
agccttctcggcaagcactc

SEQ ID NO: 3984 - DNA, 20 bp, synthetic construct
  misc_feature 1..20: note = chemically synthesized
  source 1..20: mol_type = other DNA
gccttctcggcaagcactca

SEQ ID NO: 3985 - DNA, 20 bp, synthetic construct
  misc_feature 1..20: note = chemically synthesized
  source 1..20: mol_type = other DNA
ttctcggcaagcactcaggg

SEQ ID NO: 3986 - DNA, 20 bp, synthetic construct
  misc_feature 1..20: note = chemically synthesized
  source 1..20: mol_type = other DNA
tcagggaagaacttcctgtt

SEQ ID NO: 3987 - DNA, 20 bp, synthetic construct
  misc_feature 1..20: note = chemically synthesized
  source 1..20: mol_type = other DNA
agggaagaacttcctgtttg

SEQ ID NO: 3988 - DNA, 20 bp, synthetic construct
  misc_feature 1..20: note = chemically synthesized
  source 1..20: mol_type = other DNA
acttcctgtttggagatgac

SEQ ID NO: 3989 - DNA, 20 bp, synthetic construct
  misc_feature 1..20: note = chemically synthesized
  source 1..20: mol_type = other DNA
cttcctgtttggagatgact

SEQ ID NO: 3990 - DNA, 20 bp, synthetic construct
  misc_feature 1..20: note = chemically synthesized
  source 1..20: mol_type = other DNA
ttcctgtttggagatgactg

SEQ ID NO: 3991 - DNA, 20 bp, synthetic construct
  misc_feature 1..20: note = chemically synthesized
  source 1..20: mol_type = other DNA
tgactggggaaaaaactgca

SEQ ID NO: 3992 - DNA, 20 bp, synthetic construct
  misc_feature 1..20: note = chemically synthesized
  source 1..20: mol_type = other DNA
aaaaactgcacagctgacat

SEQ ID NO: 3993 - DNA, 20 bp, synthetic construct
  misc_feature 1..20: note = chemically synthesized
  source 1..20: mol_type = other DNA
ctgacattggaaataaaccc

SEQ ID NO: 3994 - DNA, 20 bp, synthetic construct
  misc_feature 1..20: note = chemically synthesized
  source 1..20: mol_type = other DNA
ttggaaataaacccgagttc

SEQ ID NO: 3995 - DNA, 20 bp, synthetic construct
  misc_feature 1..20: note = chemically synthesized
  source 1..20: mol_type = other DNA
tggaaataaacccgagttcc

SEQ ID NO: 3996 - DNA, 20 bp, synthetic construct
  misc_feature 1..20: note = chemically synthesized
  source 1..20: mol_type = other DNA
taaacccgagttccaggttc

SEQ ID NO: 3997 - DNA, 20 bp, synthetic construct
  misc_feature 1..20: note = chemically synthesized
  source 1..20: mol_type = other DNA
aaacccgagttccaggttca

SEQ ID NO: 3998 - DNA, 20 bp, synthetic construct
  misc_feature 1..20: note = chemically synthesized
  source 1..20: mol_type = other DNA
acccgagttccaggttcaag

SEQ ID NO: 3999 - DNA, 20 bp, synthetic construct
  misc_feature 1..20: note = chemically synthesized
  source 1..20: mol_type = other DNA
gttccaggttcaaggagccc

SEQ ID NO: 4000 - DNA, 20 bp, synthetic construct
  misc_feature 1..20: note = chemically synthesized
  source 1..20: mol_type = other DNA
ttccaggttcaaggagcccc

SEQ ID NO: 4001 - DNA, 20 bp, synthetic construct
  misc_feature 1..20: note = chemically synthesized
  source 1..20: mol_type = other DNA
ggttcaaggagccccaggct

SEQ ID NO: 4002 - DNA, 20 bp, synthetic construct
  misc_feature 1..20: note = chemically synthesized
  source 1..20: mol_type = other DNA
aaggagccccaggcttagct

SEQ ID NO: 4003 - DNA, 20 bp, synthetic construct
  misc_feature 1..20: note = chemically synthesized
  source 1..20: mol_type = other DNA
ccccaggcttagctcagctc

SEQ ID NO: 4004 - DNA, 20 bp, synthetic construct
  misc_feature 1..20: note = chemically synthesized
  source 1..20: mol_type = other DNA
aggcttagctcagctcaagt

SEQ ID NO: 4005 - DNA, 20 bp, synthetic construct
  misc_feature 1..20: note = chemically synthesized
  source 1..20: mol_type = other DNA
ggcttagctcagctcaagtg

SEQ ID NO: 4006 - DNA, 20 bp, synthetic construct
  misc_feature 1..20: note = chemically synthesized
  source 1..20: mol_type = other DNA
cagctcaagtgaggaactac

SEQ ID NO: 4007 - DNA, 20 bp, synthetic construct
  misc_feature 1..20: note = chemically synthesized
  source 1..20: mol_type = other DNA
gaactacgagatttatttaa

SEQ ID NO: 4008 - DNA, 20 bp, synthetic construct
  misc_feature 1..20: note = chemically synthesized
  source 1..20: mol_type = other DNA
agatttatttaaaagcattc

SEQ ID NO: 4009 - DNA, 20 bp, synthetic construct
  misc_feature 1..20: note = chemically synthesized
  source 1..20: mol_type = other DNA
ttatttaaaagcattctagt

SEQ ID NO: 4010 - DNA, 20 bp, synthetic construct
  misc_feature 1..20: note = chemically synthesized
  source 1..20: mol_type = other DNA
tatttaaaagcattctagtt

SEQ ID NO: 4011 - DNA, 20 bp, synthetic construct
  misc_feature 1..20: note = chemically synthesized
  source 1..20: mol_type = other DNA
atttaaaagcattctagttg

SEQ ID NO: 4012 - DNA, 20 bp, synthetic construct
  misc_feature 1..20: note = chemically synthesized
  source 1..20: mol_type = other DNA
tttaaaagcattctagttgg

SEQ ID NO: 4013 - DNA, 20 bp, synthetic construct
  misc_feature 1..20: note = chemically synthesized
  source 1..20: mol_type = other DNA
aaaagcattctagttggggg

SEQ ID NO: 4014 - DNA, 20 bp, synthetic construct
  misc_feature 1..20: note = chemically synthesized
  source 1..20: mol_type = other DNA
aaagcattctagttggggga

SEQ ID NO: 4015 - DNA, 20 bp, synthetic construct
  misc_feature 1..20: note = chemically synthesized
  source 1..20: mol_type = other DNA
aagcattctagttgggggaa

SEQ ID NO: 4016 - DNA, 20 bp, synthetic construct
  misc_feature 1..20: note = chemically synthesized
  source 1..20: mol_type = other DNA
gcattctagttgggggaagg

SEQ ID NO: 4017 - DNA, 20 bp, synthetic construct
  misc_feature 1..20: note = chemically synthesized
  source 1..20: mol_type = other DNA
ttctagttgggggaagggag

SEQ ID NO: 4018 - DNA, 20 bp, synthetic construct
  misc_feature 1..20: note = chemically synthesized
  source 1..20: mol_type = other DNA
tctagttgggggaagggagt

SEQ ID NO: 4019 - DNA, 20 bp, synthetic construct
  misc_feature 1..20: note = chemically synthesized
  source 1..20: mol_type = other DNA
agttgggggaagggagtggg

SEQ ID NO: 4020 - DNA, 20 bp, synthetic construct
  misc_feature 1..20: note = chemically synthesized
  source 1..20: mol_type = other DNA
aagggagtgggcggttccaa

SEQ ID NO: 4021 - DNA, 20 bp, synthetic construct
  misc_feature 1..20: note = chemically synthesized
  source 1..20: mol_type = other DNA
cggttccaaaagtcactccg

SEQ ID NO: 4022 - DNA, 20 bp, synthetic construct
  misc_feature 1..20: note = chemically synthesized
  source 1..20: mol_type = other DNA
gttccaaaagtcactccgca

SEQ ID NO: 4023 - DNA, 20 bp, synthetic construct
  misc_feature 1..20: note = chemically synthesized
  source 1..20: mol_type = other DNA
caaaagtcactccgcagagc

SEQ ID NO: 4024 - DNA, 20 bp, synthetic construct
  misc_feature 1..20: note = chemically synthesized
  source 1..20: mol_type = other DNA
aaaagtcactccgcagagcc

SEQ ID NO: 4025 - DNA, 20 bp, synthetic construct
  misc_feature 1..20: note = chemically synthesized
  source 1..20: mol_type = other DNA
gtcactccgcagagccggga

SEQ ID NO: 4026 - DNA, 20 bp, synthetic construct
  misc_feature 1..20: note = chemically synthesized
  source 1..20: mol_type = other DNA
ctccgcagagccgggacagc

SEQ ID NO: 4027 - DNA, 20 bp, synthetic construct
  misc_feature 1..20: note = chemically synthesized
  source 1..20: mol_type = other DNA
tccgcagagccgggacagcc

SEQ ID NO: 4028 - DNA, 20 bp, synthetic construct
  misc_feature 1..20: note = chemically synthesized
  source 1..20: mol_type = other DNA
ccgcagagccgggacagccg

SEQ ID NO: 4029 - DNA, 20 bp, synthetic construct
  misc_feature 1..20: note = chemically synthesized
  source 1..20: mol_type = other DNA
cgcagagccgggacagccgg

SEQ ID NO: 4030 - DNA, 20 bp, synthetic construct
  misc_feature 1..20: note = chemically synthesized
  source 1..20: mol_type = other DNA
cagagccgggacagccgggg

SEQ ID NO: 4031 - DNA, 20 bp, synthetic construct
  misc_feature 1..20: note = chemically synthesized
  source 1..20: mol_type = other DNA
agagccgggacagccggggg

SEQ ID NO: 4032 - DNA, 20 bp, synthetic construct
  misc_feature 1..20: note = chemically synthesized
  source 1..20: mol_type = other DNA
gagccgggacagccggggga

SEQ ID NO: 4033 - DNA, 20 bp, synthetic construct
  misc_feature 1..20: note = chemically synthesized
  source 1..20: mol_type = other DNA
agccgggacagccgggggag

SEQ ID NO: 4034 - DNA, 20 bp, synthetic construct
  misc_feature 1..20: note = chemically synthesized
  source 1..20: mol_type = other DNA
gccgggacagccgggggagg

SEQ ID NO: 4035 - DNA, 20 bp, synthetic construct
  misc_feature 1..20: note = chemically synthesized
  source 1..20: mol_type = other DNA
gggacagccgggggaggggg

SEQ ID NO: 4036 - DNA, 20 bp, synthetic construct
  misc_feature 1..20: note = chemically synthesized
  source 1..20: mol_type = other DNA
ggacagccgggggagggggc

SEQ ID NO: 4037 - DNA, 20 bp, synthetic construct
  misc_feature 1..20: note = chemically synthesized
  source 1..20: mol_type = other DNA
ccgggggagggggcaggtcc

SEQ ID NO: 4038 - DNA, 20 bp, synthetic construct
  misc_feature 1..20: note = chemically synthesized
  source 1..20: mol_type = other DNA
cgggggagggggcaggtcct

SEQ ID NO: 4039 - DNA, 20 bp, synthetic construct
  misc_feature 1..20: note = chemically synthesized
  source 1..20: mol_type = other DNA
gggggagggggcaggtcctg

SEQ ID NO: 4040 - DNA, 20 bp, synthetic construct
  misc_feature 1..20: note = chemically synthesized
  source 1..20: mol_type = other DNA
gagggggcaggtcctggggc

SEQ ID NO: 4041 - DNA, 20 bp, synthetic construct
  misc_feature 1..20: note = chemically synthesized
  source 1..20: mol_type = other DNA
agggggcaggtcctggggcg

SEQ ID NO: 4042 - DNA, 20 bp, synthetic construct
  misc_feature 1..20: note = chemically synthesized
  source 1..20: mol_type = other DNA
gggggcaggtcctggggcga

SEQ ID NO: 4043 - DNA, 20 bp, synthetic construct
  misc_feature 1..20: note = chemically synthesized
  source 1..20: mol_type = other DNA
gggcgagggacccctatctg

SEQ ID NO: 4044 - DNA, 20 bp, synthetic construct
  misc_feature 1..20: note = chemically synthesized
  source 1..20: mol_type = other DNA
agggacccctatctgcagtt

SEQ ID NO: 4045 - DNA, 20 bp, synthetic construct
  misc_feature 1..20: note = chemically synthesized
  source 1..20: mol_type = other DNA
gacccctatctgcagttcag

SEQ ID NO: 4046 - DNA, 20 bp, synthetic construct
  misc_feature 1..20: note = chemically synthesized
  source 1..20: mol_type = other DNA
ccctatctgcagttcagtgg

SEQ ID NO: 4047 - DNA, 20 bp, synthetic construct
  misc_feature 1..20: note = chemically synthesized
  source 1..20: mol_type = other DNA
cctatctgcagttcagtggt

SEQ ID NO: 4048 - DNA, 20 bp, synthetic construct
  misc_feature 1..20: note = chemically synthesized
  source 1..20: mol_type = other DNA
cagtggtaggcactccctca

SEQ ID NO: 4049 - DNA, 20 bp, synthetic construct
  misc_feature 1..20: note = chemically synthesized
  source 1..20: mol_type = other DNA
agtggtaggcactccctcac

SEQ ID NO: 4050 - DNA, 20 bp, synthetic construct
  misc_feature 1..20: note = chemically synthesized
  source 1..20: mol_type = other DNA
gtggtaggcactccctcacg

SEQ ID NO: 4051 - DNA, 20 bp, synthetic construct
  misc_feature 1..20: note = chemically synthesized
  source 1..20: mol_type = other DNA
aggcactccctcacggggtc

SEQ ID NO: 4052 - DNA, 20 bp, synthetic construct
  misc_feature 1..20: note = chemically synthesized
  source 1..20: mol_type = other DNA
tccctcacggggtctggacg

SEQ ID NO: 4053 - DNA, 20 bp, synthetic construct
  misc_feature 1..20: note = chemically synthesized
  source 1..20: mol_type = other DNA
tcacggggtctggacgcaga

SEQ ID NO: 4054 - DNA, 20 bp, synthetic construct
  misc_feature 1..20: note = chemically synthesized
  source 1..20: mol_type = other DNA
cggggtctggacgcagaaag

SEQ ID NO: 4055 - DNA, 20 bp, synthetic construct
  misc_feature 1..20: note = chemically synthesized
  source 1..20: mol_type = other DNA
ggggtctggacgcagaaagt

SEQ ID NO: 4056 - DNA, 20 bp, synthetic construct
  misc_feature 1..20: note = chemically synthesized
  source 1..20: mol_type = other DNA
gggtctggacgcagaaagta

SEQ ID NO: 4057 - DNA, 20 bp, synthetic construct
  misc_feature 1..20: note = chemically synthesized
  source 1..20: mol_type = other DNA
gtctggacgcagaaagtagg

SEQ ID NO: 4058 - DNA, 20 bp, synthetic construct
  misc_feature 1..20: note = chemically synthesized
  source 1..20: mol_type = other DNA
ctggacgcagaaagtaggga

SEQ ID NO: 4059 - DNA, 20 bp, synthetic construct
  misc_feature 1..20: note = chemically synthesized
  source 1..20: mol_type = other DNA
tggacgcagaaagtagggag

SEQ ID NO: 4060 - DNA, 20 bp, synthetic construct
  misc_feature 1..20: note = chemically synthesized
  source 1..20: mol_type = other DNA
ggacgcagaaagtagggaga

SEQ ID NO: 4061 - DNA, 20 bp, synthetic construct
  misc_feature 1..20: note = chemically synthesized
  source 1..20: mol_type = other DNA
gacgcagaaagtagggagag

SEQ ID NO: 4062 - DNA, 20 bp, synthetic construct
  misc_feature 1..20: note = chemically synthesized
  source 1..20: mol_type = other DNA
aaagtagggagaggggcttg

SEQ ID NO: 4063 - DNA, 20 bp, synthetic construct
  misc_feature 1..20: note = chemically synthesized
  source 1..20: mol_type = other DNA
tagggagaggggcttgcgga

SEQ ID NO: 4064 - DNA, 20 bp, synthetic construct
  misc_feature 1..20: note = chemically synthesized
  source 1..20: mol_type = other DNA
agggagaggggcttgcggat

SEQ ID NO: 4065 - DNA, 20 bp, synthetic construct
  misc_feature 1..20: note = chemically synthesized
  source 1..20: mol_type = other DNA
gggagaggggcttgcggata

SEQ ID NO: 4066 - DNA, 20 bp, synthetic construct
  misc_feature 1..20: note = chemically synthesized
  source 1..20: mol_type = other DNA
aggggcttgcggatagggtt

SEQ ID NO: 4067 - DNA, 20 bp, synthetic construct
  misc_feature 1..20: note = chemically synthesized
  source 1..20: mol_type = other DNA
ggcttgcggatagggttgag

SEQ ID NO: 4068 - DNA, 20 bp, synthetic construct
  misc_feature 1..20: note = chemically synthesized
  source 1..20: mol_type = other DNA
gcttgcggatagggttgagc

SEQ ID NO: 4069 - DNA, 20 bp, synthetic construct
  misc_feature 1..20: note = chemically synthesized
  source 1..20: mol_type = other DNA
agggttgagcaggtcctcca

SEQ ID NO: 4070 - DNA, 20 bp, synthetic construct
  misc_feature 1..20: note = chemically synthesized
  source 1..20: mol_type = other DNA
ttgagcaggtcctccaaagt

SEQ ID NO: 4071 - DNA, 20 bp, synthetic construct
  misc_feature 1..20: note = chemically synthesized
  source 1..20: mol_type = other DNA
tccaaagttagcaaactccc

SEQ ID NO: 4072 - DNA, 20 bp, synthetic construct
  misc_feature 1..20: note = chemically synthesized
  source 1..20: mol_type = other DNA
ttagcaaactcccaagcgca

SEQ ID NO: 4073 - DNA, 20 bp, synthetic construct
  misc_feature 1..20: note = chemically synthesized
  source 1..20: mol_type = other DNA
aactcccaagcgcaaagaaa

SEQ ID NO: 4074 - DNA, 20 bp, synthetic construct
  misc_feature 1..20: note = chemically synthesized
  source 1..20: mol_type = other DNA
cccaagcgcaaagaaaaagc

SEQ ID NO: 4075 - DNA, 20 bp, synthetic construct
  misc_feature 1..20: note = chemically synthesized
  source 1..20: mol_type = other DNA
ttccacccccgccgcgcccc

SEQ ID NO: 4076 - DNA, 20 bp, synthetic construct
  misc_feature 1..20: note = chemically synthesized
  source 1..20: mol_type = other DNA
ccgcgcccctagttcgcccg

SEQ ID NO: 4077 - DNA, 20 bp, synthetic construct
  misc_feature 1..20: note = chemically synthesized
  source 1..20: mol_type = other DNA
cctagttcgcccgcagccct

SEQ ID NO: 4078 - DNA, 20 bp, synthetic construct
  misc_feature 1..20: note = chemically synthesized
  source 1..20: mol_type = other DNA
ccgcagccctcggactcacg

SEQ ID NO: 4079 - DNA, 20 bp, synthetic construct
  misc_feature 1..20: note = chemically synthesized
  source 1..20: mol_type = other DNA
agccctcggactcacgcagc

SEQ ID NO: 4080 - DNA, 20 bp, synthetic construct
  misc_feature 1..20: note = chemically synthesized
  source 1..20: mol_type = other DNA
tcacgcagcaagcgcccctg

SEQ ID NO: 4081 - DNA, 20 bp, synthetic construct
  misc_feature 1..20: note = chemically synthesized
  source 1..20: mol_type = other DNA
cacgcagcaagcgcccctgc

SEQ ID NO: 4082 - DNA, 20 bp, synthetic construct
  misc_feature 1..20: note = chemically synthesized
  source 1..20: mol_type = other DNA
caagcgcccctgcaggaccg

SEQ ID NO: 4083 - DNA, 20 bp, synthetic construct
  misc_feature 1..20: note = chemically synthesized
  source 1..20: mol_type = other DNA
tgcaggaccgcggtctgcaa

SEQ ID NO: 4084 - DNA, 20 bp, synthetic construct
  misc_feature 1..20: note = chemically synthesized
  source 1..20: mol_type = other DNA
accgcggtctgcaaaagcat

SEQ ID NO: 4085 - DNA, 20 bp, synthetic construct
  misc_feature 1..20: note = chemically synthesized
  source 1..20: mol_type = other DNA
ccgcggtctgcaaaagcatc

SEQ ID NO: 4086 - DNA, 20 bp, synthetic construct
  misc_feature 1..20: note = chemically synthesized
  source 1..20: mol_type = other DNA
gcggtctgcaaaagcatcag

SEQ ID NO: 4087 - DNA, 20 bp, synthetic construct
  misc_feature 1..20: note = chemically synthesized
  source 1..20: mol_type = other DNA
cggtctgcaaaagcatcagg

SEQ ID NO: 4088 - DNA, 20 bp, synthetic construct
  misc_feature 1..20: note = chemically synthesized
  source 1..20: mol_type = other DNA
gtctgcaaaagcatcaggag

SEQ ID NO: 4089 - DNA, 20 bp, synthetic construct
  misc_feature 1..20: note = chemically synthesized
  source 1..20: mol_type = other DNA
tgcaaaagcatcaggaggag

SEQ ID NO: 4090 - DNA, 20 bp, synthetic construct
  misc_feature 1..20: note = chemically synthesized
  source 1..20: mol_type = other DNA
agcatcaggaggagaagcgc

SEQ ID NO: 4091 - DNA, 20 bp, synthetic construct
  misc_feature 1..20: note = chemically synthesized
  source 1..20: mol_type = other DNA
caggaggagaagcgccggcc

SEQ ID NO: 4092 - DNA, 20 bp, synthetic construct
  misc_feature 1..20: note = chemically synthesized
  source 1..20: mol_type = other DNA
agaagcgccggcctggctcg

SEQ ID NO: 4093 - DNA, 20 bp, synthetic construct
  misc_feature 1..20: note = chemically synthesized
  source 1..20: mol_type = other DNA
gaagcgccggcctggctcgc

SEQ ID NO: 4094 - DNA, 20 bp, synthetic construct
  misc_feature 1..20: note = chemically synthesized
  source 1..20: mol_type = other DNA
ggctcgcgggcccatttccc

SEQ ID NO: 4095 - DNA, 20 bp, synthetic construct
  misc_feature 1..20: note = chemically synthesized
  source 1..20: mol_type = other DNA
cgggcccatttccccagctc

SEQ ID NO: 4096 - DNA, 20 bp, synthetic construct
  misc_feature 1..20: note = chemically synthesized
  source 1..20: mol_type = other DNA
cgttaaatctccgcttcttt

SEQ ID NO: 4097 - DNA, 20 bp, synthetic construct
  misc_feature 1..20: note = chemically synthesized
  source 1..20: mol_type = other DNA
gttaaatctccgcttctttt

SEQ ID NO: 4098 - DNA, 20 bp, synthetic construct
  misc_feature 1..20: note = chemically synthesized
  source 1..20: mol_type = other DNA
ttaaatctccgcttcttttg

SEQ ID NO: 4099 - DNA, 20 bp, synthetic construct
  misc_feature 1..20: note = chemically synthesized
  source 1..20: mol_type = other DNA
taaatctccgcttcttttgg

SEQ ID NO: 4100 - DNA, 20 bp, synthetic construct
  misc_feature 1..20: note = chemically synthesized
  source 1..20: mol_type = other DNA
aaatctccgcttcttttggg

SEQ ID NO: 4101 - DNA, 20 bp, synthetic construct
  misc_feature 1..20: note = chemically synthesized
  source 1..20: mol_type = other DNA
tctccgcttcttttgggggg

SEQ ID NO: 4102 - DNA, 20 bp, synthetic construct
  misc_feature 1..20: note = chemically synthesized
  source 1..20: mol_type = other DNA
ctccgcttcttttggggggc

SEQ ID NO: 4103 - DNA, 20 bp, synthetic construct
  misc_feature 1..20: note = chemically synthesized
  source 1..20: mol_type = other DNA
tccgcttcttttggggggcg

SEQ ID NO: 4104 - DNA, 20 bp, synthetic construct
  misc_feature 1..20: note = chemically synthesized
  source 1..20: mol_type = other DNA
tcttttggggggcggggaaa

SEQ ID NO: 4105 - DNA, 20 bp, synthetic construct
  misc_feature 1..20: note = chemically synthesized
  source 1..20: mol_type = other DNA
cttttggggggcggggaaac

SEQ ID NO: 4106 - DNA, 20 bp, synthetic construct
  misc_feature 1..20: note = chemically synthesized
  source 1..20: mol_type = other DNA
ttttggggggcggggaaacg

SEQ ID NO: 4107 - DNA, 20 bp, synthetic construct
  misc_feature 1..20: note = chemically synthesized
  source 1..20: mol_type = other DNA
ggggggcggggaaacgggga

SEQ ID NO: 4108 - DNA, 20 bp, synthetic construct
  misc_feature 1..20: note = chemically synthesized
  source 1..20: mol_type = other DNA
cggggaaacggggatggctc

SEQ ID NO: 4109 - DNA, 20 bp, synthetic construct
  misc_feature 1..20: note = chemically synthesized
  source 1..20: mol_type = other DNA
ggaaacggggatggctccag

SEQ ID NO: 4110 - DNA, 20 bp, synthetic construct
  misc_feature 1..20: note = chemically synthesized
  source 1..20: mol_type = other DNA
tggctccagaagtcacccta

SEQ ID NO: 4111 - DNA, 20 bp, synthetic construct
  misc_feature 1..20: note = chemically synthesized
  source 1..20: mol_type = other DNA
gtcaccctacagctattgcc

SEQ ID NO: 4112 - DNA, 20 bp, synthetic construct
  misc_feature 1..20: note = chemically synthesized
  source 1..20: mol_type = other DNA
tcaccctacagctattgcct

SEQ ID NO: 4113 - DNA, 20 bp, synthetic construct
  misc_feature 1..20: note = chemically synthesized
  source 1..20: mol_type = other DNA
ctacagctattgcctaggct

SEQ ID NO: 4114 - DNA, 20 bp, synthetic construct
  misc_feature 1..20: note = chemically synthesized
  source 1..20: mol_type = other DNA
tacagctattgcctaggctc

SEQ ID NO: 4115 - DNA, 20 bp, synthetic construct
  misc_feature 1..20: note = chemically synthesized
  source 1..20: mol_type = other DNA
cagctattgcctaggctcag

SEQ ID NO: 4116 - DNA, 20 bp, synthetic construct
  misc_feature 1..20: note = chemically synthesized
  source 1..20: mol_type = other DNA
gcctaggctcaggagatgcc

SEQ ID NO: 4117 - DNA, 20 bp, synthetic construct
  misc_feature 1..20: note = chemically synthesized
  source 1..20: mol_type = other DNA
agatgcccagtaaaacttcc

SEQ ID NO: 4118 - DNA, 20 bp, synthetic construct
  misc_feature 1..20: note = chemically synthesized
  source 1..20: mol_type = other DNA
cagtaaaacttcctggtgaa

SEQ ID NO: 4119 - DNA, 20 bp, synthetic construct
  misc_feature 1..20: note = chemically synthesized
  source 1..20: mol_type = other DNA
aacttcctggtgaaaagcaa

SEQ ID NO: 4120 - DNA, 20 bp, synthetic construct
  misc_feature 1..20: note = chemically synthesized
  source 1..20: mol_type = other DNA
acttcctggtgaaaagcaac

SEQ ID NO: 4121 - DNA, 20 bp, synthetic construct
  misc_feature 1..20: note = chemically synthesized
  source 1..20: mol_type = other DNA
gtgaaaagcaacaggtcttt

SEQ ID NO: 4122 - DNA, 20 bp, synthetic construct
  misc_feature 1..20: note = chemically synthesized
  source 1..20: mol_type = other DNA
caacaggtctttcagaactt

SEQ ID NO: 4123 - DNA, 20 bp, synthetic construct
  misc_feature 1..20: note = chemically synthesized
  source 1..20: mol_type = other DNA
ctttagttctctctctccta

SEQ ID NO: 4124 - DNA, 20 bp, synthetic construct
  misc_feature 1..20: note = chemically synthesized
  source 1..20: mol_type = other DNA
tagttctctctctcctacag

SEQ ID NO: 4125 - DNA, 20 bp, synthetic construct
  misc_feature 1..20: note = chemically synthesized
  source 1..20: mol_type = other DNA
ttctctctctcctacagcag

SEQ ID NO: 4126 - DNA, 20 bp, synthetic construct
  misc_feature 1..20: note = chemically synthesized
  source 1..20: mol_type = other DNA
tctctctctcctacagcaga

SEQ ID NO: 4127 - DNA, 20 bp, synthetic construct
  misc_feature 1..20: note = chemically synthesized
  source 1..20: mol_type = other DNA
ggtacctgcttgtgaaacac

SEQ ID NO: 4128 - DNA, 20 bp, synthetic construct
  misc_feature 1..20: note = chemically synthesized
  source 1..20: mol_type = other DNA
gtacctgcttgtgaaacact

SEQ ID NO: 4129 - DNA, 20 bp, synthetic construct
  misc_feature 1..20: note = chemically synthesized
  source 1..20: mol_type = other DNA
ttgtgaaacactaggtgatc

SEQ ID NO: 4130 - DNA, 20 bp, synthetic construct
  misc_feature 1..20: note = chemically synthesized
  source 1..20: mol_type = other DNA
aggtgatccagtgtccccct

SEQ ID NO: 4131 - DNA, 20 bp, synthetic construct
  misc_feature 1..20: note = chemically synthesized
  source 1..20: mol_type = other DNA
cccttggtttttaaatcctg

SEQ ID NO: 4132 - DNA, 20 bp, synthetic construct
  misc_feature 1..20: note = chemically synthesized
  source 1..20: mol_type = other DNA
ccttggtttttaaatcctga

SEQ ID NO: 4133 - DNA, 20 bp, synthetic construct
  misc_feature 1..20: note = chemically synthesized
  source 1..20: mol_type = other DNA
cttggtttttaaatcctgaa

SEQ ID NO: 4134 - DNA, 20 bp, synthetic construct
  misc_feature 1..20: note = chemically synthesized
  source 1..20: mol_type = other DNA
ttggtttttaaatcctgaag

SEQ ID NO: 4135 - DNA, 20 bp, synthetic construct
  misc_feature 1..20: note = chemically synthesized
  source 1..20: mol_type = other DNA
cctgaaggggtgttgttgat

SEQ ID NO: 4136 - DNA, 20 bp, synthetic construct
  misc_feature 1..20: note = chemically synthesized
  source 1..20: mol_type = other DNA
ctgaaggggtgttgttgatt

SEQ ID NO: 4137 - DNA, 20 bp, synthetic construct
  misc_feature 1..20: note = chemically synthesized
  source 1..20: mol_type = other DNA
tgaaggggtgttgttgattg

SEQ ID NO: 4138 - DNA, 20 bp, synthetic construct
  misc_feature 1..20: note = chemically synthesized
  source 1..20: mol_type = other DNA
ggggtgttgttgattgggga

SEQ ID NO: 4139 - DNA, 20 bp, synthetic construct
  misc_feature 1..20: note = chemically synthesized
  source 1..20: mol_type = other DNA
gtgttgttgattggggaaag

SEQ ID NO: 4140 - DNA, 20 bp, synthetic construct
  misc_feature 1..20: note = chemically synthesized
  source 1..20: mol_type = other DNA
caatgttctgatctgaactt

SEQ ID NO: 4141 - DNA, 20 bp, synthetic construct
  misc_feature 1..20: note = chemically synthesized
  source 1..20: mol_type = other DNA
taaaaattttatctcaacct

SEQ ID NO: 4142 - DNA, 20 bp, synthetic construct
  misc_feature 1..20: note = chemically synthesized
  source 1..20: mol_type = other DNA
aacttatgtcttatttgact

SEQ ID NO: 4143 - DNA, 20 bp, synthetic construct
  misc_feature 1..20: note = chemically synthesized
  source 1..20: mol_type = other DNA
ttatttgacttagaaatata

SEQ ID NO: 4144 - DNA, 20 bp, synthetic construct
  misc_feature 1..20: note = chemically synthesized
  source 1..20: mol_type = other DNA
ttttttgattcaaattaatt

SEQ ID NO: 4145 - DNA, 20 bp, synthetic construct
  misc_feature 1..20: note = chemically synthesized
  source 1..20: mol_type = other DNA
aagtcataacattaaccaat

SEQ ID NO: 4146 - DNA, 20 bp, synthetic construct
  misc_feature 1..20: note = chemically synthesized
  source 1..20: mol_type = other DNA
tcctactgaaacaccttcca

SEQ ID NO: 4147 - DNA, 20 bp, synthetic construct
  misc_feature 1..20: note = chemically synthesized
  source 1..20: mol_type = other DNA
tcataattgaattatctgac

SEQ ID NO: 4148 - DNA, 20 bp, synthetic construct
  misc_feature 1..20: note = chemically synthesized
  source 1..20: mol_type = other DNA
caagtgtttcacaaacttta

SEQ ID NO: 4149 - DNA, 20 bp, synthetic construct
  misc_feature 1..20: note = chemically synthesized
  source 1..20: mol_type = other DNA
tttcacaaactttacagtat

SEQ ID NO: 4150 - DNA, 20 bp, synthetic construct
  misc_feature 1..20: note = chemically synthesized
  source 1..20: mol_type = other DNA
ttcacaaactttacagtatt

SEQ ID NO: 4151 - DNA, 20 bp, synthetic construct
  misc_feature 1..20: note = chemically synthesized
  source 1..20: mol_type = other DNA
tttacagtattgggattatc

SEQ ID NO: 4152 - DNA, 20 bp, synthetic construct
  misc_feature 1..20: note = chemically synthesized
  source 1..20: mol_type = other DNA
tacagtattgggattatctg

SEQ ID NO: 4153 - DNA, 20 bp, synthetic construct
  misc_feature 1..20: note = chemically synthesized
  source 1..20: mol_type = other DNA
ggagaatgattaaacatatt

SEQ ID NO: 4154 - DNA, 20 bp, synthetic construct
  misc_feature 1..20: note = chemically synthesized
  source 1..20: mol_type = other DNA
gagaatgattaaacatattg

SEQ ID NO: 4155 - DNA, 20 bp, synthetic construct
  misc_feature 1..20: note = chemically synthesized
  source 1..20: mol_type = other DNA
ttgaggcctgctcctaaccc

SEQ ID NO: 4156 - DNA, 20 bp, synthetic construct
  misc_feature 1..20: note = chemically synthesized
  source 1..20: mol_type = other DNA
ccccagacacactgatttaa

SEQ ID NO: 4157 - DNA, 20 bp, synthetic construct
  misc_feature 1..20: note = chemically synthesized
  source 1..20: mol_type = other DNA
cccagacacactgatttaat

SEQ ID NO: 4158 - DNA, 20 bp, synthetic construct
  misc_feature 1..20: note = chemically synthesized
  source 1..20: mol_type = other DNA
ctgatttaatgggtaattgt

SEQ ID NO: 4159 - DNA, 20 bp, synthetic construct
  misc_feature 1..20: note = chemically synthesized
  source 1..20: mol_type = other DNA
tgatttaatgggtaattgtt

SEQ ID NO: 4160 - DNA, 20 bp, synthetic construct
  misc_feature 1..20: note = chemically synthesized
  source 1..20: mol_type = other DNA
tttaatgggtaattgttagg

SEQ ID NO: 4161 - DNA, 20 bp, synthetic construct
  misc_feature 1..20: note = chemically synthesized
  source 1..20: mol_type = other DNA
atgggtaattgttaggtagt

SEQ ID NO: 4162 - DNA, 20 bp, synthetic construct
  misc_feature 1..20: note = chemically synthesized
  source 1..20: mol_type = other DNA
attgttaggtagttagacat

SEQ ID NO: 4163 - DNA, 20 bp, synthetic construct
  misc_feature 1..20: note = chemically synthesized
  source 1..20: mol_type = other DNA
gttaggtagttagacattag

SEQ ID NO: 4164 - DNA, 20 bp, synthetic construct
  misc_feature 1..20: note = chemically synthesized
  source 1..20: mol_type = other DNA
ggtagttagacattagcagt

SEQ ID NO: 4165 - DNA, 20 bp, synthetic construct
  misc_feature 1..20: note = chemically synthesized
  source 1..20: mol_type = other DNA
gtagttagacattagcagtt

SEQ ID NO: 4166 - DNA, 20 bp, synthetic construct
  misc_feature 1..20: note = chemically synthesized
  source 1..20: mol_type = other DNA
agttagacattagcagttgg

SEQ ID NO: 4167 - DNA, 20 bp, synthetic construct
  misc_feature 1..20: note = chemically synthesized
  source 1..20: mol_type = other DNA
gttagacattagcagttggg

SEQ ID NO: 4168 - DNA, 20 bp, synthetic construct
  misc_feature 1..20: note = chemically synthesized
  source 1..20: mol_type = other DNA
ttagacattagcagttggga

SEQ ID NO: 4169 - DNA, 20 bp, synthetic construct
  misc_feature 1..20: note = chemically synthesized
  source 1..20: mol_type = other DNA
tagacattagcagttgggag

SEQ ID NO: 4170 - DNA, 20 bp, synthetic construct
  misc_feature 1..20: note = chemically synthesized
  source 1..20: mol_type = other DNA
tagcagttgggaggggatga

SEQ ID NO: 4171 - DNA, 20 bp, synthetic construct
  misc_feature 1..20: note = chemically synthesized
  source 1..20: mol_type = other DNA
cagttgggaggggatgacag

SEQ ID NO: 4172 - DNA, 20 bp, synthetic construct
  misc_feature 1..20: note = chemically synthesized
  source 1..20: mol_type = other DNA
gttgggaggggatgacagaa

SEQ ID NO: 4173 - DNA, 20 bp, synthetic construct
  misc_feature 1..20: note = chemically synthesized
  source 1..20: mol_type = other DNA
tgggaggggatgacagaaga

SEQ ID NO: 4174 - DNA, 20 bp, synthetic construct
  misc_feature 1..20: note = chemically synthesized
  source 1..20: mol_type = other DNA
gaggggatgacagaagagag

SEQ ID NO: 4175 - DNA, 20 bp, synthetic construct
  misc_feature 1..20: note = chemically synthesized
  source 1..20: mol_type = other DNA
ggatgacagaagagagcgga

SEQ ID NO: 4176 - DNA, 20 bp, synthetic construct
  misc_feature 1..20: note = chemically synthesized
  source 1..20: mol_type = other DNA
gatgacagaagagagcggaa

SEQ ID NO: 4177 - DNA, 20 bp, synthetic construct
  misc_feature 1..20: note = chemically synthesized
  source 1..20: mol_type = other DNA
agagcggaaaggctgtcact

SEQ ID NO: 4178 - DNA, 20 bp, synthetic construct
  misc_feature 1..20: note = chemically synthesized
  source 1..20: mol_type = other DNA
cggaaaggctgtcactaaga

SEQ ID NO: 4179 - DNA, 20 bp, synthetic construct
  misc_feature 1..20: note = chemically synthesized
  source 1..20: mol_type = other DNA
gctgtcactaagacagccac

SEQ ID NO: 4180 - DNA, 20 bp, synthetic construct
  misc_feature 1..20: note = chemically synthesized
  source 1..20: mol_type = other DNA
gccactggcccacctaaatt

SEQ ID NO: 4181 - DNA, 20 bp, synthetic construct
  misc_feature 1..20: note = chemically synthesized
  source 1..20: mol_type = other DNA
ccactggcccacctaaattc

SEQ ID NO: 4182 - DNA, 20 bp, synthetic construct
  misc_feature 1..20: note = chemically synthesized
  source 1..20: mol_type = other DNA
gcccacctaaattcaggccc

SEQ ID NO: 4183 - DNA, 20 bp, synthetic construct
  misc_feature 1..20: note = chemically synthesized
  source 1..20: mol_type = other DNA
gactaccctaatgccaccct

SEQ ID NO: 4184 - DNA, 20 bp, synthetic construct
  misc_feature 1..20: note = chemically synthesized
  source 1..20: mol_type = other DNA
actaccctaatgccacccta

SEQ ID NO: 4185 - DNA, 20 bp, synthetic construct
  misc_feature 1..20: note = chemically synthesized
  source 1..20: mol_type = other DNA
ctaccctaatgccaccctaa

SEQ ID NO: 4186 - DNA, 20 bp, synthetic construct
  misc_feature 1..20: note = chemically synthesized
  source 1..20: mol_type = other DNA
cctaatgccaccctaaggga

SEQ ID NO: 4187 - DNA, 20 bp, synthetic construct
  misc_feature 1..20: note = chemically synthesized
  source 1..20: mol_type = other DNA
taatgccaccctaagggatg

SEQ ID NO: 4188 - DNA, 20 bp, synthetic construct
  misc_feature 1..20: note = chemically synthesized
  source 1..20: mol_type = other DNA
aagggatggagtttatgata

SEQ ID NO: 4189 - DNA, 20 bp, synthetic construct
  misc_feature 1..20: note = chemically synthesized
  source 1..20: mol_type = other DNA
ggagtttatgataaagtctg

SEQ ID NO: 4190 - DNA, 20 bp, synthetic construct
  misc_feature 1..20: note = chemically synthesized
  source 1..20: mol_type = other DNA
agtctgtggccaaaatatcc

SEQ ID NO: 4191 - DNA, 20 bp, synthetic construct
  misc_feature 1..20: note = chemically synthesized
  source 1..20: mol_type = other DNA
tctgtggccaaaatatcctg

SEQ ID NO: 4192 - DNA, 20 bp, synthetic construct
  misc_feature 1..20: note = chemically synthesized
  source 1..20: mol_type = other DNA
tggccaaaatatcctggaga

SEQ ID NO: 4193 - DNA, 20 bp, synthetic construct
  misc_feature 1..20: note = chemically synthesized
  source 1..20: mol_type = other DNA
gccaaaatatcctggagaaa

SEQ ID NO: 4194 - DNA, 20 bp, synthetic construct
  misc_feature 1..20: note = chemically synthesized
  source 1..20: mol_type = other DNA
aaatatcctggagaaagaga

SEQ ID NO: 4195 - DNA, 20 bp, synthetic construct
  misc_feature 1..20: note = chemically synthesized
  source 1..20: mol_type = other DNA
aatatcctggagaaagagaa

SEQ ID NO: 4196 - DNA, 20 bp, synthetic construct
  misc_feature 1..20: note = chemically synthesized
  source 1..20: mol_type = other DNA
tatcctggagaaagagaaag

SEQ ID NO: 4197 - DNA, 20 bp, synthetic construct
  misc_feature 1..20: note = chemically synthesized
  source 1..20: mol_type = other DNA
atcctggagaaagagaaagg

SEQ ID NO: 4198 - DNA, 20 bp, synthetic construct
  misc_feature 1..20: note = chemically synthesized
  source 1..20: mol_type = other DNA
tcctggagaaagagaaagga

SEQ ID NO: 4199 - DNA, 20 bp, synthetic construct
  misc_feature 1..20: note = chemically synthesized
  source 1..20: mol_type = other DNA
gagaaagagaaaggagggta

SEQ ID NO: 4200 - DNA, 20 bp, synthetic construct
  misc_feature 1..20: note = chemically synthesized
  source 1..20: mol_type = other DNA
agaaagagaaaggagggtac

SEQ ID NO: 4201 - DNA, 20 bp, synthetic construct
  misc_feature 1..20: note = chemically synthesized
  source 1..20: mol_type = other DNA
aagagaaaggagggtacagg

SEQ ID NO: 4202 - DNA, 20 bp, synthetic construct
  misc_feature 1..20: note = chemically synthesized
  source 1..20: mol_type = other DNA
ggtacaggtggaaattccct

SEQ ID NO: 4203 - DNA, 20 bp, synthetic construct
  misc_feature 1..20: note = chemically synthesized
  source 1..20: mol_type = other DNA
gtacaggtggaaattcccta

SEQ ID NO: 4204 - DNA, 20 bp, synthetic construct
  misc_feature 1..20: note = chemically synthesized
  source 1..20: mol_type = other DNA
caggtggaaattccctaagg

SEQ ID NO: 4205 - DNA, 20 bp, synthetic construct
  misc_feature 1..20: note = chemically synthesized
  source 1..20: mol_type = other DNA
gcacatgcccaacaacacaa

SEQ ID NO: 4206 - DNA, 20 bp, synthetic construct
  misc_feature 1..20: note = chemically synthesized
  source 1..20: mol_type = other DNA
caacacaaaagcctgtcttc

SEQ ID NO: 4207 - DNA, 20 bp, synthetic construct
  misc_feature 1..20: note = chemically synthesized
  source 1..20: mol_type = other DNA
cctgtcttcaagttcacccc

SEQ ID NO: 4208 - DNA, 20 bp, synthetic construct
  misc_feature 1..20: note = chemically synthesized
  source 1..20: mol_type = other DNA
tcatcatgccatcattataa

SEQ ID NO: 4209 - DNA, 20 bp, synthetic construct
  misc_feature 1..20: note = chemically synthesized
  source 1..20: mol_type = other DNA
attataatagaatttacata

SEQ ID NO: 4210 - DNA, 20 bp, synthetic construct
  misc_feature 1..20: note = chemically synthesized
  source 1..20: mol_type = other DNA
cagttttgcccccccatccc

SEQ ID NO: 4211 - DNA, 20 bp, synthetic construct
  misc_feature 1..20: note = chemically synthesized
  source 1..20: mol_type = other DNA
agttttgcccccccatccct

SEQ ID NO: 4212 - DNA, 20 bp, synthetic construct
  misc_feature 1..20: note = chemically synthesized
  source 1..20: mol_type = other DNA
ttttgcccccccatccctgg

SEQ ID NO: 4213 - DNA, 20 bp, synthetic construct
  misc_feature 1..20: note = chemically synthesized
  source 1..20: mol_type = other DNA
tttgcccccccatccctggg

SEQ ID NO: 4214 - DNA, 20 bp, synthetic construct
  misc_feature 1..20: note = chemically synthesized
  source 1..20: mol_type = other DNA
aggcttttcttaacaaatta

SEQ ID NO: 4215 - DNA, 20 bp, synthetic construct
  misc_feature 1..20: note = chemically synthesized
  source 1..20: mol_type = other DNA
ggcttttcttaacaaattat

SEQ ID NO: 4216 - DNA, 20 bp, synthetic construct
  misc_feature 1..20: note = chemically synthesized
  source 1..20: mol_type = other DNA
tttcttaacaaattataggt

SEQ ID NO: 4217 - DNA, 20 bp, synthetic construct
  misc_feature 1..20: note = chemically synthesized
  source 1..20: mol_type = other DNA
attataggtaagaccatgca

SEQ ID NO: 4218 - DNA, 20 bp, synthetic construct
  misc_feature 1..20: note = chemically synthesized
  source 1..20: mol_type = other DNA
gaccatgcacagtttaattt

SEQ ID NO: 4219 - DNA, 20 bp, synthetic construct
  misc_feature 1..20: note = chemically synthesized
  source 1..20: mol_type = other DNA
cagtttaattttagattgta

SEQ ID NO: 4220 - DNA, 20 bp, synthetic construct
  misc_feature 1..20: note = chemically synthesized
  source 1..20: mol_type = other DNA
aataacatcatcctgtcact

SEQ ID NO: 4221 - DNA, 20 bp, synthetic construct
  misc_feature 1..20: note = chemically synthesized
  source 1..20: mol_type = other DNA
atcatcctgtcactcagata

SEQ ID NO: 4222 - DNA, 20 bp, synthetic construct
  misc_feature 1..20: note = chemically synthesized
  source 1..20: mol_type = other DNA
cctccccacaaaccccataa

SEQ ID NO: 4223 - DNA, 20 bp, synthetic construct
  misc_feature 1..20: note = chemically synthesized
  source 1..20: mol_type = other DNA
aaaccccataaaagcacctt

SEQ ID NO: 4224 - DNA, 20 bp, synthetic construct
  misc_feature 1..20: note = chemically synthesized
  source 1..20: mol_type = other DNA
aaagcaccttgagctctgta

SEQ ID NO: 4225 - DNA, 20 bp, synthetic construct
  misc_feature 1..20: note = chemically synthesized
  source 1..20: mol_type = other DNA
gcaccttgagctctgtaaag

SEQ ID NO: 4226 - DNA, 20 bp, synthetic construct
  misc_feature 1..20: note = chemically synthesized
  source 1..20: mol_type = other DNA
gagctctgtaaagaagtgct

SEQ ID NO: 4227 - DNA, 20 bp, synthetic construct
  misc_feature 1..20: note = chemically synthesized
  source 1..20: mol_type = other DNA
gaagtgctgagttcacttcg

SEQ ID NO: 4228 - DNA, 20 bp, synthetic construct
  misc_feature 1..20: note = chemically synthesized
  source 1..20: mol_type = other DNA
tgagttcacttcgcagaaat

SEQ ID NO: 4229 - DNA, 20 bp, synthetic construct
  misc_feature 1..20: note = chemically synthesized
  source 1..20: mol_type = other DNA
gaaataagcccgctgtccct

SEQ ID NO: 4230 - DNA, 20 bp, synthetic construct
  misc_feature 1..20: note = chemically synthesized
  source 1..20: mol_type = other DNA
aataagcccgctgtccctca

SEQ ID NO: 4231 - DNA, 20 bp, synthetic construct
  misc_feature 1..20: note = chemically synthesized
  source 1..20: mol_type = other DNA
gcttcaataaactttgcttt

SEQ ID NO: 4232 - DNA, 20 bp, synthetic construct
  misc_feature 1..20: note = chemically synthesized
  source 1..20: mol_type = other DNA
tttgctttaagcttgcattt

SEQ ID NO: 4233 - DNA, 20 bp, synthetic construct
  misc_feature 1..20: note = chemically synthesized
  source 1..20: mol_type = other DNA
ttaagcttgcattttggtgt

SEQ ID NO: 4234 - DNA, 20 bp, synthetic construct
  misc_feature 1..20: note = chemically synthesized
  source 1..20: mol_type = other DNA
tgcattttggtgttagtttg

SEQ ID NO: 4235 - DNA, 20 bp, synthetic construct
  misc_feature 1..20: note = chemically synthesized
  source 1..20: mol_type = other DNA
agttctttgctcactatcac

SEQ ID NO: 4236 - DNA, 20 bp, synthetic construct
  misc_feature 1..20: note = chemically synthesized
  source 1..20: mol_type = other DNA
tgctcactatcacaagaact

SEQ ID NO: 4237 - DNA, 20 bp, synthetic construct
  misc_feature 1..20: note = chemically synthesized
  source 1..20: mol_type = other DNA
atcacaagaactgagattgc

SEQ ID NO: 4238 - DNA, 20 bp, synthetic construct
  misc_feature 1..20: note = chemically synthesized
  source 1..20: mol_type = other DNA
aagaactgagattgctggtt

SEQ ID NO: 4239 - DNA, 20 bp, synthetic construct
  misc_feature 1..20: note = chemically synthesized
  source 1..20: mol_type = other DNA
gaactgagattgctggttca

SEQ ID NO: 4240 - DNA, 20 bp, synthetic construct
  misc_feature 1..20: note = chemically synthesized
  source 1..20: mol_type = other DNA
agattgctggttcagagctc

SEQ ID NO: 4241 - DNA, 20 bp, synthetic construct
  misc_feature 1..20: note = chemically synthesized
  source 1..20: mol_type = other DNA
tccggctataataatctcct

SEQ ID NO: 4242 - DNA, 20 bp, synthetic construct
  misc_feature 1..20: note = chemically synthesized
  source 1..20: mol_type = other DNA
tataataatctcctcggtta

SEQ ID NO: 4243 - DNA, 20 bp, synthetic construct
  misc_feature 1..20: note = chemically synthesized
  source 1..20: mol_type = other DNA
ataataatctcctcggttaa

SEQ ID NO: 4244 - DNA, 20 bp, synthetic construct
  misc_feature 1..20: note = chemically synthesized
  source 1..20: mol_type = other DNA
ccatcccaatgcataattcc

SEQ ID NO: 4245 - DNA, 20 bp, synthetic construct
  misc_feature 1..20: note = chemically synthesized
  source 1..20: mol_type = other DNA
caatgcataattcccagtaa

SEQ ID NO: 4246 - DNA, 20 bp, synthetic construct
  misc_feature 1..20: note = chemically synthesized
  source 1..20: mol_type = other DNA
cataattcccagtaacagta

SEQ ID NO: 4247 - DNA, 20 bp, synthetic construct
  misc_feature 1..20: note = chemically synthesized
  source 1..20: mol_type = other DNA
ataattcccagtaacagtat

SEQ ID NO: 4248 - DNA, 20 bp, synthetic construct
  misc_feature 1..20: note = chemically synthesized
  source 1..20: mol_type = other DNA
taacagtatgggatgccacc

SEQ ID NO: 4249 - DNA, 20 bp, synthetic construct
  misc_feature 1..20: note = chemically synthesized
  source 1..20: mol_type = other DNA
aacagtatgggatgccacct

SEQ ID NO: 4250 - DNA, 20 bp, synthetic construct
  misc_feature 1..20: note = chemically synthesized
  source 1..20: mol_type = other DNA
atgggatgccacctgggcaa

SEQ ID NO: 4251 - DNA, 20 bp, synthetic construct
  misc_feature 1..20: note = chemically synthesized
  source 1..20: mol_type = other DNA
tgggatgccacctgggcaat

SEQ ID NO: 4252 - DNA, 20 bp, synthetic construct
  misc_feature 1..20: note = chemically synthesized
  source 1..20: mol_type = other DNA
cctgggcaatgggattttaa

SEQ ID NO: 4253 - DNA, 20 bp, synthetic construct
  misc_feature 1..20: note = chemically synthesized
  source 1..20: mol_type = other DNA
gctttccttctccctcaacg

SEQ ID NO: 4254 - DNA, 20 bp, synthetic construct
  misc_feature 1..20: note = chemically synthesized
  source 1..20: mol_type = other DNA
ccttctccctcaacgaagtt

SEQ ID NO: 4255 - DNA, 20 bp, synthetic construct
  misc_feature 1..20: note = chemically synthesized
  source 1..20: mol_type = other DNA
cttctccctcaacgaagttt

SEQ ID NO: 4256 - DNA, 20 bp, synthetic construct
  misc_feature 1..20: note = chemically synthesized
  source 1..20: mol_type = other DNA
aagtttgggaattattgcct

SEQ ID NO: 4257 - DNA, 20 bp, synthetic construct
  misc_feature 1..20: note = chemically synthesized
  source 1..20: mol_type = other DNA
gctccaaacctttacatatc

SEQ ID NO: 4258 - DNA, 20 bp, synthetic construct
  misc_feature 1..20: note = chemically synthesized
  source 1..20: mol_type = other DNA
tacatatctagcaaattcaa

SEQ ID NO: 4259 - DNA, 20 bp, synthetic construct
  misc_feature 1..20: note = chemically synthesized
  source 1..20: mol_type = other DNA
acatatctagcaaattcaac

SEQ ID NO: 4260 - DNA, 20 bp, synthetic construct
  misc_feature 1..20: note = chemically synthesized
  source 1..20: mol_type = other DNA
tcaacaggcattatttttgt

SEQ ID NO: 4261 - DNA, 20 bp, synthetic construct
  misc_feature 1..20: note = chemically synthesized
  source 1..20: mol_type = other DNA
gtaagcatgtatgcaaattt

SEQ ID NO: 4262 - DNA, 20 bp, synthetic construct
  misc_feature 1..20: note = chemically synthesized
  source 1..20: mol_type = other DNA
tatgcaaattttggcaattc

SEQ ID NO: 4263 - DNA, 20 bp, synthetic construct
  misc_feature 1..20: note = chemically synthesized
  source 1..20: mol_type = other DNA
ggcaattcaagaaaatcaaa

SEQ ID NO: 4264 - DNA, 20 bp, synthetic construct
  misc_feature 1..20: note = chemically synthesized
  source 1..20: mol_type = other DNA
gcaattcaagaaaatcaaac

SEQ ID NO: 4265 - DNA, 20 bp, synthetic construct
  misc_feature 1..20: note = chemically synthesized
  source 1..20: mol_type = other DNA
aagaaaatcaaacaggatat

SEQ ID NO: 4266 - DNA, 20 bp, synthetic construct
  misc_feature 1..20: note = chemically synthesized
  source 1..20: mol_type = other DNA
agaaaatcaaacaggatatc

SEQ ID NO: 4267 - DNA, 20 bp, synthetic construct
  misc_feature 1..20: note = chemically synthesized
  source 1..20: mol_type = other DNA
gaaaatcaaacaggatatca

SEQ ID NO: 4268 - DNA, 20 bp, synthetic construct
  misc_feature 1..20: note = chemically synthesized
  source 1..20: mol_type = other DNA
ggatatcagggcctcgactg

SEQ ID NO: 4269 - DNA, 20 bp, synthetic construct
  misc_feature 1..20: note = chemically synthesized
  source 1..20: mol_type = other DNA
gatatcagggcctcgactgt

SEQ ID NO: 4270 - DNA, 20 bp, synthetic construct
  misc_feature 1..20: note = chemically synthesized
  source 1..20: mol_type = other DNA
gggcctcgactgtaggcaaa

SEQ ID NO: 4271 - DNA, 20 bp, synthetic construct
  misc_feature 1..20: note = chemically synthesized
  source 1..20: mol_type = other DNA
gcaaacagatacaataacat

SEQ ID NO: 4272 - DNA, 20 bp, synthetic construct
  misc_feature 1..20: note = chemically synthesized
  source 1..20: mol_type = other DNA
acaataacattggaaacatg

SEQ ID NO: 4273 - DNA, 20 bp, synthetic construct
  misc_feature 1..20: note = chemically synthesized
  source 1..20: mol_type = other DNA
aacatgtagaatattgatga

SEQ ID NO: 4274 - DNA, 20 bp, synthetic construct
  misc_feature 1..20: note = chemically synthesized
  source 1..20: mol_type = other DNA
acatgtagaatattgatgat

SEQ ID NO: 4275 - DNA, 20 bp, synthetic construct
  misc_feature 1..20: note = chemically synthesized
  source 1..20: mol_type = other DNA
aatattgatgatgggcacat

SEQ ID NO: 4276 - DNA, 20 bp, synthetic construct
  misc_feature 1..20: note = chemically synthesized
  source 1..20: mol_type = other DNA
atattgatgatgggcacatt

SEQ ID NO: 4277 - DNA, 20 bp, synthetic construct
  misc_feature 1..20: note = chemically synthesized
  source 1..20: mol_type = other DNA
tattgatgatgggcacattg

SEQ ID NO: 4278 - DNA, 20 bp, synthetic construct
  misc_feature 1..20: note = chemically synthesized
  source 1..20: mol_type = other DNA
gatgggcacattggggctga

SEQ ID NO: 4279 - DNA, 20 bp, synthetic construct
  misc_feature 1..20: note = chemically synthesized
  source 1..20: mol_type = other DNA
tattcctttttttcaatttt

SEQ ID NO: 4280 - DNA, 20 bp, synthetic construct
  misc_feature 1..20: note = chemically synthesized
  source 1..20: mol_type = other DNA
cctttttttcaatttttggt

SEQ ID NO: 4281 - DNA, 20 bp, synthetic construct
  misc_feature 1..20: note = chemically synthesized
  source 1..20: mol_type = other DNA
aatttttggtaagatataat

SEQ ID NO: 4282 - DNA, 20 bp, synthetic construct
  misc_feature 1..20: note = chemically synthesized
  source 1..20: mol_type = other DNA
tctatgtaaaatgcaaaaat

SEQ ID NO: 4283 - DNA, 20 bp, synthetic construct
  misc_feature 1..20: note = chemically synthesized
  source 1..20: mol_type = other DNA
gtaaaatgcaaaaattggcc

SEQ ID NO: 4284 - DNA, 20 bp, synthetic construct
  misc_feature 1..20: note = chemically synthesized
  source 1..20: mol_type = other DNA
atgcaaaaattggcccggct

SEQ ID NO: 4285 - DNA, 20 bp, synthetic construct
  misc_feature 1..20: note = chemically synthesized
  source 1..20: mol_type = other DNA
caaaaattggcccggctcag

SEQ ID NO: 4286 - DNA, 20 bp, synthetic construct
  misc_feature 1..20: note = chemically synthesized
  source 1..20: mol_type = other DNA
gtggctcacgcttgtaatcc

SEQ ID NO: 4287 - DNA, 20 bp, synthetic construct
  misc_feature 1..20: note = chemically synthesized
  source 1..20: mol_type = other DNA
cgcttgtaatcccagcactt

SEQ ID NO: 4288 - DNA, 20 bp, synthetic construct
  misc_feature 1..20: note = chemically synthesized
  source 1..20: mol_type = other DNA
gcttgtaatcccagcacttt

SEQ ID NO: 4289 - DNA, 20 bp, synthetic construct
  misc_feature 1..20: note = chemically synthesized
  source 1..20: mol_type = other DNA
tgtaatcccagcactttggg

SEQ ID NO: 4290 - DNA, 20 bp, synthetic construct
  misc_feature 1..20: note = chemically synthesized
  source 1..20: mol_type = other DNA
tcccagcactttgggcggcc

SEQ ID NO: 4291 - DNA, 20 bp, synthetic construct
  misc_feature 1..20: note = chemically synthesized
  source 1..20: mol_type = other DNA
cccagcactttgggcggccg

SEQ ID NO: 4292 - DNA, 20 bp, synthetic construct
  misc_feature 1..20: note = chemically synthesized
  source 1..20: mol_type = other DNA
agcactttgggcggccgagg

SEQ ID NO: 4293 - DNA, 20 bp, synthetic construct
  misc_feature 1..20: note = chemically synthesized
  source 1..20: mol_type = other DNA
gcactttgggcggccgagga

SEQ ID NO: 4294 - DNA, 20 bp, synthetic construct
  misc_feature 1..20: note = chemically synthesized
  source 1..20: mol_type = other DNA
ctttgggcggccgaggaagg

SEQ ID NO: 4295 - DNA, 20 bp, synthetic construct
  misc_feature 1..20: note = chemically synthesized
  source 1..20: mol_type = other DNA
ccgaggaaggcagatcacct

SEQ ID NO: 4296 - DNA, 20 bp, synthetic construct
  misc_feature 1..20: note = chemically synthesized
  source 1..20: mol_type = other DNA
gaaggcagatcacctgagat

SEQ ID NO: 4297 - DNA, 20 bp, synthetic construct
  misc_feature 1..20: note = chemically synthesized
  source 1..20: mol_type = other DNA
aaggcagatcacctgagatc

SEQ ID NO: 4298 - DNA, 20 bp, synthetic construct
  misc_feature 1..20: note = chemically synthesized
  source 1..20: mol_type = other DNA
aggcagatcacctgagatca

SEQ ID NO: 4299 - DNA, 20 bp, synthetic construct
  misc_feature 1..20: note = chemically synthesized
  source 1..20: mol_type = other DNA
ggcagatcacctgagatcag

SEQ ID NO: 4300 - DNA, 20 bp, synthetic construct
  misc_feature 1..20: note = chemically synthesized
  source 1..20: mol_type = other DNA
tcacctgagatcaggggttc

SEQ ID NO: 4301 - DNA, 20 bp, synthetic construct
  misc_feature 1..20: note = chemically synthesized
  source 1..20: mol_type = other DNA
tgagatcaggggttcgagac

SEQ ID NO: 4302 - DNA, 20 bp, synthetic construct
  misc_feature 1..20: note = chemically synthesized
  source 1..20: mol_type = other DNA
tcaggggttcgagaccagcc

SEQ ID NO: 4303 - DNA, 20 bp, synthetic construct
  misc_feature 1..20: note = chemically synthesized
  source 1..20: mol_type = other DNA
cgagaccagcctggccaaca

SEQ ID NO: 4304 - DNA, 20 bp, synthetic construct
  misc_feature 1..20: note = chemically synthesized
  source 1..20: mol_type = other DNA
tttactaaaaatacaaaaat

SEQ ID NO: 4305 - DNA, 20 bp, synthetic construct
  misc_feature 1..20: note = chemically synthesized
  source 1..20: mol_type = other DNA
ctaaaaatacaaaaattagc

SEQ ID NO: 4306 - DNA, 20 bp, synthetic construct
  misc_feature 1..20: note = chemically synthesized
  source 1..20: mol_type = other DNA
taaaaatacaaaaattagcc

SEQ ID NO: 4307 - DNA, 20 bp, synthetic construct
  misc_feature 1..20: note = chemically synthesized
  source 1..20: mol_type = other DNA
caaaaattagccgggcgtga

SEQ ID NO: 4308 - DNA, 20 bp, synthetic construct
  misc_feature 1..20: note = chemically synthesized
  source 1..20: mol_type = other DNA
aaattagccgggcgtgatag

SEQ ID NO: 4309 - DNA, 20 bp, synthetic construct
  misc_feature 1..20: note = chemically synthesized
  source 1..20: mol_type = other DNA
aattagccgggcgtgatagc

SEQ ID NO: 4310 - DNA, 20 bp, synthetic construct
  misc_feature 1..20: note = chemically synthesized
  source 1..20: mol_type = other DNA
atagcaggcaactgtaatcc

SEQ ID NO: 4311 - DNA, 20 bp, synthetic construct
  misc_feature 1..20: note = chemically synthesized
  source 1..20: mol_type = other DNA
aactgtaatcccagctacat

SEQ ID NO: 4312 - DNA, 20 bp, synthetic construct
  misc_feature 1..20: note = chemically synthesized
  source 1..20: mol_type = other DNA
ctgtaatcccagctacatta

SEQ ID NO: 4313 - DNA, 20 bp, synthetic construct
  misc_feature 1..20: note = chemically synthesized
  source 1..20: mol_type = other DNA
tgtaatcccagctacattag

SEQ ID NO: 4314 - DNA, 20 bp, synthetic construct
  misc_feature 1..20: note = chemically synthesized
  source 1..20: mol_type = other DNA
tcccagctacattagaggct

SEQ ID NO: 4315 - DNA, 20 bp, synthetic construct
  misc_feature 1..20: note = chemically synthesized
  source 1..20: mol_type = other DNA
cccagctacattagaggctg

SEQ ID NO: 4316 - DNA, 20 bp, synthetic construct
  misc_feature 1..20: note = chemically synthesized
  source 1..20: mol_type = other DNA
agctacattagaggctgagg

SEQ ID NO: 4317 - DNA, 20 bp, synthetic construct
  misc_feature 1..20: note = chemically synthesized
  source 1..20: mol_type = other DNA
gctacattagaggctgaggc

SEQ ID NO: 4318 - DNA, 20 bp, synthetic construct
  misc_feature 1..20: note = chemically synthesized
  source 1..20: mol_type = other DNA
tacattagaggctgaggcag

SEQ ID NO: 4319 - DNA, 20 bp, synthetic construct
  misc_feature 1..20: note = chemically synthesized
  source 1..20: mol_type = other DNA
gcaggagaatcgcttgaacc

SEQ ID NO: 4320 - DNA, 20 bp, synthetic construct
  misc_feature 1..20: note = chemically synthesized
  source 1..20: mol_type = other DNA
caggagaatcgcttgaaccc

SEQ ID NO: 4321 - DNA, 20 bp, synthetic construct
  misc_feature 1..20: note = chemically synthesized
  source 1..20: mol_type = other DNA
ggagaatcgcttgaacccgg

SEQ ID NO: 4322 - DNA, 20 bp, synthetic construct
  misc_feature 1..20: note = chemically synthesized
  source 1..20: mol_type = other DNA
gagaatcgcttgaacccggg

SEQ ID NO: 4323 - DNA, 20 bp, synthetic construct
  misc_feature 1..20: note = chemically synthesized
  source 1..20: mol_type = other DNA
tcgcttgaacccgggaggcg

SEQ ID NO: 4324 - DNA, 20 bp, synthetic construct
  misc_feature 1..20: note = chemically synthesized
  source 1..20: mol_type = other DNA
cgcttgaacccgggaggcgt

SEQ ID NO: 4325 - DNA, 20 bp, synthetic construct
  misc_feature 1..20: note = chemically synthesized
  source 1..20: mol_type = other DNA
aacccgggaggcgtaggttg

SEQ ID NO: 4326 - DNA, 20 bp, synthetic construct
  misc_feature 1..20: note = chemically synthesized
  source 1..20: mol_type = other DNA
cgggaggcgtaggttgcagt

SEQ ID NO: 4327 - DNA, 20 bp, synthetic construct
  misc_feature 1..20: note = chemically synthesized
  source 1..20: mol_type = other DNA
ggcgtaggttgcagtgagct

SEQ ID NO: 4328 - DNA, 20 bp, synthetic construct
  misc_feature 1..20: note = chemically synthesized
  source 1..20: mol_type = other DNA
aagatcgtgccatcacactc

SEQ ID NO: 4329 - DNA, 20 bp, synthetic construct
  misc_feature 1..20: note = chemically synthesized
  source 1..20: mol_type = other DNA
cgtgccatcacactccagca

SEQ ID NO: 4330 - DNA, 20 bp, synthetic construct
  misc_feature 1..20: note = chemically synthesized
  source 1..20: mol_type = other DNA
gtgccatcacactccagcat

SEQ ID NO: 4331 - DNA, 20 bp, synthetic construct
  misc_feature 1..20: note = chemically synthesized
  source 1..20: mol_type = other DNA
gccatcacactccagcatgg

SEQ ID NO: 4332 - DNA, 20 bp, synthetic construct
  misc_feature 1..20: note = chemically synthesized
  source 1..20: mol_type = other DNA
cacactccagcatgggagac

SEQ ID NO: 4333 - DNA, 20 bp, synthetic construct
  misc_feature 1..20: note = chemically synthesized
  source 1..20: mol_type = other DNA
cactccagcatgggagacaa

SEQ ID NO: 4334 - DNA, 20 bp, synthetic construct
  misc_feature 1..20: note = chemically synthesized
  source 1..20: mol_type = other DNA
ccagcatgggagacaagagc

SEQ ID NO: 4335 - DNA, 20 bp, synthetic construct
  misc_feature 1..20: note = chemically synthesized
  source 1..20: mol_type = other DNA
tcatctcaaaaaaaaaaaat

SEQ ID NO: 4336 - DNA, 20 bp, synthetic construct
  misc_feature 1..20: note = chemically synthesized
  source 1..20: mol_type = other DNA
ctcaaaaaaaaaaaattagc

SEQ ID NO: 4337 - DNA, 20 bp, synthetic construct
  misc_feature 1..20: note = chemically synthesized
  source 1..20: mol_type = other DNA
tcaaaaaaaaaaaattagct

SEQ ID NO: 4338 - DNA, 20 bp, synthetic construct
  misc_feature 1..20: note = chemically synthesized
  source 1..20: mol_type = other DNA
aaaaaaaaattagctgggtg

SEQ ID NO: 4339 - DNA, 20 bp, synthetic construct
  misc_feature 1..20: note = chemically synthesized
  source 1..20: mol_type = other DNA
aaaaaattagctgggtgtgg

SEQ ID NO: 4340 - DNA, 20 bp, synthetic construct
  misc_feature 1..20: note = chemically synthesized
  source 1..20: mol_type = other DNA
gtggcatgcacctgtaattc

SEQ ID NO: 4341 - DNA, 20 bp, synthetic construct
  misc_feature 1..20: note = chemically synthesized
  source 1..20: mol_type = other DNA
cacctgtaattccagctact

SEQ ID NO: 4342 - DNA, 20 bp, synthetic construct
  misc_feature 1..20: note = chemically synthesized
  source 1..20: mol_type = other DNA
acctgtaattccagctactc

SEQ ID NO: 4343 - DNA, 20 bp, synthetic construct
  misc_feature 1..20: note = chemically synthesized
  source 1..20: mol_type = other DNA
tgtaattccagctactcggg

SEQ ID NO: 4344 - DNA, 20 bp, synthetic construct
  misc_feature 1..20: note = chemically synthesized
  source 1..20: mol_type = other DNA
ttccagctactcgggaagct

SEQ ID NO: 4345 - DNA, 20 bp, synthetic construct
  misc_feature 1..20: note = chemically synthesized
  source 1..20: mol_type = other DNA
agctactcgggaagctgaga

SEQ ID NO: 4346 - DNA, 20 bp, synthetic construct
  misc_feature 1..20: note = chemically synthesized
  source 1..20: mol_type = other DNA
gctactcgggaagctgagac

SEQ ID NO: 4347 - DNA, 20 bp, synthetic construct
  misc_feature 1..20: note = chemically synthesized
  source 1..20: mol_type = other DNA
tactcgggaagctgagacag

SEQ ID NO: 4348 - DNA, 20 bp, synthetic construct
  misc_feature 1..20: note = chemically synthesized
  source 1..20: mol_type = other DNA
acaggagaatcgcttgaacc

SEQ ID NO: 4349 - DNA, 20 bp, synthetic construct
  misc_feature 1..20: note = chemically synthesized
  source 1..20: mol_type = other DNA
caggagaatcgcttgaacct

SEQ ID NO: 4350 - DNA, 20 bp, synthetic construct
  misc_feature 1..20: note = chemically synthesized
  source 1..20: mol_type = other DNA
ggagaatcgcttgaacctgg

SEQ ID NO: 4351 - DNA, 20 bp, synthetic construct
  misc_feature 1..20: note = chemically synthesized
  source 1..20: mol_type = other DNA
gagaatcgcttgaacctggg

SEQ ID NO: 4352 - DNA, 20 bp, synthetic construct
  misc_feature 1..20: note = chemically synthesized
  source 1..20: mol_type = other DNA
aatcgcttgaacctgggagg

SEQ ID NO: 4353 - DNA, 20 bp, synthetic construct
  misc_feature 1..20: note = chemically synthesized
  source 1..20: mol_type = other DNA
tcgcttgaacctgggaggcg

SEQ ID NO: 4354 - DNA, 20 bp, synthetic construct
  misc_feature 1..20: note = chemically synthesized
  source 1..20: mol_type = other DNA
cgcttgaacctgggaggcgg

SEQ ID NO: 4355 - DNA, 20 bp, synthetic construct
  misc_feature 1..20: note = chemically synthesized
  source 1..20: mol_type = other DNA
aacctgggaggcggaggttg

SEQ ID NO: 4356 - DNA, 20 bp, synthetic construct
  misc_feature 1..20: note = chemically synthesized
  source 1..20: mol_type = other DNA
tgggaggcggaggttgtggt

SEQ ID NO: 4357 - DNA, 20 bp, synthetic construct
  misc_feature 1..20: note = chemically synthesized
  source 1..20: mol_type = other DNA
ggcggaggttgtggtgagcc

SEQ ID NO: 4358 - DNA, 20 bp, synthetic construct
  misc_feature 1..20: note = chemically synthesized
  source 1..20: mol_type = other DNA
gagatcatgccattgcactc

SEQ ID NO: 4359 - DNA, 20 bp, synthetic construct
  misc_feature 1..20: note = chemically synthesized
  source 1..20: mol_type = other DNA
catgccattgcactccagcc

SEQ ID NO: 4360 - DNA, 20 bp, synthetic construct
  misc_feature 1..20: note = chemically synthesized
  source 1..20: mol_type = other DNA
atgccattgcactccagcct

SEQ ID NO: 4361 - DNA, 20 bp, synthetic construct
  misc_feature 1..20: note = chemically synthesized
  source 1..20: mol_type = other DNA
tgcactccagcctgggcaac

SEQ ID NO: 4362 - DNA, 20 bp, synthetic construct
  misc_feature 1..20: note = chemically synthesized
  source 1..20: mol_type = other DNA
cactccagcctgggcaacaa

SEQ ID NO: 4363 - DNA, 20 bp, synthetic construct
  misc_feature 1..20: note = chemically synthesized
  source 1..20: mol_type = other DNA
aaataaaatgcaaaaattaa

SEQ ID NO: 4364 - DNA, 20 bp, synthetic construct
  misc_feature 1..20: note = chemically synthesized
  source 1..20: mol_type = other DNA
atgcaaaaattaatggattt

SEQ ID NO: 4365 - DNA, 20 bp, synthetic construct
  misc_feature 1..20: note = chemically synthesized
  source 1..20: mol_type = other DNA
aatggattttagtatattta

SEQ ID NO: 4366 - DNA, 20 bp, synthetic construct
  misc_feature 1..20: note = chemically synthesized
  source 1..20: mol_type = other DNA
tggattttagtatatttaca

SEQ ID NO: 4367 - DNA, 20 bp, synthetic construct
  misc_feature 1..20: note = chemically synthesized
  source 1..20: mol_type = other DNA
tacatttctatctccccaaa

SEQ ID NO: 4368 - DNA, 20 bp, synthetic construct
  misc_feature 1..20: note = chemically synthesized
  source 1..20: mol_type = other DNA
gaaaccatgttcccctaatt

SEQ ID NO: 4369 - DNA, 20 bp, synthetic construct
  misc_feature 1..20: note = chemically synthesized
  source 1..20: mol_type = other DNA
acccttaattcatcgcctcc

SEQ ID NO: 4370 - DNA, 20 bp, synthetic construct
  misc_feature 1..20: note = chemically synthesized
  source 1..20: mol_type = other DNA
ttctcctcctcctcccctcc

SEQ ID NO: 4371 - DNA, 20 bp, synthetic construct
  misc_feature 1..20: note = chemically synthesized
  source 1..20: mol_type = other DNA
tcctcctcccctcccagccc

SEQ ID NO: 4372 - DNA, 20 bp, synthetic construct
  misc_feature 1..20: note = chemically synthesized
  source 1..20: mol_type = other DNA
taatctactttctttctatt

SEQ ID NO: 4373 - DNA, 20 bp, synthetic construct
  misc_feature 1..20: note = chemically synthesized
  source 1..20: mol_type = other DNA
ttctttctatttggaacatt

SEQ ID NO: 4374 - DNA, 20 bp, synthetic construct
  misc_feature 1..20: note = chemically synthesized
  source 1..20: mol_type = other DNA
tttggaacatttagtataca

SEQ ID NO: 4375 - DNA, 20 bp, synthetic construct
  misc_feature 1..20: note = chemically synthesized
  source 1..20: mol_type = other DNA
tggaacatttagtatacata

SEQ ID NO: 4376 - DNA, 20 bp, synthetic construct
  misc_feature 1..20: note = chemically synthesized
  source 1..20: mol_type = other DNA
ggaacatttagtatacatag

SEQ ID NO: 4377 - DNA, 20 bp, synthetic construct
  misc_feature 1..20: note = chemically synthesized
  source 1..20: mol_type = other DNA
atatattgctttgccgtgac

SEQ ID NO: 4378 - DNA, 20 bp, synthetic construct
  misc_feature 1..20: note = chemically synthesized
  source 1..20: mol_type = other DNA
cgtgactggcttctttcatt

SEQ ID NO: 4379 - DNA, 20 bp, synthetic construct
  misc_feature 1..20: note = chemically synthesized
  source 1..20: mol_type = other DNA
gtttttatgtatgtttttca

SEQ ID NO: 4380 - DNA, 20 bp, synthetic construct
  misc_feature 1..20: note = chemically synthesized
  source 1..20: mol_type = other DNA
ggaccaataatatctattat

SEQ ID NO: 4381 - DNA, 20 bp, synthetic construct
  misc_feature 1..20: note = chemically synthesized
  source 1..20: mol_type = other DNA
gaccaataatatctattata

SEQ ID NO: 4382 - DNA, 20 bp, synthetic construct
  misc_feature 1..20: note = chemically synthesized
  source 1..20: mol_type = other DNA
tattttatttattcattcat

SEQ ID NO: 4383 - DNA, 20 bp, synthetic construct
  misc_feature 1..20: note = chemically synthesized
  source 1..20: mol_type = other DNA
tttattcattcatcagccga

SEQ ID NO: 4384 - DNA, 20 bp, synthetic construct
  misc_feature 1..20: note = chemically synthesized
  source 1..20: mol_type = other DNA
attcatcagccgatggacat

SEQ ID NO: 4385 - DNA, 20 bp, synthetic construct
  misc_feature 1..20: note = chemically synthesized
  source 1..20: mol_type = other DNA
attggtttgtttctacttta

SEQ ID NO: 4386 - DNA, 20 bp, synthetic construct
  misc_feature 1..20: note = chemically synthesized
  source 1..20: mol_type = other DNA
tgtttctactttatggctat

SEQ ID NO: 4387 - DNA, 20 bp, synthetic construct
  misc_feature 1..20: note = chemically synthesized
  source 1..20: mol_type = other DNA
gtttctactttatggctatt

SEQ ID NO: 4388 - DNA, 20 bp, synthetic construct
  misc_feature 1..20: note = chemically synthesized
  source 1..20: mol_type = other DNA
tactttatggctattgggaa

SEQ ID NO: 4389 - DNA, 20 bp, synthetic construct
  misc_feature 1..20: note = chemically synthesized
  source 1..20: mol_type = other DNA
tgttataaacatttatgtac

SEQ ID NO: 4390 - DNA, 20 bp, synthetic construct
  misc_feature 1..20: note = chemically synthesized
  source 1..20: mol_type = other DNA
tttatgtacaagtttttttg

SEQ ID NO: 4391 - DNA, 20 bp, synthetic construct
  misc_feature 1..20: note = chemically synthesized
  source 1..20: mol_type = other DNA
acttatgttttgatttcttt

SEQ ID NO: 4392 - DNA, 20 bp, synthetic construct
  misc_feature 1..20: note = chemically synthesized
  source 1..20: mol_type = other DNA
atttcttttggttatatatc

SEQ ID NO: 4393 - DNA, 20 bp, synthetic construct
  misc_feature 1..20: note = chemically synthesized
  source 1..20: mol_type = other DNA
tcttttggttatatatctag

SEQ ID NO: 4394 - DNA, 20 bp, synthetic construct
  misc_feature 1..20: note = chemically synthesized
  source 1..20: mol_type = other DNA
tttggttatatatctagaag

SEQ ID NO: 4395 - DNA, 20 bp, synthetic construct
  misc_feature 1..20: note = chemically synthesized
  source 1..20: mol_type = other DNA
ttggttatatatctagaagt

SEQ ID NO: 4396 - DNA, 20 bp, synthetic construct
  misc_feature 1..20: note = chemically synthesized
  source 1..20: mol_type = other DNA
atatctagaagtgggtttgc

SEQ ID NO: 4397 - DNA, 20 bp, synthetic construct
  misc_feature 1..20: note = chemically synthesized
  source 1..20: mol_type = other DNA
tatctagaagtgggtttgct

SEQ ID NO: 4398 - DNA, 20 bp, synthetic construct
  misc_feature 1..20: note = chemically synthesized
  source 1..20: mol_type = other DNA
agtgggtttgctgggtcata

SEQ ID NO: 4399 - DNA, 20 bp, synthetic construct
  misc_feature 1..20: note = chemically synthesized
  source 1..20: mol_type = other DNA
gtaacactgtttaacctttt

SEQ ID NO: 4400 - DNA, 20 bp, synthetic construct
  misc_feature 1..20: note = chemically synthesized
  source 1..20: mol_type = other DNA
taacactgtttaaccttttg

SEQ ID NO: 4401 - DNA, 20 bp, synthetic construct
  misc_feature 1..20: note = chemically synthesized
  source 1..20: mol_type = other DNA
aattgccacattcttttcca

SEQ ID NO: 4402 - DNA, 20 bp, synthetic construct
  misc_feature 1..20: note = chemically synthesized
  source 1..20: mol_type = other DNA
gccacattcttttccaaagt

SEQ ID NO: 4403 - DNA, 20 bp, synthetic construct
  misc_feature 1..20: note = chemically synthesized
  source 1..20: mol_type = other DNA
taagcattttatcctcctat

SEQ ID NO: 4404 - DNA, 20 bp, synthetic construct
  misc_feature 1..20: note = chemically synthesized
  source 1..20: mol_type = other DNA
gcattttatcctcctatcag

SEQ ID NO: 4405 - DNA, 20 bp, synthetic construct
  misc_feature 1..20: note = chemically synthesized
  source 1..20: mol_type = other DNA
tcctcctatcagcagtgtat

SEQ ID NO: 4406 - DNA, 20 bp, synthetic construct
  misc_feature 1..20: note = chemically synthesized
  source 1..20: mol_type = other DNA
ctcctatcagcagtgtatga

SEQ ID NO: 4407 - DNA, 20 bp, synthetic construct
  misc_feature 1..20: note = chemically synthesized
  source 1..20: mol_type = other DNA
gatttctctccatctttgcc

SEQ ID NO: 4408 - DNA, 20 bp, synthetic construct
  misc_feature 1..20: note = chemically synthesized
  source 1..20: mol_type = other DNA
atttctctccatctttgcct

SEQ ID NO: 4409 - DNA, 20 bp, synthetic construct
  misc_feature 1..20: note = chemically synthesized
  source 1..20: mol_type = other DNA
ctttgcctgggtttttgaat

SEQ ID NO: 4410 - DNA, 20 bp, synthetic construct
  misc_feature 1..20: note = chemically synthesized
  source 1..20: mol_type = other DNA
tttgcctgggtttttgaatc

SEQ ID NO: 4411 - DNA, 20 bp, synthetic construct
  misc_feature 1..20: note = chemically synthesized
  source 1..20: mol_type = other DNA
ttgcctgggtttttgaatca

SEQ ID NO: 4412 - DNA, 20 bp, synthetic construct
  misc_feature 1..20: note = chemically synthesized
  source 1..20: mol_type = other DNA
gggtttttgaatcagggccc

SEQ ID NO: 4413 - DNA, 20 bp, synthetic construct
  misc_feature 1..20: note = chemically synthesized
  source 1..20: mol_type = other DNA
ttttgaatcagggccccaga

SEQ ID NO: 4414 - DNA, 20 bp, synthetic construct
  misc_feature 1..20: note = chemically synthesized
  source 1..20: mol_type = other DNA
ccccagatagaacaaaaatg

SEQ ID NO: 4415 - DNA, 20 bp, synthetic construct
  misc_feature 1..20: note = chemically synthesized
  source 1..20: mol_type = other DNA
agaacaaaaatgtggttatt

SEQ ID NO: 4416 - DNA, 20 bp, synthetic construct
  misc_feature 1..20: note = chemically synthesized
  source 1..20: mol_type = other DNA
ttgttccaccatcacttgtt

SEQ ID NO: 4417 - DNA, 20 bp, synthetic construct
  misc_feature 1..20: note = chemically synthesized
  source 1..20: mol_type = other DNA
ttccaccatcacttgttgag

SEQ ID NO: 4418 - DNA, 20 bp, synthetic construct
  misc_feature 1..20: note = chemically synthesized
  source 1..20: mol_type = other DNA
agaagactcttttttcattg

SEQ ID NO: 4419 - DNA, 20 bp, synthetic construct
  misc_feature 1..20: note = chemically synthesized
  source 1..20: mol_type = other DNA
cttttttcattgaagtgttt

SEQ ID NO: 4420 - DNA, 20 bp, synthetic construct
  misc_feature 1..20: note = chemically synthesized
  source 1..20: mol_type = other DNA
aatcaatctaccataaatgt

SEQ ID NO: 4421 - DNA, 20 bp, synthetic construct
  misc_feature 1..20: note = chemically synthesized
  source 1..20: mol_type = other DNA
tcaatctaccataaatgtga

SEQ ID NO: 4422 - DNA, 20 bp, synthetic construct
  misc_feature 1..20: note = chemically synthesized
  source 1..20: mol_type = other DNA
taaatgtgagagtttatttc

SEQ ID NO: 4423 - DNA, 20 bp, synthetic construct
  misc_feature 1..20: note = chemically synthesized
  source 1..20: mol_type = other DNA
aatgtgagagtttatttctg

SEQ ID NO: 4424 - DNA, 20 bp, synthetic construct
  misc_feature 1..20: note = chemically synthesized
  source 1..20: mol_type = other DNA
ctatctttttttttttttga

SEQ ID NO: 4425 - DNA, 20 bp, synthetic construct
  misc_feature 1..20: note = chemically synthesized
  source 1..20: mol_type = other DNA
atctttttttttttttgaca

SEQ ID NO: 4426 - DNA, 20 bp, synthetic construct
  misc_feature 1..20: note = chemically synthesized
  source 1..20: mol_type = other DNA
cagagcctcactctattgcc

SEQ ID NO: 4427 - DNA, 20 bp, synthetic construct
  misc_feature 1..20: note = chemically synthesized
  source 1..20: mol_type = other DNA
agagcctcactctattgccc

SEQ ID NO: 4428 - DNA, 20 bp, synthetic construct
  misc_feature 1..20: note = chemically synthesized
  source 1..20: mol_type = other DNA
cctcactctattgcccaggt

SEQ ID NO: 4429 - DNA, 20 bp, synthetic construct
  misc_feature 1..20: note = chemically synthesized
  source 1..20: mol_type = other DNA
tcactctattgcccaggttg

SEQ ID NO: 4430 - DNA, 20 bp, synthetic construct
  misc_feature 1..20: note = chemically synthesized
  source 1..20: mol_type = other DNA
ctattgcccaggttggagtg

SEQ ID NO: 4431 - DNA, 20 bp, synthetic construct
  misc_feature 1..20: note = chemically synthesized
  source 1..20: mol_type = other DNA
ttgcccaggttggagtgcag

SEQ ID NO: 4432 - DNA, 20 bp, synthetic construct
  misc_feature 1..20: note = chemically synthesized
  source 1..20: mol_type = other DNA
ggagtgcagtggcccaatcc

SEQ ID NO: 4433 - DNA, 20 bp, synthetic construct
  misc_feature 1..20: note = chemically synthesized
  source 1..20: mol_type = other DNA
agtggcccaatcccggccac

SEQ ID NO: 4434 - DNA, 20 bp, synthetic construct
  misc_feature 1..20: note = chemically synthesized
  source 1..20: mol_type = other DNA
cggccactggctcctcctcc

SEQ ID NO: 4435 - DNA, 20 bp, synthetic construct
  misc_feature 1..20: note = chemically synthesized
  source 1..20: mol_type = other DNA
ggccactggctcctcctccc

SEQ ID NO: 4436 - DNA, 20 bp, synthetic construct
  misc_feature 1..20: note = chemically synthesized
  source 1..20: mol_type = other DNA
tggctcctcctcccaggttc

SEQ ID NO: 4437 - DNA, 20 bp, synthetic construct
  misc_feature 1..20: note = chemically synthesized
  source 1..20: mol_type = other DNA
ttcaagcaattctcctgcct

SEQ ID NO: 4438 - DNA, 20 bp, synthetic construct
  misc_feature 1..20: note = chemically synthesized
  source 1..20: mol_type = other DNA
ttctcctgcctcagcctccc

SEQ ID NO: 4439 - DNA, 20 bp, synthetic construct
  misc_feature 1..20: note = chemically synthesized
  source 1..20: mol_type = other DNA
tcctgcctcagcctcccaag

SEQ ID NO: 4440 - DNA, 20 bp, synthetic construct
  misc_feature 1..20: note = chemically synthesized
  source 1..20: mol_type = other DNA
gcctcagcctcccaagcagc

SEQ ID NO: 4441 - DNA, 20 bp, synthetic construct
  misc_feature 1..20: note = chemically synthesized
  source 1..20: mol_type = other DNA
cctcagcctcccaagcagct

SEQ ID NO: 4442 - DNA, 20 bp, synthetic construct
  misc_feature 1..20: note = chemically synthesized
  source 1..20: mol_type = other DNA
ctcccaagcagctgggatta

SEQ ID NO: 4443 - DNA, 20 bp, synthetic construct
  misc_feature 1..20: note = chemically synthesized
  source 1..20: mol_type = other DNA
tcccaagcagctgggattac

SEQ ID NO: 4444 - DNA, 20 bp, synthetic construct
  misc_feature 1..20: note = chemically synthesized
  source 1..20: mol_type = other DNA
caggtacctgccaccatgcc

SEQ ID NO: 4445 - DNA, 20 bp, synthetic construct
  misc_feature 1..20: note = chemically synthesized
  source 1..20: mol_type = other DNA
ctggttaatttttgtatttt

SEQ ID NO: 4446 - DNA, 20 bp, synthetic construct
  misc_feature 1..20: note = chemically synthesized
  source 1..20: mol_type = other DNA
gttaatttttgtatttttag

SEQ ID NO: 4447 - DNA, 20 bp, synthetic construct
  misc_feature 1..20: note = chemically synthesized
  source 1..20: mol_type = other DNA
taatttttgtatttttagta

SEQ ID NO: 4448 - DNA, 20 bp, synthetic construct
  misc_feature 1..20: note = chemically synthesized
  source 1..20: mol_type = other DNA
ttttgtatttttagtagaga

SEQ ID NO: 4449 - DNA, 20 bp, synthetic construct
  misc_feature 1..20: note = chemically synthesized
  source 1..20: mol_type = other DNA
tttgtatttttagtagagac

SEQ ID NO: 4450 - DNA, 20 bp, synthetic construct
  misc_feature 1..20: note = chemically synthesized
  source 1..20: mol_type = other DNA
ttgtatttttagtagagacg

SEQ ID NO: 4451 - DNA, 20 bp, synthetic construct
  misc_feature 1..20: note = chemically synthesized
  source 1..20: mol_type = other DNA
gagacggggtttcaccatgt

SEQ ID NO: 4452 - DNA, 20 bp, synthetic construct
  misc_feature 1..20: note = chemically synthesized
  source 1..20: mol_type = other DNA
cggggtttcaccatgttggt

SEQ ID NO: 4453 - DNA, 20 bp, synthetic construct
  misc_feature 1..20: note = chemically synthesized
  source 1..20: mol_type = other DNA
ggggtttcaccatgttggtc

SEQ ID NO: 4454 - DNA, 20 bp, synthetic construct
  misc_feature 1..20: note = chemically synthesized
  source 1..20: mol_type = other DNA
tttcaccatgttggtcaggc

SEQ ID NO: 4455 - DNA, 20 bp, synthetic construct
  misc_feature 1..20: note = chemically synthesized
  source 1..20: mol_type = other DNA
ccatgttggtcaggctggtc

SEQ ID NO: 4456 - DNA, 20 bp, synthetic construct
  misc_feature 1..20: note = chemically synthesized
  source 1..20: mol_type = other DNA
tgcttgggaggctgaggcag

SEQ ID NO: 4457 - DNA, 20 bp, synthetic construct
  misc_feature 1..20: note = chemically synthesized
  source 1..20: mol_type = other DNA
tgggaggaggagccagtggc

SEQ ID NO: 4458 - DNA, 20 bp, synthetic construct
  misc_feature 1..20: note = chemically synthesized
  source 1..20: mol_type = other DNA
ctgcactccaacctgggcaa

SEQ ID NO: 4459 - DNA, 20 bp, synthetic construct
  misc_feature 1..20: note = chemically synthesized
  source 1..20: mol_type = other DNA
ctgtcaaaaaaaaaaaaaga

SEQ ID NO: 4460 - DNA, 20 bp, synthetic construct
  misc_feature 1..20: note = chemically synthesized
  source 1..20: mol_type = other DNA
gattatagattatagcataa

SEQ ID NO: 4461 - DNA, 20 bp, synthetic construct
  misc_feature 1..20: note = chemically synthesized
  source 1..20: mol_type = other DNA
atggtagattgatttttgat

SEQ ID NO: 4462 - DNA, 20 bp, synthetic construct
  misc_feature 1..20: note = chemically synthesized
  source 1..20: mol_type = other DNA
ccaaaacacttcaatgaaaa

SEQ ID NO: 4463 - DNA, 20 bp, synthetic construct
  misc_feature 1..20: note = chemically synthesized
  source 1..20: mol_type = other DNA
aacaagtgatggtggaacaa

SEQ ID NO: 4464 - DNA, 20 bp, synthetic construct
  misc_feature 1..20: note = chemically synthesized
  source 1..20: mol_type = other DNA
ctctcatacactgctgatag

SEQ ID NO: 4465 - DNA, 20 bp, synthetic construct
  misc_feature 1..20: note = chemically synthesized
  source 1..20: mol_type = other DNA
ataaaatgcttactttggaa

SEQ ID NO: 4466 - DNA, 20 bp, synthetic construct
  misc_feature 1..20: note = chemically synthesized
  source 1..20: mol_type = other DNA
aaaccaatgtccatcggctg

SEQ ID NO: 4467 - DNA, 20 bp, synthetic construct
  misc_feature 1..20: note = chemically synthesized
  source 1..20: mol_type = other DNA
caatgtccatcggctgatga

SEQ ID NO: 4468 - DNA, 20 bp, synthetic construct
  misc_feature 1..20: note = chemically synthesized
  source 1..20: mol_type = other DNA
ggctgggaggggaggaggag

SEQ ID NO: 4469 - DNA, 20 bp, synthetic construct
  misc_feature 1..20: note = chemically synthesized
  source 1..20: mol_type = other DNA
ggggaggaggaggagaatgg

SEQ ID NO: 4470 - DNA, 20 bp, synthetic construct
  misc_feature 1..20: note = chemically synthesized
  source 1..20: mol_type = other DNA
atggaggaatctgggaggcg

SEQ ID NO: 4471 - DNA, 20 bp, synthetic construct
  misc_feature 1..20: note = chemically synthesized
  source 1..20: mol_type = other DNA
aatctgggaggcgatgaatt

SEQ ID NO: 4472 - DNA, 20 bp, synthetic construct
  misc_feature 1..20: note = chemically synthesized
  source 1..20: mol_type = other DNA
gaggcgatgaattaagggta

SEQ ID NO: 4473 - DNA, 20 bp, synthetic construct
  misc_feature 1..20: note = chemically synthesized
  source 1..20: mol_type = other DNA
tatttattttatttttgaga

SEQ ID NO: 4474 - DNA, 20 bp, synthetic construct
  misc_feature 1..20: note = chemically synthesized
  source 1..20: mol_type = other DNA
ttcgctcttgttgcccaggc

SEQ ID NO: 4475 - DNA, 20 bp, synthetic construct
  misc_feature 1..20: note = chemically synthesized
  source 1..20: mol_type = other DNA
gattctcctgtctcagcttc

SEQ ID NO: 4476 - DNA, 20 bp, synthetic construct
  misc_feature 1..20: note = chemically synthesized
  source 1..20: mol_type = other DNA
gtctcagcttcccgagtagc

SEQ ID NO: 4477 - DNA, 20 bp, synthetic construct
  misc_feature 1..20: note = chemically synthesized
  source 1..20: mol_type = other DNA
cttgctcttgtctcccatgc

SEQ ID NO: 4478 - DNA, 20 bp, synthetic construct
  misc_feature 1..20: note = chemically synthesized
  source 1..20: mol_type = other DNA
ctcactgcaacctacgcctc

SEQ ID NO: 4479 - DNA, 20 bp, synthetic construct
  misc_feature 1..20: note = chemically synthesized
  source 1..20: mol_type = other DNA
gcctcagcctctaatgtagc

SEQ ID NO: 4480 - DNA, 20 bp, synthetic construct
  misc_feature 1..20: note = chemically synthesized
  source 1..20: mol_type = other DNA
ttttgtatttttagtaaaga

SEQ ID NO: 4481 - DNA, 20 bp, synthetic construct
  misc_feature 1..20: note = chemically synthesized
  source 1..20: mol_type = other DNA
tcctcggccgcccaaagtgc

SEQ ID NO: 4482 - DNA, 20 bp, synthetic construct
  misc_feature 1..20: note = chemically synthesized
  source 1..20: mol_type = other DNA
aatttttgcattttacatag

SEQ ID NO: 4483 - DNA, 20 bp, synthetic construct
  misc_feature 1..20: note = chemically synthesized
  source 1..20: mol_type = other DNA
cttaccaaaaattgaaaaaa

SEQ ID NO: 4484 - DNA, 20 bp, synthetic construct
  misc_feature 1..20: note = chemically synthesized
  source 1..20: mol_type = other DNA
tgatatcctgtttgattttc

SEQ ID NO: 4485 - DNA, 20 bp, synthetic construct
  misc_feature 1..20: note = chemically synthesized
  source 1..20: mol_type = other DNA
gcttacaaaaataatgcctg

SEQ ID NO: 4486 - DNA, 20 bp, synthetic construct
  misc_feature 1..20: note = chemically synthesized
  source 1..20: mol_type = other DNA
tggcatcccatactgttact

SEQ ID NO: 4487 - DNA, 20 bp, synthetic construct
  misc_feature 1..20: note = chemically synthesized
  source 1..20: mol_type = other DNA
tgttactgggaattatgcat

SEQ ID NO: 4488 - DNA, 20 bp, synthetic construct
  misc_feature 1..20: note = chemically synthesized
  source 1..20: mol_type = other DNA
actgggaattatgcattggg

SEQ ID NO: 4489 - DNA, 20 bp, synthetic construct
  misc_feature 1..20: note = chemically synthesized
  source 1..20: mol_type = other DNA
cagagctcaaggtgctttta

SEQ ID NO: 4490 - DNA, 20 bp, synthetic construct
  misc_feature 1..20: note = chemically synthesized
  source 1..20: mol_type = other DNA
cttttatggggtttgtgggg

SEQ ID NO: 4491 - DNA, 20 bp, synthetic construct
  misc_feature 1..20: note = chemically synthesized
  source 1..20: mol_type = other DNA
agttgaggtttgggctgtat

SEQ ID NO: 4492 - DNA, 20 bp, synthetic construct
  misc_feature 1..20: note = chemically synthesized
  source 1..20: mol_type = other DNA
tttgggctgtatctgagtga

SEQ ID NO: 4493 - DNA, 20 bp, synthetic construct
  misc_feature 1..20: note = chemically synthesized
  source 1..20: mol_type = other DNA
tttgttaagaaaagcctccc

SEQ ID NO: 4494 - DNA, 20 bp, synthetic construct
  misc_feature 1..20: note = chemically synthesized
  source 1..20: mol_type = other DNA
taatgatggcatgatgaact

SEQ ID NO: 4495 - DNA, 20 bp, synthetic construct
  misc_feature 1..20: note = chemically synthesized
  source 1..20: mol_type = other DNA
gttgggcatgtgccacctta

SEQ ID NO: 4496 - DNA, 20 bp, synthetic construct
  misc_feature 1..20: note = chemically synthesized
  source 1..20: mol_type = other DNA
taccctcctttctctttctc

SEQ ID NO: 4497 - DNA, 20 bp, synthetic construct
  misc_feature 1..20: note = chemically synthesized
  source 1..20: mol_type = other DNA
ttatcataaactccatccct

SEQ ID NO: 4498 - DNA, 20 bp, synthetic construct
  misc_feature 1..20: note = chemically synthesized
  source 1..20: mol_type = other DNA
tccatcccttagggtggcat

SEQ ID NO: 4499 - DNA, 20 bp, synthetic construct
  misc_feature 1..20: note = chemically synthesized
  source 1..20: mol_type = other DNA
gcattagggtagtcttgggc

SEQ ID NO: 4500 - DNA, 20 bp, synthetic construct
  misc_feature 1..20: note = chemically synthesized
  source 1..20: mol_type = other DNA
acccattaaatcagtgtgtc

SEQ ID NO: 4501 - DNA, 20 bp, synthetic construct
  misc_feature 1..20: note = chemically synthesized
  source 1..20: mol_type = other DNA
ggctgtggaaggtgtttcag

SEQ ID NO: 4502 - DNA, 20 bp, synthetic construct
  misc_feature 1..20: note = chemically synthesized
  source 1..20: mol_type = other DNA
aatgttatgacttaattaat

SEQ ID NO: 4503 - DNA, 20 bp, synthetic construct
  misc_feature 1..20: note = chemically synthesized
  source 1..20: mol_type = other DNA
taaaatttttaaatgtatga

SEQ ID NO: 4504 - DNA, 20 bp, synthetic construct
  misc_feature 1..20: note = chemically synthesized
  source 1..20: mol_type = other DNA
cccaatcaacaacacccctt

SEQ ID NO: 4505 - DNA, 20 bp, synthetic construct
  misc_feature 1..20: note = chemically synthesized
  source 1..20: mol_type = other DNA
tttaaaaaccaagggggaca

SEQ ID NO: 4506 - DNA, 20 bp, synthetic construct
  misc_feature 1..20: note = chemically synthesized
  source 1..20: mol_type = other DNA
ctgagcctaggcaatagctg

SEQ ID NO: 4507 - DNA, 20 bp, synthetic construct
  misc_feature 1..20: note = chemically synthesized
  source 1..20: mol_type = other DNA
cctgcaggggcgcttgctgc

SEQ ID NO: 4508 - DNA, 20 bp, synthetic construct
  misc_feature 1..20: note = chemically synthesized
  source 1..20: mol_type = other DNA
gggcgaactaggggcgcggc

SEQ ID NO: 4509 - DNA, 20 bp, synthetic construct
  misc_feature 1..20: note = chemically synthesized
  source 1..20: mol_type = other DNA
ctagctttttctttgcgctt

SEQ ID NO: 4510 - DNA, 20 bp, synthetic construct
  misc_feature 1..20: note = chemically synthesized
  source 1..20: mol_type = other DNA
tctgcgtccagaccccgtga

SEQ ID NO: 4511 - DNA, 20 bp, synthetic construct
  misc_feature 1..20: note = chemically synthesized
  source 1..20: mol_type = other DNA
cctaccactgaactgcagat

SEQ ID NO: 4512 - DNA, 20 bp, synthetic construct
  misc_feature 1..20: note = chemically synthesized
  source 1..20: mol_type = other DNA
ccccggctgtcccggctctg

SEQ ID NO: 4513 - DNA, 20 bp, synthetic construct
  misc_feature 1..20: note = chemically synthesized
  source 1..20: mol_type = other DNA
gcccactcccttcccccaac

SEQ ID NO: 4514 - DNA, 20 bp, synthetic construct
  misc_feature 1..20: note = chemically synthesized
  source 1..20: mol_type = other DNA
gggctccttgaacctggaac

SEQ ID NO: 4515 - DNA, 20 bp, synthetic construct
  misc_feature 1..20: note = chemically synthesized
  source 1..20: mol_type = other DNA
tccaaacaggaagttcttcc

SEQ ID NO: 4516 - DNA, 20 bp, synthetic construct
  misc_feature 1..20: note = chemically synthesized
  source 1..20: mol_type = other DNA
aaggctgagcaaacccacag

SEQ ID NO: 4517 - DNA, 20 bp, synthetic construct
  misc_feature 1..20: note = chemically synthesized
  source 1..20: mol_type = other DNA
aacccacagcaggatccgca

SEQ ID NO: 4518 - DNA, 20 bp, synthetic construct
  misc_feature 1..20: note = chemically synthesized
  source 1..20: mol_type = other DNA
cacggggtttccacctcaga

SEQ ID NO: 4519 - DNA, 20 bp, synthetic construct
  misc_feature 1..20: note = chemically synthesized
  source 1..20: mol_type = other DNA
gttgggcggtgggggcgcga

SEQ ID NO: 4520 - DNA, 20 bp, synthetic construct
  misc_feature 1..20: note = chemically synthesized
  source 1..20: mol_type = other DNA
gggcgcgaaagagtggcgtt

SEQ ID NO: 4521 - DNA, 20 bp, synthetic construct
  misc_feature 1..20: note = chemically synthesized
  source 1..20: mol_type = other DNA
gaaagagtggcgttggggat

SEQ ID NO: 4522 - DNA, 20 bp, synthetic construct
  misc_feature 1..20: note = chemically synthesized
  source 1..20: mol_type = other DNA
cacccacttttggtgagacc

SEQ ID NO: 4523 - DNA, 20 bp, synthetic construct
  misc_feature 1..20: note = chemically synthesized
  source 1..20: mol_type = other DNA
agacctggggtggaggtctc

SEQ ID NO: 4524 - DNA, 20 bp, synthetic construct
  misc_feature 1..20: note = chemically synthesized
  source 1..20: mol_type = other DNA
ttattttactagaagttaac

SEQ ID NO: 4525 - DNA, 20 bp, synthetic construct
  misc_feature 1..20: note = chemically synthesized
  source 1..20: mol_type = other DNA
gtagtgtagcacagtgttct

SEQ ID NO: 4526 - DNA, 20 bp, synthetic construct
  misc_feature 1..20: note = chemically synthesized
  source 1..20: mol_type = other DNA
gccggcctcagcacagcact

SEQ ID NO: 4527 - DNA, 20 bp, synthetic construct
  misc_feature 1..20: note = chemically synthesized
  source 1..20: mol_type = other DNA
atccacattttacacatgac

SEQ ID NO: 4528 - DNA, 20 bp, synthetic construct
  misc_feature 1..20: note = chemically synthesized
  source 1..20: mol_type = other DNA
acatcacactgcattagagg

SEQ ID NO: 4529 - DNA, 20 bp, synthetic construct
  misc_feature 1..20: note = chemically synthesized
  source 1..20: mol_type = other DNA
ttcattgtttacaagtgtaa

SEQ ID NO: 4530 - DNA, 20 bp, synthetic construct
  misc_feature 1..20: note = chemically synthesized
  source 1..20: mol_type = other DNA
atatacaacatcaggaaatc

SEQ ID NO: 4531 - DNA, 20 bp, synthetic construct
  misc_feature 1..20: note = chemically synthesized
  source 1..20: mol_type = other DNA
agcagagacatgaaggaaat

SEQ ID NO: 4532 - DNA, 20 bp, synthetic construct
  misc_feature 1..20: note = chemically synthesized
  source 1..20: mol_type = other DNA
agcagtatttcccaggcaaa

SEQ ID NO: 4533 - DNA, 20 bp, synthetic construct
  misc_feature 1..20: note = chemically synthesized
  source 1..20: mol_type = other DNA
aactgagtgggcctggcaag

SEQ ID NO: 4534 - DNA, 20 bp, synthetic construct
  misc_feature 1..20: note = chemically synthesized
  source 1..20: mol_type = other DNA
ctggcaagttggattaaaaa

SEQ ID NO: 4535 - DNA, 20 bp, synthetic construct
  misc_feature 1..20: note = chemically synthesized
  source 1..20: mol_type = other DNA
gtggggggggggggcggcgt

SEQ ID NO: 4536 - DNA, 20 bp, synthetic construct
  misc_feature 1..20: note = chemically synthesized
  source 1..20: mol_type = other DNA
gggggactaccatctgcatg

SEQ ID NO: 4537 - DNA, 20 bp, synthetic construct
  misc_feature 1..20: note = chemically synthesized
  source 1..20: mol_type = other DNA
caaactcctggttaagaagc

SEQ ID NO: 4538 - DNA, 20 bp, synthetic construct
  misc_feature 1..20: note = chemically synthesized
  source 1..20: mol_type = other DNA
aaaataaacaagtagtgctg

SEQ ID NO: 4539 - DNA, 20 bp, synthetic construct
  misc_feature 1..20: note = chemically synthesized
  source 1..20: mol_type = other DNA
aggcgcctgtaggctgtggt

SEQ ID NO: 4540 - DNA, 20 bp, synthetic construct
  misc_feature 1..20: note = chemically synthesized
  source 1..20: mol_type = other DNA
tgtggtgtgaattctagcca

SEQ ID NO: 4541 - DNA, 20 bp, synthetic construct
  misc_feature 1..20: note = chemically synthesized
  source 1..20: mol_type = other DNA
tctggctgctatgtggaaag

SEQ ID NO: 4542 - DNA, 20 bp, synthetic construct
  misc_feature 1..20: note = chemically synthesized
  source 1..20: mol_type = other DNA
acagtccaggcaagaggtag

SEQ ID NO: 4543 - DNA, 20 bp, synthetic construct
  misc_feature 1..20: note = chemically synthesized
  source 1..20: mol_type = other DNA
gcaagaggtagtggagtggg

SEQ ID NO: 4544 - DNA, 20 bp, synthetic construct
  misc_feature 1..20: note = chemically synthesized
  source 1..20: mol_type = other DNA
ggctgggtgggaacagaaaa

SEQ ID NO: 4545 - DNA, 20 bp, synthetic construct
  misc_feature 1..20: note = chemically synthesized
  source 1..20: mol_type = other DNA
gagtgacaaaccattgtctc

SEQ ID NO: 4546 - DNA, 20 bp, synthetic construct
  misc_feature 1..20: note = chemically synthesized
  source 1..20: mol_type = other DNA
tattctgaaggaagttgctg

SEQ ID NO: 4547 - DNA, 20 bp, synthetic construct
  misc_feature 1..20: note = chemically synthesized
  source 1..20: mol_type = other DNA
atgttgtgtgagagaaagag

SEQ ID NO: 4548 - DNA, 20 bp, synthetic construct
  misc_feature 1..20: note = chemically synthesized
  source 1..20: mol_type = other DNA
gagagaaagagaagaattgg

SEQ ID NO: 4549 - DNA, 20 bp, synthetic construct
  misc_feature 1..20: note = chemically synthesized
  source 1..20: mol_type = other DNA
gagagcagattcctgagctc

SEQ ID NO: 4550 - DNA, 20 bp, synthetic construct
  misc_feature 1..20: note = chemically synthesized
  source 1..20: mol_type = other DNA
acaaaaaatacaaaaattag

SEQ ID NO: 4551 - DNA, 20 bp, synthetic construct
  misc_feature 1..20: note = chemically synthesized
  source 1..20: mol_type = other DNA
ctactcgggaggctgaggtg

SEQ ID NO: 4552 - DNA, 20 bp, synthetic construct
  misc_feature 1..20: note = chemically synthesized
  source 1..20: mol_type = other DNA
cctgaccccctgaaaaagag

SEQ ID NO: 4553 - DNA, 20 bp, synthetic construct
  misc_feature 1..20: note = chemically synthesized
  source 1..20: mol_type = other DNA
aattttattggcctgagcag

SEQ ID NO: 4554 - DNA, 20 bp, synthetic construct
  misc_feature 1..20: note = chemically synthesized
  source 1..20: mol_type = other DNA
aggcagaggaaagagcagtt

SEQ ID NO: 4555 - DNA, 20 bp, synthetic construct
  misc_feature 1..20: note = chemically synthesized
  source 1..20: mol_type = other DNA
agagcagtttggggtaaatc

SEQ ID NO: 4556 - DNA, 20 bp, synthetic construct
  misc_feature 1..20: note = chemically synthesized
  source 1..20: mol_type = other DNA
ccacataggcagttcagtgt

SEQ ID NO: 4557 - DNA, 20 bp, synthetic construct
  misc_feature 1..20: note = chemically synthesized
  source 1..20: mol_type = other DNA
caggtagatcatttgaggtc

SEQ ID NO: 4558 - DNA, 20 bp, synthetic construct
  misc_feature 1..20: note = chemically synthesized
  source 1..20: mol_type = other DNA
ttttcaggaggcttaggtag

SEQ ID NO: 4559 - DNA, 20 bp, synthetic construct
  misc_feature 1..20: note = chemically synthesized
  source 1..20: mol_type = other DNA
ttgtgccactgcactccagc

SEQ ID NO: 4560 - DNA, 20 bp, synthetic construct
  misc_feature 1..20: note = chemically synthesized
  source 1..20: mol_type = other DNA
ctgcactccagcctgggtga

SEQ ID NO: 4561 - DNA, 20 bp, synthetic construct
  misc_feature 1..20: note = chemically synthesized
  source 1..20: mol_type = other DNA
aaaaaaaaaaaaaaaactga

SEQ ID NO: 4562 - DNA, 20 bp, synthetic construct
  misc_feature 1..20: note = chemically synthesized
  source 1..20: mol_type = other DNA
aaactgaaggaattattcct

SEQ ID NO: 4563 - DNA, 20 bp, synthetic construct
  misc_feature 1..20: note = chemically synthesized
  source 1..20: mol_type = other DNA
aaggaattattcctcaggat

SEQ ID NO: 4564 - DNA, 20 bp, synthetic construct
  misc_feature 1..20: note = chemically synthesized
  source 1..20: mol_type = other DNA
tttgccctgagcaccaactc

SEQ ID NO: 4565 - DNA, 20 bp, synthetic construct
  misc_feature 1..20: note = chemically synthesized
  source 1..20: mol_type = other DNA
agacacaccttaacattttc

SEQ ID NO: 4566 - DNA, 20 bp, synthetic construct
  misc_feature 1..20: note = chemically synthesized
  source 1..20: mol_type = other DNA
ctagaatccaccagctttag

SEQ ID NO: 4567 - DNA, 20 bp, synthetic construct
  misc_feature 1..20: note = chemically synthesized
  source 1..20: mol_type = other DNA
ttagtggagtctgtctaatc

SEQ ID NO: 4568 - DNA, 20 bp, synthetic construct
  misc_feature 1..20: note = chemically synthesized
  source 1..20: mol_type = other DNA
gtctgtctaatcatgagtat

SEQ ID NO: 4569 - DNA, 20 bp, synthetic construct
  misc_feature 1..20: note = chemically synthesized
  source 1..20: mol_type = other DNA
tctaatcatgagtattggaa

SEQ ID NO: 4570 - DNA, 20 bp, synthetic construct
  misc_feature 1..20: note = chemically synthesized
  source 1..20: mol_type = other DNA
ataggatctgggggcagtga

SEQ ID NO: 4571 - DNA, 20 bp, synthetic construct
  misc_feature 1..20: note = chemically synthesized
  source 1..20: mol_type = other DNA
gaccagacacagctgatggt

SEQ ID NO: 4572 - DNA, 20 bp, synthetic construct
  misc_feature 1..20: note = chemically synthesized
  source 1..20: mol_type = other DNA
actctctgcactacctcttc

SEQ ID NO: 4573 - DNA, 20 bp, synthetic construct
  misc_feature 1..20: note = chemically synthesized
  source 1..20: mol_type = other DNA
tgtttgaagctttgggctac

SEQ ID NO: 4574 - DNA, 20 bp, synthetic construct
  misc_feature 1..20: note = chemically synthesized
  source 1..20: mol_type = other DNA
tgttcgtgttctatgatcat

SEQ ID NO: 4575 - DNA, 20 bp, synthetic construct
  misc_feature 1..20: note = chemically synthesized
  source 1..20: mol_type = other DNA
cgtgtggagccccgaactcc

SEQ ID NO: 4576 - DNA, 20 bp, synthetic construct
  misc_feature 1..20: note = chemically synthesized
  source 1..20: mol_type = other DNA
cgaactccatgggtttccag

SEQ ID NO: 4577 - DNA, 20 bp, synthetic construct
  misc_feature 1..20: note = chemically synthesized
  source 1..20: mol_type = other DNA
caagccagatgtggctgcag

SEQ ID NO: 4578 - DNA, 20 bp, synthetic construct
  misc_feature 1..20: note = chemically synthesized
  source 1..20: mol_type = other DNA
agatgtggctgcagctgagt

SEQ ID NO: 4579 - DNA, 20 bp, synthetic construct
  misc_feature 1..20: note = chemically synthesized
  source 1..20: mol_type = other DNA
gcagctgagtcagagtctga

SEQ ID NO: 4580 - DNA, 20 bp, synthetic construct
  misc_feature 1..20: note = chemically synthesized
  source 1..20: mol_type = other DNA
tgagtcagagtctgaaaggg

SEQ ID NO: 4581 - DNA, 20 bp, synthetic construct
  misc_feature 1..20: note = chemically synthesized
  source 1..20: mol_type = other DNA
tggaaaatcacaaccacagc

SEQ ID NO: 4582 - DNA, 20 bp, synthetic construct
  misc_feature 1..20: note = chemically synthesized
  source 1..20: mol_type = other DNA
gtgggagcagggaagaggga

SEQ ID NO: 4583 - DNA, 20 bp, synthetic construct
  misc_feature 1..20: note = chemically synthesized
  source 1..20: mol_type = other DNA
cctgagatcatttggtcctt

SEQ ID NO: 4584 - DNA, 20 bp, synthetic construct
  misc_feature 1..20: note = chemically synthesized
  source 1..20: mol_type = other DNA
tggttgcagttaacaaggct

SEQ ID NO: 4585 - DNA, 20 bp, synthetic construct
  misc_feature 1..20: note = chemically synthesized
  source 1..20: mol_type = other DNA
aacaaggctggggatttttc

SEQ ID NO: 4586 - DNA, 20 bp, synthetic construct
  misc_feature 1..20: note = chemically synthesized
  source 1..20: mol_type = other DNA
taccgagggctactggaagt

SEQ ID NO: 4587 - DNA, 20 bp, synthetic construct
  misc_feature 1..20: note = chemically synthesized
  source 1..20: mol_type = other DNA
gtatgatgggcaggaccacc

SEQ ID NO: 4588 - DNA, 20 bp, synthetic construct
  misc_feature 1..20: note = chemically synthesized
  source 1..20: mol_type = other DNA
ttgaattctgccctgacaca

SEQ ID NO: 4589 - DNA, 20 bp, synthetic construct
  misc_feature 1..20: note = chemically synthesized
  source 1..20: mol_type = other DNA
cagggcctggcccaccaagc

SEQ ID NO: 4590 - DNA, 20 bp, synthetic construct
  misc_feature 1..20: note = chemically synthesized
  source 1..20: mol_type = other DNA
ctgcccctatactctagtgg

SEQ ID NO: 4591 - DNA, 20 bp, synthetic construct
  misc_feature 1..20: note = chemically synthesized
  source 1..20: mol_type = other DNA
gtggaggaggttgcagggca

SEQ ID NO: 4592 - DNA, 20 bp, synthetic construct
  misc_feature 1..20: note = chemically synthesized
  source 1..20: mol_type = other DNA
cagggcacggaatccctggt

SEQ ID NO: 4593 - DNA, 20 bp, synthetic construct
  misc_feature 1..20: note = chemically synthesized
  source 1..20: mol_type = other DNA
ggaagggactttctcaatcc

SEQ ID NO: 4594 - DNA, 20 bp, synthetic construct
  misc_feature 1..20: note = chemically synthesized
  source 1..20: mol_type = other DNA
gtatgagacagccacaagtc

SEQ ID NO: 4595 - DNA, 20 bp, synthetic construct
  misc_feature 1..20: note = chemically synthesized
  source 1..20: mol_type = other DNA
cagcactttgggaggccgag

SEQ ID NO: 4596 - DNA, 20 bp, synthetic construct
  misc_feature 1..20: note = chemically synthesized
  source 1..20: mol_type = other DNA
aggcgggtggtcacaaggtc

SEQ ID NO: 4597 - DNA, 20 bp, synthetic construct
  misc_feature 1..20: note = chemically synthesized
  source 1..20: mol_type = other DNA
ctgcactccagcctaggcag

SEQ ID NO: 4598 - DNA, 20 bp, synthetic construct
  misc_feature 1..20: note = chemically synthesized
  source 1..20: mol_type = other DNA
aaaaaaaaaaaaaaaaaaaa

SEQ ID NO: 4599 - DNA, 20 bp, synthetic construct
  misc_feature 1..20: note = chemically synthesized
  source 1..20: mol_type = other DNA
tcagagatctcagctatcat

SEQ ID NO: 4600 - DNA, 20 bp, synthetic construct
  misc_feature 1..20: note = chemically synthesized
  source 1..20: mol_type = other DNA
tatcaagtgaggccacttat

SEQ ID NO: 4601 - DNA, 20 bp, synthetic construct
  misc_feature 1..20: note = chemically synthesized
  source 1..20: mol_type = other DNA
gaggccacttatcagagtag

SEQ ID NO: 4602 - DNA, 20 bp, synthetic construct
  misc_feature 1..20: note = chemically synthesized
  source 1..20: mol_type = other DNA
tatctatcagaacaaagaac

SEQ ID NO: 4603 - DNA, 20 bp, synthetic construct
  misc_feature 1..20: note = chemically synthesized
  source 1..20: mol_type = other DNA
ctctccaagtgacactgtgt

SEQ ID NO: 4604 - DNA, 20 bp, synthetic construct
  misc_feature 1..20: note = chemically synthesized
  source 1..20: mol_type = other DNA
gtagcttgtttttttctgaa

SEQ ID NO: 4605 - DNA, 20 bp, synthetic construct
  misc_feature 1..20: note = chemically synthesized
  source 1..20: mol_type = other DNA
aaagttccagtcttcctggc

SEQ ID NO: 4606 - DNA, 20 bp, synthetic construct
  misc_feature 1..20: note = chemically synthesized
  source 1..20: mol_type = other DNA
acatcaccatgaagtggctg

SEQ ID NO: 4607 - DNA, 20 bp, synthetic construct
  misc_feature 1..20: note = chemically synthesized
  source 1..20: mol_type = other DNA
ggctgaaggataagcagcca

SEQ ID NO: 4608 - DNA, 20 bp, synthetic construct
  misc_feature 1..20: note = chemically synthesized
  source 1..20: mol_type = other DNA
taagcagccaatggatgcca

SEQ ID NO: 4609 - DNA, 20 bp, synthetic construct
  misc_feature 1..20: note = chemically synthesized
  source 1..20: mol_type = other DNA
ctaaagacgtattgcccaat

SEQ ID NO: 4610 - DNA, 20 bp, synthetic construct
  misc_feature 1..20: note = chemically synthesized
  source 1..20: mol_type = other DNA
ggggatgggacctaccaggg

SEQ ID NO: 4611 - DNA, 20 bp, synthetic construct
  misc_feature 1..20: note = chemically synthesized
  source 1..20: mol_type = other DNA
gccaggtggagcacccaggc

SEQ ID NO: 4612 - DNA, 20 bp, synthetic construct
  misc_feature 1..20: note = chemically synthesized
  source 1..20: mol_type = other DNA
atcagcccctcattgtgatc

SEQ ID NO: 4613 - DNA, 20 bp, synthetic construct
  misc_feature 1..20: note = chemically synthesized
  source 1..20: mol_type = other DNA
aggagctgagaaaatctatt

SEQ ID NO: 4614 - DNA, 20 bp, synthetic construct
  misc_feature 1..20: note = chemically synthesized
  source 1..20: mol_type = other DNA
aaaatctattgggggttgag

SEQ ID NO: 4615 - DNA, 20 bp, synthetic construct
  misc_feature 1..20: note = chemically synthesized
  source 1..20: mol_type = other DNA
ggtaattatggcagtgagat

SEQ ID NO: 4616 - DNA, 20 bp, synthetic construct
  misc_feature 1..20: note = chemically synthesized
  source 1..20: mol_type = other DNA
tgaggatctgctctttgtta

SEQ ID NO: 4617 - DNA, 20 bp, synthetic construct
  misc_feature 1..20: note = chemically synthesized
  source 1..20: mol_type = other DNA
tctttgttagggggtgggct

SEQ ID NO: 4618 - DNA, 20 bp, synthetic construct
  misc_feature 1..20: note = chemically synthesized
  source 1..20: mol_type = other DNA
ccgtctggcaccctagtcat

SEQ ID NO: 4619 - DNA, 20 bp, synthetic construct
  misc_feature 1..20: note = chemically synthesized
  source 1..20: mol_type = other DNA
ctagtcattggagtcatcag

SEQ ID NO: 4620 - DNA, 20 bp, synthetic construct
  misc_feature 1..20: note = chemically synthesized
  source 1..20: mol_type = other DNA
tttgtcgtcatcttgttcat

SEQ ID NO: 4621 - DNA, 20 bp, synthetic construct
  misc_feature 1..20: note = chemically synthesized
  source 1..20: mol_type = other DNA
tcataatattaaggaagagg

SEQ ID NO: 4622 - DNA, 20 bp, synthetic construct
  misc_feature 1..20: note = chemically synthesized
  source 1..20: mol_type = other DNA
aaggaagaggcagggttcaa

SEQ ID NO: 4623 - DNA, 20 bp, synthetic construct
  misc_feature 1..20: note = chemically synthesized
  source 1..20: mol_type = other DNA
acagtgggaagaggggcaga

SEQ ID NO: 4624 - DNA, 20 bp, synthetic construct
  misc_feature 1..20: note = chemically synthesized
  source 1..20: mol_type = other DNA
cagaaaataatggttctccc

SEQ ID NO: 4625 - DNA, 20 bp, synthetic construct
  misc_feature 1..20: note = chemically synthesized
  source 1..20: mol_type = other DNA
ctcagaacccaaatctggta

SEQ ID NO: 4626 - DNA, 20 bp, synthetic construct
  misc_feature 1..20: note = chemically synthesized
  source 1..20: mol_type = other DNA
gcaggcaggaagcaaatgct

SEQ ID NO: 4627 - DNA, 20 bp, synthetic construct
  misc_feature 1..20: note = chemically synthesized
  source 1..20: mol_type = other DNA
atgcttagggtgtcaaagga

SEQ ID NO: 4628 - DNA, 20 bp, synthetic construct
  misc_feature 1..20: note = chemically synthesized
  source 1..20: mol_type = other DNA
aagaatgatcacattcagct

SEQ ID NO: 4629 - DNA, 20 bp, synthetic construct
  misc_feature 1..20: note = chemically synthesized
  source 1..20: mol_type = other DNA
ctggggatcaagatagcctt

SEQ ID NO: 4630 - DNA, 20 bp, synthetic construct
  misc_feature 1..20: note = chemically synthesized
  source 1..20: mol_type = other DNA
tctggatcttgaaggagaag

SEQ ID NO: 4631 - DNA, 20 bp, synthetic construct
  misc_feature 1..20: note = chemically synthesized
  source 1..20: mol_type = other DNA
ggagcaaccatgccaagtag

SEQ ID NO: 4632 - DNA, 20 bp, synthetic construct
  misc_feature 1..20: note = chemically synthesized
  source 1..20: mol_type = other DNA
ataattactgtaccttaacc

SEQ ID NO: 4633 - DNA, 20 bp, synthetic construct
  misc_feature 1..20: note = chemically synthesized
  source 1..20: mol_type = other DNA
catctgtggtgtagggaaaa

SEQ ID NO: 4634 - DNA, 20 bp, synthetic construct
  misc_feature 1..20: note = chemically synthesized
  source 1..20: mol_type = other DNA
cagaaagaagccagctcata

SEQ ID NO: 4635 - DNA, 20 bp, synthetic construct
  misc_feature 1..20: note = chemically synthesized
  source 1..20: mol_type = other DNA
agccagctcatacagagtcc

SEQ ID NO: 4636 - DNA, 20 bp, synthetic construct
  misc_feature 1..20: note = chemically synthesized
  source 1..20: mol_type = other DNA
tacagagtccaagggtcttt

SEQ ID NO: 4637 - DNA, 20 bp, synthetic construct
  misc_feature 1..20: note = chemically synthesized
  source 1..20: mol_type = other DNA
tccaagggtcttttgggata

SEQ ID NO: 4638 - DNA, 20 bp, synthetic construct
  misc_feature 1..20: note = chemically synthesized
  source 1..20: mol_type = other DNA
ggatattgggttatgatcac

SEQ ID NO: 4639 - DNA, 20 bp, synthetic construct
  misc_feature 1..20: note = chemically synthesized
  source 1..20: mol_type = other DNA
tgatcactggggtgtcattg

SEQ ID NO: 4640 - DNA, 20 bp, synthetic construct
  misc_feature 1..20: note = chemically synthesized
  source 1..20: mol_type = other DNA
accacgatctcccttatatg

SEQ ID NO: 4641 - DNA, 20 bp, synthetic construct
  misc_feature 1..20: note = chemically synthesized
  source 1..20: mol_type = other DNA
gtgcccaggtctaaattgag

SEQ ID NO: 4642 - DNA, 20 bp, synthetic construct
  misc_feature 1..20: note = chemically synthesized
  source 1..20: mol_type = other DNA
ccaggtctaaattgagatgg

SEQ ID NO: 4643 - DNA, 20 bp, synthetic construct
  misc_feature 1..20: note = chemically synthesized
  source 1..20: mol_type = other DNA
aggtttgtgatgcctctttc

SEQ ID NO: 4644 - DNA, 20 bp, synthetic construct
  misc_feature 1..20: note = chemically synthesized
  source 1..20: mol_type = other DNA
gcactacgtcttagctgaac

SEQ ID NO: 4645 - DNA, 20 bp, synthetic construct
  misc_feature 1..20: note = chemically synthesized
  source 1..20: mol_type = other DNA
caaaactagagactcaaaga

SEQ ID NO: 4646 - DNA, 20 bp, synthetic construct
  misc_feature 1..20: note = chemically synthesized
  source 1..20: mol_type = other DNA
gagctcttcatgtttcagga

SEQ ID NO: 4647 - DNA, 20 bp, synthetic construct
  misc_feature 1..20: note = chemically synthesized
  source 1..20: mol_type = other DNA
agatttccccatttaggttt

SEQ ID NO: 4648 - DNA, 20 bp, synthetic construct
  misc_feature 1..20: note = chemically synthesized
  source 1..20: mol_type = other DNA
ggacccgttcaacttttcct

SEQ ID NO: 4649 - DNA, 20 bp, synthetic construct
  misc_feature 1..20: note = chemically synthesized
  source 1..20: mol_type = other DNA
ctcatctgtcaccaagcctt

SEQ ID NO: 4650 - DNA, 20 bp, synthetic construct
  misc_feature 1..20: note = chemically synthesized
  source 1..20: mol_type = other DNA
ttcttccatctgattgtgat

SEQ ID NO: 4651 - DNA, 20 bp, synthetic construct
  misc_feature 1..20: note = chemically synthesized
  source 1..20: mol_type = other DNA
ctatgaaggctgtacactgc

SEQ ID NO: 4652 - DNA, 20 bp, synthetic construct
  misc_feature 1..20: note = chemically synthesized
  source 1..20: mol_type = other DNA
aaaaagcatcatggctatct

SEQ ID NO: 4653 - DNA, 20 bp, synthetic construct
  misc_feature 1..20: note = chemically synthesized
  source 1..20: mol_type = other DNA
ggctatctgtgggtagtatg

SEQ ID NO: 4654 - DNA, 20 bp, synthetic construct
  misc_feature 1..20: note = chemically synthesized
  source 1..20: mol_type = other DNA
taggaggcaaatatcttgaa

SEQ ID NO: 4655 - DNA, 20 bp, synthetic construct
  misc_feature 1..20: note = chemically synthesized
  source 1..20: mol_type = other DNA
agtttaatggtgccttcatt

SEQ ID NO: 4656 - DNA, 20 bp, synthetic construct
  misc_feature 1..20: note = chemically synthesized
  source 1..20: mol_type = other DNA
actctagtattccagacctg

SEQ ID NO: 4657 - DNA, 20 bp, synthetic construct
  misc_feature 1..20: note = chemically synthesized
  source 1..20: mol_type = other DNA
ctgataatgaaaattatgat

SEQ ID NO: 4658 - DNA, 20 bp, synthetic construct
  misc_feature 1..20: note = chemically synthesized
  source 1..20: mol_type = other DNA
cagcactttgggaggccaaa

SEQ ID NO: 4659 - DNA, 20 bp, synthetic construct
  misc_feature 1..20: note = chemically synthesized
  source 1..20: mol_type = other DNA
actttgggaggccaaagcgg

SEQ ID NO: 4660 - DNA, 20 bp, synthetic construct
  misc_feature 1..20: note = chemically synthesized
  source 1..20: mol_type = other DNA
tactcggaaggctgaggcag

SEQ ID NO: 4661 - DNA, 20 bp, synthetic construct
  misc_feature 1..20: note = chemically synthesized
  source 1..20: mol_type = other DNA
gaggcagagcttgcagtgag

SEQ ID NO: 4662 - DNA, 20 bp, synthetic construct
  misc_feature 1..20: note = chemically synthesized
  source 1..20: mol_type = other DNA
ctgcactccagcctaggtga

SEQ ID NO: 4663 - DNA, 20 bp, synthetic construct
  misc_feature 1..20: note = chemically synthesized
  source 1..20: mol_type = other DNA
aaaaaaaagaaagtgaagta

SEQ ID NO: 4664 - DNA, 20 bp, synthetic construct
  misc_feature 1..20: note = chemically synthesized
  source 1..20: mol_type = other DNA
cattcagtagtttagatgcc

SEQ ID NO: 4665 - DNA, 20 bp, synthetic construct
  misc_feature 1..20: note = chemically synthesized
  source 1..20: mol_type = other DNA
cttgtctcattgtgtttctt

SEQ ID NO: 4666 - DNA, 20 bp, synthetic construct
  misc_feature 1..20: note = chemically synthesized
  source 1..20: mol_type = other DNA
tgtgtttcttctgagtgagc

SEQ ID NO: 4667 - DNA, 20 bp, synthetic construct
  misc_feature 1..20: note = chemically synthesized
  source 1..20: mol_type = other DNA
aagtccctgaaggaaggtcc

SEQ ID NO: 4668 - DNA, 20 bp, synthetic construct
  misc_feature 1..20: note = chemically synthesized
  source 1..20: mol_type = other DNA
cctccctaggccagtgcctc

SEQ ID NO: 4669 - DNA, 20 bp, synthetic construct
  misc_feature 1..20: note = chemically synthesized
  source 1..20: mol_type = other DNA
tggtatttccctcaatgaag

SEQ ID NO: 4670 - DNA, 20 bp, synthetic construct
  misc_feature 1..20: note = chemically synthesized
  source 1..20: mol_type = other DNA
ggaagccaccaagtggctta

SEQ ID NO: 4671 - DNA, 20 bp, synthetic construct
  misc_feature 1..20: note = chemically synthesized
  source 1..20: mol_type = other DNA
aggtccttccatggagccac

SEQ ID NO: 4672 - DNA, 20 bp, synthetic construct
  misc_feature 1..20: note = chemically synthesized
  source 1..20: mol_type = other DNA
aaaatctaaccaggacattc

SEQ ID NO: 4673 - DNA, 20 bp, synthetic construct
  misc_feature 1..20: note = chemically synthesized
  source 1..20: mol_type = other DNA
aatcagttcaccatgttcaa

SEQ ID NO: 4674 - DNA, 20 bp, synthetic construct
  misc_feature 1..20: note = chemically synthesized
  source 1..20: mol_type = other DNA
tgagactctattgcccaggc

SEQ ID NO: 4675 - DNA, 20 bp, synthetic construct
  misc_feature 1..20: note = chemically synthesized
  source 1..20: mol_type = other DNA
gtctcagcctcccaagtagc

SEQ ID NO: 4676 - DNA, 20 bp, synthetic construct
  misc_feature 1..20: note = chemically synthesized
  source 1..20: mol_type = other DNA
ttttgtatttttagtagaga

SEQ ID NO: 4677 - DNA, 20 bp, synthetic construct
  misc_feature 1..20: note = chemically synthesized
  source 1..20: mol_type = other DNA
ccaccctgcccagccgtcaa

SEQ ID NO: 4678 - DNA, 20 bp, synthetic construct
  misc_feature 1..20: note = chemically synthesized
  source 1..20: mol_type = other DNA
gtcttgaagggcaggtgctt

SEQ ID NO: 4679 - DNA, 20 bp, synthetic construct
  misc_feature 1..20: note = chemically synthesized
  source 1..20: mol_type = other DNA
cattgtagaaaagctataaa

SEQ ID NO: 4680 - DNA, 20 bp, synthetic construct
  misc_feature 1..20: note = chemically synthesized
  source 1..20: mol_type = other DNA
tttctttacattttgtctta

SEQ ID NO: 4681 - DNA, 20 bp, synthetic construct
  misc_feature 1..20: note = chemically synthesized
  source 1..20: mol_type = other DNA
ttttcattcaactgtggtag

SEQ ID NO: 4682 - DNA, 20 bp, synthetic construct
  misc_feature 1..20: note = chemically synthesized
  source 1..20: mol_type = other DNA
acttactcttctacctcata

SEQ ID NO: 4683 - DNA, 20 bp, synthetic construct
  misc_feature 1..20: note = chemically synthesized
  source 1..20: mol_type = other DNA
caaaccatggtagtaaagag

SEQ ID NO: 4684 - DNA, 20 bp, synthetic construct
  misc_feature 1..20: note = chemically synthesized
  source 1..20: mol_type = other DNA
gtgaccagagatgcagcgct

SEQ ID NO: 4685 - DNA, 20 bp, synthetic construct
  misc_feature 1..20: note = chemically synthesized
  source 1..20: mol_type = other DNA
gagggttttcctgaaggtaa

SEQ ID NO: 4686 - DNA, 20 bp, synthetic construct
  misc_feature 1..20: note = chemically synthesized
  source 1..20: mol_type = other DNA
ttcctgaaggtaaaggaata

SEQ ID NO: 4687 - DNA, 20 bp, synthetic construct
  misc_feature 1..20: note = chemically synthesized
  source 1..20: mol_type = other DNA
tgaaggtaaaggaataaaga

SEQ ID NO: 4688 - DNA, 20 bp, synthetic construct
  misc_feature 1..20: note = chemically synthesized
  source 1..20: mol_type = other DNA
agaaactacttaccagctat

SEQ ID NO: 4689 - DNA, 20 bp, synthetic construct
  misc_feature 1..20: note = chemically synthesized
  source 1..20: mol_type = other DNA
ttaccagctatttgaattgc

SEQ ID NO: 4690 - DNA, 20 bp, synthetic construct
  misc_feature 1..20: note = chemically synthesized
  source 1..20: mol_type = other DNA
acaaaccactctgataatca

SEQ ID NO: 4691 - DNA, 20 bp, synthetic construct
  misc_feature 1..20: note = chemically synthesized
  source 1..20: mol_type = other DNA
tgtgattctctctgtaggct

SEQ ID NO: 4692 - DNA, 20 bp, synthetic construct
  misc_feature 1..20: note = chemically synthesized
  source 1..20: mol_type = other DNA
aacttctacactctaacatg

SEQ ID NO: 4693 - DNA, 20 bp, synthetic construct
  misc_feature 1..20: note = chemically synthesized
  source 1..20: mol_type = other DNA
gacaattttatttgaaagcc

SEQ ID NO: 4694 - DNA, 20 bp, synthetic construct
  misc_feature 1..20: note = chemically synthesized
  source 1..20: mol_type = other DNA
gtatctcaagcattctattt

SEQ ID NO: 4695 - DNA, 20 bp, synthetic construct
  misc_feature 1..20: note = chemically synthesized
  source 1..20: mol_type = other DNA
gtgtagaagagatagatatg

SEQ ID NO: 4696 - DNA, 20 bp, synthetic construct
  misc_feature 1..20: note = chemically synthesized
  source 1..20: mol_type = other DNA
agagatagatatggtggatt

SEQ ID NO: 4697 - DNA, 20 bp, synthetic construct
  misc_feature 1..20: note = chemically synthesized
  source 1..20: mol_type = other DNA
acttatatattttctatttc

SEQ ID NO: 4698 - DNA, 20 bp, synthetic construct
  misc_feature 1..20: note = chemically synthesized
  source 1..20: mol_type = other DNA
atatattttctatttcttgg

SEQ ID NO: 4699 - DNA, 20 bp, synthetic construct
  misc_feature 1..20: note = chemically synthesized
  source 1..20: mol_type = other DNA
attttctatttcttggatgg

SEQ ID NO: 4700 - DNA, 20 bp, synthetic construct
  misc_feature 1..20: note = chemically synthesized
  source 1..20: mol_type = other DNA
tttcaaaaactttttttttc

SEQ ID NO: 4701 - DNA, 20 bp, synthetic construct
  misc_feature 1..20: note = chemically synthesized
  source 1..20: mol_type = other DNA
aaaaactttttttttccggg

SEQ ID NO: 4702 - DNA, 20 bp, synthetic construct
  misc_feature 1..20: note = chemically synthesized
  source 1..20: mol_type = other DNA
caaaattgtacttgtacccc

SEQ ID NO: 4703 - DNA, 20 bp, synthetic construct
  misc_feature 1..20: note = chemically synthesized
  source 1..20: mol_type = other DNA
actagatattaggctgtgtt

SEQ ID NO: 4704 - DNA, 20 bp, synthetic construct
  misc_feature 1..20: note = chemically synthesized
  source 1..20: mol_type = other DNA
atcttaatttaattcctcca

SEQ ID NO: 4705 - DNA, 20 bp, synthetic construct
  misc_feature 1..20: note = chemically synthesized
  source 1..20: mol_type = other DNA
ttgctgaagaaaatgatgtg

SEQ ID NO: 4706 - DNA, 20 bp, synthetic construct
  misc_feature 1..20: note = chemically synthesized
  source 1..20: mol_type = other DNA
gatttttattctagctattc

SEQ ID NO: 4707 - DNA, 20 bp, synthetic construct
  misc_feature 1..20: note = chemically synthesized
  source 1..20: mol_type = other DNA
aatgtttgctgcagggaaaa

SEQ ID NO: 4708 - DNA, 20 bp, synthetic construct
  misc_feature 1..20: note = chemically synthesized
  source 1..20: mol_type = other DNA
ctgcagggaaaaaggaatct

SEQ ID NO: 4709 - DNA, 20 bp, synthetic construct
  misc_feature 1..20: note = chemically synthesized
  source 1..20: mol_type = other DNA
tcagatgtattttaaaattt

SEQ ID NO: 4710 - DNA, 20 bp, synthetic construct
  misc_feature 1..20: note = chemically synthesized
  source 1..20: mol_type = other DNA
gatattttgttcagttcata

SEQ ID NO: 4711 - DNA, 20 bp, synthetic construct
  misc_feature 1..20: note = chemically synthesized
  source 1..20: mol_type = other DNA
tttttttttttttctcgaga

SEQ ID NO: 4712 - DNA, 20 bp, synthetic construct
  misc_feature 1..20: note = chemically synthesized
  source 1..20: mol_type = other DNA
tctcactctatcacccaggc

SEQ ID NO: 4713 - DNA, 20 bp, synthetic construct
  misc_feature 1..20: note = chemically synthesized
  source 1..20: mol_type = other DNA
ctcactgcaacctctgcctc

SEQ ID NO: 4714 - DNA, 20 bp, synthetic construct
  misc_feature 1..20: note = chemically synthesized
  source 1..20: mol_type = other DNA
ttttgtatttttagtagaga

SEQ ID NO: 4715 - DNA, 20 bp, synthetic construct
  misc_feature 1..20: note = chemically synthesized
  source 1..20: mol_type = other DNA
tttttggcctcccaaagtgc

SEQ ID NO: 4716 - DNA, 20 bp, synthetic construct
  misc_feature 1..20: note = chemically synthesized
  source 1..20: mol_type = other DNA
ttgttttgttgttgttgaga

SEQ ID NO: 4717 - DNA, 20 bp, synthetic construct
  misc_feature 1..20: note = chemically synthesized
  source 1..20: mol_type = other DNA
gatcctcccacctcagccta

SEQ ID NO: 4718 - DNA, 20 bp, synthetic construct
  misc_feature 1..20: note = chemically synthesized
  source 1..20: mol_type = other DNA
tttttctattatttattgaa

SEQ ID NO: 4719 - DNA, 20 bp, synthetic construct
  misc_feature 1..20: note = chemically synthesized
  source 1..20: mol_type = other DNA
ccacccacctcagcgtccga

SEQ ID NO: 4720 - DNA, 20 bp, synthetic construct
  misc_feature 1..20: note = chemically synthesized
  source 1..20: mol_type = other DNA
cagcgtccgaaaggattatc

SEQ ID NO: 4721 - DNA, 20 bp, synthetic construct
  misc_feature 1..20: note = chemically synthesized
  source 1..20: mol_type = other DNA
cccggccaaatttctaactt

SEQ ID NO: 4722 - DNA, 20 bp, synthetic construct
  misc_feature 1..20: note = chemically synthesized
  source 1..20: mol_type = other DNA
tatcattcagggagaaattt

SEQ ID NO: 4723 - DNA, 20 bp, synthetic construct
  misc_feature 1..20: note = chemically synthesized
  source 1..20: mol_type = other DNA
attcagggagaaatttgggg

SEQ ID NO: 4724 - DNA, 20 bp, synthetic construct
  misc_feature 1..20: note = chemically synthesized
  source 1..20: mol_type = other DNA
tttactctgaagattctaaa

SEQ ID NO: 4725 - DNA, 20 bp, synthetic construct
  misc_feature 1..20: note = chemically synthesized
  source 1..20: mol_type = other DNA
gaagattctaaaaagaattt

SEQ ID NO: 4726 - DNA, 20 bp, synthetic construct
  misc_feature 1..20: note = chemically synthesized
  source 1..20: mol_type = other DNA
aattcatacttcaggggcag

SEQ ID NO: 4727 - DNA, 20 bp, synthetic construct
  misc_feature 1..20: note = chemically synthesized
  source 1..20: mol_type = other DNA
cgttagctaactgtagtcta

SEQ ID NO: 4728 - DNA, 20 bp, synthetic construct
  misc_feature 1..20: note = chemically synthesized
  source 1..20: mol_type = other DNA
ccttgatttattccttaaaa

SEQ ID NO: 4729 - DNA, 20 bp, synthetic construct
  misc_feature 1..20: note = chemically synthesized
  source 1..20: mol_type = other DNA
gctcgccctgtctcccaggc

SEQ ID NO: 4730 - DNA, 20 bp, synthetic construct
  misc_feature 1..20: note = chemically synthesized
  source 1..20: mol_type = other DNA
gattctcctgccccagcctc

SEQ ID NO: 4731 - DNA, 20 bp, synthetic construct
  misc_feature 1..20: note = chemically synthesized
  source 1..20: mol_type = other DNA
gtttgtatttttagtagaga

SEQ ID NO: 4732 - DNA, 20 bp, synthetic construct
  misc_feature 1..20: note = chemically synthesized
  source 1..20: mol_type = other DNA
gcctcgacctcccaaagtgc

SEQ ID NO: 4733 - DNA, 20 bp, synthetic construct
  misc_feature 1..20: note = chemically synthesized
  source 1..20: mol_type = other DNA
tcatgagccactgcacccgg

SEQ ID NO: 4734 - DNA, 20 bp, synthetic construct
  misc_feature 1..20: note = chemically synthesized
  source 1..20: mol_type = other DNA
ccaacttcactactgccccc

SEQ ID NO: 4735 - DNA, 20 bp, synthetic construct
  misc_feature 1..20: note = chemically synthesized
  source 1..20: mol_type = other DNA
tgagggcatctgttttaagt

SEQ ID NO: 4736 - DNA, 20 bp, synthetic construct
  misc_feature 1..20: note = chemically synthesized
  source 1..20: mol_type = other DNA
ttaagtatgggtataatgtt

SEQ ID NO: 4737 - DNA, 20 bp, synthetic construct
  misc_feature 1..20: note = chemically synthesized
  source 1..20: mol_type = other DNA
gggtttttctttgtgtaagt

SEQ ID NO: 4738 - DNA, 20 bp, synthetic construct
  misc_feature 1..20: note = chemically synthesized
  source 1..20: mol_type = other DNA
gctattaagaaagtattcaa

SEQ ID NO: 4739 - DNA, 20 bp, synthetic construct
  misc_feature 1..20: note = chemically synthesized
  source 1..20: mol_type = other DNA
tttgaaacaaatgtttaaga

SEQ ID NO: 4740 - DNA, 20 bp, synthetic construct
  misc_feature 1..20: note = chemically synthesized
  source 1..20: mol_type = other DNA
tgggcagatcacttaagccc

SEQ ID NO: 4741 - DNA, 20 bp, synthetic construct
  misc_feature 1..20: note = chemically synthesized
  source 1..20: mol_type = other DNA
cgggcagatcacctgaggtc

SEQ ID NO: 4742 - DNA, 20 bp, synthetic construct
  misc_feature 1..20: note = chemically synthesized
  source 1..20: mol_type = other DNA
tactcgggaggctgaggcag

SEQ ID NO: 4743 - DNA, 20 bp, synthetic construct
  misc_feature 1..20: note = chemically synthesized
  source 1..20: mol_type = other DNA
tacttgggaggctgaggtgg

SEQ ID NO: 4744 - DNA, 20 bp, synthetic construct
  misc_feature 1..20: note = chemically synthesized
  source 1..20: mol_type = other DNA
gatttttttctagaaaagta

SEQ ID NO: 4745 - DNA, 20 bp, synthetic construct
  misc_feature 1..20: note = chemically synthesized
  source 1..20: mol_type = other DNA
acagtttaattcagaaaaaa

SEQ ID NO: 4746 - DNA, 20 bp, synthetic construct
  misc_feature 1..20: note = chemically synthesized
  source 1..20: mol_type = other DNA
agaaaaaaatgaatcagaaa

SEQ ID NO: 4747 - DNA, 20 bp, synthetic construct
  misc_feature 1..20: note = chemically synthesized
  source 1..20: mol_type = other DNA
attttctgattcattttttt

SEQ ID NO: 4748 - DNA, 20 bp, synthetic construct
  misc_feature 1..20: note = chemically synthesized
  source 1..20: mol_type = other DNA
tgtttatttttttcctagac

SEQ ID NO: 4749 - DNA, 20 bp, synthetic construct
  misc_feature 1..20: note = chemically synthesized
  source 1..20: mol_type = other DNA
gtttgttttgttttttgaga

SEQ ID NO: 4750 - DNA, 20 bp, synthetic construct
  misc_feature 1..20: note = chemically synthesized
  source 1..20: mol_type = other DNA
ttcgctcttgttgcccaggc

SEQ ID NO: 4751 - DNA, 20 bp, synthetic construct
  misc_feature 1..20: note = chemically synthesized
  source 1..20: mol_type = other DNA
cccaggctggagtgcaatgg

SEQ ID NO: 4752 - DNA, 20 bp, synthetic construct
  misc_feature 1..20: note = chemically synthesized
  source 1..20: mol_type = other DNA
aattctcctgcctcagcctc

SEQ ID NO: 4753 - DNA, 20 bp, synthetic construct
  misc_feature 1..20: note = chemically synthesized
  source 1..20: mol_type = other DNA
gcctcagcctcccgagtagc

SEQ ID NO: 4754 - DNA, 20 bp, synthetic construct
  misc_feature 1..20: note = chemically synthesized
  source 1..20: mol_type = other DNA
ttttgtatttttagtagaga

SEQ ID NO: 4755 - DNA, 20 bp, synthetic construct
  misc_feature 1..20: note = chemically synthesized
  source 1..20: mol_type = other DNA
gcctcggcctcccaaagtgc

SEQ ID NO: 4756 - DNA, 20 bp, synthetic construct
  misc_feature 1..20: note = chemically synthesized
  source 1..20: mol_type = other DNA
ctgtgttgtccaggctggtc

SEQ ID NO: 4757 - DNA, 20 bp, synthetic construct
  misc_feature 1..20: note = chemically synthesized
  source 1..20: mol_type = other DNA
accttgtcctcccaaaatgc

SEQ ID NO: 4758 - DNA, 20 bp, synthetic construct
  misc_feature 1..20: note = chemically synthesized
  source 1..20: mol_type = other DNA
ttcaaaaattttacaaacat

SEQ ID NO: 4759 - DNA, 20 bp, synthetic construct
  misc_feature 1..20: note = chemically synthesized
  source 1..20: mol_type = other DNA
atttgattttcaaaattccc

SEQ ID NO: 4760 - DNA, 20 bp, synthetic construct
  misc_feature 1..20: note = chemically synthesized
  source 1..20: mol_type = other DNA
tttatgaaagtgccattcag

SEQ ID NO: 4761 - DNA, 20 bp, synthetic construct
  misc_feature 1..20: note = chemically synthesized
  source 1..20: mol_type = other DNA
ggcaggctgatcacgaggtc

SEQ ID NO: 4762 - DNA, 20 bp, synthetic construct
  misc_feature 1..20: note = chemically synthesized
  source 1..20: mol_type = other DNA
tactcaggaggctggggcag

SEQ ID NO: 4763 - DNA, 20 bp, synthetic construct
  misc_feature 1..20: note = chemically synthesized
  source 1..20: mol_type = other DNA
gtcatagtgactcagtttta

SEQ ID NO: 4764 - DNA, 20 bp, synthetic construct
  misc_feature 1..20: note = chemically synthesized
  source 1..20: mol_type = other DNA
tcagttttaaggaataaatc

SEQ ID NO: 4765 - DNA, 20 bp, synthetic construct
  misc_feature 1..20: note = chemically synthesized
  source 1..20: mol_type = other DNA
tgacttgcactgaaagttat

SEQ ID NO: 4766 - DNA, 20 bp, synthetic construct
  misc_feature 1..20: note = chemically synthesized
  source 1..20: mol_type = other DNA
tattcccctgcccctgaagt

SEQ ID NO: 4767 - DNA, 20 bp, synthetic construct
  misc_feature 1..20: note = chemically synthesized
  source 1..20: mol_type = other DNA
aaagactccaaaattctttt

SEQ ID NO: 4768 - DNA, 20 bp, synthetic construct
  misc_feature 1..20: note = chemically synthesized
  source 1..20: mol_type = other DNA
aaaattctttttagaatctt

SEQ ID NO: 4769 - DNA, 20 bp, synthetic construct
  misc_feature 1..20: note = chemically synthesized
  source 1..20: mol_type = other DNA
agaatcttcagagtaaaagc

SEQ ID NO: 4770 - DNA, 20 bp, synthetic construct
  misc_feature 1..20: note = chemically synthesized
  source 1..20: mol_type = other DNA
ctggtgtataaaataacttg

SEQ ID NO: 4771 - DNA, 20 bp, synthetic construct
  misc_feature 1..20: note = chemically synthesized
  source 1..20: mol_type = other DNA
atccatccccaaatttctcc

SEQ ID NO: 4772 - DNA, 20 bp, synthetic construct
  misc_feature 1..20: note = chemically synthesized
  source 1..20: mol_type = other DNA
atttctccctgaatgataaa

SEQ ID NO: 4773 - DNA, 20 bp, synthetic construct
  misc_feature 1..20: note = chemically synthesized
  source 1..20: mol_type = other DNA
ctgaatgataaagagaataa

SEQ ID NO: 4774 - DNA, 20 bp, synthetic construct
  misc_feature 1..20: note = chemically synthesized
  source 1..20: mol_type = other DNA
taatcctttcggacgctgag

SEQ ID NO: 4775 - DNA, 20 bp, synthetic construct
  misc_feature 1..20: note = chemically synthesized
  source 1..20: mol_type = other DNA
cctttcggacgctgaggtgg

SEQ ID NO: 4776 - DNA, 20 bp, synthetic construct
  misc_feature 1..20: note = chemically synthesized
  source 1..20: mol_type = other DNA
tgggtggatcgcatgagctc

SEQ ID NO: 4777 - DNA, 20 bp, synthetic construct
  misc_feature 1..20: note = chemically synthesized
  source 1..20: mol_type = other DNA
tactcagtaggctgaggtgg

SEQ ID NO: 4778 - DNA, 20 bp, synthetic construct
  misc_feature 1..20: note = chemically synthesized
  source 1..20: mol_type = other DNA
actttgggaggccaaaaagg

SEQ ID NO: 4779 - DNA, 20 bp, synthetic construct
  misc_feature 1..20: note = chemically synthesized
  source 1..20: mol_type = other DNA
agggcggatcatttgaggtc

SEQ ID NO: 4780 - DNA, 20 bp, synthetic construct
  misc_feature 1..20: note = chemically synthesized
  source 1..20: mol_type = other DNA
tcatgccactgcattccagc

SEQ ID NO: 4781 - DNA, 20 bp, synthetic construct
  misc_feature 1..20: note = chemically synthesized
  source 1..20: mol_type = other DNA
ctgcattccagcctgggtga

SEQ ID NO: 4782 - DNA, 20 bp, synthetic construct
  misc_feature 1..20: note = chemically synthesized
  source 1..20: mol_type = other DNA
atatttaggaaaaaaattat

SEQ ID NO: 4783 - DNA, 20 bp, synthetic construct
  misc_feature 1..20: note = chemically synthesized
  source 1..20: mol_type = other DNA
ttttccctgcagcaaacatt

SEQ ID NO: 4784 - DNA, 20 bp, synthetic construct
  misc_feature 1..20: note = chemically synthesized
  source 1..20: mol_type = other DNA
aggttgtgtagttgttattc

SEQ ID NO: 4785 - DNA, 20 bp, synthetic construct
  misc_feature 1..20: note = chemically synthesized
  source 1..20: mol_type = other DNA
agttgttattccagaatagc

SEQ ID NO: 4786 - DNA, 20 bp, synthetic construct
  misc_feature 1..20: note = chemically synthesized
  source 1..20: mol_type = other DNA
taacagcaacataagcataa

SEQ ID NO: 4787 - DNA, 20 bp, synthetic construct
  misc_feature 1..20: note = chemically synthesized
  source 1..20: mol_type = other DNA
tacctcataagattctttgg

SEQ ID NO: 4788 - DNA, 20 bp, synthetic construct
  misc_feature 1..20: note = chemically synthesized
  source 1..20: mol_type = other DNA
cttaagattatatatattca

SEQ ID NO: 4789 - DNA, 20 bp, synthetic construct
  misc_feature 1..20: note = chemically synthesized
  source 1..20: mol_type = other DNA
cttaaacaattactcagaaa

SEQ ID NO: 4790 - DNA, 20 bp, synthetic construct
  misc_feature 1..20: note = chemically synthesized
  source 1..20: mol_type = other DNA
aaatagaatgcttgagatac

SEQ ID NO: 4791 - DNA, 20 bp, synthetic construct
  misc_feature 1..20: note = chemically synthesized
  source 1..20: mol_type = other DNA
tatcaagtaataaatgcatg

SEQ ID NO: 4792 - DNA, 20 bp, synthetic construct
  misc_feature 1..20: note = chemically synthesized
  source 1..20: mol_type = other DNA
tgtagtaacattctacatgt

SEQ ID NO: 4793 - DNA, 20 bp, synthetic construct
  misc_feature 1..20: note = chemically synthesized
  source 1..20: mol_type = other DNA
ttatacccaaagcctacaga

SEQ ID NO: 4794 - DNA, 20 bp, synthetic construct
  misc_feature 1..20: note = chemically synthesized
  source 1..20: mol_type = other DNA
gaaaaaaagttagtttaaaa

SEQ ID NO: 4795 - DNA, 20 bp, synthetic construct
  misc_feature 1..20: note = chemically synthesized
  source 1..20: mol_type = other DNA
actgagtttatgaaaaattt

SEQ ID NO: 4796 - DNA, 20 bp, synthetic construct
  misc_feature 1..20: note = chemically synthesized
  source 1..20: mol_type = other DNA
tgttttgtttttaaatgtgt

SEQ ID NO: 4797 - DNA, 20 bp, synthetic construct
  misc_feature 1..20: note = chemically synthesized
  source 1..20: mol_type = other DNA
taaatgtgtgtgagtttgtg

SEQ ID NO: 4798 - DNA, 20 bp, synthetic construct
  misc_feature 1..20: note = chemically synthesized
  source 1..20: mol_type = other DNA
acattattataatacaacat

SEQ ID NO: 4799 - DNA, 20 bp, synthetic construct
  misc_feature 1..20: note = chemically synthesized
  source 1..20: mol_type = other DNA
gtacttgactcaatgattat

SEQ ID NO: 4800 - DNA, 20 bp, synthetic construct
  misc_feature 1..20: note = chemically synthesized
  source 1..20: mol_type = other DNA
tctctttactaccatggttt

SEQ ID NO: 4801 - DNA, 20 bp, synthetic construct
  misc_feature 1..20: note = chemically synthesized
  source 1..20: mol_type = other DNA
tgtgaatggttttgccagag

SEQ ID NO: 4802 - DNA, 20 bp, synthetic construct
  misc_feature 1..20: note = chemically synthesized
  source 1..20: mol_type = other DNA
tggttttgccagaggtgaat

SEQ ID NO: 4803 - DNA, 20 bp, synthetic construct
  misc_feature 1..20: note = chemically synthesized
  source 1..20: mol_type = other DNA
tttcaaatgtagttgacctt

SEQ ID NO: 4804 - DNA, 20 bp, synthetic construct
  misc_feature 1..20: note = chemically synthesized
  source 1..20: mol_type = other DNA
gtagttgaccttaagaattt

SEQ ID NO: 4805 - DNA, 20 bp, synthetic construct
  misc_feature 1..20: note = chemically synthesized
  source 1..20: mol_type = other DNA
aaatgtgttactgtgaagac

SEQ ID NO: 4806 - DNA, 20 bp, synthetic construct
  misc_feature 1..20: note = chemically synthesized
  source 1..20: mol_type = other DNA
acatattccttatgaggtag

SEQ ID NO: 4807 - DNA, 20 bp, synthetic construct
  misc_feature 1..20: note = chemically synthesized
  source 1..20: mol_type = other DNA
aataatttgtcatatgcttt

SEQ ID NO: 4808 - DNA, 20 bp, synthetic construct
  misc_feature 1..20: note = chemically synthesized
  source 1..20: mol_type = other DNA
aacttagacgacaatgtccc

SEQ ID NO: 4809 - DNA, 20 bp, synthetic construct
  misc_feature 1..20: note = chemically synthesized
  source 1..20: mol_type = other DNA
gattaattcggctaccacag

SEQ ID NO: 4810 - DNA, 20 bp, synthetic construct
  misc_feature 1..20: note = chemically synthesized
  source 1..20: mol_type = other DNA
gaagcacctgcccttcaaga

SEQ ID NO: 4811 - DNA, 20 bp, synthetic construct
  misc_feature 1..20: note = chemically synthesized
  source 1..20: mol_type = other DNA
ataaagtaaacacatgccat

SEQ ID NO: 4812 - DNA, 20 bp, synthetic construct
  misc_feature 1..20: note = chemically synthesized
  source 1..20: mol_type = other DNA
agactcttttgacggctggg

SEQ ID NO: 4813 - DNA, 20 bp, synthetic construct
  misc_feature 1..20: note = chemically synthesized
  source 1..20: mol_type = other DNA
actttgggaggccgaggcag

SEQ ID NO: 4814 - DNA, 20 bp, synthetic construct
  misc_feature 1..20: note = chemically synthesized
  source 1..20: mol_type = other DNA
caggcggatcacgaggtcag

SEQ ID NO: 4815 - DNA, 20 bp, synthetic construct
  misc_feature 1..20: note = chemically synthesized
  source 1..20: mol_type = other DNA
tacttgggaggctgagacag

SEQ ID NO: 4816 - DNA, 20 bp, synthetic construct
  misc_feature 1..20: note = chemically synthesized
  source 1..20: mol_type = other DNA
ttgcactccagcctgggcaa

SEQ ID NO: 4817 - DNA, 20 bp, synthetic construct
  misc_feature 1..20: note = chemically synthesized
  source 1..20: mol_type = other DNA
aacatggtgaactgatttcc

SEQ ID NO: 4818 - DNA, 20 bp, synthetic construct
  misc_feature 1..20: note = chemically synthesized
  source 1..20: mol_type = other DNA
ttcccagaatctagcaattc

SEQ ID NO: 4819 - DNA, 20 bp, synthetic construct
  misc_feature 1..20: note = chemically synthesized
  source 1..20: mol_type = other DNA
ttcattgagggaaataccac

SEQ ID NO: 4820 - DNA, 20 bp, synthetic construct
  misc_feature 1..20: note = chemically synthesized
  source 1..20: mol_type = other DNA
caccaattacagtccttgcg

SEQ ID NO: 4821 - DNA, 20 bp, synthetic construct
  misc_feature 1..20: note = chemically synthesized
  source 1..20: mol_type = other DNA
cttgcgtagggtccaaagaa

SEQ ID NO: 4822 - DNA, 20 bp, synthetic construct
  misc_feature 1..20: note = chemically synthesized
  source 1..20: mol_type = other DNA
agagagcaacagaggagcaa

SEQ ID NO: 4823 - DNA, 20 bp, synthetic construct
  misc_feature 1..20: note = chemically synthesized
  source 1..20: mol_type = other DNA
ttaaaggaaacatgacagct

SEQ ID NO: 4824 - DNA, 20 bp, synthetic construct
  misc_feature 1..20: note = chemically synthesized
  source 1..20: mol_type = other DNA
tattctaggcatctaaacta

SEQ ID NO: 4825 - DNA, 20 bp, synthetic construct
  misc_feature 1..20: note = chemically synthesized
  source 1..20: mol_type = other DNA
gtatcaaacggtcagattga

SEQ ID NO: 4826 - DNA, 20 bp, synthetic construct
  misc_feature 1..20: note = chemically synthesized
  source 1..20: mol_type = other DNA
ttatttttatttttttgaga

SEQ ID NO: 4827 - DNA, 20 bp, synthetic construct
  misc_feature 1..20: note = chemically synthesized
  source 1..20: mol_type = other DNA
tctcactctgtcacctaggc

SEQ ID NO: 4828 - DNA, 20 bp, synthetic construct
  misc_feature 1..20: note = chemically synthesized
  source 1..20: mol_type = other DNA
ctcactgcaagctctgcctc

SEQ ID NO: 4829 - DNA, 20 bp, synthetic construct
  misc_feature 1..20: note = chemically synthesized
  source 1..20: mol_type = other DNA
cattctcctgcctcagcctt

SEQ ID NO: 4830 - DNA, 20 bp, synthetic construct
  misc_feature 1..20: note = chemically synthesized
  source 1..20: mol_type = other DNA
ttttgtatttttattagaga

SEQ ID NO: 4831 - DNA, 20 bp, synthetic construct
  misc_feature 1..20: note = chemically synthesized
  source 1..20: mol_type = other DNA
tggggtttcaccatgttagc

SEQ ID NO: 4832 - DNA, 20 bp, synthetic construct
  misc_feature 1..20: note = chemically synthesized
  source 1..20: mol_type = other DNA
gctttggcctcccaaagtgc

SEQ ID NO: 4833 - DNA, 20 bp, synthetic construct
  misc_feature 1..20: note = chemically synthesized
  source 1..20: mol_type = other DNA
tcttcatttaaaaaagaaat

SEQ ID NO: 4834 - DNA, 20 bp, synthetic construct
  misc_feature 1..20: note = chemically synthesized
  source 1..20: mol_type = other DNA
ggataatagtacctatctca

SEQ ID NO: 4835 - DNA, 20 bp, synthetic construct
  misc_feature 1..20: note = chemically synthesized
  source 1..20: mol_type = other DNA
gcatgtaagtaggtgctcag

SEQ ID NO: 4836 - DNA, 20 bp, synthetic construct
  misc_feature 1..20: note = chemically synthesized
  source 1..20: mol_type = other DNA
ttattgtgattcttcaggtc

SEQ ID NO: 4837 - DNA, 20 bp, synthetic construct
  misc_feature 1..20: note = chemically synthesized
  source 1..20: mol_type = other DNA
attcttcaggtctggaatac

SEQ ID NO: 4838 - DNA, 20 bp, synthetic construct
  misc_feature 1..20: note = chemically synthesized
  source 1..20: mol_type = other DNA
ctcacatcacaatcagatgg

SEQ ID NO: 4839 - DNA, 20 bp, synthetic construct
  misc_feature 1..20: note = chemically synthesized
  source 1..20: mol_type = other DNA
tccccaaggcttggtgacag

SEQ ID NO: 4840 - DNA, 20 bp, synthetic construct
  misc_feature 1..20: note = chemically synthesized
  source 1..20: mol_type = other DNA
gcttggtgacagatgagtta

SEQ ID NO: 4841 - DNA, 20 bp, synthetic construct
  misc_feature 1..20: note = chemically synthesized
  source 1..20: mol_type = other DNA
gttactgggtaacacagaga

SEQ ID NO: 4842 - DNA, 20 bp, synthetic construct
  misc_feature 1..20: note = chemically synthesized
  source 1..20: mol_type = other DNA
ggattcaaaggaaaagttga

SEQ ID NO: 4843 - DNA, 20 bp, synthetic construct
  misc_feature 1..20: note = chemically synthesized
  source 1..20: mol_type = other DNA
ggttatgactagccacgtcc

SEQ ID NO: 4844 - DNA, 20 bp, synthetic construct
  misc_feature 1..20: note = chemically synthesized
  source 1..20: mol_type = other DNA
agcttttctcagatgttaaa

SEQ ID NO: 4845 - DNA, 20 bp, synthetic construct
  misc_feature 1..20: note = chemically synthesized
  source 1..20: mol_type = other DNA
atgtaagtcccccaaattta

SEQ ID NO: 4846 - DNA, 20 bp, synthetic construct
  misc_feature 1..20: note = chemically synthesized
  source 1..20: mol_type = other DNA
ccaggggagaggtcacagct

SEQ ID NO: 4847 - DNA, 20 bp, synthetic construct
  misc_feature 1..20: note = chemically synthesized
  source 1..20: mol_type = other DNA
aacagagaaggctaaaatca

SEQ ID NO: 4848 - DNA, 20 bp, synthetic construct
  misc_feature 1..20: note = chemically synthesized
  source 1..20: mol_type = other DNA
ctcataaatgcactccctct

SEQ ID NO: 4849 - DNA, 20 bp, synthetic construct
  misc_feature 1..20: note = chemically synthesized
  source 1..20: mol_type = other DNA
agttttgtctccttcccaca

SEQ ID NO: 4850 - DNA, 20 bp, synthetic construct
  misc_feature 1..20: note = chemically synthesized
  source 1..20: mol_type = other DNA
caatttagacctgggcacta

SEQ ID NO: 4851 - DNA, 20 bp, synthetic construct
  misc_feature 1..20: note = chemically synthesized
  source 1..20: mol_type = other DNA
agatcgtggtcctcctttct

SEQ ID NO: 4852 - DNA, 20 bp, synthetic construct
  misc_feature 1..20: note = chemically synthesized
  source 1..20: mol_type = other DNA
ccctacaccacagatgttca

SEQ ID NO: 4853 - DNA, 20 bp, synthetic construct
  misc_feature 1..20: note = chemically synthesized
  source 1..20: mol_type = other DNA
ggggtagaaatgcataattg

SEQ ID NO: 4854 - DNA, 20 bp, synthetic construct
  misc_feature 1..20: note = chemically synthesized
  source 1..20: mol_type = other DNA
gagtgatagctacgcaaact

SEQ ID NO: 4855 - DNA, 20 bp, synthetic construct
  misc_feature 1..20: note = chemically synthesized
  source 1..20: mol_type = other DNA
tcatcttcaacctcacctaa

SEQ ID NO: 4856 - DNA, 20 bp, synthetic construct
  misc_feature 1..20: note = chemically synthesized
  source 1..20: mol_type = other DNA
aaggctatcttgatccccag

SEQ ID NO: 4857 - DNA, 20 bp, synthetic construct
  misc_feature 1..20: note = chemically synthesized
  source 1..20: mol_type = other DNA
ctgcctgctttaggacctca

SEQ ID NO: 4858 - DNA, 20 bp, synthetic construct
  misc_feature 1..20: note = chemically synthesized
  source 1..20: mol_type = other DNA
aatttcattccctaccagat

SEQ ID NO: 4859 - DNA, 20 bp, synthetic construct
  misc_feature 1..20: note = chemically synthesized
  source 1..20: mol_type = other DNA
ccctaccagatttgggttct

SEQ ID NO: 4860 - DNA, 20 bp, synthetic construct
  misc_feature 1..20: note = chemically synthesized
  source 1..20: mol_type = other DNA
aggtgctctgaagatgtttg

SEQ ID NO: 4861 - DNA, 20 bp, synthetic construct
  misc_feature 1..20: note = chemically synthesized
  source 1..20: mol_type = other DNA
gggagctgctggtgtcccca

SEQ ID NO: 4862 - DNA, 20 bp, synthetic construct
  misc_feature 1..20: note = chemically synthesized
  source 1..20: mol_type = other DNA
aaatgagaaaaatgcttccc

SEQ ID NO: 4863 - DNA, 20 bp, synthetic construct
  misc_feature 1..20: note = chemically synthesized
  source 1..20: mol_type = other DNA
ccactgatgactccaatgac

SEQ ID NO: 4864 - DNA, 20 bp, synthetic construct
  misc_feature 1..20: note = chemically synthesized
  source 1..20: mol_type = other DNA
aatgaggggctgatccaggc

SEQ ID NO: 4865 - DNA, 20 bp, synthetic construct
  misc_feature 1..20: note = chemically synthesized
  source 1..20: mol_type = other DNA
tatatctctgctcttcccca

SEQ ID NO: 4866 - DNA, 20 bp, synthetic construct
  misc_feature 1..20: note = chemically synthesized
  source 1..20: mol_type = other DNA
ccacttcatggtgatgttct

SEQ ID NO: 4867 - DNA, 20 bp, synthetic construct
  misc_feature 1..20: note = chemically synthesized
  source 1..20: mol_type = other DNA
tagttcaaggcccgacaccg

SEQ ID NO: 4868 - DNA, 20 bp, synthetic construct
  misc_feature 1..20: note = chemically synthesized
  source 1..20: mol_type = other DNA
ggcacttgacaggaaagagg

SEQ ID NO: 4869 - DNA, 20 bp, synthetic construct
  misc_feature 1..20: note = chemically synthesized
  source 1..20: mol_type = other DNA
aaagaggaaggatgaggaga

SEQ ID NO: 4870 - DNA, 20 bp, synthetic construct
  misc_feature 1..20: note = chemically synthesized
  source 1..20: mol_type = other DNA
tttatgtgcattgaaaatga

SEQ ID NO: 4871 - DNA, 20 bp, synthetic construct
  misc_feature 1..20: note = chemically synthesized
  source 1..20: mol_type = other DNA
atacagatggtcagtttcac

SEQ ID NO: 4872 - DNA, 20 bp, synthetic construct
  misc_feature 1..20: note = chemically synthesized
  source 1..20: mol_type = other DNA
tgaaagaaacttttaaccta

SEQ ID NO: 4873 - DNA, 20 bp, synthetic construct
  misc_feature 1..20: note = chemically synthesized
  source 1..20: mol_type = other DNA
tcatatgatagctgagatct

SEQ ID NO: 4874 - DNA, 20 bp, synthetic construct
  misc_feature 1..20: note = chemically synthesized
  source 1..20: mol_type = other DNA
ttttttttttttttttaaga

SEQ ID NO: 4875 - DNA, 20 bp, synthetic construct
  misc_feature 1..20: note = chemically synthesized
  source 1..20: mol_type = other DNA
tctcactctgctgcctaggc

SEQ ID NO: 4876 - DNA, 20 bp, synthetic construct
  misc_feature 1..20: note = chemically synthesized
  source 1..20: mol_type = other DNA
atttttgtatttttttagag

SEQ ID NO: 4877 - DNA, 20 bp, synthetic construct
  misc_feature 1..20: note = chemically synthesized
  source 1..20: mol_type = other DNA
gcctcggcctcccaaagtgc

SEQ ID NO: 4878 - DNA, 20 bp, synthetic construct
  misc_feature 1..20: note = chemically synthesized
  source 1..20: mol_type = other DNA
tcccaaagtgctgggattac

SEQ ID NO: 4879 - DNA, 20 bp, synthetic construct
  misc_feature 1..20: note = chemically synthesized
  source 1..20: mol_type = other DNA
cgtgcccggccttgacattt

SEQ ID NO: 4880 - DNA, 20 bp, synthetic construct
  misc_feature 1..20: note = chemically synthesized
  source 1..20: mol_type = other DNA
caattataaggtagagactc

SEQ ID NO: 4881 - DNA, 20 bp, synthetic construct
  misc_feature 1..20: note = chemically synthesized
  source 1..20: mol_type = other DNA
ggattgagaaagtcccttcc

SEQ ID NO: 4882 - DNA, 20 bp, synthetic construct
  misc_feature 1..20: note = chemically synthesized
  source 1..20: mol_type = other DNA
ccacctctgaaactccaacc

SEQ ID NO: 4883 - DNA, 20 bp, synthetic construct
  misc_feature 1..20: note = chemically synthesized
  source 1..20: mol_type = other DNA
aacctcctccactctgccac

SEQ ID NO: 4884 - DNA, 20 bp, synthetic construct
  misc_feature 1..20: note = chemically synthesized
  source 1..20: mol_type = other DNA
taggccctgttctgcctggc

SEQ ID NO: 4885 - DNA, 20 bp, synthetic construct
  misc_feature 1..20: note = chemically synthesized
  source 1..20: mol_type = other DNA
ccagcttggtgggccaggcc

SEQ ID NO: 4886 - DNA, 20 bp, synthetic construct
  misc_feature 1..20: note = chemically synthesized
  source 1..20: mol_type = other DNA
tccaatccagtgtgtcaggg

SEQ ID NO: 4887 - DNA, 20 bp, synthetic construct
  misc_feature 1..20: note = chemically synthesized
  source 1..20: mol_type = other DNA
tcttcttgcatttcacagcc

SEQ ID NO: 4888 - DNA, 20 bp, synthetic construct
  misc_feature 1..20: note = chemically synthesized
  source 1..20: mol_type = other DNA
tcacagcccaggatgacctg

SEQ ID NO: 4889 - DNA, 20 bp, synthetic construct
  misc_feature 1..20: note = chemically synthesized
  source 1..20: mol_type = other DNA
gccttgttaactgcaaccaa

SEQ ID NO: 4890 - DNA, 20 bp, synthetic construct
  misc_feature 1..20: note = chemically synthesized
  source 1..20: mol_type = other DNA
gaaattctactggaaaccca

SEQ ID NO: 4891 - DNA, 20 bp, synthetic construct
  misc_feature 1..20: note = chemically synthesized
  source 1..20: mol_type = other DNA
acccatgaagaggtagtgca

SEQ ID NO: 4892 - DNA, 20 bp, synthetic construct
  misc_feature 1..20: note = chemically synthesized
  source 1..20: mol_type = other DNA
catgtgtagtaggaggggag

SEQ ID NO: 4893 - DNA, 20 bp, synthetic construct
  misc_feature 1..20: note = chemically synthesized
  source 1..20: mol_type = other DNA
tgtctggtcctcattttgtg

SEQ ID NO: 4894 - DNA, 20 bp, synthetic construct
  misc_feature 1..20: note = chemically synthesized
  source 1..20: mol_type = other DNA
tggtcctcattttgtgaagg

SEQ ID NO: 4895 - DNA, 20 bp, synthetic construct
  misc_feature 1..20: note = chemically synthesized
  source 1..20: mol_type = other DNA
ctttcttccatatgacagtc

SEQ ID NO: 4896 - DNA, 20 bp, synthetic construct
  misc_feature 1..20: note = chemically synthesized
  source 1..20: mol_type = other DNA
gacagactccactaaagctg

SEQ ID NO: 4897 - DNA, 20 bp, synthetic construct
  misc_feature 1..20: note = chemically synthesized
  source 1..20: mol_type = other DNA
tagccatggtagttgaactc

SEQ ID NO: 4898 - DNA, 20 bp, synthetic construct
  misc_feature 1..20: note = chemically synthesized
  source 1..20: mol_type = other DNA
caaattagacccaaatcctg

SEQ ID NO: 4899 - DNA, 20 bp, synthetic construct
  misc_feature 1..20: note = chemically synthesized
  source 1..20: mol_type = other DNA
ttttttttttttttttgaga

SEQ ID NO: 4900 - DNA, 20 bp, synthetic construct
  misc_feature 1..20: note = chemically synthesized
  source 1..20: mol_type = other DNA
tctcactctatcacccaggc

SEQ ID NO: 4901 - DNA, 20 bp, synthetic construct
  misc_feature 1..20: note = chemically synthesized
  source 1..20: mol_type = other DNA
ctcactgcaacctgcacctc

SEQ ID NO: 4902 - DNA, 20 bp, synthetic construct
  misc_feature 1..20: note = chemically synthesized
  source 1..20: mol_type = other DNA
acctgcacctcctgggttca

SEQ ID NO: 4903 - DNA, 20 bp, synthetic construct
  misc_feature 1..20: note = chemically synthesized
  source 1..20: mol_type = other DNA
ttttgtatttttagtagaca

SEQ ID NO: 4904 - DNA, 20 bp, synthetic construct
  misc_feature 1..20: note = chemically synthesized
  source 1..20: mol_type = other DNA
tgcctcagccaccaaagtgc

SEQ ID NO: 4905 - DNA, 20 bp, synthetic construct
  misc_feature 1..20: note = chemically synthesized
  source 1..20: mol_type = other DNA
caccgtgcccagccttggtc

SEQ ID NO: 4906 - DNA, 20 bp, synthetic construct
  misc_feature 1..20: note = chemically synthesized
  source 1..20: mol_type = other DNA
tcaccacttggaagcctgac

SEQ ID NO: 4907 - DNA, 20 bp, synthetic construct
  misc_feature 1..20: note = chemically synthesized
  source 1..20: mol_type = other DNA
tttaactcttctctttttca

SEQ ID NO: 4908 - DNA, 20 bp, synthetic construct
  misc_feature 1..20: note = chemically synthesized
  source 1..20: mol_type = other DNA
tttcagggggtcaggggaga

SEQ ID NO: 4909 - DNA, 20 bp, synthetic construct
  misc_feature 1..20: note = chemically synthesized
  source 1..20: mol_type = other DNA
ataccctccacctcagcctc

SEQ ID NO: 4910 - DNA, 20 bp, synthetic construct
  misc_feature 1..20: note = chemically synthesized
  source 1..20: mol_type = other DNA
acctcagcctcccgagtagc

SEQ ID NO: 4911 - DNA, 20 bp, synthetic construct
  misc_feature 1..20: note = chemically synthesized
  source 1..20: mol_type = other DNA
ttttgtattttttgtagaga

SEQ ID NO: 4912 - DNA, 20 bp, synthetic construct
  misc_feature 1..20: note = chemically synthesized
  source 1..20: mol_type = other DNA
ggtcttgaactcctgagctc

SEQ ID NO: 4913 - DNA, 20 bp, synthetic construct
  misc_feature 1..20: note = chemically synthesized
  source 1..20: mol_type = other DNA
tctctttctctcacacaaca

SEQ ID NO: 4914 - DNA, 20 bp, synthetic construct
  misc_feature 1..20: note = chemically synthesized
  source 1..20: mol_type = other DNA
aatccttcagcaacttcctt

SEQ ID NO: 4915 - DNA, 20 bp, synthetic construct
  misc_feature 1..20: note = chemically synthesized
  source 1..20: mol_type = other DNA
gatcactgttactccttggc

SEQ ID NO: 4916 - DNA, 20 bp, synthetic construct
  misc_feature 1..20: note = chemically synthesized
  source 1..20: mol_type = other DNA
tcaacccgagcttcttaacc

SEQ ID NO: 4917 - DNA, 20 bp, synthetic construct
  misc_feature 1..20: note = chemically synthesized
  source 1..20: mol_type = other DNA
tttttggttgtcaagactgg

SEQ ID NO: 4918 - DNA, 20 bp, synthetic construct
  misc_feature 1..20: note = chemically synthesized
  source 1..20: mol_type = other DNA
gggagtgctcctagcaccta

SEQ ID NO: 4919 - DNA, 20 bp, synthetic construct
  misc_feature 1..20: note = chemically synthesized
  source 1..20: mol_type = other DNA
cacctagtgagtagggagga

SEQ ID NO: 4920 - DNA, 20 bp, synthetic construct
  misc_feature 1..20: note = chemically synthesized
  source 1..20: mol_type = other DNA
ccccccccacacacacacac

SEQ ID NO: 4921 - DNA, 20 bp, synthetic construct
  misc_feature 1..20: note = chemically synthesized
  source 1..20: mol_type = other DNA
ctctgctcaagtgtcagccc

SEQ ID NO: 4922 - DNA, 20 bp, synthetic construct
  misc_feature 1..20: note = chemically synthesized
  source 1..20: mol_type = other DNA
cttattgtcatctctcccac

SEQ ID NO: 4923 - DNA, 20 bp, synthetic construct
  misc_feature 1..20: note = chemically synthesized
  source 1..20: mol_type = other DNA
cactagaatgcaaaatatca

SEQ ID NO: 4924 - DNA, 20 bp, synthetic construct
  misc_feature 1..20: note = chemically synthesized
  source 1..20: mol_type = other DNA
ctcatttacacttgtaaaca

SEQ ID NO: 4925 - DNA, 20 bp, synthetic construct
  misc_feature 1..20: note = chemically synthesized
  source 1..20: mol_type = other DNA
tctaatgcagtgtgatgttt

SEQ ID NO: 4926 - DNA, 20 bp, synthetic construct
  misc_feature 1..20: note = chemically synthesized
  source 1..20: mol_type = other DNA
caccaaagcccagtgtacca

SEQ ID NO: 4927 - DNA, 20 bp, synthetic construct
  misc_feature 1..20: note = chemically synthesized
  source 1..20: mol_type = other DNA
attcttgtcatgtgtaaaat

SEQ ID NO: 4928 - DNA, 20 bp, synthetic construct
  misc_feature 1..20: note = chemically synthesized
  source 1..20: mol_type = other DNA
tatgttctttgtaacctgaa

SEQ ID NO: 4929 - DNA, 20 bp, synthetic construct
  misc_feature 1..20: note = chemically synthesized
  source 1..20: mol_type = other DNA
cctgaaaagagttatataat

SEQ ID NO: 4930 - DNA, 20 bp, synthetic construct
  misc_feature 1..20: note = chemically synthesized
  source 1..20: mol_type = other DNA
aaaatcaaataagatcagat

SEQ ID NO: 4931 - DNA, 20 bp, synthetic construct
  misc_feature 1..20: note = chemically synthesized
  source 1..20: mol_type = other DNA
gatatgaatgtaacttagaa

SEQ ID NO: 4932 - DNA, 20 bp, synthetic construct
  misc_feature 1..20: note = chemically synthesized
  source 1..20: mol_type = other DNA
caataaagcctagccgaaaa

SEQ ID NO: 4933 - DNA, 20 bp, synthetic construct
  misc_feature 1..20: note = chemically synthesized
  source 1..20: mol_type = other DNA
caggcaaaagaacaattgcc

SEQ ID NO: 4934 - DNA, 20 bp, synthetic construct
  misc_feature 1..20: note = chemically synthesized
  source 1..20: mol_type = other DNA
caccccaggtctcaccaaaa

SEQ ID NO: 4935 - DNA, 20 bp, synthetic construct
  misc_feature 1..20: note = chemically synthesized
  source 1..20: mol_type = other DNA
caggtctcaccaaaagtggg

SEQ ID NO: 4936 - DNA, 20 bp, synthetic construct
  misc_feature 1..20: note = chemically synthesized
  source 1..20: mol_type = other DNA
caaaagtgggtggaatggtg

SEQ ID NO: 4937 - DNA, 20 bp, synthetic construct
  misc_feature 1..20: note = chemically synthesized
  source 1..20: mol_type = other DNA
ttctgaggtggaaaccccgt

SEQ ID NO: 4938 - DNA, 20 bp, synthetic construct
  misc_feature 1..20: note = chemically synthesized
  source 1..20: mol_type = other DNA
aaccccgtgcggatcctgct

SEQ ID NO: 4939 - DNA, 20 bp, synthetic construct
  misc_feature 1..20: note = chemically synthesized
  source 1..20: mol_type = other DNA
agctgacattggaaataaac

SEQ ID NO: 4940 - DNA, 20 bp, synthetic construct
  misc_feature 1..20: note = chemically synthesized
  source 1..20: mol_type = other DNA
aagcattctagttgggggaa

SEQ ID NO: 4941 - DNA, 20 bp, synthetic construct
  misc_feature 1..20: note = chemically synthesized
  source 1..20: mol_type = other DNA
cagtggtaggcactccctca

SEQ ID NO: 4942 - DNA, 20 bp, synthetic construct
  misc_feature 1..20: note = chemically synthesized
  source 1..20: mol_type = other DNA
gaaagtagggagaggggctt

SEQ ID NO: 4943 - DNA, 20 bp, synthetic construct
  misc_feature 1..20: note = chemically synthesized
  source 1..20: mol_type = other DNA
tagggagaggggcttgcgga

SEQ ID NO: 4944 - DNA, 20 bp, synthetic construct
  misc_feature 1..20: note = chemically synthesized
  source 1..20: mol_type = other DNA
cttttggggggcggggaaac

SEQ ID NO: 4945 - DNA, 20 bp, synthetic construct
  misc_feature 1..20: note = chemically synthesized
  source 1..20: mol_type = other DNA
ccttggtttttaaatcctga

SEQ ID NO: 4946 - DNA, 20 bp, synthetic construct
  misc_feature 1..20: note = chemically synthesized
  source 1..20: mol_type = other DNA
accttccacagccttcataa

SEQ ID NO: 4947 - DNA, 20 bp, synthetic construct
  misc_feature 1..20: note = chemically synthesized
  source 1..20: mol_type = other DNA
tttcacaaactttacagtat

SEQ ID NO: 4948 - DNA, 20 bp, synthetic construct
  misc_feature 1..20: note = chemically synthesized
  source 1..20: mol_type = other DNA
tacagtattgggattatctg

SEQ ID NO: 4949 - DNA, 20 bp, synthetic construct
  misc_feature 1..20: note = chemically synthesized
  source 1..20: mol_type = other DNA
accccagacacactgattta

SEQ ID NO: 4950 - DNA, 20 bp, synthetic construct
  misc_feature 1..20: note = chemically synthesized
  source 1..20: mol_type = other DNA
ttagacattagcagttggga

SEQ ID NO: 4951 - DNA, 20 bp, synthetic construct
  misc_feature 1..20: note = chemically synthesized
  source 1..20: mol_type = other DNA
actaccctaatgccacccta

SEQ ID NO: 4952 - DNA, 20 bp, synthetic construct
  misc_feature 1..20: note = chemically synthesized
  source 1..20: mol_type = other DNA
cctaatgccaccctaaggga

SEQ ID NO: 4953 - DNA, 20 bp, synthetic construct
  misc_feature 1..20: note = chemically synthesized
  source 1..20: mol_type = other DNA
tatcctggagaaagagaaag

SEQ ID NO: 4954 - DNA, 20 bp, synthetic construct
  misc_feature 1..20: note = chemically synthesized
  source 1..20: mol_type = other DNA
tcatcatgccatcattataa

SEQ ID NO: 4955 - DNA, 20 bp, synthetic construct
  misc_feature 1..20: note = chemically synthesized
  source 1..20: mol_type = other DNA
ttgagctctgtaaagaagtg

SEQ ID NO: 4956 - DNA, 20 bp, synthetic construct
  misc_feature 1..20: note = chemically synthesized
  source 1..20: mol_type = other DNA
gaaataagcccgctgtccct

SEQ ID NO: 4957 - DNA, 20 bp, synthetic construct
  misc_feature 1..20: note = chemically synthesized
  source 1..20: mol_type = other DNA
tataataatctcctcggtta

SEQ ID NO: 4958 - DNA, 20 bp, synthetic construct
  misc_feature 1..20: note = chemically synthesized
  source 1..20: mol_type = other DNA
cataattcccagtaacagta

SEQ ID NO: 4959 - DNA, 20 bp, synthetic construct
  misc_feature 1..20: note = chemically synthesized
  source 1..20: mol_type = other DNA
atgggatgccacctgggcaa

SEQ ID NO: 4960 - DNA, 20 bp, synthetic construct
  misc_feature 1..20: note = chemically synthesized
  source 1..20: mol_type = other DNA
cttctccctcaacgaagttt

SEQ ID NO: 4961 - DNA, 20 bp, synthetic construct
  misc_feature 1..20: note = chemically synthesized
  source 1..20: mol_type = other DNA
ggcaattcaagaaaatcaaa

SEQ ID NO: 4962 - DNA, 20 bp, synthetic construct
  misc_feature 1..20: note = chemically synthesized
  source 1..20: mol_type = other DNA
acaataacattggaaacatg

SEQ ID NO: 4963 - DNA, 20 bp, synthetic construct
  misc_feature 1..20: note = chemically synthesized
  source 1..20: mol_type = other DNA
aaggcagatcacctgagatc

SEQ ID NO: 4964 - DNA, 20 bp, synthetic construct
  misc_feature 1..20: note = chemically synthesized
  source 1..20: mol_type = other DNA
tacattagaggctgaggcag

SEQ ID NO: 4965 - DNA, 20 bp, synthetic construct
  misc_feature 1..20: note = chemically synthesized
  source 1..20: mol_type = other DNA
tctcaaaaaaaaaaaattag

SEQ ID NO: 4966 - DNA, 20 bp, synthetic construct
  misc_feature 1..20: note = chemically synthesized
  source 1..20: mol_type = other DNA
tactcgggaagctgagacag

SEQ ID NO: 4967 - DNA, 20 bp, synthetic construct
  misc_feature 1..20: note = chemically synthesized
  source 1..20: mol_type = other DNA
aaaataaaatgcaaaaatta

SEQ ID NO: 4968 - DNA, 20 bp, synthetic construct
  misc_feature 1..20: note = chemically synthesized
  source 1..20: mol_type = other DNA
gtttctactttatggctatt

SEQ ID NO: 4969 - DNA, 20 bp, synthetic construct
  misc_feature 1..20: note = chemically synthesized
  source 1..20: mol_type = other DNA
ttttggttatatatctagaa

SEQ ID NO: 4970 - DNA, 20 bp, synthetic construct
  misc_feature 1..20: note = chemically synthesized
  source 1..20: mol_type = other DNA
tatatctagaagtgggtttg

SEQ ID NO: 4971 - DNA, 20 bp, synthetic construct
  misc_feature 1..20: note = chemically synthesized
  source 1..20: mol_type = other DNA
taacactgtttaaccttttg

SEQ ID NO: 4972 - DNA, 20 bp, synthetic construct
  misc_feature 1..20: note = chemically synthesized
  source 1..20: mol_type = other DNA
tcctcctatcagcagtgtat

SEQ ID NO: 4973 - DNA, 20 bp, synthetic construct
  misc_feature 1..20: note = chemically synthesized
  source 1..20: mol_type = other DNA
tgatttctctccatctttgc

SEQ ID NO: 4974 - DNA, 20 bp, synthetic construct
  misc_feature 1..20: note = chemically synthesized
  source 1..20: mol_type = other DNA
ctccatctttgcctgggttt

SEQ ID NO: 4975 - DNA, 20 bp, synthetic construct
  misc_feature 1..20: note = chemically synthesized
  source 1..20: mol_type = other DNA
aatcaatctaccataaatgt

SEQ ID NO: 4976 - DNA, 20 bp, synthetic construct
  misc_feature 1..20: note = chemically synthesized
  source 1..20: mol_type = other DNA
taaatgtgagagtttatttc

SEQ ID NO: 4977 - DNA, 20 bp, synthetic construct
  misc_feature 1..20: note = chemically synthesized
  source 1..20: mol_type = other DNA
cctcactctattgcccaggt

SEQ ID NO: 4978 - DNA, 20 bp, synthetic construct
  misc_feature 1..20: note = chemically synthesized
  source 1..20: mol_type = other DNA
gcctcagcctcccaagcagc

SEQ ID NO: 4979 - DNA, 20 bp, synthetic construct
  misc_feature 1..20: note = chemically synthesized
  source 1..20: mol_type = other DNA
ttttgtatttttagtagaga

SEQ ID NO: 4980 - DNA, 20 bp, synthetic construct
  misc_feature 1..20: note = chemically synthesized
  source 1..20: mol_type = other DNA
ctgcttgggaggctgaggca

SEQ ID NO: 4981 - DNA, 20 bp, synthetic construct
  misc_feature 1..20: note = chemically synthesized
  source 1..20: mol_type = other DNA
aatgggataaaattgagact

SEQ ID NO: 4982 - DNA, 20 bp, synthetic construct
  misc_feature 1..20: note = chemically synthesized
  source 1..20: mol_type = other DNA
aaaaacccaggcaaagatgg

SEQ ID NO: 4983 - DNA, 20 bp, synthetic construct
  misc_feature 1..20: note = chemically synthesized
  source 1..20: mol_type = other DNA
gataaaatgcttactttgga

SEQ ID NO: 4984 - DNA, 20 bp, synthetic construct
  misc_feature 1..20: note = chemically synthesized
  source 1..20: mol_type = other DNA
cacttctagatatataacca

SEQ ID NO: 4985 - DNA, 20 bp, synthetic construct
  misc_feature 1..20: note = chemically synthesized
  source 1..20: mol_type = other DNA
ctattcccaatagccataaa

SEQ ID NO: 4986 - DNA, 20 bp, synthetic construct
  misc_feature 1..20: note = chemically synthesized
  source 1..20: mol_type = other DNA
atgtatactaaatgttccaa

SEQ ID NO: 4987 - DNA, 20 bp, synthetic construct
  misc_feature 1..20: note = chemically synthesized
  source 1..20: mol_type = other DNA
atactaaatgttccaaatag

SEQ ID NO: 4988 - DNA, 20 bp, synthetic construct
  misc_feature 1..20: note = chemically synthesized
  source 1..20: mol_type = other DNA
gggctgggaggggaggagga

SEQ ID NO: 4989 - DNA, 20 bp, synthetic construct
  misc_feature 1..20: note = chemically synthesized
  source 1..20: mol_type = other DNA
catggtttctttttggggag

SEQ ID NO: 4990 - DNA, 20 bp, synthetic construct
  misc_feature 1..20: note = chemically synthesized
  source 1..20: mol_type = other DNA
tggtcttacctataatttgt

SEQ ID NO: 4991 - DNA, 20 bp, synthetic construct
  misc_feature 1..20: note = chemically synthesized
  source 1..20: mol_type = other DNA
cgcccactcccttcccccaa

SEQ ID NO: 4992 - DNA, 20 bp, synthetic construct
  misc_feature 1..20: note = chemically synthesized
  source 1..20: mol_type = other DNA
tatccacattttacacatga

SEQ ID NO: 4993 - DNA, 20 bp, synthetic construct
  misc_feature 1..20: note = chemically synthesized
  source 1..20: mol_type = other DNA
ataataaaatttcatgttga

SEQ ID NO: 4994 - DNA, 20 bp, synthetic construct
  misc_feature 1..20: note = chemically synthesized
  source 1..20: mol_type = other DNA
agatgacaataagcaaatga

SEQ ID NO: 4995 - DNA, 20 bp, synthetic construct
  misc_feature 1..20: note = chemically synthesized
  source 1..20: mol_type = other DNA
gagcagagacatgaaggaaa

SEQ ID NO: 4996 - DNA, 20 bp, synthetic construct
  misc_feature 1..20: note = chemically synthesized
  source 1..20: mol_type = other DNA
ctctggctgctatgtggaaa

SEQ ID NO: 4997 - DNA, 20 bp, synthetic construct
  misc_feature 1..20: note = chemically synthesized
  source 1..20: mol_type = other DNA
gtggagtgggctgggtggga

SEQ ID NO: 4998 - DNA, 20 bp, synthetic construct
  misc_feature 1..20: note = chemically synthesized
  source 1..20: mol_type = other DNA
gaaggattctatgttgtgtg

SEQ ID NO: 4999 - DNA, 20 bp, synthetic construct
  misc_feature 1..20: note = chemically synthesized
  source 1..20: mol_type = other DNA
tatgttgtgtgagagaaaga

SEQ ID NO: 5000 - DNA, 20 bp, synthetic construct
  misc_feature 1..20: note = chemically synthesized
  source 1..20: mol_type = other DNA
gccacataggcagttcagtg

SEQ ID NO: 5001 - DNA, 20 bp, synthetic construct
  misc_feature 1..20: note = chemically synthesized
  source 1..20: mol_type = other DNA
gttttcaggaggcttaggta

SEQ ID NO: 5002 - DNA, 20 bp, synthetic construct
  misc_feature 1..20: note = chemically synthesized
  source 1..20: mol_type = other DNA
tagacacaccttaacatttt

SEQ ID NO: 5003 - DNA, 20 bp, synthetic construct
  misc_feature 1..20: note = chemically synthesized
  source 1..20: mol_type = other DNA
gggtggcagccacgtgtggc

SEQ ID NO: 5004 - DNA, 20 bp, synthetic construct
  misc_feature 1..20: note = chemically synthesized
  source 1..20: mol_type = other DNA
gcacccaggactgtcatatg

SEQ ID NO: 5005 - DNA, 20 bp, synthetic construct
  misc_feature 1..20: note = chemically synthesized
  source 1..20: mol_type = other DNA
ccgaactccatgggtttcca

SEQ ID NO: 5006 - DNA, 20 bp, synthetic construct
  misc_feature 1..20: note = chemically synthesized
  source 1..20: mol_type = other DNA
tatttatacctgttaaaaat

SEQ ID NO: 5007 - DNA, 20 bp, synthetic construct
  misc_feature 1..20: note = chemically synthesized
  source 1..20: mol_type = other DNA
aaaaaaaaaaaaaaaaaaaa

SEQ ID NO: 5008 - DNA, 20 bp, synthetic construct
  misc_feature 1..20: note = chemically synthesized
  source 1..20: mol_type = other DNA
tgaggccacttatcagagta

SEQ ID NO: 5009 - DNA, 20 bp, synthetic construct
  misc_feature 1..20: note = chemically synthesized
  source 1..20: mol_type = other DNA
gactgatgagagccaggagc

SEQ ID NO: 5010 - DNA, 20 bp, synthetic construct
  misc_feature 1..20: note = chemically synthesized
  source 1..20: mol_type = other DNA
caccagcagctccctgggag

SEQ ID NO: 5011 - DNA, 20 bp, synthetic construct
  misc_feature 1..20: note = chemically synthesized
  source 1..20: mol_type = other DNA
acagaaaataatggttctcc

SEQ ID NO: 5012 - DNA, 20 bp, synthetic construct
  misc_feature 1..20: note = chemically synthesized
  source 1..20: mol_type = other DNA
aatgcttagggtgtcaaagg

SEQ ID NO: 5013 - DNA, 20 bp, synthetic construct
  misc_feature 1..20: note = chemically synthesized
  source 1..20: mol_type = other DNA
gtataaggcatactgggaga

SEQ ID NO: 5014 - DNA, 20 bp, synthetic construct
  misc_feature 1..20: note = chemically synthesized
  source 1..20: mol_type = other DNA
acatctgtggtgtagggaaa

SEQ ID NO: 5015 - DNA, 20 bp, synthetic construct
  misc_feature 1..20: note = chemically synthesized
  source 1..20: mol_type = other DNA
gtggtgtagggaaaagagaa

SEQ ID NO: 5016 - DNA, 20 bp, synthetic construct
  misc_feature 1..20: note = chemically synthesized
  source 1..20: mol_type = other DNA
ggggtgtcattgaaggatcc

SEQ ID NO: 5017 - DNA, 20 bp, synthetic construct
  misc_feature 1..20: note = chemically synthesized
  source 1..20: mol_type = other DNA
atgagaggtgaggagaccag

SEQ ID NO: 5018 - DNA, 20 bp, synthetic construct
  misc_feature 1..20: note = chemically synthesized
  source 1..20: mol_type = other DNA
ggagagagttgaacctaaac

SEQ ID NO: 5019 - DNA, 20 bp, synthetic construct
  misc_feature 1..20: note = chemically synthesized
  source 1..20: mol_type = other DNA
acatgattcattttaacatc

SEQ ID NO: 5020 - DNA, 20 bp, synthetic construct
  misc_feature 1..20: note = chemically synthesized
  source 1..20: mol_type = other DNA
gaatggaagaggcacctgtc

SEQ ID NO: 5021 - DNA, 20 bp, synthetic construct
  misc_feature 1..20: note = chemically synthesized
  source 1..20: mol_type = other DNA
tactctagtattccagacct

SEQ ID NO: 5022 - DNA, 20 bp, synthetic construct
  misc_feature 1..20: note = chemically synthesized
  source 1..20: mol_type = other DNA
tccccatttcttttttaaat

SEQ ID NO: 5023 - DNA, 20 bp, synthetic construct
  misc_feature 1..20: note = chemically synthesized
  source 1..20: mol_type = other DNA
ctactcggaaggctgaggca

SEQ ID NO: 5024 - DNA, 20 bp, synthetic construct
  misc_feature 1..20: note = chemically synthesized
  source 1..20: mol_type = other DNA
aaataaaaaaatgaaaaaaa

SEQ ID NO: 5025 - DNA, 20 bp, synthetic construct
  misc_feature 1..20: note = chemically synthesized
  source 1..20: mol_type = other DNA
tatctcatagtttgtcagtg

SEQ ID NO: 5026 - DNA, 20 bp, synthetic construct
  misc_feature 1..20: note = chemically synthesized
  source 1..20: mol_type = other DNA
acattcagtagtttagatgc

SEQ ID NO: 5027 - DNA, 20 bp, synthetic construct
  misc_feature 1..20: note = chemically synthesized
  source 1..20: mol_type = other DNA
gaatcacatgaaggggaaca

SEQ ID NO: 5028 - DNA, 20 bp, synthetic construct
  misc_feature 1..20: note = chemically synthesized
  source 1..20: mol_type = other DNA
accattttctttttttgtgg

SEQ ID NO: 5029 - DNA, 20 bp, synthetic construct
  misc_feature 1..20: note = chemically synthesized
  source 1..20: mol_type = other DNA
tttgtggttagaaaagttat

SEQ ID NO: 5030 - DNA, 20 bp, synthetic construct
  misc_feature 1..20: note = chemically synthesized
  source 1..20: mol_type = other DNA
aaatgtgatttacgctcatt

SEQ ID NO: 5031 - DNA, 20 bp, synthetic construct
  misc_feature 1..20: note = chemically synthesized
  source 1..20: mol_type = other DNA
tttcacctgggctgagattt

SEQ ID NO: 5032 - DNA, 20 bp, synthetic construct
  misc_feature 1..20: note = chemically synthesized
  source 1..20: mol_type = other DNA
gtggcctgttaattttttta

SEQ ID NO: 5033 - DNA, 20 bp, synthetic construct
  misc_feature 1..20: note = chemically synthesized
  source 1..20: mol_type = other DNA
tttcctgaaggtaaaggaat

SEQ ID NO: 5034 - DNA, 20 bp, synthetic construct
  misc_feature 1..20: note = chemically synthesized
  source 1..20: mol_type = other DNA
gtgcactggaaatcacttgt

SEQ ID NO: 5035 - DNA, 20 bp, synthetic construct
  misc_feature 1..20: note = chemically synthesized
  source 1..20: mol_type = other DNA
gagaaaagcccctgaaaatt

SEQ ID NO: 5036 - DNA, 20 bp, synthetic construct
  misc_feature 1..20: note = chemically synthesized
  source 1..20: mol_type = other DNA
tgaaaatttgagaaaacaaa

SEQ ID NO: 5037 - DNA, 20 bp, synthetic construct
  misc_feature 1..20: note = chemically synthesized
  source 1..20: mol_type = other DNA
taacttctacactctaacat

SEQ ID NO: 5038 - DNA, 20 bp, synthetic construct
  misc_feature 1..20: note = chemically synthesized
  source 1..20: mol_type = other DNA
tacattaaaagttttccatg

SEQ ID NO: 5039 - DNA, 20 bp, synthetic construct
  misc_feature 1..20: note = chemically synthesized
  source 1..20: mol_type = other DNA
cccatgaatatatataatct

SEQ ID NO: 5040 - DNA, 20 bp, synthetic construct
  misc_feature 1..20: note = chemically synthesized
  source 1..20: mol_type = other DNA
aatcttaatttaattcctcc

SEQ ID NO: 5041 - DNA, 20 bp, synthetic construct
  misc_feature 1..20: note = chemically synthesized
  source 1..20: mol_type = other DNA
gagaggttagttaacttgct

SEQ ID NO: 5042 - DNA, 20 bp, synthetic construct
  misc_feature 1..20: note = chemically synthesized
  source 1..20: mol_type = other DNA
gctgcagggaaaaaggaatc

SEQ ID NO: 5043 - DNA, 20 bp, synthetic construct
  misc_feature 1..20: note = chemically synthesized
  source 1..20: mol_type = other DNA
ggatattttgttcagttcat

SEQ ID NO: 5044 - DNA, 20 bp, synthetic construct
  misc_feature 1..20: note = chemically synthesized
  source 1..20: mol_type = other DNA
ttattctctttatcattcag

SEQ ID NO: 5045 - DNA, 20 bp, synthetic construct
  misc_feature 1..20: note = chemically synthesized
  source 1..20: mol_type = other DNA
ttttactctgaagattctaa

SEQ ID NO: 5046 - DNA, 20 bp, synthetic construct
  misc_feature 1..20: note = chemically synthesized
  source 1..20: mol_type = other DNA
ttgtgctttctgtgtgctat

SEQ ID NO: 5047 - DNA, 20 bp, synthetic construct
  misc_feature 1..20: note = chemically synthesized
  source 1..20: mol_type = other DNA
atgtttaagagaggataatg

SEQ ID NO: 5048 - DNA, 20 bp, synthetic construct
  misc_feature 1..20: note = chemically synthesized
  source 1..20: mol_type = other DNA
ttccagaccagcctcaacat

SEQ ID NO: 5049 - DNA, 20 bp, synthetic construct
  misc_feature 1..20: note = chemically synthesized
  source 1..20: mol_type = other DNA
ctactcgggaggctgaggca

SEQ ID NO: 5050 - DNA, 20 bp, synthetic construct
  misc_feature 1..20: note = chemically synthesized
  source 1..20: mol_type = other DNA
aaaattttaaaatcttaaaa

SEQ ID NO: 5051 - DNA, 20 bp, synthetic construct
  misc_feature 1..20: note = chemically synthesized
  source 1..20: mol_type = other DNA
tttaaaatcttaaaaaaaga

SEQ ID NO: 5052 - DNA, 20 bp, synthetic construct
  misc_feature 1..20: note = chemically synthesized
  source 1..20: mol_type = other DNA
caagcctaggaagtgcaagt

SEQ ID NO: 5053 - DNA, 20 bp, synthetic construct
  misc_feature 1..20: note = chemically synthesized
  source 1..20: mol_type = other DNA
tgtgaaataatttaaactga

SEQ ID NO: 5054 - DNA, 20 bp, synthetic construct
  misc_feature 1..20: note = chemically synthesized
  source 1..20: mol_type = other DNA
gaaaaagcagagattttttt

SEQ ID NO: 5055 - DNA, 20 bp, synthetic construct
  misc_feature 1..20: note = chemically synthesized
  source 1..20: mol_type = other DNA
aatggtactgacagtttaat

SEQ ID NO: 5056 - DNA, 20 bp, synthetic construct
  misc_feature 1..20: note = chemically synthesized
  source 1..20: mol_type = other DNA
ttaattcagaaaaaaatgaa

SEQ ID NO: 5057 - DNA, 20 bp, synthetic construct
  misc_feature 1..20: note = chemically synthesized
  source 1..20: mol_type = other DNA
ataagttaggttgctgaaaa

SEQ ID NO: 5058 - DNA, 20 bp, synthetic construct
  misc_feature 1..20: note = chemically synthesized
  source 1..20: mol_type = other DNA
tacctccactccttactttt

SEQ ID NO: 5059 - DNA, 20 bp, synthetic construct
  misc_feature 1..20: note = chemically synthesized
  source 1..20: mol_type = other DNA
ttaaaaataaagatatctgg

SEQ ID NO: 5060 - DNA, 20 bp, synthetic construct
  misc_feature 1..20: note = chemically synthesized
  source 1..20: mol_type = other DNA
gaatactttcttaatagcac

SEQ ID NO: 5061 - DNA, 20 bp, synthetic construct
  misc_feature 1..20: note = chemically synthesized
  source 1..20: mol_type = other DNA
ttgtgaacccaaacttacac

SEQ ID NO: 5062 - DNA, 20 bp, synthetic construct
  misc_feature 1..20: note = chemically synthesized
  source 1..20: mol_type = other DNA
ctactcaggaggctggggca

SEQ ID NO: 5063 - DNA, 20 bp, synthetic construct
  misc_feature 1..20: note = chemically synthesized
  source 1..20: mol_type = other DNA
taaagactccaaaattcttt

SEQ ID NO: 5064 - DNA, 20 bp, synthetic construct
  misc_feature 1..20: note = chemically synthesized
  source 1..20: mol_type = other DNA
tagaatcttcagagtaaaag

SEQ ID NO: 5065 - DNA, 20 bp, synthetic construct
  misc_feature 1..20: note = chemically synthesized
  source 1..20: mol_type = other DNA
aatttctccctgaatgataa

SEQ ID NO: 5066 - DNA, 20 bp, synthetic construct
  misc_feature 1..20: note = chemically synthesized
  source 1..20: mol_type = other DNA
tgaatatgtcaattcaaaag

SEQ ID NO: 5067 - DNA, 20 bp, synthetic construct
  misc_feature 1..20: note = chemically synthesized
  source 1..20: mol_type = other DNA
agaacccgtttcaataaata

SEQ ID NO: 5068 - DNA, 20 bp, synthetic construct
  misc_feature 1..20: note = chemically synthesized
  source 1..20: mol_type = other DNA
ctcaacaacaacaaaacaag

SEQ ID NO: 5069 - DNA, 20 bp, synthetic construct
  misc_feature 1..20: note = chemically synthesized
  source 1..20: mol_type = other DNA
gatagagtgagactccatct

SEQ ID NO: 5070 - DNA, 20 bp, synthetic construct
  misc_feature 1..20: note = chemically synthesized
  source 1..20: mol_type = other DNA
aaggttgtgtagttgttatt

SEQ ID NO: 5071 - DNA, 20 bp, synthetic construct
  misc_feature 1..20: note = chemically synthesized
  source 1..20: mol_type = other DNA
tagttgttattccagaatag

SEQ ID NO: 5072 - DNA, 20 bp, synthetic construct
  misc_feature 1..20: note = chemically synthesized
  source 1..20: mol_type = other DNA
ataacagcaacataagcata

SEQ ID NO: 5073 - DNA, 20 bp, synthetic construct
  misc_feature 1..20: note = chemically synthesized
  source 1..20: mol_type = other DNA
aatgtacaaattcatccatc

SEQ ID NO: 5074 - DNA, 20 bp, synthetic construct
  misc_feature 1..20: note = chemically synthesized
  source 1..20: mol_type = other DNA
caaattcatccatccaagaa

SEQ ID NO: 5075 - DNA, 20 bp, synthetic construct
  misc_feature 1..20: note = chemically synthesized
  source 1..20: mol_type = other DNA
tctacaccttaaacaattac

SEQ ID NO: 5076 - DNA, 20 bp, synthetic construct
  misc_feature 1..20: note = chemically synthesized
  source 1..20: mol_type = other DNA
ccttaaacaattactcagaa

SEQ ID NO: 5077 - DNA, 20 bp, synthetic construct
  misc_feature 1..20: note = chemically synthesized
  source 1..20: mol_type = other DNA
gaaatagaatgcttgagata

SEQ ID NO: 5078 - DNA, 20 bp, synthetic construct
  misc_feature 1..20: note = chemically synthesized
  source 1..20: mol_type = other DNA
attatacccaaagcctacag

SEQ ID NO: 5079 - DNA, 20 bp, synthetic construct
  misc_feature 1..20: note = chemically synthesized
  source 1..20: mol_type = other DNA
gaaaatctttaatttgaaag

SEQ ID NO: 5080 - DNA, 20 bp, synthetic construct
  misc_feature 1..20: note = chemically synthesized
  source 1..20: mol_type = other DNA
ttaaatgtgtgtgagtttgt

SEQ ID NO: 5081 - DNA, 20 bp, synthetic construct
  misc_feature 1..20: note = chemically synthesized
  source 1..20: mol_type = other DNA
gacattattataatacaaca

SEQ ID NO: 5082 - DNA, 20 bp, synthetic construct
  misc_feature 1..20: note = chemically synthesized
  source 1..20: mol_type = other DNA
atggttttgccagaggtgaa

SEQ ID NO: 5083 - DNA, 20 bp, synthetic construct
  misc_feature 1..20: note = chemically synthesized
  source 1..20: mol_type = other DNA
ttttcaaatgtagttgacct

SEQ ID NO: 5084 - DNA, 20 bp, synthetic construct
  misc_feature 1..20: note = chemically synthesized
  source 1..20: mol_type = other DNA
ttaagaatttatgaataaag

SEQ ID NO: 5085 - DNA, 20 bp, synthetic construct
  misc_feature 1..20: note = chemically synthesized
  source 1..20: mol_type = other DNA
attaagcttaaaaaacaccg

SEQ ID NO: 5086 - DNA, 20 bp, synthetic construct
  misc_feature 1..20: note = chemically synthesized
  source 1..20: mol_type = other DNA
cagtatagtaagatattaag

SEQ ID NO: 5087 - DNA, 20 bp, synthetic construct
  misc_feature 1..20: note = chemically synthesized
  source 1..20: mol_type = other DNA
aaataatttgtcatatgctt

SEQ ID NO: 5088 - DNA, 20 bp, synthetic construct
  misc_feature 1..20: note = chemically synthesized
  source 1..20: mol_type = other DNA
gacgacaatgtccctagagt

SEQ ID NO: 5089 - DNA, 20 bp, synthetic construct
  misc_feature 1..20: note = chemically synthesized
  source 1..20: mol_type = other DNA
tattccgtaagacaaaatgt

SEQ ID NO: 5090 - DNA, 20 bp, synthetic construct
  misc_feature 1..20: note = chemically synthesized
  source 1..20: mol_type = other DNA
taacttttctaaccacaaaa

SEQ ID NO: 5091 - DNA, 20 bp, synthetic construct
  misc_feature 1..20: note = chemically synthesized
  source 1..20: mol_type = other DNA
gctaaaatttaatgcctaaa

SEQ ID NO: 5092 - DNA, 20 bp, synthetic construct
  misc_feature 1..20: note = chemically synthesized
  source 1..20: mol_type = other DNA
tgaagcacctgcccttcaag

SEQ ID NO: 5093 - DNA, 20 bp, synthetic construct
  misc_feature 1..20: note = chemically synthesized
  source 1..20: mol_type = other DNA
ctacttgggaggctgagaca

SEQ ID NO: 5094 - DNA, 20 bp, synthetic construct
  misc_feature 1..20: note = chemically synthesized
  source 1..20: mol_type = other DNA
gaacatggtgaactgatttc

SEQ ID NO: 5095 - DNA, 20 bp, synthetic construct
  misc_feature 1..20: note = chemically synthesized
  source 1..20: mol_type = other DNA
acagtccttgcgtagggtcc

SEQ ID NO: 5096 - DNA, 20 bp, synthetic construct
  misc_feature 1..20: note = chemically synthesized
  source 1..20: mol_type = other DNA
atgtgattcaagctcactca

SEQ ID NO: 5097 - DNA, 20 bp, synthetic construct
  misc_feature 1..20: note = chemically synthesized
  source 1..20: mol_type = other DNA
cttcactttcttcatttaaa

SEQ ID NO: 5098 - DNA, 20 bp, synthetic construct
  misc_feature 1..20: note = chemically synthesized
  source 1..20: mol_type = other DNA
gggataatagtacctatctc

SEQ ID NO: 5099 - DNA, 20 bp, synthetic construct
  misc_feature 1..20: note = chemically synthesized
  source 1..20: mol_type = other DNA
tcagaacaaggagagaccag

SEQ ID NO: 5100 - DNA, 20 bp, synthetic construct
  misc_feature 1..20: note = chemically synthesized
  source 1..20: mol_type = other DNA
gtatgacaccttcatgccaa

SEQ ID NO: 5101 - DNA, 20 bp, synthetic construct
  misc_feature 1..20: note = chemically synthesized
  source 1..20: mol_type = other DNA
actcacatcacaatcagatg

SEQ ID NO: 5102 - DNA, 20 bp, synthetic construct
  misc_feature 1..20: note = chemically synthesized
  source 1..20: mol_type = other DNA
aaaggaaaagttgaacgggt

SEQ ID NO: 5103 - DNA, 20 bp, synthetic construct
  misc_feature 1..20: note = chemically synthesized
  source 1..20: mol_type = other DNA
gatcaccggcatgcaggaac

SEQ ID NO: 5104 - DNA, 20 bp, synthetic construct
  misc_feature 1..20: note = chemically synthesized
  source 1..20: mol_type = other DNA
acaccacagatgttcagggg

SEQ ID NO: 5105 - DNA, 20 bp, synthetic construct
  misc_feature 1..20: note = chemically synthesized
  source 1..20: mol_type = other DNA
tccctaccagatttgggttc

SEQ ID NO: 5106 - DNA, 20 bp, synthetic construct
  misc_feature 1..20: note = chemically synthesized
  source 1..20: mol_type = other DNA
agggagctgctggtgtcccc

SEQ ID NO: 5107 - DNA, 20 bp, synthetic construct
  misc_feature 1..20: note = chemically synthesized
  source 1..20: mol_type = other DNA
gtgtccccaaagaatataaa

SEQ ID NO: 5108 - DNA, 20 bp, synthetic construct
  misc_feature 1..20: note = chemically synthesized
  source 1..20: mol_type = other DNA
cagacggtgagggctctaaa

SEQ ID NO: 5109 - DNA, 20 bp, synthetic construct
  misc_feature 1..20: note = chemically synthesized
  source 1..20: mol_type = other DNA
ggaggaaggaaatacccttt

SEQ ID NO: 5110 - DNA, 20 bp, synthetic construct
  misc_feature 1..20: note = chemically synthesized
  source 1..20: mol_type = other DNA
gattattgctatgttctatg

SEQ ID NO: 5111 - DNA, 20 bp, synthetic construct
  misc_feature 1..20: note = chemically synthesized
  source 1..20: mol_type = other DNA
tccctttgagccatatgcat

SEQ ID NO: 5112 - DNA, 20 bp, synthetic construct
  misc_feature 1..20: note = chemically synthesized
  source 1..20: mol_type = other DNA
ttgagccatatgcatggaga

SEQ ID NO: 5113 - DNA, 20 bp, synthetic construct
  misc_feature 1..20: note = chemically synthesized
  source 1..20: mol_type = other DNA
taaggtagagactctaggat

SEQ ID NO: 5114 - DNA, 20 bp, synthetic construct
  misc_feature 1..20: note = chemically synthesized
  source 1..20: mol_type = other DNA
aggattgagaaagtcccttc

SEQ ID NO: 5115 - DNA, 20 bp, synthetic construct
  misc_feature 1..20: note = chemically synthesized
  source 1..20: mol_type = other DNA
ctccaatccagtgtgtcagg

SEQ ID NO: 5116 - DNA, 20 bp, synthetic construct
  misc_feature 1..20: note = chemically synthesized
  source 1..20: mol_type = other DNA
tccactaaagctggtggatt

SEQ ID NO: 5117 - DNA, 20 bp, synthetic construct
  misc_feature 1..20: note = chemically synthesized
  source 1..20: mol_type = other DNA
tttcctctgccttcaccatc

SEQ ID NO: 5118 - DNA, 20 bp, synthetic construct
  misc_feature 1..20: note = chemically synthesized
  source 1..20: mol_type = other DNA
ttctctttctctcacacaac

SEQ ID NO: 5119 - DNA, 20 bp, synthetic construct
  misc_feature 1..20: note = chemically synthesized
  source 1..20: mol_type = other DNA
gaatccttcagcaacttcct

SEQ ID NO: 5120 - DNA, 20 bp, synthetic construct
  misc_feature 1..20: note = chemically synthesized
  source 1..20: mol_type = other DNA
agatcactgttactccttgg

SEQ ID NO: 5121 - DNA, 20 bp, synthetic construct
  misc_feature 1..20: note = chemically synthesized
  source 1..20: mol_type = other DNA
cacacacacatgagtagtgc

SEQ ID NO: 5122 - DNA, 20 bp, synthetic construct
  misc_feature 1..20: note = chemically synthesized
  source 1..20: mol_type = other DNA
gcttattgtcatctctccca

SEQ ID NO: 5123 - DNA, 20 bp, synthetic construct
  misc_feature 1..20: note = chemically synthesized
  source 1..20: mol_type = other DNA
ctctaatgcagtgtgatgtt

SEQ ID NO: 5124 - DNA, 20 bp, synthetic construct
  misc_feature 1..20: note = chemically synthesized
  source 1..20: mol_type = other DNA
ctgtagtacttgaaataaca

SEQ ID NO: 5125 - DNA, 20 bp, synthetic construct
  misc_feature 1..20: note = chemically synthesized
  source 1..20: mol_type = other DNA
tcaataaagcctagccgaaa

SEQ ID NO: 5126 - DNA, 20 bp, synthetic construct
  misc_feature 1..20: note = chemically synthesized
  source 1..20: mol_type = other DNA
ccaaaagtgggtggaatggt

SEQ ID NO: 5127 - DNA, 20 bp, synthetic construct
  misc_feature 1..20: note = chemically synthesized
  source 1..20: mol_type = other DNA
ctccctcacggggtctggac

SEQ ID NO: 5128 - DNA, 20 bp, synthetic construct
  misc_feature 1..20: note = chemically synthesized
  source 1..20: mol_type = other DNA
gttagcaaactcccaagcgc

SEQ ID NO: 5129 - DNA, 20 bp, synthetic construct
  misc_feature 1..20: note = chemically synthesized
  source 1..20: mol_type = other DNA
caacttatgtcttatttgac

SEQ ID NO: 5130 - DNA, 20 bp, synthetic construct
  misc_feature 1..20: note = chemically synthesized
  source 1..20: mol_type = other DNA
ttacagtattgggattatct

SEQ ID NO: 5131 - DNA, 20 bp, synthetic construct
  misc_feature 1..20: note = chemically synthesized
  source 1..20: mol_type = other DNA
gtctgtggccaaaatatcct

SEQ ID NO: 5132 - DNA, 20 bp, synthetic construct
  misc_feature 1..20: note = chemically synthesized
  source 1..20: mol_type = other DNA
ggccaaaatatcctggagaa

SEQ ID NO: 5133 - DNA, 20 bp, synthetic construct
  misc_feature 1..20: note = chemically synthesized
  source 1..20: mol_type = other DNA
ttcatcatgccatcattata

SEQ ID NO: 5134 - DNA, 20 bp, synthetic construct
  misc_feature 1..20: note = chemically synthesized
  source 1..20: mol_type = other DNA
agaagtgctgagttcacttc

SEQ ID NO: 5135 - DNA, 20 bp, synthetic construct
  misc_feature 1..20: note = chemically synthesized
  source 1..20: mol_type = other DNA
gtatgcaaattttggcaatt

SEQ ID NO: 5136 - DNA, 20 bp, synthetic construct
  misc_feature 1..20: note = chemically synthesized
  source 1..20: mol_type = other DNA
tacaataacattggaaacat

SEQ ID NO: 5137 - DNA, 20 bp, synthetic construct
  misc_feature 1..20: note = chemically synthesized
  source 1..20: mol_type = other DNA
ctacattagaggctgaggca

SEQ ID NO: 5138 - DNA, 20 bp, synthetic construct
  misc_feature 1..20: note = chemically synthesized
  source 1..20: mol_type = other DNA
ctactcgggaagctgagaca

SEQ ID NO: 5139 - DNA, 20 bp, synthetic construct
  misc_feature 1..20: note = chemically synthesized
  source 1..20: mol_type = other DNA
ttacatttctatctccccaa

SEQ ID NO: 5140 - DNA, 20 bp, synthetic construct
  misc_feature 1..20: note = chemically synthesized
  source 1..20: mol_type = other DNA
ttgatttttgataagggtgc

SEQ ID NO: 5141 - DNA, 20 bp, synthetic construct
  misc_feature 1..20: note = chemically synthesized
  source 1..20: mol_type = other DNA
tctatctggggccctgattc

SEQ ID NO: 5142 - DNA, 20 bp, synthetic construct
  misc_feature 1..20: note = chemically synthesized
  source 1..20: mol_type = other DNA
gatatataaccaaaagaaat

SEQ ID NO: 5143 - DNA, 20 bp, synthetic construct
  misc_feature 1..20: note = chemically synthesized
  source 1..20: mol_type = other DNA
atcaaaacataagtctacaa

SEQ ID NO: 5144 - DNA, 20 bp, synthetic construct
  misc_feature 1..20: note = chemically synthesized
  source 1..20: mol_type = other DNA
atagatattattggtccatg

SEQ ID NO: 5145 - DNA, 20 bp, synthetic construct
  misc_feature 1..20: note = chemically synthesized
  source 1..20: mol_type = other DNA
ggtccatgaaaaacatacat

SEQ ID NO: 5146 - DNA, 20 bp, synthetic construct
  misc_feature 1..20: note = chemically synthesized
  source 1..20: mol_type = other DNA
gcctcccagggatggggggg

SEQ ID NO: 5147 - DNA, 20 bp, synthetic construct
  misc_feature 1..20: note = chemically synthesized
  source 1..20: mol_type = other DNA
gacttaattaatttgaatca

SEQ ID NO: 5148 - DNA, 20 bp, synthetic construct
  misc_feature 1..20: note = chemically synthesized
  source 1..20: mol_type = other DNA
acaacaccccttcaggattt

SEQ ID NO: 5149 - DNA, 20 bp, synthetic construct
  misc_feature 1..20: note = chemically synthesized
  source 1..20: mol_type = other DNA
gaccagcctgggcaacacag

SEQ ID NO: 5150 - DNA, 20 bp, synthetic construct
  misc_feature 1..20: note = chemically synthesized
  source 1..20: mol_type = other DNA
aaaaaaaaaaaaaaaaaaaa

SEQ ID NO: 5151 - DNA, 20 bp, synthetic construct
  misc_feature 1..20: note = chemically synthesized
  source 1..20: mol_type = other DNA
gactcactgtgggaaggaga

SEQ ID NO: 5152 - DNA, 20 bp, synthetic construct
  misc_feature 1..20: note = chemically synthesized
  source 1..20: mol_type = other DNA
tcacatgaaggggaacagca

SEQ ID NO: 5153 - DNA, 20 bp, synthetic construct
  misc_feature 1..20: note = chemically synthesized
  source 1..20: mol_type = other DNA
tgttatttaattagccagtg

SEQ ID NO: 5154 - DNA, 20 bp, synthetic construct
  misc_feature 1..20: note = chemically synthesized
  source 1..20: mol_type = other DNA
aaattcttattcacctctgg

SEQ ID NO: 5155 - DNA, 20 bp, synthetic construct
  misc_feature 1..20: note = chemically synthesized
  source 1..20: mol_type = other DNA
aaaagcccctgaaaatttga

SEQ ID NO: 5156 - DNA, 20 bp, synthetic construct
  misc_feature 1..20: note = chemically synthesized
  source 1..20: mol_type = other DNA
aactgggaacacaacagaag

SEQ ID NO: 5157 - DNA, 20 bp, synthetic construct
  misc_feature 1..20: note = chemically synthesized
  source 1..20: mol_type = other DNA
ataatactgtcagtatttta

SEQ ID NO: 5158 - DNA, 20 bp, synthetic construct
  misc_feature 1..20: note = chemically synthesized
  source 1..20: mol_type = other DNA
tcacaaactcacacacattt

SEQ ID NO: 5159 - DNA, 20 bp, synthetic construct
  misc_feature 1..20: note = chemically synthesized
  source 1..20: mol_type = other DNA
aactcacacacatttaaaaa

SEQ ID NO: 5160 - DNA, 20 bp, synthetic construct
  misc_feature 1..20: note = chemically synthesized
  source 1..20: mol_type = other DNA
tccatggcagaaatcttttc

SEQ ID NO: 5161 - DNA, 20 bp, synthetic construct
  misc_feature 1..20: note = chemically synthesized
  source 1..20: mol_type = other DNA
aatatccttgatttattcct

SEQ ID NO: 5162 - DNA, 20 bp, synthetic construct
  misc_feature 1..20: note = chemically synthesized
  source 1..20: mol_type = other DNA
ccggctgaatggcactttca

SEQ ID NO: 5163 - DNA, 20 bp, synthetic construct
  misc_feature 1..20: note = chemically synthesized
  source 1..20: mol_type = other DNA
tgggttcacaatttcatcat

SEQ ID NO: 5164 - DNA, 20 bp, synthetic construct
  misc_feature 1..20: note = chemically synthesized
  source 1..20: mol_type = other DNA
aagagcgaaactccatctca

SEQ ID NO: 5165 - DNA, 20 bp, synthetic construct
  misc_feature 1..20: note = chemically synthesized
  source 1..20: mol_type = other DNA
cgaaactccatctcaaaaaa

SEQ ID NO: 5166 - DNA, 20 bp, synthetic construct
  misc_feature 1..20: note = chemically synthesized
  source 1..20: mol_type = other DNA
gcctaggaagtgcaagtcaa

SEQ ID NO: 5167 - DNA, 20 bp, synthetic construct
  misc_feature 1..20: note = chemically synthesized
  source 1..20: mol_type = other DNA
gtaaggagtggaggtaaaaa

SEQ ID NO: 5168 - DNA, 20 bp, synthetic construct
  misc_feature 1..20: note = chemically synthesized
  source 1..20: mol_type = other DNA
gaacccaaacttacacaaag

SEQ ID NO: 5169 - DNA, 20 bp, synthetic construct
  misc_feature 1..20: note = chemically synthesized
  source 1..20: mol_type = other DNA
cgtaacattatacccatact

SEQ ID NO: 5170 - DNA, 20 bp, synthetic construct
  misc_feature 1..20: note = chemically synthesized
  source 1..20: mol_type = other DNA
agatgccctcatatacatag

SEQ ID NO: 5171 - DNA, 20 bp, synthetic construct
  misc_feature 1..20: note = chemically synthesized
  source 1..20: mol_type = other DNA
cgagctccgtctcgaaaaaa

SEQ ID NO: 5172 - DNA, 20 bp, synthetic construct
  misc_feature 1..20: note = chemically synthesized
  source 1..20: mol_type = other DNA
agaccctgtctcaacaacaa

SEQ ID NO: 5173 - DNA, 20 bp, synthetic construct
  misc_feature 1..20: note = chemically synthesized
  source 1..20: mol_type = other DNA
ttaggagtgctgctgttcct

SEQ ID NO: 5174 - DNA, 20 bp, synthetic construct
  misc_feature 1..20: note = chemically synthesized
  source 1..20: mol_type = other DNA
ttgaaaagatttctgccatg

SEQ ID NO: 5175 - DNA, 20 bp, synthetic construct
  misc_feature 1..20: note = chemically synthesized
  source 1..20: mol_type = other DNA
ggtttgaaaaaaagttagtt

SEQ ID NO: 5176 - DNA, 20 bp, synthetic construct
  misc_feature 1..20: note = chemically synthesized
  source 1..20: mol_type = other DNA
ctttattcctttaccttcag

SEQ ID NO: 5177 - DNA, 20 bp, synthetic construct
  misc_feature 1..20: note = chemically synthesized
  source 1..20: mol_type = other DNA
agccagaaaaattaagctta

SEQ ID NO: 5178 - DNA, 20 bp, synthetic construct
  misc_feature 1..20: note = chemically synthesized
  source 1..20: mol_type = other DNA
aaatctcagcccaggtgaaa

SEQ ID NO: 5179 - DNA, 20 bp, synthetic construct
  misc_feature 1..20: note = chemically synthesized
  source 1..20: mol_type = other DNA
caggtgaaataaaaccaata

SEQ ID NO: 5180 - DNA, 20 bp, synthetic construct
  misc_feature 1..20: note = chemically synthesized
  source 1..20: mol_type = other DNA
acaccttcatgccaattaga

SEQ ID NO: 5181 - DNA, 20 bp, synthetic construct
  misc_feature 1..20: note = chemically synthesized
  source 1..20: mol_type = other DNA
atatttgcctcctacctgct

SEQ ID NO: 5182 - DNA, 20 bp, synthetic construct
  misc_feature 1..20: note = chemically synthesized
  source 1..20: mol_type = other DNA
ccaatgaacaagatgacgac

SEQ ID NO: 5183 - DNA, 20 bp, synthetic construct
  misc_feature 1..20: note = chemically synthesized
  source 1..20: mol_type = other DNA
gtgccagacggtgagggctc

SEQ ID NO: 5184 - DNA, 20 bp, synthetic construct
  misc_feature 1..20: note = chemically synthesized
  source 1..20: mol_type = other DNA
aggaaatacccttttcagaa

SEQ ID NO: 5185 - DNA, 20 bp, synthetic construct
  misc_feature 1..20: note = chemically synthesized
  source 1..20: mol_type = other DNA
tccaccataccttgttggtc

SEQ ID NO: 5186 - DNA, 20 bp, synthetic construct
  misc_feature 1..20: note = chemically synthesized
  source 1..20: mol_type = other DNA
ttctcctacctaagcctcct

SEQ ID NO: 5187 - DNA, 20 bp, synthetic construct
  misc_feature 1..20: note = chemically synthesized
  source 1..20: mol_type = other DNA
acacacatgagtagtgctga

SEQ ID NO: 5188 - DNA, 20 bp, synthetic construct
  misc_feature 1..20: note = chemically synthesized
  source 1..20: mol_type = other DNA
aatgtggatacacgtagtac

SEQ ID NO: 5189 - DNA, 20 bp, synthetic construct
  misc_feature 1..20: note = chemically synthesized
  source 1..20: mol_type = other DNA
tagtacttgaaataacatca

SEQ ID NO: 5190 - DNA, 20 bp, synthetic construct
  misc_feature 1..20: note = chemically synthesized
  source 1..20: mol_type = other DNA
aattgttcagttcaaacgtt

SEQ ID NO: 5191 - DNA, 20 bp, synthetic construct
  misc_feature 1..20: note = chemically synthesized
  source 1..20: mol_type = other DNA
tgtttggagatgactgggga

SEQ ID NO: 5192 - DNA, 20 bp, synthetic construct
  misc_feature 1..20: note = chemically synthesized
  source 1..20: mol_type = other DNA
taggctcaggagatgcccag

SEQ ID NO: 5193 - DNA, 20 bp, synthetic construct
  misc_feature 1..20: note = chemically synthesized
  source 1..20: mol_type = other DNA
tggcaggtacctgtaatccc

SEQ ID NO: 5194 - DNA, 20 bp, synthetic construct
  misc_feature 1..20: note = chemically synthesized
  source 1..20: mol_type = other DNA
ttgggaggctgaggcaggag

SEQ ID NO: 5195 - DNA, 20 bp, synthetic construct
  misc_feature 1..20: note = chemically synthesized
  source 1..20: mol_type = other DNA
ctgggaggaggagccagtgg

SEQ ID NO: 5196 - DNA, 20 bp, synthetic construct
  misc_feature 1..20: note = chemically synthesized
  source 1..20: mol_type = other DNA
tctgtcaaaaaaaaaaaaag

SEQ ID NO: 5197 - DNA, 20 bp, synthetic construct
  misc_feature 1..20: note = chemically synthesized
  source 1..20: mol_type = other DNA
aaaaaaaaaaaagataggat

SEQ ID NO: 5198 - DNA, 20 bp, synthetic construct
  misc_feature 1..20: note = chemically synthesized
  source 1..20: mol_type = other DNA
aaataaactctcacatttat

SEQ ID NO: 5199 - DNA, 20 bp, synthetic construct
  misc_feature 1..20: note = chemically synthesized
  source 1..20: mol_type = other DNA
aaactctcacatttatggta

SEQ ID NO: 5200 - DNA, 20 bp, synthetic construct
  misc_feature 1..20: note = chemically synthesized
  source 1..20: mol_type = other DNA
catttttgttctatctgggg

SEQ ID NO: 5201 - DNA, 20 bp, synthetic construct
  misc_feature 1..20: note = chemically synthesized
  source 1..20: mol_type = other DNA
acactgctgataggaggata

SEQ ID NO: 5202 - DNA, 20 bp, synthetic construct
  misc_feature 1..20: note = chemically synthesized
  source 1..20: mol_type = other DNA
ctacaaaaaaacttgtacat

SEQ ID NO: 5203 - DNA, 20 bp, synthetic construct
  misc_feature 1..20: note = chemically synthesized
  source 1..20: mol_type = other DNA
aatgttccaaatagaaagaa

SEQ ID NO: 5204 - DNA, 20 bp, synthetic construct
  misc_feature 1..20: note = chemically synthesized
  source 1..20: mol_type = other DNA
caaatagaaagaaagtagat

SEQ ID NO: 5205 - DNA, 20 bp, synthetic construct
  misc_feature 1..20: note = chemically synthesized
  source 1..20: mol_type = other DNA
agggtactgaattaggggaa

SEQ ID NO: 5206 - DNA, 20 bp, synthetic construct
  misc_feature 1..20: note = chemically synthesized
  source 1..20: mol_type = other DNA
tatttattttatttttgaga

SEQ ID NO: 5207 - DNA, 20 bp, synthetic construct
  misc_feature 1..20: note = chemically synthesized
  source 1..20: mol_type = other DNA
aacctccgcctcccaggttc

SEQ ID NO: 5208 - DNA, 20 bp, synthetic construct
  misc_feature 1..20: note = chemically synthesized
  source 1..20: mol_type = other DNA
ggttcaagcgattctcctgt

SEQ ID NO: 5209 - DNA, 20 bp, synthetic construct
  misc_feature 1..20: note = chemically synthesized
  source 1..20: mol_type = other DNA
aacctacgcctcccgggttc

SEQ ID NO: 5210 - DNA, 20 bp, synthetic construct
  misc_feature 1..20: note = chemically synthesized
  source 1..20: mol_type = other DNA
tgcctcagcctctaatgtag

SEQ ID NO: 5211 - DNA, 20 bp, synthetic construct
  misc_feature 1..20: note = chemically synthesized
  source 1..20: mol_type = other DNA
ttttgtatttttagtaaaga

SEQ ID NO: 5212 - DNA, 20 bp, synthetic construct
  misc_feature 1..20: note = chemically synthesized
  source 1..20: mol_type = other DNA
ttcctcggccgcccaaagtg

SEQ ID NO: 5213 - DNA, 20 bp, synthetic construct
  misc_feature 1..20: note = chemically synthesized
  source 1..20: mol_type = other DNA
gtgcccatcatcaatattct

SEQ ID NO: 5214 - DNA, 20 bp, synthetic construct
  misc_feature 1..20: note = chemically synthesized
  source 1..20: mol_type = other DNA
catgtttccaatgttattgt

SEQ ID NO: 5215 - DNA, 20 bp, synthetic construct
  misc_feature 1..20: note = chemically synthesized
  source 1..20: mol_type = other DNA
ctacagtcgaggccctgata

SEQ ID NO: 5216 - DNA, 20 bp, synthetic construct
  misc_feature 1..20: note = chemically synthesized
  source 1..20: mol_type = other DNA
agtcgaggccctgatatcct

SEQ ID NO: 5217 - DNA, 20 bp, synthetic construct
  misc_feature 1..20: note = chemically synthesized
  source 1..20: mol_type = other DNA
tgaattgccaaaatttgcat

SEQ ID NO: 5218 - DNA, 20 bp, synthetic construct
  misc_feature 1..20: note = chemically synthesized
  source 1..20: mol_type = other DNA
gttgaatttgctagatatgt

SEQ ID NO: 5219 - DNA, 20 bp, synthetic construct
  misc_feature 1..20: note = chemically synthesized
  source 1..20: mol_type = other DNA
aggtgtattaaatttattaa

SEQ ID NO: 5220 - DNA, 20 bp, synthetic construct
  misc_feature 1..20: note = chemically synthesized
  source 1..20: mol_type = other DNA
aaacttcgttgagggagaag

SEQ ID NO: 5221 - DNA, 20 bp, synthetic construct
  misc_feature 1..20: note = chemically synthesized
  source 1..20: mol_type = other DNA
tgggatggatcctttaaccg

SEQ ID NO: 5222 - DNA, 20 bp, synthetic construct
  misc_feature 1..20: note = chemically synthesized
  source 1..20: mol_type = other DNA
ctacaaactaacaccaaaat

SEQ ID NO: 5223 - DNA, 20 bp, synthetic construct
  misc_feature 1..20: note = chemically synthesized
  source 1..20: mol_type = other DNA
accaaaatgcaagcttaaag

SEQ ID NO: 5224 - DNA, 20 bp, synthetic construct
  misc_feature 1..20: note = chemically synthesized
  source 1..20: mol_type = other DNA
ataatacactctgagggaca

SEQ ID NO: 5225 - DNA, 20 bp, synthetic construct
  misc_feature 1..20: note = chemically synthesized
  source 1..20: mol_type = other DNA
gcacttctttacagagctca

SEQ ID NO: 5226 - DNA, 20 bp, synthetic construct
  misc_feature 1..20: note = chemically synthesized
  source 1..20: mol_type = other DNA
cagagctcaaggtgctttta

SEQ ID NO: 5227 - DNA, 20 bp, synthetic construct
  misc_feature 1..20: note = chemically synthesized
  source 1..20: mol_type = other DNA
tggggtttgtggggaggagt

SEQ ID NO: 5228 - DNA, 20 bp, synthetic construct
  misc_feature 1..20: note = chemically synthesized
  source 1..20: mol_type = other DNA
ctgagtgacaggatgatgtt

SEQ ID NO: 5229 - DNA, 20 bp, synthetic construct
  misc_feature 1..20: note = chemically synthesized
  source 1..20: mol_type = other DNA
aacttggggtgaacttgaag

SEQ ID NO: 5230 - DNA, 20 bp, synthetic construct
  misc_feature 1..20: note = chemically synthesized
  source 1..20: mol_type = other DNA
ggggttaggagcaggcctca

SEQ ID NO: 5231 - DNA, 20 bp, synthetic construct
  misc_feature 1..20: note = chemically synthesized
  source 1..20: mol_type = other DNA
tccagataatcccaatactg

SEQ ID NO: 5232 - DNA, 20 bp, synthetic construct
  misc_feature 1..20: note = chemically synthesized
  source 1..20: mol_type = other DNA
tcaattatgaaggctgtgga

SEQ ID NO: 5233 - DNA, 20 bp, synthetic construct
  misc_feature 1..20: note = chemically synthesized
  source 1..20: mol_type = other DNA
tgaatcaaaaaacaaaatga

SEQ ID NO: 5234 - DNA, 20 bp, synthetic construct
  misc_feature 1..20: note = chemically synthesized
  source 1..20: mol_type = other DNA
ttgagataaaatttttaaat

SEQ ID NO: 5235 - DNA, 20 bp, synthetic construct
  misc_feature 1..20: note = chemically synthesized
  source 1..20: mol_type = other DNA
ccccaatcaacaacacccct

SEQ ID NO: 5236 - DNA, 20 bp, synthetic construct
  misc_feature 1..20: note = chemically synthesized
  source 1..20: mol_type = other DNA
aagggggacactggatcacc

SEQ ID NO: 5237 - DNA, 20 bp, synthetic construct
  misc_feature 1..20: note = chemically synthesized
  source 1..20: mol_type = other DNA
aactaaagttctgaaagacc

SEQ ID NO: 5238 - DNA, 20 bp, synthetic construct
  misc_feature 1..20: note = chemically synthesized
  source 1..20: mol_type = other DNA
agacctgttgcttttcacca

SEQ ID NO: 5239 - DNA, 20 bp, synthetic construct
  misc_feature 1..20: note = chemically synthesized
  source 1..20: mol_type = other DNA
agggtgacttctggagccat

SEQ ID NO: 5240 - DNA, 20 bp, synthetic construct
  misc_feature 1..20: note = chemically synthesized
  source 1..20: mol_type = other DNA
tccccgccccccaaaagaag

SEQ ID NO: 5241 - DNA, 20 bp, synthetic construct
  misc_feature 1..20: note = chemically synthesized
  source 1..20: mol_type = other DNA
aatgggcccgcgagccaggc

SEQ ID NO: 5242 - DNA, 20 bp, synthetic construct
  misc_feature 1..20: note = chemically synthesized
  source 1..20: mol_type = other DNA
caggccggcgcttctcctcc

SEQ ID NO: 5243 - DNA, 20 bp, synthetic construct
  misc_feature 1..20: note = chemically synthesized
  source 1..20: mol_type = other DNA
tgcagaccgcggtcctgcag

SEQ ID NO: 5244 - DNA, 20 bp, synthetic construct
  misc_feature 1..20: note = chemically synthesized
  source 1..20: mol_type = other DNA
gcgggggtggaaaaatcgaa

SEQ ID NO: 5245 - DNA, 20 bp, synthetic construct
  misc_feature 1..20: note = chemically synthesized
  source 1..20: mol_type = other DNA
aatcgaaactagctttttct

SEQ ID NO: 5246 - DNA, 20 bp, synthetic construct
  misc_feature 1..20: note = chemically synthesized
  source 1..20: mol_type = other DNA
ctagctttttctttgcgctt

SEQ ID NO: 5247 - DNA, 20 bp, synthetic construct
  misc_feature 1..20: note = chemically synthesized
  source 1..20: mol_type = other DNA
ccactcccttcccccaacta

SEQ ID NO: 5248 - DNA, 20 bp, synthetic construct
  misc_feature 1..20: note = chemically synthesized
  source 1..20: mol_type = other DNA
gggctccttgaacctggaac

SEQ ID NO: 5249 - DNA, 20 bp, synthetic construct
  misc_feature 1..20: note = chemically synthesized
  source 1..20: mol_type = other DNA
tttatttccaatgtcagctg

SEQ ID NO: 5250 - DNA, 20 bp, synthetic construct
  misc_feature 1..20: note = chemically synthesized
  source 1..20: mol_type = other DNA
caaacaggaagttcttccct

SEQ ID NO: 5251 - DNA, 20 bp, synthetic construct
  misc_feature 1..20: note = chemically synthesized
  source 1..20: mol_type = other DNA
aacccacagcaggatccgca

SEQ ID NO: 5252 - DNA, 20 bp, synthetic construct
  misc_feature 1..20: note = chemically synthesized
  source 1..20: mol_type = other DNA
gcctggaaaattaagtatat

SEQ ID NO: 5253 - DNA, 20 bp, synthetic construct
  misc_feature 1..20: note = chemically synthesized
  source 1..20: mol_type = other DNA
attaagtatatgttagtttt

SEQ ID NO: 5254 - DNA, 20 bp, synthetic construct
  misc_feature 1..20: note = chemically synthesized
  source 1..20: mol_type = other DNA
ctgaacaattctcttttcgg

SEQ ID NO: 5255 - DNA, 20 bp, synthetic construct
  misc_feature 1..20: note = chemically synthesized
  source 1..20: mol_type = other DNA
ttctcttttcggctaggctt

SEQ ID NO: 5256 - DNA, 20 bp, synthetic construct
  misc_feature 1..20: note = chemically synthesized
  source 1..20: mol_type = other DNA
ttacattcatatctgatctt

SEQ ID NO: 5257 - DNA, 20 bp, synthetic construct
  misc_feature 1..20: note = chemically synthesized
  source 1..20: mol_type = other DNA
tagggaggtaggagctaata

SEQ ID NO: 5258 - DNA, 20 bp, synthetic construct
  misc_feature 1..20: note = chemically synthesized
  source 1..20: mol_type = other DNA
ttactagaagttaactggaa

SEQ ID NO: 5259 - DNA, 20 bp, synthetic construct
  misc_feature 1..20: note = chemically synthesized
  source 1..20: mol_type = other DNA
gttacaaagaacataaataa

SEQ ID NO: 5260 - DNA, 20 bp, synthetic construct
  misc_feature 1..20: note = chemically synthesized
  source 1..20: mol_type = other DNA
gatgttatttcaagtactac

SEQ ID NO: 5261 - DNA, 20 bp, synthetic construct
  misc_feature 1..20: note = chemically synthesized
  source 1..20: mol_type = other DNA
ctgcttctaatcttagttga

SEQ ID NO: 5262 - DNA, 20 bp, synthetic construct
  misc_feature 1..20: note = chemically synthesized
  source 1..20: mol_type = other DNA
gccggcctcagcacagcact

SEQ ID NO: 5263 - DNA, 20 bp, synthetic construct
  misc_feature 1..20: note = chemically synthesized
  source 1..20: mol_type = other DNA
caagaatgaggcatggcacg

SEQ ID NO: 5264 - DNA, 20 bp, synthetic construct
  misc_feature 1..20: note = chemically synthesized
  source 1..20: mol_type = other DNA
caaatttattcaatggtaca

SEQ ID NO: 5265 - DNA, 20 bp, synthetic construct
  misc_feature 1..20: note = chemically synthesized
  source 1..20: mol_type = other DNA
ctcatgtctccacttcatag

SEQ ID NO: 5266 - DNA, 20 bp, synthetic construct
  misc_feature 1..20: note = chemically synthesized
  source 1..20: mol_type = other DNA
tcatgttgagcagaaatatt

SEQ ID NO: 5267 - DNA, 20 bp, synthetic construct
  misc_feature 1..20: note = chemically synthesized
  source 1..20: mol_type = other DNA
aaactgagtgggcctggcaa

SEQ ID NO: 5268 - DNA, 20 bp, synthetic construct
  misc_feature 1..20: note = chemically synthesized
  source 1..20: mol_type = other DNA
ctggcaagttggattaaaaa

SEQ ID NO: 5269 - DNA, 20 bp, synthetic construct
  misc_feature 1..20: note = chemically synthesized
  source 1..20: mol_type = other DNA
aggagtaacagtgatctgtc

SEQ ID NO: 5270 - DNA, 20 bp, synthetic construct
  misc_feature 1..20: note = chemically synthesized
  source 1..20: mol_type = other DNA
gtgatctgtcacaggctttt

SEQ ID NO: 5271 - DNA, 20 bp, synthetic construct
  misc_feature 1..20: note = chemically synthesized
  source 1..20: mol_type = other DNA
atattctgaaggaagttgct

SEQ ID NO: 5272 - DNA, 20 bp, synthetic construct
  misc_feature 1..20: note = chemically synthesized
  source 1..20: mol_type = other DNA
ccaaggaggaggccaaggag

SEQ ID NO: 5273 - DNA, 20 bp, synthetic construct
  misc_feature 1..20: note = chemically synthesized
  source 1..20: mol_type = other DNA
cgggaggctgaggtggaggg

SEQ ID NO: 5274 - DNA, 20 bp, synthetic construct
  misc_feature 1..20: note = chemically synthesized
  source 1..20: mol_type = other DNA
atggtgaaggcagaggaaag

SEQ ID NO: 5275 - DNA, 20 bp, synthetic construct
  misc_feature 1..20: note = chemically synthesized
  source 1..20: mol_type = other DNA
aggatctgcatttggacatg

SEQ ID NO: 5276 - DNA, 20 bp, synthetic construct
  misc_feature 1..20: note = chemically synthesized
  source 1..20: mol_type = other DNA
tgcatttggacatgttaagt

SEQ ID NO: 5277 - DNA, 20 bp, synthetic construct
  misc_feature 1..20: note = chemically synthesized
  source 1..20: mol_type = other DNA
tgttaagtttgagattccag

SEQ ID NO: 5278 - DNA, 20 bp, synthetic construct
  misc_feature 1..20: note = chemically synthesized
  source 1..20: mol_type = other DNA
caggtagatcatttgaggtc

SEQ ID NO: 5279 - DNA, 20 bp, synthetic construct
  misc_feature 1..20: note = chemically synthesized
  source 1..20: mol_type = other DNA
tttgaggtcaggagtttgag

SEQ ID NO: 5280 - DNA, 20 bp, synthetic construct
  misc_feature 1..20: note = chemically synthesized
  source 1..20: mol_type = other DNA
ggtggcgcacgcctatagtc

SEQ ID NO: 5281 - DNA, 20 bp, synthetic construct
  misc_feature 1..20: note = chemically synthesized
  source 1..20: mol_type = other DNA
cctatagtcccaggttttca

SEQ ID NO: 5282 - DNA, 20 bp, synthetic construct
  misc_feature 1..20: note = chemically synthesized
  source 1..20: mol_type = other DNA
gaggtgcaggttgcagtgag

SEQ ID NO: 5283 - DNA, 20 bp, synthetic construct
  misc_feature 1..20: note = chemically synthesized
  source 1..20: mol_type = other DNA
aaaactgaaggaattattcc

SEQ ID NO: 5284 - DNA, 20 bp, synthetic construct
  misc_feature 1..20: note = chemically synthesized
  source 1..20: mol_type = other DNA
cttaacattttctagaatcc

SEQ ID NO: 5285 - DNA, 20 bp, synthetic construct
  misc_feature 1..20: note = chemically synthesized
  source 1..20: mol_type = other DNA
agagcaggaccttggtcttt

SEQ ID NO: 5286 - DNA, 20 bp, synthetic construct
  misc_feature 1..20: note = chemically synthesized
  source 1..20: mol_type = other DNA
gaccttggtctttccttgtt

SEQ ID NO: 5287 - DNA, 20 bp, synthetic construct
  misc_feature 1..20: note = chemically synthesized
  source 1..20: mol_type = other DNA
cgtgtggagccccgaactcc

SEQ ID NO: 5288 - DNA, 20 bp, synthetic construct
  misc_feature 1..20: note = chemically synthesized
  source 1..20: mol_type = other DNA
cctcaccttcctgaggttgt

SEQ ID NO: 5289 - DNA, 20 bp, synthetic construct
  misc_feature 1..20: note = chemically synthesized
  source 1..20: mol_type = other DNA
gagcagggaagagggaagga

SEQ ID NO: 5290 - DNA, 20 bp, synthetic construct
  misc_feature 1..20: note = chemically synthesized
  source 1..20: mol_type = other DNA
ttggttgcagttaacaaggc

SEQ ID NO: 5291 - DNA, 20 bp, synthetic construct
  misc_feature 1..20: note = chemically synthesized
  source 1..20: mol_type = other DNA
cttgaattctgccctgacac

SEQ ID NO: 5292 - DNA, 20 bp, synthetic construct
  misc_feature 1..20: note = chemically synthesized
  source 1..20: mol_type = other DNA
caagctggagtgggaaaggc

SEQ ID NO: 5293 - DNA, 20 bp, synthetic construct
  misc_feature 1..20: note = chemically synthesized
  source 1..20: mol_type = other DNA
cagttgctggagctggggag

SEQ ID NO: 5294 - DNA, 20 bp, synthetic construct
  misc_feature 1..20: note = chemically synthesized
  source 1..20: mol_type = other DNA
cagggcacggaatccctggt

SEQ ID NO: 5295 - DNA, 20 bp, synthetic construct
  misc_feature 1..20: note = chemically synthesized
  source 1..20: mol_type = other DNA
gtatgagacagccacaagtc

SEQ ID NO: 5296 - DNA, 20 bp, synthetic construct
  misc_feature 1..20: note = chemically synthesized
  source 1..20: mol_type = other DNA
caaagggaagtgtctatggc

SEQ ID NO: 5297 - DNA, 20 bp, synthetic construct
  misc_feature 1..20: note = chemically synthesized
  source 1..20: mol_type = other DNA
aggcgggtggtcacaaggtc

SEQ ID NO: 5298 - DNA, 20 bp, synthetic construct
  misc_feature 1..20: note = chemically synthesized
  source 1..20: mol_type = other DNA
ttggaaggctgaggcaggag

SEQ ID NO: 5299 - DNA, 20 bp, synthetic construct
  misc_feature 1..20: note = chemically synthesized
  source 1..20: mol_type = other DNA
gtagaagaatcctttaggtt

SEQ ID NO: 5300 - DNA, 20 bp, synthetic construct
  misc_feature 1..20: note = chemically synthesized
  source 1..20: mol_type = other DNA
tgaagctacctatcttacaa

SEQ ID NO: 5301 - DNA, 20 bp, synthetic construct
  misc_feature 1..20: note = chemically synthesized
  source 1..20: mol_type = other DNA
acacaaaatggtgtctctcc

SEQ ID NO: 5302 - DNA, 20 bp, synthetic construct
  misc_feature 1..20: note = chemically synthesized
  source 1..20: mol_type = other DNA
aaaatggtgtctctcctgta

SEQ ID NO: 5303 - DNA, 20 bp, synthetic construct
  misc_feature 1..20: note = chemically synthesized
  source 1..20: mol_type = other DNA
gtgggctgagggtggcaatc

SEQ ID NO: 5304 - DNA, 20 bp, synthetic construct
  misc_feature 1..20: note = chemically synthesized
  source 1..20: mol_type = other DNA
ggtggcaatcaaaggcttta

SEQ ID NO: 5305 - DNA, 20 bp, synthetic construct
  misc_feature 1..20: note = chemically synthesized
  source 1..20: mol_type = other DNA
caaaggctttaacttgcttt

SEQ ID NO: 5306 - DNA, 20 bp, synthetic construct
  misc_feature 1..20: note = chemically synthesized
  source 1..20: mol_type = other DNA
attggagtcatcagtggaat

SEQ ID NO: 5307 - DNA, 20 bp, synthetic construct
  misc_feature 1..20: note = chemically synthesized
  source 1..20: mol_type = other DNA
agcacctactattttgcaag

SEQ ID NO: 5308 - DNA, 20 bp, synthetic construct
  misc_feature 1..20: note = chemically synthesized
  source 1..20: mol_type = other DNA
agagctgtttaaggtagtac

SEQ ID NO: 5309 - DNA, 20 bp, synthetic construct
  misc_feature 1..20: note = chemically synthesized
  source 1..20: mol_type = other DNA
tcctaaagcaggcaggaagc

SEQ ID NO: 5310 - DNA, 20 bp, synthetic construct
  misc_feature 1..20: note = chemically synthesized
  source 1..20: mol_type = other DNA
ttctggatcttgaaggagaa

SEQ ID NO: 5311 - DNA, 20 bp, synthetic construct
  misc_feature 1..20: note = chemically synthesized
  source 1..20: mol_type = other DNA
aggagagtataaggcatact

SEQ ID NO: 5312 - DNA, 20 bp, synthetic construct
  misc_feature 1..20: note = chemically synthesized
  source 1..20: mol_type = other DNA
ataattactgtaccttaacc

SEQ ID NO: 5313 - DNA, 20 bp, synthetic construct
  misc_feature 1..20: note = chemically synthesized
  source 1..20: mol_type = other DNA
gagaagaggcaagatggtgc

SEQ ID NO: 5314 - DNA, 20 bp, synthetic construct
  misc_feature 1..20: note = chemically synthesized
  source 1..20: mol_type = other DNA
ggagtgcatttatgagctct

SEQ ID NO: 5315 - DNA, 20 bp, synthetic construct
  misc_feature 1..20: note = chemically synthesized
  source 1..20: mol_type = other DNA
tagaaattgcctgacgaact

SEQ ID NO: 5316 - DNA, 20 bp, synthetic construct
  misc_feature 1..20: note = chemically synthesized
  source 1..20: mol_type = other DNA
cttctctgttcatttcctca

SEQ ID NO: 5317 - DNA, 20 bp, synthetic construct
  misc_feature 1..20: note = chemically synthesized
  source 1..20: mol_type = other DNA
cctcaaaaagatttccccat

SEQ ID NO: 5318 - DNA, 20 bp, synthetic construct
  misc_feature 1..20: note = chemically synthesized
  source 1..20: mol_type = other DNA
atgaacctcaagctgcatct

SEQ ID NO: 5319 - DNA, 20 bp, synthetic construct
  misc_feature 1..20: note = chemically synthesized
  source 1..20: mol_type = other DNA
tccttaaatttgggggactt

SEQ ID NO: 5320 - DNA, 20 bp, synthetic construct
  misc_feature 1..20: note = chemically synthesized
  source 1..20: mol_type = other DNA
gattcattttaacatctgag

SEQ ID NO: 5321 - DNA, 20 bp, synthetic construct
  misc_feature 1..20: note = chemically synthesized
  source 1..20: mol_type = other DNA
acgtggctagtcataacctt

SEQ ID NO: 5322 - DNA, 20 bp, synthetic construct
  misc_feature 1..20: note = chemically synthesized
  source 1..20: mol_type = other DNA
actcatctgtcaccaagcct

SEQ ID NO: 5323 - DNA, 20 bp, synthetic construct
  misc_feature 1..20: note = chemically synthesized
  source 1..20: mol_type = other DNA
caagccttggggattcttcc

SEQ ID NO: 5324 - DNA, 20 bp, synthetic construct
  misc_feature 1..20: note = chemically synthesized
  source 1..20: mol_type = other DNA
ctatctgtgggtagtatgat

SEQ ID NO: 5325 - DNA, 20 bp, synthetic construct
  misc_feature 1..20: note = chemically synthesized
  source 1..20: mol_type = other DNA
tcttgaaaggggttgtgaag

SEQ ID NO: 5326 - DNA, 20 bp, synthetic construct
  misc_feature 1..20: note = chemically synthesized
  source 1..20: mol_type = other DNA
taattggcatgaaggtgtca

SEQ ID NO: 5327 - DNA, 20 bp, synthetic construct
  misc_feature 1..20: note = chemically synthesized
  source 1..20: mol_type = other DNA
gaaggtgtcatacagatttg

SEQ ID NO: 5328 - DNA, 20 bp, synthetic construct
  misc_feature 1..20: note = chemically synthesized
  source 1..20: mol_type = other DNA
aatggcatgaacccaggagg

SEQ ID NO: 5329 - DNA, 20 bp, synthetic construct
  misc_feature 1..20: note = chemically synthesized
  source 1..20: mol_type = other DNA
gaggcagagcttgcagtgag

SEQ ID NO: 5330 - DNA, 20 bp, synthetic construct
  misc_feature 1..20: note = chemically synthesized
  source 1..20: mol_type = other DNA
aagtgaagtatagagtatct

SEQ ID NO: 5331 - DNA, 20 bp, synthetic construct
  misc_feature 1..20: note = chemically synthesized
  source 1..20: mol_type = other DNA
atagtttgtcagtgatagaa

SEQ ID NO: 5332 - DNA, 20 bp, synthetic construct
  misc_feature 1..20: note = chemically synthesized
  source 1..20: mol_type = other DNA
gtttcaaactcagtcaatct

SEQ ID NO: 5333 - DNA, 20 bp, synthetic construct
  misc_feature 1..20: note = chemically synthesized
  source 1..20: mol_type = other DNA
tctcagacaccactacattc

SEQ ID NO: 5334 - DNA, 20 bp, synthetic construct
  misc_feature 1..20: note = chemically synthesized
  source 1..20: mol_type = other DNA
atggctcttctcttgtctca

SEQ ID NO: 5335 - DNA, 20 bp, synthetic construct
  misc_feature 1..20: note = chemically synthesized
  source 1..20: mol_type = other DNA
tctcattgtgtttcttctga

SEQ ID NO: 5336 - DNA, 20 bp, synthetic construct
  misc_feature 1..20: note = chemically synthesized
  source 1..20: mol_type = other DNA
aaccaactgatcctcagctg

SEQ ID NO: 5337 - DNA, 20 bp, synthetic construct
  misc_feature 1..20: note = chemically synthesized
  source 1..20: mol_type = other DNA
ggggacagctagtggccctg

SEQ ID NO: 5338 - DNA, 20 bp, synthetic construct
  misc_feature 1..20: note = chemically synthesized
  source 1..20: mol_type = other DNA
tggtataatggaagccacca

SEQ ID NO: 5339 - DNA, 20 bp, synthetic construct
  misc_feature 1..20: note = chemically synthesized
  source 1..20: mol_type = other DNA
aaccaggacattcaggaatt

SEQ ID NO: 5340 - DNA, 20 bp, synthetic construct
  misc_feature 1..20: note = chemically synthesized
  source 1..20: mol_type = other DNA
aacctctgcctcccaggttc

SEQ ID NO: 5341 - DNA, 20 bp, synthetic construct
  misc_feature 1..20: note = chemically synthesized
  source 1..20: mol_type = other DNA
tgtctcagcctcccaagtag

SEQ ID NO: 5342 - DNA, 20 bp, synthetic construct
  misc_feature 1..20: note = chemically synthesized
  source 1..20: mol_type = other DNA
ttttgtatttttagtagaga

SEQ ID NO: 5343 - DNA, 20 bp, synthetic construct
  misc_feature 1..20: note = chemically synthesized
  source 1..20: mol_type = other DNA
tgcctcggcctcccaaagtg

SEQ ID NO: 5344 - DNA, 20 bp, synthetic construct
  misc_feature 1..20: note = chemically synthesized
  source 1..20: mol_type = other DNA
aatatatatatccagatggc

SEQ ID NO: 5345 - DNA, 20 bp, synthetic construct
  misc_feature 1..20: note = chemically synthesized
  source 1..20: mol_type = other DNA
agcattctgtcttgaagggc

SEQ ID NO: 5346 - DNA, 20 bp, synthetic construct
  misc_feature 1..20: note = chemically synthesized
  source 1..20: mol_type = other DNA
caggataccatatacagctc

SEQ ID NO: 5347 - DNA, 20 bp, synthetic construct
  misc_feature 1..20: note = chemically synthesized
  source 1..20: mol_type = other DNA
agttatgtagaaaaaagtaa

SEQ ID NO: 5348 - DNA, 20 bp, synthetic construct
  misc_feature 1..20: note = chemically synthesized
  source 1..20: mol_type = other DNA
tgtatattgtattgtatact

SEQ ID NO: 5349 - DNA, 20 bp, synthetic construct
  misc_feature 1..20: note = chemically synthesized
  source 1..20: mol_type = other DNA
ttcatcttgtgtatatactt

SEQ ID NO: 5350 - DNA, 20 bp, synthetic construct
  misc_feature 1..20: note = chemically synthesized
  source 1..20: mol_type = other DNA
tgtcattttggagacattta

SEQ ID NO: 5351 - DNA, 20 bp, synthetic construct
  misc_feature 1..20: note = chemically synthesized
  source 1..20: mol_type = other DNA
aactgtggtagccgaattaa

SEQ ID NO: 5352 - DNA, 20 bp, synthetic construct
  misc_feature 1..20: note = chemically synthesized
  source 1..20: mol_type = other DNA
atactgaaagcagactgcta

SEQ ID NO: 5353 - DNA, 20 bp, synthetic construct
  misc_feature 1..20: note = chemically synthesized
  source 1..20: mol_type = other DNA
aattaatttattaggtaagc

SEQ ID NO: 5354 - DNA, 20 bp, synthetic construct
  misc_feature 1..20: note = chemically synthesized
  source 1..20: mol_type = other DNA
taggtaagcatttgttttat

SEQ ID NO: 5355 - DNA, 20 bp, synthetic construct
  misc_feature 1..20: note = chemically synthesized
  source 1..20: mol_type = other DNA
ttggttttatttcacctggg

SEQ ID NO: 5356 - DNA, 20 bp, synthetic construct
  misc_feature 1..20: note = chemically synthesized
  source 1..20: mol_type = other DNA
tttaagtcctcattttcttt

SEQ ID NO: 5357 - DNA, 20 bp, synthetic construct
  misc_feature 1..20: note = chemically synthesized
  source 1..20: mol_type = other DNA
tcattttctttcggtgtttt

SEQ ID NO: 5358 - DNA, 20 bp, synthetic construct
  misc_feature 1..20: note = chemically synthesized
  source 1..20: mol_type = other DNA
tgttttttaagcttaatttt

SEQ ID NO: 5359 - DNA, 20 bp, synthetic construct
  misc_feature 1..20: note = chemically synthesized
  source 1..20: mol_type = other DNA
gtgaccagagatgcagcgct

SEQ ID NO: 5360 - DNA, 20 bp, synthetic construct
  misc_feature 1..20: note = chemically synthesized
  source 1..20: mol_type = other DNA
atcattgagtcaagtacagc

SEQ ID NO: 5361 - DNA, 20 bp, synthetic construct
  misc_feature 1..20: note = chemically synthesized
  source 1..20: mol_type = other DNA
atccccaaatttttcataaa

SEQ ID NO: 5362 - DNA, 20 bp, synthetic construct
  misc_feature 1..20: note = chemically synthesized
  source 1..20: mol_type = other DNA
taactttttttcaaaccaca

SEQ ID NO: 5363 - DNA, 20 bp, synthetic construct
  misc_feature 1..20: note = chemically synthesized
  source 1..20: mol_type = other DNA
aatatttctgactttcaaat

SEQ ID NO: 5364 - DNA, 20 bp, synthetic construct
  misc_feature 1..20: note = chemically synthesized
  source 1..20: mol_type = other DNA
atgcaggctgatatttgtaa

SEQ ID NO: 5365 - DNA, 20 bp, synthetic construct
  misc_feature 1..20: note = chemically synthesized
  source 1..20: mol_type = other DNA
ttgtaattgtgattctctct

SEQ ID NO: 5366 - DNA, 20 bp, synthetic construct
  misc_feature 1..20: note = chemically synthesized
  source 1..20: mol_type = other DNA
gttcttttccttttttgcat

SEQ ID NO: 5367 - DNA, 20 bp, synthetic construct
  misc_feature 1..20: note = chemically synthesized
  source 1..20: mol_type = other DNA
caagcattctatttctgagt

SEQ ID NO: 5368 - DNA, 20 bp, synthetic construct
  misc_feature 1..20: note = chemically synthesized
  source 1..20: mol_type = other DNA
ggtgtagaagagatagatat

SEQ ID NO: 5369 - DNA, 20 bp, synthetic construct
  misc_feature 1..20: note = chemically synthesized
  source 1..20: mol_type = other DNA
gatggatgaatttgtacatt

SEQ ID NO: 5370 - DNA, 20 bp, synthetic construct
  misc_feature 1..20: note = chemically synthesized
  source 1..20: mol_type = other DNA
caaaaactttttttttccgg

SEQ ID NO: 5371 - DNA, 20 bp, synthetic construct
  misc_feature 1..20: note = chemically synthesized
  source 1..20: mol_type = other DNA
tttccgggatggattgaagg

SEQ ID NO: 5372 - DNA, 20 bp, synthetic construct
  misc_feature 1..20: note = chemically synthesized
  source 1..20: mol_type = other DNA
gagctattgctgctattctg

SEQ ID NO: 5373 - DNA, 20 bp, synthetic construct
  misc_feature 1..20: note = chemically synthesized
  source 1..20: mol_type = other DNA
cttgctgaagaaaatgatgt

SEQ ID NO: 5374 - DNA, 20 bp, synthetic construct
  misc_feature 1..20: note = chemically synthesized
  source 1..20: mol_type = other DNA
atacggtgtggcaacagtta

SEQ ID NO: 5375 - DNA, 20 bp, synthetic construct
  misc_feature 1..20: note = chemically synthesized
  source 1..20: mol_type = other DNA
tttaggaacagcagcactcc

SEQ ID NO: 5376 - DNA, 20 bp, synthetic construct
  misc_feature 1..20: note = chemically synthesized
  source 1..20: mol_type = other DNA
ttttgtatttttagtagaga

SEQ ID NO: 5377 - DNA, 20 bp, synthetic construct
  misc_feature 1..20: note = chemically synthesized
  source 1..20: mol_type = other DNA
ctttttggcctcccaaagtg

SEQ ID NO: 5378 - DNA, 20 bp, synthetic construct
  misc_feature 1..20: note = chemically synthesized
  source 1..20: mol_type = other DNA
cgcgcccagccaaatttcta

SEQ ID NO: 5379 - DNA, 20 bp, synthetic construct
  misc_feature 1..20: note = chemically synthesized
  source 1..20: mol_type = other DNA
tccacccacctcagcgtccg

SEQ ID NO: 5380 - DNA, 20 bp, synthetic construct
  misc_feature 1..20: note = chemically synthesized
  source 1..20: mol_type = other DNA
tccaccaagttattttatac

SEQ ID NO: 5381 - DNA, 20 bp, synthetic construct
  misc_feature 1..20: note = chemically synthesized
  source 1..20: mol_type = other DNA
attatttaaaaaaatcaaat

SEQ ID NO: 5382 - DNA, 20 bp, synthetic construct
  misc_feature 1..20: note = chemically synthesized
  source 1..20: mol_type = other DNA
tcaaattctagcttttactc

SEQ ID NO: 5383 - DNA, 20 bp, synthetic construct
  misc_feature 1..20: note = chemically synthesized
  source 1..20: mol_type = other DNA
tagtctattgagttaaatat

SEQ ID NO: 5384 - DNA, 20 bp, synthetic construct
  misc_feature 1..20: note = chemically synthesized
  source 1..20: mol_type = other DNA
gagtcactatgacggcactt

SEQ ID NO: 5385 - DNA, 20 bp, synthetic construct
  misc_feature 1..20: note = chemically synthesized
  source 1..20: mol_type = other DNA
aatctccgcctcccaggttc

SEQ ID NO: 5386 - DNA, 20 bp, synthetic construct
  misc_feature 1..20: note = chemically synthesized
  source 1..20: mol_type = other DNA
cacacaccaccacgcccagc

SEQ ID NO: 5387 - DNA, 20 bp, synthetic construct
  misc_feature 1..20: note = chemically synthesized
  source 1..20: mol_type = other DNA
gtttgtatttttagtagaga

SEQ ID NO: 5388 - DNA, 20 bp, synthetic construct
  misc_feature 1..20: note = chemically synthesized
  source 1..20: mol_type = other DNA
tgcctcgacctcccaaagtg

SEQ ID NO: 5389 - DNA, 20 bp, synthetic construct
  misc_feature 1..20: note = chemically synthesized
  source 1..20: mol_type = other DNA
ccaacttcactactgccccc

SEQ ID NO: 5390 - DNA, 20 bp, synthetic construct
  misc_feature 1..20: note = chemically synthesized
  source 1..20: mol_type = other DNA
tttactatgtatatgagggc

SEQ ID NO: 5391 - DNA, 20 bp, synthetic construct
  misc_feature 1..20: note = chemically synthesized
  source 1..20: mol_type = other DNA
ttaagtatgggtataatgtt

SEQ ID NO: 5392 - DNA, 20 bp, synthetic construct
  misc_feature 1..20: note = chemically synthesized
  source 1..20: mol_type = other DNA
tgttacgggtttttctttgt

SEQ ID NO: 5393 - DNA, 20 bp, synthetic construct
  misc_feature 1..20: note = chemically synthesized
  source 1..20: mol_type = other DNA
taaaacaaatgtaaaatact

SEQ ID NO: 5394 - DNA, 20 bp, synthetic construct
  misc_feature 1..20: note = chemically synthesized
  source 1..20: mol_type = other DNA
aaaatcaaatttaattactc

SEQ ID NO: 5395 - DNA, 20 bp, synthetic construct
  misc_feature 1..20: note = chemically synthesized
  source 1..20: mol_type = other DNA
gtttgtaaaatttttgaaac

SEQ ID NO: 5396 - DNA, 20 bp, synthetic construct
  misc_feature 1..20: note = chemically synthesized
  source 1..20: mol_type = other DNA
tcgggaggctgaggcaggag

SEQ ID NO: 5397 - DNA, 20 bp, synthetic construct
  misc_feature 1..20: note = chemically synthesized
  source 1..20: mol_type = other DNA
aacaaatcgaagtgtattaa

SEQ ID NO: 5398 - DNA, 20 bp, synthetic construct
  misc_feature 1..20: note = chemically synthesized
  source 1..20: mol_type = other DNA
tttaaactgaaaagaaaaag

SEQ ID NO: 5399 - DNA, 20 bp, synthetic construct
  misc_feature 1..20: note = chemically synthesized
  source 1..20: mol_type = other DNA
aaaggtgtgccaatggtact

SEQ ID NO: 5400 - DNA, 20 bp, synthetic construct
  misc_feature 1..20: note = chemically synthesized
  source 1..20: mol_type = other DNA
cttatttaaaaatatccatt

SEQ ID NO: 5401 - DNA, 20 bp, synthetic construct
  misc_feature 1..20: note = chemically synthesized
  source 1..20: mol_type = other DNA
gtagcatacctgtgtctctg

SEQ ID NO: 5402 - DNA, 20 bp, synthetic construct
  misc_feature 1..20: note = chemically synthesized
  source 1..20: mol_type = other DNA
ttacttttctagaaaaaaat

SEQ ID NO: 5403 - DNA, 20 bp, synthetic construct
  misc_feature 1..20: note = chemically synthesized
  source 1..20: mol_type = other DNA
aaaaatctctgctttttctt

SEQ ID NO: 5404 - DNA, 20 bp, synthetic construct
  misc_feature 1..20: note = chemically synthesized
  source 1..20: mol_type = other DNA
tcagtttaaattatttcaca

SEQ ID NO: 5405 - DNA, 20 bp, synthetic construct
  misc_feature 1..20: note = chemically synthesized
  source 1..20: mol_type = other DNA
gttttcttgacttgcacttc

SEQ ID NO: 5406 - DNA, 20 bp, synthetic construct
  misc_feature 1..20: note = chemically synthesized
  source 1..20: mol_type = other DNA
ccataaacactattaataca

SEQ ID NO: 5407 - DNA, 20 bp, synthetic construct
  misc_feature 1..20: note = chemically synthesized
  source 1..20: mol_type = other DNA
agaaaatttcttttcttttt

SEQ ID NO: 5408 - DNA, 20 bp, synthetic construct
  misc_feature 1..20: note = chemically synthesized
  source 1..20: mol_type = other DNA
ttttaagattttaaaatttt

SEQ ID NO: 5409 - DNA, 20 bp, synthetic construct
  misc_feature 1..20: note = chemically synthesized
  source 1..20: mol_type = other DNA
gcacaaccacacctgactaa

SEQ ID NO: 5410 - DNA, 20 bp, synthetic construct
  misc_feature 1..20: note = chemically synthesized
  source 1..20: mol_type = other DNA
acacctgactaattttgttt

SEQ ID NO: 5411 - DNA, 20 bp, synthetic construct
  misc_feature 1..20: note = chemically synthesized
  source 1..20: mol_type = other DNA
ctgactaattttgtttattt

SEQ ID NO: 5412 - DNA, 20 bp, synthetic construct
  misc_feature 1..20: note = chemically synthesized
  source 1..20: mol_type = other DNA
taattttgtttatttgtttg

SEQ ID NO: 5413 - DNA, 20 bp, synthetic construct
  misc_feature 1..20: note = chemically synthesized
  source 1..20: mol_type = other DNA
gtttgttttgttttttgaga

SEQ ID NO: 5414 - DNA, 20 bp, synthetic construct
  misc_feature 1..20: note = chemically synthesized
  source 1..20: mol_type = other DNA
tgcctcagcctcccgagtag

SEQ ID NO: 5415 - DNA, 20 bp, synthetic construct
  misc_feature 1..20: note = chemically synthesized
  source 1..20: mol_type = other DNA
ttttgtatttttagtagaga

SEQ ID NO: 5416 - DNA, 20 bp, synthetic construct
  misc_feature 1..20: note = chemically synthesized
  source 1..20: mol_type = other DNA
cgcctcggcctcccaaagtg

SEQ ID NO: 5417 - DNA, 20 bp, synthetic construct
  misc_feature 1..20: note = chemically synthesized
  source 1..20: mol_type = other DNA
attttgtatattttgtagag

SEQ ID NO: 5418 - DNA, 20 bp, synthetic construct
  misc_feature 1..20: note = chemically synthesized
  source 1..20: mol_type = other DNA
tccaggctggtcttgaattc

SEQ ID NO: 5419 - DNA, 20 bp, synthetic construct
  misc_feature 1..20: note = chemically synthesized
  source 1..20: mol_type = other DNA
caccttgtcctcccaaaatg

SEQ ID NO: 5420 - DNA, 20 bp, synthetic construct
  misc_feature 1..20: note = chemically synthesized
  source 1..20: mol_type = other DNA
aacattatcctctcttaaac

SEQ ID NO: 5421 - DNA, 20 bp, synthetic construct
  misc_feature 1..20: note = chemically synthesized
  source 1..20: mol_type = other DNA
acaaacatgagagtaattaa

SEQ ID NO: 5422 - DNA, 20 bp, synthetic construct
  misc_feature 1..20: note = chemically synthesized
  source 1..20: mol_type = other DNA
gaaagcacaaagtattttac

SEQ ID NO: 5423 - DNA, 20 bp, synthetic construct
  misc_feature 1..20: note = chemically synthesized
  source 1..20: mol_type = other DNA
cagtagtgaagttggttatt

SEQ ID NO: 5424 - DNA, 20 bp, synthetic construct
  misc_feature 1..20: note = chemically synthesized
  source 1..20: mol_type = other DNA
tcaggaggctggggcaggag

SEQ ID NO: 5425 - DNA, 20 bp, synthetic construct
  misc_feature 1..20: note = chemically synthesized
  source 1..20: mol_type = other DNA
aatcgcttgaacctgggagg

SEQ ID NO: 5426 - DNA, 20 bp, synthetic construct
  misc_feature 1..20: note = chemically synthesized
  source 1..20: mol_type = other DNA
aaaaagtgccgtcatagtga

SEQ ID NO: 5427 - DNA, 20 bp, synthetic construct
  misc_feature 1..20: note = chemically synthesized
  source 1..20: mol_type = other DNA
tcttcagagtaaaagctaga

SEQ ID NO: 5428 - DNA, 20 bp, synthetic construct
  misc_feature 1..20: note = chemically synthesized
  source 1..20: mol_type = other DNA
gtataaaataacttggtgga

SEQ ID NO: 5429 - DNA, 20 bp, synthetic construct
  misc_feature 1..20: note = chemically synthesized
  source 1..20: mol_type = other DNA
acctgggcaacatagccaga

SEQ ID NO: 5430 - DNA, 20 bp, synthetic construct
  misc_feature 1..20: note = chemically synthesized
  source 1..20: mol_type = other DNA
ttgggaggctgaggcaggaa

SEQ ID NO: 5431 - DNA, 20 bp, synthetic construct
  misc_feature 1..20: note = chemically synthesized
  source 1..20: mol_type = other DNA
ttatagggatcaggcaaatt

SEQ ID NO: 5432 - DNA, 20 bp, synthetic construct
  misc_feature 1..20: note = chemically synthesized
  source 1..20: mol_type = other DNA
atggtaactgttgccacacc

SEQ ID NO: 5433 - DNA, 20 bp, synthetic construct
  misc_feature 1..20: note = chemically synthesized
  source 1..20: mol_type = other DNA
gttaactaacctctctgtgc

SEQ ID NO: 5434 - DNA, 20 bp, synthetic construct
  misc_feature 1..20: note = chemically synthesized
  source 1..20: mol_type = other DNA
caatagctcctacctacctc

SEQ ID NO: 5435 - DNA, 20 bp, synthetic construct
  misc_feature 1..20: note = chemically synthesized
  source 1..20: mol_type = other DNA
gattctttggaggaattaaa

SEQ ID NO: 5436 - DNA, 20 bp, synthetic construct
  misc_feature 1..20: note = chemically synthesized
  source 1..20: mol_type = other DNA
aattggctaaaaaaattttc

SEQ ID NO: 5437 - DNA, 20 bp, synthetic construct
  misc_feature 1..20: note = chemically synthesized
  source 1..20: mol_type = other DNA
ttcaatccatcccggaaaaa

SEQ ID NO: 5438 - DNA, 20 bp, synthetic construct
  misc_feature 1..20: note = chemically synthesized
  source 1..20: mol_type = other DNA
ccggaaaaaaaaagtttttg

SEQ ID NO: 5439 - DNA, 20 bp, synthetic construct
  misc_feature 1..20: note = chemically synthesized
  source 1..20: mol_type = other DNA
taaacaattactcagaaata

SEQ ID NO: 5440 - DNA, 20 bp, synthetic construct
  misc_feature 1..20: note = chemically synthesized
  source 1..20: mol_type = other DNA
atgcaggatgtcaacgcatc

SEQ ID NO: 5441 - DNA, 20 bp, synthetic construct
  misc_feature 1..20: note = chemically synthesized
  source 1..20: mol_type = other DNA
taaatgatagtcattgttaa

SEQ ID NO: 5442 - DNA, 20 bp, synthetic construct
  misc_feature 1..20: note = chemically synthesized
  source 1..20: mol_type = other DNA
tagtcattgttaaatcagat

SEQ ID NO: 5443 - DNA, 20 bp, synthetic construct
  misc_feature 1..20: note = chemically synthesized
  source 1..20: mol_type = other DNA
agattgtggtttgaaaaaaa

SEQ ID NO: 5444 - DNA, 20 bp, synthetic construct
  misc_feature 1..20: note = chemically synthesized
  source 1..20: mol_type = other DNA
gaaaaaaagttagtttaaaa

SEQ ID NO: 5445 - DNA, 20 bp, synthetic construct
  misc_feature 1..20: note = chemically synthesized
  source 1..20: mol_type = other DNA
aactgagtttatgaaaaatt

SEQ ID NO: 5446 - DNA, 20 bp, synthetic construct
  misc_feature 1..20: note = chemically synthesized
  source 1..20: mol_type = other DNA
aaatttggggattttagaga

SEQ ID NO: 5447 - DNA, 20 bp, synthetic construct
  misc_feature 1..20: note = chemically synthesized
  source 1..20: mol_type = other DNA
tggggattttagagacagtg

SEQ ID NO: 5448 - DNA, 20 bp, synthetic construct
  misc_feature 1..20: note = chemically synthesized
  source 1..20: mol_type = other DNA
tgttttgtttttaaatgtgt

SEQ ID NO: 5449 - DNA, 20 bp, synthetic construct
  misc_feature 1..20: note = chemically synthesized
  source 1..20: mol_type = other DNA
aatgtgtgtgagtttgtgaa

SEQ ID NO: 5450 - DNA, 20 bp, synthetic construct
  misc_feature 1..20: note = chemically synthesized
  source 1..20: mol_type = other DNA
atcacctgctgtacttgact

SEQ ID NO: 5451 - DNA, 20 bp, synthetic construct
  misc_feature 1..20: note = chemically synthesized
  source 1..20: mol_type = other DNA
cttgactcaatgattatcag

SEQ ID NO: 5452 - DNA, 20 bp, synthetic construct
  misc_feature 1..20: note = chemically synthesized
  source 1..20: mol_type = other DNA
actcaatgattatcagagtg

SEQ ID NO: 5453 - DNA, 20 bp, synthetic construct
  misc_feature 1..20: note = chemically synthesized
  source 1..20: mol_type = other DNA
tcaggcagctcagcaatggc

SEQ ID NO: 5454 - DNA, 20 bp, synthetic construct
  misc_feature 1..20: note = chemically synthesized
  source 1..20: mol_type = other DNA
agcaattcaaatagctggta

SEQ ID NO: 5455 - DNA, 20 bp, synthetic construct
  misc_feature 1..20: note = chemically synthesized
  source 1..20: mol_type = other DNA
caaatagctggtaagtagtt

SEQ ID NO: 5456 - DNA, 20 bp, synthetic construct
  misc_feature 1..20: note = chemically synthesized
  source 1..20: mol_type = other DNA
tagctggtaagtagtttctt

SEQ ID NO: 5457 - DNA, 20 bp, synthetic construct
  misc_feature 1..20: note = chemically synthesized
  source 1..20: mol_type = other DNA
gtttgttttctcaaattttc

SEQ ID NO: 5458 - DNA, 20 bp, synthetic construct
  misc_feature 1..20: note = chemically synthesized
  source 1..20: mol_type = other DNA
tttcaggggcttttctctac

SEQ ID NO: 5459 - DNA, 20 bp, synthetic construct
  misc_feature 1..20: note = chemically synthesized
  source 1..20: mol_type = other DNA
gtcacccttctctttactac

SEQ ID NO: 5460 - DNA, 20 bp, synthetic construct
  misc_feature 1..20: note = chemically synthesized
  source 1..20: mol_type = other DNA
ctttactaccatggtttgtg

SEQ ID NO: 5461 - DNA, 20 bp, synthetic construct
  misc_feature 1..20: note = chemically synthesized
  source 1..20: mol_type = other DNA
taagaatttaaaatgcaggt

SEQ ID NO: 5462 - DNA, 20 bp, synthetic construct
  misc_feature 1..20: note = chemically synthesized
  source 1..20: mol_type = other DNA
tatgaataaagccagaaaaa

SEQ ID NO: 5463 - DNA, 20 bp, synthetic construct
  misc_feature 1..20: note = chemically synthesized
  source 1..20: mol_type = other DNA
aattaacaggccacagttgc

SEQ ID NO: 5464 - DNA, 20 bp, synthetic construct
  misc_feature 1..20: note = chemically synthesized
  source 1..20: mol_type = other DNA
atgtgttactgtgaagactg

SEQ ID NO: 5465 - DNA, 20 bp, synthetic construct
  misc_feature 1..20: note = chemically synthesized
  source 1..20: mol_type = other DNA
aaataaaaccaatataaaac

SEQ ID NO: 5466 - DNA, 20 bp, synthetic construct
  misc_feature 1..20: note = chemically synthesized
  source 1..20: mol_type = other DNA
gtaagtgaagccttatagca

SEQ ID NO: 5467 - DNA, 20 bp, synthetic construct
  misc_feature 1..20: note = chemically synthesized
  source 1..20: mol_type = other DNA
taagagagaaataatttgtc

SEQ ID NO: 5468 - DNA, 20 bp, synthetic construct
  misc_feature 1..20: note = chemically synthesized
  source 1..20: mol_type = other DNA
aatttgtcatatgctttcag

SEQ ID NO: 5469 - DNA, 20 bp, synthetic construct
  misc_feature 1..20: note = chemically synthesized
  source 1..20: mol_type = other DNA
aatgtccctagagtgaagaa

SEQ ID NO: 5470 - DNA, 20 bp, synthetic construct
  misc_feature 1..20: note = chemically synthesized
  source 1..20: mol_type = other DNA
taaatgtctccaaaatgaca

SEQ ID NO: 5471 - DNA, 20 bp, synthetic construct
  misc_feature 1..20: note = chemically synthesized
  source 1..20: mol_type = other DNA
caggtaatagacaagttgtt

SEQ ID NO: 5472 - DNA, 20 bp, synthetic construct
  misc_feature 1..20: note = chemically synthesized
  source 1..20: mol_type = other DNA
ttttcactggctaattaaat

SEQ ID NO: 5473 - DNA, 20 bp, synthetic construct
  misc_feature 1..20: note = chemically synthesized
  source 1..20: mol_type = other DNA
agctttaattgtattcattt

SEQ ID NO: 5474 - DNA, 20 bp, synthetic construct
  misc_feature 1..20: note = chemically synthesized
  source 1..20: mol_type = other DNA
ttctaaccacaaaaaaagaa

SEQ ID NO: 5475 - DNA, 20 bp, synthetic construct
  misc_feature 1..20: note = chemically synthesized
  source 1..20: mol_type = other DNA
agcacctgcccttcaagaca

SEQ ID NO: 5476 - DNA, 20 bp, synthetic construct
  misc_feature 1..20: note = chemically synthesized
  source 1..20: mol_type = other DNA
ttgggaggctgagacaggag

SEQ ID NO: 5477 - DNA, 20 bp, synthetic construct
  misc_feature 1..20: note = chemically synthesized
  source 1..20: mol_type = other DNA
agactcttttgaacatggtg

SEQ ID NO: 5478 - DNA, 20 bp, synthetic construct
  misc_feature 1..20: note = chemically synthesized
  source 1..20: mol_type = other DNA
agcaattcctgaatgtcctg

SEQ ID NO: 5479 - DNA, 20 bp, synthetic construct
  misc_feature 1..20: note = chemically synthesized
  source 1..20: mol_type = other DNA
gggcatcctctaagccactt

SEQ ID NO: 5480 - DNA, 20 bp, synthetic construct
  misc_feature 1..20: note = chemically synthesized
  source 1..20: mol_type = other DNA
attataccatctcaaaatga

SEQ ID NO: 5481 - DNA, 20 bp, synthetic construct
  misc_feature 1..20: note = chemically synthesized
  source 1..20: mol_type = other DNA
atgacagctgaggatcagtt

SEQ ID NO: 5482 - DNA, 20 bp, synthetic construct
  misc_feature 1..20: note = chemically synthesized
  source 1..20: mol_type = other DNA
gttttctgctgttccccttc

SEQ ID NO: 5483 - DNA, 20 bp, synthetic construct
  misc_feature 1..20: note = chemically synthesized
  source 1..20: mol_type = other DNA
tgtctgagatgtatcaaacg

SEQ ID NO: 5484 - DNA, 20 bp, synthetic construct
  misc_feature 1..20: note = chemically synthesized
  source 1..20: mol_type = other DNA
gtatcaaacggtcagattga

SEQ ID NO: 5485 - DNA, 20 bp, synthetic construct
  misc_feature 1..20: note = chemically synthesized
  source 1..20: mol_type = other DNA
tcagattgactgagtttgaa

SEQ ID NO: 5486 - DNA, 20 bp, synthetic construct
  misc_feature 1..20: note = chemically synthesized
  source 1..20: mol_type = other DNA
ttttgtatttttattagaga

SEQ ID NO: 5487 - DNA, 20 bp, synthetic construct
  misc_feature 1..20: note = chemically synthesized
  source 1..20: mol_type = other DNA
atctcctgacctcgtgatcc

SEQ ID NO: 5488 - DNA, 20 bp, synthetic construct
  misc_feature 1..20: note = chemically synthesized
  source 1..20: mol_type = other DNA
cgctttggcctcccaaagtg

SEQ ID NO: 5489 - DNA, 20 bp, synthetic construct
  misc_feature 1..20: note = chemically synthesized
  source 1..20: mol_type = other DNA
agaagagtcggacacgaagt

SEQ ID NO: 5490 - DNA, 20 bp, synthetic construct
  misc_feature 1..20: note = chemically synthesized
  source 1..20: mol_type = other DNA
agagaccaggtagaaaatta

SEQ ID NO: 5491 - DNA, 20 bp, synthetic construct
  misc_feature 1..20: note = chemically synthesized
  source 1..20: mol_type = other DNA
atactacccacagatagcca

SEQ ID NO: 5492 - DNA, 20 bp, synthetic construct
  misc_feature 1..20: note = chemically synthesized
  source 1..20: mol_type = other DNA
caatcagatggaagaatccc

SEQ ID NO: 5493 - DNA, 20 bp, synthetic construct
  misc_feature 1..20: note = chemically synthesized
  source 1..20: mol_type = other DNA
agttactgggtaacacagag

SEQ ID NO: 5494 - DNA, 20 bp, synthetic construct
  misc_feature 1..20: note = chemically synthesized
  source 1..20: mol_type = other DNA
actagccacgtcccagggtt

SEQ ID NO: 5495 - DNA, 20 bp, synthetic construct
  misc_feature 1..20: note = chemically synthesized
  source 1..20: mol_type = other DNA
aaatgaaggaagcctctaga

SEQ ID NO: 5496 - DNA, 20 bp, synthetic construct
  misc_feature 1..20: note = chemically synthesized
  source 1..20: mol_type = other DNA
aggagttcgtcaggcaattt

SEQ ID NO: 5497 - DNA, 20 bp, synthetic construct
  misc_feature 1..20: note = chemically synthesized
  source 1..20: mol_type = other DNA
atgcactccctctttgagtc

SEQ ID NO: 5498 - DNA, 20 bp, synthetic construct
  misc_feature 1..20: note = chemically synthesized
  source 1..20: mol_type = other DNA
tcaatttagacctgggcact

SEQ ID NO: 5499 - DNA, 20 bp, synthetic construct
  misc_feature 1..20: note = chemically synthesized
  source 1..20: mol_type = other DNA
aaccattatctctcatctgg

SEQ ID NO: 5500 - DNA, 20 bp, synthetic construct
  misc_feature 1..20: note = chemically synthesized
  source 1..20: mol_type = other DNA
tctctcatctggaaatgctt

SEQ ID NO: 5501 - DNA, 20 bp, synthetic construct
  misc_feature 1..20: note = chemically synthesized
  source 1..20: mol_type = other DNA
gacccttggactctgtatga

SEQ ID NO: 5502 - DNA, 20 bp, synthetic construct
  misc_feature 1..20: note = chemically synthesized
  source 1..20: mol_type = other DNA
ctctgtatgagctggcttct

SEQ ID NO: 5503 - DNA, 20 bp, synthetic construct
  misc_feature 1..20: note = chemically synthesized
  source 1..20: mol_type = other DNA
ttcaacctcacctaatggaa

SEQ ID NO: 5504 - DNA, 20 bp, synthetic construct
  misc_feature 1..20: note = chemically synthesized
  source 1..20: mol_type = other DNA
tttcctttgacaccctaagc

SEQ ID NO: 5505 - DNA, 20 bp, synthetic construct
  misc_feature 1..20: note = chemically synthesized
  source 1..20: mol_type = other DNA
accctaagcatttgcttcct

SEQ ID NO: 5506 - DNA, 20 bp, synthetic construct
  misc_feature 1..20: note = chemically synthesized
  source 1..20: mol_type = other DNA
tgctatcaatttcattccct

SEQ ID NO: 5507 - DNA, 20 bp, synthetic construct
  misc_feature 1..20: note = chemically synthesized
  source 1..20: mol_type = other DNA
caaaatagtaggtgctctga

SEQ ID NO: 5508 - DNA, 20 bp, synthetic construct
  misc_feature 1..20: note = chemically synthesized
  source 1..20: mol_type = other DNA
ccaaagaatataaatgagaa

SEQ ID NO: 5509 - DNA, 20 bp, synthetic construct
  misc_feature 1..20: note = chemically synthesized
  source 1..20: mol_type = other DNA
cagaaaaagcaagttaaagc

SEQ ID NO: 5510 - DNA, 20 bp, synthetic construct
  misc_feature 1..20: note = chemically synthesized
  source 1..20: mol_type = other DNA
aggcactcctctcaaccccc

SEQ ID NO: 5511 - DNA, 20 bp, synthetic construct
  misc_feature 1..20: note = chemically synthesized
  source 1..20: mol_type = other DNA
cgaactccttggcatccatt

SEQ ID NO: 5512 - DNA, 20 bp, synthetic construct
  misc_feature 1..20: note = chemically synthesized
  source 1..20: mol_type = other DNA
aggaaggatgaggagagggg

SEQ ID NO: 5513 - DNA, 20 bp, synthetic construct
  misc_feature 1..20: note = chemically synthesized
  source 1..20: mol_type = other DNA
gagagacaccattttgtgtc

SEQ ID NO: 5514 - DNA, 20 bp, synthetic construct
  misc_feature 1..20: note = chemically synthesized
  source 1..20: mol_type = other DNA
gtcacttggagagcagtcag

SEQ ID NO: 5515 - DNA, 20 bp, synthetic construct
  misc_feature 1..20: note = chemically synthesized
  source 1..20: mol_type = other DNA
ttgccctttatgtgcattga

SEQ ID NO: 5516 - DNA, 20 bp, synthetic construct
  misc_feature 1..20: note = chemically synthesized
  source 1..20: mol_type = other DNA
aaaatgattgaatacagatg

SEQ ID NO: 5517 - DNA, 20 bp, synthetic construct
  misc_feature 1..20: note = chemically synthesized
  source 1..20: mol_type = other DNA
agaagcggacttgtaagata

SEQ ID NO: 5518 - DNA, 20 bp, synthetic construct
  misc_feature 1..20: note = chemically synthesized
  source 1..20: mol_type = other DNA
acttgtaagataggtagctt

SEQ ID NO: 5519 - DNA, 20 bp, synthetic construct
  misc_feature 1..20: note = chemically synthesized
  source 1..20: mol_type = other DNA
atgaaagaaacttttaacct

SEQ ID NO: 5520 - DNA, 20 bp, synthetic construct
  misc_feature 1..20: note = chemically synthesized
  source 1..20: mol_type = other DNA
cgatcttggctcagtgcaac

SEQ ID NO: 5521 - DNA, 20 bp, synthetic construct
  misc_feature 1..20: note = chemically synthesized
  source 1..20: mol_type = other DNA
atttttgtatttttttagag

SEQ ID NO: 5522 - DNA, 20 bp, synthetic construct
  misc_feature 1..20: note = chemically synthesized
  source 1..20: mol_type = other DNA
cgcctcggcctcccaaagtg

SEQ ID NO: 5523 - DNA, 20 bp, synthetic construct
  misc_feature 1..20: note = chemically synthesized
  source 1..20: mol_type = other DNA
tttaacaggtataaatatac

SEQ ID NO: 5524 - DNA, 20 bp, synthetic construct
  misc_feature 1..20: note = chemically synthesized
  source 1..20: mol_type = other DNA
tcaattataaggtagagact

SEQ ID NO: 5525 - DNA, 20 bp, synthetic construct
  misc_feature 1..20: note = chemically synthesized
  source 1..20: mol_type = other DNA
gccacctctgaaactccaac

SEQ ID NO: 5526 - DNA, 20 bp, synthetic construct
  misc_feature 1..20: note = chemically synthesized
  source 1..20: mol_type = other DNA
actagagtataggggcagaa

SEQ ID NO: 5527 - DNA, 20 bp, synthetic construct
  misc_feature 1..20: note = chemically synthesized
  source 1..20: mol_type = other DNA
gaatcttgtgcctttcccac

SEQ ID NO: 5528 - DNA, 20 bp, synthetic construct
  misc_feature 1..20: note = chemically synthesized
  source 1..20: mol_type = other DNA
ccacaagacctcagacttcc

SEQ ID NO: 5529 - DNA, 20 bp, synthetic construct
  misc_feature 1..20: note = chemically synthesized
  source 1..20: mol_type = other DNA
tccacatacccttgctgtgg

SEQ ID NO: 5530 - DNA, 20 bp, synthetic construct
  misc_feature 1..20: note = chemically synthesized
  source 1..20: mol_type = other DNA
ctgactcagctgcagccaca

SEQ ID NO: 5531 - DNA, 20 bp, synthetic construct
  misc_feature 1..20: note = chemically synthesized
  source 1..20: mol_type = other DNA
agctggtcatccacgtagcc

SEQ ID NO: 5532 - DNA, 20 bp, synthetic construct
  misc_feature 1..20: note = chemically synthesized
  source 1..20: mol_type = other DNA
gtcctgggtgctctttcctt

SEQ ID NO: 5533 - DNA, 20 bp, synthetic construct
  misc_feature 1..20: note = chemically synthesized
  source 1..20: mol_type = other DNA
cccagatcctattccaatac

SEQ ID NO: 5534 - DNA, 20 bp, synthetic construct
  misc_feature 1..20: note = chemically synthesized
  source 1..20: mol_type = other DNA
agacagactccactaaagct

SEQ ID NO: 5535 - DNA, 20 bp, synthetic construct
  misc_feature 1..20: note = chemically synthesized
  source 1..20: mol_type = other DNA
aaatcctgaggaataattcc

SEQ ID NO: 5536 - DNA, 20 bp, synthetic construct
  misc_feature 1..20: note = chemically synthesized
  source 1..20: mol_type = other DNA
aacctgcacctcctgggttc

SEQ ID NO: 5537 - DNA, 20 bp, synthetic construct
  misc_feature 1..20: note = chemically synthesized
  source 1..20: mol_type = other DNA
ttttgtatttttagtagaca

SEQ ID NO: 5538 - DNA, 20 bp, synthetic construct
  misc_feature 1..20: note = chemically synthesized
  source 1..20: mol_type = other DNA
atggggtttcaccatgttgg

SEQ ID NO: 5539 - DNA, 20 bp, synthetic construct
  misc_feature 1..20: note = chemically synthesized
  source 1..20: mol_type = other DNA
ctgcctcagccaccaaagtg

SEQ ID NO: 5540 - DNA, 20 bp, synthetic construct
  misc_feature 1..20: note = chemically synthesized
  source 1..20: mol_type = other DNA
taacatgtccaaatgcagat

SEQ ID NO: 5541 - DNA, 20 bp, synthetic construct
  misc_feature 1..20: note = chemically synthesized
  source 1..20: mol_type = other DNA
ttttgtattttttgtagaga

SEQ ID NO: 5542 - DNA, 20 bp, synthetic construct
  misc_feature 1..20: note = chemically synthesized
  source 1..20: mol_type = other DNA
tcagaatatattcaggagac

SEQ ID NO: 5543 - DNA, 20 bp, synthetic construct
  misc_feature 1..20: note = chemically synthesized
  source 1..20: mol_type = other DNA
acctcttgcctggactgtgt

SEQ ID NO: 5544 - DNA, 20 bp, synthetic construct
  misc_feature 1..20: note = chemically synthesized
  source 1..20: mol_type = other DNA
aacagcttcctggctgggct

SEQ ID NO: 5545 - DNA, 20 bp, synthetic construct
  misc_feature 1..20: note = chemically synthesized
  source 1..20: mol_type = other DNA
ttttactgttgctcccttca

SEQ ID NO: 5546 - DNA, 20 bp, synthetic construct
  misc_feature 1..20: note = chemically synthesized
  source 1..20: mol_type = other DNA
gcctacaggcgcctgcacaa

SEQ ID NO: 5547 - DNA, 20 bp, synthetic construct
  misc_feature 1..20: note = chemically synthesized
  source 1..20: mol_type = other DNA
ggcctctactccccagcact

SEQ ID NO: 5548 - DNA, 20 bp, synthetic construct
  misc_feature 1..20: note = chemically synthesized
  source 1..20: mol_type = other DNA
acttgtttatttttttcaac

SEQ ID NO: 5549 - DNA, 20 bp, synthetic construct
  misc_feature 1..20: note = chemically synthesized
  source 1..20: mol_type = other DNA
tcaacccgagcttcttaacc

SEQ ID NO: 5550 - DNA, 20 bp, synthetic construct
  misc_feature 1..20: note = chemically synthesized
  source 1..20: mol_type = other DNA
gtctactaggtgacatgtgg

SEQ ID NO: 5551 - DNA, 20 bp, synthetic construct
  misc_feature 1..20: note = chemically synthesized
  source 1..20: mol_type = other DNA
acatgagtagtgctgagaaa

SEQ ID NO: 5552 - DNA, 20 bp, synthetic construct
  misc_feature 1..20: note = chemically synthesized
  source 1..20: mol_type = other DNA
aatccaacttgccaggccca

SEQ ID NO: 5553 - DNA, 20 bp, synthetic construct
  misc_feature 1..20: note = chemically synthesized
  source 1..20: mol_type = other DNA
agagtgacttgccctgactt

SEQ ID NO: 5554 - DNA, 20 bp, synthetic construct
  misc_feature 1..20: note = chemically synthesized
  source 1..20: mol_type = other DNA
ttctctgcttctcacaacac

SEQ ID NO: 5555 - DNA, 20 bp, synthetic construct
  misc_feature 1..20: note = chemically synthesized
  source 1..20: mol_type = other DNA
tgttgtatatctttctgctc

SEQ ID NO: 5556 - DNA, 20 bp, synthetic construct
  misc_feature 1..20: note = chemically synthesized
  source 1..20: mol_type = other DNA
caaaatatcaaagggtaaag

SEQ ID NO: 5557 - DNA, 20 bp, synthetic construct
  misc_feature 1..20: note = chemically synthesized
  source 1..20: mol_type = other DNA
tgtttccctgctctctccct

SEQ ID NO: 5558 - DNA, 20 bp, synthetic construct
  misc_feature 1..20: note = chemically synthesized
  source 1..20: mol_type = other DNA
attcaacctctaatgcagtg

SEQ ID NO: 5559 - DNA, 20 bp, synthetic construct
  misc_feature 1..20: note = chemically synthesized
  source 1..20: mol_type = other DNA
cagggcaaaatcactgtcaa

SEQ ID NO: 5560 - DNA, 20 bp, synthetic construct
  misc_feature 1..20: note = chemically synthesized
  source 1..20: mol_type = other DNA
acttgaaataacatcagaaa

SEQ ID NO: 5561 - DNA, 20 bp, synthetic construct
  misc_feature 1..20: note = chemically synthesized
  source 1..20: mol_type = other DNA
atgtaacttagaagtgagtg

SEQ ID NO: 5562 - DNA, 20 bp, synthetic construct
  misc_feature 1..20: note = chemically synthesized
  source 1..20: mol_type = other DNA
aaccccgtgcggatcctgct

SEQ ID NO: 5563 - DNA, 20 bp, synthetic construct
  misc_feature 1..20: note = chemically synthesized
  source 1..20: mol_type = other DNA
caagcactcagggaagaact

SEQ ID NO: 5564 - DNA, 20 bp, synthetic construct
  misc_feature 1..20: note = chemically synthesized
  source 1..20: mol_type = other DNA
agttccaggttcaaggagcc

SEQ ID NO: 5565 - DNA, 20 bp, synthetic construct
  misc_feature 1..20: note = chemically synthesized
  source 1..20: mol_type = other DNA
ctcagctcaagtgaggaact

SEQ ID NO: 5566 - DNA, 20 bp, synthetic construct
  misc_feature 1..20: note = chemically synthesized
  source 1..20: mol_type = other DNA
tggacgcagaaagtagggag

SEQ ID NO: 5567 - DNA, 20 bp, synthetic construct
  misc_feature 1..20: note = chemically synthesized
  source 1..20: mol_type = other DNA
ctcccaagcgcaaagaaaaa

SEQ ID NO: 5568 - DNA, 20 bp, synthetic construct
  misc_feature 1..20: note = chemically synthesized
  source 1..20: mol_type = other DNA
aagcgcaaagaaaaagctag

SEQ ID NO: 5569 - DNA, 20 bp, synthetic construct
  misc_feature 1..20: note = chemically synthesized
  source 1..20: mol_type = other DNA
gccgcacgtccccgttaaat

SEQ ID NO: 5570 - DNA, 20 bp, synthetic construct
  misc_feature 1..20: note = chemically synthesized
  source 1..20: mol_type = other DNA
tctctcctacagcagaaggt

SEQ ID NO: 5571 - DNA, 20 bp, synthetic construct
  misc_feature 1..20: note = chemically synthesized
  source 1..20: mol_type = other DNA
ctaggtgatccagtgtcccc

SEQ ID NO: 5572 - DNA, 20 bp, synthetic construct
  misc_feature 1..20: note = chemically synthesized
  source 1..20: mol_type = other DNA
tttaaatcctgaaggggtgt

SEQ ID NO: 5573 - DNA, 20 bp, synthetic construct
  misc_feature 1..20: note = chemically synthesized
  source 1..20: mol_type = other DNA
gggtgttgttgattggggaa

SEQ ID NO: 5574 - DNA, 20 bp, synthetic construct
  misc_feature 1..20: note = chemically synthesized
  source 1..20: mol_type = other DNA
aactttagatatttaaatat

SEQ ID NO: 5575 - DNA, 20 bp, synthetic construct
  misc_feature 1..20: note = chemically synthesized
  source 1..20: mol_type = other DNA
tcttatttgacttagaaata

SEQ ID NO: 5576 - DNA, 20 bp, synthetic construct
  misc_feature 1..20: note = chemically synthesized
  source 1..20: mol_type = other DNA
agaaatataaagctttttca

SEQ ID NO: 5577 - DNA, 20 bp, synthetic construct
  misc_feature 1..20: note = chemically synthesized
  source 1..20: mol_type = other DNA
taaagctttttcattttgtt

SEQ ID NO: 5578 - DNA, 20 bp, synthetic construct
  misc_feature 1..20: note = chemically synthesized
  source 1..20: mol_type = other DNA
tcataattgaattatctgac

SEQ ID NO: 5579 - DNA, 20 bp, synthetic construct
  misc_feature 1..20: note = chemically synthesized
  source 1..20: mol_type = other DNA
gtttcacaaactttacagta

SEQ ID NO: 5580 - DNA, 20 bp, synthetic construct
  misc_feature 1..20: note = chemically synthesized
  source 1..20: mol_type = other DNA
cagtattgggattatctgga

SEQ ID NO: 5581 - DNA, 20 bp, synthetic construct
  misc_feature 1..20: note = chemically synthesized
  source 1..20: mol_type = other DNA
cctgctcctaaccccagaca

SEQ ID NO: 5582 - DNA, 20 bp, synthetic construct
  misc_feature 1..20: note = chemically synthesized
  source 1..20: mol_type = other DNA
cctaatgccaccctaaggga

SEQ ID NO: 5583 - DNA, 20 bp, synthetic construct
  misc_feature 1..20: note = chemically synthesized
  source 1..20: mol_type = other DNA
tcattataatagaatttaca

SEQ ID NO: 5584 - DNA, 20 bp, synthetic construct
  misc_feature 1..20: note = chemically synthesized
  source 1..20: mol_type = other DNA
gttttgcccccccatccctg

SEQ ID NO: 5585 - DNA, 20 bp, synthetic construct
  misc_feature 1..20: note = chemically synthesized
  source 1..20: mol_type = other DNA
aaattataggtaagaccatg

SEQ ID NO: 5586 - DNA, 20 bp, synthetic construct
  misc_feature 1..20: note = chemically synthesized
  source 1..20: mol_type = other DNA
aagaccatgcacagtttaat

SEQ ID NO: 5587 - DNA, 20 bp, synthetic construct
  misc_feature 1..20: note = chemically synthesized
  source 1..20: mol_type = other DNA
ctgtccctcagagtgtatta

SEQ ID NO: 5588 - DNA, 20 bp, synthetic construct
  misc_feature 1..20: note = chemically synthesized
  source 1..20: mol_type = other DNA
tattattgtgcttcaataaa

SEQ ID NO: 5589 - DNA, 20 bp, synthetic construct
  misc_feature 1..20: note = chemically synthesized
  source 1..20: mol_type = other DNA
gtgcttcaataaactttgct

SEQ ID NO: 5590 - DNA, 20 bp, synthetic construct
  misc_feature 1..20: note = chemically synthesized
  source 1..20: mol_type = other DNA
ctttaagcttgcattttggt

SEQ ID NO: 5591 - DNA, 20 bp, synthetic construct
  misc_feature 1..20: note = chemically synthesized
  source 1..20: mol_type = other DNA
tttgctcactatcacaagaa

SEQ ID NO: 5592 - DNA, 20 bp, synthetic construct
  misc_feature 1..20: note = chemically synthesized
  source 1..20: mol_type = other DNA
tatgggatgccacctgggca

SEQ ID NO: 5593 - DNA, 20 bp, synthetic construct
  misc_feature 1..20: note = chemically synthesized
  source 1..20: mol_type = other DNA
cacctgggcaatgggatttt

SEQ ID NO: 5594 - DNA, 20 bp, synthetic construct
  misc_feature 1..20: note = chemically synthesized
  source 1..20: mol_type = other DNA
aagctttccttctccctcaa

SEQ ID NO: 5595 - DNA, 20 bp, synthetic construct
  misc_feature 1..20: note = chemically synthesized
  source 1..20: mol_type = other DNA
aatattaataaatttaatac

SEQ ID NO: 5596 - DNA, 20 bp, synthetic construct
  misc_feature 1..20: note = chemically synthesized
  source 1..20: mol_type = other DNA
aattggcccggctcagtggc

SEQ ID NO: 5597 - DNA, 20 bp, synthetic construct
  misc_feature 1..20: note = chemically synthesized
  source 1..20: mol_type = other DNA
attagaggctgaggcaggag

SEQ ID NO: 5598 - DNA, 20 bp, synthetic construct
  misc_feature 1..20: note = chemically synthesized
  source 1..20: mol_type = other DNA
tcgggaagctgagacaggag

SEQ ID NO: 5599 - DNA, 20 bp, synthetic construct
  misc_feature 1..20: note = chemically synthesized
  source 1..20: mol_type = other DNA
taaaataaaatgcaaaaatt

SEQ ID NO: 5600 - DNA, 20 bp, synthetic construct
  misc_feature 1..20: note = chemically synthesized
  source 1..20: mol_type = other DNA
gtacccttaattcatcgcct

SEQ ID NO: 5601 - DNA, 20 bp, synthetic construct
  misc_feature 1..20: note = chemically synthesized
  source 1..20: mol_type = other DNA
atacatagaggcatataata

SEQ ID NO: 5602 - DNA, 20 bp, synthetic construct
  misc_feature 1..20: note = chemically synthesized
  source 1..20: mol_type = other DNA
taatatattgctttgccgtg

SEQ ID NO: 5603 - DNA, 20 bp, synthetic construct
  misc_feature 1..20: note = chemically synthesized
  source 1..20: mol_type = other DNA
ctggcttctttcatttagca

SEQ ID NO: 5604 - DNA, 20 bp, synthetic construct
  misc_feature 1..20: note = chemically synthesized
  source 1..20: mol_type = other DNA
atttagcataatgtttttat

SEQ ID NO: 5605 - DNA, 20 bp, synthetic construct
  misc_feature 1..20: note = chemically synthesized
  source 1..20: mol_type = other DNA
tcattcatcagccgatggac

SEQ ID NO: 5606 - DNA, 20 bp, synthetic construct
  misc_feature 1..20: note = chemically synthesized
  source 1..20: mol_type = other DNA
tcatcagccgatggacattg

SEQ ID NO: 5607 - DNA, 20 bp, synthetic construct
  misc_feature 1..20: note = chemically synthesized
  source 1..20: mol_type = other DNA
gctgttataaacatttatgt

SEQ ID NO: 5608 - DNA, 20 bp, synthetic construct
  misc_feature 1..20: note = chemically synthesized
  source 1..20: mol_type = other DNA
gtacaagtttttttgtagac

SEQ ID NO: 5609 - DNA, 20 bp, synthetic construct
  misc_feature 1..20: note = chemically synthesized
  source 1..20: mol_type = other DNA
agtttttttgtagacttatg

SEQ ID NO: 5610 - DNA, 20 bp, synthetic construct
  misc_feature 1..20: note = chemically synthesized
  source 1..20: mol_type = other DNA
ttttggttatatatctagaa

SEQ ID NO: 5611 - DNA, 20 bp, synthetic construct
  misc_feature 1..20: note = chemically synthesized
  source 1..20: mol_type = other DNA
tttgctgggtcatatggtaa

SEQ ID NO: 5612 - DNA, 20 bp, synthetic construct
  misc_feature 1..20: note = chemically synthesized
  source 1..20: mol_type = other DNA
ctatcagcagtgtatgagag

SEQ ID NO: 5613 - DNA, 20 bp, synthetic construct
  misc_feature 1..20: note = chemically synthesized
  source 1..20: mol_type = other DNA
tgatttctctccatctttgc

SEQ ID NO: 5614 - DNA, 20 bp, synthetic construct
  misc_feature 1..20: note = chemically synthesized
  source 1..20: mol_type = other DNA
agaagactcttttttcattg

SEQ ID NO: 5615 - DNA, 20 bp, synthetic construct
  misc_feature 1..20: note = chemically synthesized
  source 1..20: mol_type = other DNA
aatcaatctaccataaatgt

SEQ ID NO: 5616 - DNA, 20 bp, synthetic construct
  misc_feature 1..20: note = chemically synthesized
  source 1..20: mol_type = other DNA
tgcctcagcctcccaagcag

SEQ ID NO: 5617 - DNA, 20 bp, synthetic construct
  misc_feature 1..20: note = chemically synthesized
  source 1..20: mol_type = other DNA
ttttgtatttttagtagaga

SEQ ID NO: 5618 - DNA, 22 bp, synthetic construct
  misc_feature 1..22: note = chemically synthesized
  source 1..22: mol_type = other DNA
tgggaggctgaggtgggcagat

SEQ ID NO: 5619 - DNA, 22 bp, synthetic construct
  misc_feature 1..22: note = chemically synthesized
  source 1..22: mol_type = other DNA
gggaggctgaggtgggcagatc

SEQ ID NO: 5620 - DNA, 22 bp, synthetic construct
  misc_feature 1..22: note = chemically synthesized
  source 1..22: mol_type = other DNA
ggaggctgaggtgggcagatca

SEQ ID NO: 5621 - DNA, 22 bp, synthetic construct
  misc_feature 1..22: note = chemically synthesized
  source 1..22: mol_type = other DNA
aggtgggcagatcacctgaggt

SEQ ID NO: 5622 - DNA, 22 bp, synthetic construct
  misc_feature 1..22: note = chemically synthesized
  source 1..22: mol_type = other DNA
aggtcaggagttccagaccagc

SEQ ID NO: 5623 - DNA, 22 bp, synthetic construct
  misc_feature 1..22: note = chemically synthesized
  source 1..22: mol_type = other DNA
cagaccagcctgaccaacatgg

SEQ ID NO: 5624 - DNA, 22 bp, synthetic construct
  misc_feature 1..22: note = chemically synthesized
  source 1..22: mol_type = other DNA
accaacatggtgaaaccccgtc

SEQ ID NO: 5625 - DNA, 22 bp, synthetic construct
  misc_feature 1..22: note = chemically synthesized
  source 1..22: mol_type = other DNA
tactaaaaatacaaaaattaac

SEQ ID NO: 5626 - DNA, 22 bp, synthetic construct
  misc_feature 1..22: note = chemically synthesized
  source 1..22: mol_type = other DNA
ctaaaaatacaaaaattaacca

SEQ ID NO: 5627 - DNA, 22 bp, synthetic construct
  misc_feature 1..22: note = chemically synthesized
  source 1..22: mol_type = other DNA
aaaatacaaaaattaaccaggc

SEQ ID NO: 5628 - DNA, 22 bp, synthetic construct
  misc_feature 1..22: note = chemically synthesized
  source 1..22: mol_type = other DNA
accaggcatggtggcaggtacc

SEQ ID NO: 5629 - DNA, 22 bp, synthetic construct
  misc_feature 1..22: note = chemically synthesized
  source 1..22: mol_type = other DNA
taatcccagctgcttgggaggc

SEQ ID NO: 5630 - DNA, 22 bp, synthetic construct
  misc_feature 1..22: note = chemically synthesized
  source 1..22: mol_type = other DNA
cttgggaggctgaggcaggaga

SEQ ID NO: 5631 - DNA, 22 bp, synthetic construct
  misc_feature 1..22: note = chemically synthesized
  source 1..22: mol_type = other DNA
gggaggctgaggcaggagaatt

SEQ ID NO: 5632 - DNA, 22 bp, synthetic construct
  misc_feature 1..22: note = chemically synthesized
  source 1..22: mol_type = other DNA
ggaggctgaggcaggagaattg

SEQ ID NO: 5633 - DNA, 22 bp, synthetic construct
  misc_feature 1..22: note = chemically synthesized
  source 1..22: mol_type = other DNA
aggcaggagaattgcttgaacc

SEQ ID NO: 5634 - DNA, 22 bp, synthetic construct
  misc_feature 1..22: note = chemically synthesized
  source 1..22: mol_type = other DNA
cttgaacctgggaggaggagcc

SEQ ID NO: 5635 - DNA, 22 bp, synthetic construct
  misc_feature 1..22: note = chemically synthesized
  source 1..22: mol_type = other DNA
gaacctgggaggaggagccagt

SEQ ID NO: 5636 - DNA, 22 bp, synthetic construct
  misc_feature 1..22: note = chemically synthesized
  source 1..22: mol_type = other DNA
aacctgggaggaggagccagtg

SEQ ID NO: 5637 - DNA, 22 bp, synthetic construct
  misc_feature 1..22: note = chemically synthesized
  source 1..22: mol_type = other DNA
ggaggaggagccagtggccggg

SEQ ID NO: 5638 - DNA, 22 bp, synthetic construct
  misc_feature 1..22: note = chemically synthesized
  source 1..22: mol_type = other DNA
ggccactgcactccaacctggg

SEQ ID NO: 5639 - DNA, 22 bp, synthetic construct
  misc_feature 1..22: note = chemically synthesized
  source 1..22: mol_type = other DNA
cactccaacctgggcaatagag

SEQ ID NO: 5640 - DNA, 22 bp, synthetic construct
  misc_feature 1..22: note = chemically synthesized
  source 1..22: mol_type = other DNA
caacctgggcaatagagtgagg

SEQ ID NO: 5641 - DNA, 22 bp, synthetic construct
  misc_feature 1..22: note = chemically synthesized
  source 1..22: mol_type = other DNA
ggcaatagagtgaggctctgtc

SEQ ID NO: 5642 - DNA, 22 bp, synthetic construct
  misc_feature 1..22: note = chemically synthesized
  source 1..22: mol_type = other DNA
tgtcaaaaaaaaaaaaagatag

SEQ ID NO: 5643 - DNA, 22 bp, synthetic construct
  misc_feature 1..22: note = chemically synthesized
  source 1..22: mol_type = other DNA
tcaaaaaaaaaaaaagatagga

SEQ ID NO: 5644 - DNA, 22 bp, synthetic construct
  misc_feature 1..22: note = chemically synthesized
  source 1..22: mol_type = other DNA
tagattatagcataatgggata

SEQ ID NO: 5645 - DNA, 22 bp, synthetic construct
  misc_feature 1..22: note = chemically synthesized
  source 1..22: mol_type = other DNA
tagcataatgggataaaattga

SEQ ID NO: 5646 - DNA, 22 bp, synthetic construct
  misc_feature 1..22: note = chemically synthesized
  source 1..22: mol_type = other DNA
agactccagaaataaactctca

SEQ ID NO: 5647 - DNA, 22 bp, synthetic construct
  misc_feature 1..22: note = chemically synthesized
  source 1..22: mol_type = other DNA
cagaaataaactctcacattta

SEQ ID NO: 5648 - DNA, 22 bp, synthetic construct
  misc_feature 1..22: note = chemically synthesized
  source 1..22: mol_type = other DNA
tcacatttatggtagattgatt

SEQ ID NO: 5649 - DNA, 22 bp, synthetic construct
  misc_feature 1..22: note = chemically synthesized
  source 1..22: mol_type = other DNA
acatttatggtagattgatttt

SEQ ID NO: 5650 - DNA, 22 bp, synthetic construct
  misc_feature 1..22: note = chemically synthesized
  source 1..22: mol_type = other DNA
atggtagattgatttttgataa

SEQ ID NO: 5651 - DNA, 22 bp, synthetic construct
  misc_feature 1..22: note = chemically synthesized
  source 1..22: mol_type = other DNA
tggtagattgatttttgataag

SEQ ID NO: 5652 - DNA, 22 bp, synthetic construct
  misc_feature 1..22: note = chemically synthesized
  source 1..22: mol_type = other DNA
atttttgataagggtgccaaaa

SEQ ID NO: 5653 - DNA, 22 bp, synthetic construct
  misc_feature 1..22: note = chemically synthesized
  source 1..22: mol_type = other DNA
ttgataagggtgccaaaacact

SEQ ID NO: 5654 - DNA, 22 bp, synthetic construct
  misc_feature 1..22: note = chemically synthesized
  source 1..22: mol_type = other DNA
tgataagggtgccaaaacactt

SEQ ID NO: 5655 - DNA, 22 bp, synthetic construct
  misc_feature 1..22: note = chemically synthesized
  source 1..22: mol_type = other DNA
gataagggtgccaaaacacttc

SEQ ID NO: 5656 - DNA, 22 bp, synthetic construct
  misc_feature 1..22: note = chemically synthesized
  source 1..22: mol_type = other DNA
ataagggtgccaaaacacttca

SEQ ID NO: 5657 - DNA, 22 bp, synthetic construct
  misc_feature 1..22: note = chemically synthesized
  source 1..22: mol_type = other DNA
caatgaaaaaagagtcttctca

SEQ ID NO: 5658 - DNA, 22 bp, synthetic construct
  misc_feature 1..22: note = chemically synthesized
  source 1..22: mol_type = other DNA
aatgaaaaaagagtcttctcaa

SEQ ID NO: 5659 - DNA, 22 bp, synthetic construct
  misc_feature 1..22: note = chemically synthesized
  source 1..22: mol_type = other DNA
ctcaacaagtgatggtggaaca

SEQ ID NO: 5660 - DNA, 22 bp, synthetic construct
  misc_feature 1..22: note = chemically synthesized
  source 1..22: mol_type = other DNA
tcaacaagtgatggtggaacaa

SEQ ID NO: 5661 - DNA, 22 bp, synthetic construct
  misc_feature 1..22: note = chemically synthesized
  source 1..22: mol_type = other DNA
aacaagtgatggtggaacaact

SEQ ID NO: 5662 - DNA, 22 bp, synthetic construct
  misc_feature 1..22: note = chemically synthesized
  source 1..22: mol_type = other DNA
aataaccacatttttgttctat

SEQ ID NO: 5663 - DNA, 22 bp, synthetic construct
  misc_feature 1..22: note = chemically synthesized
  source 1..22: mol_type = other DNA
ttgttctatctggggccctgat

SEQ ID NO: 5664 - DNA, 22 bp, synthetic construct
  misc_feature 1..22: note = chemically synthesized
  source 1..22: mol_type = other DNA
tgttctatctggggccctgatt

SEQ ID NO: 5665 - DNA, 22 bp, synthetic construct
  misc_feature 1..22: note = chemically synthesized
  source 1..22: mol_type = other DNA
gttctatctggggccctgattc

SEQ ID NO: 5666 - DNA, 22 bp, synthetic construct
  misc_feature 1..22: note = chemically synthesized
  source 1..22: mol_type = other DNA
ttctatctggggccctgattca

SEQ ID NO: 5667 - DNA, 22 bp, synthetic construct
  misc_feature 1..22: note = chemically synthesized
  source 1..22: mol_type = other DNA
tatctggggccctgattcaaaa

SEQ ID NO: 5668 - DNA, 22 bp, synthetic construct
  misc_feature 1..22: note = chemically synthesized
  source 1..22: mol_type = other DNA
tctggggccctgattcaaaaac

SEQ ID NO: 5669 - DNA, 22 bp, synthetic construct
  misc_feature 1..22: note = chemically synthesized
  source 1..22: mol_type = other DNA
gggccctgattcaaaaacccag

SEQ ID NO: 5670 - DNA, 22 bp, synthetic construct
  misc_feature 1..22: note = chemically synthesized
  source 1..22: mol_type = other DNA
attcaaaaacccaggcaaagat

SEQ ID NO: 5671 - DNA, 22 bp, synthetic construct
  misc_feature 1..22: note = chemically synthesized
  source 1..22: mol_type = other DNA
aaaaacccaggcaaagatggag

SEQ ID NO: 5672 - DNA, 22 bp, synthetic construct
  misc_feature 1..22: note = chemically synthesized
  source 1..22: mol_type = other DNA
tcatacactgctgataggagga

SEQ ID NO: 5673 - DNA, 22 bp, synthetic construct
  misc_feature 1..22: note = chemically synthesized
  source 1..22: mol_type = other DNA
atacactgctgataggaggata

SEQ ID NO: 5674 - DNA, 22 bp, synthetic construct
  misc_feature 1..22: note = chemically synthesized
  source 1..22: mol_type = other DNA
ctgataggaggataaaatgctt

SEQ ID NO: 5675 - DNA, 22 bp, synthetic construct
  misc_feature 1..22: note = chemically synthesized
  source 1..22: mol_type = other DNA
ataggaggataaaatgcttact

SEQ ID NO: 5676 - DNA, 22 bp, synthetic construct
  misc_feature 1..22: note = chemically synthesized
  source 1..22: mol_type = other DNA
actttggaaaagaatgtggcaa

SEQ ID NO: 5677 - DNA, 22 bp, synthetic construct
  misc_feature 1..22: note = chemically synthesized
  source 1..22: mol_type = other DNA
ctttggaaaagaatgtggcaat

SEQ ID NO: 5678 - DNA, 22 bp, synthetic construct
  misc_feature 1..22: note = chemically synthesized
  source 1..22: mol_type = other DNA
tggaaaagaatgtggcaattcc

SEQ ID NO: 5679 - DNA, 22 bp, synthetic construct
  misc_feature 1..22: note = chemically synthesized
  source 1..22: mol_type = other DNA
ggaaaagaatgtggcaattcct

SEQ ID NO: 5680 - DNA, 22 bp, synthetic construct
  misc_feature 1..22: note = chemically synthesized
  source 1..22: mol_type = other DNA
gaaaagaatgtggcaattcctc

SEQ ID NO: 5681 - DNA, 22 bp, synthetic construct
  misc_feature 1..22: note = chemically synthesized
  source 1..22: mol_type = other DNA
ctcaaaaggttaaacagtgtta

SEQ ID NO: 5682 - DNA, 22 bp, synthetic construct
  misc_feature 1..22: note = chemically synthesized
  source 1..22: mol_type = other DNA
aaaaggttaaacagtgttacca

SEQ ID NO: 5683 - DNA, 22 bp, synthetic construct
  misc_feature 1..22: note = chemically synthesized
  source 1..22: mol_type = other DNA
aacagtgttaccatatgaccca

SEQ ID NO: 5684 - DNA, 22 bp, synthetic construct
  misc_feature 1..22: note = chemically synthesized
  source 1..22: mol_type = other DNA
ccatatgacccagcaaacccac

SEQ ID NO: 5685 - DNA, 22 bp, synthetic construct
  misc_feature 1..22: note = chemically synthesized
  source 1..22: mol_type = other DNA
ctagatatataaccaaaagaaa

SEQ ID NO: 5686 - DNA, 22 bp, synthetic construct
  misc_feature 1..22: note = chemically synthesized
  source 1..22: mol_type = other DNA
tagatatataaccaaaagaaat

SEQ ID NO: 5687 - DNA, 22 bp, synthetic construct
  misc_feature 1..22: note = chemically synthesized
  source 1..22: mol_type = other DNA
gatatataaccaaaagaaatca

SEQ ID NO: 5688 - DNA, 22 bp, synthetic construct
  misc_feature 1..22: note = chemically synthesized
  source 1..22: mol_type = other DNA
caaaaaaacttgtacataaatg

SEQ ID NO: 5689 - DNA, 22 bp, synthetic construct
  misc_feature 1..22: note = chemically synthesized
  source 1..22: mol_type = other DNA
gtacataaatgtttataacagc

SEQ ID NO: 5690 - DNA, 22 bp, synthetic construct
  misc_feature 1..22: note = chemically synthesized
  source 1..22: mol_type = other DNA
tacataaatgtttataacagca

SEQ ID NO: 5691 - DNA, 22 bp, synthetic construct
  misc_feature 1..22: note = chemically synthesized
  source 1..22: mol_type = other DNA
ataacagcactattcccaatag

SEQ ID NO: 5692 - DNA, 22 bp, synthetic construct
  misc_feature 1..22: note = chemically synthesized
  source 1..22: mol_type = other DNA
taacagcactattcccaatagc

SEQ ID NO: 5693 - DNA, 22 bp, synthetic construct
  misc_feature 1..22: note = chemically synthesized
  source 1..22: mol_type = other DNA
ttcccaatagccataaagtaga

SEQ ID NO: 5694 - DNA, 22 bp, synthetic construct
  misc_feature 1..22: note = chemically synthesized
  source 1..22: mol_type = other DNA
ccaatagccataaagtagaaac

SEQ ID NO: 5695 - DNA, 22 bp, synthetic construct
  misc_feature 1..22: note = chemically synthesized
  source 1..22: mol_type = other DNA
atgaatgaataaataaaatatg

SEQ ID NO: 5696 - DNA, 22 bp, synthetic construct
  misc_feature 1..22: note = chemically synthesized
  source 1..22: mol_type = other DNA
tggtatgtccttataatagata

SEQ ID NO: 5697 - DNA, 22 bp, synthetic construct
  misc_feature 1..22: note = chemically synthesized
  source 1..22: mol_type = other DNA
ataatagatattattggtccat

SEQ ID NO: 5698 - DNA, 22 bp, synthetic construct
  misc_feature 1..22: note = chemically synthesized
  source 1..22: mol_type = other DNA
taatagatattattggtccatg

SEQ ID NO: 5699 - DNA, 22 bp, synthetic construct
  misc_feature 1..22: note = chemically synthesized
  source 1..22: mol_type = other DNA
ttggtccatgaaaaacatacat

SEQ ID NO: 5700 - DNA, 22 bp, synthetic construct
  misc_feature 1..22: note = chemically synthesized
  source 1..22: mol_type = other DNA
gtccatgaaaaacatacataaa

SEQ ID NO: 5701 - DNA, 22 bp, synthetic construct
  misc_feature 1..22: note = chemically synthesized
  source 1..22: mol_type = other DNA
tgctaaatgaaagaagccagtc

SEQ ID NO: 5702 - DNA, 22 bp, synthetic construct
  misc_feature 1..22: note = chemically synthesized
  source 1..22: mol_type = other DNA
aatgaaagaagccagtcacggc

SEQ ID NO: 5703 - DNA, 22 bp, synthetic construct
  misc_feature 1..22: note = chemically synthesized
  source 1..22: mol_type = other DNA
tatgcctctatgtatactaaat

SEQ ID NO: 5704 - DNA, 22 bp, synthetic construct
  misc_feature 1..22: note = chemically synthesized
  source 1..22: mol_type = other DNA
tatgtatactaaatgttccaaa

SEQ ID NO: 5705 - DNA, 22 bp, synthetic construct
  misc_feature 1..22: note = chemically synthesized
  source 1..22: mol_type = other DNA
tgtatactaaatgttccaaata

SEQ ID NO: 5706 - DNA, 22 bp, synthetic construct
  misc_feature 1..22: note = chemically synthesized
  source 1..22: mol_type = other DNA
aatgttccaaatagaaagaaag

SEQ ID NO: 5707 - DNA, 22 bp, synthetic construct
  misc_feature 1..22: note = chemically synthesized
  source 1..22: mol_type = other DNA
caaatagaaagaaagtagatta

SEQ ID NO: 5708 - DNA, 22 bp, synthetic construct
  misc_feature 1..22: note = chemically synthesized
  source 1..22: mol_type = other DNA
aagattgtctagggctgggagg

SEQ ID NO: 5709 - DNA, 22 bp, synthetic construct
  misc_feature 1..22: note = chemically synthesized
  source 1..22: mol_type = other DNA
tctagggctgggaggggaggag

SEQ ID NO: 5710 - DNA, 22 bp, synthetic construct
  misc_feature 1..22: note = chemically synthesized
  source 1..22: mol_type = other DNA
gggctgggaggggaggaggagg

SEQ ID NO: 5711 - DNA, 22 bp, synthetic construct
  misc_feature 1..22: note = chemically synthesized
  source 1..22: mol_type = other DNA
ggaggggaggaggaggagaatg

SEQ ID NO: 5712 - DNA, 22 bp, synthetic construct
  misc_feature 1..22: note = chemically synthesized
  source 1..22: mol_type = other DNA
ggaggcgatgaattaagggtac

SEQ ID NO: 5713 - DNA, 22 bp, synthetic construct
  misc_feature 1..22: note = chemically synthesized
  source 1..22: mol_type = other DNA
agggtactgaattaggggaaca

SEQ ID NO: 5714 - DNA, 22 bp, synthetic construct
  misc_feature 1..22: note = chemically synthesized
  source 1..22: mol_type = other DNA
aattaggggaacatggtttctt

SEQ ID NO: 5715 - DNA, 22 bp, synthetic construct
  misc_feature 1..22: note = chemically synthesized
  source 1..22: mol_type = other DNA
ggggaacatggtttctttttgg

SEQ ID NO: 5716 - DNA, 22 bp, synthetic construct
  misc_feature 1..22: note = chemically synthesized
  source 1..22: mol_type = other DNA
ctttttggggagatagaaatgt

SEQ ID NO: 5717 - DNA, 22 bp, synthetic construct
  misc_feature 1..22: note = chemically synthesized
  source 1..22: mol_type = other DNA
tttttggggagatagaaatgta

SEQ ID NO: 5718 - DNA, 22 bp, synthetic construct
  misc_feature 1..22: note = chemically synthesized
  source 1..22: mol_type = other DNA
tttggggagatagaaatgtaaa

SEQ ID NO: 5719 - DNA, 22 bp, synthetic construct
  misc_feature 1..22: note = chemically synthesized
  source 1..22: mol_type = other DNA
ttggggagatagaaatgtaaaa

SEQ ID NO: 5720 - DNA, 22 bp, synthetic construct
  misc_feature 1..22: note = chemically synthesized
  source 1..22: mol_type = other DNA
tggggagatagaaatgtaaaat

SEQ ID NO: 5721 - DNA, 22 bp, synthetic construct
  misc_feature 1..22: note = chemically synthesized
  source 1..22: mol_type = other DNA
ggggagatagaaatgtaaaatt

SEQ ID NO: 5722 - DNA, 22 bp, synthetic construct
  misc_feature 1..22: note = chemically synthesized
  source 1..22: mol_type = other DNA
gggagatagaaatgtaaaattt

SEQ ID NO: 5723 - DNA, 22 bp, synthetic construct
  misc_feature 1..22: note = chemically synthesized
  source 1..22: mol_type = other DNA
tggtaatggttgcacatctctg

SEQ ID NO: 5724 - DNA, 22 bp, synthetic construct
  misc_feature 1..22: note = chemically synthesized
  source 1..22: mol_type = other DNA
ggtaatggttgcacatctctgt

SEQ ID NO: 5725 - DNA, 22 bp, synthetic construct
  misc_feature 1..22: note = chemically synthesized
  source 1..22: mol_type = other DNA
gtaatggttgcacatctctgta

SEQ ID NO: 5726 - DNA, 22 bp, synthetic construct
  misc_feature 1..22: note = chemically synthesized
  source 1..22: mol_type = other DNA
cacatctctgtaaatatactaa

SEQ ID NO: 5727 - DNA, 22 bp, synthetic construct
  misc_feature 1..22: note = chemically synthesized
  source 1..22: mol_type = other DNA
tgtaaatatactaaaatccatt

SEQ ID NO: 5728 - DNA, 22 bp, synthetic construct
  misc_feature 1..22: note = chemically synthesized
  source 1..22: mol_type = other DNA
taaatatactaaaatccattaa

SEQ ID NO: 5729 - DNA, 22 bp, synthetic construct
  misc_feature 1..22: note = chemically synthesized
  source 1..22: mol_type = other DNA
aaatccattaatttttgcattt

SEQ ID NO: 5730 - DNA, 22 bp, synthetic construct
  misc_feature 1..22: note = chemically synthesized
  source 1..22: mol_type = other DNA
atttttgcattttattttattt

SEQ ID NO: 5731 - DNA, 22 bp, synthetic construct
  misc_feature 1..22: note = chemically synthesized
  source 1..22: mol_type = other DNA
ttgcattttattttatttattt

SEQ ID NO: 5732 - DNA, 22 bp, synthetic construct
  misc_feature 1..22: note = chemically synthesized
  source 1..22: mol_type = other DNA
tgcattttattttatttatttt

SEQ ID NO: 5733 - DNA, 22 bp, synthetic construct
  misc_feature 1..22: note = chemically synthesized
  source 1..22: mol_type = other DNA
gcattttattttatttatttta

SEQ ID NO: 5734 - DNA, 22 bp, synthetic construct
  misc_feature 1..22: note = chemically synthesized
  source 1..22: mol_type = other DNA
cattttattttatttattttat

SEQ ID NO: 5735 - DNA, 22 bp, synthetic construct
  misc_feature 1..22: note = chemically synthesized
  source 1..22: mol_type = other DNA
tattttatttattttatttttg

SEQ ID NO: 5736 - DNA, 22 bp, synthetic construct
  misc_feature 1..22: note = chemically synthesized
  source 1..22: mol_type = other DNA
attttatttattttatttttga

SEQ ID NO: 5737 - DNA, 22 bp, synthetic construct
  misc_feature 1..22: note = chemically synthesized
  source 1..22: mol_type = other DNA
ttttatttattttatttttgag

SEQ ID NO: 5738 - DNA, 22 bp, synthetic construct
  misc_feature 1..22: note = chemically synthesized
  source 1..22: mol_type = other DNA
tatttattttatttttgagacg

SEQ ID NO: 5739 - DNA, 22 bp, synthetic construct
  misc_feature 1..22: note = chemically synthesized
  source 1..22: mol_type = other DNA
atttattttatttttgagacgg

SEQ ID NO: 5740 - DNA, 22 bp, synthetic construct
  misc_feature 1..22: note = chemically synthesized
  source 1..22: mol_type = other DNA
tttattttatttttgagacgga

SEQ ID NO: 5741 - DNA, 22 bp, synthetic construct
  misc_feature 1..22: note = chemically synthesized
  source 1..22: mol_type = other DNA
attttatttttgagacggagtt

SEQ ID NO: 5742 - DNA, 22 bp, synthetic construct
  misc_feature 1..22: note = chemically synthesized
  source 1..22: mol_type = other DNA
ttttatttttgagacggagttt

SEQ ID NO: 5743 - DNA, 22 bp, synthetic construct
  misc_feature 1..22: note = chemically synthesized
  source 1..22: mol_type = other DNA
tatttttgagacggagtttcgc

SEQ ID NO: 5744 - DNA, 22 bp, synthetic construct
  misc_feature 1..22: note = chemically synthesized
  source 1..22: mol_type = other DNA
atttttgagacggagtttcgct

SEQ ID NO: 5745 - DNA, 22 bp, synthetic construct
  misc_feature 1..22: note = chemically synthesized
  source 1..22: mol_type = other DNA
tttttgagacggagtttcgctc

SEQ ID NO: 5746 - DNA, 22 bp, synthetic construct
  misc_feature 1..22: note = chemically synthesized
  source 1..22: mol_type = other DNA
ttgagacggagtttcgctcttg

SEQ ID NO: 5747 - DNA, 22 bp, synthetic construct
  misc_feature 1..22: note = chemically synthesized
  source 1..22: mol_type = other DNA
tgagacggagtttcgctcttgt

SEQ ID NO: 5748 - DNA, 22 bp, synthetic construct
  misc_feature 1..22: note = chemically synthesized
  source 1..22: mol_type = other DNA
gagacggagtttcgctcttgtt

SEQ ID NO: 5749 - DNA, 22 bp, synthetic construct
  misc_feature 1..22: note = chemically synthesized
  source 1..22: mol_type = other DNA
agacggagtttcgctcttgttg

SEQ ID NO: 5750 - DNA, 22 bp, synthetic construct
  misc_feature 1..22: note = chemically synthesized
  source 1..22: mol_type = other DNA
cgctcttgttgcccaggctgga

SEQ ID NO: 5751 - DNA, 22 bp, synthetic construct
  misc_feature 1..22: note = chemically synthesized
  source 1..22: mol_type = other DNA
gctcttgttgcccaggctggag

SEQ ID NO: 5752 - DNA, 22 bp, synthetic construct
  misc_feature 1..22: note = chemically synthesized
  source 1..22: mol_type = other DNA
ttgttgcccaggctggagtgca

SEQ ID NO: 5753 - DNA, 22 bp, synthetic construct
  misc_feature 1..22: note = chemically synthesized
  source 1..22: mol_type = other DNA
gttgcccaggctggagtgcaat

SEQ ID NO: 5754 - DNA, 22 bp, synthetic construct
  misc_feature 1..22: note = chemically synthesized
  source 1..22: mol_type = other DNA
ttgcccaggctggagtgcaatg

SEQ ID NO: 5755 - DNA, 22 bp, synthetic construct
  misc_feature 1..22: note = chemically synthesized
  source 1..22: mol_type = other DNA
cccaggctggagtgcaatggca

SEQ ID NO: 5756 - DNA, 22 bp, synthetic construct
  misc_feature 1..22: note = chemically synthesized
  source 1..22: mol_type = other DNA
gagtgcaatggcatgatctcgg

SEQ ID NO: 5757 - DNA, 22 bp, synthetic construct
  misc_feature 1..22: note = chemically synthesized
  source 1..22: mol_type = other DNA
ggctcaccacaacctccgcctc

SEQ ID NO: 5758 - DNA, 22 bp, synthetic construct
  misc_feature 1..22: note = chemically synthesized
  source 1..22: mol_type = other DNA
accacaacctccgcctcccagg

SEQ ID NO: 5759 - DNA, 22 bp, synthetic construct
  misc_feature 1..22: note = chemically synthesized
  source 1..22: mol_type = other DNA
cgcctcccaggttcaagcgatt

SEQ ID NO: 5760 - DNA, 22 bp, synthetic construct
  misc_feature 1..22: note = chemically synthesized
  source 1..22: mol_type = other DNA
ccaggttcaagcgattctcctg

SEQ ID NO: 5761 - DNA, 22 bp, synthetic construct
  misc_feature 1..22: note = chemically synthesized
  source 1..22: mol_type = other DNA
aagcgattctcctgtctcagct

SEQ ID NO: 5762 - DNA, 22 bp, synthetic construct
  misc_feature 1..22: note = chemically synthesized
  source 1..22: mol_type = other DNA
tcctgtctcagcttcccgagta

SEQ ID NO: 5763 - DNA, 22 bp, synthetic construct
  misc_feature 1..22: note = chemically synthesized
  source 1..22: mol_type = other DNA
ctgtctcagcttcccgagtagc

SEQ ID NO: 5764 - DNA, 22 bp, synthetic construct
  misc_feature 1..22: note = chemically synthesized
  source 1..22: mol_type = other DNA
tctcagcttcccgagtagctgg

SEQ ID NO: 5765 - DNA, 22 bp, synthetic construct
  misc_feature 1..22: note = chemically synthesized
  source 1..22: mol_type = other DNA
agcttcccgagtagctggaatt

SEQ ID NO: 5766 - DNA, 22 bp, synthetic construct
  misc_feature 1..22: note = chemically synthesized
  source 1..22: mol_type = other DNA
cccgagtagctggaattacagg

SEQ ID NO: 5767 - DNA, 22 bp, synthetic construct
  misc_feature 1..22: note = chemically synthesized
  source 1..22: mol_type = other DNA
ccgagtagctggaattacaggt

SEQ ID NO: 5768 - DNA, 22 bp, synthetic construct
  misc_feature 1..22: note = chemically synthesized
  source 1..22: mol_type = other DNA
gaattacaggtgcatgccacca

SEQ ID NO: 5769 - DNA, 22 bp, synthetic construct
  misc_feature 1..22: note = chemically synthesized
  source 1..22: mol_type = other DNA
caggtgcatgccaccacaccca

SEQ ID NO: 5770 - DNA, 22 bp, synthetic construct
  misc_feature 1..22: note = chemically synthesized
  source 1..22: mol_type = other DNA
attttttttttttgagatgaag

SEQ ID NO: 5771 - DNA, 22 bp, synthetic construct
  misc_feature 1..22: note = chemically synthesized
  source 1..22: mol_type = other DNA
tttttttttgagatgaagtctt

SEQ ID NO: 5772 - DNA, 22 bp, synthetic construct
  misc_feature 1..22: note = chemically synthesized
  source 1..22: mol_type = other DNA
ttttttttgagatgaagtcttg

SEQ ID NO: 5773 - DNA, 22 bp, synthetic construct
  misc_feature 1..22: note = chemically synthesized
  source 1..22: mol_type = other DNA
tttttttgagatgaagtcttgc

SEQ ID NO: 5774 - DNA, 22 bp, synthetic construct
  misc_feature 1..22: note = chemically synthesized
  source 1..22: mol_type = other DNA
ttttttgagatgaagtcttgct

SEQ ID NO: 5775 - DNA, 22 bp, synthetic construct
  misc_feature 1..22: note = chemically synthesized
  source 1..22: mol_type = other DNA
tttttgagatgaagtcttgctc

SEQ ID NO: 5776 - DNA, 22 bp, synthetic construct
  misc_feature 1..22: note = chemically synthesized
  source 1..22: mol_type = other DNA
ttttgagatgaagtcttgctct

SEQ ID NO: 5777 - DNA, 22 bp, synthetic construct
  misc_feature 1..22: note = chemically synthesized
  source 1..22: mol_type = other DNA
tttgagatgaagtcttgctctt

SEQ ID NO: 5778 - DNA, 22 bp, synthetic construct
  misc_feature 1..22: note = chemically synthesized
  source 1..22: mol_type = other DNA
ttgagatgaagtcttgctcttg

SEQ ID NO: 5779 - DNA, 22 bp, synthetic construct
  misc_feature 1..22: note = chemically synthesized
  source 1..22: mol_type = other DNA
tgagatgaagtcttgctcttgt

SEQ ID NO: 5780 - DNA, 22 bp, synthetic construct
  misc_feature 1..22: note = chemically synthesized
  source 1..22: mol_type = other DNA
gagatgaagtcttgctcttgtc

SEQ ID NO: 5781 - DNA, 22 bp, synthetic construct
  misc_feature 1..22: note = chemically synthesized
  source 1..22: mol_type = other DNA
agatgaagtcttgctcttgtct

SEQ ID NO: 5782 - DNA, 22 bp, synthetic construct
  misc_feature 1..22: note = chemically synthesized
  source 1..22: mol_type = other DNA
gctcttgtctcccatgctggag

SEQ ID NO: 5783 - DNA, 22 bp, synthetic construct
  misc_feature 1..22: note = chemically synthesized
  source 1..22: mol_type = other DNA
ctcttgtctcccatgctggagt

SEQ ID NO: 5784 - DNA, 22 bp, synthetic construct
  misc_feature 1..22: note = chemically synthesized
  source 1..22: mol_type = other DNA
ttgtctcccatgctggagtgtg

SEQ ID NO: 5785 - DNA, 22 bp, synthetic construct
  misc_feature 1..22: note = chemically synthesized
  source 1..22: mol_type = other DNA
gtctcccatgctggagtgtgat

SEQ ID NO: 5786 - DNA, 22 bp, synthetic construct
  misc_feature 1..22: note = chemically synthesized
  source 1..22: mol_type = other DNA
tctcccatgctggagtgtgatg

SEQ ID NO: 5787 - DNA, 22 bp, synthetic construct
  misc_feature 1..22: note = chemically synthesized
  source 1..22: mol_type = other DNA
ccatgctggagtgtgatggcac

SEQ ID NO: 5788 - DNA, 22 bp, synthetic construct
  misc_feature 1..22: note = chemically synthesized
  source 1..22: mol_type = other DNA
gagtgtgatggcacgatcttag

SEQ ID NO: 5789 - DNA, 22 bp, synthetic construct
  misc_feature 1..22: note = chemically synthesized
  source 1..22: mol_type = other DNA
agctcactgcaacctacgcctc

SEQ ID NO: 5790 - DNA, 22 bp, synthetic construct
  misc_feature 1..22: note = chemically synthesized
  source 1..22: mol_type = other DNA
gctcactgcaacctacgcctcc

SEQ ID NO: 5791 - DNA, 22 bp, synthetic construct
  misc_feature 1..22: note = chemically synthesized
  source 1..22: mol_type = other DNA
actgcaacctacgcctcccggg

SEQ ID NO: 5792 - DNA, 22 bp, synthetic construct
  misc_feature 1..22: note = chemically synthesized
  source 1..22: mol_type = other DNA
caacctacgcctcccgggttca

SEQ ID NO: 5793 - DNA, 22 bp, synthetic construct
  misc_feature 1..22: note = chemically synthesized
  source 1..22: mol_type = other DNA
cgcctcccgggttcaagcgatt

SEQ ID NO: 5794 - DNA, 22 bp, synthetic construct
  misc_feature 1..22: note = chemically synthesized
  source 1..22: mol_type = other DNA
ccgggttcaagcgattctcctg

SEQ ID NO: 5795 - DNA, 22 bp, synthetic construct
  misc_feature 1..22: note = chemically synthesized
  source 1..22: mol_type = other DNA
aagcgattctcctgcctcagcc

SEQ ID NO: 5796 - DNA, 22 bp, synthetic construct
  misc_feature 1..22: note = chemically synthesized
  source 1..22: mol_type = other DNA
tcctgcctcagcctctaatgta

SEQ ID NO: 5797 - DNA, 22 bp, synthetic construct
  misc_feature 1..22: note = chemically synthesized
  source 1..22: mol_type = other DNA
ctgcctcagcctctaatgtagc

SEQ ID NO: 5798 - DNA, 22 bp, synthetic construct
  misc_feature 1..22: note = chemically synthesized
  source 1..22: mol_type = other DNA
cctcagcctctaatgtagctgg

SEQ ID NO: 5799 - DNA, 22 bp, synthetic construct
  misc_feature 1..22: note = chemically synthesized
  source 1..22: mol_type = other DNA
agcctctaatgtagctgggatt

SEQ ID NO: 5800 - DNA, 22 bp, synthetic construct
  misc_feature 1..22: note = chemically synthesized
  source 1..22: mol_type = other DNA
taatgtagctgggattacagtt

SEQ ID NO: 5801 - DNA, 22 bp, synthetic construct
  misc_feature 1..22: note = chemically synthesized
  source 1..22: mol_type = other DNA
atgtagctgggattacagttgc

SEQ ID NO: 5802 - DNA, 22 bp, synthetic construct
  misc_feature 1..22: note = chemically synthesized
  source 1..22: mol_type = other DNA
ggattacagttgcctgctatca

SEQ ID NO: 5803 - DNA, 22 bp, synthetic construct
  misc_feature 1..22: note = chemically synthesized
  source 1..22: mol_type = other DNA
cagttgcctgctatcacgcccg

SEQ ID NO: 5804 - DNA, 22 bp, synthetic construct
  misc_feature 1..22: note = chemically synthesized
  source 1..22: mol_type = other DNA
cctgctatcacgcccggctaat

SEQ ID NO: 5805 - DNA, 22 bp, synthetic construct
  misc_feature 1..22: note = chemically synthesized
  source 1..22: mol_type = other DNA
ctatcacgcccggctaattttt

SEQ ID NO: 5806 - DNA, 22 bp, synthetic construct
  misc_feature 1..22: note = chemically synthesized
  source 1..22: mol_type = other DNA
tcacgcccggctaatttttgta

SEQ ID NO: 5807 - DNA, 22 bp, synthetic construct
  misc_feature 1..22: note = chemically synthesized
  source 1..22: mol_type = other DNA
atttttgtatttttagtaaaga

SEQ ID NO: 5808 - DNA, 22 bp, synthetic construct
  misc_feature 1..22: note = chemically synthesized
  source 1..22: mol_type = other DNA
ttgtatttttagtaaagacggg

SEQ ID NO: 5809 - DNA, 22 bp, synthetic construct
  misc_feature 1..22: note = chemically synthesized
  source 1..22: mol_type = other DNA
tgtatttttagtaaagacgggg

SEQ ID NO: 5810 - DNA, 22 bp, synthetic construct
  misc_feature 1..22: note = chemically synthesized
  source 1..22: mol_type = other DNA
gtatttttagtaaagacggggt

SEQ ID NO: 5811 - DNA, 22 bp, synthetic construct
  misc_feature 1..22: note = chemically synthesized
  source 1..22: mol_type = other DNA
tatttttagtaaagacggggtt

SEQ ID NO: 5812 - DNA, 22 bp, synthetic construct
  misc_feature 1..22: note = chemically synthesized
  source 1..22: mol_type = other DNA
ttagtaaagacggggtttcacc

SEQ ID NO: 5813 - DNA, 22 bp, synthetic construct
  misc_feature 1..22: note = chemically synthesized
  source 1..22: mol_type = other DNA
tagtaaagacggggtttcacca

SEQ ID NO: 5814 - DNA, 22 bp, synthetic construct
  misc_feature 1..22: note = chemically synthesized
  source 1..22: mol_type = other DNA
agtaaagacggggtttcaccat

SEQ ID NO: 5815 - DNA, 22 bp, synthetic construct
  misc_feature 1..22: note = chemically synthesized
  source 1..22: mol_type = other DNA
gtaaagacggggtttcaccatg

SEQ ID NO: 5816 - DNA, 22 bp, synthetic construct
  misc_feature 1..22: note = chemically synthesized
  source 1..22: mol_type = other DNA
caccatgttggccaggctggtc

SEQ ID NO: 5817 - DNA, 22 bp, synthetic construct
  misc_feature 1..22: note = chemically synthesized
  source 1..22: mol_type = other DNA
accatgttggccaggctggtct

SEQ ID NO: 5818 - DNA, 22 bp, synthetic construct
  misc_feature 1..22: note = chemically synthesized
  source 1..22: mol_type = other DNA
gccaggctggtctcgaacccct

SEQ ID NO: 5819 - DNA, 22 bp, synthetic construct
  misc_feature 1..22: note = chemically synthesized
  source 1..22: mol_type = other DNA
gtctcgaacccctgatctcagg

SEQ ID NO: 5820 - DNA, 22 bp, synthetic construct
  misc_feature 1..22: note = chemically synthesized
  source 1..22: mol_type = other DNA
gaacccctgatctcaggtgatc

SEQ ID NO: 5821 - DNA, 22 bp, synthetic construct
  misc_feature 1..22: note = chemically synthesized
  source 1..22: mol_type = other DNA
atctcaggtgatctgccttcct

SEQ ID NO: 5822 - DNA, 22 bp, synthetic construct
  misc_feature 1..22: note = chemically synthesized
  source 1..22: mol_type = other DNA
aggtgatctgccttcctcggcc

SEQ ID NO: 5823 - DNA, 22 bp, synthetic construct
  misc_feature 1..22: note = chemically synthesized
  source 1..22: mol_type = other DNA
ccttcctcggccgcccaaagtg

SEQ ID NO: 5824 - DNA, 22 bp, synthetic construct
  misc_feature 1..22: note = chemically synthesized
  source 1..22: mol_type = other DNA
cctcggccgcccaaagtgctgg

SEQ ID NO: 5825 - DNA, 22 bp, synthetic construct
  misc_feature 1..22: note = chemically synthesized
  source 1..22: mol_type = other DNA
ctcggccgcccaaagtgctggg

SEQ ID NO: 5826 - DNA, 22 bp, synthetic construct
  misc_feature 1..22: note = chemically synthesized
  source 1..22: mol_type = other DNA
ggccgcccaaagtgctgggatt

SEQ ID NO: 5827 - DNA, 22 bp, synthetic construct
  misc_feature 1..22: note = chemically synthesized
  source 1..22: mol_type = other DNA
ggattacaagcgtgagccactg

SEQ ID NO: 5828 - DNA, 22 bp, synthetic construct
  misc_feature 1..22: note = chemically synthesized
  source 1..22: mol_type = other DNA
caagcgtgagccactgagccgg

SEQ ID NO: 5829 - DNA, 22 bp, synthetic construct
  misc_feature 1..22: note = chemically synthesized
  source 1..22: mol_type = other DNA
agccgggccaatttttgcattt

SEQ ID NO: 5830 - DNA, 22 bp, synthetic construct
  misc_feature 1..22: note = chemically synthesized
  source 1..22: mol_type = other DNA
ttgcattttacatagatgaatt

SEQ ID NO: 5831 - DNA, 22 bp, synthetic construct
  misc_feature 1..22: note = chemically synthesized
  source 1..22: mol_type = other DNA
tgcattttacatagatgaatta

SEQ ID NO: 5832 - DNA, 22 bp, synthetic construct
  misc_feature 1..22: note = chemically synthesized
  source 1..22: mol_type = other DNA
gcattttacatagatgaattat

SEQ ID NO: 5833 - DNA, 22 bp, synthetic construct
  misc_feature 1..22: note = chemically synthesized
  source 1..22: mol_type = other DNA
cattttacatagatgaattata

SEQ ID NO: 5834 - DNA, 22 bp, synthetic construct
  misc_feature 1..22: note = chemically synthesized
  source 1..22: mol_type = other DNA
tacatagatgaattatatggta

SEQ ID NO: 5835 - DNA, 22 bp, synthetic construct
  misc_feature 1..22: note = chemically synthesized
  source 1..22: mol_type = other DNA
acatagatgaattatatggtat

SEQ ID NO: 5836 - DNA, 22 bp, synthetic construct
  misc_feature 1..22: note = chemically synthesized
  source 1..22: mol_type = other DNA
catagatgaattatatggtatg

SEQ ID NO: 5837 - DNA, 22 bp, synthetic construct
  misc_feature 1..22: note = chemically synthesized
  source 1..22: mol_type = other DNA
tatggtatgctaattatatctt

SEQ ID NO: 5838 - DNA, 22 bp, synthetic construct
  misc_feature 1..22: note = chemically synthesized
  source 1..22: mol_type = other DNA
attatatcttaccaaaaattga

SEQ ID NO: 5839 - DNA, 22 bp, synthetic construct
  misc_feature 1..22: note = chemically synthesized
  source 1..22: mol_type = other DNA
tatcttaccaaaaattgaaaaa

SEQ ID NO: 5840 - DNA, 22 bp, synthetic construct
  misc_feature 1..22: note = chemically synthesized
  source 1..22: mol_type = other DNA
accaaaaattgaaaaaaaggaa

SEQ ID NO: 5841 - DNA, 22 bp, synthetic construct
  misc_feature 1..22: note = chemically synthesized
  source 1..22: mol_type = other DNA
ccaaaaattgaaaaaaaggaat

SEQ ID NO: 5842 - DNA, 22 bp, synthetic construct
  misc_feature 1..22: note = chemically synthesized
  source 1..22: mol_type = other DNA
aaaaaaaggaatagtactatca

SEQ ID NO: 5843 - DNA, 22 bp, synthetic construct
  misc_feature 1..22: note = chemically synthesized
  source 1..22: mol_type = other DNA
tcagccccaatgtgcccatcat

SEQ ID NO: 5844 - DNA, 22 bp, synthetic construct
  misc_feature 1..22: note = chemically synthesized
  source 1..22: mol_type = other DNA
tacatgtttccaatgttattgt

SEQ ID NO: 5845 - DNA, 22 bp, synthetic construct
  misc_feature 1..22: note = chemically synthesized
  source 1..22: mol_type = other DNA
catgtttccaatgttattgtat

SEQ ID NO: 5846 - DNA, 22 bp, synthetic construct
  misc_feature 1..22: note = chemically synthesized
  source 1..22: mol_type = other DNA
ccaatgttattgtatctgtttg

SEQ ID NO: 5847 - DNA, 22 bp, synthetic construct
  misc_feature 1..22: note = chemically synthesized
  source 1..22: mol_type = other DNA
caatgttattgtatctgtttgc

SEQ ID NO: 5848 - DNA, 22 bp, synthetic construct
  misc_feature 1..22: note = chemically synthesized
  source 1..22: mol_type = other DNA
ttgtatctgtttgcctacagtc

SEQ ID NO: 5849 - DNA, 22 bp, synthetic construct
  misc_feature 1..22: note = chemically synthesized
  source 1..22: mol_type = other DNA
tatctgtttgcctacagtcgag

SEQ ID NO: 5850 - DNA, 22 bp, synthetic construct
  misc_feature 1..22: note = chemically synthesized
  source 1..22: mol_type = other DNA
tttgcctacagtcgaggccctg

SEQ ID NO: 5851 - DNA, 22 bp, synthetic construct
  misc_feature 1..22: note = chemically synthesized
  source 1..22: mol_type = other DNA
gcctacagtcgaggccctgata

SEQ ID NO: 5852 - DNA, 22 bp, synthetic construct
  misc_feature 1..22: note = chemically synthesized
  source 1..22: mol_type = other DNA
cctacagtcgaggccctgatat

SEQ ID NO: 5853 - DNA, 22 bp, synthetic construct
  misc_feature 1..22: note = chemically synthesized
  source 1..22: mol_type = other DNA
cagtcgaggccctgatatcctg

SEQ ID NO: 5854 - DNA, 22 bp, synthetic construct
  misc_feature 1..22: note = chemically synthesized
  source 1..22: mol_type = other DNA
atatcctgtttgattttcttga

SEQ ID NO: 5855 - DNA, 22 bp, synthetic construct
  misc_feature 1..22: note = chemically synthesized
  source 1..22: mol_type = other DNA
tttgattttcttgaattgccaa

SEQ ID NO: 5856 - DNA, 22 bp, synthetic construct
  misc_feature 1..22: note = chemically synthesized
  source 1..22: mol_type = other DNA
gattttcttgaattgccaaaat

SEQ ID NO: 5857 - DNA, 22 bp, synthetic construct
  misc_feature 1..22: note = chemically synthesized
  source 1..22: mol_type = other DNA
attttcttgaattgccaaaatt

SEQ ID NO: 5858 - DNA, 22 bp, synthetic construct
  misc_feature 1..22: note = chemically synthesized
  source 1..22: mol_type = other DNA
tcttgaattgccaaaatttgca

SEQ ID NO: 5859 - DNA, 22 bp, synthetic construct
  misc_feature 1..22: note = chemically synthesized
  source 1..22: mol_type = other DNA
cttgaattgccaaaatttgcat

SEQ ID NO: 5860 - DNA, 22 bp, synthetic construct
  misc_feature 1..22: note = chemically synthesized
  source 1..22: mol_type = other DNA
ttgaattgccaaaatttgcata

SEQ ID NO: 5861 - DNA, 22 bp, synthetic construct
  misc_feature 1..22: note = chemically synthesized
  source 1..22: mol_type = other DNA
gaattgccaaaatttgcataca

SEQ ID NO: 5862 - DNA, 22 bp, synthetic construct
  misc_feature 1..22: note = chemically synthesized
  source 1..22: mol_type = other DNA
aattgccaaaatttgcatacat

SEQ ID NO: 5863 - DNA, 22 bp, synthetic construct
  misc_feature 1..22: note = chemically synthesized
  source 1..22: mol_type = other DNA
ccaaaatttgcatacatgctta

SEQ ID NO: 5864 - DNA, 22 bp, synthetic construct
  misc_feature 1..22: note = chemically synthesized
  source 1..22: mol_type = other DNA
gcatacatgcttacaaaaataa

SEQ ID NO: 5865 - DNA, 22 bp, synthetic construct
  misc_feature 1..22: note = chemically synthesized
  source 1..22: mol_type = other DNA
catacatgcttacaaaaataat

SEQ ID NO: 5866 - DNA, 22 bp, synthetic construct
  misc_feature 1..22: note = chemically synthesized
  source 1..22: mol_type = other DNA
acaaaaataatgcctgttgaat

SEQ ID NO: 5867 - DNA, 22 bp, synthetic construct
  misc_feature 1..22: note = chemically synthesized
  source 1..22: mol_type = other DNA
caaaaataatgcctgttgaatt

SEQ ID NO: 5868 - DNA, 22 bp, synthetic construct
  misc_feature 1..22: note = chemically synthesized
  source 1..22: mol_type = other DNA
ttgaatttgctagatatgtaaa

SEQ ID NO: 5869 - DNA, 22 bp, synthetic construct
  misc_feature 1..22: note = chemically synthesized
  source 1..22: mol_type = other DNA
aatttgctagatatgtaaaggt

SEQ ID NO: 5870 - DNA, 22 bp, synthetic construct
  misc_feature 1..22: note = chemically synthesized
  source 1..22: mol_type = other DNA
gctagatatgtaaaggtttgga

SEQ ID NO: 5871 - DNA, 22 bp, synthetic construct
  misc_feature 1..22: note = chemically synthesized
  source 1..22: mol_type = other DNA
ctagatatgtaaaggtttggag

SEQ ID NO: 5872 - DNA, 22 bp, synthetic construct
  misc_feature 1..22: note = chemically synthesized
  source 1..22: mol_type = other DNA
gatatgtaaaggtttggagcaa

SEQ ID NO: 5873 - DNA, 22 bp, synthetic construct
  misc_feature 1..22: note = chemically synthesized
  source 1..22: mol_type = other DNA
ggagcaaatcaggtgtattaaa

SEQ ID NO: 5874 - DNA, 22 bp, synthetic construct
  misc_feature 1..22: note = chemically synthesized
  source 1..22: mol_type = other DNA
gagcaaatcaggtgtattaaat

SEQ ID NO: 5875 - DNA, 22 bp, synthetic construct
  misc_feature 1..22: note = chemically synthesized
  source 1..22: mol_type = other DNA
aatttattaatattgtttgaaa

SEQ ID NO: 5876 - DNA, 22 bp, synthetic construct
  misc_feature 1..22: note = chemically synthesized
  source 1..22: mol_type = other DNA
attaatattgtttgaaatgtct

SEQ ID NO: 5877 - DNA, 22 bp, synthetic construct
  misc_feature 1..22: note = chemically synthesized
  source 1..22: mol_type = other DNA
ttaatattgtttgaaatgtcta

SEQ ID NO: 5878 - DNA, 22 bp, synthetic construct
  misc_feature 1..22: note = chemically synthesized
  source 1..22: mol_type = other DNA
atattgtttgaaatgtctaagg

SEQ ID NO: 5879 - DNA, 22 bp, synthetic construct
  misc_feature 1..22: note = chemically synthesized
  source 1..22: mol_type = other DNA
tttgaaatgtctaaggcaataa

SEQ ID NO: 5880 - DNA, 22 bp, synthetic construct
  misc_feature 1..22: note = chemically synthesized
  source 1..22: mol_type = other DNA
gaaatgtctaaggcaataattc

SEQ ID NO: 5881 - DNA, 22 bp, synthetic construct
  misc_feature 1..22: note = chemically synthesized
  source 1..22: mol_type = other DNA
aaatgtctaaggcaataattcc

SEQ ID NO: 5882 - DNA, 22 bp, synthetic construct
  misc_feature 1..22: note = chemically synthesized
  source 1..22: mol_type = other DNA
aggcaataattcccaaacttcg

SEQ ID NO: 5883 - DNA, 22 bp, synthetic construct
  misc_feature 1..22: note = chemically synthesized
  source 1..22: mol_type = other DNA
ccaaacttcgttgagggagaag

SEQ ID NO: 5884 - DNA, 22 bp, synthetic construct
  misc_feature 1..22: note = chemically synthesized
  source 1..22: mol_type = other DNA
cgttgagggagaaggaaagctt

SEQ ID NO: 5885 - DNA, 22 bp, synthetic construct
  misc_feature 1..22: note = chemically synthesized
  source 1..22: mol_type = other DNA
gttgagggagaaggaaagcttt

SEQ ID NO: 5886 - DNA, 22 bp, synthetic construct
  misc_feature 1..22: note = chemically synthesized
  source 1..22: mol_type = other DNA
agggagaaggaaagcttttaaa

SEQ ID NO: 5887 - DNA, 22 bp, synthetic construct
  misc_feature 1..22: note = chemically synthesized
  source 1..22: mol_type = other DNA
ttaaaatcccattgcccaggtg

SEQ ID NO: 5888 - DNA, 22 bp, synthetic construct
  misc_feature 1..22: note = chemically synthesized
  source 1..22: mol_type = other DNA
taaaatcccattgcccaggtgg

SEQ ID NO: 5889 - DNA, 22 bp, synthetic construct
  misc_feature 1..22: note = chemically synthesized
  source 1..22: mol_type = other DNA
aaaatcccattgcccaggtggc

SEQ ID NO: 5890 - DNA, 22 bp, synthetic construct
  misc_feature 1..22: note = chemically synthesized
  source 1..22: mol_type = other DNA
aaatcccattgcccaggtggca

SEQ ID NO: 5891 - DNA, 22 bp, synthetic construct
  misc_feature 1..22: note = chemically synthesized
  source 1..22: mol_type = other DNA
cccaggtggcatcccatactgt

SEQ ID NO: 5892 - DNA, 22 bp, synthetic construct
  misc_feature 1..22: note = chemically synthesized
  source 1..22: mol_type = other DNA
ttactgggaattatgcattggg

SEQ ID NO: 5893 - DNA, 22 bp, synthetic construct
  misc_feature 1..22: note = chemically synthesized
  source 1..22: mol_type = other DNA
ctgggaattatgcattgggatg

SEQ ID NO: 5894 - DNA, 22 bp, synthetic construct
  misc_feature 1..22: note = chemically synthesized
  source 1..22: mol_type = other DNA
ggaattatgcattgggatggat

SEQ ID NO: 5895 - DNA, 22 bp, synthetic construct
  misc_feature 1..22: note = chemically synthesized
  source 1..22: mol_type = other DNA
tgcattgggatggatcctttaa

SEQ ID NO: 5896 - DNA, 22 bp, synthetic construct
  misc_feature 1..22: note = chemically synthesized
  source 1..22: mol_type = other DNA
ggatggatcctttaaccgagga

SEQ ID NO: 5897 - DNA, 22 bp, synthetic construct
  misc_feature 1..22: note = chemically synthesized
  source 1..22: mol_type = other DNA
taaccgaggagattattatagc

SEQ ID NO: 5898 - DNA, 22 bp, synthetic construct
  misc_feature 1..22: note = chemically synthesized
  source 1..22: mol_type = other DNA
aaccgaggagattattatagcc

SEQ ID NO: 5899 - DNA, 22 bp, synthetic construct
  misc_feature 1..22: note = chemically synthesized
  source 1..22: mol_type = other DNA
accgaggagattattatagccg

SEQ ID NO: 5900 - DNA, 22 bp, synthetic construct
  misc_feature 1..22: note = chemically synthesized
  source 1..22: mol_type = other DNA
ttatagccggagctctgaacca

SEQ ID NO: 5901 - DNA, 22 bp, synthetic construct
  misc_feature 1..22: note = chemically synthesized
  source 1..22: mol_type = other DNA
tagccggagctctgaaccagca

SEQ ID NO: 5902 - DNA, 22 bp, synthetic construct
  misc_feature 1..22: note = chemically synthesized
  source 1..22: mol_type = other DNA
tgaaccagcaatctcagttctt

SEQ ID NO: 5903 - DNA, 22 bp, synthetic construct
  misc_feature 1..22: note = chemically synthesized
  source 1..22: mol_type = other DNA
aaccagcaatctcagttcttgt

SEQ ID NO: 5904 - DNA, 22 bp, synthetic construct
  misc_feature 1..22: note = chemically synthesized
  source 1..22: mol_type = other DNA
agttcttgtgatagtgagcaaa

SEQ ID NO: 5905 - DNA, 22 bp, synthetic construct
  misc_feature 1..22: note = chemically synthesized
  source 1..22: mol_type = other DNA
ttgtgatagtgagcaaagaact

SEQ ID NO: 5906 - DNA, 22 bp, synthetic construct
  misc_feature 1..22: note = chemically synthesized
  source 1..22: mol_type = other DNA
gtgatagtgagcaaagaactac

SEQ ID NO: 5907 - DNA, 22 bp, synthetic construct
  misc_feature 1..22: note = chemically synthesized
  source 1..22: mol_type = other DNA
tgatagtgagcaaagaactaca

SEQ ID NO: 5908 - DNA, 22 bp, synthetic construct
  misc_feature 1..22: note = chemically synthesized
  source 1..22: mol_type = other DNA
caaactaacaccaaaatgcaag

SEQ ID NO: 5909 - DNA, 22 bp, synthetic construct
  misc_feature 1..22: note = chemically synthesized
  source 1..22: mol_type = other DNA
acaccaaaatgcaagcttaaag

SEQ ID NO: 5910 - DNA, 22 bp, synthetic construct
  misc_feature 1..22: note = chemically synthesized
  source 1..22: mol_type = other DNA
aaagcaaagtttattgaagcac

SEQ ID NO: 5911 - DNA, 22 bp, synthetic construct
  misc_feature 1..22: note = chemically synthesized
  source 1..22: mol_type = other DNA
aagcaaagtttattgaagcaca

SEQ ID NO: 5912 - DNA, 22 bp, synthetic construct
  misc_feature 1..22: note = chemically synthesized
  source 1..22: mol_type = other DNA
attgaagcacaataatacactc

SEQ ID NO: 5913 - DNA, 22 bp, synthetic construct
  misc_feature 1..22: note = chemically synthesized
  source 1..22: mol_type = other DNA
ttgaagcacaataatacactct

SEQ ID NO: 5914 - DNA, 22 bp, synthetic construct
  misc_feature 1..22: note = chemically synthesized
  source 1..22: mol_type = other DNA
aagcacaataatacactctgag

SEQ ID NO: 5915 - DNA, 22 bp, synthetic construct
  misc_feature 1..22: note = chemically synthesized
  source 1..22: mol_type = other DNA
tgagggacagcgggcttatttc

SEQ ID NO: 5916 - DNA, 22 bp, synthetic construct
  misc_feature 1..22: note = chemically synthesized
  source 1..22: mol_type = other DNA
agggacagcgggcttatttctg

SEQ ID NO: 5917 - DNA, 22 bp, synthetic construct
  misc_feature 1..22: note = chemically synthesized
  source 1..22: mol_type = other DNA
atttctgcgaagtgaactcagc

SEQ ID NO: 5918 - DNA, 22 bp, synthetic construct
  misc_feature 1..22: note = chemically synthesized
  source 1..22: mol_type = other DNA
tttctgcgaagtgaactcagca

SEQ ID NO: 5919 - DNA, 22 bp, synthetic construct
  misc_feature 1..22: note = chemically synthesized
  source 1..22: mol_type = other DNA
ctgcgaagtgaactcagcactt

SEQ ID NO: 5920 - DNA, 22 bp, synthetic construct
  misc_feature 1..22: note = chemically synthesized
  source 1..22: mol_type = other DNA
tgcgaagtgaactcagcacttc

SEQ ID NO: 5921 - DNA, 22 bp, synthetic construct
  misc_feature 1..22: note = chemically synthesized
  source 1..22: mol_type = other DNA
cgaagtgaactcagcacttctt

SEQ ID NO: 5922 - DNA, 22 bp, synthetic construct
  misc_feature 1..22: note = chemically synthesized
  source 1..22: mol_type = other DNA
agcacttctttacagagctcaa

SEQ ID NO: 5923 - DNA, 22 bp, synthetic construct
  misc_feature 1..22: note = chemically synthesized
  source 1..22: mol_type = other DNA
ctttacagagctcaaggtgctt

SEQ ID NO: 5924 - DNA, 22 bp, synthetic construct
  misc_feature 1..22: note = chemically synthesized
  source 1..22: mol_type = other DNA
tttacagagctcaaggtgcttt

SEQ ID NO: 5925 - DNA, 22 bp, synthetic construct
  misc_feature 1..22: note = chemically synthesized
  source 1..22: mol_type = other DNA
tacagagctcaaggtgctttta

SEQ ID NO: 5926 - DNA, 22 bp, synthetic construct
  misc_feature 1..22: note = chemically synthesized
  source 1..22: mol_type = other DNA
acagagctcaaggtgcttttat

SEQ ID NO: 5927 - DNA, 22 bp, synthetic construct
  misc_feature 1..22: note = chemically synthesized
  source 1..22: mol_type = other DNA
cagagctcaaggtgcttttatg

SEQ ID NO: 5928 - DNA, 22 bp, synthetic construct
  misc_feature 1..22: note = chemically synthesized
  source 1..22: mol_type = other DNA
aaggtgcttttatggggtttgt

SEQ ID NO: 5929 - DNA, 22 bp, synthetic construct
  misc_feature 1..22: note = chemically synthesized
  source 1..22: mol_type = other DNA
ttatggggtttgtggggaggag

SEQ ID NO: 5930 - DNA, 22 bp, synthetic construct
  misc_feature 1..22: note = chemically synthesized
  source 1..22: mol_type = other DNA
tatggggtttgtggggaggagt

SEQ ID NO: 5931 - DNA, 22 bp, synthetic construct
  misc_feature 1..22: note = chemically synthesized
  source 1..22: mol_type = other DNA
atggggtttgtggggaggagtt

SEQ ID NO: 5932 - DNA, 22 bp, synthetic construct
  misc_feature 1..22: note = chemically synthesized
  source 1..22: mol_type = other DNA
tggggtttgtggggaggagttg

SEQ ID NO: 5933 - DNA, 22 bp, synthetic construct
  misc_feature 1..22: note = chemically synthesized
  source 1..22: mol_type = other DNA
gtggggaggagttgaggtttgg

SEQ ID NO: 5934 - DNA, 22 bp, synthetic construct
  misc_feature 1..22: note = chemically synthesized
  source 1..22: mol_type = other DNA
tggggaggagttgaggtttggg

SEQ ID NO: 5935 - DNA, 22 bp, synthetic construct
  misc_feature 1..22: note = chemically synthesized
  source 1..22: mol_type = other DNA
aggtttgggctgtatctgagtg

SEQ ID NO: 5936 - DNA, 22 bp, synthetic construct
  misc_feature 1..22: note = chemically synthesized
  source 1..22: mol_type = other DNA
gggctgtatctgagtgacagga

SEQ ID NO: 5937 - DNA, 22 bp, synthetic construct
  misc_feature 1..22: note = chemically synthesized
  source 1..22: mol_type = other DNA
ggctgtatctgagtgacaggat

SEQ ID NO: 5938 - DNA, 22 bp, synthetic construct
  misc_feature 1..22: note = chemically synthesized
  source 1..22: mol_type = other DNA
tatctgagtgacaggatgatgt

SEQ ID NO: 5939 - DNA, 22 bp, synthetic construct
  misc_feature 1..22: note = chemically synthesized
  source 1..22: mol_type = other DNA
agtgacaggatgatgttatttg

SEQ ID NO: 5940 - DNA, 22 bp, synthetic construct
  misc_feature 1..22: note = chemically synthesized
  source 1..22: mol_type = other DNA
tttgattgaagtgtatagctat

SEQ ID NO: 5941 - DNA, 22 bp, synthetic construct
  misc_feature 1..22: note = chemically synthesized
  source 1..22: mol_type = other DNA
gattgaagtgtatagctataca

SEQ ID NO: 5942 - DNA, 22 bp, synthetic construct
  misc_feature 1..22: note = chemically synthesized
  source 1..22: mol_type = other DNA
attgaagtgtatagctatacaa

SEQ ID NO: 5943 - DNA, 22 bp, synthetic construct
  misc_feature 1..22: note = chemically synthesized
  source 1..22: mol_type = other DNA
aagtgtatagctatacaatcta

SEQ ID NO: 5944 - DNA, 22 bp, synthetic construct
  misc_feature 1..22: note = chemically synthesized
  source 1..22: mol_type = other DNA
tacaatctaaaattaaactgtg

SEQ ID NO: 5945 - DNA, 22 bp, synthetic construct
  misc_feature 1..22: note = chemically synthesized
  source 1..22: mol_type = other DNA
aaattaaactgtgcatggtctt

SEQ ID NO: 5946 - DNA, 22 bp, synthetic construct
  misc_feature 1..22: note = chemically synthesized
  source 1..22: mol_type = other DNA
aactgtgcatggtcttacctat

SEQ ID NO: 5947 - DNA, 22 bp, synthetic construct
  misc_feature 1..22: note = chemically synthesized
  source 1..22: mol_type = other DNA
tgcatggtcttacctataattt

SEQ ID NO: 5948 - DNA, 22 bp, synthetic construct
  misc_feature 1..22: note = chemically synthesized
  source 1..22: mol_type = other DNA
acctataatttgttaagaaaag

SEQ ID NO: 5949 - DNA, 22 bp, synthetic construct
  misc_feature 1..22: note = chemically synthesized
  source 1..22: mol_type = other DNA
cctataatttgttaagaaaagc

SEQ ID NO: 5950 - DNA, 22 bp, synthetic construct
  misc_feature 1..22: note = chemically synthesized
  source 1..22: mol_type = other DNA
taatttgttaagaaaagcctcc

SEQ ID NO: 5951 - DNA, 22 bp, synthetic construct
  misc_feature 1..22: note = chemically synthesized
  source 1..22: mol_type = other DNA
gttaagaaaagcctcccaggga

SEQ ID NO: 5952 - DNA, 22 bp, synthetic construct
  misc_feature 1..22: note = chemically synthesized
  source 1..22: mol_type = other DNA
ttaagaaaagcctcccagggat

SEQ ID NO: 5953 - DNA, 22 bp, synthetic construct
  misc_feature 1..22: note = chemically synthesized
  source 1..22: mol_type = other DNA
agaaaagcctcccagggatggg

SEQ ID NO: 5954 - DNA, 22 bp, synthetic construct
  misc_feature 1..22: note = chemically synthesized
  source 1..22: mol_type = other DNA
ccagggatgggggggcaaaact

SEQ ID NO: 5955 - DNA, 22 bp, synthetic construct
  misc_feature 1..22: note = chemically synthesized
  source 1..22: mol_type = other DNA
tatgtaaattctattataatga

SEQ ID NO: 5956 - DNA, 22 bp, synthetic construct
  misc_feature 1..22: note = chemically synthesized
  source 1..22: mol_type = other DNA
tattataatgatggcatgatga

SEQ ID NO: 5957 - DNA, 22 bp, synthetic construct
  misc_feature 1..22: note = chemically synthesized
  source 1..22: mol_type = other DNA
ttataatgatggcatgatgaac

SEQ ID NO: 5958 - DNA, 22 bp, synthetic construct
  misc_feature 1..22: note = chemically synthesized
  source 1..22: mol_type = other DNA
taatgatggcatgatgaacttg

SEQ ID NO: 5959 - DNA, 22 bp, synthetic construct
  misc_feature 1..22: note = chemically synthesized
  source 1..22: mol_type = other DNA
ggggtgaacttgaagacaggct

SEQ ID NO: 5960 - DNA, 22 bp, synthetic construct
  misc_feature 1..22: note = chemically synthesized
  source 1..22: mol_type = other DNA
gggtgaacttgaagacaggctt

SEQ ID NO: 5961 - DNA, 22 bp, synthetic construct
  misc_feature 1..22: note = chemically synthesized
  source 1..22: mol_type = other DNA
gaagacaggcttttgtgttgtt

SEQ ID NO: 5962 - DNA, 22 bp, synthetic construct
  misc_feature 1..22: note = chemically synthesized
  source 1..22: mol_type = other DNA
aagacaggcttttgtgttgttg

SEQ ID NO: 5963 - DNA, 22 bp, synthetic construct
  misc_feature 1..22: note = chemically synthesized
  source 1..22: mol_type = other DNA
ttgtgttgttgggcatgtgcca

SEQ ID NO: 5964 - DNA, 22 bp, synthetic construct
  misc_feature 1..22: note = chemically synthesized
  source 1..22: mol_type = other DNA
tgtgttgttgggcatgtgccac

SEQ ID NO: 5965 - DNA, 22 bp, synthetic construct
  misc_feature 1..22: note = chemically synthesized
  source 1..22: mol_type = other DNA
gtgttgttgggcatgtgccacc

SEQ ID NO: 5966 - DNA, 22 bp, synthetic construct
  misc_feature 1..22: note = chemically synthesized
  source 1..22: mol_type = other DNA
tgttgttgggcatgtgccacct

SEQ ID NO: 5967 - DNA, 22 bp, synthetic construct
  misc_feature 1..22: note = chemically synthesized
  source 1..22: mol_type = other DNA
ttgggcatgtgccaccttaggg

SEQ ID NO: 5968 - DNA, 22 bp, synthetic construct
  misc_feature 1..22: note = chemically synthesized
  source 1..22: mol_type = other DNA
ggcatgtgccaccttagggaat

SEQ ID NO: 5969 - DNA, 22 bp, synthetic construct
  misc_feature 1..22: note = chemically synthesized
  source 1..22: mol_type = other DNA
agggaatttccacctgtaccct

SEQ ID NO: 5970 - DNA, 22 bp, synthetic construct
  misc_feature 1..22: note = chemically synthesized
  source 1..22: mol_type = other DNA
gggaatttccacctgtaccctc

SEQ ID NO: 5971 - DNA, 22 bp, synthetic construct
  misc_feature 1..22: note = chemically synthesized
  source 1..22: mol_type = other DNA
ccacctgtaccctcctttctct

SEQ ID NO: 5972 - DNA, 22 bp, synthetic construct
  misc_feature 1..22: note = chemically synthesized
  source 1..22: mol_type = other DNA
cacctgtaccctcctttctctt

SEQ ID NO: 5973 - DNA, 22 bp, synthetic construct
  misc_feature 1..22: note = chemically synthesized
  source 1..22: mol_type = other DNA
taccctcctttctctttctcca

SEQ ID NO: 5974 - DNA, 22 bp, synthetic construct
  misc_feature 1..22: note = chemically synthesized
  source 1..22: mol_type = other DNA
ctttctctttctccaggatatt

SEQ ID NO: 5975 - DNA, 22 bp, synthetic construct
  misc_feature 1..22: note = chemically synthesized
  source 1..22: mol_type = other DNA
tctctttctccaggatattttg

SEQ ID NO: 5976 - DNA, 22 bp, synthetic construct
  misc_feature 1..22: note = chemically synthesized
  source 1..22: mol_type = other DNA
ctctttctccaggatattttgg

SEQ ID NO: 5977 - DNA, 22 bp, synthetic construct
  misc_feature 1..22: note = chemically synthesized
  source 1..22: mol_type = other DNA
tctttctccaggatattttggc

SEQ ID NO: 5978 - DNA, 22 bp, synthetic construct
  misc_feature 1..22: note = chemically synthesized
  source 1..22: mol_type = other DNA
tttctccaggatattttggcca

SEQ ID NO: 5979 - DNA, 22 bp, synthetic construct
  misc_feature 1..22: note = chemically synthesized
  source 1..22: mol_type = other DNA
tctccaggatattttggccaca

SEQ ID NO: 5980 - DNA, 22 bp, synthetic construct
  misc_feature 1..22: note = chemically synthesized
  source 1..22: mol_type = other DNA
ctccaggatattttggccacag

SEQ ID NO: 5981 - DNA, 22 bp, synthetic construct
  misc_feature 1..22: note = chemically synthesized
  source 1..22: mol_type = other DNA
tccaggatattttggccacaga

SEQ ID NO: 5982 - DNA, 22 bp, synthetic construct
  misc_feature 1..22: note = chemically synthesized
  source 1..22: mol_type = other DNA
caggatattttggccacagact

SEQ ID NO: 5983 - DNA, 22 bp, synthetic construct
  misc_feature 1..22: note = chemically synthesized
  source 1..22: mol_type = other DNA
tggccacagactttatcataaa

SEQ ID NO: 5984 - DNA, 22 bp, synthetic construct
  misc_feature 1..22: note = chemically synthesized
  source 1..22: mol_type = other DNA
ggccacagactttatcataaac

SEQ ID NO: 5985 - DNA, 22 bp, synthetic construct
  misc_feature 1..22: note = chemically synthesized
  source 1..22: mol_type = other DNA
gccacagactttatcataaact

SEQ ID NO: 5986 - DNA, 22 bp, synthetic construct
  misc_feature 1..22: note = chemically synthesized
  source 1..22: mol_type = other DNA
tatcataaactccatcccttag

SEQ ID NO: 5987 - DNA, 22 bp, synthetic construct
  misc_feature 1..22: note = chemically synthesized
  source 1..22: mol_type = other DNA
atcataaactccatcccttagg

SEQ ID NO: 5988 - DNA, 22 bp, synthetic construct
  misc_feature 1..22: note = chemically synthesized
  source 1..22: mol_type = other DNA
tcataaactccatcccttaggg

SEQ ID NO: 5989 - DNA, 22 bp, synthetic construct
  misc_feature 1..22: note = chemically synthesized
  source 1..22: mol_type = other DNA
catcccttagggtggcattagg

SEQ ID NO: 5990 - DNA, 22 bp, synthetic construct
  misc_feature 1..22: note = chemically synthesized
  source 1..22: mol_type = other DNA
agggtggcattagggtagtctt

SEQ ID NO: 5991 - DNA, 22 bp, synthetic construct
  misc_feature 1..22: note = chemically synthesized
  source 1..22: mol_type = other DNA
gggtggcattagggtagtcttg

SEQ ID NO: 5992 - DNA, 22 bp, synthetic construct
  misc_feature 1..22: note = chemically synthesized
  source 1..22: mol_type = other DNA
gggtagtcttgggcctgaattt

SEQ ID NO: 5993 - DNA, 22 bp, synthetic construct
  misc_feature 1..22: note = chemically synthesized
  source 1..22: mol_type = other DNA
gggcctgaatttaggtgggcca

SEQ ID NO: 5994 - DNA, 22 bp, synthetic construct
  misc_feature 1..22: note = chemically synthesized
  source 1..22: mol_type = other DNA
ggcctgaatttaggtgggccag

SEQ ID NO: 5995 - DNA, 22 bp, synthetic construct
  misc_feature 1..22: note = chemically synthesized
  source 1..22: mol_type = other DNA
aatttaggtgggccagtggctg

SEQ ID NO: 5996 - DNA, 22 bp, synthetic construct
  misc_feature 1..22: note = chemically synthesized
  source 1..22: mol_type = other DNA
aggtgggccagtggctgtctta

SEQ ID NO: 5997 - DNA, 22 bp, synthetic construct
  misc_feature 1..22: note = chemically synthesized
  source 1..22: mol_type = other DNA
ggtgggccagtggctgtcttag

SEQ ID NO: 5998 - DNA, 22 bp, synthetic construct
  misc_feature 1..22: note = chemically synthesized
  source 1..22: mol_type = other DNA
tcttagtgacagcctttccgct

SEQ ID NO: 5999 - DNA, 22 bp, synthetic construct
  misc_feature 1..22: note = chemically synthesized
  source 1..22: mol_type = other DNA
agtgacagcctttccgctctct

SEQ ID NO: 6000 - DNA, 22 bp, synthetic construct
  misc_feature 1..22: note = chemically synthesized
  source 1..22: mol_type = other DNA
gtgacagcctttccgctctctt

SEQ ID NO: 6001 - DNA, 22 bp, synthetic construct
  misc_feature 1..22: note = chemically synthesized
  source 1..22: mol_type = other DNA
tccgctctcttctgtcatcccc

SEQ ID NO: 6002 - DNA, 22 bp, synthetic construct
  misc_feature 1..22: note = chemically synthesized
  source 1..22: mol_type = other DNA
ccgctctcttctgtcatcccct

SEQ ID NO: 6003 - DNA, 22 bp, synthetic construct
  misc_feature 1..22: note = chemically synthesized
  source 1..22: mol_type = other DNA
cgctctcttctgtcatcccctc

SEQ ID NO: 6004 - DNA, 22 bp, synthetic construct
  misc_feature 1..22: note = chemically synthesized
  source 1..22: mol_type = other DNA
tcttctgtcatcccctcccaac

SEQ ID NO: 6005 - DNA, 22 bp, synthetic construct
  misc_feature 1..22: note = chemically synthesized
  source 1..22: mol_type = other DNA
ttctgtcatcccctcccaactg

SEQ ID NO: 6006 - DNA, 22 bp, synthetic construct
  misc_feature 1..22: note = chemically synthesized
  source 1..22: mol_type = other DNA
ctgtcatcccctcccaactgct

SEQ ID NO: 6007 - DNA, 22 bp, synthetic construct
  misc_feature 1..22: note = chemically synthesized
  source 1..22: mol_type = other DNA
tgtcatcccctcccaactgcta

SEQ ID NO: 6008 - DNA, 22 bp, synthetic construct
  misc_feature 1..22: note = chemically synthesized
  source 1..22: mol_type = other DNA
tcatcccctcccaactgctaat

SEQ ID NO: 6009 - DNA, 22 bp, synthetic construct
  misc_feature 1..22: note = chemically synthesized
  source 1..22: mol_type = other DNA
ccaactgctaatgtctaactac

SEQ ID NO: 6010 - DNA, 22 bp, synthetic construct
  misc_feature 1..22: note = chemically synthesized
  source 1..22: mol_type = other DNA
ctaatgtctaactacctaacaa

SEQ ID NO: 6011 - DNA, 22 bp, synthetic construct
  misc_feature 1..22: note = chemically synthesized
  source 1..22: mol_type = other DNA
atgtctaactacctaacaatta

SEQ ID NO: 6012 - DNA, 22 bp, synthetic construct
  misc_feature 1..22: note = chemically synthesized
  source 1..22: mol_type = other DNA
actacctaacaattacccatta

SEQ ID NO: 6013 - DNA, 22 bp, synthetic construct
  misc_feature 1..22: note = chemically synthesized
  source 1..22: mol_type = other DNA
cctaacaattacccattaaatc

SEQ ID NO: 6014 - DNA, 22 bp, synthetic construct
  misc_feature 1..22: note = chemically synthesized
  source 1..22: mol_type = other DNA
acaattacccattaaatcagtg

SEQ ID NO: 6015 - DNA, 22 bp, synthetic construct
  misc_feature 1..22: note = chemically synthesized
  source 1..22: mol_type = other DNA
cccattaaatcagtgtgtctgg

SEQ ID NO: 6016 - DNA, 22 bp, synthetic construct
  misc_feature 1..22: note = chemically synthesized
  source 1..22: mol_type = other DNA
aatcagtgtgtctggggttagg

SEQ ID NO: 6017 - DNA, 22 bp, synthetic construct
  misc_feature 1..22: note = chemically synthesized
  source 1..22: mol_type = other DNA
gggttaggagcaggcctcaata

SEQ ID NO: 6018 - DNA, 22 bp, synthetic construct
  misc_feature 1..22: note = chemically synthesized
  source 1..22: mol_type = other DNA
ggagcaggcctcaatatgttta

SEQ ID NO: 6019 - DNA, 22 bp, synthetic construct
  misc_feature 1..22: note = chemically synthesized
  source 1..22: mol_type = other DNA
aatatgtttaatcattctccag

SEQ ID NO: 6020 - DNA, 22 bp, synthetic construct
  misc_feature 1..22: note = chemically synthesized
  source 1..22: mol_type = other DNA
aatcattctccagataatccca

SEQ ID NO: 6021 - DNA, 22 bp, synthetic construct
  misc_feature 1..22: note = chemically synthesized
  source 1..22: mol_type = other DNA
atcattctccagataatcccaa

SEQ ID NO: 6022 - DNA, 22 bp, synthetic construct
  misc_feature 1..22: note = chemically synthesized
  source 1..22: mol_type = other DNA
tccagataatcccaatactgta

SEQ ID NO: 6023 - DNA, 22 bp, synthetic construct
  misc_feature 1..22: note = chemically synthesized
  source 1..22: mol_type = other DNA
cagataatcccaatactgtaaa

SEQ ID NO: 6024 - DNA, 22 bp, synthetic construct
  misc_feature 1..22: note = chemically synthesized
  source 1..22: mol_type = other DNA
taaagtttgtgaaacacttgtc

SEQ ID NO: 6025 - DNA, 22 bp, synthetic construct
  misc_feature 1..22: note = chemically synthesized
  source 1..22: mol_type = other DNA
gtgaaacacttgtcagataatt

SEQ ID NO: 6026 - DNA, 22 bp, synthetic construct
  misc_feature 1..22: note = chemically synthesized
  source 1..22: mol_type = other DNA
tgaaacacttgtcagataattc

SEQ ID NO: 6027 - DNA, 22 bp, synthetic construct
  misc_feature 1..22: note = chemically synthesized
  source 1..22: mol_type = other DNA
gtcagataattcaattatgaag

SEQ ID NO: 6028 - DNA, 22 bp, synthetic construct
  misc_feature 1..22: note = chemically synthesized
  source 1..22: mol_type = other DNA
tcagataattcaattatgaagg

SEQ ID NO: 6029 - DNA, 22 bp, synthetic construct
  misc_feature 1..22: note = chemically synthesized
  source 1..22: mol_type = other DNA
aattatgaaggctgtggaaggt

SEQ ID NO: 6030 - DNA, 22 bp, synthetic construct
  misc_feature 1..22: note = chemically synthesized
  source 1..22: mol_type = other DNA
tgaaggctgtggaaggtgtttc

SEQ ID NO: 6031 - DNA, 22 bp, synthetic construct
  misc_feature 1..22: note = chemically synthesized
  source 1..22: mol_type = other DNA
tggaaggtgtttcagtaggatc

SEQ ID NO: 6032 - DNA, 22 bp, synthetic construct
  misc_feature 1..22: note = chemically synthesized
  source 1..22: mol_type = other DNA
cagtaggatctaattggttaat

SEQ ID NO: 6033 - DNA, 22 bp, synthetic construct
  misc_feature 1..22: note = chemically synthesized
  source 1..22: mol_type = other DNA
agtaggatctaattggttaatg

SEQ ID NO: 6034 - DNA, 22 bp, synthetic construct
  misc_feature 1..22: note = chemically synthesized
  source 1..22: mol_type = other DNA
attggttaatgttatgacttaa

SEQ ID NO: 6035 - DNA, 22 bp, synthetic construct
  misc_feature 1..22: note = chemically synthesized
  source 1..22: mol_type = other DNA
gttaatgttatgacttaattaa

SEQ ID NO: 6036 - DNA, 22 bp, synthetic construct
  misc_feature 1..22: note = chemically synthesized
  source 1..22: mol_type = other DNA
atgttatgacttaattaatttg

SEQ ID NO: 6037 - DNA, 22 bp, synthetic construct
  misc_feature 1..22: note = chemically synthesized
  source 1..22: mol_type = other DNA
tgacttaattaatttgaatcaa

SEQ ID NO: 6038 - DNA, 22 bp, synthetic construct
  misc_feature 1..22: note = chemically synthesized
  source 1..22: mol_type = other DNA
aattaatttgaatcaaaaaaca

SEQ ID NO: 6039 - DNA, 22 bp, synthetic construct
  misc_feature 1..22: note = chemically synthesized
  source 1..22: mol_type = other DNA
attaatttgaatcaaaaaacaa

SEQ ID NO: 6040 - DNA, 22 bp, synthetic construct
  misc_feature 1..22: note = chemically synthesized
  source 1..22: mol_type = other DNA
atttgaatcaaaaaacaaaatg

SEQ ID NO: 6041 - DNA, 22 bp, synthetic construct
  misc_feature 1..22: note = chemically synthesized
  source 1..22: mol_type = other DNA
gaatcaaaaaacaaaatgaaaa

SEQ ID NO: 6042 - DNA, 22 bp, synthetic construct
  misc_feature 1..22: note = chemically synthesized
  source 1..22: mol_type = other DNA
aatcaaaaaacaaaatgaaaaa

SEQ ID NO: 6043 - DNA, 22 bp, synthetic construct
  misc_feature 1..22: note = chemically synthesized
  source 1..22: mol_type = other DNA
tatatttctaagtcaaataaga

SEQ ID NO: 6044 - DNA, 22 bp, synthetic construct
  misc_feature 1..22: note = chemically synthesized
  source 1..22: mol_type = other DNA
atatttctaagtcaaataagac

SEQ ID NO: 6045 - DNA, 22 bp, synthetic construct
  misc_feature 1..22: note = chemically synthesized
  source 1..22: mol_type = other DNA
tatttctaagtcaaataagaca

SEQ ID NO: 6046 - DNA, 22 bp, synthetic construct
  misc_feature 1..22: note = chemically synthesized
  source 1..22: mol_type = other DNA
ctaagtcaaataagacataagt

SEQ ID NO: 6047 - DNA, 22 bp, synthetic construct
  misc_feature 1..22: note = chemically synthesized
  source 1..22: mol_type = other DNA
taagtcaaataagacataagtt

SEQ ID NO: 6048 - DNA, 22 bp, synthetic construct
  misc_feature 1..22: note = chemically synthesized
  source 1..22: mol_type = other DNA
agtcaaataagacataagttgg

SEQ ID NO: 6049 - DNA, 22 bp, synthetic construct
  misc_feature 1..22: note = chemically synthesized
  source 1..22: mol_type = other DNA
gtctaaggttgagataaaattt

SEQ ID NO: 6050 - DNA, 22 bp, synthetic construct
  misc_feature 1..22: note = chemically synthesized
  source 1..22: mol_type = other DNA
aggttgagataaaatttttaaa

SEQ ID NO: 6051 - DNA, 22 bp, synthetic construct
  misc_feature 1..22: note = chemically synthesized
  source 1..22: mol_type = other DNA
agataaaatttttaaatgtatg

SEQ ID NO: 6052 - DNA, 22 bp, synthetic construct
  misc_feature 1..22: note = chemically synthesized
  source 1..22: mol_type = other DNA
ttaaatgtatgattgaattttg

SEQ ID NO: 6053 - DNA, 22 bp, synthetic construct
  misc_feature 1..22: note = chemically synthesized
  source 1..22: mol_type = other DNA
taaatgtatgattgaattttga

SEQ ID NO: 6054 - DNA, 22 bp, synthetic construct
  misc_feature 1..22: note = chemically synthesized
  source 1..22: mol_type = other DNA
aaatgtatgattgaattttgaa

SEQ ID NO: 6055 - DNA, 22 bp, synthetic construct
  misc_feature 1..22: note = chemically synthesized
  source 1..22: mol_type = other DNA
aatgtatgattgaattttgaaa

SEQ ID NO: 6056 - DNA, 22 bp, synthetic construct
  misc_feature 1..22: note = chemically synthesized
  source 1..22: mol_type = other DNA
aattttgaaaatcataaatatt

SEQ ID NO: 6057 - DNA, 22 bp, synthetic construct
  misc_feature 1..22: note = chemically synthesized
  source 1..22: mol_type = other DNA
tgaaaatcataaatatttaaat

SEQ ID NO: 6058 - DNA, 22 bp, synthetic construct
  misc_feature 1..22: note = chemically synthesized
  source 1..22: mol_type = other DNA
gaaaatcataaatatttaaata

SEQ ID NO: 6059 - DNA, 22 bp, synthetic construct
  misc_feature 1..22: note = chemically synthesized
  source 1..22: mol_type = other DNA
aaaatcataaatatttaaatat

SEQ ID NO: 6060 - DNA, 22 bp, synthetic construct
  misc_feature 1..22: note = chemically synthesized
  source 1..22: mol_type = other DNA
aaatatctaaagttcagatcag

SEQ ID NO: 6061 - DNA, 22 bp, synthetic construct
  misc_feature 1..22: note = chemically synthesized
  source 1..22: mol_type = other DNA
aatatctaaagttcagatcaga

SEQ ID NO: 6062 - DNA, 22 bp, synthetic construct
  misc_feature 1..22: note = chemically synthesized
  source 1..22: mol_type = other DNA
aagttcagatcagaacattgcg

SEQ ID NO: 6063 - DNA, 22 bp, synthetic construct
  misc_feature 1..22: note = chemically synthesized
  source 1..22: mol_type = other DNA
agatcagaacattgcgaagcta

SEQ ID NO: 6064 - DNA, 22 bp, synthetic construct
  misc_feature 1..22: note = chemically synthesized
  source 1..22: mol_type = other DNA
cgaagctactttccccaatcaa

SEQ ID NO: 6065 - DNA, 22 bp, synthetic construct
  misc_feature 1..22: note = chemically synthesized
  source 1..22: mol_type = other DNA
ctttccccaatcaacaacaccc

SEQ ID NO: 6066 - DNA, 22 bp, synthetic construct
  misc_feature 1..22: note = chemically synthesized
  source 1..22: mol_type = other DNA
tccccaatcaacaacacccctt

SEQ ID NO: 6067 - DNA, 22 bp, synthetic construct
  misc_feature 1..22: note = chemically synthesized
  source 1..22: mol_type = other DNA
ccccaatcaacaacaccccttc

SEQ ID NO: 6068 - DNA, 22 bp, synthetic construct
  misc_feature 1..22: note = chemically synthesized
  source 1..22: mol_type = other DNA
cccaatcaacaacaccccttca

SEQ ID NO: 6069 - DNA, 22 bp, synthetic construct
  misc_feature 1..22: note = chemically synthesized
  source 1..22: mol_type = other DNA
caggatttaaaaaccaaggggg

SEQ ID NO: 6070 - DNA, 22 bp, synthetic construct
  misc_feature 1..22: note = chemically synthesized
  source 1..22: mol_type = other DNA
aggatttaaaaaccaaggggga

SEQ ID NO: 6071 - DNA, 22 bp, synthetic construct
  misc_feature 1..22: note = chemically synthesized
  source 1..22: mol_type = other DNA
aaaaaccaagggggacactgga

SEQ ID NO: 6072 - DNA, 22 bp, synthetic construct
  misc_feature 1..22: note = chemically synthesized
  source 1..22: mol_type = other DNA
aaaaccaagggggacactggat

SEQ ID NO: 6073 - DNA, 22 bp, synthetic construct
  misc_feature 1..22: note = chemically synthesized
  source 1..22: mol_type = other DNA
gatcacctagtgtttcacaagc

SEQ ID NO: 6074 - DNA, 22 bp, synthetic construct
  misc_feature 1..22: note = chemically synthesized
  source 1..22: mol_type = other DNA
gtgtttcacaagcaggtacctt

SEQ ID NO: 6075 - DNA, 22 bp, synthetic construct
  misc_feature 1..22: note = chemically synthesized
  source 1..22: mol_type = other DNA
cacaagcaggtaccttctgctg

SEQ ID NO: 6076 - DNA, 22 bp, synthetic construct
  misc_feature 1..22: note = chemically synthesized
  source 1..22: mol_type = other DNA
acaagcaggtaccttctgctgt

SEQ ID NO: 6077 - DNA, 22 bp, synthetic construct
  misc_feature 1..22: note = chemically synthesized
  source 1..22: mol_type = other DNA
ctgctgtaggagagagagaact

SEQ ID NO: 6078 - DNA, 22 bp, synthetic construct
  misc_feature 1..22: note = chemically synthesized
  source 1..22: mol_type = other DNA
tgctgtaggagagagagaacta

SEQ ID NO: 6079 - DNA, 22 bp, synthetic construct
  misc_feature 1..22: note = chemically synthesized
  source 1..22: mol_type = other DNA
ctgtaggagagagagaactaaa

SEQ ID NO: 6080 - DNA, 22 bp, synthetic construct
  misc_feature 1..22: note = chemically synthesized
  source 1..22: mol_type = other DNA
taggagagagagaactaaagtt

SEQ ID NO: 6081 - DNA, 22 bp, synthetic construct
  misc_feature 1..22: note = chemically synthesized
  source 1..22: mol_type = other DNA
aagttctgaaagacctgttgct

SEQ ID NO: 6082 - DNA, 22 bp, synthetic construct
  misc_feature 1..22: note = chemically synthesized
  source 1..22: mol_type = other DNA
tgaaagacctgttgcttttcac

SEQ ID NO: 6083 - DNA, 22 bp, synthetic construct
  misc_feature 1..22: note = chemically synthesized
  source 1..22: mol_type = other DNA
aaagacctgttgcttttcacca

SEQ ID NO: 6084 - DNA, 22 bp, synthetic construct
  misc_feature 1..22: note = chemically synthesized
  source 1..22: mol_type = other DNA
ttgcttttcaccaggaagtttt

SEQ ID NO: 6085 - DNA, 22 bp, synthetic construct
  misc_feature 1..22: note = chemically synthesized
  source 1..22: mol_type = other DNA
cttttcaccaggaagttttact

SEQ ID NO: 6086 - DNA, 22 bp, synthetic construct
  misc_feature 1..22: note = chemically synthesized
  source 1..22: mol_type = other DNA
ttcaccaggaagttttactggg

SEQ ID NO: 6087 - DNA, 22 bp, synthetic construct
  misc_feature 1..22: note = chemically synthesized
  source 1..22: mol_type = other DNA
tcaccaggaagttttactgggc

SEQ ID NO: 6088 - DNA, 22 bp, synthetic construct
  misc_feature 1..22: note = chemically synthesized
  source 1..22: mol_type = other DNA
caccaggaagttttactgggca

SEQ ID NO: 6089 - DNA, 22 bp, synthetic construct
  misc_feature 1..22: note = chemically synthesized
  source 1..22: mol_type = other DNA
accaggaagttttactgggcat

SEQ ID NO: 6090 - DNA, 22 bp, synthetic construct
  misc_feature 1..22: note = chemically synthesized
  source 1..22: mol_type = other DNA
tactgggcatctcctgagccta

SEQ ID NO: 6091 - DNA, 22 bp, synthetic construct
  misc_feature 1..22: note = chemically synthesized
  source 1..22: mol_type = other DNA
actgggcatctcctgagcctag

SEQ ID NO: 6092 - DNA, 22 bp, synthetic construct
  misc_feature 1..22: note = chemically synthesized
  source 1..22: mol_type = other DNA
ctgggcatctcctgagcctagg

SEQ ID NO: 6093 - DNA, 22 bp, synthetic construct
  misc_feature 1..22: note = chemically synthesized
  source 1..22: mol_type = other DNA
ggcatctcctgagcctaggcaa

SEQ ID NO: 6094 - DNA, 22 bp, synthetic construct
  misc_feature 1..22: note = chemically synthesized
  source 1..22: mol_type = other DNA
ctgagcctaggcaatagctgta

SEQ ID NO: 6095 - DNA, 22 bp, synthetic construct
  misc_feature 1..22: note = chemically synthesized
  source 1..22: mol_type = other DNA
agcctaggcaatagctgtaggg

SEQ ID NO: 6096 - DNA, 22 bp, synthetic construct
  misc_feature 1..22: note = chemically synthesized
  source 1..22: mol_type = other DNA
ggcaatagctgtagggtgactt

SEQ ID NO: 6097 - DNA, 22 bp, synthetic construct
  misc_feature 1..22: note = chemically synthesized
  source 1..22: mol_type = other DNA
tagggtgacttctggagccatc

SEQ ID NO: 6098 - DNA, 22 bp, synthetic construct
  misc_feature 1..22: note = chemically synthesized
  source 1..22: mol_type = other DNA
ctggagccatccccgtttcccc

SEQ ID NO: 6099 - DNA, 22 bp, synthetic construct
  misc_feature 1..22: note = chemically synthesized
  source 1..22: mol_type = other DNA
tggagccatccccgtttccccg

SEQ ID NO: 6100 - DNA, 22 bp, synthetic construct
  misc_feature 1..22: note = chemically synthesized
  source 1..22: mol_type = other DNA
gagccatccccgtttccccgcc

SEQ ID NO: 6101 - DNA, 22 bp, synthetic construct
  misc_feature 1..22: note = chemically synthesized
  source 1..22: mol_type = other DNA
ccccgccccccaaaagaagcgg

SEQ ID NO: 6102 - DNA, 22 bp, synthetic construct
  misc_feature 1..22: note = chemically synthesized
  source 1..22: mol_type = other DNA
cccgccccccaaaagaagcgga

SEQ ID NO: 6103 - DNA, 22 bp, synthetic construct
  misc_feature 1..22: note = chemically synthesized
  source 1..22: mol_type = other DNA
aacggggacgtgcggccagagc

SEQ ID NO: 6104 - DNA, 22 bp, synthetic construct
  misc_feature 1..22: note = chemically synthesized
  source 1..22: mol_type = other DNA
acggggacgtgcggccagagct

SEQ ID NO: 6105 - DNA, 22 bp, synthetic construct
  misc_feature 1..22: note = chemically synthesized
  source 1..22: mol_type = other DNA
gggaaatgggcccgcgagccag

SEQ ID NO: 6106 - DNA, 22 bp, synthetic construct
  misc_feature 1..22: note = chemically synthesized
  source 1..22: mol_type = other DNA
ctcctcctgatgcttttgcaga

SEQ ID NO: 6107 - DNA, 22 bp, synthetic construct
  misc_feature 1..22: note = chemically synthesized
  source 1..22: mol_type = other DNA
tcctcctgatgcttttgcagac

SEQ ID NO: 6108 - DNA, 22 bp, synthetic construct
  misc_feature 1..22: note = chemically synthesized
  source 1..22: mol_type = other DNA
ctcctgatgcttttgcagaccg

SEQ ID NO: 6109 - DNA, 22 bp, synthetic construct
  misc_feature 1..22: note = chemically synthesized
  source 1..22: mol_type = other DNA
ctgatgcttttgcagaccgcgg

SEQ ID NO: 6110 - DNA, 22 bp, synthetic construct
  misc_feature 1..22: note = chemically synthesized
  source 1..22: mol_type = other DNA
atgcttttgcagaccgcggtcc

SEQ ID NO: 6111 - DNA, 22 bp, synthetic construct
  misc_feature 1..22: note = chemically synthesized
  source 1..22: mol_type = other DNA
ttgcagaccgcggtcctgcagg

SEQ ID NO: 6112 - DNA, 22 bp, synthetic construct
  misc_feature 1..22: note = chemically synthesized
  source 1..22: mol_type = other DNA
tgcagaccgcggtcctgcaggg

SEQ ID NO: 6113 - DNA, 22 bp, synthetic construct
  misc_feature 1..22: note = chemically synthesized
  source 1..22: mol_type = other DNA
gcagaccgcggtcctgcagggg

SEQ ID NO: 6114 - DNA, 22 bp, synthetic construct
  misc_feature 1..22: note = chemically synthesized
  source 1..22: mol_type = other DNA
cagaccgcggtcctgcaggggc

SEQ ID NO: 6115 - DNA, 22 bp, synthetic construct
  misc_feature 1..22: note = chemically synthesized
  source 1..22: mol_type = other DNA
caggggcgcttgctgcgtgagt

SEQ ID NO: 6116 - DNA, 22 bp, synthetic construct
  misc_feature 1..22: note = chemically synthesized
  source 1..22: mol_type = other DNA
gctgcgtgagtccgagggctgc

SEQ ID NO: 6117 - DNA, 22 bp, synthetic construct
  misc_feature 1..22: note = chemically synthesized
  source 1..22: mol_type = other DNA
ctgcgtgagtccgagggctgcg

SEQ ID NO: 6118 - DNA, 22 bp, synthetic construct
  misc_feature 1..22: note = chemically synthesized
  source 1..22: mol_type = other DNA
cgtgagtccgagggctgcgggc

SEQ ID NO: 6119 - DNA, 22 bp, synthetic construct
  misc_feature 1..22: note = chemically synthesized
  source 1..22: mol_type = other DNA
cgggcgaactaggggcgcggcg

SEQ ID NO: 6120 - DNA, 22 bp, synthetic construct
  misc_feature 1..22: note = chemically synthesized
  source 1..22: mol_type = other DNA
ggggcgcggcgggggtggaaaa

SEQ ID NO: 6121 - DNA, 22 bp, synthetic construct
  misc_feature 1..22: note = chemically synthesized
  source 1..22: mol_type = other DNA
gctttttctttgcgcttgggag

SEQ ID NO: 6122 - DNA, 22 bp, synthetic construct
  misc_feature 1..22: note = chemically synthesized
  source 1..22: mol_type = other DNA
tttctttgcgcttgggagtttg

SEQ ID NO: 6123 - DNA, 22 bp, synthetic construct
  misc_feature 1..22: note = chemically synthesized
  source 1..22: mol_type = other DNA
ttctttgcgcttgggagtttgc

SEQ ID NO: 6124 - DNA, 22 bp, synthetic construct
  misc_feature 1..22: note = chemically synthesized
  source 1..22: mol_type = other DNA
tctttgcgcttgggagtttgct

SEQ ID NO: 6125 - DNA, 22 bp, synthetic construct
  misc_feature 1..22: note = chemically synthesized
  source 1..22: mol_type = other DNA
ctttgcgcttgggagtttgcta

SEQ ID NO: 6126 - DNA, 22 bp, synthetic construct
  misc_feature 1..22: note = chemically synthesized
  source 1..22: mol_type = other DNA
tttgcgcttgggagtttgctaa

SEQ ID NO: 6127 - DNA, 22 bp, synthetic construct
  misc_feature 1..22: note = chemically synthesized
  source 1..22: mol_type = other DNA
tgcgcttgggagtttgctaact

SEQ ID NO: 6128 - DNA, 22 bp, synthetic construct
  misc_feature 1..22: note = chemically synthesized
  source 1..22: mol_type = other DNA
gcgcttgggagtttgctaactt

SEQ ID NO: 6129 - DNA, 22 bp, synthetic construct
  misc_feature 1..22: note = chemically synthesized
  source 1..22: mol_type = other DNA
cgcttgggagtttgctaacttt

SEQ ID NO: 6130 - DNA, 22 bp, synthetic construct
  misc_feature 1..22: note = chemically synthesized
  source 1..22: mol_type = other DNA
gggagtttgctaactttggagg

SEQ ID NO: 6131 - DNA, 22 bp, synthetic construct
  misc_feature 1..22: note = chemically synthesized
  source 1..22: mol_type = other DNA
ggagtttgctaactttggagga

SEQ ID NO: 6132 - DNA, 22 bp, synthetic construct
  misc_feature 1..22: note = chemically synthesized
  source 1..22: mol_type = other DNA
gctaactttggaggacctgctc

SEQ ID NO: 6133 - DNA, 22 bp, synthetic construct
  misc_feature 1..22: note = chemically synthesized
  source 1..22: mol_type = other DNA
ctaactttggaggacctgctca

SEQ ID NO: 6134 - DNA, 22 bp, synthetic construct
  misc_feature 1..22: note = chemically synthesized
  source 1..22: mol_type = other DNA
actttggaggacctgctcaacc

SEQ ID NO: 6135 - DNA, 22 bp, synthetic construct
  misc_feature 1..22: note = chemically synthesized
  source 1..22: mol_type = other DNA
tggaggacctgctcaaccctat

SEQ ID NO: 6136 - DNA, 22 bp, synthetic construct
  misc_feature 1..22: note = chemically synthesized
  source 1..22: mol_type = other DNA
ggaggacctgctcaaccctatc

SEQ ID NO: 6137 - DNA, 22 bp, synthetic construct
  misc_feature 1..22: note = chemically synthesized
  source 1..22: mol_type = other DNA
gaggacctgctcaaccctatcc

SEQ ID NO: 6138 - DNA, 22 bp, synthetic construct
  misc_feature 1..22: note = chemically synthesized
  source 1..22: mol_type = other DNA
ctcaaccctatccgcaagcccc

SEQ ID NO: 6139 - DNA, 22 bp, synthetic construct
  misc_feature 1..22: note = chemically synthesized
  source 1..22: mol_type = other DNA
aaccctatccgcaagcccctct

SEQ ID NO: 6140 - DNA, 22 bp, synthetic construct
  misc_feature 1..22: note = chemically synthesized
  source 1..22: mol_type = other DNA
tccgcaagcccctctccctact

SEQ ID NO: 6141 - DNA, 22 bp, synthetic construct
  misc_feature 1..22: note = chemically synthesized
  source 1..22: mol_type = other DNA
tccctactttctgcgtccagac

SEQ ID NO: 6142 - DNA, 22 bp, synthetic construct
  misc_feature 1..22: note = chemically synthesized
  source 1..22: mol_type = other DNA
cctactttctgcgtccagaccc

SEQ ID NO: 6143 - DNA, 22 bp, synthetic construct
  misc_feature 1..22: note = chemically synthesized
  source 1..22: mol_type = other DNA
ctttctgcgtccagaccccgtg

SEQ ID NO: 6144 - DNA, 22 bp, synthetic construct
  misc_feature 1..22: note = chemically synthesized
  source 1..22: mol_type = other DNA
tctgcgtccagaccccgtgagg

SEQ ID NO: 6145 - DNA, 22 bp, synthetic construct
  misc_feature 1..22: note = chemically synthesized
  source 1..22: mol_type = other DNA
ctgcgtccagaccccgtgaggg

SEQ ID NO: 6146 - DNA, 22 bp, synthetic construct
  misc_feature 1..22: note = chemically synthesized
  source 1..22: mol_type = other DNA
tgcgtccagaccccgtgaggga

SEQ ID NO: 6147 - DNA, 22 bp, synthetic construct
  misc_feature 1..22: note = chemically synthesized
  source 1..22: mol_type = other DNA
cgtccagaccccgtgagggagt

SEQ ID NO: 6148 - DNA, 22 bp, synthetic construct
  misc_feature 1..22: note = chemically synthesized
  source 1..22: mol_type = other DNA
ccactgaactgcagataggggt

SEQ ID NO: 6149 - DNA, 22 bp, synthetic construct
  misc_feature 1..22: note = chemically synthesized
  source 1..22: mol_type = other DNA
aactgcagataggggtccctcg

SEQ ID NO: 6150 - DNA, 22 bp, synthetic construct
  misc_feature 1..22: note = chemically synthesized
  source 1..22: mol_type = other DNA
cagataggggtccctcgcccca

SEQ ID NO: 6151 - DNA, 22 bp, synthetic construct
  misc_feature 1..22: note = chemically synthesized
  source 1..22: mol_type = other DNA
gccccaggacctgccccctccc

SEQ ID NO: 6152 - DNA, 22 bp, synthetic construct
  misc_feature 1..22: note = chemically synthesized
  source 1..22: mol_type = other DNA
ccccctcccccggctgtcccgg

SEQ ID NO: 6153 - DNA, 22 bp, synthetic construct
  misc_feature 1..22: note = chemically synthesized
  source 1..22: mol_type = other DNA
ccccggctgtcccggctctgcg

SEQ ID NO: 6154 - DNA, 22 bp, synthetic construct
  misc_feature 1..22: note = chemically synthesized
  source 1..22: mol_type = other DNA
tcccggctctgcggagtgactt

SEQ ID NO: 6155 - DNA, 22 bp, synthetic construct
  misc_feature 1..22: note = chemically synthesized
  source 1..22: mol_type = other DNA
tgcggagtgacttttggaaccg

SEQ ID NO: 6156 - DNA, 22 bp, synthetic construct
  misc_feature 1..22: note = chemically synthesized
  source 1..22: mol_type = other DNA
cggagtgacttttggaaccgcc

SEQ ID NO: 6157 - DNA, 22 bp, synthetic construct
  misc_feature 1..22: note = chemically synthesized
  source 1..22: mol_type = other DNA
ttggaaccgcccactcccttcc

SEQ ID NO: 6158 - DNA, 22 bp, synthetic construct
  misc_feature 1..22: note = chemically synthesized
  source 1..22: mol_type = other DNA
tggaaccgcccactcccttccc

SEQ ID NO: 6159 - DNA, 22 bp, synthetic construct
  misc_feature 1..22: note = chemically synthesized
  source 1..22: mol_type = other DNA
ggaaccgcccactcccttcccc

SEQ ID NO: 6160 - DNA, 22 bp, synthetic construct
  misc_feature 1..22: note = chemically synthesized
  source 1..22: mol_type = other DNA
gaaccgcccactcccttccccc

SEQ ID NO: 6161 - DNA, 22 bp, synthetic construct
  misc_feature 1..22: note = chemically synthesized
  source 1..22: mol_type = other DNA
ccttcccccaactagaatgctt

SEQ ID NO: 6162 - DNA, 22 bp, synthetic construct
  misc_feature 1..22: note = chemically synthesized
  source 1..22: mol_type = other DNA
cccccaactagaatgcttttaa

SEQ ID NO: 6163 - DNA, 22 bp, synthetic construct
  misc_feature 1..22: note = chemically synthesized
  source 1..22: mol_type = other DNA
ccccaactagaatgcttttaaa

SEQ ID NO: 6164 - DNA, 22 bp, synthetic construct
  misc_feature 1..22: note = chemically synthesized
  source 1..22: mol_type = other DNA
gaatgcttttaaataaatctcg

SEQ ID NO: 6165 - DNA, 22 bp, synthetic construct
  misc_feature 1..22: note = chemically synthesized
  source 1..22: mol_type = other DNA
ttaaataaatctcgtagttcct

SEQ ID NO: 6166 - DNA, 22 bp, synthetic construct
  misc_feature 1..22: note = chemically synthesized
  source 1..22: mol_type = other DNA
taaataaatctcgtagttcctc

SEQ ID NO: 6167 - DNA, 22 bp, synthetic construct
  misc_feature 1..22: note = chemically synthesized
  source 1..22: mol_type = other DNA
aaataaatctcgtagttcctca

SEQ ID NO: 6168 - DNA, 22 bp, synthetic construct
  misc_feature 1..22: note = chemically synthesized
  source 1..22: mol_type = other DNA
aataaatctcgtagttcctcac

SEQ ID NO: 6169 - DNA, 22 bp, synthetic construct
  misc_feature 1..22: note = chemically synthesized
  source 1..22: mol_type = other DNA
gtagttcctcacttgagctgag

SEQ ID NO: 6170 - DNA, 22 bp, synthetic construct
  misc_feature 1..22: note = chemically synthesized
  source 1..22: mol_type = other DNA
ctcacttgagctgagctaagcc

SEQ ID NO: 6171 - DNA, 22 bp, synthetic construct
  misc_feature 1..22: note = chemically synthesized
  source 1..22: mol_type = other DNA
acttgagctgagctaagcctgg

SEQ ID NO: 6172 - DNA, 22 bp, synthetic construct
  misc_feature 1..22: note = chemically synthesized
  source 1..22: mol_type = other DNA
gagctgagctaagcctggggct

SEQ ID NO: 6173 - DNA, 22 bp, synthetic construct
  misc_feature 1..22: note = chemically synthesized
  source 1..22: mol_type = other DNA
agctgagctaagcctggggctc

SEQ ID NO: 6174 - DNA, 22 bp, synthetic construct
  misc_feature 1..22: note = chemically synthesized
  source 1..22: mol_type = other DNA
agctaagcctggggctccttga

SEQ ID NO: 6175 - DNA, 22 bp, synthetic construct
  misc_feature 1..22: note = chemically synthesized
  source 1..22: mol_type = other DNA
agcctggggctccttgaacctg

SEQ ID NO: 6176 - DNA, 22 bp, synthetic construct
  misc_feature 1..22: note = chemically synthesized
  source 1..22: mol_type = other DNA
gggctccttgaacctggaactc

SEQ ID NO: 6177 - DNA, 22 bp, synthetic construct
  misc_feature 1..22: note = chemically synthesized
  source 1..22: mol_type = other DNA
cttgaacctggaactcgggttt

SEQ ID NO: 6178 - DNA, 22 bp, synthetic construct
  misc_feature 1..22: note = chemically synthesized
  source 1..22: mol_type = other DNA
gaacctggaactcgggtttatt

SEQ ID NO: 6179 - DNA, 22 bp, synthetic construct
  misc_feature 1..22: note = chemically synthesized
  source 1..22: mol_type = other DNA
aacctggaactcgggtttattt

SEQ ID NO: 6180 - DNA, 22 bp, synthetic construct
  misc_feature 1..22: note = chemically synthesized
  source 1..22: mol_type = other DNA
gaactcgggtttatttccaatg

SEQ ID NO: 6181 - DNA, 22 bp, synthetic construct
  misc_feature 1..22: note = chemically synthesized
  source 1..22: mol_type = other DNA
gggtttatttccaatgtcagct

SEQ ID NO: 6182 - DNA, 22 bp, synthetic construct
  misc_feature 1..22: note = chemically synthesized
  source 1..22: mol_type = other DNA
atttccaatgtcagctgtgcag

SEQ ID NO: 6183 - DNA, 22 bp, synthetic construct
  misc_feature 1..22: note = chemically synthesized
  source 1..22: mol_type = other DNA
tttccaatgtcagctgtgcagt

SEQ ID NO: 6184 - DNA, 22 bp, synthetic construct
  misc_feature 1..22: note = chemically synthesized
  source 1..22: mol_type = other DNA
ccaatgtcagctgtgcagtttt

SEQ ID NO: 6185 - DNA, 22 bp, synthetic construct
  misc_feature 1..22: note = chemically synthesized
  source 1..22: mol_type = other DNA
caatgtcagctgtgcagttttt

SEQ ID NO: 6186 - DNA, 22 bp, synthetic construct
  misc_feature 1..22: note = chemically synthesized
  source 1..22: mol_type = other DNA
tgcagttttttccccagtcatc

SEQ ID NO: 6187 - DNA, 22 bp, synthetic construct
  misc_feature 1..22: note = chemically synthesized
  source 1..22: mol_type = other DNA
tttccccagtcatctccaaaca

SEQ ID NO: 6188 - DNA, 22 bp, synthetic construct
  misc_feature 1..22: note = chemically synthesized
  source 1..22: mol_type = other DNA
ttccccagtcatctccaaacag

SEQ ID NO: 6189 - DNA, 22 bp, synthetic construct
  misc_feature 1..22: note = chemically synthesized
  source 1..22: mol_type = other DNA
tccccagtcatctccaaacagg

SEQ ID NO: 6190 - DNA, 22 bp, synthetic construct
  misc_feature 1..22: note = chemically synthesized
  source 1..22: mol_type = other DNA
ccccagtcatctccaaacagga

SEQ ID NO: 6191 - DNA, 22 bp, synthetic construct
  misc_feature 1..22: note = chemically synthesized
  source 1..22: mol_type = other DNA
cccagtcatctccaaacaggaa

SEQ ID NO: 6192 - DNA, 22 bp, synthetic construct
  misc_feature 1..22: note = chemically synthesized
  source 1..22: mol_type = other DNA
caaacaggaagttcttccctga

SEQ ID NO: 6193 - DNA, 22 bp, synthetic construct
  misc_feature 1..22: note = chemically synthesized
  source 1..22: mol_type = other DNA
ttccctgagtgcttgccgagaa

SEQ ID NO: 6194 - DNA, 22 bp, synthetic construct
  misc_feature 1..22: note = chemically synthesized
  source 1..22: mol_type = other DNA
ccctgagtgcttgccgagaagg

SEQ ID NO: 6195 - DNA, 22 bp, synthetic construct
  misc_feature 1..22: note = chemically synthesized
  source 1..22: mol_type = other DNA
cctgagtgcttgccgagaaggc

SEQ ID NO: 6196 - DNA, 22 bp, synthetic construct
  misc_feature 1..22: note = chemically synthesized
  source 1..22: mol_type = other DNA
agtgcttgccgagaaggctgag

SEQ ID NO: 6197 - DNA, 22 bp, synthetic construct
  misc_feature 1..22: note = chemically synthesized
  source 1..22: mol_type = other DNA
gccgagaaggctgagcaaaccc

SEQ ID NO: 6198 - DNA, 22 bp, synthetic construct
  misc_feature 1..22: note = chemically synthesized
  source 1..22: mol_type = other DNA
ccgagaaggctgagcaaaccca

SEQ ID NO: 6199 - DNA, 22 bp, synthetic construct
  misc_feature 1..22: note = chemically synthesized
  source 1..22: mol_type = other DNA
agcaaacccacagcaggatccg

SEQ ID NO: 6200 - DNA, 22 bp, synthetic construct
  misc_feature 1..22: note = chemically synthesized
  source 1..22: mol_type = other DNA
ccacctcagaacgaatgcgttg

SEQ ID NO: 6201 - DNA, 22 bp, synthetic construct
  misc_feature 1..22: note = chemically synthesized
  source 1..22: mol_type = other DNA
cacctcagaacgaatgcgttgg

SEQ ID NO: 6202 - DNA, 22 bp, synthetic construct
  misc_feature 1..22: note = chemically synthesized
  source 1..22: mol_type = other DNA
agaacgaatgcgttgggcggtg

SEQ ID NO: 6203 - DNA, 22 bp, synthetic construct
  misc_feature 1..22: note = chemically synthesized
  source 1..22: mol_type = other DNA
ggcggtgggggcgcgaaagagt

SEQ ID NO: 6204 - DNA, 22 bp, synthetic construct
  misc_feature 1..22: note = chemically synthesized
  source 1..22: mol_type = other DNA
gggatctgaattcttcaccatt

SEQ ID NO: 6205 - DNA, 22 bp, synthetic construct
  misc_feature 1..22: note = chemically synthesized
  source 1..22: mol_type = other DNA
aattcttcaccattccacccac

SEQ ID NO: 6206 - DNA, 22 bp, synthetic construct
  misc_feature 1..22: note = chemically synthesized
  source 1..22: mol_type = other DNA
ttcaccattccacccacttttg

SEQ ID NO: 6207 - DNA, 22 bp, synthetic construct
  misc_feature 1..22: note = chemically synthesized
  source 1..22: mol_type = other DNA
caccattccacccacttttggt

SEQ ID NO: 6208 - DNA, 22 bp, synthetic construct
  misc_feature 1..22: note = chemically synthesized
  source 1..22: mol_type = other DNA
accattccacccacttttggtg

SEQ ID NO: 6209 - DNA, 22 bp, synthetic construct
  misc_feature 1..22: note = chemically synthesized
  source 1..22: mol_type = other DNA
cacccacttttggtgagacctg

SEQ ID NO: 6210 - DNA, 22 bp, synthetic construct
  misc_feature 1..22: note = chemically synthesized
  source 1..22: mol_type = other DNA
ttggtgagacctggggtggagg

SEQ ID NO: 6211 - DNA, 22 bp, synthetic construct
  misc_feature 1..22: note = chemically synthesized
  source 1..22: mol_type = other DNA
tggtgagacctggggtggaggt

SEQ ID NO: 6212 - DNA, 22 bp, synthetic construct
  misc_feature 1..22: note = chemically synthesized
  source 1..22: mol_type = other DNA
ggtgagacctggggtggaggtc

SEQ ID NO: 6213 - DNA, 22 bp, synthetic construct
  misc_feature 1..22: note = chemically synthesized
  source 1..22: mol_type = other DNA
gtgagacctggggtggaggtct

SEQ ID NO: 6214 - DNA, 22 bp, synthetic construct
  misc_feature 1..22: note = chemically synthesized
  source 1..22: mol_type = other DNA
gggtggaggtctctagggtggg

SEQ ID NO: 6215 - DNA, 22 bp, synthetic construct
  misc_feature 1..22: note = chemically synthesized
  source 1..22: mol_type = other DNA
tagggtgggaggctcctgagag

SEQ ID NO: 6216 - DNA, 22 bp, synthetic construct
  misc_feature 1..22: note = chemically synthesized
  source 1..22: mol_type = other DNA
gggtgggaggctcctgagagag

SEQ ID NO: 6217 - DNA, 22 bp, synthetic construct
  misc_feature 1..22: note = chemically synthesized
  source 1..22: mol_type = other DNA
ctgagagaggcctacctcgggc

SEQ ID NO: 6218 - DNA, 22 bp, synthetic construct
  misc_feature 1..22: note = chemically synthesized
  source 1..22: mol_type = other DNA
agagaggcctacctcgggcctt

SEQ ID NO: 6219 - DNA, 22 bp, synthetic construct
  misc_feature 1..22: note = chemically synthesized
  source 1..22: mol_type = other DNA
cctcgggcctttccccactctt

SEQ ID NO: 6220 - DNA, 22 bp, synthetic construct
  misc_feature 1..22: note = chemically synthesized
  source 1..22: mol_type = other DNA
gggcctttccccactcttggca

SEQ ID NO: 6221 - DNA, 22 bp, synthetic construct
  misc_feature 1..22: note = chemically synthesized
  source 1..22: mol_type = other DNA
tccccactcttggcaattgttc

SEQ ID NO: 6222 - DNA, 22 bp, synthetic construct
  misc_feature 1..22: note = chemically synthesized
  source 1..22: mol_type = other DNA
ccccactcttggcaattgttct

SEQ ID NO: 6223 - DNA, 22 bp, synthetic construct
  misc_feature 1..22: note = chemically synthesized
  source 1..22: mol_type = other DNA
cccactcttggcaattgttctt

SEQ ID NO: 6224 - DNA, 22 bp, synthetic construct
  misc_feature 1..22: note = chemically synthesized
  source 1..22: mol_type = other DNA
ttggcaattgttcttttgcctg

SEQ ID NO: 6225 - DNA, 22 bp, synthetic construct
  misc_feature 1..22: note = chemically synthesized
  source 1..22: mol_type = other DNA
ggcaattgttcttttgcctgga

SEQ ID NO: 6226 - DNA, 22 bp, synthetic construct
  misc_feature 1..22: note = chemically synthesized
  source 1..22: mol_type = other DNA
gcaattgttcttttgcctggaa

SEQ ID NO: 6227 - DNA, 22 bp, synthetic construct
  misc_feature 1..22: note = chemically synthesized
  source 1..22: mol_type = other DNA
ttcttttgcctggaaaattaag

SEQ ID NO: 6228 - DNA, 22 bp, synthetic construct
  misc_feature 1..22: note = chemically synthesized
  source 1..22: mol_type = other DNA
ttttgcctggaaaattaagtat

SEQ ID NO: 6229 - DNA, 22 bp, synthetic construct
  misc_feature 1..22: note = chemically synthesized
  source 1..22: mol_type = other DNA
ttgcctggaaaattaagtatat

SEQ ID NO: 6230 - DNA, 22 bp, synthetic construct
  misc_feature 1..22: note = chemically synthesized
  source 1..22: mol_type = other DNA
tgcctggaaaattaagtatatg

SEQ ID NO: 6231 - DNA, 22 bp, synthetic construct
  misc_feature 1..22: note = chemically synthesized
  source 1..22: mol_type = other DNA
gcctggaaaattaagtatatgt

SEQ ID NO: 6232 - DNA, 22 bp, synthetic construct
  misc_feature 1..22: note = chemically synthesized
  source 1..22: mol_type = other DNA
cctggaaaattaagtatatgtt

SEQ ID NO: 6233 - DNA, 22 bp, synthetic construct
  misc_feature 1..22: note = chemically synthesized
  source 1..22: mol_type = other DNA
gaaaattaagtatatgttagtt

SEQ ID NO: 6234 - DNA, 22 bp, synthetic construct
  misc_feature 1..22: note = chemically synthesized
  source 1..22: mol_type = other DNA
agtatatgttagttttgaacgt

SEQ ID NO: 6235 - DNA, 22 bp, synthetic construct
  misc_feature 1..22: note = chemically synthesized
  source 1..22: mol_type = other DNA
gttttgaacgtttgaactgaac

SEQ ID NO: 6236 - DNA, 22 bp, synthetic construct
  misc_feature 1..22: note = chemically synthesized
  source 1..22: mol_type = other DNA
tgaacgtttgaactgaacaatt

SEQ ID NO: 6237 - DNA, 22 bp, synthetic construct
  misc_feature 1..22: note = chemically synthesized
  source 1..22: mol_type = other DNA
gaacgtttgaactgaacaattc

SEQ ID NO: 6238 - DNA, 22 bp, synthetic construct
  misc_feature 1..22: note = chemically synthesized
  source 1..22: mol_type = other DNA
aacgtttgaactgaacaattct

SEQ ID NO: 6239 - DNA, 22 bp, synthetic construct
  misc_feature 1..22: note = chemically synthesized
  source 1..22: mol_type = other DNA
gaactgaacaattctcttttcg

SEQ ID NO: 6240 - DNA, 22 bp, synthetic construct
  misc_feature 1..22: note = chemically synthesized
  source 1..22: mol_type = other DNA
aactgaacaattctcttttcgg

SEQ ID NO: 6241 - DNA, 22 bp, synthetic construct
  misc_feature 1..22: note = chemically synthesized
  source 1..22: mol_type = other DNA
aacaattctcttttcggctagg

SEQ ID NO: 6242 - DNA, 22 bp, synthetic construct
  misc_feature 1..22: note = chemically synthesized
  source 1..22: mol_type = other DNA
tcttttcggctaggctttattg

SEQ ID NO: 6243 - DNA, 22 bp, synthetic construct
  misc_feature 1..22: note = chemically synthesized
  source 1..22: mol_type = other DNA
ttttcggctaggctttattgat

SEQ ID NO: 6244 - DNA, 22 bp, synthetic construct
  misc_feature 1..22: note = chemically synthesized
  source 1..22: mol_type = other DNA
ttcggctaggctttattgattt

SEQ ID NO: 6245 - DNA, 22 bp, synthetic construct
  misc_feature 1..22: note = chemically synthesized
  source 1..22: mol_type = other DNA
tcggctaggctttattgatttg

SEQ ID NO: 6246 - DNA, 22 bp, synthetic construct
  misc_feature 1..22: note = chemically synthesized
  source 1..22: mol_type = other DNA
cggctaggctttattgatttgc

SEQ ID NO: 6247 - DNA, 22 bp, synthetic construct
  misc_feature 1..22: note = chemically synthesized
  source 1..22: mol_type = other DNA
ggctaggctttattgatttgca

SEQ ID NO: 6248 - DNA, 22 bp, synthetic construct
  misc_feature 1..22: note = chemically synthesized
  source 1..22: mol_type = other DNA
ggctttattgatttgcaatgtg

SEQ ID NO: 6249 - DNA, 22 bp, synthetic construct
  misc_feature 1..22: note = chemically synthesized
  source 1..22: mol_type = other DNA
tattgatttgcaatgtgctgtg

SEQ ID NO: 6250 - DNA, 22 bp, synthetic construct
  misc_feature 1..22: note = chemically synthesized
  source 1..22: mol_type = other DNA
attgatttgcaatgtgctgtgt

SEQ ID NO: 6251 - DNA, 22 bp, synthetic construct
  misc_feature 1..22: note = chemically synthesized
  source 1..22: mol_type = other DNA
ttgatttgcaatgtgctgtgta

SEQ ID NO: 6252 - DNA, 22 bp, synthetic construct
  misc_feature 1..22: note = chemically synthesized
  source 1..22: mol_type = other DNA
atttgcaatgtgctgtgtaatt

SEQ ID NO: 6253 - DNA, 22 bp, synthetic construct
  misc_feature 1..22: note = chemically synthesized
  source 1..22: mol_type = other DNA
gcaatgtgctgtgtaattaaga

SEQ ID NO: 6254 - DNA, 22 bp, synthetic construct
  misc_feature 1..22: note = chemically synthesized
  source 1..22: mol_type = other DNA
caatgtgctgtgtaattaagag

SEQ ID NO: 6255 - DNA, 22 bp, synthetic construct
  misc_feature 1..22: note = chemically synthesized
  source 1..22: mol_type = other DNA
tgtaattaagaggcctctctac

SEQ ID NO: 6256 - DNA, 22 bp, synthetic construct
  misc_feature 1..22: note = chemically synthesized
  source 1..22: mol_type = other DNA
agaggcctctctacaaagtact

SEQ ID NO: 6257 - DNA, 22 bp, synthetic construct
  misc_feature 1..22: note = chemically synthesized
  source 1..22: mol_type = other DNA
tctacaaagtactgataatgaa

SEQ ID NO: 6258 - DNA, 22 bp, synthetic construct
  misc_feature 1..22: note = chemically synthesized
  source 1..22: mol_type = other DNA
tacaaagtactgataatgaaca

SEQ ID NO: 6259 - DNA, 22 bp, synthetic construct
  misc_feature 1..22: note = chemically synthesized
  source 1..22: mol_type = other DNA
caaagtactgataatgaacatg

SEQ ID NO: 6260 - DNA, 22 bp, synthetic construct
  misc_feature 1..22: note = chemically synthesized
  source 1..22: mol_type = other DNA
ataatgaacatgtaagcaatgc

SEQ ID NO: 6261 - DNA, 22 bp, synthetic construct
  misc_feature 1..22: note = chemically synthesized
  source 1..22: mol_type = other DNA
acttctaagttacattcatatc

SEQ ID NO: 6262 - DNA, 22 bp, synthetic construct
  misc_feature 1..22: note = chemically synthesized
  source 1..22: mol_type = other DNA
ctaagttacattcatatctgat

SEQ ID NO: 6263 - DNA, 22 bp, synthetic construct
  misc_feature 1..22: note = chemically synthesized
  source 1..22: mol_type = other DNA
taagttacattcatatctgatc

SEQ ID NO: 6264 - DNA, 22 bp, synthetic construct
  misc_feature 1..22: note = chemically synthesized
  source 1..22: mol_type = other DNA
agttacattcatatctgatctt

SEQ ID NO: 6265 - DNA, 22 bp, synthetic construct
  misc_feature 1..22: note = chemically synthesized
  source 1..22: mol_type = other DNA
cattcatatctgatcttatttg

SEQ ID NO: 6266 - DNA, 22 bp, synthetic construct
  misc_feature 1..22: note = chemically synthesized
  source 1..22: mol_type = other DNA
atatctgatcttatttgatttt

SEQ ID NO: 6267 - DNA, 22 bp, synthetic construct
  misc_feature 1..22: note = chemically synthesized
  source 1..22: mol_type = other DNA
atcttatttgattttcactagg

SEQ ID NO: 6268 - DNA, 22 bp, synthetic construct
  misc_feature 1..22: note = chemically synthesized
  source 1..22: mol_type = other DNA
atttgattttcactaggcatag

SEQ ID NO: 6269 - DNA, 22 bp, synthetic construct
  misc_feature 1..22: note = chemically synthesized
  source 1..22: mol_type = other DNA
tttgattttcactaggcatagg

SEQ ID NO: 6270 - DNA, 22 bp, synthetic construct
  misc_feature 1..22: note = chemically synthesized
  source 1..22: mol_type = other DNA
gattttcactaggcatagggag

SEQ ID NO: 6271 - DNA, 22 bp, synthetic construct
  misc_feature 1..22: note = chemically synthesized
  source 1..22: mol_type = other DNA
attttcactaggcatagggagg

SEQ ID NO: 6272 - DNA, 22 bp, synthetic construct
  misc_feature 1..22: note = chemically synthesized
  source 1..22: mol_type = other DNA
tcactaggcatagggaggtagg

SEQ ID NO: 6273 - DNA, 22 bp, synthetic construct
  misc_feature 1..22: note = chemically synthesized
  source 1..22: mol_type = other DNA
cactaggcatagggaggtagga

SEQ ID NO: 6274 - DNA, 22 bp, synthetic construct
  misc_feature 1..22: note = chemically synthesized
  source 1..22: mol_type = other DNA
actaggcatagggaggtaggag

SEQ ID NO: 6275 - DNA, 22 bp, synthetic construct
  misc_feature 1..22: note = chemically synthesized
  source 1..22: mol_type = other DNA
ggcatagggaggtaggagctaa

SEQ ID NO: 6276 - DNA, 22 bp, synthetic construct
  misc_feature 1..22: note = chemically synthesized
  source 1..22: mol_type = other DNA
ataatacgtttattttactaga

SEQ ID NO: 6277 - DNA, 22 bp, synthetic construct
  misc_feature 1..22: note = chemically synthesized
  source 1..22: mol_type = other DNA
attttactagaagttaactgga

SEQ ID NO: 6278 - DNA, 22 bp, synthetic construct
  misc_feature 1..22: note = chemically synthesized
  source 1..22: mol_type = other DNA
ttttactagaagttaactggaa

SEQ ID NO: 6279 - DNA, 22 bp, synthetic construct
  misc_feature 1..22: note = chemically synthesized
  source 1..22: mol_type = other DNA
tactagaagttaactggaattc

SEQ ID NO: 6280 - DNA, 22 bp, synthetic construct
  misc_feature 1..22: note = chemically synthesized
  source 1..22: mol_type = other DNA
actagaagttaactggaattca

SEQ ID NO: 6281 - DNA, 22 bp, synthetic construct
  misc_feature 1..22: note = chemically synthesized
  source 1..22: mol_type = other DNA
ctagaagttaactggaattcag

SEQ ID NO: 6282 - DNA, 22 bp, synthetic construct
  misc_feature 1..22: note = chemically synthesized
  source 1..22: mol_type = other DNA
gaagttaactggaattcagatt

SEQ ID NO: 6283 - DNA, 22 bp, synthetic construct
  misc_feature 1..22: note = chemically synthesized
  source 1..22: mol_type = other DNA
actggaattcagattatataac

SEQ ID NO: 6284 - DNA, 22 bp, synthetic construct
  misc_feature 1..22: note = chemically synthesized
  source 1..22: mol_type = other DNA
gaattcagattatataactctt

SEQ ID NO: 6285 - DNA, 22 bp, synthetic construct
  misc_feature 1..22: note = chemically synthesized
  source 1..22: mol_type = other DNA
agattatataactcttttcagg

SEQ ID NO: 6286 - DNA, 22 bp, synthetic construct
  misc_feature 1..22: note = chemically synthesized
  source 1..22: mol_type = other DNA
tataactcttttcaggttacaa

SEQ ID NO: 6287 - DNA, 22 bp, synthetic construct
  misc_feature 1..22: note = chemically synthesized
  source 1..22: mol_type = other DNA
ttttcaggttacaaagaacata

SEQ ID NO: 6288 - DNA, 22 bp, synthetic construct
  misc_feature 1..22: note = chemically synthesized
  source 1..22: mol_type = other DNA
ttcaggttacaaagaacataaa

SEQ ID NO: 6289 - DNA, 22 bp, synthetic construct
  misc_feature 1..22: note = chemically synthesized
  source 1..22: mol_type = other DNA
tcaggttacaaagaacataaat

SEQ ID NO: 6290 - DNA, 22 bp, synthetic construct
  misc_feature 1..22: note = chemically synthesized
  source 1..22: mol_type = other DNA
caggttacaaagaacataaata

SEQ ID NO: 6291 - DNA, 22 bp, synthetic construct
  misc_feature 1..22: note = chemically synthesized
  source 1..22: mol_type = other DNA
aggttacaaagaacataaataa

SEQ ID NO: 6292 - DNA, 22 bp, synthetic construct
  misc_feature 1..22: note = chemically synthesized
  source 1..22: mol_type = other DNA
caaagaacataaataatctggt

SEQ ID NO: 6293 - DNA, 22 bp, synthetic construct
  misc_feature 1..22: note = chemically synthesized
  source 1..22: mol_type = other DNA
gttttctgatgttatttcaagt

SEQ ID NO: 6294 - DNA, 22 bp, synthetic construct
  misc_feature 1..22: note = chemically synthesized
  source 1..22: mol_type = other DNA
tctgatgttatttcaagtacta

SEQ ID NO: 6295 - DNA, 22 bp, synthetic construct
  misc_feature 1..22: note = chemically synthesized
  source 1..22: mol_type = other DNA
ctgatgttatttcaagtactac

SEQ ID NO: 6296 - DNA, 22 bp, synthetic construct
  misc_feature 1..22: note = chemically synthesized
  source 1..22: mol_type = other DNA
tgatgttatttcaagtactaca

SEQ ID NO: 6297 - DNA, 22 bp, synthetic construct
  misc_feature 1..22: note = chemically synthesized
  source 1..22: mol_type = other DNA
atgttatttcaagtactacagc

SEQ ID NO: 6298 - DNA, 22 bp, synthetic construct
  misc_feature 1..22: note = chemically synthesized
  source 1..22: mol_type = other DNA
tttcaagtactacagctgcttc

SEQ ID NO: 6299 - DNA, 22 bp, synthetic construct
  misc_feature 1..22: note = chemically synthesized
  source 1..22: mol_type = other DNA
caagtactacagctgcttctaa

SEQ ID NO: 6300 - DNA, 22 bp, synthetic construct
  misc_feature 1..22: note = chemically synthesized
  source 1..22: mol_type = other DNA
aagtactacagctgcttctaat

SEQ ID NO: 6301 - DNA, 22 bp, synthetic construct
  misc_feature 1..22: note = chemically synthesized
  source 1..22: mol_type = other DNA
cagctgcttctaatcttagttg

SEQ ID NO: 6302 - DNA, 22 bp, synthetic construct
  misc_feature 1..22: note = chemically synthesized
  source 1..22: mol_type = other DNA
cttctaatcttagttgacagtg

SEQ ID NO: 6303 - DNA, 22 bp, synthetic construct
  misc_feature 1..22: note = chemically synthesized
  source 1..22: mol_type = other DNA
ctaatcttagttgacagtgatt

SEQ ID NO: 6304 - DNA, 22 bp, synthetic construct
  misc_feature 1..22: note = chemically synthesized
  source 1..22: mol_type = other DNA
taatcttagttgacagtgattt

SEQ ID NO: 6305 - DNA, 22 bp, synthetic construct
  misc_feature 1..22: note = chemically synthesized
  source 1..22: mol_type = other DNA
atcttagttgacagtgattttg

SEQ ID NO: 6306 - DNA, 22 bp, synthetic construct
  misc_feature 1..22: note = chemically synthesized
  source 1..22: mol_type = other DNA
agttgacagtgattttgccctg

SEQ ID NO: 6307 - DNA, 22 bp, synthetic construct
  misc_feature 1..22: note = chemically synthesized
  source 1..22: mol_type = other DNA
gttgacagtgattttgccctgt

SEQ ID NO: 6308 - DNA, 22 bp, synthetic construct
  misc_feature 1..22: note = chemically synthesized
  source 1..22: mol_type = other DNA
acagtgattttgccctgtagtg

SEQ ID NO: 6309 - DNA, 22 bp, synthetic construct
  misc_feature 1..22: note = chemically synthesized
  source 1..22: mol_type = other DNA
tgccctgtagtgtagcacagtg

SEQ ID NO: 6310 - DNA, 22 bp, synthetic construct
  misc_feature 1..22: note = chemically synthesized
  source 1..22: mol_type = other DNA
gccctgtagtgtagcacagtgt

SEQ ID NO: 6311 - DNA, 22 bp, synthetic construct
  misc_feature 1..22: note = chemically synthesized
  source 1..22: mol_type = other DNA
ccctgtagtgtagcacagtgtt

SEQ ID NO: 6312 - DNA, 22 bp, synthetic construct
  misc_feature 1..22: note = chemically synthesized
  source 1..22: mol_type = other DNA
tagtgtagcacagtgttctgtg

SEQ ID NO: 6313 - DNA, 22 bp, synthetic construct
  misc_feature 1..22: note = chemically synthesized
  source 1..22: mol_type = other DNA
tgtgggtcacacgccggcctca

SEQ ID NO: 6314 - DNA, 22 bp, synthetic construct
  misc_feature 1..22: note = chemically synthesized
  source 1..22: mol_type = other DNA
tgggtcacacgccggcctcagc

SEQ ID NO: 6315 - DNA, 22 bp, synthetic construct
  misc_feature 1..22: note = chemically synthesized
  source 1..22: mol_type = other DNA
agcacagcactttgagttttgg

SEQ ID NO: 6316 - DNA, 22 bp, synthetic construct
  misc_feature 1..22: note = chemically synthesized
  source 1..22: mol_type = other DNA
tgagttttggtactacgtgtat

SEQ ID NO: 6317 - DNA, 22 bp, synthetic construct
  misc_feature 1..22: note = chemically synthesized
  source 1..22: mol_type = other DNA
gagttttggtactacgtgtatc

SEQ ID NO: 6318 - DNA, 22 bp, synthetic construct
  misc_feature 1..22: note = chemically synthesized
  source 1..22: mol_type = other DNA
agttttggtactacgtgtatcc

SEQ ID NO: 6319 - DNA, 22 bp, synthetic construct
  misc_feature 1..22: note = chemically synthesized
  source 1..22: mol_type = other DNA
tggtactacgtgtatccacatt

SEQ ID NO: 6320 - DNA, 22 bp, synthetic construct
  misc_feature 1..22: note = chemically synthesized
  source 1..22: mol_type = other DNA
ggtactacgtgtatccacattt

SEQ ID NO: 6321 - DNA, 22 bp, synthetic construct
  misc_feature 1..22: note = chemically synthesized
  source 1..22: mol_type = other DNA
gtactacgtgtatccacatttt

SEQ ID NO: 6322 - DNA, 22 bp, synthetic construct
  misc_feature 1..22: note = chemically synthesized
  source 1..22: mol_type = other DNA
cgtgtatccacattttacacat

SEQ ID NO: 6323 - DNA, 22 bp, synthetic construct
  misc_feature 1..22: note = chemically synthesized
  source 1..22: mol_type = other DNA
tacacatgacaagaatgaggca

SEQ ID NO: 6324 - DNA, 22 bp, synthetic construct
  misc_feature 1..22: note = chemically synthesized
  source 1..22: mol_type = other DNA
acacatgacaagaatgaggcat

SEQ ID NO: 6325 - DNA, 22 bp, synthetic construct
  misc_feature 1..22: note = chemically synthesized
  source 1..22: mol_type = other DNA
cacatgacaagaatgaggcatg

SEQ ID NO: 6326 - DNA, 22 bp, synthetic construct
  misc_feature 1..22: note = chemically synthesized
  source 1..22: mol_type = other DNA
cttcctggcaaatttattcaat

SEQ ID NO: 6327 - DNA, 22 bp, synthetic construct
  misc_feature 1..22: note = chemically synthesized
  source 1..22: mol_type = other DNA
cctggcaaatttattcaatggt

SEQ ID NO: 6328 - DNA, 22 bp, synthetic construct
  misc_feature 1..22: note = chemically synthesized
  source 1..22: mol_type = other DNA
ctggcaaatttattcaatggta

SEQ ID NO: 6329 - DNA, 22 bp, synthetic construct
  misc_feature 1..22: note = chemically synthesized
  source 1..22: mol_type = other DNA
gcaaatttattcaatggtacac

SEQ ID NO: 6330 - DNA, 22 bp, synthetic construct
  misc_feature 1..22: note = chemically synthesized
  source 1..22: mol_type = other DNA
attcaatggtacactgggcttt

SEQ ID NO: 6331 - DNA, 22 bp, synthetic construct
  misc_feature 1..22: note = chemically synthesized
  source 1..22: mol_type = other DNA
ttcaatggtacactgggctttg

SEQ ID NO: 6332 - DNA, 22 bp, synthetic construct
  misc_feature 1..22: note = chemically synthesized
  source 1..22: mol_type = other DNA
aatggtacactgggctttggtg

SEQ ID NO: 6333 - DNA, 22 bp, synthetic construct
  misc_feature 1..22: note = chemically synthesized
  source 1..22: mol_type = other DNA
ggctttggtggcagagctcatg

SEQ ID NO: 6334 - DNA, 22 bp, synthetic construct
  misc_feature 1..22: note = chemically synthesized
  source 1..22: mol_type = other DNA
tggtggcagagctcatgtctcc

SEQ ID NO: 6335 - DNA, 22 bp, synthetic construct
  misc_feature 1..22: note = chemically synthesized
  source 1..22: mol_type = other DNA
ggtggcagagctcatgtctcca

SEQ ID NO: 6336 - DNA, 22 bp, synthetic construct
  misc_feature 1..22: note = chemically synthesized
  source 1..22: mol_type = other DNA
gtggcagagctcatgtctccac

SEQ ID NO: 6337 - DNA, 22 bp, synthetic construct
  misc_feature 1..22: note = chemically synthesized
  source 1..22: mol_type = other DNA
atgtctccacttcatagctatg

SEQ ID NO: 6338 - DNA, 22 bp, synthetic construct
  misc_feature 1..22: note = chemically synthesized
  source 1..22: mol_type = other DNA
cacttcatagctatgattctta

SEQ ID NO: 6339 - DNA, 22 bp, synthetic construct
  misc_feature 1..22: note = chemically synthesized
  source 1..22: mol_type = other DNA
catagctatgattcttaaacat

SEQ ID NO: 6340 - DNA, 22 bp, synthetic construct
  misc_feature 1..22: note = chemically synthesized
  source 1..22: mol_type = other DNA
atagctatgattcttaaacatc

SEQ ID NO: 6341 - DNA, 22 bp, synthetic construct
  misc_feature 1..22: note = chemically synthesized
  source 1..22: mol_type = other DNA
tgattcttaaacatcacactgc

SEQ ID NO: 6342 - DNA, 22 bp, synthetic construct
  misc_feature 1..22: note = chemically synthesized
  source 1..22: mol_type = other DNA
ttaaacatcacactgcattaga

SEQ ID NO: 6343 - DNA, 22 bp, synthetic construct
  misc_feature 1..22: note = chemically synthesized
  source 1..22: mol_type = other DNA
aaacatcacactgcattagagg

SEQ ID NO: 6344 - DNA, 22 bp, synthetic construct
  misc_feature 1..22: note = chemically synthesized
  source 1..22: mol_type = other DNA
aacatcacactgcattagaggt

SEQ ID NO: 6345 - DNA, 22 bp, synthetic construct
  misc_feature 1..22: note = chemically synthesized
  source 1..22: mol_type = other DNA
cattagaggttgaataataaaa

SEQ ID NO: 6346 - DNA, 22 bp, synthetic construct
  misc_feature 1..22: note = chemically synthesized
  source 1..22: mol_type = other DNA
gaggttgaataataaaatttca

SEQ ID NO: 6347 - DNA, 22 bp, synthetic construct
  misc_feature 1..22: note = chemically synthesized
  source 1..22: mol_type = other DNA
aataataaaatttcatgttgag

SEQ ID NO: 6348 - DNA, 22 bp, synthetic construct
  misc_feature 1..22: note = chemically synthesized
  source 1..22: mol_type = other DNA
catgttgagcagaaatattcat

SEQ ID NO: 6349 - DNA, 22 bp, synthetic construct
  misc_feature 1..22: note = chemically synthesized
  source 1..22: mol_type = other DNA
atgttgagcagaaatattcatt

SEQ ID NO: 6350 - DNA, 22 bp, synthetic construct
  misc_feature 1..22: note = chemically synthesized
  source 1..22: mol_type = other DNA
agcagaaatattcattgtttac

SEQ ID NO: 6351 - DNA, 22 bp, synthetic construct
  misc_feature 1..22: note = chemically synthesized
  source 1..22: mol_type = other DNA
attgtttacaagtgtaaatgag

SEQ ID NO: 6352 - DNA, 22 bp, synthetic construct
  misc_feature 1..22: note = chemically synthesized
  source 1..22: mol_type = other DNA
tttacaagtgtaaatgagtccc

SEQ ID NO: 6353 - DNA, 22 bp, synthetic construct
  misc_feature 1..22: note = chemically synthesized
  source 1..22: mol_type = other DNA
acaagtgtaaatgagtcccagc

SEQ ID NO: 6354 - DNA, 22 bp, synthetic construct
  misc_feature 1..22: note = chemically synthesized
  source 1..22: mol_type = other DNA
caagtgtaaatgagtcccagcc

SEQ ID NO: 6355 - DNA, 22 bp, synthetic construct
  misc_feature 1..22: note = chemically synthesized
  source 1..22: mol_type = other DNA
cactgttcaagccccaagggag

SEQ ID NO: 6356 - DNA, 22 bp, synthetic construct
  misc_feature 1..22: note = chemically synthesized
  source 1..22: mol_type = other DNA
ttcaagccccaagggagagagc

SEQ ID NO: 6357 - DNA, 22 bp, synthetic construct
  misc_feature 1..22: note = chemically synthesized
  source 1..22: mol_type = other DNA
aagccccaagggagagagcagg

SEQ ID NO: 6358 - DNA, 22 bp, synthetic construct
  misc_feature 1..22: note = chemically synthesized
  source 1..22: mol_type = other DNA
taccctttgatattttgcattc

SEQ ID NO: 6359 - DNA, 22 bp, synthetic construct
  misc_feature 1..22: note = chemically synthesized
  source 1..22: mol_type = other DNA
accctttgatattttgcattct

SEQ ID NO: 6360 - DNA, 22 bp, synthetic construct
  misc_feature 1..22: note = chemically synthesized
  source 1..22: mol_type = other DNA
ccctttgatattttgcattcta

SEQ ID NO: 6361 - DNA, 22 bp, synthetic construct
  misc_feature 1..22: note = chemically synthesized
  source 1..22: mol_type = other DNA
tgatattttgcattctagtggg

SEQ ID NO: 6362 - DNA, 22 bp, synthetic construct
  misc_feature 1..22: note = chemically synthesized
  source 1..22: mol_type = other DNA
gatattttgcattctagtggga

SEQ ID NO: 6363 - DNA, 22 bp, synthetic construct
  misc_feature 1..22: note = chemically synthesized
  source 1..22: mol_type = other DNA
atattttgcattctagtgggag

SEQ ID NO: 6364 - DNA, 22 bp, synthetic construct
  misc_feature 1..22: note = chemically synthesized
  source 1..22: mol_type = other DNA
tgcattctagtgggagagatga

SEQ ID NO: 6365 - DNA, 22 bp, synthetic construct
  misc_feature 1..22: note = chemically synthesized
  source 1..22: mol_type = other DNA
gcattctagtgggagagatgac

SEQ ID NO: 6366 - DNA, 22 bp, synthetic construct
  misc_feature 1..22: note = chemically synthesized
  source 1..22: mol_type = other DNA
cattctagtgggagagatgaca

SEQ ID NO: 6367 - DNA, 22 bp, synthetic construct
  misc_feature 1..22: note = chemically synthesized
  source 1..22: mol_type = other DNA
tagtgggagagatgacaataag

SEQ ID NO: 6368 - DNA, 22 bp, synthetic construct
  misc_feature 1..22: note = chemically synthesized
  source 1..22: mol_type = other DNA
gtgggagagatgacaataagca

SEQ ID NO: 6369 - DNA, 22 bp, synthetic construct
  misc_feature 1..22: note = chemically synthesized
  source 1..22: mol_type = other DNA
tgagaagcagagaagtcagggc

SEQ ID NO: 6370 - DNA, 22 bp, synthetic construct
  misc_feature 1..22: note = chemically synthesized
  source 1..22: mol_type = other DNA
tggggctgacacttgagcagag

SEQ ID NO: 6371 - DNA, 22 bp, synthetic construct
  misc_feature 1..22: note = chemically synthesized
  source 1..22: mol_type = other DNA
gggctgacacttgagcagagac

SEQ ID NO: 6372 - DNA, 22 bp, synthetic construct
  misc_feature 1..22: note = chemically synthesized
  source 1..22: mol_type = other DNA
acacttgagcagagacatgaag

SEQ ID NO: 6373 - DNA, 22 bp, synthetic construct
  misc_feature 1..22: note = chemically synthesized
  source 1..22: mol_type = other DNA
gagcagagacatgaaggaaata

SEQ ID NO: 6374 - DNA, 22 bp, synthetic construct
  misc_feature 1..22: note = chemically synthesized
  source 1..22: mol_type = other DNA
agcagagacatgaaggaaataa

SEQ ID NO: 6375 - DNA, 22 bp, synthetic construct
  misc_feature 1..22: note = chemically synthesized
  source 1..22: mol_type = other DNA
actgggagcagtatttcccagg

SEQ ID NO: 6376 - DNA, 22 bp, synthetic construct
  misc_feature 1..22: note = chemically synthesized
  source 1..22: mol_type = other DNA
ggagcagtatttcccaggcaaa

SEQ ID NO: 6377 - DNA, 22 bp, synthetic construct
  misc_feature 1..22: note = chemically synthesized
  source 1..22: mol_type = other DNA
cccaggcaaactgagtgggcct

SEQ ID NO: 6378 - DNA, 22 bp, synthetic construct
  misc_feature 1..22: note = chemically synthesized
  source 1..22: mol_type = other DNA
ccaggcaaactgagtgggcctg

SEQ ID NO: 6379 - DNA, 22 bp, synthetic construct
  misc_feature 1..22: note = chemically synthesized
  source 1..22: mol_type = other DNA
agtgggcctggcaagttggatt

SEQ ID NO: 6380 - DNA, 22 bp, synthetic construct
  misc_feature 1..22: note = chemically synthesized
  source 1..22: mol_type = other DNA
gcaagttggattaaaaagcggg

SEQ ID NO: 6381 - DNA, 22 bp, synthetic construct
  misc_feature 1..22: note = chemically synthesized
  source 1..22: mol_type = other DNA
gattaaaaagcgggttttctca

SEQ ID NO: 6382 - DNA, 22 bp, synthetic construct
  misc_feature 1..22: note = chemically synthesized
  source 1..22: mol_type = other DNA
aaaagcgggttttctcagcact

SEQ ID NO: 6383 - DNA, 22 bp, synthetic construct
  misc_feature 1..22: note = chemically synthesized
  source 1..22: mol_type = other DNA
tctcagcactactcatgtgtgt

SEQ ID NO: 6384 - DNA, 22 bp, synthetic construct
  misc_feature 1..22: note = chemically synthesized
  source 1..22: mol_type = other DNA
ctcagcactactcatgtgtgtg

SEQ ID NO: 6385 - DNA, 22 bp, synthetic construct
  misc_feature 1..22: note = chemically synthesized
  source 1..22: mol_type = other DNA
tcagcactactcatgtgtgtgt

SEQ ID NO: 6386 - DNA, 22 bp, synthetic construct
  misc_feature 1..22: note = chemically synthesized
  source 1..22: mol_type = other DNA
agcactactcatgtgtgtgtgt

SEQ ID NO: 6387 - DNA, 22 bp, synthetic construct
  misc_feature 1..22: note = chemically synthesized
  source 1..22: mol_type = other DNA
ctcatgtgtgtgtgtgtggggg

SEQ ID NO: 6388 - DNA, 22 bp, synthetic construct
  misc_feature 1..22: note = chemically synthesized
  source 1..22: mol_type = other DNA
atgtgtgtgtgtgtgggggggg

SEQ ID NO: 6389 - DNA, 22 bp, synthetic construct
  misc_feature 1..22: note = chemically synthesized
  source 1..22: mol_type = other DNA
ccatctgcatgtaggatgtcta

SEQ ID NO: 6390 - DNA, 22 bp, synthetic construct
  misc_feature 1..22: note = chemically synthesized
  source 1..22: mol_type = other DNA
catgtaggatgtctagcagtat

SEQ ID NO: 6391 - DNA, 22 bp, synthetic construct
  misc_feature 1..22: note = chemically synthesized
  source 1..22: mol_type = other DNA
gcagtatcctgtcctccctact

SEQ ID NO: 6392 - DNA, 22 bp, synthetic construct
  misc_feature 1..22: note = chemically synthesized
  source 1..22: mol_type = other DNA
tcctccctactcactaggtgct

SEQ ID NO: 6393 - DNA, 22 bp, synthetic construct
  misc_feature 1..22: note = chemically synthesized
  source 1..22: mol_type = other DNA
cctactcactaggtgctaggag

SEQ ID NO: 6394 - DNA, 22 bp, synthetic construct
  misc_feature 1..22: note = chemically synthesized
  source 1..22: mol_type = other DNA
ctcactaggtgctaggagcact

SEQ ID NO: 6395 - DNA, 22 bp, synthetic construct
  misc_feature 1..22: note = chemically synthesized
  source 1..22: mol_type = other DNA
actaggtgctaggagcactccc

SEQ ID NO: 6396 - DNA, 22 bp, synthetic construct
  misc_feature 1..22: note = chemically synthesized
  source 1..22: mol_type = other DNA
ggtgctaggagcactcccccag

SEQ ID NO: 6397 - DNA, 22 bp, synthetic construct
  misc_feature 1..22: note = chemically synthesized
  source 1..22: mol_type = other DNA
ggagcactcccccagtcttgac

SEQ ID NO: 6398 - DNA, 22 bp, synthetic construct
  misc_feature 1..22: note = chemically synthesized
  source 1..22: mol_type = other DNA
ccccagtcttgacaaccaaaaa

SEQ ID NO: 6399 - DNA, 22 bp, synthetic construct
  misc_feature 1..22: note = chemically synthesized
  source 1..22: mol_type = other DNA
gacaaccaaaaatgtctctaaa

SEQ ID NO: 6400 - DNA, 22 bp, synthetic construct
  misc_feature 1..22: note = chemically synthesized
  source 1..22: mol_type = other DNA
acaaccaaaaatgtctctaaac

SEQ ID NO: 6401 - DNA, 22 bp, synthetic construct
  misc_feature 1..22: note = chemically synthesized
  source 1..22: mol_type = other DNA
taaactttgccacatgtcacct

SEQ ID NO: 6402 - DNA, 22 bp, synthetic construct
  misc_feature 1..22: note = chemically synthesized
  source 1..22: mol_type = other DNA
aactttgccacatgtcacctag

SEQ ID NO: 6403 - DNA, 22 bp, synthetic construct
  misc_feature 1..22: note = chemically synthesized
  source 1..22: mol_type = other DNA
tgccacatgtcacctagtagac

SEQ ID NO: 6404 - DNA, 22 bp, synthetic construct
  misc_feature 1..22: note = chemically synthesized
  source 1..22: mol_type = other DNA
gccacatgtcacctagtagaca

SEQ ID NO: 6405 - DNA, 22 bp, synthetic construct
  misc_feature 1..22: note = chemically synthesized
  source 1..22: mol_type = other DNA
ccacatgtcacctagtagacaa

SEQ ID NO: 6406 - DNA, 22 bp, synthetic construct
  misc_feature 1..22: note = chemically synthesized
  source 1..22: mol_type = other DNA
gtagacaaactcctggttaaga

SEQ ID NO: 6407 - DNA, 22 bp, synthetic construct
  misc_feature 1..22: note = chemically synthesized
  source 1..22: mol_type = other DNA
ctggttaagaagctcgggttga

SEQ ID NO: 6408 - DNA, 22 bp, synthetic construct
  misc_feature 1..22: note = chemically synthesized
  source 1..22: mol_type = other DNA
gttaagaagctcgggttgaaaa

SEQ ID NO: 6409 - DNA, 22 bp, synthetic construct
  misc_feature 1..22: note = chemically synthesized
  source 1..22: mol_type = other DNA
agaagctcgggttgaaaaaaat

SEQ ID NO: 6410 - DNA, 22 bp, synthetic construct
  misc_feature 1..22: note = chemically synthesized
  source 1..22: mol_type = other DNA
gggttgaaaaaaataaacaagt

SEQ ID NO: 6411 - DNA, 22 bp, synthetic construct
  misc_feature 1..22: note = chemically synthesized
  source 1..22: mol_type = other DNA
aaaaaaataaacaagtagtgct

SEQ ID NO: 6412 - DNA, 22 bp, synthetic construct
  misc_feature 1..22: note = chemically synthesized
  source 1..22: mol_type = other DNA
gggagtagaggccaagaagtag

SEQ ID NO: 6413 - DNA, 22 bp, synthetic construct
  misc_feature 1..22: note = chemically synthesized
  source 1..22: mol_type = other DNA
agaagaggagccacaaacaagg

SEQ ID NO: 6414 - DNA, 22 bp, synthetic construct
  misc_feature 1..22: note = chemically synthesized
  source 1..22: mol_type = other DNA
tgcaggcgcctgtaggctgtgg

SEQ ID NO: 6415 - DNA, 22 bp, synthetic construct
  misc_feature 1..22: note = chemically synthesized
  source 1..22: mol_type = other DNA
taggctgtggtgtgaattctag

SEQ ID NO: 6416 - DNA, 22 bp, synthetic construct
  misc_feature 1..22: note = chemically synthesized
  source 1..22: mol_type = other DNA
tggtgtgaattctagccaagga

SEQ ID NO: 6417 - DNA, 22 bp, synthetic construct
  misc_feature 1..22: note = chemically synthesized
  source 1..22: mol_type = other DNA
tagccaaggagtaacagtgatc

SEQ ID NO: 6418 - DNA, 22 bp, synthetic construct
  misc_feature 1..22: note = chemically synthesized
  source 1..22: mol_type = other DNA
gccaaggagtaacagtgatctg

SEQ ID NO: 6419 - DNA, 22 bp, synthetic construct
  misc_feature 1..22: note = chemically synthesized
  source 1..22: mol_type = other DNA
tcacaggcttttaaaagattgc

SEQ ID NO: 6420 - DNA, 22 bp, synthetic construct
  misc_feature 1..22: note = chemically synthesized
  source 1..22: mol_type = other DNA
ttaaaagattgctctggctgct

SEQ ID NO: 6421 - DNA, 22 bp, synthetic construct
  misc_feature 1..22: note = chemically synthesized
  source 1..22: mol_type = other DNA
taaaagattgctctggctgcta

SEQ ID NO: 6422 - DNA, 22 bp, synthetic construct
  misc_feature 1..22: note = chemically synthesized
  source 1..22: mol_type = other DNA
aaaagattgctctggctgctat

SEQ ID NO: 6423 - DNA, 22 bp, synthetic construct
  misc_feature 1..22: note = chemically synthesized
  source 1..22: mol_type = other DNA
aaagattgctctggctgctatg

SEQ ID NO: 6424 - DNA, 22 bp, synthetic construct
  misc_feature 1..22: note = chemically synthesized
  source 1..22: mol_type = other DNA
ctctggctgctatgtggaaagc

SEQ ID NO: 6425 - DNA, 22 bp, synthetic construct
  misc_feature 1..22: note = chemically synthesized
  source 1..22: mol_type = other DNA
tggctgctatgtggaaagcaga

SEQ ID NO: 6426 - DNA, 22 bp, synthetic construct
  misc_feature 1..22: note = chemically synthesized
  source 1..22: mol_type = other DNA
gctgctatgtggaaagcagaat

SEQ ID NO: 6427 - DNA, 22 bp, synthetic construct
  misc_feature 1..22: note = chemically synthesized
  source 1..22: mol_type = other DNA
ctatgtggaaagcagaatgaag

SEQ ID NO: 6428 - DNA, 22 bp, synthetic construct
  misc_feature 1..22: note = chemically synthesized
  source 1..22: mol_type = other DNA
tgtggaaagcagaatgaaggga

SEQ ID NO: 6429 - DNA, 22 bp, synthetic construct
  misc_feature 1..22: note = chemically synthesized
  source 1..22: mol_type = other DNA
ttacacagtccaggcaagaggt

SEQ ID NO: 6430 - DNA, 22 bp, synthetic construct
  misc_feature 1..22: note = chemically synthesized
  source 1..22: mol_type = other DNA
cacagtccaggcaagaggtagt

SEQ ID NO: 6431 - DNA, 22 bp, synthetic construct
  misc_feature 1..22: note = chemically synthesized
  source 1..22: mol_type = other DNA
ggtgggaacagaaaagggagtg

SEQ ID NO: 6432 - DNA, 22 bp, synthetic construct
  misc_feature 1..22: note = chemically synthesized
  source 1..22: mol_type = other DNA
tctcctgaatatattctgaagg

SEQ ID NO: 6433 - DNA, 22 bp, synthetic construct
  misc_feature 1..22: note = chemically synthesized
  source 1..22: mol_type = other DNA
ctgaatatattctgaaggaagt

SEQ ID NO: 6434 - DNA, 22 bp, synthetic construct
  misc_feature 1..22: note = chemically synthesized
  source 1..22: mol_type = other DNA
aatatattctgaaggaagttgc

SEQ ID NO: 6435 - DNA, 22 bp, synthetic construct
  misc_feature 1..22: note = chemically synthesized
  source 1..22: mol_type = other DNA
tgaaggaagttgctgaaggatt

SEQ ID NO: 6436 - DNA, 22 bp, synthetic construct
  misc_feature 1..22: note = chemically synthesized
  source 1..22: mol_type = other DNA
aaggaagttgctgaaggattct

SEQ ID NO: 6437 - DNA, 22 bp, synthetic construct
  misc_feature 1..22: note = chemically synthesized
  source 1..22: mol_type = other DNA
ctgaaggattctatgttgtgtg

SEQ ID NO: 6438 - DNA, 22 bp, synthetic construct
  misc_feature 1..22: note = chemically synthesized
  source 1..22: mol_type = other DNA
aaggattctatgttgtgtgaga

SEQ ID NO: 6439 - DNA, 22 bp, synthetic construct
  misc_feature 1..22: note = chemically synthesized
  source 1..22: mol_type = other DNA
tatgttgtgtgagagaaagaga

SEQ ID NO: 6440 - DNA, 22 bp, synthetic construct
  misc_feature 1..22: note = chemically synthesized
  source 1..22: mol_type = other DNA
tgttgtgtgagagaaagagaag

SEQ ID NO: 6441 - DNA, 22 bp, synthetic construct
  misc_feature 1..22: note = chemically synthesized
  source 1..22: mol_type = other DNA
tgtgagagaaagagaagaattg

SEQ ID NO: 6442 - DNA, 22 bp, synthetic construct
  misc_feature 1..22: note = chemically synthesized
  source 1..22: mol_type = other DNA
gctgggtgtagtagctcatgcc

SEQ ID NO: 6443 - DNA, 22 bp, synthetic construct
  misc_feature 1..22: note = chemically synthesized
  source 1..22: mol_type = other DNA
ggtgtagtagctcatgccaagg

SEQ ID NO: 6444 - DNA, 22 bp, synthetic construct
  misc_feature 1..22: note = chemically synthesized
  source 1..22: mol_type = other DNA
atgccaaggaggaggccaagga

SEQ ID NO: 6445 - DNA, 22 bp, synthetic construct
  misc_feature 1..22: note = chemically synthesized
  source 1..22: mol_type = other DNA
ctgagctcaggagttcaagacc

SEQ ID NO: 6446 - DNA, 22 bp, synthetic construct
  misc_feature 1..22: note = chemically synthesized
  source 1..22: mol_type = other DNA
agctcaggagttcaagaccagc

SEQ ID NO: 6447 - DNA, 22 bp, synthetic construct
  misc_feature 1..22: note = chemically synthesized
  source 1..22: mol_type = other DNA
aggagttcaagaccagcctggg

SEQ ID NO: 6448 - DNA, 22 bp, synthetic construct
  misc_feature 1..22: note = chemically synthesized
  source 1..22: mol_type = other DNA
aagaccagcctgggcaacacag

SEQ ID NO: 6449 - DNA, 22 bp, synthetic construct
  misc_feature 1..22: note = chemically synthesized
  source 1..22: mol_type = other DNA
ggcaacacagcaaaaccccttc

SEQ ID NO: 6450 - DNA, 22 bp, synthetic construct
  misc_feature 1..22: note = chemically synthesized
  source 1..22: mol_type = other DNA
ctctacaaaaaatacaaaaatt

SEQ ID NO: 6451 - DNA, 22 bp, synthetic construct
  misc_feature 1..22: note = chemically synthesized
  source 1..22: mol_type = other DNA
tctacaaaaaatacaaaaatta

SEQ ID NO: 6452 - DNA, 22 bp, synthetic construct
  misc_feature 1..22: note = chemically synthesized
  source 1..22: mol_type = other DNA
tacaaaaaatacaaaaattagc

SEQ ID NO: 6453 - DNA, 22 bp, synthetic construct
  misc_feature 1..22: note = chemically synthesized
  source 1..22: mol_type = other DNA
caaaaaatacaaaaattagctg

SEQ ID NO: 6454 - DNA, 22 bp, synthetic construct
  misc_feature 1..22: note = chemically synthesized
  source 1..22: mol_type = other DNA
gctgggtgtggtggcatgcacc

SEQ ID NO: 6455 - DNA, 22 bp, synthetic construct
  misc_feature 1..22: note = chemically synthesized
  source 1..22: mol_type = other DNA
ggtgtggtggcatgcacctgtg

SEQ ID NO: 6456 - DNA, 22 bp, synthetic construct
  misc_feature 1..22: note = chemically synthesized
  source 1..22: mol_type = other DNA
tgatcctagctactcgggaggc

SEQ ID NO: 6457 - DNA, 22 bp, synthetic construct
  misc_feature 1..22: note = chemically synthesized
  source 1..22: mol_type = other DNA
gctactcgggaggctgaggtgg

SEQ ID NO: 6458 - DNA, 22 bp, synthetic construct
  misc_feature 1..22: note = chemically synthesized
  source 1..22: mol_type = other DNA
ctcgggaggctgaggtggaggg

SEQ ID NO: 6459 - DNA, 22 bp, synthetic construct
  misc_feature 1..22: note = chemically synthesized
  source 1..22: mol_type = other DNA
gggaggctgaggtggagggtat

SEQ ID NO: 6460 - DNA, 22 bp, synthetic construct
  misc_feature 1..22: note = chemically synthesized
  source 1..22: mol_type = other DNA
aggtggagggtattgcttgagc

SEQ ID NO: 6461 - DNA, 22 bp, synthetic construct
  misc_feature 1..22: note = chemically synthesized
  source 1..22: mol_type = other DNA
cttgagcccaggaagttgaggc

SEQ ID NO: 6462 - DNA, 22 bp, synthetic construct
  misc_feature 1..22: note = chemically synthesized
  source 1..22: mol_type = other DNA
gagcccaggaagttgaggctgc

SEQ ID NO: 6463 - DNA, 22 bp, synthetic construct
  misc_feature 1..22: note = chemically synthesized
  source 1..22: mol_type = other DNA
agcccaggaagttgaggctgca

SEQ ID NO: 6464 - DNA, 22 bp, synthetic construct
  misc_feature 1..22: note = chemically synthesized
  source 1..22: mol_type = other DNA
aggctgcagtgagccatgactg

SEQ ID NO: 6465 - DNA, 22 bp, synthetic construct
  misc_feature 1..22: note = chemically synthesized
  source 1..22: mol_type = other DNA
cagtgagccatgactgtgccac

SEQ ID NO: 6466 - DNA, 22 bp, synthetic construct
  misc_feature 1..22: note = chemically synthesized
  source 1..22: mol_type = other DNA
tgccactgtacttcagcctagg

SEQ ID NO: 6467 - DNA, 22 bp, synthetic construct
  misc_feature 1..22: note = chemically synthesized
  source 1..22: mol_type = other DNA
tacttcagcctaggtgacagag

SEQ ID NO: 6468 - DNA, 22 bp, synthetic construct
  misc_feature 1..22: note = chemically synthesized
  source 1..22: mol_type = other DNA
cagcctaggtgacagagcaaga

SEQ ID NO: 6469 - DNA, 22 bp, synthetic construct
  misc_feature 1..22: note = chemically synthesized
  source 1..22: mol_type = other DNA
agcctaggtgacagagcaagac

SEQ ID NO: 6470 - DNA, 22 bp, synthetic construct
  misc_feature 1..22: note = chemically synthesized
  source 1..22: mol_type = other DNA
ggtgacagagcaagaccctgtc

SEQ ID NO: 6471 - DNA, 22 bp, synthetic construct
  misc_feature 1..22: note = chemically synthesized
  source 1..22: mol_type = other DNA
tctcccctgaccccctgaaaaa

SEQ ID NO: 6472 - DNA, 22 bp, synthetic construct
  misc_feature 1..22: note = chemically synthesized
  source 1..22: mol_type = other DNA
ccctgaccccctgaaaaagaga

SEQ ID NO: 6473 - DNA, 22 bp, synthetic construct
  misc_feature 1..22: note = chemically synthesized
  source 1..22: mol_type = other DNA
accccctgaaaaagagaagagt

SEQ ID NO: 6474 - DNA, 22 bp, synthetic construct
  misc_feature 1..22: note = chemically synthesized
  source 1..22: mol_type = other DNA
aaaaagagaagagttaaagttg

SEQ ID NO: 6475 - DNA, 22 bp, synthetic construct
  misc_feature 1..22: note = chemically synthesized
  source 1..22: mol_type = other DNA
aagttgactttgttctttattt

SEQ ID NO: 6476 - DNA, 22 bp, synthetic construct
  misc_feature 1..22: note = chemically synthesized
  source 1..22: mol_type = other DNA
actttgttctttattttaattt

SEQ ID NO: 6477 - DNA, 22 bp, synthetic construct
  misc_feature 1..22: note = chemically synthesized
  source 1..22: mol_type = other DNA
tgttctttattttaattttatt

SEQ ID NO: 6478 - DNA, 22 bp, synthetic construct
  misc_feature 1..22: note = chemically synthesized
  source 1..22: mol_type = other DNA
gttctttattttaattttattg

SEQ ID NO: 6479 - DNA, 22 bp, synthetic construct
  misc_feature 1..22: note = chemically synthesized
  source 1..22: mol_type = other DNA
ttctttattttaattttattgg

SEQ ID NO: 6480 - DNA, 22 bp, synthetic construct
  misc_feature 1..22: note = chemically synthesized
  source 1..22: mol_type = other DNA
tttattttaattttattggcct

SEQ ID NO: 6481 - DNA, 22 bp, synthetic construct
  misc_feature 1..22: note = chemically synthesized
  source 1..22: mol_type = other DNA
tattttaattttattggcctga

SEQ ID NO: 6482 - DNA, 22 bp, synthetic construct
  misc_feature 1..22: note = chemically synthesized
  source 1..22: mol_type = other DNA
attttaattttattggcctgag

SEQ ID NO: 6483 - DNA, 22 bp, synthetic construct
  misc_feature 1..22: note = chemically synthesized
  source 1..22: mol_type = other DNA
ttttaattttattggcctgagc

SEQ ID NO: 6484 - DNA, 22 bp, synthetic construct
  misc_feature 1..22: note = chemically synthesized
  source 1..22: mol_type = other DNA
taattttattggcctgagcagt

SEQ ID NO: 6485 - DNA, 22 bp, synthetic construct
  misc_feature 1..22: note = chemically synthesized
  source 1..22: mol_type = other DNA
aattttattggcctgagcagtg

SEQ ID NO: 6486 - DNA, 22 bp, synthetic construct
  misc_feature 1..22: note = chemically synthesized
  source 1..22: mol_type = other DNA
attttattggcctgagcagtgg

SEQ ID NO: 6487 - DNA, 22 bp, synthetic construct
  misc_feature 1..22: note = chemically synthesized
  source 1..22: mol_type = other DNA
tattggcctgagcagtggggta

SEQ ID NO: 6488 - DNA, 22 bp, synthetic construct
  misc_feature 1..22: note = chemically synthesized
  source 1..22: mol_type = other DNA
attggcctgagcagtggggtaa

SEQ ID NO: 6489 - DNA, 22 bp, synthetic construct
  misc_feature 1..22: note = chemically synthesized
  source 1..22: mol_type = other DNA
ttggcctgagcagtggggtaat

SEQ ID NO: 6490 - DNA, 22 bp, synthetic construct
  misc_feature 1..22: note = chemically synthesized
  source 1..22: mol_type = other DNA
gcctgagcagtggggtaattgg

SEQ ID NO: 6491 - DNA, 22 bp, synthetic construct
  misc_feature 1..22: note = chemically synthesized
  source 1..22: mol_type = other DNA
agcagtggggtaattggcaatg

SEQ ID NO: 6492 - DNA, 22 bp, synthetic construct
  misc_feature 1..22: note = chemically synthesized
  source 1..22: mol_type = other DNA
gcaatgccatttctgagatggt

SEQ ID NO: 6493 - DNA, 22 bp, synthetic construct
  misc_feature 1..22: note = chemically synthesized
  source 1..22: mol_type = other DNA
ctgagatggtgaaggcagagga

SEQ ID NO: 6494 - DNA, 22 bp, synthetic construct
  misc_feature 1..22: note = chemically synthesized
  source 1..22: mol_type = other DNA
tgagatggtgaaggcagaggaa

SEQ ID NO: 6495 - DNA, 22 bp, synthetic construct
  misc_feature 1..22: note = chemically synthesized
  source 1..22: mol_type = other DNA
agatggtgaaggcagaggaaag

SEQ ID NO: 6496 - DNA, 22 bp, synthetic construct
  misc_feature 1..22: note = chemically synthesized
  source 1..22: mol_type = other DNA
ggggtaaatcaaggatctgcat

SEQ ID NO: 6497 - DNA, 22 bp, synthetic construct
  misc_feature 1..22: note = chemically synthesized
  source 1..22: mol_type = other DNA
gggtaaatcaaggatctgcatt

SEQ ID NO: 6498 - DNA, 22 bp, synthetic construct
  misc_feature 1..22: note = chemically synthesized
  source 1..22: mol_type = other DNA
catttggacatgttaagtttga

SEQ ID NO: 6499 - DNA, 22 bp, synthetic construct
  misc_feature 1..22: note = chemically synthesized
  source 1..22: mol_type = other DNA
ggacatgttaagtttgagattc

SEQ ID NO: 6500 - DNA, 22 bp, synthetic construct
  misc_feature 1..22: note = chemically synthesized
  source 1..22: mol_type = other DNA
gacatgttaagtttgagattcc

SEQ ID NO: 6501 - DNA, 22 bp, synthetic construct
  misc_feature 1..22: note = chemically synthesized
  source 1..22: mol_type = other DNA
agtttgagattccagtcaggct

SEQ ID NO: 6502 - DNA, 22 bp, synthetic construct
  misc_feature 1..22: note = chemically synthesized
  source 1..22: mol_type = other DNA
gagattccagtcaggcttccaa

SEQ ID NO: 6503 - DNA, 22 bp, synthetic construct
  misc_feature 1..22: note = chemically synthesized
  source 1..22: mol_type = other DNA
agattccagtcaggcttccaag

SEQ ID NO: 6504 - DNA, 22 bp, synthetic construct
  misc_feature 1..22: note = chemically synthesized
  source 1..22: mol_type = other DNA
cagtcaggcttccaagtggtga

SEQ ID NO: 6505 - DNA, 22 bp, synthetic construct
  misc_feature 1..22: note = chemically synthesized
  source 1..22: mol_type = other DNA
ccaagtggtgaggccacatagg

SEQ ID NO: 6506 - DNA, 22 bp, synthetic construct
  misc_feature 1..22: note = chemically synthesized
  source 1..22: mol_type = other DNA
caagtggtgaggccacataggc

SEQ ID NO: 6507 - DNA, 22 bp, synthetic construct
  misc_feature 1..22: note = chemically synthesized
  source 1..22: mol_type = other DNA
agtgtaagaattcaggaccaag

SEQ ID NO: 6508 - DNA, 22 bp, synthetic construct
  misc_feature 1..22: note = chemically synthesized
  source 1..22: mol_type = other DNA
aggaccaaggctgggcacggtg

SEQ ID NO: 6509 - DNA, 22 bp, synthetic construct
  misc_feature 1..22: note = chemically synthesized
  source 1..22: mol_type = other DNA
ggcacggtggctcacttctgta

SEQ ID NO: 6510 - DNA, 22 bp, synthetic construct
  misc_feature 1..22: note = chemically synthesized
  source 1..22: mol_type = other DNA
acttctgtaatcccagcacttt

SEQ ID NO: 6511 - DNA, 22 bp, synthetic construct
  misc_feature 1..22: note = chemically synthesized
  source 1..22: mol_type = other DNA
ctgtaatcccagcactttggtg

SEQ ID NO: 6512 - DNA, 22 bp, synthetic construct
  misc_feature 1..22: note = chemically synthesized
  source 1..22: mol_type = other DNA
tgtaatcccagcactttggtgg

SEQ ID NO: 6513 - DNA, 22 bp, synthetic construct
  misc_feature 1..22: note = chemically synthesized
  source 1..22: mol_type = other DNA
taatcccagcactttggtggct

SEQ ID NO: 6514 - DNA, 22 bp, synthetic construct
  misc_feature 1..22: note = chemically synthesized
  source 1..22: mol_type = other DNA
tggtggctgaggcaggtagatc

SEQ ID NO: 6515 - DNA, 22 bp, synthetic construct
  misc_feature 1..22: note = chemically synthesized
  source 1..22: mol_type = other DNA
ggtggctgaggcaggtagatca

SEQ ID NO: 6516 - DNA, 22 bp, synthetic construct
  misc_feature 1..22: note = chemically synthesized
  source 1..22: mol_type = other DNA
gtggctgaggcaggtagatcat

SEQ ID NO: 6517 - DNA, 22 bp, synthetic construct
  misc_feature 1..22: note = chemically synthesized
  source 1..22: mol_type = other DNA
aggcaggtagatcatttgaggt

SEQ ID NO: 6518 - DNA, 22 bp, synthetic construct
  misc_feature 1..22: note = chemically synthesized
  source 1..22: mol_type = other DNA
gaggtcaggagtttgagacaag

SEQ ID NO: 6519 - DNA, 22 bp, synthetic construct
  misc_feature 1..22: note = chemically synthesized
  source 1..22: mol_type = other DNA
aggtcaggagtttgagacaagc

SEQ ID NO: 6520 - DNA, 22 bp, synthetic construct
  misc_feature 1..22: note = chemically synthesized
  source 1..22: mol_type = other DNA
gagacaagcttggccaacatgg

SEQ ID NO: 6521 - DNA, 22 bp, synthetic construct
  misc_feature 1..22: note = chemically synthesized
  source 1..22: mol_type = other DNA
agacaagcttggccaacatggt

SEQ ID NO: 6522 - DNA, 22 bp, synthetic construct
  misc_feature 1..22: note = chemically synthesized
  source 1..22: mol_type = other DNA
ggccaacatggtgaaaccccat

SEQ ID NO: 6523 - DNA, 22 bp, synthetic construct
  misc_feature 1..22: note = chemically synthesized
  source 1..22: mol_type = other DNA
gccaacatggtgaaaccccatg

SEQ ID NO: 6524 - DNA, 22 bp, synthetic construct
  misc_feature 1..22: note = chemically synthesized
  source 1..22: mol_type = other DNA
ctaaaaatacaaaaattagcct

SEQ ID NO: 6525 - DNA, 22 bp, synthetic construct
  misc_feature 1..22: note = chemically synthesized
  source 1..22: mol_type = other DNA
aaaatacaaaaattagcctggt

SEQ ID NO: 6526 - DNA, 22 bp, synthetic construct
  misc_feature 1..22: note = chemically synthesized
  source 1..22: mol_type = other DNA
gcctggtgtggtggcgcacgcc

SEQ ID NO: 6527 - DNA, 22 bp, synthetic construct
  misc_feature 1..22: note = chemically synthesized
  source 1..22: mol_type = other DNA
gtgtggtggcgcacgcctatag

SEQ ID NO: 6528 - DNA, 22 bp, synthetic construct
  misc_feature 1..22: note = chemically synthesized
  source 1..22: mol_type = other DNA
tagtcccaggttttcaggaggc

SEQ ID NO: 6529 - DNA, 22 bp, synthetic construct
  misc_feature 1..22: note = chemically synthesized
  source 1..22: mol_type = other DNA
tcaggaggcttaggtaggagaa

SEQ ID NO: 6530 - DNA, 22 bp, synthetic construct
  misc_feature 1..22: note = chemically synthesized
  source 1..22: mol_type = other DNA
caggaggcttaggtaggagaat

SEQ ID NO: 6531 - DNA, 22 bp, synthetic construct
  misc_feature 1..22: note = chemically synthesized
  source 1..22: mol_type = other DNA
aggaggcttaggtaggagaatc

SEQ ID NO: 6532 - DNA, 22 bp, synthetic construct
  misc_feature 1..22: note = chemically synthesized
  source 1..22: mol_type = other DNA
aggtaggagaatcccttgaacc

SEQ ID NO: 6533 - DNA, 22 bp, synthetic construct
  misc_feature 1..22: note = chemically synthesized
  source 1..22: mol_type = other DNA
ggtaggagaatcccttgaaccc

SEQ ID NO: 6534 - DNA, 22 bp, synthetic construct
  misc_feature 1..22: note = chemically synthesized
  source 1..22: mol_type = other DNA
gaacccaggaggtgcaggttgc

SEQ ID NO: 6535 - DNA, 22 bp, synthetic construct
  misc_feature 1..22: note = chemically synthesized
  source 1..22: mol_type = other DNA
aacccaggaggtgcaggttgca

SEQ ID NO: 6536 - DNA, 22 bp, synthetic construct
  misc_feature 1..22: note = chemically synthesized
  source 1..22: mol_type = other DNA
cagtgagctgagattgtgccac

SEQ ID NO: 6537 - DNA, 22 bp, synthetic construct
  misc_feature 1..22: note = chemically synthesized
  source 1..22: mol_type = other DNA
agattgtgccactgcactccag

SEQ ID NO: 6538 - DNA, 22 bp, synthetic construct
  misc_feature 1..22: note = chemically synthesized
  source 1..22: mol_type = other DNA
tgccactgcactccagcctggg

SEQ ID NO: 6539 - DNA, 22 bp, synthetic construct
  misc_feature 1..22: note = chemically synthesized
  source 1..22: mol_type = other DNA
cactccagcctgggtgatagag

SEQ ID NO: 6540 - DNA, 22 bp, synthetic construct
  misc_feature 1..22: note = chemically synthesized
  source 1..22: mol_type = other DNA
cagcctgggtgatagagtgaga

SEQ ID NO: 6541 - DNA, 22 bp, synthetic construct
  misc_feature 1..22: note = chemically synthesized
  source 1..22: mol_type = other DNA
ggtgatagagtgagactctgtc

SEQ ID NO: 6542 - DNA, 22 bp, synthetic construct
  misc_feature 1..22: note = chemically synthesized
  source 1..22: mol_type = other DNA
tgtctcaaaaaaaaaaaaaaaa

SEQ ID NO: 6543 - DNA, 22 bp, synthetic construct
  misc_feature 1..22: note = chemically synthesized
  source 1..22: mol_type = other DNA
tctcaaaaaaaaaaaaaaaaaa

SEQ ID NO: 6544 - DNA, 22 bp, synthetic construct
  misc_feature 1..22: note = chemically synthesized
  source 1..22: mol_type = other DNA
aaaaaaaaaaaaaaaaaaaaaa

SEQ ID NO: 6545 - DNA, 22 bp, synthetic construct
  misc_feature 1..22: note = chemically synthesized
  source 1..22: mol_type = other DNA
aaggaattattcctcaggattt

SEQ ID NO: 6546 - DNA, 22 bp, synthetic construct
  misc_feature 1..22: note = chemically synthesized
  source 1..22: mol_type = other DNA
ttcctcaggatttgggtctaat

SEQ ID NO: 6547 - DNA, 22 bp, synthetic construct
  misc_feature 1..22: note = chemically synthesized
  source 1..22: mol_type = other DNA
ctcaggatttgggtctaatttg

SEQ ID NO: 6548 - DNA, 22 bp, synthetic construct
  misc_feature 1..22: note = chemically synthesized
  source 1..22: mol_type = other DNA
aggatttgggtctaatttgccc

SEQ ID NO: 6549 - DNA, 22 bp, synthetic construct
  misc_feature 1..22: note = chemically synthesized
  source 1..22: mol_type = other DNA
gggtctaatttgccctgagcac

SEQ ID NO: 6550 - DNA, 22 bp, synthetic construct
  misc_feature 1..22: note = chemically synthesized
  source 1..22: mol_type = other DNA
ggtctaatttgccctgagcacc

SEQ ID NO: 6551 - DNA, 22 bp, synthetic construct
  misc_feature 1..22: note = chemically synthesized
  source 1..22: mol_type = other DNA
atttgccctgagcaccaactcc

SEQ ID NO: 6552 - DNA, 22 bp, synthetic construct
  misc_feature 1..22: note = chemically synthesized
  source 1..22: mol_type = other DNA
gccctgagcaccaactcctgag

SEQ ID NO: 6553 - DNA, 22 bp, synthetic construct
  misc_feature 1..22: note = chemically synthesized
  source 1..22: mol_type = other DNA
ccctgagcaccaactcctgagt

SEQ ID NO: 6554 - DNA, 22 bp, synthetic construct
  misc_feature 1..22: note = chemically synthesized
  source 1..22: mol_type = other DNA
agcaccaactcctgagttcaac

SEQ ID NO: 6555 - DNA, 22 bp, synthetic construct
  misc_feature 1..22: note = chemically synthesized
  source 1..22: mol_type = other DNA
ctgagttcaactaccatggcta

SEQ ID NO: 6556 - DNA, 22 bp, synthetic construct
  misc_feature 1..22: note = chemically synthesized
  source 1..22: mol_type = other DNA
agttcaactaccatggctagac

SEQ ID NO: 6557 - DNA, 22 bp, synthetic construct
  misc_feature 1..22: note = chemically synthesized
  source 1..22: mol_type = other DNA
aactaccatggctagacacacc

SEQ ID NO: 6558 - DNA, 22 bp, synthetic construct
  misc_feature 1..22: note = chemically synthesized
  source 1..22: mol_type = other DNA
ccatggctagacacaccttaac

SEQ ID NO: 6559 - DNA, 22 bp, synthetic construct
  misc_feature 1..22: note = chemically synthesized
  source 1..22: mol_type = other DNA
gacacaccttaacattttctag

SEQ ID NO: 6560 - DNA, 22 bp, synthetic construct
  misc_feature 1..22: note = chemically synthesized
  source 1..22: mol_type = other DNA
aacattttctagaatccaccag

SEQ ID NO: 6561 - DNA, 22 bp, synthetic construct
  misc_feature 1..22: note = chemically synthesized
  source 1..22: mol_type = other DNA
acattttctagaatccaccagc

SEQ ID NO: 6562 - DNA, 22 bp, synthetic construct
  misc_feature 1..22: note = chemically synthesized
  source 1..22: mol_type = other DNA
tctagaatccaccagctttagt

SEQ ID NO: 6563 - DNA, 22 bp, synthetic construct
  misc_feature 1..22: note = chemically synthesized
  source 1..22: mol_type = other DNA
ctagaatccaccagctttagtg

SEQ ID NO: 6564 - DNA, 22 bp, synthetic construct
  misc_feature 1..22: note = chemically synthesized
  source 1..22: mol_type = other DNA
tagaatccaccagctttagtgg

SEQ ID NO: 6565 - DNA, 22 bp, synthetic construct
  misc_feature 1..22: note = chemically synthesized
  source 1..22: mol_type = other DNA
gaatccaccagctttagtggag

SEQ ID NO: 6566 - DNA, 22 bp, synthetic construct
  misc_feature 1..22: note = chemically synthesized
  source 1..22: mol_type = other DNA
tagtggagtctgtctaatcatg

SEQ ID NO: 6567 - DNA, 22 bp, synthetic construct
  misc_feature 1..22: note = chemically synthesized
  source 1..22: mol_type = other DNA
agtggagtctgtctaatcatga

SEQ ID NO: 6568 - DNA, 22 bp, synthetic construct
  misc_feature 1..22: note = chemically synthesized
  source 1..22: mol_type = other DNA
gtggagtctgtctaatcatgag

SEQ ID NO: 6569 - DNA, 22 bp, synthetic construct
  misc_feature 1..22: note = chemically synthesized
  source 1..22: mol_type = other DNA
tctaatcatgagtattggaata

SEQ ID NO: 6570 - DNA, 22 bp, synthetic construct
  misc_feature 1..22: note = chemically synthesized
  source 1..22: mol_type = other DNA
atcatgagtattggaataggat

SEQ ID NO: 6571 - DNA, 22 bp, synthetic construct
  misc_feature 1..22: note = chemically synthesized
  source 1..22: mol_type = other DNA
gaataggatctgggggcagtga

SEQ ID NO: 6572 - DNA, 22 bp, synthetic construct
  misc_feature 1..22: note = chemically synthesized
  source 1..22: mol_type = other DNA
ggggcagtgagggggtggcagc

SEQ ID NO: 6573 - DNA, 22 bp, synthetic construct
  misc_feature 1..22: note = chemically synthesized
  source 1..22: mol_type = other DNA
tcatatggaagaaagacaggac

SEQ ID NO: 6574 - DNA, 22 bp, synthetic construct
  misc_feature 1..22: note = chemically synthesized
  source 1..22: mol_type = other DNA
caactcacccttcacaaaatga

SEQ ID NO: 6575 - DNA, 22 bp, synthetic construct
  misc_feature 1..22: note = chemically synthesized
  source 1..22: mol_type = other DNA
acccttcacaaaatgaggacca

SEQ ID NO: 6576 - DNA, 22 bp, synthetic construct
  misc_feature 1..22: note = chemically synthesized
  source 1..22: mol_type = other DNA
cacaaaatgaggaccagacaca

SEQ ID NO: 6577 - DNA, 22 bp, synthetic construct
  misc_feature 1..22: note = chemically synthesized
  source 1..22: mol_type = other DNA
acaaaatgaggaccagacacag

SEQ ID NO: 6578 - DNA, 22 bp, synthetic construct
  misc_feature 1..22: note = chemically synthesized
  source 1..22: mol_type = other DNA
atggtatgagttgatgcaggtg

SEQ ID NO: 6579 - DNA, 22 bp, synthetic construct
  misc_feature 1..22: note = chemically synthesized
  source 1..22: mol_type = other DNA
atgcaggtgtgtggagcctcaa

SEQ ID NO: 6580 - DNA, 22 bp, synthetic construct
  misc_feature 1..22: note = chemically synthesized
  source 1..22: mol_type = other DNA
aacatcctgctcccctcctact

SEQ ID NO: 6581 - DNA, 22 bp, synthetic construct
  misc_feature 1..22: note = chemically synthesized
  source 1..22: mol_type = other DNA
ctcccctcctactacacatggt

SEQ ID NO: 6582 - DNA, 22 bp, synthetic construct
  misc_feature 1..22: note = chemically synthesized
  source 1..22: mol_type = other DNA
ccctcctactacacatggttaa

SEQ ID NO: 6583 - DNA, 22 bp, synthetic construct
  misc_feature 1..22: note = chemically synthesized
  source 1..22: mol_type = other DNA
ctactacacatggttaaggcct

SEQ ID NO: 6584 - DNA, 22 bp, synthetic construct
  misc_feature 1..22: note = chemically synthesized
  source 1..22: mol_type = other DNA
ctacacatggttaaggcctgtt

SEQ ID NO: 6585 - DNA, 22 bp, synthetic construct
  misc_feature 1..22: note = chemically synthesized
  source 1..22: mol_type = other DNA
cacatggttaaggcctgttgct

SEQ ID NO: 6586 - DNA, 22 bp, synthetic construct
  misc_feature 1..22: note = chemically synthesized
  source 1..22: mol_type = other DNA
aggcctgttgctctgtctccag

SEQ ID NO: 6587 - DNA, 22 bp, synthetic construct
  misc_feature 1..22: note = chemically synthesized
  source 1..22: mol_type = other DNA
ttgctctgtctccaggttcaca

SEQ ID NO: 6588 - DNA, 22 bp, synthetic construct
  misc_feature 1..22: note = chemically synthesized
  source 1..22: mol_type = other DNA
ctctgtctccaggttcacactc

SEQ ID NO: 6589 - DNA, 22 bp, synthetic construct
  misc_feature 1..22: note = chemically synthesized
  source 1..22: mol_type = other DNA
tgtctccaggttcacactctct

SEQ ID NO: 6590 - DNA, 22 bp, synthetic construct
  misc_feature 1..22: note = chemically synthesized
  source 1..22: mol_type = other DNA
tctccaggttcacactctctgc

SEQ ID NO: 6591 - DNA, 22 bp, synthetic construct
  misc_feature 1..22: note = chemically synthesized
  source 1..22: mol_type = other DNA
caggttcacactctctgcacta

SEQ ID NO: 6592 - DNA, 22 bp, synthetic construct
  misc_feature 1..22: note = chemically synthesized
  source 1..22: mol_type = other DNA
acactctctgcactacctcttc

SEQ ID NO: 6593 - DNA, 22 bp, synthetic construct
  misc_feature 1..22: note = chemically synthesized
  source 1..22: mol_type = other DNA
tctgcactacctcttcatgggt

SEQ ID NO: 6594 - DNA, 22 bp, synthetic construct
  misc_feature 1..22: note = chemically synthesized
  source 1..22: mol_type = other DNA
tgcactacctcttcatgggtgc

SEQ ID NO: 6595 - DNA, 22 bp, synthetic construct
  misc_feature 1..22: note = chemically synthesized
  source 1..22: mol_type = other DNA
cactacctcttcatgggtgcct

SEQ ID NO: 6596 - DNA, 22 bp, synthetic construct
  misc_feature 1..22: note = chemically synthesized
  source 1..22: mol_type = other DNA
cctcttcatgggtgcctcagag

SEQ ID NO: 6597 - DNA, 22 bp, synthetic construct
  misc_feature 1..22: note = chemically synthesized
  source 1..22: mol_type = other DNA
ttcatgggtgcctcagagcagg

SEQ ID NO: 6598 - DNA, 22 bp, synthetic construct
  misc_feature 1..22: note = chemically synthesized
  source 1..22: mol_type = other DNA
catgggtgcctcagagcaggac

SEQ ID NO: 6599 - DNA, 22 bp, synthetic construct
  misc_feature 1..22: note = chemically synthesized
  source 1..22: mol_type = other DNA
atgggtgcctcagagcaggacc

SEQ ID NO: 6600 - DNA, 22 bp, synthetic construct
  misc_feature 1..22: note = chemically synthesized
  source 1..22: mol_type = other DNA
agagcaggaccttggtctttcc

SEQ ID NO: 6601 - DNA, 22 bp, synthetic construct
  misc_feature 1..22: note = chemically synthesized
  source 1..22: mol_type = other DNA
ggtctttccttgtttgaagctt

SEQ ID NO: 6602 - DNA, 22 bp, synthetic construct
  misc_feature 1..22: note = chemically synthesized
  source 1..22: mol_type = other DNA
gtctttccttgtttgaagcttt

SEQ ID NO: 6603 - DNA, 22 bp, synthetic construct
  misc_feature 1..22: note = chemically synthesized
  source 1..22: mol_type = other DNA
tccttgtttgaagctttgggct

SEQ ID NO: 6604 - DNA, 22 bp, synthetic construct
  misc_feature 1..22: note = chemically synthesized
  source 1..22: mol_type = other DNA
ccttgtttgaagctttgggcta

SEQ ID NO: 6605 - DNA, 22 bp, synthetic construct
  misc_feature 1..22: note = chemically synthesized
  source 1..22: mol_type = other DNA
cttgtttgaagctttgggctac

SEQ ID NO: 6606 - DNA, 22 bp, synthetic construct
  misc_feature 1..22: note = chemically synthesized
  source 1..22: mol_type = other DNA
gtttgaagctttgggctacgtg

SEQ ID NO: 6607 - DNA, 22 bp, synthetic construct
  misc_feature 1..22: note = chemically synthesized
  source 1..22: mol_type = other DNA
tttgaagctttgggctacgtgg

SEQ ID NO: 6608 - DNA, 22 bp, synthetic construct
  misc_feature 1..22: note = chemically synthesized
  source 1..22: mol_type = other DNA
gaagctttgggctacgtggatg

SEQ ID NO: 6609 - DNA, 22 bp, synthetic construct
  misc_feature 1..22: note = chemically synthesized
  source 1..22: mol_type = other DNA
aagctttgggctacgtggatga

SEQ ID NO: 6610 - DNA, 22 bp, synthetic construct
  misc_feature 1..22: note = chemically synthesized
  source 1..22: mol_type = other DNA
tgggctacgtggatgaccagct

SEQ ID NO: 6611 - DNA, 22 bp, synthetic construct
  misc_feature 1..22: note = chemically synthesized
  source 1..22: mol_type = other DNA
gggctacgtggatgaccagctg

SEQ ID NO: 6612 - DNA, 22 bp, synthetic construct
  misc_feature 1..22: note = chemically synthesized
  source 1..22: mol_type = other DNA
ggctacgtggatgaccagctgt

SEQ ID NO: 6613 - DNA, 22 bp, synthetic construct
  misc_feature 1..22: note = chemically synthesized
  source 1..22: mol_type = other DNA
cgtggatgaccagctgttcgtg

SEQ ID NO: 6614 - DNA, 22 bp, synthetic construct
  misc_feature 1..22: note = chemically synthesized
  source 1..22: mol_type = other DNA
ttcgtgttctatgatcatgaga

SEQ ID NO: 6615 - DNA, 22 bp, synthetic construct
  misc_feature 1..22: note = chemically synthesized
  source 1..22: mol_type = other DNA
gtgttctatgatcatgagagtc

SEQ ID NO: 6616 - DNA, 22 bp, synthetic construct
  misc_feature 1..22: note = chemically synthesized
  source 1..22: mol_type = other DNA
tatgatcatgagagtcgccgtg

SEQ ID NO: 6617 - DNA, 22 bp, synthetic construct
  misc_feature 1..22: note = chemically synthesized
  source 1..22: mol_type = other DNA
tgatcatgagagtcgccgtgtg

SEQ ID NO: 6618 - DNA, 22 bp, synthetic construct
  misc_feature 1..22: note = chemically synthesized
  source 1..22: mol_type = other DNA
catgggtttccagtagaatttc

SEQ ID NO: 6619 - DNA, 22 bp, synthetic construct
  misc_feature 1..22: note = chemically synthesized
  source 1..22: mol_type = other DNA
ccagtagaatttcaagccagat

SEQ ID NO: 6620 - DNA, 22 bp, synthetic construct
  misc_feature 1..22: note = chemically synthesized
  source 1..22: mol_type = other DNA
cagtagaatttcaagccagatg

SEQ ID NO: 6621 - DNA, 22 bp, synthetic construct
  misc_feature 1..22: note = chemically synthesized
  source 1..22: mol_type = other DNA
caagccagatgtggctgcagct

SEQ ID NO: 6622 - DNA, 22 bp, synthetic construct
  misc_feature 1..22: note = chemically synthesized
  source 1..22: mol_type = other DNA
aagccagatgtggctgcagctg

SEQ ID NO: 6623 - DNA, 22 bp, synthetic construct
  misc_feature 1..22: note = chemically synthesized
  source 1..22: mol_type = other DNA
cagctgagtcagagtctgaaag

SEQ ID NO: 6624 - DNA, 22 bp, synthetic construct
  misc_feature 1..22: note = chemically synthesized
  source 1..22: mol_type = other DNA
agtcagagtctgaaagggtggg

SEQ ID NO: 6625 - DNA, 22 bp, synthetic construct
  misc_feature 1..22: note = chemically synthesized
  source 1..22: mol_type = other DNA
aaagggtgggatcacatgttca

SEQ ID NO: 6626 - DNA, 22 bp, synthetic construct
  misc_feature 1..22: note = chemically synthesized
  source 1..22: mol_type = other DNA
actgttgacttctggactatta

SEQ ID NO: 6627 - DNA, 22 bp, synthetic construct
  misc_feature 1..22: note = chemically synthesized
  source 1..22: mol_type = other DNA
ttgacttctggactattatgga

SEQ ID NO: 6628 - DNA, 22 bp, synthetic construct
  misc_feature 1..22: note = chemically synthesized
  source 1..22: mol_type = other DNA
acttctggactattatggaaaa

SEQ ID NO: 6629 - DNA, 22 bp, synthetic construct
  misc_feature 1..22: note = chemically synthesized
  source 1..22: mol_type = other DNA
ctggactattatggaaaatcac

SEQ ID NO: 6630 - DNA, 22 bp, synthetic construct
  misc_feature 1..22: note = chemically synthesized
  source 1..22: mol_type = other DNA
tggactattatggaaaatcaca

SEQ ID NO: 6631 - DNA, 22 bp, synthetic construct
  misc_feature 1..22: note = chemically synthesized
  source 1..22: mol_type = other DNA
gactattatggaaaatcacaac

SEQ ID NO: 6632 - DNA, 22 bp, synthetic construct
  misc_feature 1..22: note = chemically synthesized
  source 1..22: mol_type = other DNA
ttatggaaaatcacaaccacag

SEQ ID NO: 6633 - DNA, 22 bp, synthetic construct
  misc_feature 1..22: note = chemically synthesized
  source 1..22: mol_type = other DNA
tggaaaatcacaaccacagcaa

SEQ ID NO: 6634 - DNA, 22 bp, synthetic construct
  misc_feature 1..22: note = chemically synthesized
  source 1..22: mol_type = other DNA
accttcctgaggttgtcagagc

SEQ ID NO: 6635 - DNA, 22 bp, synthetic construct
  misc_feature 1..22: note = chemically synthesized
  source 1..22: mol_type = other DNA
cctgaggttgtcagagcttttc

SEQ ID NO: 6636 - DNA, 22 bp, synthetic construct
  misc_feature 1..22: note = chemically synthesized
  source 1..22: mol_type = other DNA
ctgaggttgtcagagcttttca

SEQ ID NO: 6637 - DNA, 22 bp, synthetic construct
  misc_feature 1..22: note = chemically synthesized
  source 1..22: mol_type = other DNA
aggttgtcagagcttttcatct

SEQ ID NO: 6638 - DNA, 22 bp, synthetic construct
  misc_feature 1..22: note = chemically synthesized
  source 1..22: mol_type = other DNA
tcagagcttttcatcttttcat

SEQ ID NO: 6639 - DNA, 22 bp, synthetic construct
  misc_feature 1..22: note = chemically synthesized
  source 1..22: mol_type = other DNA
ttcatcttttcatgcatcttga

SEQ ID NO: 6640 - DNA, 22 bp, synthetic construct
  misc_feature 1..22: note = chemically synthesized
  source 1..22: mol_type = other DNA
tcatcttttcatgcatcttgaa

SEQ ID NO: 6641 - DNA, 22 bp, synthetic construct
  misc_feature 1..22: note = chemically synthesized
  source 1..22: mol_type = other DNA
catcttttcatgcatcttgaag

SEQ ID NO: 6642 - DNA, 22 bp, synthetic construct
  misc_feature 1..22: note = chemically synthesized
  source 1..22: mol_type = other DNA
atcttttcatgcatcttgaagg

SEQ ID NO: 6643 - DNA, 22 bp, synthetic construct
  misc_feature 1..22: note = chemically synthesized
  source 1..22: mol_type = other DNA
ttcatgcatcttgaaggaaaca

SEQ ID NO: 6644 - DNA, 22 bp, synthetic construct
  misc_feature 1..22: note = chemically synthesized
  source 1..22: mol_type = other DNA
tcatgcatcttgaaggaaacag

SEQ ID NO: 6645 - DNA, 22 bp, synthetic construct
  misc_feature 1..22: note = chemically synthesized
  source 1..22: mol_type = other DNA
catgcatcttgaaggaaacagc

SEQ ID NO: 6646 - DNA, 22 bp, synthetic construct
  misc_feature 1..22: note = chemically synthesized
  source 1..22: mol_type = other DNA
atgcatcttgaaggaaacagct

SEQ ID NO: 6647 - DNA, 22 bp, synthetic construct
  misc_feature 1..22: note = chemically synthesized
  source 1..22: mol_type = other DNA
gaaggaaacagctggaagtctg

SEQ ID NO: 6648 - DNA, 22 bp, synthetic construct
  misc_feature 1..22: note = chemically synthesized
  source 1..22: mol_type = other DNA
aaggaaacagctggaagtctga

SEQ ID NO: 6649 - DNA, 22 bp, synthetic construct
  misc_feature 1..22: note = chemically synthesized
  source 1..22: mol_type = other DNA
gaagtctgaggtcttgtgggag

SEQ ID NO: 6650 - DNA, 22 bp, synthetic construct
  misc_feature 1..22: note = chemically synthesized
  source 1..22: mol_type = other DNA
aggtcttgtgggagcagggaag

SEQ ID NO: 6651 - DNA, 22 bp, synthetic construct
  misc_feature 1..22: note = chemically synthesized
  source 1..22: mol_type = other DNA
gtgggagcagggaagagggaag

SEQ ID NO: 6652 - DNA, 22 bp, synthetic construct
  misc_feature 1..22: note = chemically synthesized
  source 1..22: mol_type = other DNA
tgggagcagggaagagggaagg

SEQ ID NO: 6653 - DNA, 22 bp, synthetic construct
  misc_feature 1..22: note = chemically synthesized
  source 1..22: mol_type = other DNA
gcttcctgagatcatttggtcc

SEQ ID NO: 6654 - DNA, 22 bp, synthetic construct
  misc_feature 1..22: note = chemically synthesized
  source 1..22: mol_type = other DNA
cttcctgagatcatttggtcct

SEQ ID NO: 6655 - DNA, 22 bp, synthetic construct
  misc_feature 1..22: note = chemically synthesized
  source 1..22: mol_type = other DNA
cctgagatcatttggtccttgg

SEQ ID NO: 6656 - DNA, 22 bp, synthetic construct
  misc_feature 1..22: note = chemically synthesized
  source 1..22: mol_type = other DNA
ctgagatcatttggtccttggg

SEQ ID NO: 6657 - DNA, 22 bp, synthetic construct
  misc_feature 1..22: note = chemically synthesized
  source 1..22: mol_type = other DNA
agatcatttggtccttggggat

SEQ ID NO: 6658 - DNA, 22 bp, synthetic construct
  misc_feature 1..22: note = chemically synthesized
  source 1..22: mol_type = other DNA
ggtccttggggatggtggaaat

SEQ ID NO: 6659 - DNA, 22 bp, synthetic construct
  misc_feature 1..22: note = chemically synthesized
  source 1..22: mol_type = other DNA
gtccttggggatggtggaaata

SEQ ID NO: 6660 - DNA, 22 bp, synthetic construct
  misc_feature 1..22: note = chemically synthesized
  source 1..22: mol_type = other DNA
ggggatggtggaaatagggacc

SEQ ID NO: 6661 - DNA, 22 bp, synthetic construct
  misc_feature 1..22: note = chemically synthesized
  source 1..22: mol_type = other DNA
gggatggtggaaatagggacct

SEQ ID NO: 6662 - DNA, 22 bp, synthetic construct
  misc_feature 1..22: note = chemically synthesized
  source 1..22: mol_type = other DNA
ttcctttggttgcagttaacaa

SEQ ID NO: 6663 - DNA, 22 bp, synthetic construct
  misc_feature 1..22: note = chemically synthesized
  source 1..22: mol_type = other DNA
ctttggttgcagttaacaaggc

SEQ ID NO: 6664 - DNA, 22 bp, synthetic construct
  misc_feature 1..22: note = chemically synthesized
  source 1..22: mol_type = other DNA
tggttgcagttaacaaggctgg

SEQ ID NO: 6665 - DNA, 22 bp, synthetic construct
  misc_feature 1..22: note = chemically synthesized
  source 1..22: mol_type = other DNA
ggttgcagttaacaaggctggg

SEQ ID NO: 6666 - DNA, 22 bp, synthetic construct
  misc_feature 1..22: note = chemically synthesized
  source 1..22: mol_type = other DNA
gttgcagttaacaaggctgggg

SEQ ID NO: 6667 - DNA, 22 bp, synthetic construct
  misc_feature 1..22: note = chemically synthesized
  source 1..22: mol_type = other DNA
cagttaacaaggctggggattt

SEQ ID NO: 6668 - DNA, 22 bp, synthetic construct
  misc_feature 1..22: note = chemically synthesized
  source 1..22: mol_type = other DNA
acaaggctggggatttttccag

SEQ ID NO: 6669 - DNA, 22 bp, synthetic construct
  misc_feature 1..22: note = chemically synthesized
  source 1..22: mol_type = other DNA
gggatttttccagagtcccaca

SEQ ID NO: 6670 - DNA, 22 bp, synthetic construct
  misc_feature 1..22: note = chemically synthesized
  source 1..22: mol_type = other DNA
ttccagagtcccacaccctgca

SEQ ID NO: 6671 - DNA, 22 bp, synthetic construct
  misc_feature 1..22: note = chemically synthesized
  source 1..22: mol_type = other DNA
tccagagtcccacaccctgcag

SEQ ID NO: 6672 - DNA, 22 bp, synthetic construct
  misc_feature 1..22: note = chemically synthesized
  source 1..22: mol_type = other DNA
ccagagtcccacaccctgcagg

SEQ ID NO: 6673 - DNA, 22 bp, synthetic construct
  misc_feature 1..22: note = chemically synthesized
  source 1..22: mol_type = other DNA
cagagtcccacaccctgcaggt

SEQ ID NO: 6674 - DNA, 22 bp, synthetic construct
  misc_feature 1..22: note = chemically synthesized
  source 1..22: mol_type = other DNA
caggtcatcctgggctgtgaaa

SEQ ID NO: 6675 - DNA, 22 bp, synthetic construct
  misc_feature 1..22: note = chemically synthesized
  source 1..22: mol_type = other DNA
ggctgtgaaatgcaagaagaca

SEQ ID NO: 6676 - DNA, 22 bp, synthetic construct
  misc_feature 1..22: note = chemically synthesized
  source 1..22: mol_type = other DNA
tgaaatgcaagaagacaacagt

SEQ ID NO: 6677 - DNA, 22 bp, synthetic construct
  misc_feature 1..22: note = chemically synthesized
  source 1..22: mol_type = other DNA
ctggaagtacgggtatgatggg

SEQ ID NO: 6678 - DNA, 22 bp, synthetic construct
  misc_feature 1..22: note = chemically synthesized
  source 1..22: mol_type = other DNA
gaagtacgggtatgatgggcag

SEQ ID NO: 6679 - DNA, 22 bp, synthetic construct
  misc_feature 1..22: note = chemically synthesized
  source 1..22: mol_type = other DNA
gaattctgccctgacacactgg

SEQ ID NO: 6680 - DNA, 22 bp, synthetic construct
  misc_feature 1..22: note = chemically synthesized
  source 1..22: mol_type = other DNA
aattctgccctgacacactgga

SEQ ID NO: 6681 - DNA, 22 bp, synthetic construct
  misc_feature 1..22: note = chemically synthesized
  source 1..22: mol_type = other DNA
tgccctgacacactggattgga

SEQ ID NO: 6682 - DNA, 22 bp, synthetic construct
  misc_feature 1..22: note = chemically synthesized
  source 1..22: mol_type = other DNA
ccctgacacactggattggaga

SEQ ID NO: 6683 - DNA, 22 bp, synthetic construct
  misc_feature 1..22: note = chemically synthesized
  source 1..22: mol_type = other DNA
acacactggattggagagcagc

SEQ ID NO: 6684 - DNA, 22 bp, synthetic construct
  misc_feature 1..22: note = chemically synthesized
  source 1..22: mol_type = other DNA
gattggagagcagcagaaccca

SEQ ID NO: 6685 - DNA, 22 bp, synthetic construct
  misc_feature 1..22: note = chemically synthesized
  source 1..22: mol_type = other DNA
gagagcagcagaacccagggcc

SEQ ID NO: 6686 - DNA, 22 bp, synthetic construct
  misc_feature 1..22: note = chemically synthesized
  source 1..22: mol_type = other DNA
gcccaccaagctggagtgggaa

SEQ ID NO: 6687 - DNA, 22 bp, synthetic construct
  misc_feature 1..22: note = chemically synthesized
  source 1..22: mol_type = other DNA
gagtgggaaaggcacaagattc

SEQ ID NO: 6688 - DNA, 22 bp, synthetic construct
  misc_feature 1..22: note = chemically synthesized
  source 1..22: mol_type = other DNA
gggccaggcagaacagggccta

SEQ ID NO: 6689 - DNA, 22 bp, synthetic construct
  misc_feature 1..22: note = chemically synthesized
  source 1..22: mol_type = other DNA
cctggagagggactgccctgca

SEQ ID NO: 6690 - DNA, 22 bp, synthetic construct
  misc_feature 1..22: note = chemically synthesized
  source 1..22: mol_type = other DNA
gagagggactgccctgcacagc

SEQ ID NO: 6691 - DNA, 22 bp, synthetic construct
  misc_feature 1..22: note = chemically synthesized
  source 1..22: mol_type = other DNA
ccctgcacagctgcagcagttg

SEQ ID NO: 6692 - DNA, 22 bp, synthetic construct
  misc_feature 1..22: note = chemically synthesized
  source 1..22: mol_type = other DNA
cacagctgcagcagttgctgga

SEQ ID NO: 6693 - DNA, 22 bp, synthetic construct
  misc_feature 1..22: note = chemically synthesized
  source 1..22: mol_type = other DNA
cagcagttgctggagctgggga

SEQ ID NO: 6694 - DNA, 22 bp, synthetic construct
  misc_feature 1..22: note = chemically synthesized
  source 1..22: mol_type = other DNA
ctggagctggggagaggtgttt

SEQ ID NO: 6695 - DNA, 22 bp, synthetic construct
  misc_feature 1..22: note = chemically synthesized
  source 1..22: mol_type = other DNA
gagctggggagaggtgttttgg

SEQ ID NO: 6696 - DNA, 22 bp, synthetic construct
  misc_feature 1..22: note = chemically synthesized
  source 1..22: mol_type = other DNA
gggagaggtgttttggaccaac

SEQ ID NO: 6697 - DNA, 22 bp, synthetic construct
  misc_feature 1..22: note = chemically synthesized
  source 1..22: mol_type = other DNA
tggaccaacaaggtatggtgga

SEQ ID NO: 6698 - DNA, 22 bp, synthetic construct
  misc_feature 1..22: note = chemically synthesized
  source 1..22: mol_type = other DNA
ggaccaacaaggtatggtggaa

SEQ ID NO: 6699 - DNA, 22 bp, synthetic construct
  misc_feature 1..22: note = chemically synthesized
  source 1..22: mol_type = other DNA
gaccaacaaggtatggtggaaa

SEQ ID NO: 6700 - DNA, 22 bp, synthetic construct
  misc_feature 1..22: note = chemically synthesized
  source 1..22: mol_type = other DNA
ctgcccctatactctagtggca

SEQ ID NO: 6701 - DNA, 22 bp, synthetic construct
  misc_feature 1..22: note = chemically synthesized
  source 1..22: mol_type = other DNA
tgcccctatactctagtggcag

SEQ ID NO: 6702 - DNA, 22 bp, synthetic construct
  misc_feature 1..22: note = chemically synthesized
  source 1..22: mol_type = other DNA
cccctatactctagtggcagag

SEQ ID NO: 6703 - DNA, 22 bp, synthetic construct
  misc_feature 1..22: note = chemically synthesized
  source 1..22: mol_type = other DNA
tactctagtggcagagtggagg

SEQ ID NO: 6704 - DNA, 22 bp, synthetic construct
  misc_feature 1..22: note = chemically synthesized
  source 1..22: mol_type = other DNA
tagtggcagagtggaggaggtt

SEQ ID NO: 6705 - DNA, 22 bp, synthetic construct
  misc_feature 1..22: note = chemically synthesized
  source 1..22: mol_type = other DNA
gtggcagagtggaggaggttgc

SEQ ID NO: 6706 - DNA, 22 bp, synthetic construct
  misc_feature 1..22: note = chemically synthesized
  source 1..22: mol_type = other DNA
cagggcacggaatccctggttg

SEQ ID NO: 6707 - DNA, 22 bp, synthetic construct
  misc_feature 1..22: note = chemically synthesized
  source 1..22: mol_type = other DNA
gttggagtttcagaggtggctg

SEQ ID NO: 6708 - DNA, 22 bp, synthetic construct
  misc_feature 1..22: note = chemically synthesized
  source 1..22: mol_type = other DNA
gagtttcagaggtggctgaggc

SEQ ID NO: 6709 - DNA, 22 bp, synthetic construct
  misc_feature 1..22: note = chemically synthesized
  source 1..22: mol_type = other DNA
cagaggtggctgaggctgtgtg

SEQ ID NO: 6710 - DNA, 22 bp, synthetic construct
  misc_feature 1..22: note = chemically synthesized
  source 1..22: mol_type = other DNA
agaggtggctgaggctgtgtgc

SEQ ID NO: 6711 - DNA, 22 bp, synthetic construct
  misc_feature 1..22: note = chemically synthesized
  source 1..22: mol_type = other DNA
aggctgtgtgcctctccaaatt

SEQ ID NO: 6712 - DNA, 22 bp, synthetic construct
  misc_feature 1..22: note = chemically synthesized
  source 1..22: mol_type = other DNA
tgtgcctctccaaattctggga

SEQ ID NO: 6713 - DNA, 22 bp, synthetic construct
  misc_feature 1..22: note = chemically synthesized
  source 1..22: mol_type = other DNA
tccaaattctgggaagggactt

SEQ ID NO: 6714 - DNA, 22 bp, synthetic construct
  misc_feature 1..22: note = chemically synthesized
  source 1..22: mol_type = other DNA
caaattctgggaagggactttc

SEQ ID NO: 6715 - DNA, 22 bp, synthetic construct
  misc_feature 1..22: note = chemically synthesized
  source 1..22: mol_type = other DNA
tgggaagggactttctcaatcc

SEQ ID NO: 6716 - DNA, 22 bp, synthetic construct
  misc_feature 1..22: note = chemically synthesized
  source 1..22: mol_type = other DNA
ggaagggactttctcaatccta

SEQ ID NO: 6717 - DNA, 22 bp, synthetic construct
  misc_feature 1..22: note = chemically synthesized
  source 1..22: mol_type = other DNA
tctcaatcctagagtctctacc

SEQ ID NO: 6718 - DNA, 22 bp, synthetic construct
  misc_feature 1..22: note = chemically synthesized
  source 1..22: mol_type = other DNA
ctcaatcctagagtctctacct

SEQ ID NO: 6719 - DNA, 22 bp, synthetic construct
  misc_feature 1..22: note = chemically synthesized
  source 1..22: mol_type = other DNA
tcaatcctagagtctctacctt

SEQ ID NO: 6720 - DNA, 22 bp, synthetic construct
  misc_feature 1..22: note = chemically synthesized
  source 1..22: mol_type = other DNA
aatcctagagtctctaccttat

SEQ ID NO: 6721 - DNA, 22 bp, synthetic construct
  misc_feature 1..22: note = chemically synthesized
  source 1..22: mol_type = other DNA
gagtctctaccttataattgag

SEQ ID NO: 6722 - DNA, 22 bp, synthetic construct
  misc_feature 1..22: note = chemically synthesized
  source 1..22: mol_type = other DNA
taccttataattgagatgtatg

SEQ ID NO: 6723 - DNA, 22 bp, synthetic construct
  misc_feature 1..22: note = chemically synthesized
  source 1..22: mol_type = other DNA
ccttataattgagatgtatgag

SEQ ID NO: 6724 - DNA, 22 bp, synthetic construct
  misc_feature 1..22: note = chemically synthesized
  source 1..22: mol_type = other DNA
ataattgagatgtatgagacag

SEQ ID NO: 6725 - DNA, 22 bp, synthetic construct
  misc_feature 1..22: note = chemically synthesized
  source 1..22: mol_type = other DNA
taattgagatgtatgagacagc

SEQ ID NO: 6726 - DNA, 22 bp, synthetic construct
  misc_feature 1..22: note = chemically synthesized
  source 1..22: mol_type = other DNA
agatgtatgagacagccacaag

SEQ ID NO: 6727 - DNA, 22 bp, synthetic construct
  misc_feature 1..22: note = chemically synthesized
  source 1..22: mol_type = other DNA
aatttcttttctccatgcatat

SEQ ID NO: 6728 - DNA, 22 bp, synthetic construct
  misc_feature 1..22: note = chemically synthesized
  source 1..22: mol_type = other DNA
atttcttttctccatgcatatg

SEQ ID NO: 6729 - DNA, 22 bp, synthetic construct
  misc_feature 1..22: note = chemically synthesized
  source 1..22: mol_type = other DNA
cttttctccatgcatatggctc

SEQ ID NO: 6730 - DNA, 22 bp, synthetic construct
  misc_feature 1..22: note = chemically synthesized
  source 1..22: mol_type = other DNA
ttttctccatgcatatggctca

SEQ ID NO: 6731 - DNA, 22 bp, synthetic construct
  misc_feature 1..22: note = chemically synthesized
  source 1..22: mol_type = other DNA
ttctccatgcatatggctcaaa

SEQ ID NO: 6732 - DNA, 22 bp, synthetic construct
  misc_feature 1..22: note = chemically synthesized
  source 1..22: mol_type = other DNA
tctccatgcatatggctcaaag

SEQ ID NO: 6733 - DNA, 22 bp, synthetic construct
  misc_feature 1..22: note = chemically synthesized
  source 1..22: mol_type = other DNA
ctccatgcatatggctcaaagg

SEQ ID NO: 6734 - DNA, 22 bp, synthetic construct
  misc_feature 1..22: note = chemically synthesized
  source 1..22: mol_type = other DNA
tccatgcatatggctcaaaggg

SEQ ID NO: 6735 - DNA, 22 bp, synthetic construct
  misc_feature 1..22: note = chemically synthesized
  source 1..22: mol_type = other DNA
catgcatatggctcaaagggaa

SEQ ID NO: 6736 - DNA, 22 bp, synthetic construct
  misc_feature 1..22: note = chemically synthesized
  source 1..22: mol_type = other DNA
aaagggaagtgtctatggccct

SEQ ID NO: 6737 - DNA, 22 bp, synthetic construct
  misc_feature 1..22: note = chemically synthesized
  source 1..22: mol_type = other DNA
tggcccttgctttttatttaac

SEQ ID NO: 6738 - DNA, 22 bp, synthetic construct
  misc_feature 1..22: note = chemically synthesized
  source 1..22: mol_type = other DNA
gctttttatttaaccaataatc

SEQ ID NO: 6739 - DNA, 22 bp, synthetic construct
  misc_feature 1..22: note = chemically synthesized
  source 1..22: mol_type = other DNA
ctttttatttaaccaataatct

SEQ ID NO: 6740 - DNA, 22 bp, synthetic construct
  misc_feature 1..22: note = chemically synthesized
  source 1..22: mol_type = other DNA
tttatttaaccaataatctttt

SEQ ID NO: 6741 - DNA, 22 bp, synthetic construct
  misc_feature 1..22: note = chemically synthesized
  source 1..22: mol_type = other DNA
ttatttaaccaataatcttttg

SEQ ID NO: 6742 - DNA, 22 bp, synthetic construct
  misc_feature 1..22: note = chemically synthesized
  source 1..22: mol_type = other DNA
tatttaaccaataatcttttgt

SEQ ID NO: 6743 - DNA, 22 bp, synthetic construct
  misc_feature 1..22: note = chemically synthesized
  source 1..22: mol_type = other DNA
atttaaccaataatcttttgta

SEQ ID NO: 6744 - DNA, 22 bp, synthetic construct
  misc_feature 1..22: note = chemically synthesized
  source 1..22: mol_type = other DNA
tttaaccaataatcttttgtat

SEQ ID NO: 6745 - DNA, 22 bp, synthetic construct
  misc_feature 1..22: note = chemically synthesized
  source 1..22: mol_type = other DNA
aaccaataatcttttgtatatt

SEQ ID NO: 6746 - DNA, 22 bp, synthetic construct
  misc_feature 1..22: note = chemically synthesized
  source 1..22: mol_type = other DNA
accaataatcttttgtatattt

SEQ ID NO: 6747 - DNA, 22 bp, synthetic construct
  misc_feature 1..22: note = chemically synthesized
  source 1..22: mol_type = other DNA
ttgtatatttatacctgttaaa

SEQ ID NO: 6748 - DNA, 22 bp, synthetic construct
  misc_feature 1..22: note = chemically synthesized
  source 1..22: mol_type = other DNA
tgtatatttatacctgttaaaa

SEQ ID NO: 6749 - DNA, 22 bp, synthetic construct
  misc_feature 1..22: note = chemically synthesized
  source 1..22: mol_type = other DNA
gtatatttatacctgttaaaaa

SEQ ID NO: 6750 - DNA, 22 bp, synthetic construct
  misc_feature 1..22: note = chemically synthesized
  source 1..22: mol_type = other DNA
tatatttatacctgttaaaaat

SEQ ID NO: 6751 - DNA, 22 bp, synthetic construct
  misc_feature 1..22: note = chemically synthesized
  source 1..22: mol_type = other DNA
atacctgttaaaaattcagaaa

SEQ ID NO: 6752 - DNA, 22 bp, synthetic construct
  misc_feature 1..22: note = chemically synthesized
  source 1..22: mol_type = other DNA
tacctgttaaaaattcagaaat

SEQ ID NO: 6753 - DNA, 22 bp, synthetic construct
  misc_feature 1..22: note = chemically synthesized
  source 1..22: mol_type = other DNA
ttaaaaattcagaaatgtcaag

SEQ ID NO: 6754 - DNA, 22 bp, synthetic construct
  misc_feature 1..22: note = chemically synthesized
  source 1..22: mol_type = other DNA
aaaattcagaaatgtcaaggcc

SEQ ID NO: 6755 - DNA, 22 bp, synthetic construct
  misc_feature 1..22: note = chemically synthesized
  source 1..22: mol_type = other DNA
agaaatgtcaaggccgggcacg

SEQ ID NO: 6756 - DNA, 22 bp, synthetic construct
  misc_feature 1..22: note = chemically synthesized
  source 1..22: mol_type = other DNA
acccctgtaatcccagcacttt

SEQ ID NO: 6757 - DNA, 22 bp, synthetic construct
  misc_feature 1..22: note = chemically synthesized
  source 1..22: mol_type = other DNA
taatcccagcactttgggaggc

SEQ ID NO: 6758 - DNA, 22 bp, synthetic construct
  misc_feature 1..22: note = chemically synthesized
  source 1..22: mol_type = other DNA
tgggaggccgaggcgggtggtc

SEQ ID NO: 6759 - DNA, 22 bp, synthetic construct
  misc_feature 1..22: note = chemically synthesized
  source 1..22: mol_type = other DNA
gggaggccgaggcgggtggtca

SEQ ID NO: 6760 - DNA, 22 bp, synthetic construct
  misc_feature 1..22: note = chemically synthesized
  source 1..22: mol_type = other DNA
ggaggccgaggcgggtggtcac

SEQ ID NO: 6761 - DNA, 22 bp, synthetic construct
  misc_feature 1..22: note = chemically synthesized
  source 1..22: mol_type = other DNA
gagaccagcctgaccaacatgg

SEQ ID NO: 6762 - DNA, 22 bp, synthetic construct
  misc_feature 1..22: note = chemically synthesized
  source 1..22: mol_type = other DNA
agaccagcctgaccaacatggt

SEQ ID NO: 6763 - DNA, 22 bp, synthetic construct
  misc_feature 1..22: note = chemically synthesized
  source 1..22: mol_type = other DNA
accaacatggtgaaacccgtct

SEQ ID NO: 6764 - DNA, 22 bp, synthetic construct
  misc_feature 1..22: note = chemically synthesized
  source 1..22: mol_type = other DNA
taaaaaaatacaaaaattagct

SEQ ID NO: 6765 - DNA, 22 bp, synthetic construct
  misc_feature 1..22: note = chemically synthesized
  source 1..22: mol_type = other DNA
aaaaaatacaaaaattagctgg

SEQ ID NO: 6766 - DNA, 22 bp, synthetic construct
  misc_feature 1..22: note = chemically synthesized
  source 1..22: mol_type = other DNA
gctggtcacagtcatgcgcacc

SEQ ID NO: 6767 - DNA, 22 bp, synthetic construct
  misc_feature 1..22: note = chemically synthesized
  source 1..22: mol_type = other DNA
gtcacagtcatgcgcacctgta

SEQ ID NO: 6768 - DNA, 22 bp, synthetic construct
  misc_feature 1..22: note = chemically synthesized
  source 1..22: mol_type = other DNA
tagtcccagctaattggaaggc

SEQ ID NO: 6769 - DNA, 22 bp, synthetic construct
  misc_feature 1..22: note = chemically synthesized
  source 1..22: mol_type = other DNA
attggaaggctgaggcaggagc

SEQ ID NO: 6770 - DNA, 22 bp, synthetic construct
  misc_feature 1..22: note = chemically synthesized
  source 1..22: mol_type = other DNA
gaaggctgaggcaggagcatcg

SEQ ID NO: 6771 - DNA, 22 bp, synthetic construct
  misc_feature 1..22: note = chemically synthesized
  source 1..22: mol_type = other DNA
aggcaggagcatcgcttgaacc

SEQ ID NO: 6772 - DNA, 22 bp, synthetic construct
  misc_feature 1..22: note = chemically synthesized
  source 1..22: mol_type = other DNA
gaacctgggaagcggaagttgc

SEQ ID NO: 6773 - DNA, 22 bp, synthetic construct
  misc_feature 1..22: note = chemically synthesized
  source 1..22: mol_type = other DNA
aacctgggaagcggaagttgca

SEQ ID NO: 6774 - DNA, 22 bp, synthetic construct
  misc_feature 1..22: note = chemically synthesized
  source 1..22: mol_type = other DNA
ggaagcggaagttgcactgagc

SEQ ID NO: 6775 - DNA, 22 bp, synthetic construct
  misc_feature 1..22: note = chemically synthesized
  source 1..22: mol_type = other DNA
cactgagccaagatcgcgccac

SEQ ID NO: 6776 - DNA, 22 bp, synthetic construct
  misc_feature 1..22: note = chemically synthesized
  source 1..22: mol_type = other DNA
agccaagatcgcgccactgcac

SEQ ID NO: 6777 - DNA, 22 bp, synthetic construct
  misc_feature 1..22: note = chemically synthesized
  source 1..22: mol_type = other DNA
cactccagcctaggcagcagag

SEQ ID NO: 6778 - DNA, 22 bp, synthetic construct
  misc_feature 1..22: note = chemically synthesized
  source 1..22: mol_type = other DNA
cagcctaggcagcagagtgaga

SEQ ID NO: 6779 - DNA, 22 bp, synthetic construct
  misc_feature 1..22: note = chemically synthesized
  source 1..22: mol_type = other DNA
ggcagcagagtgagactccatc

SEQ ID NO: 6780 - DNA, 22 bp, synthetic construct
  misc_feature 1..22: note = chemically synthesized
  source 1..22: mol_type = other DNA
catcttaaaaaaaaaaaaaaaa

SEQ ID NO: 6781 - DNA, 22 bp, synthetic construct
  misc_feature 1..22: note = chemically synthesized
  source 1..22: mol_type = other DNA
aaaaaaaaaaaaaaaaaaaaaa

SEQ ID NO: 6782 - DNA, 22 bp, synthetic construct
  misc_feature 1..22: note = chemically synthesized
  source 1..22: mol_type = other DNA
aaaaaaaaaaaaaaaaaaaaaa

SEQ ID NO: 6783 - DNA, 22 bp, synthetic construct
  misc_feature 1..22: note = chemically synthesized
  source 1..22: mol_type = other DNA
agagatctcagctatcatatga

SEQ ID NO: 6784 - DNA, 22 bp, synthetic construct
  misc_feature 1..22: note = chemically synthesized
  source 1..22: mol_type = other DNA
agctatcatatgaataccagga

SEQ ID NO: 6785 - DNA, 22 bp, synthetic construct
  misc_feature 1..22: note = chemically synthesized
  source 1..22: mol_type = other DNA
tcatatgaataccaggacaaaa

SEQ ID NO: 6786 - DNA, 22 bp, synthetic construct
  misc_feature 1..22: note = chemically synthesized
  source 1..22: mol_type = other DNA
atcagagtagaagaatccttta

SEQ ID NO: 6787 - DNA, 22 bp, synthetic construct
  misc_feature 1..22: note = chemically synthesized
  source 1..22: mol_type = other DNA
tcagagtagaagaatcctttag

SEQ ID NO: 6788 - DNA, 22 bp, synthetic construct
  misc_feature 1..22: note = chemically synthesized
  source 1..22: mol_type = other DNA
taggttaaaagtttctttcata

SEQ ID NO: 6789 - DNA, 22 bp, synthetic construct
  misc_feature 1..22: note = chemically synthesized
  source 1..22: mol_type = other DNA
aggttaaaagtttctttcatag

SEQ ID NO: 6790 - DNA, 22 bp, synthetic construct
  misc_feature 1..22: note = chemically synthesized
  source 1..22: mol_type = other DNA
ggttaaaagtttctttcataga

SEQ ID NO: 6791 - DNA, 22 bp, synthetic construct
  misc_feature 1..22: note = chemically synthesized
  source 1..22: mol_type = other DNA
aaagtttctttcatagaacata

SEQ ID NO: 6792 - DNA, 22 bp, synthetic construct
  misc_feature 1..22: note = chemically synthesized
  source 1..22: mol_type = other DNA
ctttcatagaacatagcaataa

SEQ ID NO: 6793 - DNA, 22 bp, synthetic construct
  misc_feature 1..22: note = chemically synthesized
  source 1..22: mol_type = other DNA
tttcatagaacatagcaataat

SEQ ID NO: 6794 - DNA, 22 bp, synthetic construct
  misc_feature 1..22: note = chemically synthesized
  source 1..22: mol_type = other DNA
tcatagaacatagcaataatca

SEQ ID NO: 6795 - DNA, 22 bp, synthetic construct
  misc_feature 1..22: note = chemically synthesized
  source 1..22: mol_type = other DNA
catagaacatagcaataatcac

SEQ ID NO: 6796 - DNA, 22 bp, synthetic construct
  misc_feature 1..22: note = chemically synthesized
  source 1..22: mol_type = other DNA
atagaacatagcaataatcact

SEQ ID NO: 6797 - DNA, 22 bp, synthetic construct
  misc_feature 1..22: note = chemically synthesized
  source 1..22: mol_type = other DNA
aagctacctatcttacaagtcc

SEQ ID NO: 6798 - DNA, 22 bp, synthetic construct
  misc_feature 1..22: note = chemically synthesized
  source 1..22: mol_type = other DNA
cctatcttacaagtccgcttct

SEQ ID NO: 6799 - DNA, 22 bp, synthetic construct
  misc_feature 1..22: note = chemically synthesized
  source 1..22: mol_type = other DNA
tcttacaagtccgcttcttata

SEQ ID NO: 6800 - DNA, 22 bp, synthetic construct
  misc_feature 1..22: note = chemically synthesized
  source 1..22: mol_type = other DNA
acaagtccgcttcttataacaa

SEQ ID NO: 6801 - DNA, 22 bp, synthetic construct
  misc_feature 1..22: note = chemically synthesized
  source 1..22: mol_type = other DNA
caagtccgcttcttataacaat

SEQ ID NO: 6802 - DNA, 22 bp, synthetic construct
  misc_feature 1..22: note = chemically synthesized
  source 1..22: mol_type = other DNA
cttataacaatgcctcctaggt

SEQ ID NO: 6803 - DNA, 22 bp, synthetic construct
  misc_feature 1..22: note = chemically synthesized
  source 1..22: mol_type = other DNA
ttataacaatgcctcctaggtt

SEQ ID NO: 6804 - DNA, 22 bp, synthetic construct
  misc_feature 1..22: note = chemically synthesized
  source 1..22: mol_type = other DNA
ataacaatgcctcctaggttga

SEQ ID NO: 6805 - DNA, 22 bp, synthetic construct
  misc_feature 1..22: note = chemically synthesized
  source 1..22: mol_type = other DNA
taacaatgcctcctaggttgac

SEQ ID NO: 6806 - DNA, 22 bp, synthetic construct
  misc_feature 1..22: note = chemically synthesized
  source 1..22: mol_type = other DNA
ctaggttgacccaggtgaaact

SEQ ID NO: 6807 - DNA, 22 bp, synthetic construct
  misc_feature 1..22: note = chemically synthesized
  source 1..22: mol_type = other DNA
ggttgacccaggtgaaactgac

SEQ ID NO: 6808 - DNA, 22 bp, synthetic construct
  misc_feature 1..22: note = chemically synthesized
  source 1..22: mol_type = other DNA
acccaggtgaaactgaccatct

SEQ ID NO: 6809 - DNA, 22 bp, synthetic construct
  misc_feature 1..22: note = chemically synthesized
  source 1..22: mol_type = other DNA
accatctgtattcaatcatttt

SEQ ID NO: 6810 - DNA, 22 bp, synthetic construct
  misc_feature 1..22: note = chemically synthesized
  source 1..22: mol_type = other DNA
tattcaatcattttcaatgcac

SEQ ID NO: 6811 - DNA, 22 bp, synthetic construct
  misc_feature 1..22: note = chemically synthesized
  source 1..22: mol_type = other DNA
aatcattttcaatgcacataaa

SEQ ID NO: 6812 - DNA, 22 bp, synthetic construct
  misc_feature 1..22: note = chemically synthesized
  source 1..22: mol_type = other DNA
tcaatgcacataaagggcaatt

SEQ ID NO: 6813 - DNA, 22 bp, synthetic construct
  misc_feature 1..22: note = chemically synthesized
  source 1..22: mol_type = other DNA
caatgcacataaagggcaattt

SEQ ID NO: 6814 - DNA, 22 bp, synthetic construct
  misc_feature 1..22: note = chemically synthesized
  source 1..22: mol_type = other DNA
aatgcacataaagggcaatttt

SEQ ID NO: 6815 - DNA, 22 bp, synthetic construct
  misc_feature 1..22: note = chemically synthesized
  source 1..22: mol_type = other DNA
tatctatcagaacaaagaacat

SEQ ID NO: 6816 - DNA, 22 bp, synthetic construct
  misc_feature 1..22: note = chemically synthesized
  source 1..22: mol_type = other DNA
atctatcagaacaaagaacatg

SEQ ID NO: 6817 - DNA, 22 bp, synthetic construct
  misc_feature 1..22: note = chemically synthesized
  source 1..22: mol_type = other DNA
tctatcagaacaaagaacatgg

SEQ ID NO: 6818 - DNA, 22 bp, synthetic construct
  misc_feature 1..22: note = chemically synthesized
  source 1..22: mol_type = other DNA
tcagaacaaagaacatgggtaa

SEQ ID NO: 6819 - DNA, 22 bp, synthetic construct
  misc_feature 1..22: note = chemically synthesized
  source 1..22: mol_type = other DNA
acatgtgaggagaacaagctga

SEQ ID NO: 6820 - DNA, 22 bp, synthetic construct
  misc_feature 1..22: note = chemically synthesized
  source 1..22: mol_type = other DNA
catgtgaggagaacaagctgat

SEQ ID NO: 6821 - DNA, 22 bp, synthetic construct
  misc_feature 1..22: note = chemically synthesized
  source 1..22: mol_type = other DNA
atctgactgctctccaagtgac

SEQ ID NO: 6822 - DNA, 22 bp, synthetic construct
  misc_feature 1..22: note = chemically synthesized
  source 1..22: mol_type = other DNA
actgctctccaagtgacactgt

SEQ ID NO: 6823 - DNA, 22 bp, synthetic construct
  misc_feature 1..22: note = chemically synthesized
  source 1..22: mol_type = other DNA
ctctccaagtgacactgtgtta

SEQ ID NO: 6824 - DNA, 22 bp, synthetic construct
  misc_feature 1..22: note = chemically synthesized
  source 1..22: mol_type = other DNA
tccaagtgacactgtgttagag

SEQ ID NO: 6825 - DNA, 22 bp, synthetic construct
  misc_feature 1..22: note = chemically synthesized
  source 1..22: mol_type = other DNA
caagtgacactgtgttagagtc

SEQ ID NO: 6826 - DNA, 22 bp, synthetic construct
  misc_feature 1..22: note = chemically synthesized
  source 1..22: mol_type = other DNA
tgttagagtccaatcttaggac

SEQ ID NO: 6827 - DNA, 22 bp, synthetic construct
  misc_feature 1..22: note = chemically synthesized
  source 1..22: mol_type = other DNA
gagtccaatcttaggacacaaa

SEQ ID NO: 6828 - DNA, 22 bp, synthetic construct
  misc_feature 1..22: note = chemically synthesized
  source 1..22: mol_type = other DNA
aggacacaaaatggtgtctctc

SEQ ID NO: 6829 - DNA, 22 bp, synthetic construct
  misc_feature 1..22: note = chemically synthesized
  source 1..22: mol_type = other DNA
ggacacaaaatggtgtctctcc

SEQ ID NO: 6830 - DNA, 22 bp, synthetic construct
  misc_feature 1..22: note = chemically synthesized
  source 1..22: mol_type = other DNA
tcctgtagcttgtttttttctg

SEQ ID NO: 6831 - DNA, 22 bp, synthetic construct
  misc_feature 1..22: note = chemically synthesized
  source 1..22: mol_type = other DNA
ctgtagcttgtttttttctgaa

SEQ ID NO: 6832 - DNA, 22 bp, synthetic construct
  misc_feature 1..22: note = chemically synthesized
  source 1..22: mol_type = other DNA
tagcttgtttttttctgaaaag

SEQ ID NO: 6833 - DNA, 22 bp, synthetic construct
  misc_feature 1..22: note = chemically synthesized
  source 1..22: mol_type = other DNA
gtttttttctgaaaagggtatt

SEQ ID NO: 6834 - DNA, 22 bp, synthetic construct
  misc_feature 1..22: note = chemically synthesized
  source 1..22: mol_type = other DNA
tttttttctgaaaagggtattt

SEQ ID NO: 6835 - DNA, 22 bp, synthetic construct
  misc_feature 1..22: note = chemically synthesized
  source 1..22: mol_type = other DNA
ttttctgaaaagggtatttcct

SEQ ID NO: 6836 - DNA, 22 bp, synthetic construct
  misc_feature 1..22: note = chemically synthesized
  source 1..22: mol_type = other DNA
tttctgaaaagggtatttcctt

SEQ ID NO: 6837 - DNA, 22 bp, synthetic construct
  misc_feature 1..22: note = chemically synthesized
  source 1..22: mol_type = other DNA
ttctgaaaagggtatttccttc

SEQ ID NO: 6838 - DNA, 22 bp, synthetic construct
  misc_feature 1..22: note = chemically synthesized
  source 1..22: mol_type = other DNA
tctgaaaagggtatttccttcc

SEQ ID NO: 6839 - DNA, 22 bp, synthetic construct
  misc_feature 1..22: note = chemically synthesized
  source 1..22: mol_type = other DNA
ctgaaaagggtatttccttcct

SEQ ID NO: 6840 - DNA, 22 bp, synthetic construct
  misc_feature 1..22: note = chemically synthesized
  source 1..22: mol_type = other DNA
tgaaaagggtatttccttcctc

SEQ ID NO: 6841 - DNA, 22 bp, synthetic construct
  misc_feature 1..22: note = chemically synthesized
  source 1..22: mol_type = other DNA
aaaagggtatttccttcctcca

SEQ ID NO: 6842 - DNA, 22 bp, synthetic construct
  misc_feature 1..22: note = chemically synthesized
  source 1..22: mol_type = other DNA
ccttcctccaacctatagaagg

SEQ ID NO: 6843 - DNA, 22 bp, synthetic construct
  misc_feature 1..22: note = chemically synthesized
  source 1..22: mol_type = other DNA
cttcctccaacctatagaagga

SEQ ID NO: 6844 - DNA, 22 bp, synthetic construct
  misc_feature 1..22: note = chemically synthesized
  source 1..22: mol_type = other DNA
cctccaacctatagaaggaagt

SEQ ID NO: 6845 - DNA, 22 bp, synthetic construct
  misc_feature 1..22: note = chemically synthesized
  source 1..22: mol_type = other DNA
ctccaacctatagaaggaagtg

SEQ ID NO: 6846 - DNA, 22 bp, synthetic construct
  misc_feature 1..22: note = chemically synthesized
  source 1..22: mol_type = other DNA
caacctatagaaggaagtgaaa

SEQ ID NO: 6847 - DNA, 22 bp, synthetic construct
  misc_feature 1..22: note = chemically synthesized
  source 1..22: mol_type = other DNA
tagaaggaagtgaaagttccag

SEQ ID NO: 6848 - DNA, 22 bp, synthetic construct
  misc_feature 1..22: note = chemically synthesized
  source 1..22: mol_type = other DNA
cagtcttcctggcaagggtaaa

SEQ ID NO: 6849 - DNA, 22 bp, synthetic construct
  misc_feature 1..22: note = chemically synthesized
  source 1..22: mol_type = other DNA
cctggcaagggtaaacagatcc

SEQ ID NO: 6850 - DNA, 22 bp, synthetic construct
  misc_feature 1..22: note = chemically synthesized
  source 1..22: mol_type = other DNA
ctggcaagggtaaacagatccc

SEQ ID NO: 6851 - DNA, 22 bp, synthetic construct
  misc_feature 1..22: note = chemically synthesized
  source 1..22: mol_type = other DNA
gcaagggtaaacagatcccctc

SEQ ID NO: 6852 - DNA, 22 bp, synthetic construct
  misc_feature 1..22: note = chemically synthesized
  source 1..22: mol_type = other DNA
tcctcatccttcctctttcctg

SEQ ID NO: 6853 - DNA, 22 bp, synthetic construct
  misc_feature 1..22: note = chemically synthesized
  source 1..22: mol_type = other DNA
ctcatccttcctctttcctgtc

SEQ ID NO: 6854 - DNA, 22 bp, synthetic construct
  misc_feature 1..22: note = chemically synthesized
  source 1..22: mol_type = other DNA
atccttcctctttcctgtcaag

SEQ ID NO: 6855 - DNA, 22 bp, synthetic construct
  misc_feature 1..22: note = chemically synthesized
  source 1..22: mol_type = other DNA
cctctttcctgtcaagtgcctc

SEQ ID NO: 6856 - DNA, 22 bp, synthetic construct
  misc_feature 1..22: note = chemically synthesized
  source 1..22: mol_type = other DNA
ctctttcctgtcaagtgcctcc

SEQ ID NO: 6857 - DNA, 22 bp, synthetic construct
  misc_feature 1..22: note = chemically synthesized
  source 1..22: mol_type = other DNA
tttcctgtcaagtgcctccttt

SEQ ID NO: 6858 - DNA, 22 bp, synthetic construct
  misc_feature 1..22: note = chemically synthesized
  source 1..22: mol_type = other DNA
tcctgtcaagtgcctcctttgg

SEQ ID NO: 6859 - DNA, 22 bp, synthetic construct
  misc_feature 1..22: note = chemically synthesized
  source 1..22: mol_type = other DNA
cctgtcaagtgcctcctttggt

SEQ ID NO: 6860 - DNA, 22 bp, synthetic construct
  misc_feature 1..22: note = chemically synthesized
  source 1..22: mol_type = other DNA
ctgtcaagtgcctcctttggtg

SEQ ID NO: 6861 - DNA, 22 bp, synthetic construct
  misc_feature 1..22: note = chemically synthesized
  source 1..22: mol_type = other DNA
tcaagtgcctcctttggtgaag

SEQ ID NO: 6862 - DNA, 22 bp, synthetic construct
  misc_feature 1..22: note = chemically synthesized
  source 1..22: mol_type = other DNA
ctttggtgaaggtgacacatca

SEQ ID NO: 6863 - DNA, 22 bp, synthetic construct
  misc_feature 1..22: note = chemically synthesized
  source 1..22: mol_type = other DNA
tggtgaaggtgacacatcatgt

SEQ ID NO: 6864 - DNA, 22 bp, synthetic construct
  misc_feature 1..22: note = chemically synthesized
  source 1..22: mol_type = other DNA
ggtgaaggtgacacatcatgtg

SEQ ID NO: 6865 - DNA, 22 bp, synthetic construct
  misc_feature 1..22: note = chemically synthesized
  source 1..22: mol_type = other DNA
gtgaaggtgacacatcatgtga

SEQ ID NO: 6866 - DNA, 22 bp, synthetic construct
  misc_feature 1..22: note = chemically synthesized
  source 1..22: mol_type = other DNA
ttcagtgaccactctacggtgt

SEQ ID NO: 6867 - DNA, 22 bp, synthetic construct
  misc_feature 1..22: note = chemically synthesized
  source 1..22: mol_type = other DNA
cagtgaccactctacggtgtcg

SEQ ID NO: 6868 - DNA, 22 bp, synthetic construct
  misc_feature 1..22: note = chemically synthesized
  source 1..22: mol_type = other DNA
agtgaccactctacggtgtcgg

SEQ ID NO: 6869 - DNA, 22 bp, synthetic construct
  misc_feature 1..22: note = chemically synthesized
  source 1..22: mol_type = other DNA
tacggtgtcgggccttgaacta

SEQ ID NO: 6870 - DNA, 22 bp, synthetic construct
  misc_feature 1..22: note = chemically synthesized
  source 1..22: mol_type = other DNA
cggtgtcgggccttgaactact

SEQ ID NO: 6871 - DNA, 22 bp, synthetic construct
  misc_feature 1..22: note = chemically synthesized
  source 1..22: mol_type = other DNA
gaactactacccccagaacatc

SEQ ID NO: 6872 - DNA, 22 bp, synthetic construct
  misc_feature 1..22: note = chemically synthesized
  source 1..22: mol_type = other DNA
aactactacccccagaacatca

SEQ ID NO: 6873 - DNA, 22 bp, synthetic construct
  misc_feature 1..22: note = chemically synthesized
  source 1..22: mol_type = other DNA
ctacccccagaacatcaccatg

SEQ ID NO: 6874 - DNA, 22 bp, synthetic construct
  misc_feature 1..22: note = chemically synthesized
  source 1..22: mol_type = other DNA
cccccagaacatcaccatgaag

SEQ ID NO: 6875 - DNA, 22 bp, synthetic construct
  misc_feature 1..22: note = chemically synthesized
  source 1..22: mol_type = other DNA
aaggataagcagccaatggatg

SEQ ID NO: 6876 - DNA, 22 bp, synthetic construct
  misc_feature 1..22: note = chemically synthesized
  source 1..22: mol_type = other DNA
gaacctaaagacgtattgccca

SEQ ID NO: 6877 - DNA, 22 bp, synthetic construct
  misc_feature 1..22: note = chemically synthesized
  source 1..22: mol_type = other DNA
aagacgtattgcccaatgggga

SEQ ID NO: 6878 - DNA, 22 bp, synthetic construct
  misc_feature 1..22: note = chemically synthesized
  source 1..22: mol_type = other DNA
cccaatggggatgggacctacc

SEQ ID NO: 6879 - DNA, 22 bp, synthetic construct
  misc_feature 1..22: note = chemically synthesized
  source 1..22: mol_type = other DNA
ccagggctggataaccttggct

SEQ ID NO: 6880 - DNA, 22 bp, synthetic construct
  misc_feature 1..22: note = chemically synthesized
  source 1..22: mol_type = other DNA
gataaccttggctgtaccccct

SEQ ID NO: 6881 - DNA, 22 bp, synthetic construct
  misc_feature 1..22: note = chemically synthesized
  source 1..22: mol_type = other DNA
ggctgtaccccctggggaagag

SEQ ID NO: 6882 - DNA, 22 bp, synthetic construct
  misc_feature 1..22: note = chemically synthesized
  source 1..22: mol_type = other DNA
gctgtaccccctggggaagagc

SEQ ID NO: 6883 - DNA, 22 bp, synthetic construct
  misc_feature 1..22: note = chemically synthesized
  source 1..22: mol_type = other DNA
taccccctggggaagagcagag

SEQ ID NO: 6884 - DNA, 22 bp, synthetic construct
  misc_feature 1..22: note = chemically synthesized
  source 1..22: mol_type = other DNA
gggaagagcagagatatacgtg

SEQ ID NO: 6885 - DNA, 22 bp, synthetic construct
  misc_feature 1..22: note = chemically synthesized
  source 1..22: mol_type = other DNA
gatcagcccctcattgtgatct

SEQ ID NO: 6886 - DNA, 22 bp, synthetic construct
  misc_feature 1..22: note = chemically synthesized
  source 1..22: mol_type = other DNA
attgtgatctggggtatgtgac

SEQ ID NO: 6887 - DNA, 22 bp, synthetic construct
  misc_feature 1..22: note = chemically synthesized
  source 1..22: mol_type = other DNA
tgatctggggtatgtgactgat

SEQ ID NO: 6888 - DNA, 22 bp, synthetic construct
  misc_feature 1..22: note = chemically synthesized
  source 1..22: mol_type = other DNA
gggtatgtgactgatgagagcc

SEQ ID NO: 6889 - DNA, 22 bp, synthetic construct
  misc_feature 1..22: note = chemically synthesized
  source 1..22: mol_type = other DNA
atgagagccaggagctgagaaa

SEQ ID NO: 6890 - DNA, 22 bp, synthetic construct
  misc_feature 1..22: note = chemically synthesized
  source 1..22: mol_type = other DNA
agaaaatctattgggggttgag

SEQ ID NO: 6891 - DNA, 22 bp, synthetic construct
  misc_feature 1..22: note = chemically synthesized
  source 1..22: mol_type = other DNA
ttgggggttgagaggagtgcct

SEQ ID NO: 6892 - DNA, 22 bp, synthetic construct
  misc_feature 1..22: note = chemically synthesized
  source 1..22: mol_type = other DNA
ggggttgagaggagtgcctgag

SEQ ID NO: 6893 - DNA, 22 bp, synthetic construct
  misc_feature 1..22: note = chemically synthesized
  source 1..22: mol_type = other DNA
agaggagtgcctgaggaggtaa

SEQ ID NO: 6894 - DNA, 22 bp, synthetic construct
  misc_feature 1..22: note = chemically synthesized
  source 1..22: mol_type = other DNA
aggaggtaattatggcagtgag

SEQ ID NO: 6895 - DNA, 22 bp, synthetic construct
  misc_feature 1..22: note = chemically synthesized
  source 1..22: mol_type = other DNA
tggcagtgagatgaggatctgc

SEQ ID NO: 6896 - DNA, 22 bp, synthetic construct
  misc_feature 1..22: note = chemically synthesized
  source 1..22: mol_type = other DNA
ctctttgttagggggtgggctg

SEQ ID NO: 6897 - DNA, 22 bp, synthetic construct
  misc_feature 1..22: note = chemically synthesized
  source 1..22: mol_type = other DNA
tttgttagggggtgggctgagg

SEQ ID NO: 6898 - DNA, 22 bp, synthetic construct
  misc_feature 1..22: note = chemically synthesized
  source 1..22: mol_type = other DNA
tgttagggggtgggctgagggt

SEQ ID NO: 6899 - DNA, 22 bp, synthetic construct
  misc_feature 1..22: note = chemically synthesized
  source 1..22: mol_type = other DNA
gttagggggtgggctgagggtg

SEQ ID NO: 6900 - DNA, 22 bp, synthetic construct
  misc_feature 1..22: note = chemically synthesized
  source 1..22: mol_type = other DNA
ttagggggtgggctgagggtgg

SEQ ID NO: 6901 - DNA, 22 bp, synthetic construct
  misc_feature 1..22: note = chemically synthesized
  source 1..22: mol_type = other DNA
gggggtgggctgagggtggcaa

SEQ ID NO: 6902 - DNA, 22 bp, synthetic construct
  misc_feature 1..22: note = chemically synthesized
  source 1..22: mol_type = other DNA
agggtggcaatcaaaggcttta

SEQ ID NO: 6903 - DNA, 22 bp, synthetic construct
  misc_feature 1..22: note = chemically synthesized
  source 1..22: mol_type = other DNA
taacttgctttttctgttttag

SEQ ID NO: 6904 - DNA, 22 bp, synthetic construct
  misc_feature 1..22: note = chemically synthesized
  source 1..22: mol_type = other DNA
aacttgctttttctgttttaga

SEQ ID NO: 6905 - DNA, 22 bp, synthetic construct
  misc_feature 1..22: note = chemically synthesized
  source 1..22: mol_type = other DNA
acttgctttttctgttttagag

SEQ ID NO: 6906 - DNA, 22 bp, synthetic construct
  misc_feature 1..22: note = chemically synthesized
  source 1..22: mol_type = other DNA
gctttttctgttttagagccct

SEQ ID NO: 6907 - DNA, 22 bp, synthetic construct
  misc_feature 1..22: note = chemically synthesized
  source 1..22: mol_type = other DNA
ctttttctgttttagagccctc

SEQ ID NO: 6908 - DNA, 22 bp, synthetic construct
  misc_feature 1..22: note = chemically synthesized
  source 1..22: mol_type = other DNA
tttctgttttagagccctcacc

SEQ ID NO: 6909 - DNA, 22 bp, synthetic construct
  misc_feature 1..22: note = chemically synthesized
  source 1..22: mol_type = other DNA
ttctgttttagagccctcaccg

SEQ ID NO: 6910 - DNA, 22 bp, synthetic construct
  misc_feature 1..22: note = chemically synthesized
  source 1..22: mol_type = other DNA
tctgttttagagccctcaccgt

SEQ ID NO: 6911 - DNA, 22 bp, synthetic construct
  misc_feature 1..22: note = chemically synthesized
  source 1..22: mol_type = other DNA
ctgttttagagccctcaccgtc

SEQ ID NO: 6912 - DNA, 22 bp, synthetic construct
  misc_feature 1..22: note = chemically synthesized
  source 1..22: mol_type = other DNA
tgttttagagccctcaccgtct

SEQ ID NO: 6913 - DNA, 22 bp, synthetic construct
  misc_feature 1..22: note = chemically synthesized
  source 1..22: mol_type = other DNA
ttttagagccctcaccgtctgg

SEQ ID NO: 6914 - DNA, 22 bp, synthetic construct
  misc_feature 1..22: note = chemically synthesized
  source 1..22: mol_type = other DNA
tagagccctcaccgtctggcac

SEQ ID NO: 6915 - DNA, 22 bp, synthetic construct
  misc_feature 1..22: note = chemically synthesized
  source 1..22: mol_type = other DNA
agagccctcaccgtctggcacc

SEQ ID NO: 6916 - DNA, 22 bp, synthetic construct
  misc_feature 1..22: note = chemically synthesized
  source 1..22: mol_type = other DNA
gagccctcaccgtctggcaccc

SEQ ID NO: 6917 - DNA, 22 bp, synthetic construct
  misc_feature 1..22: note = chemically synthesized
  source 1..22: mol_type = other DNA
accgtctggcaccctagtcatt

SEQ ID NO: 6918 - DNA, 22 bp, synthetic construct
  misc_feature 1..22: note = chemically synthesized
  source 1..22: mol_type = other DNA
gcaccctagtcattggagtcat

SEQ ID NO: 6919 - DNA, 22 bp, synthetic construct
  misc_feature 1..22: note = chemically synthesized
  source 1..22: mol_type = other DNA
gtcattggagtcatcagtggaa

SEQ ID NO: 6920 - DNA, 22 bp, synthetic construct
  misc_feature 1..22: note = chemically synthesized
  source 1..22: mol_type = other DNA
gagtcatcagtggaattgctgt

SEQ ID NO: 6921 - DNA, 22 bp, synthetic construct
  misc_feature 1..22: note = chemically synthesized
  source 1..22: mol_type = other DNA
ctgtttttgtcgtcatcttgtt

SEQ ID NO: 6922 - DNA, 22 bp, synthetic construct
  misc_feature 1..22: note = chemically synthesized
  source 1..22: mol_type = other DNA
tttttgtcgtcatcttgttcat

SEQ ID NO: 6923 - DNA, 22 bp, synthetic construct
  misc_feature 1..22: note = chemically synthesized
  source 1..22: mol_type = other DNA
ttgtcgtcatcttgttcattgg

SEQ ID NO: 6924 - DNA, 22 bp, synthetic construct
  misc_feature 1..22: note = chemically synthesized
  source 1..22: mol_type = other DNA
tgtcgtcatcttgttcattgga

SEQ ID NO: 6925 - DNA, 22 bp, synthetic construct
  misc_feature 1..22: note = chemically synthesized
  source 1..22: mol_type = other DNA
gtcgtcatcttgttcattggaa

SEQ ID NO: 6926 - DNA, 22 bp, synthetic construct
  misc_feature 1..22: note = chemically synthesized
  source 1..22: mol_type = other DNA
tcgtcatcttgttcattggaat

SEQ ID NO: 6927 - DNA, 22 bp, synthetic construct
  misc_feature 1..22: note = chemically synthesized
  source 1..22: mol_type = other DNA
gttcattggaattttgttcata

SEQ ID NO: 6928 - DNA, 22 bp, synthetic construct
  misc_feature 1..22: note = chemically synthesized
  source 1..22: mol_type = other DNA
ttcattggaattttgttcataa

SEQ ID NO: 6929 - DNA, 22 bp, synthetic construct
  misc_feature 1..22: note = chemically synthesized
  source 1..22: mol_type = other DNA
attggaattttgttcataatat

SEQ ID NO: 6930 - DNA, 22 bp, synthetic construct
  misc_feature 1..22: note = chemically synthesized
  source 1..22: mol_type = other DNA
gaattttgttcataatattaag

SEQ ID NO: 6931 - DNA, 22 bp, synthetic construct
  misc_feature 1..22: note = chemically synthesized
  source 1..22: mol_type = other DNA
tgttcataatattaaggaagag

SEQ ID NO: 6932 - DNA, 22 bp, synthetic construct
  misc_feature 1..22: note = chemically synthesized
  source 1..22: mol_type = other DNA
gttcataatattaaggaagagg

SEQ ID NO: 6933 - DNA, 22 bp, synthetic construct
  misc_feature 1..22: note = chemically synthesized
  source 1..22: mol_type = other DNA
ttcataatattaaggaagaggc

SEQ ID NO: 6934 - DNA, 22 bp, synthetic construct
  misc_feature 1..22: note = chemically synthesized
  source 1..22: mol_type = other DNA
ataatattaaggaagaggcagg

SEQ ID NO: 6935 - DNA, 22 bp, synthetic construct
  misc_feature 1..22: note = chemically synthesized
  source 1..22: mol_type = other DNA
aggaagaggcagggttcaagtg

SEQ ID NO: 6936 - DNA, 22 bp, synthetic construct
  misc_feature 1..22: note = chemically synthesized
  source 1..22: mol_type = other DNA
aagtgagtaggaacaaggggga

SEQ ID NO: 6937 - DNA, 22 bp, synthetic construct
  misc_feature 1..22: note = chemically synthesized
  source 1..22: mol_type = other DNA
ttagtacctctgccccagggca

SEQ ID NO: 6938 - DNA, 22 bp, synthetic construct
  misc_feature 1..22: note = chemically synthesized
  source 1..22: mol_type = other DNA
agtacctctgccccagggcaca

SEQ ID NO: 6939 - DNA, 22 bp, synthetic construct
  misc_feature 1..22: note = chemically synthesized
  source 1..22: mol_type = other DNA
gtacctctgccccagggcacag

SEQ ID NO: 6940 - DNA, 22 bp, synthetic construct
  misc_feature 1..22: note = chemically synthesized
  source 1..22: mol_type = other DNA
tgccccagggcacagtgggaag

SEQ ID NO: 6941 - DNA, 22 bp, synthetic construct
  misc_feature 1..22: note = chemically synthesized
  source 1..22: mol_type = other DNA
ccccagggcacagtgggaagag

SEQ ID NO: 6942 - DNA, 22 bp, synthetic construct
  misc_feature 1..22: note = chemically synthesized
  source 1..22: mol_type = other DNA
gcatccatgggaagcatttttc

SEQ ID NO: 6943 - DNA, 22 bp, synthetic construct
  misc_feature 1..22: note = chemically synthesized
  source 1..22: mol_type = other DNA
ttctcatttatattctttgggg

SEQ ID NO: 6944 - DNA, 22 bp, synthetic construct
  misc_feature 1..22: note = chemically synthesized
  source 1..22: mol_type = other DNA
tctcatttatattctttgggga

SEQ ID NO: 6945 - DNA, 22 bp, synthetic construct
  misc_feature 1..22: note = chemically synthesized
  source 1..22: mol_type = other DNA
ctcatttatattctttggggac

SEQ ID NO: 6946 - DNA, 22 bp, synthetic construct
  misc_feature 1..22: note = chemically synthesized
  source 1..22: mol_type = other DNA
tcatttatattctttggggaca

SEQ ID NO: 6947 - DNA, 22 bp, synthetic construct
  misc_feature 1..22: note = chemically synthesized
  source 1..22: mol_type = other DNA
atttatattctttggggacacc

SEQ ID NO: 6948 - DNA, 22 bp, synthetic construct
  misc_feature 1..22: note = chemically synthesized
  source 1..22: mol_type = other DNA
atattctttggggacaccagca

SEQ ID NO: 6949 - DNA, 22 bp, synthetic construct
  misc_feature 1..22: note = chemically synthesized
  source 1..22: mol_type = other DNA
tattctttggggacaccagcag

SEQ ID NO: 6950 - DNA, 22 bp, synthetic construct
  misc_feature 1..22: note = chemically synthesized
  source 1..22: mol_type = other DNA
tttggggacaccagcagctccc

SEQ ID NO: 6951 - DNA, 22 bp, synthetic construct
  misc_feature 1..22: note = chemically synthesized
  source 1..22: mol_type = other DNA
tggggacaccagcagctccctg

SEQ ID NO: 6952 - DNA, 22 bp, synthetic construct
  misc_feature 1..22: note = chemically synthesized
  source 1..22: mol_type = other DNA
ggggacaccagcagctccctgg

SEQ ID NO: 6953 - DNA, 22 bp, synthetic construct
  misc_feature 1..22: note = chemically synthesized
  source 1..22: mol_type = other DNA
gggacaccagcagctccctggg

SEQ ID NO: 6954 - DNA, 22 bp, synthetic construct
  misc_feature 1..22: note = chemically synthesized
  source 1..22: mol_type = other DNA
cctgggagacagaaaataatgg

SEQ ID NO: 6955 - DNA, 22 bp, synthetic construct
  misc_feature 1..22: note = chemically synthesized
  source 1..22: mol_type = other DNA
ggagacagaaaataatggttct

SEQ ID NO: 6956 - DNA, 22 bp, synthetic construct
  misc_feature 1..22: note = chemically synthesized
  source 1..22: mol_type = other DNA
tccccagaatgaaagtctctaa

SEQ ID NO: 6957 - DNA, 22 bp, synthetic construct
  misc_feature 1..22: note = chemically synthesized
  source 1..22: mol_type = other DNA
cccagaatgaaagtctctaatt

SEQ ID NO: 6958 - DNA, 22 bp, synthetic construct
  misc_feature 1..22: note = chemically synthesized
  source 1..22: mol_type = other DNA
taattcaacaaacatcttcaga

SEQ ID NO: 6959 - DNA, 22 bp, synthetic construct
  misc_feature 1..22: note = chemically synthesized
  source 1..22: mol_type = other DNA
attcaacaaacatcttcagagc

SEQ ID NO: 6960 - DNA, 22 bp, synthetic construct
  misc_feature 1..22: note = chemically synthesized
  source 1..22: mol_type = other DNA
aacaaacatcttcagagcacct

SEQ ID NO: 6961 - DNA, 22 bp, synthetic construct
  misc_feature 1..22: note = chemically synthesized
  source 1..22: mol_type = other DNA
cagagcacctactattttgcaa

SEQ ID NO: 6962 - DNA, 22 bp, synthetic construct
  misc_feature 1..22: note = chemically synthesized
  source 1..22: mol_type = other DNA
agagcacctactattttgcaag

SEQ ID NO: 6963 - DNA, 22 bp, synthetic construct
  misc_feature 1..22: note = chemically synthesized
  source 1..22: mol_type = other DNA
ctattttgcaagagctgtttaa

SEQ ID NO: 6964 - DNA, 22 bp, synthetic construct
  misc_feature 1..22: note = chemically synthesized
  source 1..22: mol_type = other DNA
ttttgcaagagctgtttaaggt

SEQ ID NO: 6965 - DNA, 22 bp, synthetic construct
  misc_feature 1..22: note = chemically synthesized
  source 1..22: mol_type = other DNA
tgcaagagctgtttaaggtagt

SEQ ID NO: 6966 - DNA, 22 bp, synthetic construct
  misc_feature 1..22: note = chemically synthesized
  source 1..22: mol_type = other DNA
gcaagagctgtttaaggtagta

SEQ ID NO: 6967 - DNA, 22 bp, synthetic construct
  misc_feature 1..22: note = chemically synthesized
  source 1..22: mol_type = other DNA
caagagctgtttaaggtagtac

SEQ ID NO: 6968 - DNA, 22 bp, synthetic construct
  misc_feature 1..22: note = chemically synthesized
  source 1..22: mol_type = other DNA
tttaaggtagtacaggggcttt

SEQ ID NO: 6969 - DNA, 22 bp, synthetic construct
  misc_feature 1..22: note = chemically synthesized
  source 1..22: mol_type = other DNA
aaggtagtacaggggctttgag

SEQ ID NO: 6970 - DNA, 22 bp, synthetic construct
  misc_feature 1..22: note = chemically synthesized
  source 1..22: mol_type = other DNA
aggtagtacaggggctttgagg

SEQ ID NO: 6971 - DNA, 22 bp, synthetic construct
  misc_feature 1..22: note = chemically synthesized
  source 1..22: mol_type = other DNA
tgaggttgagaagtcactgtgg

SEQ ID NO: 6972 - DNA, 22 bp, synthetic construct
  misc_feature 1..22: note = chemically synthesized
  source 1..22: mol_type = other DNA
gaggttgagaagtcactgtggc

SEQ ID NO: 6973 - DNA, 22 bp, synthetic construct
  misc_feature 1..22: note = chemically synthesized
  source 1..22: mol_type = other DNA
aggttgagaagtcactgtggct

SEQ ID NO: 6974 - DNA, 22 bp, synthetic construct
  misc_feature 1..22: note = chemically synthesized
  source 1..22: mol_type = other DNA
agaagtcactgtggctattctc

SEQ ID NO: 6975 - DNA, 22 bp, synthetic construct
  misc_feature 1..22: note = chemically synthesized
  source 1..22: mol_type = other DNA
tggctattctcagaacccaaat

SEQ ID NO: 6976 - DNA, 22 bp, synthetic construct
  misc_feature 1..22: note = chemically synthesized
  source 1..22: mol_type = other DNA
ttctcagaacccaaatctggta

SEQ ID NO: 6977 - DNA, 22 bp, synthetic construct
  misc_feature 1..22: note = chemically synthesized
  source 1..22: mol_type = other DNA
tcagaacccaaatctggtaggg

SEQ ID NO: 6978 - DNA, 22 bp, synthetic construct
  misc_feature 1..22: note = chemically synthesized
  source 1..22: mol_type = other DNA
agaacccaaatctggtagggaa

SEQ ID NO: 6979 - DNA, 22 bp, synthetic construct
  misc_feature 1..22: note = chemically synthesized
  source 1..22: mol_type = other DNA
gtagggaatgaaattgatagca

SEQ ID NO: 6980 - DNA, 22 bp, synthetic construct
  misc_feature 1..22: note = chemically synthesized
  source 1..22: mol_type = other DNA
atagcaagtaaatgtagttaaa

SEQ ID NO: 6981 - DNA, 22 bp, synthetic construct
  misc_feature 1..22: note = chemically synthesized
  source 1..22: mol_type = other DNA
aagaagaccccatgaggtccta

SEQ ID NO: 6982 - DNA, 22 bp, synthetic construct
  misc_feature 1..22: note = chemically synthesized
  source 1..22: mol_type = other DNA
aagcaggcaggaagcaaatgct

SEQ ID NO: 6983 - DNA, 22 bp, synthetic construct
  misc_feature 1..22: note = chemically synthesized
  source 1..22: mol_type = other DNA
agggtgtcaaaggaaagaatga

SEQ ID NO: 6984 - DNA, 22 bp, synthetic construct
  misc_feature 1..22: note = chemically synthesized
  source 1..22: mol_type = other DNA
gggtgtcaaaggaaagaatgat

SEQ ID NO: 6985 - DNA, 22 bp, synthetic construct
  misc_feature 1..22: note = chemically synthesized
  source 1..22: mol_type = other DNA
agctggggatcaagatagcctt

SEQ ID NO: 6986 - DNA, 22 bp, synthetic construct
  misc_feature 1..22: note = chemically synthesized
  source 1..22: mol_type = other DNA
gggatcaagatagccttctgga

SEQ ID NO: 6987 - DNA, 22 bp, synthetic construct
  misc_feature 1..22: note = chemically synthesized
  source 1..22: mol_type = other DNA
ctggatcttgaaggagaagctg

SEQ ID NO: 6988 - DNA, 22 bp, synthetic construct
  misc_feature 1..22: note = chemically synthesized
  source 1..22: mol_type = other DNA
tggatcttgaaggagaagctgg

SEQ ID NO: 6989 - DNA, 22 bp, synthetic construct
  misc_feature 1..22: note = chemically synthesized
  source 1..22: mol_type = other DNA
gatcttgaaggagaagctggat

SEQ ID NO: 6990 - DNA, 22 bp, synthetic construct
  misc_feature 1..22: note = chemically synthesized
  source 1..22: mol_type = other DNA
gaaggagaagctggattccatt

SEQ ID NO: 6991 - DNA, 22 bp, synthetic construct
  misc_feature 1..22: note = chemically synthesized
  source 1..22: mol_type = other DNA
aaggagaagctggattccatta

SEQ ID NO: 6992 - DNA, 22 bp, synthetic construct
  misc_feature 1..22: note = chemically synthesized
  source 1..22: mol_type = other DNA
gattccattaggtgaggttgaa

SEQ ID NO: 6993 - DNA, 22 bp, synthetic construct
  misc_feature 1..22: note = chemically synthesized
  source 1..22: mol_type = other DNA
cattaggtgaggttgaagatga

SEQ ID NO: 6994 - DNA, 22 bp, synthetic construct
  misc_feature 1..22: note = chemically synthesized
  source 1..22: mol_type = other DNA
ggtgaggttgaagatgatggga

SEQ ID NO: 6995 - DNA, 22 bp, synthetic construct
  misc_feature 1..22: note = chemically synthesized
  source 1..22: mol_type = other DNA
aagatgatgggaggtctacaca

SEQ ID NO: 6996 - DNA, 22 bp, synthetic construct
  misc_feature 1..22: note = chemically synthesized
  source 1..22: mol_type = other DNA
cacagacggagcaaccatgcca

SEQ ID NO: 6997 - DNA, 22 bp, synthetic construct
  misc_feature 1..22: note = chemically synthesized
  source 1..22: mol_type = other DNA
ggagattagaaataattactgt

SEQ ID NO: 6998 - DNA, 22 bp, synthetic construct
  misc_feature 1..22: note = chemically synthesized
  source 1..22: mol_type = other DNA
gaaataattactgtaccttaac

SEQ ID NO: 6999 - DNA, 22 bp, synthetic construct
  misc_feature 1..22: note = chemically synthesized
  source 1..22: mol_type = other DNA
ctgtaccttaaccctgagtttg

SEQ ID NO: 7000 - DNA, 22 bp, synthetic construct
  misc_feature 1..22: note = chemically synthesized
  source 1..22: mol_type = other DNA
taccttaaccctgagtttgcgt

SEQ ID NO: 7001 - DNA, 22 bp, synthetic construct
  misc_feature 1..22: note = chemically synthesized
  source 1..22: mol_type = other DNA
aaccctgagtttgcgtagctat

SEQ ID NO: 7002 - DNA, 22 bp, synthetic construct
  misc_feature 1..22: note = chemically synthesized
  source 1..22: mol_type = other DNA
accctgagtttgcgtagctatc

SEQ ID NO: 7003 - DNA, 22 bp, synthetic construct
  misc_feature 1..22: note = chemically synthesized
  source 1..22: mol_type = other DNA
agtttgcgtagctatcactcac

SEQ ID NO: 7004 - DNA, 22 bp, synthetic construct
  misc_feature 1..22: note = chemically synthesized
  source 1..22: mol_type = other DNA
gcgtagctatcactcaccaatt

SEQ ID NO: 7005 - DNA, 22 bp, synthetic construct
  misc_feature 1..22: note = chemically synthesized
  source 1..22: mol_type = other DNA
cgtagctatcactcaccaatta

SEQ ID NO: 7006 - DNA, 22 bp, synthetic construct
  misc_feature 1..22: note = chemically synthesized
  source 1..22: mol_type = other DNA
tcactcaccaattatgcatttc

SEQ ID NO: 7007 - DNA, 22 bp, synthetic construct
  misc_feature 1..22: note = chemically synthesized
  source 1..22: mol_type = other DNA
accaattatgcatttctacccc

SEQ ID NO: 7008 - DNA, 22 bp, synthetic construct
  misc_feature 1..22: note = chemically synthesized
  source 1..22: mol_type = other DNA
tgcatttctaccccctgaacat

SEQ ID NO: 7009 - DNA, 22 bp, synthetic construct
  misc_feature 1..22: note = chemically synthesized
  source 1..22: mol_type = other DNA
ctaccccctgaacatctgtggt

SEQ ID NO: 7010 - DNA, 22 bp, synthetic construct
  misc_feature 1..22: note = chemically synthesized
  source 1..22: mol_type = other DNA
taccccctgaacatctgtggtg

SEQ ID NO: 7011 - DNA, 22 bp, synthetic construct
  misc_feature 1..22: note = chemically synthesized
  source 1..22: mol_type = other DNA
ccccctgaacatctgtggtgta

SEQ ID NO: 7012 - DNA, 22 bp, synthetic construct
  misc_feature 1..22: note = chemically synthesized
  source 1..22: mol_type = other DNA
aacatctgtggtgtagggaaaa

SEQ ID NO: 7013 - DNA, 22 bp, synthetic construct
  misc_feature 1..22: note = chemically synthesized
  source 1..22: mol_type = other DNA
tggtgtagggaaaagagaatca

SEQ ID NO: 7014 - DNA, 22 bp, synthetic construct
  misc_feature 1..22: note = chemically synthesized
  source 1..22: mol_type = other DNA
atacagagtccaagggtctttt

SEQ ID NO: 7015 - DNA, 22 bp, synthetic construct
  misc_feature 1..22: note = chemically synthesized
  source 1..22: mol_type = other DNA
ttgggatattgggttatgatca

SEQ ID NO: 7016 - DNA, 22 bp, synthetic construct
  misc_feature 1..22: note = chemically synthesized
  source 1..22: mol_type = other DNA
tgggatattgggttatgatcac

SEQ ID NO: 7017 - DNA, 22 bp, synthetic construct
  misc_feature 1..22: note = chemically synthesized
  source 1..22: mol_type = other DNA
gggatattgggttatgatcact

SEQ ID NO: 7018 - DNA, 22 bp, synthetic construct
  misc_feature 1..22: note = chemically synthesized
  source 1..22: mol_type = other DNA
ggatattgggttatgatcactg

SEQ ID NO: 7019 - DNA, 22 bp, synthetic construct
  misc_feature 1..22: note = chemically synthesized
  source 1..22: mol_type = other DNA
ggttatgatcactggggtgtca

SEQ ID NO: 7020 - DNA, 22 bp, synthetic construct
  misc_feature 1..22: note = chemically synthesized
  source 1..22: mol_type = other DNA
tgatcactggggtgtcattgaa

SEQ ID NO: 7021 - DNA, 22 bp, synthetic construct
  misc_feature 1..22: note = chemically synthesized
  source 1..22: mol_type = other DNA
gggtgtcattgaaggatcctaa

SEQ ID NO: 7022 - DNA, 22 bp, synthetic construct
  misc_feature 1..22: note = chemically synthesized
  source 1..22: mol_type = other DNA
aaggatcctaagaaaggaggac

SEQ ID NO: 7023 - DNA, 22 bp, synthetic construct
  misc_feature 1..22: note = chemically synthesized
  source 1..22: mol_type = other DNA
agaaaggaggaccacgatctcc

SEQ ID NO: 7024 - DNA, 22 bp, synthetic construct
  misc_feature 1..22: note = chemically synthesized
  source 1..22: mol_type = other DNA
ccttatatggtgaatgtgttgt

SEQ ID NO: 7025 - DNA, 22 bp, synthetic construct
  misc_feature 1..22: note = chemically synthesized
  source 1..22: mol_type = other DNA
atatggtgaatgtgttgttaag

SEQ ID NO: 7026 - DNA, 22 bp, synthetic construct
  misc_feature 1..22: note = chemically synthesized
  source 1..22: mol_type = other DNA
tatggtgaatgtgttgttaaga

SEQ ID NO: 7027 - DNA, 22 bp, synthetic construct
  misc_feature 1..22: note = chemically synthesized
  source 1..22: mol_type = other DNA
ttaagaagttagatgagaggtg

SEQ ID NO: 7028 - DNA, 22 bp, synthetic construct
  misc_feature 1..22: note = chemically synthesized
  source 1..22: mol_type = other DNA
agaagttagatgagaggtgagg

SEQ ID NO: 7029 - DNA, 22 bp, synthetic construct
  misc_feature 1..22: note = chemically synthesized
  source 1..22: mol_type = other DNA
gatgagaggtgaggagaccagt

SEQ ID NO: 7030 - DNA, 22 bp, synthetic construct
  misc_feature 1..22: note = chemically synthesized
  source 1..22: mol_type = other DNA
gaaagccaataagcatttccag

SEQ ID NO: 7031 - DNA, 22 bp, synthetic construct
  misc_feature 1..22: note = chemically synthesized
  source 1..22: mol_type = other DNA
ccagatgagagataatggttct

SEQ ID NO: 7032 - DNA, 22 bp, synthetic construct
  misc_feature 1..22: note = chemically synthesized
  source 1..22: mol_type = other DNA
cagatgagagataatggttctt

SEQ ID NO: 7033 - DNA, 22 bp, synthetic construct
  misc_feature 1..22: note = chemically synthesized
  source 1..22: mol_type = other DNA
ttgaaatccaatagtgcccagg

SEQ ID NO: 7034 - DNA, 22 bp, synthetic construct
  misc_feature 1..22: note = chemically synthesized
  source 1..22: mol_type = other DNA
gaaatccaatagtgcccaggtc

SEQ ID NO: 7035 - DNA, 22 bp, synthetic construct
  misc_feature 1..22: note = chemically synthesized
  source 1..22: mol_type = other DNA
aaatccaatagtgcccaggtct

SEQ ID NO: 7036 - DNA, 22 bp, synthetic construct
  misc_feature 1..22: note = chemically synthesized
  source 1..22: mol_type = other DNA
aattgagatgggtgaatgagga

SEQ ID NO: 7037 - DNA, 22 bp, synthetic construct
  misc_feature 1..22: note = chemically synthesized
  source 1..22: mol_type = other DNA
agatgggtgaatgaggaaaata

SEQ ID NO: 7038 - DNA, 22 bp, synthetic construct
  misc_feature 1..22: note = chemically synthesized
  source 1..22: mol_type = other DNA
ggtttgtgatgcctctttcctg

SEQ ID NO: 7039 - DNA, 22 bp, synthetic construct
  misc_feature 1..22: note = chemically synthesized
  source 1..22: mol_type = other DNA
gtgatgcctctttcctgggtct

SEQ ID NO: 7040 - DNA, 22 bp, synthetic construct
  misc_feature 1..22: note = chemically synthesized
  source 1..22: mol_type = other DNA
tgatgcctctttcctgggtctc

SEQ ID NO: 7041 - DNA, 22 bp, synthetic construct
  misc_feature 1..22: note = chemically synthesized
  source 1..22: mol_type = other DNA
tttcctgggtctcttgtctcca

SEQ ID NO: 7042 - DNA, 22 bp, synthetic construct
  misc_feature 1..22: note = chemically synthesized
  source 1..22: mol_type = other DNA
tcctgggtctcttgtctccaca

SEQ ID NO: 7043 - DNA, 22 bp, synthetic construct
  misc_feature 1..22: note = chemically synthesized
  source 1..22: mol_type = other DNA
cctgggtctcttgtctccacag

SEQ ID NO: 7044 - DNA, 22 bp, synthetic construct
  misc_feature 1..22: note = chemically synthesized
  source 1..22: mol_type = other DNA
ctgggtctcttgtctccacagg

SEQ ID NO: 7045 - DNA, 22 bp, synthetic construct
  misc_feature 1..22: note = chemically synthesized
  source 1..22: mol_type = other DNA
ggtctcttgtctccacaggagg

SEQ ID NO: 7046 - DNA, 22 bp, synthetic construct
  misc_feature 1..22: note = chemically synthesized
  source 1..22: mol_type = other DNA
ttgtctccacaggaggagccat

SEQ ID NO: 7047 - DNA, 22 bp, synthetic construct
  misc_feature 1..22: note = chemically synthesized
  source 1..22: mol_type = other DNA
gtctccacaggaggagccatgg

SEQ ID NO: 7048 - DNA, 22 bp, synthetic construct
  misc_feature 1..22: note = chemically synthesized
  source 1..22: mol_type = other DNA
tctccacaggaggagccatggg

SEQ ID NO: 7049 - DNA, 22 bp, synthetic construct
  misc_feature 1..22: note = chemically synthesized
  source 1..22: mol_type = other DNA
cacaggaggagccatggggcac

SEQ ID NO: 7050 - DNA, 22 bp, synthetic construct
  misc_feature 1..22: note = chemically synthesized
  source 1..22: mol_type = other DNA
cgtcttagctgaacgtgagtga

SEQ ID NO: 7051 - DNA, 22 bp, synthetic construct
  misc_feature 1..22: note = chemically synthesized
  source 1..22: mol_type = other DNA
agctgaacgtgagtgacacgca

SEQ ID NO: 7052 - DNA, 22 bp, synthetic construct
  misc_feature 1..22: note = chemically synthesized
  source 1..22: mol_type = other DNA
gctgaacgtgagtgacacgcag

SEQ ID NO: 7053 - DNA, 22 bp, synthetic construct
  misc_feature 1..22: note = chemically synthesized
  source 1..22: mol_type = other DNA
aacgtgagtgacacgcagcctg

SEQ ID NO: 7054 - DNA, 22 bp, synthetic construct
  misc_feature 1..22: note = chemically synthesized
  source 1..22: mol_type = other DNA
cagactcactgtgggaaggaga

SEQ ID NO: 7055 - DNA, 22 bp, synthetic construct
  misc_feature 1..22: note = chemically synthesized
  source 1..22: mol_type = other DNA
actgtgggaaggagacaaaact

SEQ ID NO: 7056 - DNA, 22 bp, synthetic construct
  misc_feature 1..22: note = chemically synthesized
  source 1..22: mol_type = other DNA
tgggaaggagacaaaactagag

SEQ ID NO: 7057 - DNA, 22 bp, synthetic construct
  misc_feature 1..22: note = chemically synthesized
  source 1..22: mol_type = other DNA
gagactcaaagagggagtgcat

SEQ ID NO: 7058 - DNA, 22 bp, synthetic construct
  misc_feature 1..22: note = chemically synthesized
  source 1..22: mol_type = other DNA
aaagagggagtgcatttatgag

SEQ ID NO: 7059 - DNA, 22 bp, synthetic construct
  misc_feature 1..22: note = chemically synthesized
  source 1..22: mol_type = other DNA
atgagctcttcatgtttcagga

SEQ ID NO: 7060 - DNA, 22 bp, synthetic construct
  misc_feature 1..22: note = chemically synthesized
  source 1..22: mol_type = other DNA
tgagctcttcatgtttcaggag

SEQ ID NO: 7061 - DNA, 22 bp, synthetic construct
  misc_feature 1..22: note = chemically synthesized
  source 1..22: mol_type = other DNA
ttcatgtttcaggagagagttg

SEQ ID NO: 7062 - DNA, 22 bp, synthetic construct
  misc_feature 1..22: note = chemically synthesized
  source 1..22: mol_type = other DNA
catgtttcaggagagagttgaa

SEQ ID NO: 7063 - DNA, 22 bp, synthetic construct
  misc_feature 1..22: note = chemically synthesized
  source 1..22: mol_type = other DNA
atgtttcaggagagagttgaac

SEQ ID NO: 7064 - DNA, 22 bp, synthetic construct
  misc_feature 1..22: note = chemically synthesized
  source 1..22: mol_type = other DNA
caggagagagttgaacctaaac

SEQ ID NO: 7065 - DNA, 22 bp, synthetic construct
  misc_feature 1..22: note = chemically synthesized
  source 1..22: mol_type = other DNA
aggagagagttgaacctaaaca

SEQ ID NO: 7066 - DNA, 22 bp, synthetic construct
  misc_feature 1..22: note = chemically synthesized
  source 1..22: mol_type = other DNA
aacctaaacatagaaattgcct

SEQ ID NO: 7067 - DNA, 22 bp, synthetic construct
  misc_feature 1..22: note = chemically synthesized
  source 1..22: mol_type = other DNA
aacatagaaattgcctgacgaa

SEQ ID NO: 7068 - DNA, 22 bp, synthetic construct
  misc_feature 1..22: note = chemically synthesized
  source 1..22: mol_type = other DNA
cctgacgaactccttgatttta

SEQ ID NO: 7069 - DNA, 22 bp, synthetic construct
  misc_feature 1..22: note = chemically synthesized
  source 1..22: mol_type = other DNA
acgaactccttgattttagcct

SEQ ID NO: 7070 - DNA, 22 bp, synthetic construct
  misc_feature 1..22: note = chemically synthesized
  source 1..22: mol_type = other DNA
cttgattttagccttctctgtt

SEQ ID NO: 7071 - DNA, 22 bp, synthetic construct
  misc_feature 1..22: note = chemically synthesized
  source 1..22: mol_type = other DNA
gattttagccttctctgttcat

SEQ ID NO: 7072 - DNA, 22 bp, synthetic construct
  misc_feature 1..22: note = chemically synthesized
  source 1..22: mol_type = other DNA
attttagccttctctgttcatt

SEQ ID NO: 7073 - DNA, 22 bp, synthetic construct
  misc_feature 1..22: note = chemically synthesized
  source 1..22: mol_type = other DNA
tagccttctctgttcatttcct

SEQ ID NO: 7074 - DNA, 22 bp, synthetic construct
  misc_feature 1..22: note = chemically synthesized
  source 1..22: mol_type = other DNA
agccttctctgttcatttcctc

SEQ ID NO: 7075 - DNA, 22 bp, synthetic construct
  misc_feature 1..22: note = chemically synthesized
  source 1..22: mol_type = other DNA
gccttctctgttcatttcctca

SEQ ID NO: 7076 - DNA, 22 bp, synthetic construct
  misc_feature 1..22: note = chemically synthesized
  source 1..22: mol_type = other DNA
ctctgttcatttcctcaaaaag

SEQ ID NO: 7077 - DNA, 22 bp, synthetic construct
  misc_feature 1..22: note = chemically synthesized
  source 1..22: mol_type = other DNA
tctgttcatttcctcaaaaaga

SEQ ID NO: 7078 - DNA, 22 bp, synthetic construct
  misc_feature 1..22: note = chemically synthesized
  source 1..22: mol_type = other DNA
tgttcatttcctcaaaaagatt

SEQ ID NO: 7079 - DNA, 22 bp, synthetic construct
  misc_feature 1..22: note = chemically synthesized
  source 1..22: mol_type = other DNA
ttcatttcctcaaaaagatttc

SEQ ID NO: 7080 - DNA, 22 bp, synthetic construct
  misc_feature 1..22: note = chemically synthesized
  source 1..22: mol_type = other DNA
atttcctcaaaaagatttcccc

SEQ ID NO: 7081 - DNA, 22 bp, synthetic construct
  misc_feature 1..22: note = chemically synthesized
  source 1..22: mol_type = other DNA
cctcaaaaagatttccccattt

SEQ ID NO: 7082 - DNA, 22 bp, synthetic construct
  misc_feature 1..22: note = chemically synthesized
  source 1..22: mol_type = other DNA
ctcaaaaagatttccccattta

SEQ ID NO: 7083 - DNA, 22 bp, synthetic construct
  misc_feature 1..22: note = chemically synthesized
  source 1..22: mol_type = other DNA
aaaaagatttccccatttaggt

SEQ ID NO: 7084 - DNA, 22 bp, synthetic construct
  misc_feature 1..22: note = chemically synthesized
  source 1..22: mol_type = other DNA
ccccatttaggtttctgagttc

SEQ ID NO: 7085 - DNA, 22 bp, synthetic construct
  misc_feature 1..22: note = chemically synthesized
  source 1..22: mol_type = other DNA
cccatttaggtttctgagttcc

SEQ ID NO: 7086 - DNA, 22 bp, synthetic construct
  misc_feature 1..22: note = chemically synthesized
  source 1..22: mol_type = other DNA
aggtttctgagttcctgcatgc

SEQ ID NO: 7087 - DNA, 22 bp, synthetic construct
  misc_feature 1..22: note = chemically synthesized
  source 1..22: mol_type = other DNA
ggtttctgagttcctgcatgcc

SEQ ID NO: 7088 - DNA, 22 bp, synthetic construct
  misc_feature 1..22: note = chemically synthesized
  source 1..22: mol_type = other DNA
ctgagttcctgcatgccggtga

SEQ ID NO: 7089 - DNA, 22 bp, synthetic construct
  misc_feature 1..22: note = chemically synthesized
  source 1..22: mol_type = other DNA
tgagttcctgcatgccggtgat

SEQ ID NO: 7090 - DNA, 22 bp, synthetic construct
  misc_feature 1..22: note = chemically synthesized
  source 1..22: mol_type = other DNA
agttcctgcatgccggtgatcc

SEQ ID NO: 7091 - DNA, 22 bp, synthetic construct
  misc_feature 1..22: note = chemically synthesized
  source 1..22: mol_type = other DNA
ctgcatgccggtgatccctagc

SEQ ID NO: 7092 - DNA, 22 bp, synthetic construct
  misc_feature 1..22: note = chemically synthesized
  source 1..22: mol_type = other DNA
catgccggtgatccctagctgt

SEQ ID NO: 7093 - DNA, 22 bp, synthetic construct
  misc_feature 1..22: note = chemically synthesized
  source 1..22: mol_type = other DNA
gctgtgacctctcccctggaac

SEQ ID NO: 7094 - DNA, 22 bp, synthetic construct
  misc_feature 1..22: note = chemically synthesized
  source 1..22: mol_type = other DNA
tgacctctcccctggaactgtc

SEQ ID NO: 7095 - DNA, 22 bp, synthetic construct
  misc_feature 1..22: note = chemically synthesized
  source 1..22: mol_type = other DNA
tcccctggaactgtctctcatg

SEQ ID NO: 7096 - DNA, 22 bp, synthetic construct
  misc_feature 1..22: note = chemically synthesized
  source 1..22: mol_type = other DNA
ccctggaactgtctctcatgaa

SEQ ID NO: 7097 - DNA, 22 bp, synthetic construct
  misc_feature 1..22: note = chemically synthesized
  source 1..22: mol_type = other DNA
gaactgtctctcatgaacctca

SEQ ID NO: 7098 - DNA, 22 bp, synthetic construct
  misc_feature 1..22: note = chemically synthesized
  source 1..22: mol_type = other DNA
tctctcatgaacctcaagctgc

SEQ ID NO: 7099 - DNA, 22 bp, synthetic construct
  misc_feature 1..22: note = chemically synthesized
  source 1..22: mol_type = other DNA
tcatgaacctcaagctgcatct

SEQ ID NO: 7100 - DNA, 22 bp, synthetic construct
  misc_feature 1..22: note = chemically synthesized
  source 1..22: mol_type = other DNA
atgaacctcaagctgcatctag

SEQ ID NO: 7101 - DNA, 22 bp, synthetic construct
  misc_feature 1..22: note = chemically synthesized
  source 1..22: mol_type = other DNA
aagctgcatctagaggcttcct

SEQ ID NO: 7102 - DNA, 22 bp, synthetic construct
  misc_feature 1..22: note = chemically synthesized
  source 1..22: mol_type = other DNA
catctagaggcttccttcattt

SEQ ID NO: 7103 - DNA, 22 bp, synthetic construct
  misc_feature 1..22: note = chemically synthesized
  source 1..22: mol_type = other DNA
gaggcttccttcatttcctccg

SEQ ID NO: 7104 - DNA, 22 bp, synthetic construct
  misc_feature 1..22: note = chemically synthesized
  source 1..22: mol_type = other DNA
ccttcatttcctccgtcacctc

SEQ ID NO: 7105 - DNA, 22 bp, synthetic construct
  misc_feature 1..22: note = chemically synthesized
  source 1..22: mol_type = other DNA
cttcatttcctccgtcacctca

SEQ ID NO: 7106 - DNA, 22 bp, synthetic construct
  misc_feature 1..22: note = chemically synthesized
  source 1..22: mol_type = other DNA
catttcctccgtcacctcagag

SEQ ID NO: 7107 - DNA, 22 bp, synthetic construct
  misc_feature 1..22: note = chemically synthesized
  source 1..22: mol_type = other DNA
atttcctccgtcacctcagaga

SEQ ID NO: 7108 - DNA, 22 bp, synthetic construct
  misc_feature 1..22: note = chemically synthesized
  source 1..22: mol_type = other DNA
cctccgtcacctcagagacata

SEQ ID NO: 7109 - DNA, 22 bp, synthetic construct
  misc_feature 1..22: note = chemically synthesized
  source 1..22: mol_type = other DNA
ctccgtcacctcagagacatac

SEQ ID NO: 7110 - DNA, 22 bp, synthetic construct
  misc_feature 1..22: note = chemically synthesized
  source 1..22: mol_type = other DNA
cgtcacctcagagacatacacc

SEQ ID NO: 7111 - DNA, 22 bp, synthetic construct
  misc_feature 1..22: note = chemically synthesized
  source 1..22: mol_type = other DNA
agagacatacacctatgtcatt

SEQ ID NO: 7112 - DNA, 22 bp, synthetic construct
  misc_feature 1..22: note = chemically synthesized
  source 1..22: mol_type = other DNA
tgtcatttcatttcctattttt

SEQ ID NO: 7113 - DNA, 22 bp, synthetic construct
  misc_feature 1..22: note = chemically synthesized
  source 1..22: mol_type = other DNA
catttcctatttttggaagagg

SEQ ID NO: 7114 - DNA, 22 bp, synthetic construct
  misc_feature 1..22: note = chemically synthesized
  source 1..22: mol_type = other DNA
atttcctatttttggaagagga

SEQ ID NO: 7115 - DNA, 22 bp, synthetic construct
  misc_feature 1..22: note = chemically synthesized
  source 1..22: mol_type = other DNA
cctatttttggaagaggactcc

SEQ ID NO: 7116 - DNA, 22 bp, synthetic construct
  misc_feature 1..22: note = chemically synthesized
  source 1..22: mol_type = other DNA
ctatttttggaagaggactcct

SEQ ID NO: 7117 - DNA, 22 bp, synthetic construct
  misc_feature 1..22: note = chemically synthesized
  source 1..22: mol_type = other DNA
tttttggaagaggactccttaa

SEQ ID NO: 7118 - DNA, 22 bp, synthetic construct
  misc_feature 1..22: note = chemically synthesized
  source 1..22: mol_type = other DNA
ttggaagaggactccttaaatt

SEQ ID NO: 7119 - DNA, 22 bp, synthetic construct
  misc_feature 1..22: note = chemically synthesized
  source 1..22: mol_type = other DNA
tggaagaggactccttaaattt

SEQ ID NO: 7120 - DNA, 22 bp, synthetic construct
  misc_feature 1..22: note = chemically synthesized
  source 1..22: mol_type = other DNA
ggaagaggactccttaaatttg

SEQ ID NO: 7121 - DNA, 22 bp, synthetic construct
  misc_feature 1..22: note = chemically synthesized
  source 1..22: mol_type = other DNA
gaagaggactccttaaatttgg

SEQ ID NO: 7122 - DNA, 22 bp, synthetic construct
  misc_feature 1..22: note = chemically synthesized
  source 1..22: mol_type = other DNA
cttaaatttgggggacttacat

SEQ ID NO: 7123 - DNA, 22 bp, synthetic construct
  misc_feature 1..22: note = chemically synthesized
  source 1..22: mol_type = other DNA
aaatttgggggacttacatgat

SEQ ID NO: 7124 - DNA, 22 bp, synthetic construct
  misc_feature 1..22: note = chemically synthesized
  source 1..22: mol_type = other DNA
aatttgggggacttacatgatt

SEQ ID NO: 7125 - DNA, 22 bp, synthetic construct
  misc_feature 1..22: note = chemically synthesized
  source 1..22: mol_type = other DNA
gggggacttacatgattcattt

SEQ ID NO: 7126 - DNA, 22 bp, synthetic construct
  misc_feature 1..22: note = chemically synthesized
  source 1..22: mol_type = other DNA
ggggacttacatgattcatttt

SEQ ID NO: 7127 - DNA, 22 bp, synthetic construct
  misc_feature 1..22: note = chemically synthesized
  source 1..22: mol_type = other DNA
acatgattcattttaacatctg

SEQ ID NO: 7128 - DNA, 22 bp, synthetic construct
  misc_feature 1..22: note = chemically synthesized
  source 1..22: mol_type = other DNA
catgattcattttaacatctga

SEQ ID NO: 7129 - DNA, 22 bp, synthetic construct
  misc_feature 1..22: note = chemically synthesized
  source 1..22: mol_type = other DNA
attttaacatctgagaaaagct

SEQ ID NO: 7130 - DNA, 22 bp, synthetic construct
  misc_feature 1..22: note = chemically synthesized
  source 1..22: mol_type = other DNA
taacatctgagaaaagctttga

SEQ ID NO: 7131 - DNA, 22 bp, synthetic construct
  misc_feature 1..22: note = chemically synthesized
  source 1..22: mol_type = other DNA
aacatctgagaaaagctttgaa

SEQ ID NO: 7132 - DNA, 22 bp, synthetic construct
  misc_feature 1..22: note = chemically synthesized
  source 1..22: mol_type = other DNA
acatctgagaaaagctttgaac

SEQ ID NO: 7133 - DNA, 22 bp, synthetic construct
  misc_feature 1..22: note = chemically synthesized
  source 1..22: mol_type = other DNA
agaaaagctttgaaccctggga

SEQ ID NO: 7134 - DNA, 22 bp, synthetic construct
  misc_feature 1..22: note = chemically synthesized
  source 1..22: mol_type = other DNA
tgaaccctgggacgtggctagt

SEQ ID NO: 7135 - DNA, 22 bp, synthetic construct
  misc_feature 1..22: note = chemically synthesized
  source 1..22: mol_type = other DNA
gaaccctgggacgtggctagtc

SEQ ID NO: 7136 - DNA, 22 bp, synthetic construct
  misc_feature 1..22: note = chemically synthesized
  source 1..22: mol_type = other DNA
aaccctgggacgtggctagtca

SEQ ID NO: 7137 - DNA, 22 bp, synthetic construct
  misc_feature 1..22: note = chemically synthesized
  source 1..22: mol_type = other DNA
ggacgtggctagtcataacctt

SEQ ID NO: 7138 - DNA, 22 bp, synthetic construct
  misc_feature 1..22: note = chemically synthesized
  source 1..22: mol_type = other DNA
gtcataaccttaccagattttt

SEQ ID NO: 7139 - DNA, 22 bp, synthetic construct
  misc_feature 1..22: note = chemically synthesized
  source 1..22: mol_type = other DNA
accagatttttacacatgtatc

SEQ ID NO: 7140 - DNA, 22 bp, synthetic construct
  misc_feature 1..22: note = chemically synthesized
  source 1..22: mol_type = other DNA
ccagatttttacacatgtatct

SEQ ID NO: 7141 - DNA, 22 bp, synthetic construct
  misc_feature 1..22: note = chemically synthesized
  source 1..22: mol_type = other DNA
ttacacatgtatctatgcattt

SEQ ID NO: 7142 - DNA, 22 bp, synthetic construct
  misc_feature 1..22: note = chemically synthesized
  source 1..22: mol_type = other DNA
tacacatgtatctatgcatttt

SEQ ID NO: 7143 - DNA, 22 bp, synthetic construct
  misc_feature 1..22: note = chemically synthesized
  source 1..22: mol_type = other DNA
acacatgtatctatgcattttc

SEQ ID NO: 7144 - DNA, 22 bp, synthetic construct
  misc_feature 1..22: note = chemically synthesized
  source 1..22: mol_type = other DNA
cacatgtatctatgcattttct

SEQ ID NO: 7145 - DNA, 22 bp, synthetic construct
  misc_feature 1..22: note = chemically synthesized
  source 1..22: mol_type = other DNA
tgcattttctggacccgttcaa

SEQ ID NO: 7146 - DNA, 22 bp, synthetic construct
  misc_feature 1..22: note = chemically synthesized
  source 1..22: mol_type = other DNA
tctggacccgttcaacttttcc

SEQ ID NO: 7147 - DNA, 22 bp, synthetic construct
  misc_feature 1..22: note = chemically synthesized
  source 1..22: mol_type = other DNA
ctggacccgttcaacttttcct

SEQ ID NO: 7148 - DNA, 22 bp, synthetic construct
  misc_feature 1..22: note = chemically synthesized
  source 1..22: mol_type = other DNA
tggacccgttcaacttttcctt

SEQ ID NO: 7149 - DNA, 22 bp, synthetic construct
  misc_feature 1..22: note = chemically synthesized
  source 1..22: mol_type = other DNA
gacccgttcaacttttcctttg

SEQ ID NO: 7150 - DNA, 22 bp, synthetic construct
  misc_feature 1..22: note = chemically synthesized
  source 1..22: mol_type = other DNA
aacttttcctttgaatcctctc

SEQ ID NO: 7151 - DNA, 22 bp, synthetic construct
  misc_feature 1..22: note = chemically synthesized
  source 1..22: mol_type = other DNA
ttcctttgaatcctctctctgt

SEQ ID NO: 7152 - DNA, 22 bp, synthetic construct
  misc_feature 1..22: note = chemically synthesized
  source 1..22: mol_type = other DNA
tcctttgaatcctctctctgtg

SEQ ID NO: 7153 - DNA, 22 bp, synthetic construct
  misc_feature 1..22: note = chemically synthesized
  source 1..22: mol_type = other DNA
cctttgaatcctctctctgtgt

SEQ ID NO: 7154 - DNA, 22 bp, synthetic construct
  misc_feature 1..22: note = chemically synthesized
  source 1..22: mol_type = other DNA
ctttgaatcctctctctgtgtt

SEQ ID NO: 7155 - DNA, 22 bp, synthetic construct
  misc_feature 1..22: note = chemically synthesized
  source 1..22: mol_type = other DNA
tgaatcctctctctgtgttacc

SEQ ID NO: 7156 - DNA, 22 bp, synthetic construct
  misc_feature 1..22: note = chemically synthesized
  source 1..22: mol_type = other DNA
gaatcctctctctgtgttaccc

SEQ ID NO: 7157 - DNA, 22 bp, synthetic construct
  misc_feature 1..22: note = chemically synthesized
  source 1..22: mol_type = other DNA
aatcctctctctgtgttaccca

SEQ ID NO: 7158 - DNA, 22 bp, synthetic construct
  misc_feature 1..22: note = chemically synthesized
  source 1..22: mol_type = other DNA
tctctgtgttacccagtaactc

SEQ ID NO: 7159 - DNA, 22 bp, synthetic construct
  misc_feature 1..22: note = chemically synthesized
  source 1..22: mol_type = other DNA
tctgtgttacccagtaactcat

SEQ ID NO: 7160 - DNA, 22 bp, synthetic construct
  misc_feature 1..22: note = chemically synthesized
  source 1..22: mol_type = other DNA
tgtgttacccagtaactcatct

SEQ ID NO: 7161 - DNA, 22 bp, synthetic construct
  misc_feature 1..22: note = chemically synthesized
  source 1..22: mol_type = other DNA
tgttacccagtaactcatctgt

SEQ ID NO: 7162 - DNA, 22 bp, synthetic construct
  misc_feature 1..22: note = chemically synthesized
  source 1..22: mol_type = other DNA
cccagtaactcatctgtcacca

SEQ ID NO: 7163 - DNA, 22 bp, synthetic construct
  misc_feature 1..22: note = chemically synthesized
  source 1..22: mol_type = other DNA
atctgtcaccaagccttgggga

SEQ ID NO: 7164 - DNA, 22 bp, synthetic construct
  misc_feature 1..22: note = chemically synthesized
  source 1..22: mol_type = other DNA
tcaccaagccttggggattctt

SEQ ID NO: 7165 - DNA, 22 bp, synthetic construct
  misc_feature 1..22: note = chemically synthesized
  source 1..22: mol_type = other DNA
ggggattcttccatctgattgt

SEQ ID NO: 7166 - DNA, 22 bp, synthetic construct
  misc_feature 1..22: note = chemically synthesized
  source 1..22: mol_type = other DNA
gggattcttccatctgattgtg

SEQ ID NO: 7167 - DNA, 22 bp, synthetic construct
  misc_feature 1..22: note = chemically synthesized
  source 1..22: mol_type = other DNA
ttccatctgattgtgatgtgag

SEQ ID NO: 7168 - DNA, 22 bp, synthetic construct
  misc_feature 1..22: note = chemically synthesized
  source 1..22: mol_type = other DNA
ccatctgattgtgatgtgagtt

SEQ ID NO: 7169 - DNA, 22 bp, synthetic construct
  misc_feature 1..22: note = chemically synthesized
  source 1..22: mol_type = other DNA
catctgattgtgatgtgagttg

SEQ ID NO: 7170 - DNA, 22 bp, synthetic construct
  misc_feature 1..22: note = chemically synthesized
  source 1..22: mol_type = other DNA
attgtgatgtgagttgcacagc

SEQ ID NO: 7171 - DNA, 22 bp, synthetic construct
  misc_feature 1..22: note = chemically synthesized
  source 1..22: mol_type = other DNA
tgatgtgagttgcacagctatg

SEQ ID NO: 7172 - DNA, 22 bp, synthetic construct
  misc_feature 1..22: note = chemically synthesized
  source 1..22: mol_type = other DNA
cacagctatgaaggctgtacac

SEQ ID NO: 7173 - DNA, 22 bp, synthetic construct
  misc_feature 1..22: note = chemically synthesized
  source 1..22: mol_type = other DNA
tgaaggctgtacactgcacgaa

SEQ ID NO: 7174 - DNA, 22 bp, synthetic construct
  misc_feature 1..22: note = chemically synthesized
  source 1..22: mol_type = other DNA
tacactgcacgaatggaagagg

SEQ ID NO: 7175 - DNA, 22 bp, synthetic construct
  misc_feature 1..22: note = chemically synthesized
  source 1..22: mol_type = other DNA
cacgaatggaagaggcacctgt

SEQ ID NO: 7176 - DNA, 22 bp, synthetic construct
  misc_feature 1..22: note = chemically synthesized
  source 1..22: mol_type = other DNA
tcccagaaaaagcatcatggct

SEQ ID NO: 7177 - DNA, 22 bp, synthetic construct
  misc_feature 1..22: note = chemically synthesized
  source 1..22: mol_type = other DNA
tctgtgggtagtatgatgggtg

SEQ ID NO: 7178 - DNA, 22 bp, synthetic construct
  misc_feature 1..22: note = chemically synthesized
  source 1..22: mol_type = other DNA
tgggtagtatgatgggtgtttt

SEQ ID NO: 7179 - DNA, 22 bp, synthetic construct
  misc_feature 1..22: note = chemically synthesized
  source 1..22: mol_type = other DNA
ttagcaggtaggaggcaaatat

SEQ ID NO: 7180 - DNA, 22 bp, synthetic construct
  misc_feature 1..22: note = chemically synthesized
  source 1..22: mol_type = other DNA
tagcaggtaggaggcaaatatc

SEQ ID NO: 7181 - DNA, 22 bp, synthetic construct
  misc_feature 1..22: note = chemically synthesized
  source 1..22: mol_type = other DNA
agcaggtaggaggcaaatatct

SEQ ID NO: 7182 - DNA, 22 bp, synthetic construct
  misc_feature 1..22: note = chemically synthesized
  source 1..22: mol_type = other DNA
gcaggtaggaggcaaatatctt

SEQ ID NO: 7183 - DNA, 22 bp, synthetic construct
  misc_feature 1..22: note = chemically synthesized
  source 1..22: mol_type = other DNA
gaaaggggttgtgaagaggtgt

SEQ ID NO: 7184 - DNA, 22 bp, synthetic construct
  misc_feature 1..22: note = chemically synthesized
  source 1..22: mol_type = other DNA
aaaggggttgtgaagaggtgtt

SEQ ID NO: 7185 - DNA, 22 bp, synthetic construct
  misc_feature 1..22: note = chemically synthesized
  source 1..22: mol_type = other DNA
tgaagaggtgttttttctaatt

SEQ ID NO: 7186 - DNA, 22 bp, synthetic construct
  misc_feature 1..22: note = chemically synthesized
  source 1..22: mol_type = other DNA
tttctaattggcatgaaggtgt

SEQ ID NO: 7187 - DNA, 22 bp, synthetic construct
  misc_feature 1..22: note = chemically synthesized
  source 1..22: mol_type = other DNA
ttctaattggcatgaaggtgtc

SEQ ID NO: 7188 - DNA, 22 bp, synthetic construct
  misc_feature 1..22: note = chemically synthesized
  source 1..22: mol_type = other DNA
tctaattggcatgaaggtgtca

SEQ ID NO: 7189 - DNA, 22 bp, synthetic construct
  misc_feature 1..22: note = chemically synthesized
  source 1..22: mol_type = other DNA
ctaattggcatgaaggtgtcat

SEQ ID NO: 7190 - DNA, 22 bp, synthetic construct
  misc_feature 1..22: note = chemically synthesized
  source 1..22: mol_type = other DNA
taattggcatgaaggtgtcata

SEQ ID NO: 7191 - DNA, 22 bp, synthetic construct
  misc_feature 1..22: note = chemically synthesized
  source 1..22: mol_type = other DNA
attggcatgaaggtgtcataca

SEQ ID NO: 7192 - DNA, 22 bp, synthetic construct
  misc_feature 1..22: note = chemically synthesized
  source 1..22: mol_type = other DNA
gcatgaaggtgtcatacagatt

SEQ ID NO: 7193 - DNA, 22 bp, synthetic construct
  misc_feature 1..22: note = chemically synthesized
  source 1..22: mol_type = other DNA
gcaaagtttaatggtgccttca

SEQ ID NO: 7194 - DNA, 22 bp, synthetic construct
  misc_feature 1..22: note = chemically synthesized
  source 1..22: mol_type = other DNA
caaagtttaatggtgccttcat

SEQ ID NO: 7195 - DNA, 22 bp, synthetic construct
  misc_feature 1..22: note = chemically synthesized
  source 1..22: mol_type = other DNA
aatggtgccttcatttgggatg

SEQ ID NO: 7196 - DNA, 22 bp, synthetic construct
  misc_feature 1..22: note = chemically synthesized
  source 1..22: mol_type = other DNA
atggtgccttcatttgggatgc

SEQ ID NO: 7197 - DNA, 22 bp, synthetic construct
  misc_feature 1..22: note = chemically synthesized
  source 1..22: mol_type = other DNA
catttgggatgctactctagta

SEQ ID NO: 7198 - DNA, 22 bp, synthetic construct
  misc_feature 1..22: note = chemically synthesized
  source 1..22: mol_type = other DNA
atttgggatgctactctagtat

SEQ ID NO: 7199 - DNA, 22 bp, synthetic construct
  misc_feature 1..22: note = chemically synthesized
  source 1..22: mol_type = other DNA
gggatgctactctagtattcca

SEQ ID NO: 7200 - DNA, 22 bp, synthetic construct
  misc_feature 1..22: note = chemically synthesized
  source 1..22: mol_type = other DNA
ggatgctactctagtattccag

SEQ ID NO: 7201 - DNA, 22 bp, synthetic construct
  misc_feature 1..22: note = chemically synthesized
  source 1..22: mol_type = other DNA
ctctagtattccagacctgaag

SEQ ID NO: 7202 - DNA, 22 bp, synthetic construct
  misc_feature 1..22: note = chemically synthesized
  source 1..22: mol_type = other DNA
tagtattccagacctgaagaat

SEQ ID NO: 7203 - DNA, 22 bp, synthetic construct
  misc_feature 1..22: note = chemically synthesized
  source 1..22: mol_type = other DNA
gtattccagacctgaagaatca

SEQ ID NO: 7204 - DNA, 22 bp, synthetic construct
  misc_feature 1..22: note = chemically synthesized
  source 1..22: mol_type = other DNA
cagacctgaagaatcacaataa

SEQ ID NO: 7205 - DNA, 22 bp, synthetic construct
  misc_feature 1..22: note = chemically synthesized
  source 1..22: mol_type = other DNA
aagaatcacaataattttctac

SEQ ID NO: 7206 - DNA, 22 bp, synthetic construct
  misc_feature 1..22: note = chemically synthesized
  source 1..22: mol_type = other DNA
tctacctggtctctccttgttc

SEQ ID NO: 7207 - DNA, 22 bp, synthetic construct
  misc_feature 1..22: note = chemically synthesized
  source 1..22: mol_type = other DNA
ctacctggtctctccttgttct

SEQ ID NO: 7208 - DNA, 22 bp, synthetic construct
  misc_feature 1..22: note = chemically synthesized
  source 1..22: mol_type = other DNA
tacctggtctctccttgttctg

SEQ ID NO: 7209 - DNA, 22 bp, synthetic construct
  misc_feature 1..22: note = chemically synthesized
  source 1..22: mol_type = other DNA
cctggtctctccttgttctgat

SEQ ID NO: 7210 - DNA, 22 bp, synthetic construct
  misc_feature 1..22: note = chemically synthesized
  source 1..22: mol_type = other DNA
gtctctccttgttctgataatg

SEQ ID NO: 7211 - DNA, 22 bp, synthetic construct
  misc_feature 1..22: note = chemically synthesized
  source 1..22: mol_type = other DNA
tccttgttctgataatgaaaat

SEQ ID NO: 7212 - DNA, 22 bp, synthetic construct
  misc_feature 1..22: note = chemically synthesized
  source 1..22: mol_type = other DNA
cttgttctgataatgaaaatta

SEQ ID NO: 7213 - DNA, 22 bp, synthetic construct
  misc_feature 1..22: note = chemically synthesized
  source 1..22: mol_type = other DNA
gttctgataatgaaaattatga

SEQ ID NO: 7214 - DNA, 22 bp, synthetic construct
  misc_feature 1..22: note = chemically synthesized
  source 1..22: mol_type = other DNA
ttctgataatgaaaattatgat

SEQ ID NO: 7215 - DNA, 22 bp, synthetic construct
  misc_feature 1..22: note = chemically synthesized
  source 1..22: mol_type = other DNA
tgataatgaaaattatgataag

SEQ ID NO: 7216 - DNA, 22 bp, synthetic construct
  misc_feature 1..22: note = chemically synthesized
  source 1..22: mol_type = other DNA
ataatgaaaattatgataagga

SEQ ID NO: 7217 - DNA, 22 bp, synthetic construct
  misc_feature 1..22: note = chemically synthesized
  source 1..22: mol_type = other DNA
tgataaggatgataaaagcact

SEQ ID NO: 7218 - DNA, 22 bp, synthetic construct
  misc_feature 1..22: note = chemically synthesized
  source 1..22: mol_type = other DNA
acttcgtgtccgactcttctga

SEQ ID NO: 7219 - DNA, 22 bp, synthetic construct
  misc_feature 1..22: note = chemically synthesized
  source 1..22: mol_type = other DNA
cttcgtgtccgactcttctgag

SEQ ID NO: 7220 - DNA, 22 bp, synthetic construct
  misc_feature 1..22: note = chemically synthesized
  source 1..22: mol_type = other DNA
cgtgtccgactcttctgagcac

SEQ ID NO: 7221 - DNA, 22 bp, synthetic construct
  misc_feature 1..22: note = chemically synthesized
  source 1..22: mol_type = other DNA
gtgtccgactcttctgagcacc

SEQ ID NO: 7222 - DNA, 22 bp, synthetic construct
  misc_feature 1..22: note = chemically synthesized
  source 1..22: mol_type = other DNA
ttctgagcacctacttacatgc

SEQ ID NO: 7223 - DNA, 22 bp, synthetic construct
  misc_feature 1..22: note = chemically synthesized
  source 1..22: mol_type = other DNA
ctgagcacctacttacatgcat

SEQ ID NO: 7224 - DNA, 22 bp, synthetic construct
  misc_feature 1..22: note = chemically synthesized
  source 1..22: mol_type = other DNA
tgagcacctacttacatgcatt

SEQ ID NO: 7225 - DNA, 22 bp, synthetic construct
  misc_feature 1..22: note = chemically synthesized
  source 1..22: mol_type = other DNA
agcacctacttacatgcattac

SEQ ID NO: 7226 - DNA, 22 bp, synthetic construct
  misc_feature 1..22: note = chemically synthesized
  source 1..22: mol_type = other DNA
cttacatgcattactgcatgca

SEQ ID NO: 7227 - DNA, 22 bp, synthetic construct
  misc_feature 1..22: note = chemically synthesized
  source 1..22: mol_type = other DNA
acatgcattactgcatgcactt

SEQ ID NO: 7228 - DNA, 22 bp, synthetic construct
  misc_feature 1..22: note = chemically synthesized
  source 1..22: mol_type = other DNA
catgcattactgcatgcacttc

SEQ ID NO: 7229 - DNA, 22 bp, synthetic construct
  misc_feature 1..22: note = chemically synthesized
  source 1..22: mol_type = other DNA
ctgcatgcacttcttacaataa

SEQ ID NO: 7230 - DNA, 22 bp, synthetic construct
  misc_feature 1..22: note = chemically synthesized
  source 1..22: mol_type = other DNA
catgcacttcttacaataattc

SEQ ID NO: 7231 - DNA, 22 bp, synthetic construct
  misc_feature 1..22: note = chemically synthesized
  source 1..22: mol_type = other DNA
cttacaataattctatgagata

SEQ ID NO: 7232 - DNA, 22 bp, synthetic construct
  misc_feature 1..22: note = chemically synthesized
  source 1..22: mol_type = other DNA
ttacaataattctatgagatag

SEQ ID NO: 7233 - DNA, 22 bp, synthetic construct
  misc_feature 1..22: note = chemically synthesized
  source 1..22: mol_type = other DNA
acaataattctatgagataggt

SEQ ID NO: 7234 - DNA, 22 bp, synthetic construct
  misc_feature 1..22: note = chemically synthesized
  source 1..22: mol_type = other DNA
caataattctatgagataggta

SEQ ID NO: 7235 - DNA, 22 bp, synthetic construct
  misc_feature 1..22: note = chemically synthesized
  source 1..22: mol_type = other DNA
tatgagataggtactattatcc

SEQ ID NO: 7236 - DNA, 22 bp, synthetic construct
  misc_feature 1..22: note = chemically synthesized
  source 1..22: mol_type = other DNA
tgagataggtactattatcccc

SEQ ID NO: 7237 - DNA, 22 bp, synthetic construct
  misc_feature 1..22: note = chemically synthesized
  source 1..22: mol_type = other DNA
ttatccccatttcttttttaaa

SEQ ID NO: 7238 - DNA, 22 bp, synthetic construct
  misc_feature 1..22: note = chemically synthesized
  source 1..22: mol_type = other DNA
tccccatttcttttttaaatga

SEQ ID NO: 7239 - DNA, 22 bp, synthetic construct
  misc_feature 1..22: note = chemically synthesized
  source 1..22: mol_type = other DNA
cttttttaaatgaagaaagtga

SEQ ID NO: 7240 - DNA, 22 bp, synthetic construct
  misc_feature 1..22: note = chemically synthesized
  source 1..22: mol_type = other DNA
ttttttaaatgaagaaagtgaa

SEQ ID NO: 7241 - DNA, 22 bp, synthetic construct
  misc_feature 1..22: note = chemically synthesized
  source 1..22: mol_type = other DNA
ttttaaatgaagaaagtgaagt

SEQ ID NO: 7242 - DNA, 22 bp, synthetic construct
  misc_feature 1..22: note = chemically synthesized
  source 1..22: mol_type = other DNA
tttaaatgaagaaagtgaagta

SEQ ID NO: 7243 - DNA, 22 bp, synthetic construct
  misc_feature 1..22: note = chemically synthesized
  source 1..22: mol_type = other DNA
ttaaatgaagaaagtgaagtag

SEQ ID NO: 7244 - DNA, 22 bp, synthetic construct
  misc_feature 1..22: note = chemically synthesized
  source 1..22: mol_type = other DNA
taaatgaagaaagtgaagtagg

SEQ ID NO: 7245 - DNA, 22 bp, synthetic construct
  misc_feature 1..22: note = chemically synthesized
  source 1..22: mol_type = other DNA
aaatgaagaaagtgaagtaggc

SEQ ID NO: 7246 - DNA, 22 bp, synthetic construct
  misc_feature 1..22: note = chemically synthesized
  source 1..22: mol_type = other DNA
aatgaagaaagtgaagtaggcc

SEQ ID NO: 7247 - DNA, 22 bp, synthetic construct
  misc_feature 1..22: note = chemically synthesized
  source 1..22: mol_type = other DNA
acgcctgtaatcccagcacttt

SEQ ID NO: 7248 - DNA, 22 bp, synthetic construct
  misc_feature 1..22: note = chemically synthesized
  source 1..22: mol_type = other DNA
taatcccagcactttgggaggc

SEQ ID NO: 7249 - DNA, 22 bp, synthetic construct
  misc_feature 1..22: note = chemically synthesized
  source 1..22: mol_type = other DNA
tgggaggccaaagcgggtggat

SEQ ID NO: 7250 - DNA, 22 bp, synthetic construct
  misc_feature 1..22: note = chemically synthesized
  source 1..22: mol_type = other DNA
gggaggccaaagcgggtggatc

SEQ ID NO: 7251 - DNA, 22 bp, synthetic construct
  misc_feature 1..22: note = chemically synthesized
  source 1..22: mol_type = other DNA
ggaggccaaagcgggtggatca

SEQ ID NO: 7252 - DNA, 22 bp, synthetic construct
  misc_feature 1..22: note = chemically synthesized
  source 1..22: mol_type = other DNA
gctaacatggtgaaaccccatc

SEQ ID NO: 7253 - DNA, 22 bp, synthetic construct
  misc_feature 1..22: note = chemically synthesized
  source 1..22: mol_type = other DNA
acatggtgaaaccccatctcta

SEQ ID NO: 7254 - DNA, 22 bp, synthetic construct
  misc_feature 1..22: note = chemically synthesized
  source 1..22: mol_type = other DNA
taataaaaatacaaaaaattag

SEQ ID NO: 7255 - DNA, 22 bp, synthetic construct
  misc_feature 1..22: note = chemically synthesized
  source 1..22: mol_type = other DNA
ataaaaatacaaaaaattagct

SEQ ID NO: 7256 - DNA, 22 bp, synthetic construct
  misc_feature 1..22: note = chemically synthesized
  source 1..22: mol_type = other DNA
gctgggcgtggtggcagacgcc

SEQ ID NO: 7257 - DNA, 22 bp, synthetic construct
  misc_feature 1..22: note = chemically synthesized
  source 1..22: mol_type = other DNA
ggcgtggtggcagacgcctgta

SEQ ID NO: 7258 - DNA, 22 bp, synthetic construct
  misc_feature 1..22: note = chemically synthesized
  source 1..22: mol_type = other DNA
tagtcccagctactcggaaggc

SEQ ID NO: 7259 - DNA, 22 bp, synthetic construct
  misc_feature 1..22: note = chemically synthesized
  source 1..22: mol_type = other DNA
ctcggaaggctgaggcaggaga

SEQ ID NO: 7260 - DNA, 22 bp, synthetic construct
  misc_feature 1..22: note = chemically synthesized
  source 1..22: mol_type = other DNA
ggaaggctgaggcaggagaatg

SEQ ID NO: 7261 - DNA, 22 bp, synthetic construct
  misc_feature 1..22: note = chemically synthesized
  source 1..22: mol_type = other DNA
aggcaggagaatggcatgaacc

SEQ ID NO: 7262 - DNA, 22 bp, synthetic construct
  misc_feature 1..22: note = chemically synthesized
  source 1..22: mol_type = other DNA
gcagtgagccgagtttgcgcca

SEQ ID NO: 7263 - DNA, 22 bp, synthetic construct
  misc_feature 1..22: note = chemically synthesized
  source 1..22: mol_type = other DNA
cagtgagccgagtttgcgccac

SEQ ID NO: 7264 - DNA, 22 bp, synthetic construct
  misc_feature 1..22: note = chemically synthesized
  source 1..22: mol_type = other DNA
gcgccactgcactccagcctag

SEQ ID NO: 7265 - DNA, 22 bp, synthetic construct
  misc_feature 1..22: note = chemically synthesized
  source 1..22: mol_type = other DNA
cgccactgcactccagcctagg

SEQ ID NO: 7266 - DNA, 22 bp, synthetic construct
  misc_feature 1..22: note = chemically synthesized
  source 1..22: mol_type = other DNA
cactccagcctaggtgacagag

SEQ ID NO: 7267 - DNA, 22 bp, synthetic construct
  misc_feature 1..22: note = chemically synthesized
  source 1..22: mol_type = other DNA
cagcctaggtgacagagtgaga

SEQ ID NO: 7268 - DNA, 22 bp, synthetic construct
  misc_feature 1..22: note = chemically synthesized
  source 1..22: mol_type = other DNA
ggtgacagagtgagactccatc

SEQ ID NO: 7269 - DNA, 22 bp, synthetic construct
  misc_feature 1..22: note = chemically synthesized
  source 1..22: mol_type = other DNA
catctcaaaaaaataaaaataa

SEQ ID NO: 7270 - DNA, 22 bp, synthetic construct
  misc_feature 1..22: note = chemically synthesized
  source 1..22: mol_type = other DNA
aaaaaaataaaaataaaaataa

SEQ ID NO: 7271 - DNA, 22 bp, synthetic construct
  misc_feature 1..22: note = chemically synthesized
  source 1..22: mol_type = other DNA
atagtttgtcagtgatagaaac

SEQ ID NO: 7272 - DNA, 22 bp, synthetic construct
  misc_feature 1..22: note = chemically synthesized
  source 1..22: mol_type = other DNA
gtcagtgatagaaacaggtttc

SEQ ID NO: 7273 - DNA, 22 bp, synthetic construct
  misc_feature 1..22: note = chemically synthesized
  source 1..22: mol_type = other DNA
tcagtgatagaaacaggtttca

SEQ ID NO: 7274 - DNA, 22 bp, synthetic construct
  misc_feature 1..22: note = chemically synthesized
  source 1..22: mol_type = other DNA
caaactcagtcaatctgaccgt

SEQ ID NO: 7275 - DNA, 22 bp, synthetic construct
  misc_feature 1..22: note = chemically synthesized
  source 1..22: mol_type = other DNA
aaactcagtcaatctgaccgtt

SEQ ID NO: 7276 - DNA, 22 bp, synthetic construct
  misc_feature 1..22: note = chemically synthesized
  source 1..22: mol_type = other DNA
agtcaatctgaccgtttgatac

SEQ ID NO: 7277 - DNA, 22 bp, synthetic construct
  misc_feature 1..22: note = chemically synthesized
  source 1..22: mol_type = other DNA
accgtttgatacatctcagaca

SEQ ID NO: 7278 - DNA, 22 bp, synthetic construct
  misc_feature 1..22: note = chemically synthesized
  source 1..22: mol_type = other DNA
gatacatctcagacaccactac

SEQ ID NO: 7279 - DNA, 22 bp, synthetic construct
  misc_feature 1..22: note = chemically synthesized
  source 1..22: mol_type = other DNA
atacatctcagacaccactaca

SEQ ID NO: 7280 - DNA, 22 bp, synthetic construct
  misc_feature 1..22: note = chemically synthesized
  source 1..22: mol_type = other DNA
agacaccactacattcagtagt

SEQ ID NO: 7281 - DNA, 22 bp, synthetic construct
  misc_feature 1..22: note = chemically synthesized
  source 1..22: mol_type = other DNA
cattcagtagtttagatgccta

SEQ ID NO: 7282 - DNA, 22 bp, synthetic construct
  misc_feature 1..22: note = chemically synthesized
  source 1..22: mol_type = other DNA
agtagtttagatgcctagaata

SEQ ID NO: 7283 - DNA, 22 bp, synthetic construct
  misc_feature 1..22: note = chemically synthesized
  source 1..22: mol_type = other DNA
agatgcctagaataaatagaga

SEQ ID NO: 7284 - DNA, 22 bp, synthetic construct
  misc_feature 1..22: note = chemically synthesized
  source 1..22: mol_type = other DNA
gatgcctagaataaatagagaa

SEQ ID NO: 7285 - DNA, 22 bp, synthetic construct
  misc_feature 1..22: note = chemically synthesized
  source 1..22: mol_type = other DNA
gaataaatagagaaggaaggag

SEQ ID NO: 7286 - DNA, 22 bp, synthetic construct
  misc_feature 1..22: note = chemically synthesized
  source 1..22: mol_type = other DNA
ttctcttgtctcattgtgtttc

SEQ ID NO: 7287 - DNA, 22 bp, synthetic construct
  misc_feature 1..22: note = chemically synthesized
  source 1..22: mol_type = other DNA
ctcttgtctcattgtgtttctt

SEQ ID NO: 7288 - DNA, 22 bp, synthetic construct
  misc_feature 1..22: note = chemically synthesized
  source 1..22: mol_type = other DNA
tcttgtctcattgtgtttcttc

SEQ ID NO: 7289 - DNA, 22 bp, synthetic construct
  misc_feature 1..22: note = chemically synthesized
  source 1..22: mol_type = other DNA
ttgtctcattgtgtttcttctg

SEQ ID NO: 7290 - DNA, 22 bp, synthetic construct
  misc_feature 1..22: note = chemically synthesized
  source 1..22: mol_type = other DNA
gtctcattgtgtttcttctgag

SEQ ID NO: 7291 - DNA, 22 bp, synthetic construct
  misc_feature 1..22: note = chemically synthesized
  source 1..22: mol_type = other DNA
tctcattgtgtttcttctgagt

SEQ ID NO: 7292 - DNA, 22 bp, synthetic construct
  misc_feature 1..22: note = chemically synthesized
  source 1..22: mol_type = other DNA
attgtgtttcttctgagtgagc

SEQ ID NO: 7293 - DNA, 22 bp, synthetic construct
  misc_feature 1..22: note = chemically synthesized
  source 1..22: mol_type = other DNA
tgtttcttctgagtgagcttga

SEQ ID NO: 7294 - DNA, 22 bp, synthetic construct
  misc_feature 1..22: note = chemically synthesized
  source 1..22: mol_type = other DNA
cttctgagtgagcttgaatcac

SEQ ID NO: 7295 - DNA, 22 bp, synthetic construct
  misc_feature 1..22: note = chemically synthesized
  source 1..22: mol_type = other DNA
ttctgagtgagcttgaatcaca

SEQ ID NO: 7296 - DNA, 22 bp, synthetic construct
  misc_feature 1..22: note = chemically synthesized
  source 1..22: mol_type = other DNA
ctgagtgagcttgaatcacatg

SEQ ID NO: 7297 - DNA, 22 bp, synthetic construct
  misc_feature 1..22: note = chemically synthesized
  source 1..22: mol_type = other DNA
tgagtgagcttgaatcacatga

SEQ ID NO: 7298 - DNA, 22 bp, synthetic construct
  misc_feature 1..22: note = chemically synthesized
  source 1..22: mol_type = other DNA
agtgagcttgaatcacatgaag

SEQ ID NO: 7299 - DNA, 22 bp, synthetic construct
  misc_feature 1..22: note = chemically synthesized
  source 1..22: mol_type = other DNA
gaatcacatgaaggggaacagc

SEQ ID NO: 7300 - DNA, 22 bp, synthetic construct
  misc_feature 1..22: note = chemically synthesized
  source 1..22: mol_type = other DNA
aatcacatgaaggggaacagca

SEQ ID NO: 7301 - DNA, 22 bp, synthetic construct
  misc_feature 1..22: note = chemically synthesized
  source 1..22: mol_type = other DNA
atcctcagctgtcatgtttcct

SEQ ID NO: 7302 - DNA, 22 bp, synthetic construct
  misc_feature 1..22: note = chemically synthesized
  source 1..22: mol_type = other DNA
agctgtcatgtttcctttaaaa

SEQ ID NO: 7303 - DNA, 22 bp, synthetic construct
  misc_feature 1..22: note = chemically synthesized
  source 1..22: mol_type = other DNA
tcatgtttcctttaaaagtccc

SEQ ID NO: 7304 - DNA, 22 bp, synthetic construct
  misc_feature 1..22: note = chemically synthesized
  source 1..22: mol_type = other DNA
cctttaaaagtccctgaaggaa

SEQ ID NO: 7305 - DNA, 22 bp, synthetic construct
  misc_feature 1..22: note = chemically synthesized
  source 1..22: mol_type = other DNA
ctttaaaagtccctgaaggaag

SEQ ID NO: 7306 - DNA, 22 bp, synthetic construct
  misc_feature 1..22: note = chemically synthesized
  source 1..22: mol_type = other DNA
taaaagtccctgaaggaaggtc

SEQ ID NO: 7307 - DNA, 22 bp, synthetic construct
  misc_feature 1..22: note = chemically synthesized
  source 1..22: mol_type = other DNA
aaaagtccctgaaggaaggtcc

SEQ ID NO: 7308 - DNA, 22 bp, synthetic construct
  misc_feature 1..22: note = chemically synthesized
  source 1..22: mol_type = other DNA
aaagtccctgaaggaaggtcct

SEQ ID NO: 7309 - DNA, 22 bp, synthetic construct
  misc_feature 1..22: note = chemically synthesized
  source 1..22: mol_type = other DNA
aaggaaggtcctggaatgtgac

SEQ ID NO: 7310 - DNA, 22 bp, synthetic construct
  misc_feature 1..22: note = chemically synthesized
  source 1..22: mol_type = other DNA
gaatgtgactcccttgctcctc

SEQ ID NO: 7311 - DNA, 22 bp, synthetic construct
  misc_feature 1..22: note = chemically synthesized
  source 1..22: mol_type = other DNA
ccttgctcctctgttgctctct

SEQ ID NO: 7312 - DNA, 22 bp, synthetic construct
  misc_feature 1..22: note = chemically synthesized
  source 1..22: mol_type = other DNA
gctcctctgttgctctctttgg

SEQ ID NO: 7313 - DNA, 22 bp, synthetic construct
  misc_feature 1..22: note = chemically synthesized
  source 1..22: mol_type = other DNA
ctcctctgttgctctctttggc

SEQ ID NO: 7314 - DNA, 22 bp, synthetic construct
  misc_feature 1..22: note = chemically synthesized
  source 1..22: mol_type = other DNA
ctctgttgctctctttggcatt

SEQ ID NO: 7315 - DNA, 22 bp, synthetic construct
  misc_feature 1..22: note = chemically synthesized
  source 1..22: mol_type = other DNA
tgttgctctctttggcattcat

SEQ ID NO: 7316 - DNA, 22 bp, synthetic construct
  misc_feature 1..22: note = chemically synthesized
  source 1..22: mol_type = other DNA
ttgctctctttggcattcattt

SEQ ID NO: 7317 - DNA, 22 bp, synthetic construct
  misc_feature 1..22: note = chemically synthesized
  source 1..22: mol_type = other DNA
ctctctttggcattcatttctt

SEQ ID NO: 7318 - DNA, 22 bp, synthetic construct
  misc_feature 1..22: note = chemically synthesized
  source 1..22: mol_type = other DNA
tctttggcattcatttctttgg

SEQ ID NO: 7319 - DNA, 22 bp, synthetic construct
  misc_feature 1..22: note = chemically synthesized
  source 1..22: mol_type = other DNA
tttggcattcatttctttggac

SEQ ID NO: 7320 - DNA, 22 bp, synthetic construct
  misc_feature 1..22: note = chemically synthesized
  source 1..22: mol_type = other DNA
tggcattcatttctttggaccc

SEQ ID NO: 7321 - DNA, 22 bp, synthetic construct
  misc_feature 1..22: note = chemically synthesized
  source 1..22: mol_type = other DNA
ggcattcatttctttggaccct

SEQ ID NO: 7322 - DNA, 22 bp, synthetic construct
  misc_feature 1..22: note = chemically synthesized
  source 1..22: mol_type = other DNA
gcattcatttctttggacccta

SEQ ID NO: 7323 - DNA, 22 bp, synthetic construct
  misc_feature 1..22: note = chemically synthesized
  source 1..22: mol_type = other DNA
atttctttggaccctacgcaag

SEQ ID NO: 7324 - DNA, 22 bp, synthetic construct
  misc_feature 1..22: note = chemically synthesized
  source 1..22: mol_type = other DNA
ctttggaccctacgcaaggact

SEQ ID NO: 7325 - DNA, 22 bp, synthetic construct
  misc_feature 1..22: note = chemically synthesized
  source 1..22: mol_type = other DNA
tttggaccctacgcaaggactg

SEQ ID NO: 7326 - DNA, 22 bp, synthetic construct
  misc_feature 1..22: note = chemically synthesized
  source 1..22: mol_type = other DNA
tggaccctacgcaaggactgta

SEQ ID NO: 7327 - DNA, 22 bp, synthetic construct
  misc_feature 1..22: note = chemically synthesized
  source 1..22: mol_type = other DNA
ggaccctacgcaaggactgtaa

SEQ ID NO: 7328 - DNA, 22 bp, synthetic construct
  misc_feature 1..22: note = chemically synthesized
  source 1..22: mol_type = other DNA
gaccctacgcaaggactgtaat

SEQ ID NO: 7329 - DNA, 22 bp, synthetic construct
  misc_feature 1..22: note = chemically synthesized
  source 1..22: mol_type = other DNA
cgcaaggactgtaattggtggg

SEQ ID NO: 7330 - DNA, 22 bp, synthetic construct
  misc_feature 1..22: note = chemically synthesized
  source 1..22: mol_type = other DNA
taattggtggggacagctagtg

SEQ ID NO: 7331 - DNA, 22 bp, synthetic construct
  misc_feature 1..22: note = chemically synthesized
  source 1..22: mol_type = other DNA
gtggggacagctagtggccctg

SEQ ID NO: 7332 - DNA, 22 bp, synthetic construct
  misc_feature 1..22: note = chemically synthesized
  source 1..22: mol_type = other DNA
gtggccctgctgggcttcacac

SEQ ID NO: 7333 - DNA, 22 bp, synthetic construct
  misc_feature 1..22: note = chemically synthesized
  source 1..22: mol_type = other DNA
ctgggcttcacacacggtgtcc

SEQ ID NO: 7334 - DNA, 22 bp, synthetic construct
  misc_feature 1..22: note = chemically synthesized
  source 1..22: mol_type = other DNA
ggcttcacacacggtgtcctcc

SEQ ID NO: 7335 - DNA, 22 bp, synthetic construct
  misc_feature 1..22: note = chemically synthesized
  source 1..22: mol_type = other DNA
cacacacggtgtcctccctagg

SEQ ID NO: 7336 - DNA, 22 bp, synthetic construct
  misc_feature 1..22: note = chemically synthesized
  source 1..22: mol_type = other DNA
acacacggtgtcctccctaggc

SEQ ID NO: 7337 - DNA, 22 bp, synthetic construct
  misc_feature 1..22: note = chemically synthesized
  source 1..22: mol_type = other DNA
cctaggccagtgcctctggagt

SEQ ID NO: 7338 - DNA, 22 bp, synthetic construct
  misc_feature 1..22: note = chemically synthesized
  source 1..22: mol_type = other DNA
ggccagtgcctctggagtcaga

SEQ ID NO: 7339 - DNA, 22 bp, synthetic construct
  misc_feature 1..22: note = chemically synthesized
  source 1..22: mol_type = other DNA
tggagtcagaactctggtggta

SEQ ID NO: 7340 - DNA, 22 bp, synthetic construct
  misc_feature 1..22: note = chemically synthesized
  source 1..22: mol_type = other DNA
gagtcagaactctggtggtatt

SEQ ID NO: 7341 - DNA, 22 bp, synthetic construct
  misc_feature 1..22: note = chemically synthesized
  source 1..22: mol_type = other DNA
tggtggtatttccctcaatgaa

SEQ ID NO: 7342 - DNA, 22 bp, synthetic construct
  misc_feature 1..22: note = chemically synthesized
  source 1..22: mol_type = other DNA
gtggtatttccctcaatgaagt

SEQ ID NO: 7343 - DNA, 22 bp, synthetic construct
  misc_feature 1..22: note = chemically synthesized
  source 1..22: mol_type = other DNA
ccctcaatgaagtggagtaagc

SEQ ID NO: 7344 - DNA, 22 bp, synthetic construct
  misc_feature 1..22: note = chemically synthesized
  source 1..22: mol_type = other DNA
cctcaatgaagtggagtaagct

SEQ ID NO: 7345 - DNA, 22 bp, synthetic construct
  misc_feature 1..22: note = chemically synthesized
  source 1..22: mol_type = other DNA
aatgaagtggagtaagctctct

SEQ ID NO: 7346 - DNA, 22 bp, synthetic construct
  misc_feature 1..22: note = chemically synthesized
  source 1..22: mol_type = other DNA
tctcattttgagatggtataat

SEQ ID NO: 7347 - DNA, 22 bp, synthetic construct
  misc_feature 1..22: note = chemically synthesized
  source 1..22: mol_type = other DNA
tcattttgagatggtataatgg

SEQ ID NO: 7348 - DNA, 22 bp, synthetic construct
  misc_feature 1..22: note = chemically synthesized
  source 1..22: mol_type = other DNA
attttgagatggtataatggaa

SEQ ID NO: 7349 - DNA, 22 bp, synthetic construct
  misc_feature 1..22: note = chemically synthesized
  source 1..22: mol_type = other DNA
tgagatggtataatggaagcca

SEQ ID NO: 7350 - DNA, 22 bp, synthetic construct
  misc_feature 1..22: note = chemically synthesized
  source 1..22: mol_type = other DNA
gagatggtataatggaagccac

SEQ ID NO: 7351 - DNA, 22 bp, synthetic construct
  misc_feature 1..22: note = chemically synthesized
  source 1..22: mol_type = other DNA
agatggtataatggaagccacc

SEQ ID NO: 7352 - DNA, 22 bp, synthetic construct
  misc_feature 1..22: note = chemically synthesized
  source 1..22: mol_type = other DNA
agaggatgcccaggtccttcca

SEQ ID NO: 7353 - DNA, 22 bp, synthetic construct
  misc_feature 1..22: note = chemically synthesized
  source 1..22: mol_type = other DNA
gaggatgcccaggtccttccat

SEQ ID NO: 7354 - DNA, 22 bp, synthetic construct
  misc_feature 1..22: note = chemically synthesized
  source 1..22: mol_type = other DNA
ccatggagccactggggttccg

SEQ ID NO: 7355 - DNA, 22 bp, synthetic construct
  misc_feature 1..22: note = chemically synthesized
  source 1..22: mol_type = other DNA
catggagccactggggttccgg

SEQ ID NO: 7356 - DNA, 22 bp, synthetic construct
  misc_feature 1..22: note = chemically synthesized
  source 1..22: mol_type = other DNA
gggttccggtgcacattaaaaa

SEQ ID NO: 7357 - DNA, 22 bp, synthetic construct
  misc_feature 1..22: note = chemically synthesized
  source 1..22: mol_type = other DNA
cggtgcacattaaaaaaaaaat

SEQ ID NO: 7358 - DNA, 22 bp, synthetic construct
  misc_feature 1..22: note = chemically synthesized
  source 1..22: mol_type = other DNA
aaaaaaaaatctaaccaggaca

SEQ ID NO: 7359 - DNA, 22 bp, synthetic construct
  misc_feature 1..22: note = chemically synthesized
  source 1..22: mol_type = other DNA
accaggacattcaggaattgct

SEQ ID NO: 7360 - DNA, 22 bp, synthetic construct
  misc_feature 1..22: note = chemically synthesized
  source 1..22: mol_type = other DNA
aggaattgctagattctgggaa

SEQ ID NO: 7361 - DNA, 22 bp, synthetic construct
  misc_feature 1..22: note = chemically synthesized
  source 1..22: mol_type = other DNA
ctagattctgggaaatcagttc

SEQ ID NO: 7362 - DNA, 22 bp, synthetic construct
  misc_feature 1..22: note = chemically synthesized
  source 1..22: mol_type = other DNA
gattctgggaaatcagttcacc

SEQ ID NO: 7363 - DNA, 22 bp, synthetic construct
  misc_feature 1..22: note = chemically synthesized
  source 1..22: mol_type = other DNA
tgggaaatcagttcaccatgtt

SEQ ID NO: 7364 - DNA, 22 bp, synthetic construct
  misc_feature 1..22: note = chemically synthesized
  source 1..22: mol_type = other DNA
ggaaatcagttcaccatgttca

SEQ ID NO: 7365 - DNA, 22 bp, synthetic construct
  misc_feature 1..22: note = chemically synthesized
  source 1..22: mol_type = other DNA
accatgttcaaaagagtctttt

SEQ ID NO: 7366 - DNA, 22 bp, synthetic construct
  misc_feature 1..22: note = chemically synthesized
  source 1..22: mol_type = other DNA
aaaagagtcttttttttttttt

SEQ ID NO: 7367 - DNA, 22 bp, synthetic construct
  misc_feature 1..22: note = chemically synthesized
  source 1..22: mol_type = other DNA
ttttttttttttgagactctat

SEQ ID NO: 7368 - DNA, 22 bp, synthetic construct
  misc_feature 1..22: note = chemically synthesized
  source 1..22: mol_type = other DNA
tttttttttttgagactctatt

SEQ ID NO: 7369 - DNA, 22 bp, synthetic construct
  misc_feature 1..22: note = chemically synthesized
  source 1..22: mol_type = other DNA
ttttttttttgagactctattg

SEQ ID NO: 7370 - DNA, 22 bp, synthetic construct
  misc_feature 1..22: note = chemically synthesized
  source 1..22: mol_type = other DNA
tttttttttgagactctattgc

SEQ ID NO: 7371 - DNA, 22 bp, synthetic construct
  misc_feature 1..22: note = chemically synthesized
  source 1..22: mol_type = other DNA
ttttttttgagactctattgcc

SEQ ID NO: 7372 - DNA, 22 bp, synthetic construct
  misc_feature 1..22: note = chemically synthesized
  source 1..22: mol_type = other DNA
tttttttgagactctattgccc

SEQ ID NO: 7373 - DNA, 22 bp, synthetic construct
  misc_feature 1..22: note = chemically synthesized
  source 1..22: mol_type = other DNA
ttttttgagactctattgccca

SEQ ID NO: 7374 - DNA, 22 bp, synthetic construct
  misc_feature 1..22: note = chemically synthesized
  source 1..22: mol_type = other DNA
tttttgagactctattgcccag

SEQ ID NO: 7375 - DNA, 22 bp, synthetic construct
  misc_feature 1..22: note = chemically synthesized
  source 1..22: mol_type = other DNA
ttttgagactctattgcccagg

SEQ ID NO: 7376 - DNA, 22 bp, synthetic construct
  misc_feature 1..22: note = chemically synthesized
  source 1..22: mol_type = other DNA
tttgagactctattgcccaggc

SEQ ID NO: 7377 - DNA, 22 bp, synthetic construct
  misc_feature 1..22: note = chemically synthesized
  source 1..22: mol_type = other DNA
ttgagactctattgcccaggct

SEQ ID NO: 7378 - DNA, 22 bp, synthetic construct
  misc_feature 1..22: note = chemically synthesized
  source 1..22: mol_type = other DNA
tgagactctattgcccaggctg

SEQ ID NO: 7379 - DNA, 22 bp, synthetic construct
  misc_feature 1..22: note = chemically synthesized
  source 1..22: mol_type = other DNA
gagactctattgcccaggctgg

SEQ ID NO: 7380 - DNA, 22 bp, synthetic construct
  misc_feature 1..22: note = chemically synthesized
  source 1..22: mol_type = other DNA
agactctattgcccaggctgga

SEQ ID NO: 7381 - DNA, 22 bp, synthetic construct
  misc_feature 1..22: note = chemically synthesized
  source 1..22: mol_type = other DNA
tattgcccaggctggagtgcaa

SEQ ID NO: 7382 - DNA, 22 bp, synthetic construct
  misc_feature 1..22: note = chemically synthesized
  source 1..22: mol_type = other DNA
ttgcccaggctggagtgcaatg

SEQ ID NO: 7383 - DNA, 22 bp, synthetic construct
  misc_feature 1..22: note = chemically synthesized
  source 1..22: mol_type = other DNA
cccaggctggagtgcaatggca

SEQ ID NO: 7384 - DNA, 22 bp, synthetic construct
  misc_feature 1..22: note = chemically synthesized
  source 1..22: mol_type = other DNA
gagtgcaatggcatgatctcgg

SEQ ID NO: 7385 - DNA, 22 bp, synthetic construct
  misc_feature 1..22: note = chemically synthesized
  source 1..22: mol_type = other DNA
ggctcactgtaacctctgcctc

SEQ ID NO: 7386 - DNA, 22 bp, synthetic construct
  misc_feature 1..22: note = chemically synthesized
  source 1..22: mol_type = other DNA
actgtaacctctgcctcccagg

SEQ ID NO: 7387 - DNA, 22 bp, synthetic construct
  misc_feature 1..22: note = chemically synthesized
  source 1..22: mol_type = other DNA
taacctctgcctcccaggttca

SEQ ID NO: 7388 - DNA, 22 bp, synthetic construct
  misc_feature 1..22: note = chemically synthesized
  source 1..22: mol_type = other DNA
tgcctcccaggttcaagcgatt

SEQ ID NO: 7389 - DNA, 22 bp, synthetic construct
  misc_feature 1..22: note = chemically synthesized
  source 1..22: mol_type = other DNA
cctcccaggttcaagcgattct

SEQ ID NO: 7390 - DNA, 22 bp, synthetic construct
  misc_feature 1..22: note = chemically synthesized
  source 1..22: mol_type = other DNA
ccaggttcaagcgattctcctg

SEQ ID NO: 7391 - DNA, 22 bp, synthetic construct
  misc_feature 1..22: note = chemically synthesized
  source 1..22: mol_type = other DNA
aagcgattctcctgtctcagcc

SEQ ID NO: 7392 - DNA, 22 bp, synthetic construct
  misc_feature 1..22: note = chemically synthesized
  source 1..22: mol_type = other DNA
tcctgtctcagcctcccaagta

SEQ ID NO: 7393 - DNA, 22 bp, synthetic construct
  misc_feature 1..22: note = chemically synthesized
  source 1..22: mol_type = other DNA
ctgtctcagcctcccaagtagc

SEQ ID NO: 7394 - DNA, 22 bp, synthetic construct
  misc_feature 1..22: note = chemically synthesized
  source 1..22: mol_type = other DNA
tctcagcctcccaagtagctgg

SEQ ID NO: 7395 - DNA, 22 bp, synthetic construct
  misc_feature 1..22: note = chemically synthesized
  source 1..22: mol_type = other DNA
agcctcccaagtagctgggatt

SEQ ID NO: 7396 - DNA, 22 bp, synthetic construct
  misc_feature 1..22: note = chemically synthesized
  source 1..22: mol_type = other DNA
ccaagtagctgggattacaggc

SEQ ID NO: 7397 - DNA, 22 bp, synthetic construct
  misc_feature 1..22: note = chemically synthesized
  source 1..22: mol_type = other DNA
ggattacaggcgtgcaccacca

SEQ ID NO: 7398 - DNA, 22 bp, synthetic construct
  misc_feature 1..22: note = chemically synthesized
  source 1..22: mol_type = other DNA
caggcgtgcaccaccatgcccg

SEQ ID NO: 7399 - DNA, 22 bp, synthetic construct
  misc_feature 1..22: note = chemically synthesized
  source 1..22: mol_type = other DNA
atttttgtatttttagtagaga

SEQ ID NO: 7400 - DNA, 22 bp, synthetic construct
  misc_feature 1..22: note = chemically synthesized
  source 1..22: mol_type = other DNA
ttgtatttttagtagagacagg

SEQ ID NO: 7401 - DNA, 22 bp, synthetic construct
  misc_feature 1..22: note = chemically synthesized
  source 1..22: mol_type = other DNA
tgtatttttagtagagacaggg

SEQ ID NO: 7402 - DNA, 22 bp, synthetic construct
  misc_feature 1..22: note = chemically synthesized
  source 1..22: mol_type = other DNA
gtatttttagtagagacagggt

SEQ ID NO: 7403 - DNA, 22 bp, synthetic construct
  misc_feature 1..22: note = chemically synthesized
  source 1..22: mol_type = other DNA
tatttttagtagagacagggtt

SEQ ID NO: 7404 - DNA, 22 bp, synthetic construct
  misc_feature 1..22: note = chemically synthesized
  source 1..22: mol_type = other DNA
ttagtagagacagggtttcacc

SEQ ID NO: 7405 - DNA, 22 bp, synthetic construct
  misc_feature 1..22: note = chemically synthesized
  source 1..22: mol_type = other DNA
tagtagagacagggtttcacca

SEQ ID NO: 7406 - DNA, 22 bp, synthetic construct
  misc_feature 1..22: note = chemically synthesized
  source 1..22: mol_type = other DNA
agtagagacagggtttcaccat

SEQ ID NO: 7407 - DNA, 22 bp, synthetic construct
  misc_feature 1..22: note = chemically synthesized
  source 1..22: mol_type = other DNA
gtagagacagggtttcaccatg

SEQ ID NO: 7408 - DNA, 22 bp, synthetic construct
  misc_feature 1..22: note = chemically synthesized
  source 1..22: mol_type = other DNA
caccatgttggccaggctggtc

SEQ ID NO: 7409 - DNA, 22 bp, synthetic construct
  misc_feature 1..22: note = chemically synthesized
  source 1..22: mol_type = other DNA
accatgttggccaggctggtct

SEQ ID NO: 7410 - DNA, 22 bp, synthetic construct
  misc_feature 1..22: note = chemically synthesized
  source 1..22: mol_type = other DNA
gccaggctggtctcgaactctc

SEQ ID NO: 7411 - DNA, 22 bp, synthetic construct
  misc_feature 1..22: note = chemically synthesized
  source 1..22: mol_type = other DNA
gtctcgaactctcctgacctcg

SEQ ID NO: 7412 - DNA, 22 bp, synthetic construct
  misc_feature 1..22: note = chemically synthesized
  source 1..22: mol_type = other DNA
gaactctcctgacctcgtgatc

SEQ ID NO: 7413 - DNA, 22 bp, synthetic construct
  misc_feature 1..22: note = chemically synthesized
  source 1..22: mol_type = other DNA
tcctgacctcgtgatccgcctg

SEQ ID NO: 7414 - DNA, 22 bp, synthetic construct
  misc_feature 1..22: note = chemically synthesized
  source 1..22: mol_type = other DNA
ctgacctcgtgatccgcctgcc

SEQ ID NO: 7415 - DNA, 22 bp, synthetic construct
  misc_feature 1..22: note = chemically synthesized
  source 1..22: mol_type = other DNA
acctcgtgatccgcctgcctcg

SEQ ID NO: 7416 - DNA, 22 bp, synthetic construct
  misc_feature 1..22: note = chemically synthesized
  source 1..22: mol_type = other DNA
gtgatccgcctgcctcggcctc

SEQ ID NO: 7417 - DNA, 22 bp, synthetic construct
  misc_feature 1..22: note = chemically synthesized
  source 1..22: mol_type = other DNA
cctcggcctcccaaagtgctga

SEQ ID NO: 7418 - DNA, 22 bp, synthetic construct
  misc_feature 1..22: note = chemically synthesized
  source 1..22: mol_type = other DNA
ggcctcccaaagtgctgagatt

SEQ ID NO: 7419 - DNA, 22 bp, synthetic construct
  misc_feature 1..22: note = chemically synthesized
  source 1..22: mol_type = other DNA
ccaaagtgctgagattacaggt

SEQ ID NO: 7420 - DNA, 22 bp, synthetic construct
  misc_feature 1..22: note = chemically synthesized
  source 1..22: mol_type = other DNA
agattacaggtgtgagccaccc

SEQ ID NO: 7421 - DNA, 22 bp, synthetic construct
  misc_feature 1..22: note = chemically synthesized
  source 1..22: mol_type = other DNA
caggtgtgagccaccctgccca

SEQ ID NO: 7422 - DNA, 22 bp, synthetic construct
  misc_feature 1..22: note = chemically synthesized
  source 1..22: mol_type = other DNA
cccagccgtcaaaagagtctta

SEQ ID NO: 7423 - DNA, 22 bp, synthetic construct
  misc_feature 1..22: note = chemically synthesized
  source 1..22: mol_type = other DNA
aatatatatatccagatggcat

SEQ ID NO: 7424 - DNA, 22 bp, synthetic construct
  misc_feature 1..22: note = chemically synthesized
  source 1..22: mol_type = other DNA
atatatatatccagatggcatg

SEQ ID NO: 7425 - DNA, 22 bp, synthetic construct
  misc_feature 1..22: note = chemically synthesized
  source 1..22: mol_type = other DNA
actttatgttactacatgcact

SEQ ID NO: 7426 - DNA, 22 bp, synthetic construct
  misc_feature 1..22: note = chemically synthesized
  source 1..22: mol_type = other DNA
ctttatgttactacatgcactt

SEQ ID NO: 7427 - DNA, 22 bp, synthetic construct
  misc_feature 1..22: note = chemically synthesized
  source 1..22: mol_type = other DNA
tatgttactacatgcacttggc

SEQ ID NO: 7428 - DNA, 22 bp, synthetic construct
  misc_feature 1..22: note = chemically synthesized
  source 1..22: mol_type = other DNA
atgttactacatgcacttggct

SEQ ID NO: 7429 - DNA, 22 bp, synthetic construct
  misc_feature 1..22: note = chemically synthesized
  source 1..22: mol_type = other DNA
tgttactacatgcacttggctg

SEQ ID NO: 7430 - DNA, 22 bp, synthetic construct
  misc_feature 1..22: note = chemically synthesized
  source 1..22: mol_type = other DNA
ctacatgcacttggctgcataa

SEQ ID NO: 7431 - DNA, 22 bp, synthetic construct
  misc_feature 1..22: note = chemically synthesized
  source 1..22: mol_type = other DNA
catgcacttggctgcataaatg

SEQ ID NO: 7432 - DNA, 22 bp, synthetic construct
  misc_feature 1..22: note = chemically synthesized
  source 1..22: mol_type = other DNA
ggctgcataaatgtggtacaag

SEQ ID NO: 7433 - DNA, 22 bp, synthetic construct
  misc_feature 1..22: note = chemically synthesized
  source 1..22: mol_type = other DNA
gctgcataaatgtggtacaagc

SEQ ID NO: 7434 - DNA, 22 bp, synthetic construct
  misc_feature 1..22: note = chemically synthesized
  source 1..22: mol_type = other DNA
cataaatgtggtacaagcattc

SEQ ID NO: 7435 - DNA, 22 bp, synthetic construct
  misc_feature 1..22: note = chemically synthesized
  source 1..22: mol_type = other DNA
tgtcttgaagggcaggtgcttc

SEQ ID NO: 7436 - DNA, 22 bp, synthetic construct
  misc_feature 1..22: note = chemically synthesized
  source 1..22: mol_type = other DNA
tcttgaagggcaggtgcttcag

SEQ ID NO: 7437 - DNA, 22 bp, synthetic construct
  misc_feature 1..22: note = chemically synthesized
  source 1..22: mol_type = other DNA
gaagggcaggtgcttcaggata

SEQ ID NO: 7438 - DNA, 22 bp, synthetic construct
  misc_feature 1..22: note = chemically synthesized
  source 1..22: mol_type = other DNA
aagggcaggtgcttcaggatac

SEQ ID NO: 7439 - DNA, 22 bp, synthetic construct
  misc_feature 1..22: note = chemically synthesized
  source 1..22: mol_type = other DNA
caggataccatatacagctcag

SEQ ID NO: 7440 - DNA, 22 bp, synthetic construct
  misc_feature 1..22: note = chemically synthesized
  source 1..22: mol_type = other DNA
aggataccatatacagctcaga

SEQ ID NO: 7441 - DNA, 22 bp, synthetic construct
  misc_feature 1..22: note = chemically synthesized
  source 1..22: mol_type = other DNA
agaagtttcttctttaggcatt

SEQ ID NO: 7442 - DNA, 22 bp, synthetic construct
  misc_feature 1..22: note = chemically synthesized
  source 1..22: mol_type = other DNA
cttctttaggcattaaatttta

SEQ ID NO: 7443 - DNA, 22 bp, synthetic construct
  misc_feature 1..22: note = chemically synthesized
  source 1..22: mol_type = other DNA
ttctttaggcattaaattttag

SEQ ID NO: 7444 - DNA, 22 bp, synthetic construct
  misc_feature 1..22: note = chemically synthesized
  source 1..22: mol_type = other DNA
ctttaggcattaaattttagca

SEQ ID NO: 7445 - DNA, 22 bp, synthetic construct
  misc_feature 1..22: note = chemically synthesized
  source 1..22: mol_type = other DNA
tttaggcattaaattttagcaa

SEQ ID NO: 7446 - DNA, 22 bp, synthetic construct
  misc_feature 1..22: note = chemically synthesized
  source 1..22: mol_type = other DNA
taggcattaaattttagcaaag

SEQ ID NO: 7447 - DNA, 22 bp, synthetic construct
  misc_feature 1..22: note = chemically synthesized
  source 1..22: mol_type = other DNA
aggcattaaattttagcaaaga

SEQ ID NO: 7448 - DNA, 22 bp, synthetic construct
  misc_feature 1..22: note = chemically synthesized
  source 1..22: mol_type = other DNA
ggcattaaattttagcaaagat

SEQ ID NO: 7449 - DNA, 22 bp, synthetic construct
  misc_feature 1..22: note = chemically synthesized
  source 1..22: mol_type = other DNA
aattttagcaaagatatctcat

SEQ ID NO: 7450 - DNA, 22 bp, synthetic construct
  misc_feature 1..22: note = chemically synthesized
  source 1..22: mol_type = other DNA
tagcaaagatatctcatctctt

SEQ ID NO: 7451 - DNA, 22 bp, synthetic construct
  misc_feature 1..22: note = chemically synthesized
  source 1..22: mol_type = other DNA
agcaaagatatctcatctcttc

SEQ ID NO: 7452 - DNA, 22 bp, synthetic construct
  misc_feature 1..22: note = chemically synthesized
  source 1..22: mol_type = other DNA
gcaaagatatctcatctcttct

SEQ ID NO: 7453 - DNA, 22 bp, synthetic construct
  misc_feature 1..22: note = chemically synthesized
  source 1..22: mol_type = other DNA
atctcttcttttaaaccatttt

SEQ ID NO: 7454 - DNA, 22 bp, synthetic construct
  misc_feature 1..22: note = chemically synthesized
  source 1..22: mol_type = other DNA
ttcttttaaaccattttctttt

SEQ ID NO: 7455 - DNA, 22 bp, synthetic construct
  misc_feature 1..22: note = chemically synthesized
  source 1..22: mol_type = other DNA
cttttaaaccattttctttttt

SEQ ID NO: 7456 - DNA, 22 bp, synthetic construct
  misc_feature 1..22: note = chemically synthesized
  source 1..22: mol_type = other DNA
ttttaaaccattttcttttttt

SEQ ID NO: 7457 - DNA, 22 bp, synthetic construct
  misc_feature 1..22: note = chemically synthesized
  source 1..22: mol_type = other DNA
ttaaaccattttctttttttgt

SEQ ID NO: 7458 - DNA, 22 bp, synthetic construct
  misc_feature 1..22: note = chemically synthesized
  source 1..22: mol_type = other DNA
taaaccattttctttttttgtg

SEQ ID NO: 7459 - DNA, 22 bp, synthetic construct
  misc_feature 1..22: note = chemically synthesized
  source 1..22: mol_type = other DNA
aaaccattttctttttttgtgg

SEQ ID NO: 7460 - DNA, 22 bp, synthetic construct
  misc_feature 1..22: note = chemically synthesized
  source 1..22: mol_type = other DNA
aaccattttctttttttgtggt

SEQ ID NO: 7461 - DNA, 22 bp, synthetic construct
  misc_feature 1..22: note = chemically synthesized
  source 1..22: mol_type = other DNA
tctttttttgtggttagaaaag

SEQ ID NO: 7462 - DNA, 22 bp, synthetic construct
  misc_feature 1..22: note = chemically synthesized
  source 1..22: mol_type = other DNA
ctttttttgtggttagaaaagt

SEQ ID NO: 7463 - DNA, 22 bp, synthetic construct
  misc_feature 1..22: note = chemically synthesized
  source 1..22: mol_type = other DNA
tttttttgtggttagaaaagtt

SEQ ID NO: 7464 - DNA, 22 bp, synthetic construct
  misc_feature 1..22: note = chemically synthesized
  source 1..22: mol_type = other DNA
tttttgtggttagaaaagttat

SEQ ID NO: 7465 - DNA, 22 bp, synthetic construct
  misc_feature 1..22: note = chemically synthesized
  source 1..22: mol_type = other DNA
ttttgtggttagaaaagttatg

SEQ ID NO: 7466 - DNA, 22 bp, synthetic construct
  misc_feature 1..22: note = chemically synthesized
  source 1..22: mol_type = other DNA
tttgtggttagaaaagttatgt

SEQ ID NO: 7467 - DNA, 22 bp, synthetic construct
  misc_feature 1..22: note = chemically synthesized
  source 1..22: mol_type = other DNA
ttgtggttagaaaagttatgta

SEQ ID NO: 7468 - DNA, 22 bp, synthetic construct
  misc_feature 1..22: note = chemically synthesized
  source 1..22: mol_type = other DNA
tgtggttagaaaagttatgtag

SEQ ID NO: 7469 - DNA, 22 bp, synthetic construct
  misc_feature 1..22: note = chemically synthesized
  source 1..22: mol_type = other DNA
gtggttagaaaagttatgtaga

SEQ ID NO: 7470 - DNA, 22 bp, synthetic construct
  misc_feature 1..22: note = chemically synthesized
  source 1..22: mol_type = other DNA
tggttagaaaagttatgtagaa

SEQ ID NO: 7471 - DNA, 22 bp, synthetic construct
  misc_feature 1..22: note = chemically synthesized
  source 1..22: mol_type = other DNA
gaaaagttatgtagaaaaaagt

SEQ ID NO: 7472 - DNA, 22 bp, synthetic construct
  misc_feature 1..22: note = chemically synthesized
  source 1..22: mol_type = other DNA
tgtagaaaaaagtaaatgtgat

SEQ ID NO: 7473 - DNA, 22 bp, synthetic construct
  misc_feature 1..22: note = chemically synthesized
  source 1..22: mol_type = other DNA
acgctcattgtagaaaagctat

SEQ ID NO: 7474 - DNA, 22 bp, synthetic construct
  misc_feature 1..22: note = chemically synthesized
  source 1..22: mol_type = other DNA
cgctcattgtagaaaagctata

SEQ ID NO: 7475 - DNA, 22 bp, synthetic construct
  misc_feature 1..22: note = chemically synthesized
  source 1..22: mol_type = other DNA
attgtagaaaagctataaaatg

SEQ ID NO: 7476 - DNA, 22 bp, synthetic construct
  misc_feature 1..22: note = chemically synthesized
  source 1..22: mol_type = other DNA
tagaaaagctataaaatgaata

SEQ ID NO: 7477 - DNA, 22 bp, synthetic construct
  misc_feature 1..22: note = chemically synthesized
  source 1..22: mol_type = other DNA
taaaatgaatacaattaaagct

SEQ ID NO: 7478 - DNA, 22 bp, synthetic construct
  misc_feature 1..22: note = chemically synthesized
  source 1..22: mol_type = other DNA
aagctgttatttaattagccag

SEQ ID NO: 7479 - DNA, 22 bp, synthetic construct
  misc_feature 1..22: note = chemically synthesized
  source 1..22: mol_type = other DNA
ttatttaattagccagtgaaaa

SEQ ID NO: 7480 - DNA, 22 bp, synthetic construct
  misc_feature 1..22: note = chemically synthesized
  source 1..22: mol_type = other DNA
tttaattagccagtgaaaaact

SEQ ID NO: 7481 - DNA, 22 bp, synthetic construct
  misc_feature 1..22: note = chemically synthesized
  source 1..22: mol_type = other DNA
aattagccagtgaaaaactatt

SEQ ID NO: 7482 - DNA, 22 bp, synthetic construct
  misc_feature 1..22: note = chemically synthesized
  source 1..22: mol_type = other DNA
attagccagtgaaaaactatta

SEQ ID NO: 7483 - DNA, 22 bp, synthetic construct
  misc_feature 1..22: note = chemically synthesized
  source 1..22: mol_type = other DNA
gccagtgaaaaactattaacaa

SEQ ID NO: 7484 - DNA, 22 bp, synthetic construct
  misc_feature 1..22: note = chemically synthesized
  source 1..22: mol_type = other DNA
ttaacaacttgtctattacctg

SEQ ID NO: 7485 - DNA, 22 bp, synthetic construct
  misc_feature 1..22: note = chemically synthesized
  source 1..22: mol_type = other DNA
acaacttgtctattacctgtta

SEQ ID NO: 7486 - DNA, 22 bp, synthetic construct
  misc_feature 1..22: note = chemically synthesized
  source 1..22: mol_type = other DNA
gtctattacctgttagtattat

SEQ ID NO: 7487 - DNA, 22 bp, synthetic construct
  misc_feature 1..22: note = chemically synthesized
  source 1..22: mol_type = other DNA
tctattacctgttagtattatt

SEQ ID NO: 7488 - DNA, 22 bp, synthetic construct
  misc_feature 1..22: note = chemically synthesized
  source 1..22: mol_type = other DNA
ttacctgttagtattattgttg

SEQ ID NO: 7489 - DNA, 22 bp, synthetic construct
  misc_feature 1..22: note = chemically synthesized
  source 1..22: mol_type = other DNA
cctgttagtattattgttgcat

SEQ ID NO: 7490 - DNA, 22 bp, synthetic construct
  misc_feature 1..22: note = chemically synthesized
  source 1..22: mol_type = other DNA
ttagtattattgttgcattaaa

SEQ ID NO: 7491 - DNA, 22 bp, synthetic construct
  misc_feature 1..22: note = chemically synthesized
  source 1..22: mol_type = other DNA
gtattattgttgcattaaaaat

SEQ ID NO: 7492 - DNA, 22 bp, synthetic construct
  misc_feature 1..22: note = chemically synthesized
  source 1..22: mol_type = other DNA
ttgttgcattaaaaatgcatat

SEQ ID NO: 7493 - DNA, 22 bp, synthetic construct
  misc_feature 1..22: note = chemically synthesized
  source 1..22: mol_type = other DNA
ttgcattaaaaatgcatatact

SEQ ID NO: 7494 - DNA, 22 bp, synthetic construct
  misc_feature 1..22: note = chemically synthesized
  source 1..22: mol_type = other DNA
cattaaaaatgcatatacttta

SEQ ID NO: 7495 - DNA, 22 bp, synthetic construct
  misc_feature 1..22: note = chemically synthesized
  source 1..22: mol_type = other DNA
aaaatgcatatactttaataaa

SEQ ID NO: 7496 - DNA, 22 bp, synthetic construct
  misc_feature 1..22: note = chemically synthesized
  source 1..22: mol_type = other DNA
taataaatgtatattgtattgt

SEQ ID NO: 7497 - DNA, 22 bp, synthetic construct
  misc_feature 1..22: note = chemically synthesized
  source 1..22: mol_type = other DNA
aataaatgtatattgtattgta

SEQ ID NO: 7498 - DNA, 22 bp, synthetic construct
  misc_feature 1..22: note = chemically synthesized
  source 1..22: mol_type = other DNA
ataaatgtatattgtattgtat

SEQ ID NO: 7499 - DNA, 22 bp, synthetic construct
  misc_feature 1..22: note = chemically synthesized
  source 1..22: mol_type = other DNA
tattgtatactgcatgatttta

SEQ ID NO: 7500 - DNA, 22 bp, synthetic construct
  misc_feature 1..22: note = chemically synthesized
  source 1..22: mol_type = other DNA
tatactgcatgattttattgaa

SEQ ID NO: 7501 - DNA, 22 bp, synthetic construct
  misc_feature 1..22: note = chemically synthesized
  source 1..22: mol_type = other DNA
catgattttattgaagttcttg

SEQ ID NO: 7502 - DNA, 22 bp, synthetic construct
  misc_feature 1..22: note = chemically synthesized
  source 1..22: mol_type = other DNA
tattgaagttcttgttcatctt

SEQ ID NO: 7503 - DNA, 22 bp, synthetic construct
  misc_feature 1..22: note = chemically synthesized
  source 1..22: mol_type = other DNA
attgaagttcttgttcatcttg

SEQ ID NO: 7504 - DNA, 22 bp, synthetic construct
  misc_feature 1..22: note = chemically synthesized
  source 1..22: mol_type = other DNA
ttgaagttcttgttcatcttgt

SEQ ID NO: 7505 - DNA, 22 bp, synthetic construct
  misc_feature 1..22: note = chemically synthesized
  source 1..22: mol_type = other DNA
aagttcttgttcatcttgtgta

SEQ ID NO: 7506 - DNA, 22 bp, synthetic construct
  misc_feature 1..22: note = chemically synthesized
  source 1..22: mol_type = other DNA
ttgttcatcttgtgtatatact

SEQ ID NO: 7507 - DNA, 22 bp, synthetic construct
  misc_feature 1..22: note = chemically synthesized
  source 1..22: mol_type = other DNA
gttcatcttgtgtatatactta

SEQ ID NO: 7508 - DNA, 22 bp, synthetic construct
  misc_feature 1..22: note = chemically synthesized
  source 1..22: mol_type = other DNA
ttcatcttgtgtatatacttaa

SEQ ID NO: 7509 - DNA, 22 bp, synthetic construct
  misc_feature 1..22: note = chemically synthesized
  source 1..22: mol_type = other DNA
atcttgtgtatatacttaatcg

SEQ ID NO: 7510 - DNA, 22 bp, synthetic construct
  misc_feature 1..22: note = chemically synthesized
  source 1..22: mol_type = other DNA
gtgtatatacttaatcgctttg

SEQ ID NO: 7511 - DNA, 22 bp, synthetic construct
  misc_feature 1..22: note = chemically synthesized
  source 1..22: mol_type = other DNA
tgtatatacttaatcgctttgt

SEQ ID NO: 7512 - DNA, 22 bp, synthetic construct
  misc_feature 1..22: note = chemically synthesized
  source 1..22: mol_type = other DNA
aatcgctttgtcattttggaga

SEQ ID NO: 7513 - DNA, 22 bp, synthetic construct
  misc_feature 1..22: note = chemically synthesized
  source 1..22: mol_type = other DNA
atcgctttgtcattttggagac

SEQ ID NO: 7514 - DNA, 22 bp, synthetic construct
  misc_feature 1..22: note = chemically synthesized
  source 1..22: mol_type = other DNA
tgtcattttggagacatttatt

SEQ ID NO: 7515 - DNA, 22 bp, synthetic construct
  misc_feature 1..22: note = chemically synthesized
  source 1..22: mol_type = other DNA
gtcattttggagacatttattt

SEQ ID NO: 7516 - DNA, 22 bp, synthetic construct
  misc_feature 1..22: note = chemically synthesized
  source 1..22: mol_type = other DNA
tcattttggagacatttatttt

SEQ ID NO: 7517 - DNA, 22 bp, synthetic construct
  misc_feature 1..22: note = chemically synthesized
  source 1..22: mol_type = other DNA
tggagacatttattttgcttct

SEQ ID NO: 7518 - DNA, 22 bp, synthetic construct
  misc_feature 1..22: note = chemically synthesized
  source 1..22: mol_type = other DNA
ggagacatttattttgcttcta

SEQ ID NO: 7519 - DNA, 22 bp, synthetic construct
  misc_feature 1..22: note = chemically synthesized
  source 1..22: mol_type = other DNA
gagacatttattttgcttctaa

SEQ ID NO: 7520 - DNA, 22 bp, synthetic construct
  misc_feature 1..22: note = chemically synthesized
  source 1..22: mol_type = other DNA
attttgcttctaatttctttac

SEQ ID NO: 7521 - DNA, 22 bp, synthetic construct
  misc_feature 1..22: note = chemically synthesized
  source 1..22: mol_type = other DNA
ttttgcttctaatttctttaca

SEQ ID NO: 7522 - DNA, 22 bp, synthetic construct
  misc_feature 1..22: note = chemically synthesized
  source 1..22: mol_type = other DNA
tgcttctaatttctttacattt

SEQ ID NO: 7523 - DNA, 22 bp, synthetic construct
  misc_feature 1..22: note = chemically synthesized
  source 1..22: mol_type = other DNA
gcttctaatttctttacatttt

SEQ ID NO: 7524 - DNA, 22 bp, synthetic construct
  misc_feature 1..22: note = chemically synthesized
  source 1..22: mol_type = other DNA
cttctaatttctttacattttg

SEQ ID NO: 7525 - DNA, 22 bp, synthetic construct
  misc_feature 1..22: note = chemically synthesized
  source 1..22: mol_type = other DNA
ctaatttctttacattttgtct

SEQ ID NO: 7526 - DNA, 22 bp, synthetic construct
  misc_feature 1..22: note = chemically synthesized
  source 1..22: mol_type = other DNA
taatttctttacattttgtctt

SEQ ID NO: 7527 - DNA, 22 bp, synthetic construct
  misc_feature 1..22: note = chemically synthesized
  source 1..22: mol_type = other DNA
atttctttacattttgtcttac

SEQ ID NO: 7528 - DNA, 22 bp, synthetic construct
  misc_feature 1..22: note = chemically synthesized
  source 1..22: mol_type = other DNA
ctttacattttgtcttacggaa

SEQ ID NO: 7529 - DNA, 22 bp, synthetic construct
  misc_feature 1..22: note = chemically synthesized
  source 1..22: mol_type = other DNA
tttacattttgtcttacggaat

SEQ ID NO: 7530 - DNA, 22 bp, synthetic construct
  misc_feature 1..22: note = chemically synthesized
  source 1..22: mol_type = other DNA
tacattttgtcttacggaatat

SEQ ID NO: 7531 - DNA, 22 bp, synthetic construct
  misc_feature 1..22: note = chemically synthesized
  source 1..22: mol_type = other DNA
acattttgtcttacggaatatt

SEQ ID NO: 7532 - DNA, 22 bp, synthetic construct
  misc_feature 1..22: note = chemically synthesized
  source 1..22: mol_type = other DNA
cattttgtcttacggaatattt

SEQ ID NO: 7533 - DNA, 22 bp, synthetic construct
  misc_feature 1..22: note = chemically synthesized
  source 1..22: mol_type = other DNA
tgtcttacggaatattttcatt

SEQ ID NO: 7534 - DNA, 22 bp, synthetic construct
  misc_feature 1..22: note = chemically synthesized
  source 1..22: mol_type = other DNA
gtcttacggaatattttcattc

SEQ ID NO: 7535 - DNA, 22 bp, synthetic construct
  misc_feature 1..22: note = chemically synthesized
  source 1..22: mol_type = other DNA
tcttacggaatattttcattca

SEQ ID NO: 7536 - DNA, 22 bp, synthetic construct
  misc_feature 1..22: note = chemically synthesized
  source 1..22: mol_type = other DNA
acggaatattttcattcaactg

SEQ ID NO: 7537 - DNA, 22 bp, synthetic construct
  misc_feature 1..22: note = chemically synthesized
  source 1..22: mol_type = other DNA
cggaatattttcattcaactgt

SEQ ID NO: 7538 - DNA, 22 bp, synthetic construct
  misc_feature 1..22: note = chemically synthesized
  source 1..22: mol_type = other DNA
tcattcaactgtggtagccgaa

SEQ ID NO: 7539 - DNA, 22 bp, synthetic construct
  misc_feature 1..22: note = chemically synthesized
  source 1..22: mol_type = other DNA
cattcaactgtggtagccgaat

SEQ ID NO: 7540 - DNA, 22 bp, synthetic construct
  misc_feature 1..22: note = chemically synthesized
  source 1..22: mol_type = other DNA
attcaactgtggtagccgaatt

SEQ ID NO: 7541 - DNA, 22 bp, synthetic construct
  misc_feature 1..22: note = chemically synthesized
  source 1..22: mol_type = other DNA
aactgtggtagccgaattaatc

SEQ ID NO: 7542 - DNA, 22 bp, synthetic construct
  misc_feature 1..22: note = chemically synthesized
  source 1..22: mol_type = other DNA
tggtagccgaattaatcgtgtt

SEQ ID NO: 7543 - DNA, 22 bp, synthetic construct
  misc_feature 1..22: note = chemically synthesized
  source 1..22: mol_type = other DNA
atcgtgtttcttcactctaggg

SEQ ID NO: 7544 - DNA, 22 bp, synthetic construct
  misc_feature 1..22: note = chemically synthesized
  source 1..22: mol_type = other DNA
cttcactctagggacattgtcg

SEQ ID NO: 7545 - DNA, 22 bp, synthetic construct
  misc_feature 1..22: note = chemically synthesized
  source 1..22: mol_type = other DNA
ttcactctagggacattgtcgt

SEQ ID NO: 7546 - DNA, 22 bp, synthetic construct
  misc_feature 1..22: note = chemically synthesized
  source 1..22: mol_type = other DNA
cactctagggacattgtcgtct

SEQ ID NO: 7547 - DNA, 22 bp, synthetic construct
  misc_feature 1..22: note = chemically synthesized
  source 1..22: mol_type = other DNA
actctagggacattgtcgtcta

SEQ ID NO: 7548 - DNA, 22 bp, synthetic construct
  misc_feature 1..22: note = chemically synthesized
  source 1..22: mol_type = other DNA
tagggacattgtcgtctaagtt

SEQ ID NO: 7549 - DNA, 22 bp, synthetic construct
  misc_feature 1..22: note = chemically synthesized
  source 1..22: mol_type = other DNA
gggacattgtcgtctaagttgt

SEQ ID NO: 7550 - DNA, 22 bp, synthetic construct
  misc_feature 1..22: note = chemically synthesized
  source 1..22: mol_type = other DNA
tcgtctaagttgtaagacattg

SEQ ID NO: 7551 - DNA, 22 bp, synthetic construct
  misc_feature 1..22: note = chemically synthesized
  source 1..22: mol_type = other DNA
agttgtaagacattggttattt

SEQ ID NO: 7552 - DNA, 22 bp, synthetic construct
  misc_feature 1..22: note = chemically synthesized
  source 1..22: mol_type = other DNA
taagacattggttattttacca

SEQ ID NO: 7553 - DNA, 22 bp, synthetic construct
  misc_feature 1..22: note = chemically synthesized
  source 1..22: mol_type = other DNA
gttattttaccagcaaaccatt

SEQ ID NO: 7554 - DNA, 22 bp, synthetic construct
  misc_feature 1..22: note = chemically synthesized
  source 1..22: mol_type = other DNA
ttttaccagcaaaccattctga

SEQ ID NO: 7555 - DNA, 22 bp, synthetic construct
  misc_feature 1..22: note = chemically synthesized
  source 1..22: mol_type = other DNA
taccagcaaaccattctgaaag

SEQ ID NO: 7556 - DNA, 22 bp, synthetic construct
  misc_feature 1..22: note = chemically synthesized
  source 1..22: mol_type = other DNA
accagcaaaccattctgaaagc

SEQ ID NO: 7557 - DNA, 22 bp, synthetic construct
  misc_feature 1..22: note = chemically synthesized
  source 1..22: mol_type = other DNA
ccagcaaaccattctgaaagca

SEQ ID NO: 7558 - DNA, 22 bp, synthetic construct
  misc_feature 1..22: note = chemically synthesized
  source 1..22: mol_type = other DNA
tgaaagcatatgacaaattatt

SEQ ID NO: 7559 - DNA, 22 bp, synthetic construct
  misc_feature 1..22: note = chemically synthesized
  source 1..22: mol_type = other DNA
aaagcatatgacaaattatttc

SEQ ID NO: 7560 - DNA, 22 bp, synthetic construct
  misc_feature 1..22: note = chemically synthesized
  source 1..22: mol_type = other DNA
tttctctcttaatatcttacta

SEQ ID NO: 7561 - DNA, 22 bp, synthetic construct
  misc_feature 1..22: note = chemically synthesized
  source 1..22: mol_type = other DNA
ctctcttaatatcttactatac

SEQ ID NO: 7562 - DNA, 22 bp, synthetic construct
  misc_feature 1..22: note = chemically synthesized
  source 1..22: mol_type = other DNA
tctcttaatatcttactatact

SEQ ID NO: 7563 - DNA, 22 bp, synthetic construct
  misc_feature 1..22: note = chemically synthesized
  source 1..22: mol_type = other DNA
tcttaatatcttactatactga

SEQ ID NO: 7564 - DNA, 22 bp, synthetic construct
  misc_feature 1..22: note = chemically synthesized
  source 1..22: mol_type = other DNA
ttaatatcttactatactgaaa

SEQ ID NO: 7565 - DNA, 22 bp, synthetic construct
  misc_feature 1..22: note = chemically synthesized
  source 1..22: mol_type = other DNA
aatatcttactatactgaaagc

SEQ ID NO: 7566 - DNA, 22 bp, synthetic construct
  misc_feature 1..22: note = chemically synthesized
  source 1..22: mol_type = other DNA
atatcttactatactgaaagca

SEQ ID NO: 7567 - DNA, 22 bp, synthetic construct
  misc_feature 1..22: note = chemically synthesized
  source 1..22: mol_type = other DNA
actatactgaaagcagactgct

SEQ ID NO: 7568 - DNA, 22 bp, synthetic construct
  misc_feature 1..22: note = chemically synthesized
  source 1..22: mol_type = other DNA
ctatactgaaagcagactgcta

SEQ ID NO: 7569 - DNA, 22 bp, synthetic construct
  misc_feature 1..22: note = chemically synthesized
  source 1..22: mol_type = other DNA
tactgaaagcagactgctataa

SEQ ID NO: 7570 - DNA, 22 bp, synthetic construct
  misc_feature 1..22: note = chemically synthesized
  source 1..22: mol_type = other DNA
aaagcagactgctataaggctt

SEQ ID NO: 7571 - DNA, 22 bp, synthetic construct
  misc_feature 1..22: note = chemically synthesized
  source 1..22: mol_type = other DNA
ctataaggcttcacttactctt

SEQ ID NO: 7572 - DNA, 22 bp, synthetic construct
  misc_feature 1..22: note = chemically synthesized
  source 1..22: mol_type = other DNA
taaggcttcacttactcttcta

SEQ ID NO: 7573 - DNA, 22 bp, synthetic construct
  misc_feature 1..22: note = chemically synthesized
  source 1..22: mol_type = other DNA
cacttactcttctacctcataa

SEQ ID NO: 7574 - DNA, 22 bp, synthetic construct
  misc_feature 1..22: note = chemically synthesized
  source 1..22: mol_type = other DNA
acttactcttctacctcataag

SEQ ID NO: 7575 - DNA, 22 bp, synthetic construct
  misc_feature 1..22: note = chemically synthesized
  source 1..22: mol_type = other DNA
actcttctacctcataaggaat

SEQ ID NO: 7576 - DNA, 22 bp, synthetic construct
  misc_feature 1..22: note = chemically synthesized
  source 1..22: mol_type = other DNA
ctcttctacctcataaggaata

SEQ ID NO: 7577 - DNA, 22 bp, synthetic construct
  misc_feature 1..22: note = chemically synthesized
  source 1..22: mol_type = other DNA
ttctacctcataaggaatatgt

SEQ ID NO: 7578 - DNA, 22 bp, synthetic construct
  misc_feature 1..22: note = chemically synthesized
  source 1..22: mol_type = other DNA
ctacctcataaggaatatgtta

SEQ ID NO: 7579 - DNA, 22 bp, synthetic construct
  misc_feature 1..22: note = chemically synthesized
  source 1..22: mol_type = other DNA
tacctcataaggaatatgttac

SEQ ID NO: 7580 - DNA, 22 bp, synthetic construct
  misc_feature 1..22: note = chemically synthesized
  source 1..22: mol_type = other DNA
cctcataaggaatatgttacaa

SEQ ID NO: 7581 - DNA, 22 bp, synthetic construct
  misc_feature 1..22: note = chemically synthesized
  source 1..22: mol_type = other DNA
ataaggaatatgttacaattaa

SEQ ID NO: 7582 - DNA, 22 bp, synthetic construct
  misc_feature 1..22: note = chemically synthesized
  source 1..22: mol_type = other DNA
caattaatttattaggtaagca

SEQ ID NO: 7583 - DNA, 22 bp, synthetic construct
  misc_feature 1..22: note = chemically synthesized
  source 1..22: mol_type = other DNA
atttattaggtaagcatttgtt

SEQ ID NO: 7584 - DNA, 22 bp, synthetic construct
  misc_feature 1..22: note = chemically synthesized
  source 1..22: mol_type = other DNA
attaggtaagcatttgttttat

SEQ ID NO: 7585 - DNA, 22 bp, synthetic construct
  misc_feature 1..22: note = chemically synthesized
  source 1..22: mol_type = other DNA
ttaggtaagcatttgttttata

SEQ ID NO: 7586 - DNA, 22 bp, synthetic construct
  misc_feature 1..22: note = chemically synthesized
  source 1..22: mol_type = other DNA
ggtaagcatttgttttatattg

SEQ ID NO: 7587 - DNA, 22 bp, synthetic construct
  misc_feature 1..22: note = chemically synthesized
  source 1..22: mol_type = other DNA
gttttatattggttttatttca

SEQ ID NO: 7588 - DNA, 22 bp, synthetic construct
  misc_feature 1..22: note = chemically synthesized
  source 1..22: mol_type = other DNA
ttttatattggttttatttcac

SEQ ID NO: 7589 - DNA, 22 bp, synthetic construct
  misc_feature 1..22: note = chemically synthesized
  source 1..22: mol_type = other DNA
tatattggttttatttcacctg

SEQ ID NO: 7590 - DNA, 22 bp, synthetic construct
  misc_feature 1..22: note = chemically synthesized
  source 1..22: mol_type = other DNA
atattggttttatttcacctgg

SEQ ID NO: 7591 - DNA, 22 bp, synthetic construct
  misc_feature 1..22: note = chemically synthesized
  source 1..22: mol_type = other DNA
tattggttttatttcacctggg

SEQ ID NO: 7592 - DNA, 22 bp, synthetic construct
  misc_feature 1..22: note = chemically synthesized
  source 1..22: mol_type = other DNA
gttttatttcacctgggctgag

SEQ ID NO: 7593 - DNA, 22 bp, synthetic construct
  misc_feature 1..22: note = chemically synthesized
  source 1..22: mol_type = other DNA
tatttcacctgggctgagattt

SEQ ID NO: 7594 - DNA, 22 bp, synthetic construct
  misc_feature 1..22: note = chemically synthesized
  source 1..22: mol_type = other DNA
atttcacctgggctgagatttc

SEQ ID NO: 7595 - DNA, 22 bp, synthetic construct
  misc_feature 1..22: note = chemically synthesized
  source 1..22: mol_type = other DNA
tttcacctgggctgagatttca

SEQ ID NO: 7596 - DNA, 22 bp, synthetic construct
  misc_feature 1..22: note = chemically synthesized
  source 1..22: mol_type = other DNA
cacctgggctgagatttcaaga

SEQ ID NO: 7597 - DNA, 22 bp, synthetic construct
  misc_feature 1..22: note = chemically synthesized
  source 1..22: mol_type = other DNA
acctgggctgagatttcaagaa

SEQ ID NO: 7598 - DNA, 22 bp, synthetic construct
  misc_feature 1..22: note = chemically synthesized
  source 1..22: mol_type = other DNA
ggctgagatttcaagaaacacc

SEQ ID NO: 7599 - DNA, 22 bp, synthetic construct
  misc_feature 1..22: note = chemically synthesized
  source 1..22: mol_type = other DNA
agatttcaagaaacaccccagt

SEQ ID NO: 7600 - DNA, 22 bp, synthetic construct
  misc_feature 1..22: note = chemically synthesized
  source 1..22: mol_type = other DNA
caagaaacaccccagtcttcac

SEQ ID NO: 7601 - DNA, 22 bp, synthetic construct
  misc_feature 1..22: note = chemically synthesized
  source 1..22: mol_type = other DNA
aagaaacaccccagtcttcaca

SEQ ID NO: 7602 - DNA, 22 bp, synthetic construct
  misc_feature 1..22: note = chemically synthesized
  source 1..22: mol_type = other DNA
cacagtaacacatttcactaac

SEQ ID NO: 7603 - DNA, 22 bp, synthetic construct
  misc_feature 1..22: note = chemically synthesized
  source 1..22: mol_type = other DNA
acagtaacacatttcactaaca

SEQ ID NO: 7604 - DNA, 22 bp, synthetic construct
  misc_feature 1..22: note = chemically synthesized
  source 1..22: mol_type = other DNA
cactaacacatttactaaacat

SEQ ID NO: 7605 - DNA, 22 bp, synthetic construct
  misc_feature 1..22: note = chemically synthesized
  source 1..22: mol_type = other DNA
actaacacatttactaaacatc

SEQ ID NO: 7606 - DNA, 22 bp, synthetic construct
  misc_feature 1..22: note = chemically synthesized
  source 1..22: mol_type = other DNA
acacatttactaaacatcagca

SEQ ID NO: 7607 - DNA, 22 bp, synthetic construct
  misc_feature 1..22: note = chemically synthesized
  source 1..22: mol_type = other DNA
actaaacatcagcaactgtggc

SEQ ID NO: 7608 - DNA, 22 bp, synthetic construct
  misc_feature 1..22: note = chemically synthesized
  source 1..22: mol_type = other DNA
ctaaacatcagcaactgtggcc

SEQ ID NO: 7609 - DNA, 22 bp, synthetic construct
  misc_feature 1..22: note = chemically synthesized
  source 1..22: mol_type = other DNA
aacatcagcaactgtggcctgt

SEQ ID NO: 7610 - DNA, 22 bp, synthetic construct
  misc_feature 1..22: note = chemically synthesized
  source 1..22: mol_type = other DNA
tggcctgttaatttttttaata

SEQ ID NO: 7611 - DNA, 22 bp, synthetic construct
  misc_feature 1..22: note = chemically synthesized
  source 1..22: mol_type = other DNA
ttaatttttttaatagaaattt

SEQ ID NO: 7612 - DNA, 22 bp, synthetic construct
  misc_feature 1..22: note = chemically synthesized
  source 1..22: mol_type = other DNA
atttttttaatagaaattttaa

SEQ ID NO: 7613 - DNA, 22 bp, synthetic construct
  misc_feature 1..22: note = chemically synthesized
  source 1..22: mol_type = other DNA
ttttaatagaaattttaagtcc

SEQ ID NO: 7614 - DNA, 22 bp, synthetic construct
  misc_feature 1..22: note = chemically synthesized
  source 1..22: mol_type = other DNA
tttaatagaaattttaagtcct

SEQ ID NO: 7615 - DNA, 22 bp, synthetic construct
  misc_feature 1..22: note = chemically synthesized
  source 1..22: mol_type = other DNA
ttaatagaaattttaagtcctc

SEQ ID NO: 7616 - DNA, 22 bp, synthetic construct
  misc_feature 1..22: note = chemically synthesized
  source 1..22: mol_type = other DNA
taatagaaattttaagtcctca

SEQ ID NO: 7617 - DNA, 22 bp, synthetic construct
  misc_feature 1..22: note = chemically synthesized
  source 1..22: mol_type = other DNA
aatagaaattttaagtcctcat

SEQ ID NO: 7618 - DNA, 22 bp, synthetic construct
  misc_feature 1..22: note = chemically synthesized
  source 1..22: mol_type = other DNA
atagaaattttaagtcctcatt

SEQ ID NO: 7619 - DNA, 22 bp, synthetic construct
  misc_feature 1..22: note = chemically synthesized
  source 1..22: mol_type = other DNA
taagtcctcattttctttcggt

SEQ ID NO: 7620 - DNA, 22 bp, synthetic construct
  misc_feature 1..22: note = chemically synthesized
  source 1..22: mol_type = other DNA
aagtcctcattttctttcggtg

SEQ ID NO: 7621 - DNA, 22 bp, synthetic construct
  misc_feature 1..22: note = chemically synthesized
  source 1..22: mol_type = other DNA
agtcctcattttctttcggtgt

SEQ ID NO: 7622 - DNA, 22 bp, synthetic construct
  misc_feature 1..22: note = chemically synthesized
  source 1..22: mol_type = other DNA
attttctttcggtgttttttaa

SEQ ID NO: 7623 - DNA, 22 bp, synthetic construct
  misc_feature 1..22: note = chemically synthesized
  source 1..22: mol_type = other DNA
tctttcggtgttttttaagctt

SEQ ID NO: 7624 - DNA, 22 bp, synthetic construct
  misc_feature 1..22: note = chemically synthesized
  source 1..22: mol_type = other DNA
ctttcggtgttttttaagctta

SEQ ID NO: 7625 - DNA, 22 bp, synthetic construct
  misc_feature 1..22: note = chemically synthesized
  source 1..22: mol_type = other DNA
tttcggtgttttttaagcttaa

SEQ ID NO: 7626 - DNA, 22 bp, synthetic construct
  misc_feature 1..22: note = chemically synthesized
  source 1..22: mol_type = other DNA
tcggtgttttttaagcttaatt

SEQ ID NO: 7627 - DNA, 22 bp, synthetic construct
  misc_feature 1..22: note = chemically synthesized
  source 1..22: mol_type = other DNA
cggtgttttttaagcttaattt

SEQ ID NO: 7628 - DNA, 22 bp, synthetic construct
  misc_feature 1..22: note = chemically synthesized
  source 1..22: mol_type = other DNA
ggtgttttttaagcttaatttt

SEQ ID NO: 7629 - DNA, 22 bp, synthetic construct
  misc_feature 1..22: note = chemically synthesized
  source 1..22: mol_type = other DNA
tttaagcttaatttttctggct

SEQ ID NO: 7630 - DNA, 22 bp, synthetic construct
  misc_feature 1..22: note = chemically synthesized
  source 1..22: mol_type = other DNA
ttaagcttaatttttctggctt

SEQ ID NO: 7631 - DNA, 22 bp, synthetic construct
  misc_feature 1..22: note = chemically synthesized
  source 1..22: mol_type = other DNA
taagcttaatttttctggcttt

SEQ ID NO: 7632 - DNA, 22 bp, synthetic construct
  misc_feature 1..22: note = chemically synthesized
  source 1..22: mol_type = other DNA
aagcttaatttttctggcttta

SEQ ID NO: 7633 - DNA, 22 bp, synthetic construct
  misc_feature 1..22: note = chemically synthesized
  source 1..22: mol_type = other DNA
agcttaatttttctggctttat

SEQ ID NO: 7634 - DNA, 22 bp, synthetic construct
  misc_feature 1..22: note = chemically synthesized
  source 1..22: mol_type = other DNA
aatttttctggctttattcata

SEQ ID NO: 7635 - DNA, 22 bp, synthetic construct
  misc_feature 1..22: note = chemically synthesized
  source 1..22: mol_type = other DNA
atttttctggctttattcataa

SEQ ID NO: 7636 - DNA, 22 bp, synthetic construct
  misc_feature 1..22: note = chemically synthesized
  source 1..22: mol_type = other DNA
ttctggctttattcataaattc

SEQ ID NO: 7637 - DNA, 22 bp, synthetic construct
  misc_feature 1..22: note = chemically synthesized
  source 1..22: mol_type = other DNA
tctggctttattcataaattct

SEQ ID NO: 7638 - DNA, 22 bp, synthetic construct
  misc_feature 1..22: note = chemically synthesized
  source 1..22: mol_type = other DNA
ctggctttattcataaattctt

SEQ ID NO: 7639 - DNA, 22 bp, synthetic construct
  misc_feature 1..22: note = chemically synthesized
  source 1..22: mol_type = other DNA
tggctttattcataaattctta

SEQ ID NO: 7640 - DNA, 22 bp, synthetic construct
  misc_feature 1..22: note = chemically synthesized
  source 1..22: mol_type = other DNA
gctttattcataaattcttaag

SEQ ID NO: 7641 - DNA, 22 bp, synthetic construct
  misc_feature 1..22: note = chemically synthesized
  source 1..22: mol_type = other DNA
tattcataaattcttaaggtca

SEQ ID NO: 7642 - DNA, 22 bp, synthetic construct
  misc_feature 1..22: note = chemically synthesized
  source 1..22: mol_type = other DNA
attcataaattcttaaggtcaa

SEQ ID NO: 7643 - DNA, 22 bp, synthetic construct
  misc_feature 1..22: note = chemically synthesized
  source 1..22: mol_type = other DNA
ttcataaattcttaaggtcaac

SEQ ID NO: 7644 - DNA, 22 bp, synthetic construct
  misc_feature 1..22: note = chemically synthesized
  source 1..22: mol_type = other DNA
ataaattcttaaggtcaactac

SEQ ID NO: 7645 - DNA, 22 bp, synthetic construct
  misc_feature 1..22: note = chemically synthesized
  source 1..22: mol_type = other DNA
ttaaggtcaactacatttgaaa

SEQ ID NO: 7646 - DNA, 22 bp, synthetic construct
  misc_feature 1..22: note = chemically synthesized
  source 1..22: mol_type = other DNA
aaggtcaactacatttgaaaaa

SEQ ID NO: 7647 - DNA, 22 bp, synthetic construct
  misc_feature 1..22: note = chemically synthesized
  source 1..22: mol_type = other DNA
aggtcaactacatttgaaaaat

SEQ ID NO: 7648 - DNA, 22 bp, synthetic construct
  misc_feature 1..22: note = chemically synthesized
  source 1..22: mol_type = other DNA
catttgaaaaatcaaagacctg

SEQ ID NO: 7649 - DNA, 22 bp, synthetic construct
  misc_feature 1..22: note = chemically synthesized
  source 1..22: mol_type = other DNA
gaaaaatcaaagacctgcattt

SEQ ID NO: 7650 - DNA, 22 bp, synthetic construct
  misc_feature 1..22: note = chemically synthesized
  source 1..22: mol_type = other DNA
aaaaatcaaagacctgcatttt

SEQ ID NO: 7651 - DNA, 22 bp, synthetic construct
  misc_feature 1..22: note = chemically synthesized
  source 1..22: mol_type = other DNA
cattttaaattcttattcacct

SEQ ID NO: 7652 - DNA, 22 bp, synthetic construct
  misc_feature 1..22: note = chemically synthesized
  source 1..22: mol_type = other DNA
taaattcttattcacctctggc

SEQ ID NO: 7653 - DNA, 22 bp, synthetic construct
  misc_feature 1..22: note = chemically synthesized
  source 1..22: mol_type = other DNA
aaattcttattcacctctggca

SEQ ID NO: 7654 - DNA, 22 bp, synthetic construct
  misc_feature 1..22: note = chemically synthesized
  source 1..22: mol_type = other DNA
aattcttattcacctctggcaa

SEQ ID NO: 7655 - DNA, 22 bp, synthetic construct
  misc_feature 1..22: note = chemically synthesized
  source 1..22: mol_type = other DNA
ttattcacctctggcaaaacca

SEQ ID NO: 7656 - DNA, 22 bp, synthetic construct
  misc_feature 1..22: note = chemically synthesized
  source 1..22: mol_type = other DNA
attcacctctggcaaaaccatt

SEQ ID NO: 7657 - DNA, 22 bp, synthetic construct
  misc_feature 1..22: note = chemically synthesized
  source 1..22: mol_type = other DNA
ttcacctctggcaaaaccattc

SEQ ID NO: 7658 - DNA, 22 bp, synthetic construct
  misc_feature 1..22: note = chemically synthesized
  source 1..22: mol_type = other DNA
acctctggcaaaaccattcaca

SEQ ID NO: 7659 - DNA, 22 bp, synthetic construct
  misc_feature 1..22: note = chemically synthesized
  source 1..22: mol_type = other DNA
tggcaaaaccattcacaaacca

SEQ ID NO: 7660 - DNA, 22 bp, synthetic construct
  misc_feature 1..22: note = chemically synthesized
  source 1..22: mol_type = other DNA
gcaaaaccattcacaaaccatg

SEQ ID NO: 7661 - DNA, 22 bp, synthetic construct
  misc_feature 1..22: note = chemically synthesized
  source 1..22: mol_type = other DNA
acaaaccatggtagtaaagaga

SEQ ID NO: 7662 - DNA, 22 bp, synthetic construct
  misc_feature 1..22: note = chemically synthesized
  source 1..22: mol_type = other DNA
gtggccataggtaaatgtacca

SEQ ID NO: 7663 - DNA, 22 bp, synthetic construct
  misc_feature 1..22: note = chemically synthesized
  source 1..22: mol_type = other DNA
agggttttcctgaaggtaaagg

SEQ ID NO: 7664 - DNA, 22 bp, synthetic construct
  misc_feature 1..22: note = chemically synthesized
  source 1..22: mol_type = other DNA
tcctgaaggtaaaggaataaag

SEQ ID NO: 7665 - DNA, 22 bp, synthetic construct
  misc_feature 1..22: note = chemically synthesized
  source 1..22: mol_type = other DNA
cctgaaggtaaaggaataaaga

SEQ ID NO: 7666 - DNA, 22 bp, synthetic construct
  misc_feature 1..22: note = chemically synthesized
  source 1..22: mol_type = other DNA
ctgaaggtaaaggaataaagaa

SEQ ID NO: 7667 - DNA, 22 bp, synthetic construct
  misc_feature 1..22: note = chemically synthesized
  source 1..22: mol_type = other DNA
aaggtaaaggaataaagaatgg

SEQ ID NO: 7668 - DNA, 22 bp, synthetic construct
  misc_feature 1..22: note = chemically synthesized
  source 1..22: mol_type = other DNA
gaaatcacttgtagagaaaagc

SEQ ID NO: 7669 - DNA, 22 bp, synthetic construct
  misc_feature 1..22: note = chemically synthesized
  source 1..22: mol_type = other DNA
gtagagaaaagcccctgaaaat

SEQ ID NO: 7670 - DNA, 22 bp, synthetic construct
  misc_feature 1..22: note = chemically synthesized
  source 1..22: mol_type = other DNA
tagagaaaagcccctgaaaatt

SEQ ID NO: 7671 - DNA, 22 bp, synthetic construct
  misc_feature 1..22: note = chemically synthesized
  source 1..22: mol_type = other DNA
aaaatttgagaaaacaaacaag

SEQ ID NO: 7672 - DNA, 22 bp, synthetic construct
  misc_feature 1..22: note = chemically synthesized
  source 1..22: mol_type = other DNA
gagaaaacaaacaagaaactac

SEQ ID NO: 7673 - DNA, 22 bp, synthetic construct
  misc_feature 1..22: note = chemically synthesized
  source 1..22: mol_type = other DNA
agaaaacaaacaagaaactact

SEQ ID NO: 7674 - DNA, 22 bp, synthetic construct
  misc_feature 1..22: note = chemically synthesized
  source 1..22: mol_type = other DNA
cttaccagctatttgaattgct

SEQ ID NO: 7675 - DNA, 22 bp, synthetic construct
  misc_feature 1..22: note = chemically synthesized
  source 1..22: mol_type = other DNA
accagctatttgaattgctgga

SEQ ID NO: 7676 - DNA, 22 bp, synthetic construct
  misc_feature 1..22: note = chemically synthesized
  source 1..22: mol_type = other DNA
ccagctatttgaattgctggaa

SEQ ID NO: 7677 - DNA, 22 bp, synthetic construct
  misc_feature 1..22: note = chemically synthesized
  source 1..22: mol_type = other DNA
tttgaattgctggaatcacagg

SEQ ID NO: 7678 - DNA, 22 bp, synthetic construct
  misc_feature 1..22: note = chemically synthesized
  source 1..22: mol_type = other DNA
gaattgctggaatcacaggcca

SEQ ID NO: 7679 - DNA, 22 bp, synthetic construct
  misc_feature 1..22: note = chemically synthesized
  source 1..22: mol_type = other DNA
aattgctggaatcacaggccat

SEQ ID NO: 7680 - DNA, 22 bp, synthetic construct
  misc_feature 1..22: note = chemically synthesized
  source 1..22: mol_type = other DNA
ctggaatcacaggccattgctg

SEQ ID NO: 7681 - DNA, 22 bp, synthetic construct
  misc_feature 1..22: note = chemically synthesized
  source 1..22: mol_type = other DNA
gaatcacaggccattgctgagc

SEQ ID NO: 7682 - DNA, 22 bp, synthetic construct
  misc_feature 1..22: note = chemically synthesized
  source 1..22: mol_type = other DNA
ctgagctgcctgaactgggaac

SEQ ID NO: 7683 - DNA, 22 bp, synthetic construct
  misc_feature 1..22: note = chemically synthesized
  source 1..22: mol_type = other DNA
agctgcctgaactgggaacaca

SEQ ID NO: 7684 - DNA, 22 bp, synthetic construct
  misc_feature 1..22: note = chemically synthesized
  source 1..22: mol_type = other DNA
cctgaactgggaacacaacaga

SEQ ID NO: 7685 - DNA, 22 bp, synthetic construct
  misc_feature 1..22: note = chemically synthesized
  source 1..22: mol_type = other DNA
aactgggaacacaacagaagga

SEQ ID NO: 7686 - DNA, 22 bp, synthetic construct
  misc_feature 1..22: note = chemically synthesized
  source 1..22: mol_type = other DNA
ggaacacaacagaaggaaaaca

SEQ ID NO: 7687 - DNA, 22 bp, synthetic construct
  misc_feature 1..22: note = chemically synthesized
  source 1..22: mol_type = other DNA
tgataatcattgagtcaagtac

SEQ ID NO: 7688 - DNA, 22 bp, synthetic construct
  misc_feature 1..22: note = chemically synthesized
  source 1..22: mol_type = other DNA
ataatcattgagtcaagtacag

SEQ ID NO: 7689 - DNA, 22 bp, synthetic construct
  misc_feature 1..22: note = chemically synthesized
  source 1..22: mol_type = other DNA
agtcaagtacagcaggtgattg

SEQ ID NO: 7690 - DNA, 22 bp, synthetic construct
  misc_feature 1..22: note = chemically synthesized
  source 1..22: mol_type = other DNA
aggactgctgagaggtacaggc

SEQ ID NO: 7691 - DNA, 22 bp, synthetic construct
  misc_feature 1..22: note = chemically synthesized
  source 1..22: mol_type = other DNA
ctgagaggtacaggccaaaatt

SEQ ID NO: 7692 - DNA, 22 bp, synthetic construct
  misc_feature 1..22: note = chemically synthesized
  source 1..22: mol_type = other DNA
agaggtacaggccaaaattctt

SEQ ID NO: 7693 - DNA, 22 bp, synthetic construct
  misc_feature 1..22: note = chemically synthesized
  source 1..22: mol_type = other DNA
ttatgttgtattataataatgt

SEQ ID NO: 7694 - DNA, 22 bp, synthetic construct
  misc_feature 1..22: note = chemically synthesized
  source 1..22: mol_type = other DNA
atgttgtattataataatgtca

SEQ ID NO: 7695 - DNA, 22 bp, synthetic construct
  misc_feature 1..22: note = chemically synthesized
  source 1..22: mol_type = other DNA
tgttgtattataataatgtcat

SEQ ID NO: 7696 - DNA, 22 bp, synthetic construct
  misc_feature 1..22: note = chemically synthesized
  source 1..22: mol_type = other DNA
tattataataatgtcatcttat

SEQ ID NO: 7697 - DNA, 22 bp, synthetic construct
  misc_feature 1..22: note = chemically synthesized
  source 1..22: mol_type = other DNA
taataatgtcatcttataatac

SEQ ID NO: 7698 - DNA, 22 bp, synthetic construct
  misc_feature 1..22: note = chemically synthesized
  source 1..22: mol_type = other DNA
ataatactgtcagtattttata

SEQ ID NO: 7699 - DNA, 22 bp, synthetic construct
  misc_feature 1..22: note = chemically synthesized
  source 1..22: mol_type = other DNA
taatactgtcagtattttataa

SEQ ID NO: 7700 - DNA, 22 bp, synthetic construct
  misc_feature 1..22: note = chemically synthesized
  source 1..22: mol_type = other DNA
tcagtattttataaaacattct

SEQ ID NO: 7701 - DNA, 22 bp, synthetic construct
  misc_feature 1..22: note = chemically synthesized
  source 1..22: mol_type = other DNA
tataaaacattcttcacaaact

SEQ ID NO: 7702 - DNA, 22 bp, synthetic construct
  misc_feature 1..22: note = chemically synthesized
  source 1..22: mol_type = other DNA
ataaaacattcttcacaaactc

SEQ ID NO: 7703 - DNA, 22 bp, synthetic construct
  misc_feature 1..22: note = chemically synthesized
  source 1..22: mol_type = other DNA
taaaacattcttcacaaactca

SEQ ID NO: 7704 - DNA, 22 bp, synthetic construct
  misc_feature 1..22: note = chemically synthesized
  source 1..22: mol_type = other DNA
ttcacaaactcacacacattta

SEQ ID NO: 7705 - DNA, 22 bp, synthetic construct
  misc_feature 1..22: note = chemically synthesized
  source 1..22: mol_type = other DNA
cacaaactcacacacatttaaa

SEQ ID NO: 7706 - DNA, 22 bp, synthetic construct
  misc_feature 1..22: note = chemically synthesized
  source 1..22: mol_type = other DNA
acaaactcacacacatttaaaa

SEQ ID NO: 7707 - DNA, 22 bp, synthetic construct
  misc_feature 1..22: note = chemically synthesized
  source 1..22: mol_type = other DNA
acacacatttaaaaacaaaaca

SEQ ID NO: 7708 - DNA, 22 bp, synthetic construct
  misc_feature 1..22: note = chemically synthesized
  source 1..22: mol_type = other DNA
aaaaacaaaacactgtctctaa

SEQ ID NO: 7709 - DNA, 22 bp, synthetic construct
  misc_feature 1..22: note = chemically synthesized
  source 1..22: mol_type = other DNA
aaaacaaaacactgtctctaaa

SEQ ID NO: 7710 - DNA, 22 bp, synthetic construct
  misc_feature 1..22: note = chemically synthesized
  source 1..22: mol_type = other DNA
tctctaaaatccccaaattttt

SEQ ID NO: 7711 - DNA, 22 bp, synthetic construct
  misc_feature 1..22: note = chemically synthesized
  source 1..22: mol_type = other DNA
taaaatccccaaatttttcata

SEQ ID NO: 7712 - DNA, 22 bp, synthetic construct
  misc_feature 1..22: note = chemically synthesized
  source 1..22: mol_type = other DNA
aaatccccaaatttttcataaa

SEQ ID NO: 7713 - DNA, 22 bp, synthetic construct
  misc_feature 1..22: note = chemically synthesized
  source 1..22: mol_type = other DNA
ttcataaactcagttttaaact

SEQ ID NO: 7714 - DNA, 22 bp, synthetic construct
  misc_feature 1..22: note = chemically synthesized
  source 1..22: mol_type = other DNA
tcataaactcagttttaaacta

SEQ ID NO: 7715 - DNA, 22 bp, synthetic construct
  misc_feature 1..22: note = chemically synthesized
  source 1..22: mol_type = other DNA
cataaactcagttttaaactaa

SEQ ID NO: 7716 - DNA, 22 bp, synthetic construct
  misc_feature 1..22: note = chemically synthesized
  source 1..22: mol_type = other DNA
ataaactcagttttaaactaac

SEQ ID NO: 7717 - DNA, 22 bp, synthetic construct
  misc_feature 1..22: note = chemically synthesized
  source 1..22: mol_type = other DNA
agttttaaactaactttttttc

SEQ ID NO: 7718 - DNA, 22 bp, synthetic construct
  misc_feature 1..22: note = chemically synthesized
  source 1..22: mol_type = other DNA
taaactaactttttttcaaacc

SEQ ID NO: 7719 - DNA, 22 bp, synthetic construct
  misc_feature 1..22: note = chemically synthesized
  source 1..22: mol_type = other DNA
aaactaactttttttcaaacca

SEQ ID NO: 7720 - DNA, 22 bp, synthetic construct
  misc_feature 1..22: note = chemically synthesized
  source 1..22: mol_type = other DNA
aactaactttttttcaaaccac

SEQ ID NO: 7721 - DNA, 22 bp, synthetic construct
  misc_feature 1..22: note = chemically synthesized
  source 1..22: mol_type = other DNA
actttttttcaaaccacaatct

SEQ ID NO: 7722 - DNA, 22 bp, synthetic construct
  misc_feature 1..22: note = chemically synthesized
  source 1..22: mol_type = other DNA
tttttcaaaccacaatctgatt

SEQ ID NO: 7723 - DNA, 22 bp, synthetic construct
  misc_feature 1..22: note = chemically synthesized
  source 1..22: mol_type = other DNA
ttttcaaaccacaatctgattt

SEQ ID NO: 7724 - DNA, 22 bp, synthetic construct
  misc_feature 1..22: note = chemically synthesized
  source 1..22: mol_type = other DNA
tttcaaaccacaatctgattta

SEQ ID NO: 7725 - DNA, 22 bp, synthetic construct
  misc_feature 1..22: note = chemically synthesized
  source 1..22: mol_type = other DNA
ttcaaaccacaatctgatttaa

SEQ ID NO: 7726 - DNA, 22 bp, synthetic construct
  misc_feature 1..22: note = chemically synthesized
  source 1..22: mol_type = other DNA
tcaaaccacaatctgatttaac

SEQ ID NO: 7727 - DNA, 22 bp, synthetic construct
  misc_feature 1..22: note = chemically synthesized
  source 1..22: mol_type = other DNA
caaaccacaatctgatttaaca

SEQ ID NO: 7728 - DNA, 22 bp, synthetic construct
  misc_feature 1..22: note = chemically synthesized
  source 1..22: mol_type = other DNA
aaaccacaatctgatttaacaa

SEQ ID NO: 7729 - DNA, 22 bp, synthetic construct
  misc_feature 1..22: note = chemically synthesized
  source 1..22: mol_type = other DNA
atttaacaatgactatcattta

SEQ ID NO: 7730 - DNA, 22 bp, synthetic construct
  misc_feature 1..22: note = chemically synthesized
  source 1..22: mol_type = other DNA
aacaatgactatcatttaaata

SEQ ID NO: 7731 - DNA, 22 bp, synthetic construct
  misc_feature 1..22: note = chemically synthesized
  source 1..22: mol_type = other DNA
acaatgactatcatttaaatat

SEQ ID NO: 7732 - DNA, 22 bp, synthetic construct
  misc_feature 1..22: note = chemically synthesized
  source 1..22: mol_type = other DNA
tcatttaaatatttctgacttt

SEQ ID NO: 7733 - DNA, 22 bp, synthetic construct
  misc_feature 1..22: note = chemically synthesized
  source 1..22: mol_type = other DNA
aaatatttctgactttcaaatt

SEQ ID NO: 7734 - DNA, 22 bp, synthetic construct
  misc_feature 1..22: note = chemically synthesized
  source 1..22: mol_type = other DNA
aatatttctgactttcaaatta

SEQ ID NO: 7735 - DNA, 22 bp, synthetic construct
  misc_feature 1..22: note = chemically synthesized
  source 1..22: mol_type = other DNA
ctgactttcaaattaaagattt

SEQ ID NO: 7736 - DNA, 22 bp, synthetic construct
  misc_feature 1..22: note = chemically synthesized
  source 1..22: mol_type = other DNA
tgactttcaaattaaagatttt

SEQ ID NO: 7737 - DNA, 22 bp, synthetic construct
  misc_feature 1..22: note = chemically synthesized
  source 1..22: mol_type = other DNA
actttcaaattaaagattttca

SEQ ID NO: 7738 - DNA, 22 bp, synthetic construct
  misc_feature 1..22: note = chemically synthesized
  source 1..22: mol_type = other DNA
tcaaattaaagattttcacatg

SEQ ID NO: 7739 - DNA, 22 bp, synthetic construct
  misc_feature 1..22: note = chemically synthesized
  source 1..22: mol_type = other DNA
caaattaaagattttcacatgc

SEQ ID NO: 7740 - DNA, 22 bp, synthetic construct
  misc_feature 1..22: note = chemically synthesized
  source 1..22: mol_type = other DNA
aaattaaagattttcacatgca

SEQ ID NO: 7741 - DNA, 22 bp, synthetic construct
  misc_feature 1..22: note = chemically synthesized
  source 1..22: mol_type = other DNA
aagattttcacatgcaggctga

SEQ ID NO: 7742 - DNA, 22 bp, synthetic construct
  misc_feature 1..22: note = chemically synthesized
  source 1..22: mol_type = other DNA
tcacatgcaggctgatatttgt

SEQ ID NO: 7743 - DNA, 22 bp, synthetic construct
  misc_feature 1..22: note = chemically synthesized
  source 1..22: mol_type = other DNA
cacatgcaggctgatatttgta

SEQ ID NO: 7744 - DNA, 22 bp, synthetic construct
  misc_feature 1..22: note = chemically synthesized
  source 1..22: mol_type = other DNA
acatgcaggctgatatttgtaa

SEQ ID NO: 7745 - DNA, 22 bp, synthetic construct
  misc_feature 1..22: note = chemically synthesized
  source 1..22: mol_type = other DNA
atatttgtaattgtgattctct

SEQ ID NO: 7746 - DNA, 22 bp, synthetic construct
  misc_feature 1..22: note = chemically synthesized
  source 1..22: mol_type = other DNA
gtaattgtgattctctctgtag

SEQ ID NO: 7747 - DNA, 22 bp, synthetic construct
  misc_feature 1..22: note = chemically synthesized
  source 1..22: mol_type = other DNA
taattgtgattctctctgtagg

SEQ ID NO: 7748 - DNA, 22 bp, synthetic construct
  misc_feature 1..22: note = chemically synthesized
  source 1..22: mol_type = other DNA
tgattctctctgtaggctttgg

SEQ ID NO: 7749 - DNA, 22 bp, synthetic construct
  misc_feature 1..22: note = chemically synthesized
  source 1..22: mol_type = other DNA
tctctgtaggctttgggtataa

SEQ ID NO: 7750 - DNA, 22 bp, synthetic construct
  misc_feature 1..22: note = chemically synthesized
  source 1..22: mol_type = other DNA
tctgtaggctttgggtataatg

SEQ ID NO: 7751 - DNA, 22 bp, synthetic construct
  misc_feature 1..22: note = chemically synthesized
  source 1..22: mol_type = other DNA
tgtaggctttgggtataatgtg

SEQ ID NO: 7752 - DNA, 22 bp, synthetic construct
  misc_feature 1..22: note = chemically synthesized
  source 1..22: mol_type = other DNA
taggctttgggtataatgtgtt

SEQ ID NO: 7753 - DNA, 22 bp, synthetic construct
  misc_feature 1..22: note = chemically synthesized
  source 1..22: mol_type = other DNA
tgggtataatgtgttcttttcc

SEQ ID NO: 7754 - DNA, 22 bp, synthetic construct
  misc_feature 1..22: note = chemically synthesized
  source 1..22: mol_type = other DNA
gggtataatgtgttcttttcct

SEQ ID NO: 7755 - DNA, 22 bp, synthetic construct
  misc_feature 1..22: note = chemically synthesized
  source 1..22: mol_type = other DNA
ggtataatgtgttcttttcctt

SEQ ID NO: 7756 - DNA, 22 bp, synthetic construct
  misc_feature 1..22: note = chemically synthesized
  source 1..22: mol_type = other DNA
ttttccttttttgcatcagcga

SEQ ID NO: 7757 - DNA, 22 bp, synthetic construct
  misc_feature 1..22: note = chemically synthesized
  source 1..22: mol_type = other DNA
ttccttttttgcatcagcgatt

SEQ ID NO: 7758 - DNA, 22 bp, synthetic construct
  misc_feature 1..22: note = chemically synthesized
  source 1..22: mol_type = other DNA
tccttttttgcatcagcgatta

SEQ ID NO: 7759 - DNA, 22 bp, synthetic construct
  misc_feature 1..22: note = chemically synthesized
  source 1..22: mol_type = other DNA
ccttttttgcatcagcgattaa

SEQ ID NO: 7760 - DNA, 22 bp, synthetic construct
  misc_feature 1..22: note = chemically synthesized
  source 1..22: mol_type = other DNA
cttttttgcatcagcgattaac

SEQ ID NO: 7761 - DNA, 22 bp, synthetic construct
  misc_feature 1..22: note = chemically synthesized
  source 1..22: mol_type = other DNA
ttttgcatcagcgattaacttc

SEQ ID NO: 7762 - DNA, 22 bp, synthetic construct
  misc_feature 1..22: note = chemically synthesized
  source 1..22: mol_type = other DNA
tttgcatcagcgattaacttct

SEQ ID NO: 7763 - DNA, 22 bp, synthetic construct
  misc_feature 1..22: note = chemically synthesized
  source 1..22: mol_type = other DNA
ttgcatcagcgattaacttcta

SEQ ID NO: 7764 - DNA, 22 bp, synthetic construct
  misc_feature 1..22: note = chemically synthesized
  source 1..22: mol_type = other DNA
tgcatcagcgattaacttctac

SEQ ID NO: 7765 - DNA, 22 bp, synthetic construct
  misc_feature 1..22: note = chemically synthesized
  source 1..22: mol_type = other DNA
gcatcagcgattaacttctaca

SEQ ID NO: 7766 - DNA, 22 bp, synthetic construct
  misc_feature 1..22: note = chemically synthesized
  source 1..22: mol_type = other DNA
catcagcgattaacttctacac

SEQ ID NO: 7767 - DNA, 22 bp, synthetic construct
  misc_feature 1..22: note = chemically synthesized
  source 1..22: mol_type = other DNA
acttctacactctaacatgtag

SEQ ID NO: 7768 - DNA, 22 bp, synthetic construct
  misc_feature 1..22: note = chemically synthesized
  source 1..22: mol_type = other DNA
ctacactctaacatgtagaatg

SEQ ID NO: 7769 - DNA, 22 bp, synthetic construct
  misc_feature 1..22: note = chemically synthesized
  source 1..22: mol_type = other DNA
tacactctaacatgtagaatgt

SEQ ID NO: 7770 - DNA, 22 bp, synthetic construct
  misc_feature 1..22: note = chemically synthesized
  source 1..22: mol_type = other DNA
cactctaacatgtagaatgtta

SEQ ID NO: 7771 - DNA, 22 bp, synthetic construct
  misc_feature 1..22: note = chemically synthesized
  source 1..22: mol_type = other DNA
taacatgtagaatgttactaca

SEQ ID NO: 7772 - DNA, 22 bp, synthetic construct
  misc_feature 1..22: note = chemically synthesized
  source 1..22: mol_type = other DNA
acatgtagaatgttactacaat

SEQ ID NO: 7773 - DNA, 22 bp, synthetic construct
  misc_feature 1..22: note = chemically synthesized
  source 1..22: mol_type = other DNA
ctacaatattaaagtattttgt

SEQ ID NO: 7774 - DNA, 22 bp, synthetic construct
  misc_feature 1..22: note = chemically synthesized
  source 1..22: mol_type = other DNA
caatattaaagtattttgtatg

SEQ ID NO: 7775 - DNA, 22 bp, synthetic construct
  misc_feature 1..22: note = chemically synthesized
  source 1..22: mol_type = other DNA
aagtattttgtatgacaatttt

SEQ ID NO: 7776 - DNA, 22 bp, synthetic construct
  misc_feature 1..22: note = chemically synthesized
  source 1..22: mol_type = other DNA
tgtatgacaattttatttgaaa

SEQ ID NO: 7777 - DNA, 22 bp, synthetic construct
  misc_feature 1..22: note = chemically synthesized
  source 1..22: mol_type = other DNA
gtatgacaattttatttgaaag

SEQ ID NO: 7778 - DNA, 22 bp, synthetic construct
  misc_feature 1..22: note = chemically synthesized
  source 1..22: mol_type = other DNA
tatgacaattttatttgaaagc

SEQ ID NO: 7779 - DNA, 22 bp, synthetic construct
  misc_feature 1..22: note = chemically synthesized
  source 1..22: mol_type = other DNA
tatttgaaagcctaggatgcgt

SEQ ID NO: 7780 - DNA, 22 bp, synthetic construct
  misc_feature 1..22: note = chemically synthesized
  source 1..22: mol_type = other DNA
atttgaaagcctaggatgcgtt

SEQ ID NO: 7781 - DNA, 22 bp, synthetic construct
  misc_feature 1..22: note = chemically synthesized
  source 1..22: mol_type = other DNA
tttgaaagcctaggatgcgttg

SEQ ID NO: 7782 - DNA, 22 bp, synthetic construct
  misc_feature 1..22: note = chemically synthesized
  source 1..22: mol_type = other DNA
gaaagcctaggatgcgttgaca

SEQ ID NO: 7783 - DNA, 22 bp, synthetic construct
  misc_feature 1..22: note = chemically synthesized
  source 1..22: mol_type = other DNA
aaagcctaggatgcgttgacat

SEQ ID NO: 7784 - DNA, 22 bp, synthetic construct
  misc_feature 1..22: note = chemically synthesized
  source 1..22: mol_type = other DNA
ggatgcgttgacatcctgcatg

SEQ ID NO: 7785 - DNA, 22 bp, synthetic construct
  misc_feature 1..22: note = chemically synthesized
  source 1..22: mol_type = other DNA
acatcctgcatgcatttattac

SEQ ID NO: 7786 - DNA, 22 bp, synthetic construct
  misc_feature 1..22: note = chemically synthesized
  source 1..22: mol_type = other DNA
catgcatttattacttgatatg

SEQ ID NO: 7787 - DNA, 22 bp, synthetic construct
  misc_feature 1..22: note = chemically synthesized
  source 1..22: mol_type = other DNA
attacttgatatgcatgcattc

SEQ ID NO: 7788 - DNA, 22 bp, synthetic construct
  misc_feature 1..22: note = chemically synthesized
  source 1..22: mol_type = other DNA
ttacttgatatgcatgcattct

SEQ ID NO: 7789 - DNA, 22 bp, synthetic construct
  misc_feature 1..22: note = chemically synthesized
  source 1..22: mol_type = other DNA
cttgatatgcatgcattctggt

SEQ ID NO: 7790 - DNA, 22 bp, synthetic construct
  misc_feature 1..22: note = chemically synthesized
  source 1..22: mol_type = other DNA
gatatgcatgcattctggtatc

SEQ ID NO: 7791 - DNA, 22 bp, synthetic construct
  misc_feature 1..22: note = chemically synthesized
  source 1..22: mol_type = other DNA
atatgcatgcattctggtatct

SEQ ID NO: 7792 - DNA, 22 bp, synthetic construct
  misc_feature 1..22: note = chemically synthesized
  source 1..22: mol_type = other DNA
tggtatctcaagcattctattt

SEQ ID NO: 7793 - DNA, 22 bp, synthetic construct
  misc_feature 1..22: note = chemically synthesized
  source 1..22: mol_type = other DNA
gtatctcaagcattctatttct

SEQ ID NO: 7794 - DNA, 22 bp, synthetic construct
  misc_feature 1..22: note = chemically synthesized
  source 1..22: mol_type = other DNA
aagcattctatttctgagtaat

SEQ ID NO: 7795 - DNA, 22 bp, synthetic construct
  misc_feature 1..22: note = chemically synthesized
  source 1..22: mol_type = other DNA
aacaattactcagaaatagaat

SEQ ID NO: 7796 - DNA, 22 bp, synthetic construct
  misc_feature 1..22: note = chemically synthesized
  source 1..22: mol_type = other DNA
ctcagaaatagaatgcttgaga

SEQ ID NO: 7797 - DNA, 22 bp, synthetic construct
  misc_feature 1..22: note = chemically synthesized
  source 1..22: mol_type = other DNA
agaaatagaatgcttgagatac

SEQ ID NO: 7798 - DNA, 22 bp, synthetic construct
  misc_feature 1..22: note = chemically synthesized
  source 1..22: mol_type = other DNA
gagataccagaatgcatgcata

SEQ ID NO: 7799 - DNA, 22 bp, synthetic construct
  misc_feature 1..22: note = chemically synthesized
  source 1..22: mol_type = other DNA
agataccagaatgcatgcatat

SEQ ID NO: 7800 - DNA, 22 bp, synthetic construct
  misc_feature 1..22: note = chemically synthesized
  source 1..22: mol_type = other DNA
ggctttcaaataaaattgtcat

SEQ ID NO: 7801 - DNA, 22 bp, synthetic construct
  misc_feature 1..22: note = chemically synthesized
  source 1..22: mol_type = other DNA
tcaaataaaattgtcatacaaa

SEQ ID NO: 7802 - DNA, 22 bp, synthetic construct
  misc_feature 1..22: note = chemically synthesized
  source 1..22: mol_type = other DNA
caaataaaattgtcatacaaaa

SEQ ID NO: 7803 - DNA, 22 bp, synthetic construct
  misc_feature 1..22: note = chemically synthesized
  source 1..22: mol_type = other DNA
aaataaaattgtcatacaaaat

SEQ ID NO: 7804 - DNA, 22 bp, synthetic construct
  misc_feature 1..22: note = chemically synthesized
  source 1..22: mol_type = other DNA
tcatacaaaatactttaatatt

SEQ ID NO: 7805 - DNA, 22 bp, synthetic construct
  misc_feature 1..22: note = chemically synthesized
  source 1..22: mol_type = other DNA
taatattgtagtaacattctac

SEQ ID NO: 7806 - DNA, 22 bp, synthetic construct
  misc_feature 1..22: note = chemically synthesized
  source 1..22: mol_type = other DNA
aatattgtagtaacattctaca

SEQ ID NO: 7807 - DNA, 22 bp, synthetic construct
  misc_feature 1..22: note = chemically synthesized
  source 1..22: mol_type = other DNA
atattgtagtaacattctacat

SEQ ID NO: 7808 - DNA, 22 bp, synthetic construct
  misc_feature 1..22: note = chemically synthesized
  source 1..22: mol_type = other DNA
tagtaacattctacatgttaga

SEQ ID NO: 7809 - DNA, 22 bp, synthetic construct
  misc_feature 1..22: note = chemically synthesized
  source 1..22: mol_type = other DNA
tacatgttagagtgtagaagtt

SEQ ID NO: 7810 - DNA, 22 bp, synthetic construct
  misc_feature 1..22: note = chemically synthesized
  source 1..22: mol_type = other DNA
catgttagagtgtagaagttaa

SEQ ID NO: 7811 - DNA, 22 bp, synthetic construct
  misc_feature 1..22: note = chemically synthesized
  source 1..22: mol_type = other DNA
gagtgtagaagttaatcgctga

SEQ ID NO: 7812 - DNA, 22 bp, synthetic construct
  misc_feature 1..22: note = chemically synthesized
  source 1..22: mol_type = other DNA
atcgctgatgcaaaaaaggaaa

SEQ ID NO: 7813 - DNA, 22 bp, synthetic construct
  misc_feature 1..22: note = chemically synthesized
  source 1..22: mol_type = other DNA
atgcaaaaaaggaaaagaacac

SEQ ID NO: 7814 - DNA, 22 bp, synthetic construct
  misc_feature 1..22: note = chemically synthesized
  source 1..22: mol_type = other DNA
tacccaaagcctacagagagaa

SEQ ID NO: 7815 - DNA, 22 bp, synthetic construct
  misc_feature 1..22: note = chemically synthesized
  source 1..22: mol_type = other DNA
cagagagaatcacaattacaaa

SEQ ID NO: 7816 - DNA, 22 bp, synthetic construct
  misc_feature 1..22: note = chemically synthesized
  source 1..22: mol_type = other DNA
caaatatcagcctgcatgtgaa

SEQ ID NO: 7817 - DNA, 22 bp, synthetic construct
  misc_feature 1..22: note = chemically synthesized
  source 1..22: mol_type = other DNA
catgtgaaaatctttaatttga

SEQ ID NO: 7818 - DNA, 22 bp, synthetic construct
  misc_feature 1..22: note = chemically synthesized
  source 1..22: mol_type = other DNA
taatttgaaagtcagaaatatt

SEQ ID NO: 7819 - DNA, 22 bp, synthetic construct
  misc_feature 1..22: note = chemically synthesized
  source 1..22: mol_type = other DNA
aatttgaaagtcagaaatattt

SEQ ID NO: 7820 - DNA, 22 bp, synthetic construct
  misc_feature 1..22: note = chemically synthesized
  source 1..22: mol_type = other DNA
atttgaaagtcagaaatattta

SEQ ID NO: 7821 - DNA, 22 bp, synthetic construct
  misc_feature 1..22: note = chemically synthesized
  source 1..22: mol_type = other DNA
gaaagtcagaaatatttaaatg

SEQ ID NO: 7822 - DNA, 22 bp, synthetic construct
  misc_feature 1..22: note = chemically synthesized
  source 1..22: mol_type = other DNA
aaagtcagaaatatttaaatga

SEQ ID NO: 7823 - DNA, 22 bp, synthetic construct
  misc_feature 1..22: note = chemically synthesized
  source 1..22: mol_type = other DNA
aaatgatagtcattgttaaatc

SEQ ID NO: 7824 - DNA, 22 bp, synthetic construct
  misc_feature 1..22: note = chemically synthesized
  source 1..22: mol_type = other DNA
aatgatagtcattgttaaatca

SEQ ID NO: 7825 - DNA, 22 bp, synthetic construct
  misc_feature 1..22: note = chemically synthesized
  source 1..22: mol_type = other DNA
ttaaatcagattgtggtttgaa

SEQ ID NO: 7826 - DNA, 22 bp, synthetic construct
  misc_feature 1..22: note = chemically synthesized
  source 1..22: mol_type = other DNA
aatcagattgtggtttgaaaaa

SEQ ID NO: 7827 - DNA, 22 bp, synthetic construct
  misc_feature 1..22: note = chemically synthesized
  source 1..22: mol_type = other DNA
tggtttgaaaaaaagttagttt

SEQ ID NO: 7828 - DNA, 22 bp, synthetic construct
  misc_feature 1..22: note = chemically synthesized
  source 1..22: mol_type = other DNA
gaaaaaaagttagtttaaaact

SEQ ID NO: 7829 - DNA, 22 bp, synthetic construct
  misc_feature 1..22: note = chemically synthesized
  source 1..22: mol_type = other DNA
aaaaaaagttagtttaaaactg

SEQ ID NO: 7830 - DNA, 22 bp, synthetic construct
  misc_feature 1..22: note = chemically synthesized
  source 1..22: mol_type = other DNA
gtttaaaactgagtttatgaaa

SEQ ID NO: 7831 - DNA, 22 bp, synthetic construct
  misc_feature 1..22: note = chemically synthesized
  source 1..22: mol_type = other DNA
aaaactgagtttatgaaaaatt

SEQ ID NO: 7832 - DNA, 22 bp, synthetic construct
  misc_feature 1..22: note = chemically synthesized
  source 1..22: mol_type = other DNA
aaactgagtttatgaaaaattt

SEQ ID NO: 7833 - DNA, 22 bp, synthetic construct
  misc_feature 1..22: note = chemically synthesized
  source 1..22: mol_type = other DNA
agtttatgaaaaatttggggat

SEQ ID NO: 7834 - DNA, 22 bp, synthetic construct
  misc_feature 1..22: note = chemically synthesized
  source 1..22: mol_type = other DNA
atgaaaaatttggggattttag

SEQ ID NO: 7835 - DNA, 22 bp, synthetic construct
  misc_feature 1..22: note = chemically synthesized
  source 1..22: mol_type = other DNA
tgaaaaatttggggattttaga

SEQ ID NO: 7836 - DNA, 22 bp, synthetic construct
  misc_feature 1..22: note = chemically synthesized
  source 1..22: mol_type = other DNA
ggggattttagagacagtgttt

SEQ ID NO: 7837 - DNA, 22 bp, synthetic construct
  misc_feature 1..22: note = chemically synthesized
  source 1..22: mol_type = other DNA
gggattttagagacagtgtttt

SEQ ID NO: 7838 - DNA, 22 bp, synthetic construct
  misc_feature 1..22: note = chemically synthesized
  source 1..22: mol_type = other DNA
tagagacagtgttttgttttta

SEQ ID NO: 7839 - DNA, 22 bp, synthetic construct
  misc_feature 1..22: note = chemically synthesized
  source 1..22: mol_type = other DNA
agagacagtgttttgtttttaa

SEQ ID NO: 7840 - DNA, 22 bp, synthetic construct
  misc_feature 1..22: note = chemically synthesized
  source 1..22: mol_type = other DNA
gagacagtgttttgtttttaaa

SEQ ID NO: 7841 - DNA, 22 bp, synthetic construct
  misc_feature 1..22: note = chemically synthesized
  source 1..22: mol_type = other DNA
tgtttttaaatgtgtgtgagtt

SEQ ID NO: 7842 - DNA, 22 bp, synthetic construct
  misc_feature 1..22: note = chemically synthesized
  source 1..22: mol_type = other DNA
gtttttaaatgtgtgtgagttt

SEQ ID NO: 7843 - DNA, 22 bp, synthetic construct
  misc_feature 1..22: note = chemically synthesized
  source 1..22: mol_type = other DNA
tttttaaatgtgtgtgagtttg

SEQ ID NO: 7844 - DNA, 22 bp, synthetic construct
  misc_feature 1..22: note = chemically synthesized
  source 1..22: mol_type = other DNA
ttaaatgtgtgtgagtttgtga

SEQ ID NO: 7845 - DNA, 22 bp, synthetic construct
  misc_feature 1..22: note = chemically synthesized
  source 1..22: mol_type = other DNA
taaatgtgtgtgagtttgtgaa

SEQ ID NO: 7846 - DNA, 22 bp, synthetic construct
  misc_feature 1..22: note = chemically synthesized
  source 1..22: mol_type = other DNA
aaatgtgtgtgagtttgtgaag

SEQ ID NO: 7847 - DNA, 22 bp, synthetic construct
  misc_feature 1..22: note = chemically synthesized
  source 1..22: mol_type = other DNA
aatgtgtgtgagtttgtgaaga

SEQ ID NO: 7848 - DNA, 22 bp, synthetic construct
  misc_feature 1..22: note = chemically synthesized
  source 1..22: mol_type = other DNA
gtgaagaatgttttataaaata

SEQ ID NO: 7849 - DNA, 22 bp, synthetic construct
  misc_feature 1..22: note = chemically synthesized
  source 1..22: mol_type = other DNA
tgaagaatgttttataaaatac

SEQ ID NO: 7850 - DNA, 22 bp, synthetic construct
  misc_feature 1..22: note = chemically synthesized
  source 1..22: mol_type = other DNA
tataaaatactgacagtattat

SEQ ID NO: 7851 - DNA, 22 bp, synthetic construct
  misc_feature 1..22: note = chemically synthesized
  source 1..22: mol_type = other DNA
ataaaatactgacagtattata

SEQ ID NO: 7852 - DNA, 22 bp, synthetic construct
  misc_feature 1..22: note = chemically synthesized
  source 1..22: mol_type = other DNA
taaaatactgacagtattataa

SEQ ID NO: 7853 - DNA, 22 bp, synthetic construct
  misc_feature 1..22: note = chemically synthesized
  source 1..22: mol_type = other DNA
acagtattataagatgacatta

SEQ ID NO: 7854 - DNA, 22 bp, synthetic construct
  misc_feature 1..22: note = chemically synthesized
  source 1..22: mol_type = other DNA
taagatgacattattataatac

SEQ ID NO: 7855 - DNA, 22 bp, synthetic construct
  misc_feature 1..22: note = chemically synthesized
  source 1..22: mol_type = other DNA
ttataatacaacataagaattt

SEQ ID NO: 7856 - DNA, 22 bp, synthetic construct
  misc_feature 1..22: note = chemically synthesized
  source 1..22: mol_type = other DNA
taatacaacataagaattttgg

SEQ ID NO: 7857 - DNA, 22 bp, synthetic construct
  misc_feature 1..22: note = chemically synthesized
  source 1..22: mol_type = other DNA
tggcctgtacctctcagcagtc

SEQ ID NO: 7858 - DNA, 22 bp, synthetic construct
  misc_feature 1..22: note = chemically synthesized
  source 1..22: mol_type = other DNA
ggcctgtacctctcagcagtcc

SEQ ID NO: 7859 - DNA, 22 bp, synthetic construct
  misc_feature 1..22: note = chemically synthesized
  source 1..22: mol_type = other DNA
gcctgtacctctcagcagtcct

SEQ ID NO: 7860 - DNA, 22 bp, synthetic construct
  misc_feature 1..22: note = chemically synthesized
  source 1..22: mol_type = other DNA
tacctctcagcagtcctcaatc

SEQ ID NO: 7861 - DNA, 22 bp, synthetic construct
  misc_feature 1..22: note = chemically synthesized
  source 1..22: mol_type = other DNA
tcagcagtcctcaatcacctgc

SEQ ID NO: 7862 - DNA, 22 bp, synthetic construct
  misc_feature 1..22: note = chemically synthesized
  source 1..22: mol_type = other DNA
agcagtcctcaatcacctgctg

SEQ ID NO: 7863 - DNA, 22 bp, synthetic construct
  misc_feature 1..22: note = chemically synthesized
  source 1..22: mol_type = other DNA
aatcacctgctgtacttgactc

SEQ ID NO: 7864 - DNA, 22 bp, synthetic construct
  misc_feature 1..22: note = chemically synthesized
  source 1..22: mol_type = other DNA
ctgtacttgactcaatgattat

SEQ ID NO: 7865 - DNA, 22 bp, synthetic construct
  misc_feature 1..22: note = chemically synthesized
  source 1..22: mol_type = other DNA
tacttgactcaatgattatcag

SEQ ID NO: 7866 - DNA, 22 bp, synthetic construct
  misc_feature 1..22: note = chemically synthesized
  source 1..22: mol_type = other DNA
gactcaatgattatcagagtgg

SEQ ID NO: 7867 - DNA, 22 bp, synthetic construct
  misc_feature 1..22: note = chemically synthesized
  source 1..22: mol_type = other DNA
actcaatgattatcagagtggt

SEQ ID NO: 7868 - DNA, 22 bp, synthetic construct
  misc_feature 1..22: note = chemically synthesized
  source 1..22: mol_type = other DNA
aatgattatcagagtggtttgt

SEQ ID NO: 7869 - DNA, 22 bp, synthetic construct
  misc_feature 1..22: note = chemically synthesized
  source 1..22: mol_type = other DNA
tcagagtggtttgttttccttc

SEQ ID NO: 7870 - DNA, 22 bp, synthetic construct
  misc_feature 1..22: note = chemically synthesized
  source 1..22: mol_type = other DNA
gttttccttctgttgtgttccc

SEQ ID NO: 7871 - DNA, 22 bp, synthetic construct
  misc_feature 1..22: note = chemically synthesized
  source 1..22: mol_type = other DNA
ttttccttctgttgtgttccca

SEQ ID NO: 7872 - DNA, 22 bp, synthetic construct
  misc_feature 1..22: note = chemically synthesized
  source 1..22: mol_type = other DNA
tccttctgttgtgttcccagtt

SEQ ID NO: 7873 - DNA, 22 bp, synthetic construct
  misc_feature 1..22: note = chemically synthesized
  source 1..22: mol_type = other DNA
ccttctgttgtgttcccagttc

SEQ ID NO: 7874 - DNA, 22 bp, synthetic construct
  misc_feature 1..22: note = chemically synthesized
  source 1..22: mol_type = other DNA
cttctgttgtgttcccagttca

SEQ ID NO: 7875 - DNA, 22 bp, synthetic construct
  misc_feature 1..22: note = chemically synthesized
  source 1..22: mol_type = other DNA
ctgttgtgttcccagttcaggc

SEQ ID NO: 7876 - DNA, 22 bp, synthetic construct
  misc_feature 1..22: note = chemically synthesized
  source 1..22: mol_type = other DNA
tgttgtgttcccagttcaggca

SEQ ID NO: 7877 - DNA, 22 bp, synthetic construct
  misc_feature 1..22: note = chemically synthesized
  source 1..22: mol_type = other DNA
ttgtgttcccagttcaggcagc

SEQ ID NO: 7878 - DNA, 22 bp, synthetic construct
  misc_feature 1..22: note = chemically synthesized
  source 1..22: mol_type = other DNA
tgttcccagttcaggcagctca

SEQ ID NO: 7879 - DNA, 22 bp, synthetic construct
  misc_feature 1..22: note = chemically synthesized
  source 1..22: mol_type = other DNA
ccagttcaggcagctcagcaat

SEQ ID NO: 7880 - DNA, 22 bp, synthetic construct
  misc_feature 1..22: note = chemically synthesized
  source 1..22: mol_type = other DNA
aggcagctcagcaatggcctgt

SEQ ID NO: 7881 - DNA, 22 bp, synthetic construct
  misc_feature 1..22: note = chemically synthesized
  source 1..22: mol_type = other DNA
agcaatggcctgtgattccagc

SEQ ID NO: 7882 - DNA, 22 bp, synthetic construct
  misc_feature 1..22: note = chemically synthesized
  source 1..22: mol_type = other DNA
tgattccagcaattcaaatagc

SEQ ID NO: 7883 - DNA, 22 bp, synthetic construct
  misc_feature 1..22: note = chemically synthesized
  source 1..22: mol_type = other DNA
cagcaattcaaatagctggtaa

SEQ ID NO: 7884 - DNA, 22 bp, synthetic construct
  misc_feature 1..22: note = chemically synthesized
  source 1..22: mol_type = other DNA
aaatagctggtaagtagtttct

SEQ ID NO: 7885 - DNA, 22 bp, synthetic construct
  misc_feature 1..22: note = chemically synthesized
  source 1..22: mol_type = other DNA
gtaagtagtttcttgtttgttt

SEQ ID NO: 7886 - DNA, 22 bp, synthetic construct
  misc_feature 1..22: note = chemically synthesized
  source 1..22: mol_type = other DNA
cttgtttgttttctcaaatttt

SEQ ID NO: 7887 - DNA, 22 bp, synthetic construct
  misc_feature 1..22: note = chemically synthesized
  source 1..22: mol_type = other DNA
ttgtttgttttctcaaattttc

SEQ ID NO: 7888 - DNA, 22 bp, synthetic construct
  misc_feature 1..22: note = chemically synthesized
  source 1..22: mol_type = other DNA
gtttgttttctcaaattttcag

SEQ ID NO: 7889 - DNA, 22 bp, synthetic construct
  misc_feature 1..22: note = chemically synthesized
  source 1..22: mol_type = other DNA
tttgttttctcaaattttcagg

SEQ ID NO: 7890 - DNA, 22 bp, synthetic construct
  misc_feature 1..22: note = chemically synthesized
  source 1..22: mol_type = other DNA
gttttctcaaattttcaggggc

SEQ ID NO: 7891 - DNA, 22 bp, synthetic construct
  misc_feature 1..22: note = chemically synthesized
  source 1..22: mol_type = other DNA
ttttctcaaattttcaggggct

SEQ ID NO: 7892 - DNA, 22 bp, synthetic construct
  misc_feature 1..22: note = chemically synthesized
  source 1..22: mol_type = other DNA
tctcaaattttcaggggctttt

SEQ ID NO: 7893 - DNA, 22 bp, synthetic construct
  misc_feature 1..22: note = chemically synthesized
  source 1..22: mol_type = other DNA
ctcaaattttcaggggcttttc

SEQ ID NO: 7894 - DNA, 22 bp, synthetic construct
  misc_feature 1..22: note = chemically synthesized
  source 1..22: mol_type = other DNA
tcaaattttcaggggcttttct

SEQ ID NO: 7895 - DNA, 22 bp, synthetic construct
  misc_feature 1..22: note = chemically synthesized
  source 1..22: mol_type = other DNA
aaattttcaggggcttttctct

SEQ ID NO: 7896 - DNA, 22 bp, synthetic construct
  misc_feature 1..22: note = chemically synthesized
  source 1..22: mol_type = other DNA
tcaggggcttttctctacaagt

SEQ ID NO: 7897 - DNA, 22 bp, synthetic construct
  misc_feature 1..22: note = chemically synthesized
  source 1..22: mol_type = other DNA
caggggcttttctctacaagtg

SEQ ID NO: 7898 - DNA, 22 bp, synthetic construct
  misc_feature 1..22: note = chemically synthesized
  source 1..22: mol_type = other DNA
aggggcttttctctacaagtga

SEQ ID NO: 7899 - DNA, 22 bp, synthetic construct
  misc_feature 1..22: note = chemically synthesized
  source 1..22: mol_type = other DNA
ttctctacaagtgatttccagt

SEQ ID NO: 7900 - DNA, 22 bp, synthetic construct
  misc_feature 1..22: note = chemically synthesized
  source 1..22: mol_type = other DNA
tctctacaagtgatttccagtg

SEQ ID NO: 7901 - DNA, 22 bp, synthetic construct
  misc_feature 1..22: note = chemically synthesized
  source 1..22: mol_type = other DNA
ctctacaagtgatttccagtgc

SEQ ID NO: 7902 - DNA, 22 bp, synthetic construct
  misc_feature 1..22: note = chemically synthesized
  source 1..22: mol_type = other DNA
tctacaagtgatttccagtgca

SEQ ID NO: 7903 - DNA, 22 bp, synthetic construct
  misc_feature 1..22: note = chemically synthesized
  source 1..22: mol_type = other DNA
tacaagtgatttccagtgcacg

SEQ ID NO: 7904 - DNA, 22 bp, synthetic construct
  misc_feature 1..22: note = chemically synthesized
  source 1..22: mol_type = other DNA
caagtgatttccagtgcacgcc

SEQ ID NO: 7905 - DNA, 22 bp, synthetic construct
  misc_feature 1..22: note = chemically synthesized
  source 1..22: mol_type = other DNA
ccagtgcacgcccctccaccca

SEQ ID NO: 7906 - DNA, 22 bp, synthetic construct
  misc_feature 1..22: note = chemically synthesized
  source 1..22: mol_type = other DNA
cagtgcacgcccctccacccat

SEQ ID NO: 7907 - DNA, 22 bp, synthetic construct
  misc_feature 1..22: note = chemically synthesized
  source 1..22: mol_type = other DNA
cacccattctttattcctttac

SEQ ID NO: 7908 - DNA, 22 bp, synthetic construct
  misc_feature 1..22: note = chemically synthesized
  source 1..22: mol_type = other DNA
tttattcctttaccttcaggaa

SEQ ID NO: 7909 - DNA, 22 bp, synthetic construct
  misc_feature 1..22: note = chemically synthesized
  source 1..22: mol_type = other DNA
tattcctttaccttcaggaaaa

SEQ ID NO: 7910 - DNA, 22 bp, synthetic construct
  misc_feature 1..22: note = chemically synthesized
  source 1..22: mol_type = other DNA
attcctttaccttcaggaaaac

SEQ ID NO: 7911 - DNA, 22 bp, synthetic construct
  misc_feature 1..22: note = chemically synthesized
  source 1..22: mol_type = other DNA
ttcctttaccttcaggaaaacc

SEQ ID NO: 7912 - DNA, 22 bp, synthetic construct
  misc_feature 1..22: note = chemically synthesized
  source 1..22: mol_type = other DNA
ctttaccttcaggaaaaccctc

SEQ ID NO: 7913 - DNA, 22 bp, synthetic construct
  misc_feature 1..22: note = chemically synthesized
  source 1..22: mol_type = other DNA
taccttcaggaaaaccctcagc

SEQ ID NO: 7914 - DNA, 22 bp, synthetic construct
  misc_feature 1..22: note = chemically synthesized
  source 1..22: mol_type = other DNA
accttcaggaaaaccctcagcg

SEQ ID NO: 7915 - DNA, 22 bp, synthetic construct
  misc_feature 1..22: note = chemically synthesized
  source 1..22: mol_type = other DNA
ccttcaggaaaaccctcagcgc

SEQ ID NO: 7916 - DNA, 22 bp, synthetic construct
  misc_feature 1..22: note = chemically synthesized
  source 1..22: mol_type = other DNA
caggaaaaccctcagcgctgca

SEQ ID NO: 7917 - DNA, 22 bp, synthetic construct
  misc_feature 1..22: note = chemically synthesized
  source 1..22: mol_type = other DNA
aggaaaaccctcagcgctgcat

SEQ ID NO: 7918 - DNA, 22 bp, synthetic construct
  misc_feature 1..22: note = chemically synthesized
  source 1..22: mol_type = other DNA
agcgctgcatctctggtcaccg

SEQ ID NO: 7919 - DNA, 22 bp, synthetic construct
  misc_feature 1..22: note = chemically synthesized
  source 1..22: mol_type = other DNA
catctctggtcaccggaccacc

SEQ ID NO: 7920 - DNA, 22 bp, synthetic construct
  misc_feature 1..22: note = chemically synthesized
  source 1..22: mol_type = other DNA
tggtcaccggaccaccgtggta

SEQ ID NO: 7921 - DNA, 22 bp, synthetic construct
  misc_feature 1..22: note = chemically synthesized
  source 1..22: mol_type = other DNA
gtcaccggaccaccgtggtaca

SEQ ID NO: 7922 - DNA, 22 bp, synthetic construct
  misc_feature 1..22: note = chemically synthesized
  source 1..22: mol_type = other DNA
acctatggccaccaggtgtcac

SEQ ID NO: 7923 - DNA, 22 bp, synthetic construct
  misc_feature 1..22: note = chemically synthesized
  source 1..22: mol_type = other DNA
cctatggccaccaggtgtcacc

SEQ ID NO: 7924 - DNA, 22 bp, synthetic construct
  misc_feature 1..22: note = chemically synthesized
  source 1..22: mol_type = other DNA
tggccaccaggtgtcacccttc

SEQ ID NO: 7925 - DNA, 22 bp, synthetic construct
  misc_feature 1..22: note = chemically synthesized
  source 1..22: mol_type = other DNA
ctctttactaccatggtttgtg

SEQ ID NO: 7926 - DNA, 22 bp, synthetic construct
  misc_feature 1..22: note = chemically synthesized
  source 1..22: mol_type = other DNA
tctttactaccatggtttgtga

SEQ ID NO: 7927 - DNA, 22 bp, synthetic construct
  misc_feature 1..22: note = chemically synthesized
  source 1..22: mol_type = other DNA
tttactaccatggtttgtgaat

SEQ ID NO: 7928 - DNA, 22 bp, synthetic construct
  misc_feature 1..22: note = chemically synthesized
  source 1..22: mol_type = other DNA
tactaccatggtttgtgaatgg

SEQ ID NO: 7929 - DNA, 22 bp, synthetic construct
  misc_feature 1..22: note = chemically synthesized
  source 1..22: mol_type = other DNA
actaccatggtttgtgaatggt

SEQ ID NO: 7930 - DNA, 22 bp, synthetic construct
  misc_feature 1..22: note = chemically synthesized
  source 1..22: mol_type = other DNA
ctaccatggtttgtgaatggtt

SEQ ID NO: 7931 - DNA, 22 bp, synthetic construct
  misc_feature 1..22: note = chemically synthesized
  source 1..22: mol_type = other DNA
ccatggtttgtgaatggttttg

SEQ ID NO: 7932 - DNA, 22 bp, synthetic construct
  misc_feature 1..22: note = chemically synthesized
  source 1..22: mol_type = other DNA
gtgaatggttttgccagaggtg

SEQ ID NO: 7933 - DNA, 22 bp, synthetic construct
  misc_feature 1..22: note = chemically synthesized
  source 1..22: mol_type = other DNA
tgaatggttttgccagaggtga

SEQ ID NO: 7934 - DNA, 22 bp, synthetic construct
  misc_feature 1..22: note = chemically synthesized
  source 1..22: mol_type = other DNA
tgccagaggtgaataagaattt

SEQ ID NO: 7935 - DNA, 22 bp, synthetic construct
  misc_feature 1..22: note = chemically synthesized
  source 1..22: mol_type = other DNA
gccagaggtgaataagaattta

SEQ ID NO: 7936 - DNA, 22 bp, synthetic construct
  misc_feature 1..22: note = chemically synthesized
  source 1..22: mol_type = other DNA
ccagaggtgaataagaatttaa

SEQ ID NO: 7937 - DNA, 22 bp, synthetic construct
  misc_feature 1..22: note = chemically synthesized
  source 1..22: mol_type = other DNA
aaaatgcaggtctttgattttt

SEQ ID NO: 7938 - DNA, 22 bp, synthetic construct
  misc_feature 1..22: note = chemically synthesized
  source 1..22: mol_type = other DNA
aaatgcaggtctttgatttttc

SEQ ID NO: 7939 - DNA, 22 bp, synthetic construct
  misc_feature 1..22: note = chemically synthesized
  source 1..22: mol_type = other DNA
tgatttttcaaatgtagttgac

SEQ ID NO: 7940 - DNA, 22 bp, synthetic construct
  misc_feature 1..22: note = chemically synthesized
  source 1..22: mol_type = other DNA
gatttttcaaatgtagttgacc

SEQ ID NO: 7941 - DNA, 22 bp, synthetic construct
  misc_feature 1..22: note = chemically synthesized
  source 1..22: mol_type = other DNA
atttttcaaatgtagttgacct

SEQ ID NO: 7942 - DNA, 22 bp, synthetic construct
  misc_feature 1..22: note = chemically synthesized
  source 1..22: mol_type = other DNA
ttcaaatgtagttgaccttaag

SEQ ID NO: 7943 - DNA, 22 bp, synthetic construct
  misc_feature 1..22: note = chemically synthesized
  source 1..22: mol_type = other DNA
tcaaatgtagttgaccttaaga

SEQ ID NO: 7944 - DNA, 22 bp, synthetic construct
  misc_feature 1..22: note = chemically synthesized
  source 1..22: mol_type = other DNA
caaatgtagttgaccttaagaa

SEQ ID NO: 7945 - DNA, 22 bp, synthetic construct
  misc_feature 1..22: note = chemically synthesized
  source 1..22: mol_type = other DNA
aaatgtagttgaccttaagaat

SEQ ID NO: 7946 - DNA, 22 bp, synthetic construct
  misc_feature 1..22: note = chemically synthesized
  source 1..22: mol_type = other DNA
accttaagaatttatgaataaa

SEQ ID NO: 7947 - DNA, 22 bp, synthetic construct
  misc_feature 1..22: note = chemically synthesized
  source 1..22: mol_type = other DNA
aagaatttatgaataaagccag

SEQ ID NO: 7948 - DNA, 22 bp, synthetic construct
  misc_feature 1..22: note = chemically synthesized
  source 1..22: mol_type = other DNA
agaatttatgaataaagccaga

SEQ ID NO: 7949 - DNA, 22 bp, synthetic construct
  misc_feature 1..22: note = chemically synthesized
  source 1..22: mol_type = other DNA
atgaataaagccagaaaaatta

SEQ ID NO: 7950 - DNA, 22 bp, synthetic construct
  misc_feature 1..22: note = chemically synthesized
  source 1..22: mol_type = other DNA
tgaataaagccagaaaaattaa

SEQ ID NO: 7951 - DNA, 22 bp, synthetic construct
  misc_feature 1..22: note = chemically synthesized
  source 1..22: mol_type = other DNA
agcttaaaaaacaccgaaagaa

SEQ ID NO: 7952 - DNA, 22 bp, synthetic construct
  misc_feature 1..22: note = chemically synthesized
  source 1..22: mol_type = other DNA
aaaaaacaccgaaagaaaatga

SEQ ID NO: 7953 - DNA, 22 bp, synthetic construct
  misc_feature 1..22: note = chemically synthesized
  source 1..22: mol_type = other DNA
aaaaacaccgaaagaaaatgag

SEQ ID NO: 7954 - DNA, 22 bp, synthetic construct
  misc_feature 1..22: note = chemically synthesized
  source 1..22: mol_type = other DNA
aaaatttctattaaaaaaatta

SEQ ID NO: 7955 - DNA, 22 bp, synthetic construct
  misc_feature 1..22: note = chemically synthesized
  source 1..22: mol_type = other DNA
aaatttctattaaaaaaattaa

SEQ ID NO: 7956 - DNA, 22 bp, synthetic construct
  misc_feature 1..22: note = chemically synthesized
  source 1..22: mol_type = other DNA
ctattaaaaaaattaacaggcc

SEQ ID NO: 7957 - DNA, 22 bp, synthetic construct
  misc_feature 1..22: note = chemically synthesized
  source 1..22: mol_type = other DNA
tattaaaaaaattaacaggcca

SEQ ID NO: 7958 - DNA, 22 bp, synthetic construct
  misc_feature 1..22: note = chemically synthesized
  source 1..22: mol_type = other DNA
ttaaaaaaattaacaggccaca

SEQ ID NO: 7959 - DNA, 22 bp, synthetic construct
  misc_feature 1..22: note = chemically synthesized
  source 1..22: mol_type = other DNA
aaaaaattaacaggccacagtt

SEQ ID NO: 7960 - DNA, 22 bp, synthetic construct
  misc_feature 1..22: note = chemically synthesized
  source 1..22: mol_type = other DNA
acaggccacagttgctgatgtt

SEQ ID NO: 7961 - DNA, 22 bp, synthetic construct
  misc_feature 1..22: note = chemically synthesized
  source 1..22: mol_type = other DNA
ctgatgtttagtaaatgtgtta

SEQ ID NO: 7962 - DNA, 22 bp, synthetic construct
  misc_feature 1..22: note = chemically synthesized
  source 1..22: mol_type = other DNA
atgtttagtaaatgtgttagtg

SEQ ID NO: 7963 - DNA, 22 bp, synthetic construct
  misc_feature 1..22: note = chemically synthesized
  source 1..22: mol_type = other DNA
agtaaatgtgttagtgaaatgt

SEQ ID NO: 7964 - DNA, 22 bp, synthetic construct
  misc_feature 1..22: note = chemically synthesized
  source 1..22: mol_type = other DNA
gtaaatgtgttagtgaaatgtg

SEQ ID NO: 7965 - DNA, 22 bp, synthetic construct
  misc_feature 1..22: note = chemically synthesized
  source 1..22: mol_type = other DNA
gtgaaatgtgttactgtgaaga

SEQ ID NO: 7966 - DNA, 22 bp, synthetic construct
  misc_feature 1..22: note = chemically synthesized
  source 1..22: mol_type = other DNA
ctgtgaagactggggtgtttct

SEQ ID NO: 7967 - DNA, 22 bp, synthetic construct
  misc_feature 1..22: note = chemically synthesized
  source 1..22: mol_type = other DNA
tgaagactggggtgtttcttga

SEQ ID NO: 7968 - DNA, 22 bp, synthetic construct
  misc_feature 1..22: note = chemically synthesized
  source 1..22: mol_type = other DNA
gggtgtttcttgaaatctcagc

SEQ ID NO: 7969 - DNA, 22 bp, synthetic construct
  misc_feature 1..22: note = chemically synthesized
  source 1..22: mol_type = other DNA
cttgaaatctcagcccaggtga

SEQ ID NO: 7970 - DNA, 22 bp, synthetic construct
  misc_feature 1..22: note = chemically synthesized
  source 1..22: mol_type = other DNA
ttgaaatctcagcccaggtgaa

SEQ ID NO: 7971 - DNA, 22 bp, synthetic construct
  misc_feature 1..22: note = chemically synthesized
  source 1..22: mol_type = other DNA
gaaatctcagcccaggtgaaat

SEQ ID NO: 7972 - DNA, 22 bp, synthetic construct
  misc_feature 1..22: note = chemically synthesized
  source 1..22: mol_type = other DNA
aaatctcagcccaggtgaaata

SEQ ID NO: 7973 - DNA, 22 bp, synthetic construct
  misc_feature 1..22: note = chemically synthesized
  source 1..22: mol_type = other DNA
agcccaggtgaaataaaaccaa

SEQ ID NO: 7974 - DNA, 22 bp, synthetic construct
  misc_feature 1..22: note = chemically synthesized
  source 1..22: mol_type = other DNA
acctaataaattaattgtaaca

SEQ ID NO: 7975 - DNA, 22 bp, synthetic construct
  misc_feature 1..22: note = chemically synthesized
  source 1..22: mol_type = other DNA
cctaataaattaattgtaacat

SEQ ID NO: 7976 - DNA, 22 bp, synthetic construct
  misc_feature 1..22: note = chemically synthesized
  source 1..22: mol_type = other DNA
ataaattaattgtaacatattc

SEQ ID NO: 7977 - DNA, 22 bp, synthetic construct
  misc_feature 1..22: note = chemically synthesized
  source 1..22: mol_type = other DNA
attgtaacatattccttatgag

SEQ ID NO: 7978 - DNA, 22 bp, synthetic construct
  misc_feature 1..22: note = chemically synthesized
  source 1..22: mol_type = other DNA
taacatattccttatgaggtag

SEQ ID NO: 7979 - DNA, 22 bp, synthetic construct
  misc_feature 1..22: note = chemically synthesized
  source 1..22: mol_type = other DNA
cttatgaggtagaagagtaagt

SEQ ID NO: 7980 - DNA, 22 bp, synthetic construct
  misc_feature 1..22: note = chemically synthesized
  source 1..22: mol_type = other DNA
atgaggtagaagagtaagtgaa

SEQ ID NO: 7981 - DNA, 22 bp, synthetic construct
  misc_feature 1..22: note = chemically synthesized
  source 1..22: mol_type = other DNA
tgaggtagaagagtaagtgaag

SEQ ID NO: 7982 - DNA, 22 bp, synthetic construct
  misc_feature 1..22: note = chemically synthesized
  source 1..22: mol_type = other DNA
atagcagtctgctttcagtata

SEQ ID NO: 7983 - DNA, 22 bp, synthetic construct
  misc_feature 1..22: note = chemically synthesized
  source 1..22: mol_type = other DNA
tagcagtctgctttcagtatag

SEQ ID NO: 7984 - DNA, 22 bp, synthetic construct
  misc_feature 1..22: note = chemically synthesized
  source 1..22: mol_type = other DNA
ctttcagtatagtaagatatta

SEQ ID NO: 7985 - DNA, 22 bp, synthetic construct
  misc_feature 1..22: note = chemically synthesized
  source 1..22: mol_type = other DNA
tcagtatagtaagatattaaga

SEQ ID NO: 7986 - DNA, 22 bp, synthetic construct
  misc_feature 1..22: note = chemically synthesized
  source 1..22: mol_type = other DNA
cagtatagtaagatattaagag

SEQ ID NO: 7987 - DNA, 22 bp, synthetic construct
  misc_feature 1..22: note = chemically synthesized
  source 1..22: mol_type = other DNA
agtatagtaagatattaagaga

SEQ ID NO: 7988 - DNA, 22 bp, synthetic construct
  misc_feature 1..22: note = chemically synthesized
  source 1..22: mol_type = other DNA
agagagaaataatttgtcatat

SEQ ID NO: 7989 - DNA, 22 bp, synthetic construct
  misc_feature 1..22: note = chemically synthesized
  source 1..22: mol_type = other DNA
gtcatatgctttcagaatggtt

SEQ ID NO: 7990 - DNA, 22 bp, synthetic construct
  misc_feature 1..22: note = chemically synthesized
  source 1..22: mol_type = other DNA
tcatatgctttcagaatggttt

SEQ ID NO: 7991 - DNA, 22 bp, synthetic construct
  misc_feature 1..22: note = chemically synthesized
  source 1..22: mol_type = other DNA
tcagaatggtttgctggtaaaa

SEQ ID NO: 7992 - DNA, 22 bp, synthetic construct
  misc_feature 1..22: note = chemically synthesized
  source 1..22: mol_type = other DNA
cagaatggtttgctggtaaaat

SEQ ID NO: 7993 - DNA, 22 bp, synthetic construct
  misc_feature 1..22: note = chemically synthesized
  source 1..22: mol_type = other DNA
agaatggtttgctggtaaaata

SEQ ID NO: 7994 - DNA, 22 bp, synthetic construct
  misc_feature 1..22: note = chemically synthesized
  source 1..22: mol_type = other DNA
gctggtaaaataaccaatgtct

SEQ ID NO: 7995 - DNA, 22 bp, synthetic construct
  misc_feature 1..22: note = chemically synthesized
  source 1..22: mol_type = other DNA
ctggtaaaataaccaatgtctt

SEQ ID NO: 7996 - DNA, 22 bp, synthetic construct
  misc_feature 1..22: note = chemically synthesized
  source 1..22: mol_type = other DNA
gtaaaataaccaatgtcttaca

SEQ ID NO: 7997 - DNA, 22 bp, synthetic construct
  misc_feature 1..22: note = chemically synthesized
  source 1..22: mol_type = other DNA
acaacttagacgacaatgtccc

SEQ ID NO: 7998 - DNA, 22 bp, synthetic construct
  misc_feature 1..22: note = chemically synthesized
  source 1..22: mol_type = other DNA
caacttagacgacaatgtccct

SEQ ID NO: 7999 - DNA, 22 bp, synthetic construct
  misc_feature 1..22: note = chemically synthesized
  source 1..22: mol_type = other DNA
agacgacaatgtccctagagtg

SEQ ID NO: 8000 - DNA, 22 bp, synthetic construct
  misc_feature 1..22: note = chemically synthesized
  source 1..22: mol_type = other DNA
gacgacaatgtccctagagtga

SEQ ID NO: 8001 - DNA, 22 bp, synthetic construct
  misc_feature 1..22: note = chemically synthesized
  source 1..22: mol_type = other DNA
gagtgaagaaacacgattaatt

SEQ ID NO: 8002 - DNA, 22 bp, synthetic construct
  misc_feature 1..22: note = chemically synthesized
  source 1..22: mol_type = other DNA
attcggctaccacagttgaatg

SEQ ID NO: 8003 - DNA, 22 bp, synthetic construct
  misc_feature 1..22: note = chemically synthesized
  source 1..22: mol_type = other DNA
ggctaccacagttgaatgaaaa

SEQ ID NO: 8004 - DNA, 22 bp, synthetic construct
  misc_feature 1..22: note = chemically synthesized
  source 1..22: mol_type = other DNA
ccacagttgaatgaaaatattc

SEQ ID NO: 8005 - DNA, 22 bp, synthetic construct
  misc_feature 1..22: note = chemically synthesized
  source 1..22: mol_type = other DNA
aatgaaaatattccgtaagaca

SEQ ID NO: 8006 - DNA, 22 bp, synthetic construct
  misc_feature 1..22: note = chemically synthesized
  source 1..22: mol_type = other DNA
cgtaagacaaaatgtaaagaaa

SEQ ID NO: 8007 - DNA, 22 bp, synthetic construct
  misc_feature 1..22: note = chemically synthesized
  source 1..22: mol_type = other DNA
gaagcaaaataaatgtctccaa

SEQ ID NO: 8008 - DNA, 22 bp, synthetic construct
  misc_feature 1..22: note = chemically synthesized
  source 1..22: mol_type = other DNA
caaaatgacaaagcgattaagt

SEQ ID NO: 8009 - DNA, 22 bp, synthetic construct
  misc_feature 1..22: note = chemically synthesized
  source 1..22: mol_type = other DNA
agtatatacacaagatgaacaa

SEQ ID NO: 8010 - DNA, 22 bp, synthetic construct
  misc_feature 1..22: note = chemically synthesized
  source 1..22: mol_type = other DNA
caataaaatcatgcagtataca

SEQ ID NO: 8011 - DNA, 22 bp, synthetic construct
  misc_feature 1..22: note = chemically synthesized
  source 1..22: mol_type = other DNA
aataaaatcatgcagtatacaa

SEQ ID NO: 8012 - DNA, 22 bp, synthetic construct
  misc_feature 1..22: note = chemically synthesized
  source 1..22: mol_type = other DNA
attaaagtatatgcatttttaa

SEQ ID NO: 8013 - DNA, 22 bp, synthetic construct
  misc_feature 1..22: note = chemically synthesized
  source 1..22: mol_type = other DNA
ttaaagtatatgcatttttaat

SEQ ID NO: 8014 - DNA, 22 bp, synthetic construct
  misc_feature 1..22: note = chemically synthesized
  source 1..22: mol_type = other DNA
aagtatatgcatttttaatgca

SEQ ID NO: 8015 - DNA, 22 bp, synthetic construct
  misc_feature 1..22: note = chemically synthesized
  source 1..22: mol_type = other DNA
ttaatgcaacaataatactaac

SEQ ID NO: 8016 - DNA, 22 bp, synthetic construct
  misc_feature 1..22: note = chemically synthesized
  source 1..22: mol_type = other DNA
taatgcaacaataatactaaca

SEQ ID NO: 8017 - DNA, 22 bp, synthetic construct
  misc_feature 1..22: note = chemically synthesized
  source 1..22: mol_type = other DNA
aatgcaacaataatactaacag

SEQ ID NO: 8018 - DNA, 22 bp, synthetic construct
  misc_feature 1..22: note = chemically synthesized
  source 1..22: mol_type = other DNA
atgcaacaataatactaacagg

SEQ ID NO: 8019 - DNA, 22 bp, synthetic construct
  misc_feature 1..22: note = chemically synthesized
  source 1..22: mol_type = other DNA
acaggtaatagacaagttgtta

SEQ ID NO: 8020 - DNA, 22 bp, synthetic construct
  misc_feature 1..22: note = chemically synthesized
  source 1..22: mol_type = other DNA
ttaatagtttttcactggctaa

SEQ ID NO: 8021 - DNA, 22 bp, synthetic construct
  misc_feature 1..22: note = chemically synthesized
  source 1..22: mol_type = other DNA
atagtttttcactggctaatta

SEQ ID NO: 8022 - DNA, 22 bp, synthetic construct
  misc_feature 1..22: note = chemically synthesized
  source 1..22: mol_type = other DNA
ttcactggctaattaaataaca

SEQ ID NO: 8023 - DNA, 22 bp, synthetic construct
  misc_feature 1..22: note = chemically synthesized
  source 1..22: mol_type = other DNA
tcactggctaattaaataacag

SEQ ID NO: 8024 - DNA, 22 bp, synthetic construct
  misc_feature 1..22: note = chemically synthesized
  source 1..22: mol_type = other DNA
cactggctaattaaataacagc

SEQ ID NO: 8025 - DNA, 22 bp, synthetic construct
  misc_feature 1..22: note = chemically synthesized
  source 1..22: mol_type = other DNA
actggctaattaaataacagct

SEQ ID NO: 8026 - DNA, 22 bp, synthetic construct
  misc_feature 1..22: note = chemically synthesized
  source 1..22: mol_type = other DNA
gctaattaaataacagctttaa

SEQ ID NO: 8027 - DNA, 22 bp, synthetic construct
  misc_feature 1..22: note = chemically synthesized
  source 1..22: mol_type = other DNA
attaaataacagctttaattgt

SEQ ID NO: 8028 - DNA, 22 bp, synthetic construct
  misc_feature 1..22: note = chemically synthesized
  source 1..22: mol_type = other DNA
aataacagctttaattgtattc

SEQ ID NO: 8029 - DNA, 22 bp, synthetic construct
  misc_feature 1..22: note = chemically synthesized
  source 1..22: mol_type = other DNA
taattgtattcattttatagct

SEQ ID NO: 8030 - DNA, 22 bp, synthetic construct
  misc_feature 1..22: note = chemically synthesized
  source 1..22: mol_type = other DNA
aattgtattcattttatagctt

SEQ ID NO: 8031 - DNA, 22 bp, synthetic construct
  misc_feature 1..22: note = chemically synthesized
  source 1..22: mol_type = other DNA
attgtattcattttatagcttt

SEQ ID NO: 8032 - DNA, 22 bp, synthetic construct
  misc_feature 1..22: note = chemically synthesized
  source 1..22: mol_type = other DNA
tattcattttatagcttttcta

SEQ ID NO: 8033 - DNA, 22 bp, synthetic construct
  misc_feature 1..22: note = chemically synthesized
  source 1..22: mol_type = other DNA
attttatagcttttctacaatg

SEQ ID NO: 8034 - DNA, 22 bp, synthetic construct
  misc_feature 1..22: note = chemically synthesized
  source 1..22: mol_type = other DNA
tatagcttttctacaatgagcg

SEQ ID NO: 8035 - DNA, 22 bp, synthetic construct
  misc_feature 1..22: note = chemically synthesized
  source 1..22: mol_type = other DNA
atagcttttctacaatgagcgt

SEQ ID NO: 8036 - DNA, 22 bp, synthetic construct
  misc_feature 1..22: note = chemically synthesized
  source 1..22: mol_type = other DNA
tagcttttctacaatgagcgta

SEQ ID NO: 8037 - DNA, 22 bp, synthetic construct
  misc_feature 1..22: note = chemically synthesized
  source 1..22: mol_type = other DNA
ttctacaatgagcgtaaatcac

SEQ ID NO: 8038 - DNA, 22 bp, synthetic construct
  misc_feature 1..22: note = chemically synthesized
  source 1..22: mol_type = other DNA
tctacaatgagcgtaaatcaca

SEQ ID NO: 8039 - DNA, 22 bp, synthetic construct
  misc_feature 1..22: note = chemically synthesized
  source 1..22: mol_type = other DNA
ctacaatgagcgtaaatcacat

SEQ ID NO: 8040 - DNA, 22 bp, synthetic construct
  misc_feature 1..22: note = chemically synthesized
  source 1..22: mol_type = other DNA
tacaatgagcgtaaatcacatt

SEQ ID NO: 8041 - DNA, 22 bp, synthetic construct
  misc_feature 1..22: note = chemically synthesized
  source 1..22: mol_type = other DNA
caatgagcgtaaatcacattta

SEQ ID NO: 8042 - DNA, 22 bp, synthetic construct
  misc_feature 1..22: note = chemically synthesized
  source 1..22: mol_type = other DNA
acttttttctacataacttttc

SEQ ID NO: 8043 - DNA, 22 bp, synthetic construct
  misc_feature 1..22: note = chemically synthesized
  source 1..22: mol_type = other DNA
cttttttctacataacttttct

SEQ ID NO: 8044 - DNA, 22 bp, synthetic construct
  misc_feature 1..22: note = chemically synthesized
  source 1..22: mol_type = other DNA
ttttctacataacttttctaac

SEQ ID NO: 8045 - DNA, 22 bp, synthetic construct
  misc_feature 1..22: note = chemically synthesized
  source 1..22: mol_type = other DNA
tttctacataacttttctaacc

SEQ ID NO: 8046 - DNA, 22 bp, synthetic construct
  misc_feature 1..22: note = chemically synthesized
  source 1..22: mol_type = other DNA
ttctacataacttttctaacca

SEQ ID NO: 8047 - DNA, 22 bp, synthetic construct
  misc_feature 1..22: note = chemically synthesized
  source 1..22: mol_type = other DNA
tctacataacttttctaaccac

SEQ ID NO: 8048 - DNA, 22 bp, synthetic construct
  misc_feature 1..22: note = chemically synthesized
  source 1..22: mol_type = other DNA
ctacataacttttctaaccaca

SEQ ID NO: 8049 - DNA, 22 bp, synthetic construct
  misc_feature 1..22: note = chemically synthesized
  source 1..22: mol_type = other DNA
tacataacttttctaaccacaa

SEQ ID NO: 8050 - DNA, 22 bp, synthetic construct
  misc_feature 1..22: note = chemically synthesized
  source 1..22: mol_type = other DNA
cataacttttctaaccacaaaa

SEQ ID NO: 8051 - DNA, 22 bp, synthetic construct
  misc_feature 1..22: note = chemically synthesized
  source 1..22: mol_type = other DNA
ttctaaccacaaaaaaagaaaa

SEQ ID NO: 8052 - DNA, 22 bp, synthetic construct
  misc_feature 1..22: note = chemically synthesized
  source 1..22: mol_type = other DNA
tctaaccacaaaaaaagaaaat

SEQ ID NO: 8053 - DNA, 22 bp, synthetic construct
  misc_feature 1..22: note = chemically synthesized
  source 1..22: mol_type = other DNA
ctaaccacaaaaaaagaaaatg

SEQ ID NO: 8054 - DNA, 22 bp, synthetic construct
  misc_feature 1..22: note = chemically synthesized
  source 1..22: mol_type = other DNA
taaccacaaaaaaagaaaatgg

SEQ ID NO: 8055 - DNA, 22 bp, synthetic construct
  misc_feature 1..22: note = chemically synthesized
  source 1..22: mol_type = other DNA
accacaaaaaaagaaaatggtt

SEQ ID NO: 8056 - DNA, 22 bp, synthetic construct
  misc_feature 1..22: note = chemically synthesized
  source 1..22: mol_type = other DNA
aaaagaagagatgagatatctt

SEQ ID NO: 8057 - DNA, 22 bp, synthetic construct
  misc_feature 1..22: note = chemically synthesized
  source 1..22: mol_type = other DNA
aaagaagagatgagatatcttt

SEQ ID NO: 8058 - DNA, 22 bp, synthetic construct
  misc_feature 1..22: note = chemically synthesized
  source 1..22: mol_type = other DNA
tgctaaaatttaatgcctaaag

SEQ ID NO: 8059 - DNA, 22 bp, synthetic construct
  misc_feature 1..22: note = chemically synthesized
  source 1..22: mol_type = other DNA
gctaaaatttaatgcctaaaga

SEQ ID NO: 8060 - DNA, 22 bp, synthetic construct
  misc_feature 1..22: note = chemically synthesized
  source 1..22: mol_type = other DNA
ctaaaatttaatgcctaaagaa

SEQ ID NO: 8061 - DNA, 22 bp, synthetic construct
  misc_feature 1..22: note = chemically synthesized
  source 1..22: mol_type = other DNA
aaatttaatgcctaaagaagaa

SEQ ID NO: 8062 - DNA, 22 bp, synthetic construct
  misc_feature 1..22: note = chemically synthesized
  source 1..22: mol_type = other DNA
aatgcctaaagaagaaacttct

SEQ ID NO: 8063 - DNA, 22 bp, synthetic construct
  misc_feature 1..22: note = chemically synthesized
  source 1..22: mol_type = other DNA
atgcctaaagaagaaacttctg

SEQ ID NO: 8064 - DNA, 22 bp, synthetic construct
  misc_feature 1..22: note = chemically synthesized
  source 1..22: mol_type = other DNA
aagaagaaacttctgagctgta

SEQ ID NO: 8065 - DNA, 22 bp, synthetic construct
  misc_feature 1..22: note = chemically synthesized
  source 1..22: mol_type = other DNA
ctgagctgtatatggtatcctg

SEQ ID NO: 8066 - DNA, 22 bp, synthetic construct
  misc_feature 1..22: note = chemically synthesized
  source 1..22: mol_type = other DNA
tgagctgtatatggtatcctga

SEQ ID NO: 8067 - DNA, 22 bp, synthetic construct
  misc_feature 1..22: note = chemically synthesized
  source 1..22: mol_type = other DNA
agctgtatatggtatcctgaag

SEQ ID NO: 8068 - DNA, 22 bp, synthetic construct
  misc_feature 1..22: note = chemically synthesized
  source 1..22: mol_type = other DNA
tatatggtatcctgaagcacct

SEQ ID NO: 8069 - DNA, 22 bp, synthetic construct
  misc_feature 1..22: note = chemically synthesized
  source 1..22: mol_type = other DNA
aagcacctgcccttcaagacag

SEQ ID NO: 8070 - DNA, 22 bp, synthetic construct
  misc_feature 1..22: note = chemically synthesized
  source 1..22: mol_type = other DNA
cccttcaagacagaatgcttgt

SEQ ID NO: 8071 - DNA, 22 bp, synthetic construct
  misc_feature 1..22: note = chemically synthesized
  source 1..22: mol_type = other DNA
caagacagaatgcttgtaccac

SEQ ID NO: 8072 - DNA, 22 bp, synthetic construct
  misc_feature 1..22: note = chemically synthesized
  source 1..22: mol_type = other DNA
aagacagaatgcttgtaccaca

SEQ ID NO: 8073 - DNA, 22 bp, synthetic construct
  misc_feature 1..22: note = chemically synthesized
  source 1..22: mol_type = other DNA
gtaccacatttatgcagccaag

SEQ ID NO: 8074 - DNA, 22 bp, synthetic construct
  misc_feature 1..22: note = chemically synthesized
  source 1..22: mol_type = other DNA
taccacatttatgcagccaagt

SEQ ID NO: 8075 - DNA, 22 bp, synthetic construct
  misc_feature 1..22: note = chemically synthesized
  source 1..22: mol_type = other DNA
atgcagccaagtgcatgtagta

SEQ ID NO: 8076 - DNA, 22 bp, synthetic construct
  misc_feature 1..22: note = chemically synthesized
  source 1..22: mol_type = other DNA
tgcagccaagtgcatgtagtaa

SEQ ID NO: 8077 - DNA, 22 bp, synthetic construct
  misc_feature 1..22: note = chemically synthesized
  source 1..22: mol_type = other DNA
gatatatatattaagactcttt

SEQ ID NO: 8078 - DNA, 22 bp, synthetic construct
  misc_feature 1..22: note = chemically synthesized
  source 1..22: mol_type = other DNA
agactcttttgacggctgggca

SEQ ID NO: 8079 - DNA, 22 bp, synthetic construct
  misc_feature 1..22: note = chemically synthesized
  source 1..22: mol_type = other DNA
ttttgacggctgggcagggtgg

SEQ ID NO: 8080 - DNA, 22 bp, synthetic construct
  misc_feature 1..22: note = chemically synthesized
  source 1..22: mol_type = other DNA
ttgacggctgggcagggtggct

SEQ ID NO: 8081 - DNA, 22 bp, synthetic construct
  misc_feature 1..22: note = chemically synthesized
  source 1..22: mol_type = other DNA
tgacggctgggcagggtggctc

SEQ ID NO: 8082 - DNA, 22 bp, synthetic construct
  misc_feature 1..22: note = chemically synthesized
  source 1..22: mol_type = other DNA
gacggctgggcagggtggctca

SEQ ID NO: 8083 - DNA, 22 bp, synthetic construct
  misc_feature 1..22: note = chemically synthesized
  source 1..22: mol_type = other DNA
acggctgggcagggtggctcac

SEQ ID NO: 8084 - DNA, 22 bp, synthetic construct
  misc_feature 1..22: note = chemically synthesized
  source 1..22: mol_type = other DNA
ggcagggtggctcacacctgta

SEQ ID NO: 8085 - DNA, 22 bp, synthetic construct
  misc_feature 1..22: note = chemically synthesized
  source 1..22: mol_type = other DNA
acacctgtaatctcagcacttt

SEQ ID NO: 8086 - DNA, 22 bp, synthetic construct
  misc_feature 1..22: note = chemically synthesized
  source 1..22: mol_type = other DNA
taatctcagcactttgggaggc

SEQ ID NO: 8087 - DNA, 22 bp, synthetic construct
  misc_feature 1..22: note = chemically synthesized
  source 1..22: mol_type = other DNA
agcactttgggaggccgaggca

SEQ ID NO: 8088 - DNA, 22 bp, synthetic construct
  misc_feature 1..22: note = chemically synthesized
  source 1..22: mol_type = other DNA
tgggaggccgaggcaggcggat

SEQ ID NO: 8089 - DNA, 22 bp, synthetic construct
  misc_feature 1..22: note = chemically synthesized
  source 1..22: mol_type = other DNA
gggaggccgaggcaggcggatc

SEQ ID NO: 8090 - DNA, 22 bp, synthetic construct
  misc_feature 1..22: note = chemically synthesized
  source 1..22: mol_type = other DNA
ggaggccgaggcaggcggatca

SEQ ID NO: 8091 - DNA, 22 bp, synthetic construct
  misc_feature 1..22: note = chemically synthesized
  source 1..22: mol_type = other DNA
gagaccagcctggccaacatgg

SEQ ID NO: 8092 - DNA, 22 bp, synthetic construct
  misc_feature 1..22: note = chemically synthesized
  source 1..22: mol_type = other DNA
gccaacatggtgaaaccctgtc

SEQ ID NO: 8093 - DNA, 22 bp, synthetic construct
  misc_feature 1..22: note = chemically synthesized
  source 1..22: mol_type = other DNA
tctctactaaaaatacaaaaat

SEQ ID NO: 8094 - DNA, 22 bp, synthetic construct
  misc_feature 1..22: note = chemically synthesized
  source 1..22: mol_type = other DNA
tactaaaaatacaaaaattagc

SEQ ID NO: 8095 - DNA, 22 bp, synthetic construct
  misc_feature 1..22: note = chemically synthesized
  source 1..22: mol_type = other DNA
ctaaaaatacaaaaattagccg

SEQ ID NO: 8096 - DNA, 22 bp, synthetic construct
  misc_feature 1..22: note = chemically synthesized
  source 1..22: mol_type = other DNA
aaaatacaaaaattagccgggc

SEQ ID NO: 8097 - DNA, 22 bp, synthetic construct
  misc_feature 1..22: note = chemically synthesized
  source 1..22: mol_type = other DNA
gccgggcatggtggtgcacgcc

SEQ ID NO: 8098 - DNA, 22 bp, synthetic construct
  misc_feature 1..22: note = chemically synthesized
  source 1..22: mol_type = other DNA
taatcccagctacttgggaggc

SEQ ID NO: 8099 - DNA, 22 bp, synthetic construct
  misc_feature 1..22: note = chemically synthesized
  source 1..22: mol_type = other DNA
cttgggaggctgagacaggaga

SEQ ID NO: 8100 - DNA, 22 bp, synthetic construct
  misc_feature 1..22: note = chemically synthesized
  source 1..22: mol_type = other DNA
gggaggctgagacaggagaatc

SEQ ID NO: 8101 - DNA, 22 bp, synthetic construct
  misc_feature 1..22: note = chemically synthesized
  source 1..22: mol_type = other DNA
ggaggctgagacaggagaatcg

SEQ ID NO: 8102 - DNA, 22 bp, synthetic construct
  misc_feature 1..22: note = chemically synthesized
  source 1..22: mol_type = other DNA
agacaggagaatcgcttgaacc

SEQ ID NO: 8103 - DNA, 22 bp, synthetic construct
  misc_feature 1..22: note = chemically synthesized
  source 1..22: mol_type = other DNA
gaacctgggaggcagaggttac

SEQ ID NO: 8104 - DNA, 22 bp, synthetic construct
  misc_feature 1..22: note = chemically synthesized
  source 1..22: mol_type = other DNA
aacctgggaggcagaggttaca

SEQ ID NO: 8105 - DNA, 22 bp, synthetic construct
  misc_feature 1..22: note = chemically synthesized
  source 1..22: mol_type = other DNA
ggaggcagaggttacagtgagc

SEQ ID NO: 8106 - DNA, 22 bp, synthetic construct
  misc_feature 1..22: note = chemically synthesized
  source 1..22: mol_type = other DNA
cagtgagccgagatcatgccat

SEQ ID NO: 8107 - DNA, 22 bp, synthetic construct
  misc_feature 1..22: note = chemically synthesized
  source 1..22: mol_type = other DNA
cactccagcctgggcaatagag

SEQ ID NO: 8108 - DNA, 22 bp, synthetic construct
  misc_feature 1..22: note = chemically synthesized
  source 1..22: mol_type = other DNA
cagcctgggcaatagagtctca

SEQ ID NO: 8109 - DNA, 22 bp, synthetic construct
  misc_feature 1..22: note = chemically synthesized
  source 1..22: mol_type = other DNA
ggcaatagagtctcaaaaaaaa

SEQ ID NO: 8110 - DNA, 22 bp, synthetic construct
  misc_feature 1..22: note = chemically synthesized
  source 1..22: mol_type = other DNA
aaaaaaaaaaaaaagactcttt

SEQ ID NO: 8111 - DNA, 22 bp, synthetic construct
  misc_feature 1..22: note = chemically synthesized
  source 1..22: mol_type = other DNA
ttttgaacatggtgaactgatt

SEQ ID NO: 8112 - DNA, 22 bp, synthetic construct
  misc_feature 1..22: note = chemically synthesized
  source 1..22: mol_type = other DNA
ttgaacatggtgaactgatttc

SEQ ID NO: 8113 - DNA, 22 bp, synthetic construct
  misc_feature 1..22: note = chemically synthesized
  source 1..22: mol_type = other DNA
tgaacatggtgaactgatttcc

SEQ ID NO: 8114 - DNA, 22 bp, synthetic construct
  misc_feature 1..22: note = chemically synthesized
  source 1..22: mol_type = other DNA
gaacatggtgaactgatttccc

SEQ ID NO: 8115 - DNA, 22 bp, synthetic construct
  misc_feature 1..22: note = chemically synthesized
  source 1..22: mol_type = other DNA
aacatggtgaactgatttccca

SEQ ID NO: 8116 - DNA, 22 bp, synthetic construct
  misc_feature 1..22: note = chemically synthesized
  source 1..22: mol_type = other DNA
atttcccagaatctagcaattc

SEQ ID NO: 8117 - DNA, 22 bp, synthetic construct
  misc_feature 1..22: note = chemically synthesized
  source 1..22: mol_type = other DNA
cccagaatctagcaattcctga

SEQ ID NO: 8118 - DNA, 22 bp, synthetic construct
  misc_feature 1..22: note = chemically synthesized
  source 1..22: mol_type = other DNA
ccagaatctagcaattcctgaa

SEQ ID NO: 8119 - DNA, 22 bp, synthetic construct
  misc_feature 1..22: note = chemically synthesized
  source 1..22: mol_type = other DNA
gcaattcctgaatgtcctggtt

SEQ ID NO: 8120 - DNA, 22 bp, synthetic construct
  misc_feature 1..22: note = chemically synthesized
  source 1..22: mol_type = other DNA
ctgaatgtcctggttagatttt

SEQ ID NO: 8121 - DNA, 22 bp, synthetic construct
  misc_feature 1..22: note = chemically synthesized
  source 1..22: mol_type = other DNA
aatgtcctggttagattttttt

SEQ ID NO: 8122 - DNA, 22 bp, synthetic construct
  misc_feature 1..22: note = chemically synthesized
  source 1..22: mol_type = other DNA
gttagattttttttttaatgtg

SEQ ID NO: 8123 - DNA, 22 bp, synthetic construct
  misc_feature 1..22: note = chemically synthesized
  source 1..22: mol_type = other DNA
gattttttttttaatgtgcacc

SEQ ID NO: 8124 - DNA, 22 bp, synthetic construct
  misc_feature 1..22: note = chemically synthesized
  source 1..22: mol_type = other DNA
tttttttaatgtgcaccggaac

SEQ ID NO: 8125 - DNA, 22 bp, synthetic construct
  misc_feature 1..22: note = chemically synthesized
  source 1..22: mol_type = other DNA
ttttttaatgtgcaccggaacc

SEQ ID NO: 8126 - DNA, 22 bp, synthetic construct
  misc_feature 1..22: note = chemically synthesized
  source 1..22: mol_type = other DNA
tttttaatgtgcaccggaaccc

SEQ ID NO: 8127 - DNA, 22 bp, synthetic construct
  misc_feature 1..22: note = chemically synthesized
  source 1..22: mol_type = other DNA
ttttaatgtgcaccggaacccc

SEQ ID NO: 8128 - DNA, 22 bp, synthetic construct
  misc_feature 1..22: note = chemically synthesized
  source 1..22: mol_type = other DNA
tttaatgtgcaccggaacccca

SEQ ID NO: 8129 - DNA, 22 bp, synthetic construct
  misc_feature 1..22: note = chemically synthesized
  source 1..22: mol_type = other DNA
ttaatgtgcaccggaaccccag

SEQ ID NO: 8130 - DNA, 22 bp, synthetic construct
  misc_feature 1..22: note = chemically synthesized
  source 1..22: mol_type = other DNA
taatgtgcaccggaaccccagt

SEQ ID NO: 8131 - DNA, 22 bp, synthetic construct
  misc_feature 1..22: note = chemically synthesized
  source 1..22: mol_type = other DNA
aatgtgcaccggaaccccagtg

SEQ ID NO: 8132 - DNA, 22 bp, synthetic construct
  misc_feature 1..22: note = chemically synthesized
  source 1..22: mol_type = other DNA
atgtgcaccggaaccccagtgg

SEQ ID NO: 8133 - DNA, 22 bp, synthetic construct
  misc_feature 1..22: note = chemically synthesized
  source 1..22: mol_type = other DNA
catggaaggacctgggcatcct

SEQ ID NO: 8134 - DNA, 22 bp, synthetic construct
  misc_feature 1..22: note = chemically synthesized
  source 1..22: mol_type = other DNA
ggcatcctctaagccacttggt

SEQ ID NO: 8135 - DNA, 22 bp, synthetic construct
  misc_feature 1..22: note = chemically synthesized
  source 1..22: mol_type = other DNA
taagccacttggtggcttccat

SEQ ID NO: 8136 - DNA, 22 bp, synthetic construct
  misc_feature 1..22: note = chemically synthesized
  source 1..22: mol_type = other DNA
agccacttggtggcttccatta

SEQ ID NO: 8137 - DNA, 22 bp, synthetic construct
  misc_feature 1..22: note = chemically synthesized
  source 1..22: mol_type = other DNA
ggtggcttccattataccatct

SEQ ID NO: 8138 - DNA, 22 bp, synthetic construct
  misc_feature 1..22: note = chemically synthesized
  source 1..22: mol_type = other DNA
gtggcttccattataccatctc

SEQ ID NO: 8139 - DNA, 22 bp, synthetic construct
  misc_feature 1..22: note = chemically synthesized
  source 1..22: mol_type = other DNA
ccattataccatctcaaaatga

SEQ ID NO: 8140 - DNA, 22 bp, synthetic construct
  misc_feature 1..22: note = chemically synthesized
  source 1..22: mol_type = other DNA
cattataccatctcaaaatgag

SEQ ID NO: 8141 - DNA, 22 bp, synthetic construct
  misc_feature 1..22: note = chemically synthesized
  source 1..22: mol_type = other DNA
taccatctcaaaatgagagagc

SEQ ID NO: 8142 - DNA, 22 bp, synthetic construct
  misc_feature 1..22: note = chemically synthesized
  source 1..22: mol_type = other DNA
aaaatgagagagcttactccac

SEQ ID NO: 8143 - DNA, 22 bp, synthetic construct
  misc_feature 1..22: note = chemically synthesized
  source 1..22: mol_type = other DNA
actccacttcattgagggaaat

SEQ ID NO: 8144 - DNA, 22 bp, synthetic construct
  misc_feature 1..22: note = chemically synthesized
  source 1..22: mol_type = other DNA
ctccacttcattgagggaaata

SEQ ID NO: 8145 - DNA, 22 bp, synthetic construct
  misc_feature 1..22: note = chemically synthesized
  source 1..22: mol_type = other DNA
cacttcattgagggaaatacca

SEQ ID NO: 8146 - DNA, 22 bp, synthetic construct
  misc_feature 1..22: note = chemically synthesized
  source 1..22: mol_type = other DNA
cattgagggaaataccaccaga

SEQ ID NO: 8147 - DNA, 22 bp, synthetic construct
  misc_feature 1..22: note = chemically synthesized
  source 1..22: mol_type = other DNA
attgagggaaataccaccagag

SEQ ID NO: 8148 - DNA, 22 bp, synthetic construct
  misc_feature 1..22: note = chemically synthesized
  source 1..22: mol_type = other DNA
agggaaataccaccagagttct

SEQ ID NO: 8149 - DNA, 22 bp, synthetic construct
  misc_feature 1..22: note = chemically synthesized
  source 1..22: mol_type = other DNA
tgactccagaggcactggccta

SEQ ID NO: 8150 - DNA, 22 bp, synthetic construct
  misc_feature 1..22: note = chemically synthesized
  source 1..22: mol_type = other DNA
actccagaggcactggcctagg

SEQ ID NO: 8151 - DNA, 22 bp, synthetic construct
  misc_feature 1..22: note = chemically synthesized
  source 1..22: mol_type = other DNA
cagaggcactggcctagggagg

SEQ ID NO: 8152 - DNA, 22 bp, synthetic construct
  misc_feature 1..22: note = chemically synthesized
  source 1..22: mol_type = other DNA
gcctagggaggacaccgtgtgt

SEQ ID NO: 8153 - DNA, 22 bp, synthetic construct
  misc_feature 1..22: note = chemically synthesized
  source 1..22: mol_type = other DNA
gggaggacaccgtgtgtgaagc

SEQ ID NO: 8154 - DNA, 22 bp, synthetic construct
  misc_feature 1..22: note = chemically synthesized
  source 1..22: mol_type = other DNA
gctgtccccaccaattacagtc

SEQ ID NO: 8155 - DNA, 22 bp, synthetic construct
  misc_feature 1..22: note = chemically synthesized
  source 1..22: mol_type = other DNA
tccccaccaattacagtccttg

SEQ ID NO: 8156 - DNA, 22 bp, synthetic construct
  misc_feature 1..22: note = chemically synthesized
  source 1..22: mol_type = other DNA
cagtccttgcgtagggtccaaa

SEQ ID NO: 8157 - DNA, 22 bp, synthetic construct
  misc_feature 1..22: note = chemically synthesized
  source 1..22: mol_type = other DNA
gcgtagggtccaaagaaatgaa

SEQ ID NO: 8158 - DNA, 22 bp, synthetic construct
  misc_feature 1..22: note = chemically synthesized
  source 1..22: mol_type = other DNA
cgtagggtccaaagaaatgaat

SEQ ID NO: 8159 - DNA, 22 bp, synthetic construct
  misc_feature 1..22: note = chemically synthesized
  source 1..22: mol_type = other DNA
caggaccttccttcagggactt

SEQ ID NO: 8160 - DNA, 22 bp, synthetic construct
  misc_feature 1..22: note = chemically synthesized
  source 1..22: mol_type = other DNA
ccttcagggacttttaaaggaa

SEQ ID NO: 8161 - DNA, 22 bp, synthetic construct
  misc_feature 1..22: note = chemically synthesized
  source 1..22: mol_type = other DNA
cttcagggacttttaaaggaaa

SEQ ID NO: 8162 - DNA, 22 bp, synthetic construct
  misc_feature 1..22: note = chemically synthesized
  source 1..22: mol_type = other DNA
cagggacttttaaaggaaacat

SEQ ID NO: 8163 - DNA, 22 bp, synthetic construct
  misc_feature 1..22: note = chemically synthesized
  source 1..22: mol_type = other DNA
agggacttttaaaggaaacatg

SEQ ID NO: 8164 - DNA, 22 bp, synthetic construct
  misc_feature 1..22: note = chemically synthesized
  source 1..22: mol_type = other DNA
ttaaaggaaacatgacagctga

SEQ ID NO: 8165 - DNA, 22 bp, synthetic construct
  misc_feature 1..22: note = chemically synthesized
  source 1..22: mol_type = other DNA
taaaggaaacatgacagctgag

SEQ ID NO: 8166 - DNA, 22 bp, synthetic construct
  misc_feature 1..22: note = chemically synthesized
  source 1..22: mol_type = other DNA
aaaggaaacatgacagctgagg

SEQ ID NO: 8167 - DNA, 22 bp, synthetic construct
  misc_feature 1..22: note = chemically synthesized
  source 1..22: mol_type = other DNA
aaggaaacatgacagctgagga

SEQ ID NO: 8168 - DNA, 22 bp, synthetic construct
  misc_feature 1..22: note = chemically synthesized
  source 1..22: mol_type = other DNA
aggatcagttggttgttttctg

SEQ ID NO: 8169 - DNA, 22 bp, synthetic construct
  misc_feature 1..22: note = chemically synthesized
  source 1..22: mol_type = other DNA
gttgttttctgctgttcccctt

SEQ ID NO: 8170 - DNA, 22 bp, synthetic construct
  misc_feature 1..22: note = chemically synthesized
  source 1..22: mol_type = other DNA
ttttctgctgttccccttcatg

SEQ ID NO: 8171 - DNA, 22 bp, synthetic construct
  misc_feature 1..22: note = chemically synthesized
  source 1..22: mol_type = other DNA
tctgctgttccccttcatgtga

SEQ ID NO: 8172 - DNA, 22 bp, synthetic construct
  misc_feature 1..22: note = chemically synthesized
  source 1..22: mol_type = other DNA
ctgctgttccccttcatgtgat

SEQ ID NO: 8173 - DNA, 22 bp, synthetic construct
  misc_feature 1..22: note = chemically synthesized
  source 1..22: mol_type = other DNA
tgctgttccccttcatgtgatt

SEQ ID NO: 8174 - DNA, 22 bp, synthetic construct
  misc_feature 1..22: note = chemically synthesized
  source 1..22: mol_type = other DNA
ctgttccccttcatgtgattca

SEQ ID NO: 8175 - DNA, 22 bp, synthetic construct
  misc_feature 1..22: note = chemically synthesized
  source 1..22: mol_type = other DNA
ttccccttcatgtgattcaagc

SEQ ID NO: 8176 - DNA, 22 bp, synthetic construct
  misc_feature 1..22: note = chemically synthesized
  source 1..22: mol_type = other DNA
cccttcatgtgattcaagctca

SEQ ID NO: 8177 - DNA, 22 bp, synthetic construct
  misc_feature 1..22: note = chemically synthesized
  source 1..22: mol_type = other DNA
catgtgattcaagctcactcag

SEQ ID NO: 8178 - DNA, 22 bp, synthetic construct
  misc_feature 1..22: note = chemically synthesized
  source 1..22: mol_type = other DNA
atgtgattcaagctcactcaga

SEQ ID NO: 8179 - DNA, 22 bp, synthetic construct
  misc_feature 1..22: note = chemically synthesized
  source 1..22: mol_type = other DNA
aagctcactcagaagaaacaca

SEQ ID NO: 8180 - DNA, 22 bp, synthetic construct
  misc_feature 1..22: note = chemically synthesized
  source 1..22: mol_type = other DNA
actcagaagaaacacaatgaga

SEQ ID NO: 8181 - DNA, 22 bp, synthetic construct
  misc_feature 1..22: note = chemically synthesized
  source 1..22: mol_type = other DNA
agaagaaacacaatgagacaag

SEQ ID NO: 8182 - DNA, 22 bp, synthetic construct
  misc_feature 1..22: note = chemically synthesized
  source 1..22: mol_type = other DNA
cttccttctctatttattctag

SEQ ID NO: 8183 - DNA, 22 bp, synthetic construct
  misc_feature 1..22: note = chemically synthesized
  source 1..22: mol_type = other DNA
ccttctctatttattctaggca

SEQ ID NO: 8184 - DNA, 22 bp, synthetic construct
  misc_feature 1..22: note = chemically synthesized
  source 1..22: mol_type = other DNA
cttctctatttattctaggcat

SEQ ID NO: 8185 - DNA, 22 bp, synthetic construct
  misc_feature 1..22: note = chemically synthesized
  source 1..22: mol_type = other DNA
ctctatttattctaggcatcta

SEQ ID NO: 8186 - DNA, 22 bp, synthetic construct
  misc_feature 1..22: note = chemically synthesized
  source 1..22: mol_type = other DNA
tctatttattctaggcatctaa

SEQ ID NO: 8187 - DNA, 22 bp, synthetic construct
  misc_feature 1..22: note = chemically synthesized
  source 1..22: mol_type = other DNA
tatttattctaggcatctaaac

SEQ ID NO: 8188 - DNA, 22 bp, synthetic construct
  misc_feature 1..22: note = chemically synthesized
  source 1..22: mol_type = other DNA
tttattctaggcatctaaacta

SEQ ID NO: 8189 - DNA, 22 bp, synthetic construct
  misc_feature 1..22: note = chemically synthesized
  source 1..22: mol_type = other DNA
attctaggcatctaaactactg

SEQ ID NO: 8190 - DNA, 22 bp, synthetic construct
  misc_feature 1..22: note = chemically synthesized
  source 1..22: mol_type = other DNA
ttctaggcatctaaactactga

SEQ ID NO: 8191 - DNA, 22 bp, synthetic construct
  misc_feature 1..22: note = chemically synthesized
  source 1..22: mol_type = other DNA
taggcatctaaactactgaatg

SEQ ID NO: 8192 - DNA, 22 bp, synthetic construct
  misc_feature 1..22: note = chemically synthesized
  source 1..22: mol_type = other DNA
ggcatctaaactactgaatgta

SEQ ID NO: 8193 - DNA, 22 bp, synthetic construct
  misc_feature 1..22: note = chemically synthesized
  source 1..22: mol_type = other DNA
aactactgaatgtagtggtgtc

SEQ ID NO: 8194 - DNA, 22 bp, synthetic construct
  misc_feature 1..22: note = chemically synthesized
  source 1..22: mol_type = other DNA
ctgaatgtagtggtgtctgaga

SEQ ID NO: 8195 - DNA, 22 bp, synthetic construct
  misc_feature 1..22: note = chemically synthesized
  source 1..22: mol_type = other DNA
aatgtagtggtgtctgagatgt

SEQ ID NO: 8196 - DNA, 22 bp, synthetic construct
  misc_feature 1..22: note = chemically synthesized
  source 1..22: mol_type = other DNA
agatgtatcaaacggtcagatt

SEQ ID NO: 8197 - DNA, 22 bp, synthetic construct
  misc_feature 1..22: note = chemically synthesized
  source 1..22: mol_type = other DNA
actgagtttgaaacctgtttct

SEQ ID NO: 8198 - DNA, 22 bp, synthetic construct
  misc_feature 1..22: note = chemically synthesized
  source 1..22: mol_type = other DNA
agtttgaaacctgtttctatca

SEQ ID NO: 8199 - DNA, 22 bp, synthetic construct
  misc_feature 1..22: note = chemically synthesized
  source 1..22: mol_type = other DNA
gaaacctgtttctatcactgac

SEQ ID NO: 8200 - DNA, 22 bp, synthetic construct
  misc_feature 1..22: note = chemically synthesized
  source 1..22: mol_type = other DNA
aaacctgtttctatcactgaca

SEQ ID NO: 8201 - DNA, 22 bp, synthetic construct
  misc_feature 1..22: note = chemically synthesized
  source 1..22: mol_type = other DNA
tttctatcactgacaaactatg

SEQ ID NO: 8202 - DNA, 22 bp, synthetic construct
  misc_feature 1..22: note = chemically synthesized
  source 1..22: mol_type = other DNA
ctatcactgacaaactatgaga

SEQ ID NO: 8203 - DNA, 22 bp, synthetic construct
  misc_feature 1..22: note = chemically synthesized
  source 1..22: mol_type = other DNA
tatcactgacaaactatgagat

SEQ ID NO: 8204 - DNA, 22 bp, synthetic construct
  misc_feature 1..22: note = chemically synthesized
  source 1..22: mol_type = other DNA
tcactgacaaactatgagatac

SEQ ID NO: 8205 - DNA, 22 bp, synthetic construct
  misc_feature 1..22: note = chemically synthesized
  source 1..22: mol_type = other DNA
acaaactatgagatactctata

SEQ ID NO: 8206 - DNA, 22 bp, synthetic construct
  misc_feature 1..22: note = chemically synthesized
  source 1..22: mol_type = other DNA
tgagatactctatacttcactt

SEQ ID NO: 8207 - DNA, 22 bp, synthetic construct
  misc_feature 1..22: note = chemically synthesized
  source 1..22: mol_type = other DNA
tatacttcactttctttttttt

SEQ ID NO: 8208 - DNA, 22 bp, synthetic construct
  misc_feature 1..22: note = chemically synthesized
  source 1..22: mol_type = other DNA
tacttcactttctttttttttt

SEQ ID NO: 8209 - DNA, 22 bp, synthetic construct
  misc_feature 1..22: note = chemically synthesized
  source 1..22: mol_type = other DNA
cactttcttttttttttcattt

SEQ ID NO: 8210 - DNA, 22 bp, synthetic construct
  misc_feature 1..22: note = chemically synthesized
  source 1..22: mol_type = other DNA
actttcttttttttttcatttt

SEQ ID NO: 8211 - DNA, 22 bp, synthetic construct
  misc_feature 1..22: note = chemically synthesized
  source 1..22: mol_type = other DNA
tcttttttttttcattttttta

SEQ ID NO: 8212 - DNA, 22 bp, synthetic construct
  misc_feature 1..22: note = chemically synthesized
  source 1..22: mol_type = other DNA
cttttttttttcatttttttat

SEQ ID NO: 8213 - DNA, 22 bp, synthetic construct
  misc_feature 1..22: note = chemically synthesized
  source 1..22: mol_type = other DNA
ttttttttttcatttttttatt

SEQ ID NO: 8214 - DNA, 22 bp, synthetic construct
  misc_feature 1..22: note = chemically synthesized
  source 1..22: mol_type = other DNA
ttttttttcatttttttatttt

SEQ ID NO: 8215 - DNA, 22 bp, synthetic construct
  misc_feature 1..22: note = chemically synthesized
  source 1..22: mol_type = other DNA
tttttttcatttttttattttt

SEQ ID NO: 8216 - DNA, 22 bp, synthetic construct
  misc_feature 1..22: note = chemically synthesized
  source 1..22: mol_type = other DNA
ttttttcatttttttattttta

SEQ ID NO: 8217 - DNA, 22 bp, synthetic construct
  misc_feature 1..22: note = chemically synthesized
  source 1..22: mol_type = other DNA
tttttcatttttttatttttat

SEQ ID NO: 8218 - DNA, 22 bp, synthetic construct
  misc_feature 1..22: note = chemically synthesized
  source 1..22: mol_type = other DNA
ttttcatttttttatttttatt

SEQ ID NO: 8219 - DNA, 22 bp, synthetic construct
  misc_feature 1..22: note = chemically synthesized
  source 1..22: mol_type = other DNA
tttcatttttttatttttattt

SEQ ID NO: 8220 - DNA, 22 bp, synthetic construct
  misc_feature 1..22: note = chemically synthesized
  source 1..22: mol_type = other DNA
ttcatttttttatttttatttt

SEQ ID NO: 8221 - DNA, 22 bp, synthetic construct
  misc_feature 1..22: note = chemically synthesized
  source 1..22: mol_type = other DNA
tcatttttttatttttattttt

SEQ ID NO: 8222 - DNA, 22 bp, synthetic construct
  misc_feature 1..22: note = chemically synthesized
  source 1..22: mol_type = other DNA
catttttttatttttattttta

SEQ ID NO: 8223 - DNA, 22 bp, synthetic construct
  misc_feature 1..22: note = chemically synthesized
  source 1..22: mol_type = other DNA
atttttttatttttatttttat

SEQ ID NO: 8224 - DNA, 22 bp, synthetic construct
  misc_feature 1..22: note = chemically synthesized
  source 1..22: mol_type = other DNA
ttttatttttatttttattttt

SEQ ID NO: 8225 - DNA, 22 bp, synthetic construct
  misc_feature 1..22: note = chemically synthesized
  source 1..22: mol_type = other DNA
tttatttttatttttatttttt

SEQ ID NO: 8226 - DNA, 22 bp, synthetic construct
  misc_feature 1..22: note = chemically synthesized
  source 1..22: mol_type = other DNA
ttatttttatttttattttttt

SEQ ID NO: 8227 - DNA, 22 bp, synthetic construct
  misc_feature 1..22: note = chemically synthesized
  source 1..22: mol_type = other DNA
tatttttatttttatttttttg

SEQ ID NO: 8228 - DNA, 22 bp, synthetic construct
  misc_feature 1..22: note = chemically synthesized
  source 1..22: mol_type = other DNA
atttttatttttatttttttga

SEQ ID NO: 8229 - DNA, 22 bp, synthetic construct
  misc_feature 1..22: note = chemically synthesized
  source 1..22: mol_type = other DNA
tttttatttttatttttttgag

SEQ ID NO: 8230 - DNA, 22 bp, synthetic construct
  misc_feature 1..22: note = chemically synthesized
  source 1..22: mol_type = other DNA
ttatttttatttttttgagatg

SEQ ID NO: 8231 - DNA, 22 bp, synthetic construct
  misc_feature 1..22: note = chemically synthesized
  source 1..22: mol_type = other DNA
tatttttatttttttgagatgg

SEQ ID NO: 8232 - DNA, 22 bp, synthetic construct
  misc_feature 1..22: note = chemically synthesized
  source 1..22: mol_type = other DNA
atttttatttttttgagatgga

SEQ ID NO: 8233 - DNA, 22 bp, synthetic construct
  misc_feature 1..22: note = chemically synthesized
  source 1..22: mol_type = other DNA
tttttatttttttgagatggag

SEQ ID NO: 8234 - DNA, 22 bp, synthetic construct
  misc_feature 1..22: note = chemically synthesized
  source 1..22: mol_type = other DNA
ttatttttttgagatggagtct

SEQ ID NO: 8235 - DNA, 22 bp, synthetic construct
  misc_feature 1..22: note = chemically synthesized
  source 1..22: mol_type = other DNA
tatttttttgagatggagtctc

SEQ ID NO: 8236 - DNA, 22 bp, synthetic construct
  misc_feature 1..22: note = chemically synthesized
  source 1..22: mol_type = other DNA
atttttttgagatggagtctca

SEQ ID NO: 8237 - DNA, 22 bp, synthetic construct
  misc_feature 1..22: note = chemically synthesized
  source 1..22: mol_type = other DNA
tttttttgagatggagtctcac

SEQ ID NO: 8238 - DNA, 22 bp, synthetic construct
  misc_feature 1..22: note = chemically synthesized
  source 1..22: mol_type = other DNA
ttttgagatggagtctcactct

SEQ ID NO: 8239 - DNA, 22 bp, synthetic construct
  misc_feature 1..22: note = chemically synthesized
  source 1..22: mol_type = other DNA
tttgagatggagtctcactctg

SEQ ID NO: 8240 - DNA, 22 bp, synthetic construct
  misc_feature 1..22: note = chemically synthesized
  source 1..22: mol_type = other DNA
ttgagatggagtctcactctgt

SEQ ID NO: 8241 - DNA, 22 bp, synthetic construct
  misc_feature 1..22: note = chemically synthesized
  source 1..22: mol_type = other DNA
tgagatggagtctcactctgtc

SEQ ID NO: 8242 - DNA, 22 bp, synthetic construct
  misc_feature 1..22: note = chemically synthesized
  source 1..22: mol_type = other DNA
gagatggagtctcactctgtca

SEQ ID NO: 8243 - DNA, 22 bp, synthetic construct
  misc_feature 1..22: note = chemically synthesized
  source 1..22: mol_type = other DNA
agatggagtctcactctgtcac

SEQ ID NO: 8244 - DNA, 22 bp, synthetic construct
  misc_feature 1..22: note = chemically synthesized
  source 1..22: mol_type = other DNA
actctgtcacctaggctggagt

SEQ ID NO: 8245 - DNA, 22 bp, synthetic construct
  misc_feature 1..22: note = chemically synthesized
  source 1..22: mol_type = other DNA
tgtcacctaggctggagtgcag

SEQ ID NO: 8246 - DNA, 22 bp, synthetic construct
  misc_feature 1..22: note = chemically synthesized
  source 1..22: mol_type = other DNA
tcacctaggctggagtgcagtg

SEQ ID NO: 8247 - DNA, 22 bp, synthetic construct
  misc_feature 1..22: note = chemically synthesized
  source 1..22: mol_type = other DNA
ggctggagtgcagtggcgcaaa

SEQ ID NO: 8248 - DNA, 22 bp, synthetic construct
  misc_feature 1..22: note = chemically synthesized
  source 1..22: mol_type = other DNA
gagtgcagtggcgcaaactcgg

SEQ ID NO: 8249 - DNA, 22 bp, synthetic construct
  misc_feature 1..22: note = chemically synthesized
  source 1..22: mol_type = other DNA
ggctcactgcaagctctgcctc

SEQ ID NO: 8250 - DNA, 22 bp, synthetic construct
  misc_feature 1..22: note = chemically synthesized
  source 1..22: mol_type = other DNA
actgcaagctctgcctcctggg

SEQ ID NO: 8251 - DNA, 22 bp, synthetic construct
  misc_feature 1..22: note = chemically synthesized
  source 1..22: mol_type = other DNA
caagctctgcctcctgggttca

SEQ ID NO: 8252 - DNA, 22 bp, synthetic construct
  misc_feature 1..22: note = chemically synthesized
  source 1..22: mol_type = other DNA
tgcctcctgggttcatgccatt

SEQ ID NO: 8253 - DNA, 22 bp, synthetic construct
  misc_feature 1..22: note = chemically synthesized
  source 1..22: mol_type = other DNA
cctcctgggttcatgccattct

SEQ ID NO: 8254 - DNA, 22 bp, synthetic construct
  misc_feature 1..22: note = chemically synthesized
  source 1..22: mol_type = other DNA
ctgggttcatgccattctcctg

SEQ ID NO: 8255 - DNA, 22 bp, synthetic construct
  misc_feature 1..22: note = chemically synthesized
  source 1..22: mol_type = other DNA
ggttcatgccattctcctgcct

SEQ ID NO: 8256 - DNA, 22 bp, synthetic construct
  misc_feature 1..22: note = chemically synthesized
  source 1..22: mol_type = other DNA
atgccattctcctgcctcagcc

SEQ ID NO: 8257 - DNA, 22 bp, synthetic construct
  misc_feature 1..22: note = chemically synthesized
  source 1..22: mol_type = other DNA
tcctgcctcagccttccgagta

SEQ ID NO: 8258 - DNA, 22 bp, synthetic construct
  misc_feature 1..22: note = chemically synthesized
  source 1..22: mol_type = other DNA
ctgcctcagccttccgagtagc

SEQ ID NO: 8259 - DNA, 22 bp, synthetic construct
  misc_feature 1..22: note = chemically synthesized
  source 1..22: mol_type = other DNA
cctcagccttccgagtagctgg

SEQ ID NO: 8260 - DNA, 22 bp, synthetic construct
  misc_feature 1..22: note = chemically synthesized
  source 1..22: mol_type = other DNA
agccttccgagtagctgggact

SEQ ID NO: 8261 - DNA, 22 bp, synthetic construct
  misc_feature 1..22: note = chemically synthesized
  source 1..22: mol_type = other DNA
ccgagtagctgggactacaggc

SEQ ID NO: 8262 - DNA, 22 bp, synthetic construct
  misc_feature 1..22: note = chemically synthesized
  source 1..22: mol_type = other DNA
cgagtagctgggactacaggcg

SEQ ID NO: 8263 - DNA, 22 bp, synthetic construct
  misc_feature 1..22: note = chemically synthesized
  source 1..22: mol_type = other DNA
ggactacaggcgtctgccacca

SEQ ID NO: 8264 - DNA, 22 bp, synthetic construct
  misc_feature 1..22: note = chemically synthesized
  source 1..22: mol_type = other DNA
caggcgtctgccaccacgccca

SEQ ID NO: 8265 - DNA, 22 bp, synthetic construct
  misc_feature 1..22: note = chemically synthesized
  source 1..22: mol_type = other DNA
ccaccacgcccagctaattttt

SEQ ID NO: 8266 - DNA, 22 bp, synthetic construct
  misc_feature 1..22: note = chemically synthesized
  source 1..22: mol_type = other DNA
attttttgtatttttattagag

SEQ ID NO: 8267 - DNA, 22 bp, synthetic construct
  misc_feature 1..22: note = chemically synthesized
  source 1..22: mol_type = other DNA
tttgtatttttattagagatgg

SEQ ID NO: 8268 - DNA, 22 bp, synthetic construct
  misc_feature 1..22: note = chemically synthesized
  source 1..22: mol_type = other DNA
ttgtatttttattagagatggg

SEQ ID NO: 8269 - DNA, 22 bp, synthetic construct
  misc_feature 1..22: note = chemically synthesized
  source 1..22: mol_type = other DNA
tgtatttttattagagatgggg

SEQ ID NO: 8270 - DNA, 22 bp, synthetic construct
  misc_feature 1..22: note = chemically synthesized
  source 1..22: mol_type = other DNA
gtatttttattagagatggggt

SEQ ID NO: 8271 - DNA, 22 bp, synthetic construct
  misc_feature 1..22: note = chemically synthesized
  source 1..22: mol_type = other DNA
tatttttattagagatggggtt

SEQ ID NO: 8272 - DNA, 22 bp, synthetic construct
  misc_feature 1..22: note = chemically synthesized
  source 1..22: mol_type = other DNA
ttattagagatggggtttcacc

SEQ ID NO: 8273 - DNA, 22 bp, synthetic construct
  misc_feature 1..22: note = chemically synthesized
  source 1..22: mol_type = other DNA
tattagagatggggtttcacca

SEQ ID NO: 8274 - DNA, 22 bp, synthetic construct
  misc_feature 1..22: note = chemically synthesized
  source 1..22: mol_type = other DNA
attagagatggggtttcaccat

SEQ ID NO: 8275 - DNA, 22 bp, synthetic construct
  misc_feature 1..22: note = chemically synthesized
  source 1..22: mol_type = other DNA
ttagagatggggtttcaccatg

SEQ ID NO: 8276 - DNA, 22 bp, synthetic construct
  misc_feature 1..22: note = chemically synthesized
  source 1..22: mol_type = other DNA
gagatggggtttcaccatgtta

SEQ ID NO: 8277 - DNA, 22 bp, synthetic construct
  misc_feature 1..22: note = chemically synthesized
  source 1..22: mol_type = other DNA
caccatgttagccaggatggtc

SEQ ID NO: 8278 - DNA, 22 bp, synthetic construct
  misc_feature 1..22: note = chemically synthesized
  source 1..22: mol_type = other DNA
accatgttagccaggatggtct

SEQ ID NO: 8279 - DNA, 22 bp, synthetic construct
  misc_feature 1..22: note = chemically synthesized
  source 1..22: mol_type = other DNA
gccaggatggtctcgatctcct

SEQ ID NO: 8280 - DNA, 22 bp, synthetic construct
  misc_feature 1..22: note = chemically synthesized
  source 1..22: mol_type = other DNA
gatctcctgacctcgtgatcca

SEQ ID NO: 8281 - DNA, 22 bp, synthetic construct
  misc_feature 1..22: note = chemically synthesized
  source 1..22: mol_type = other DNA
ctgacctcgtgatccacccgct

SEQ ID NO: 8282 - DNA, 22 bp, synthetic construct
  misc_feature 1..22: note = chemically synthesized
  source 1..22: mol_type = other DNA
acctcgtgatccacccgctttg

SEQ ID NO: 8283 - DNA, 22 bp, synthetic construct
  misc_feature 1..22: note = chemically synthesized
  source 1..22: mol_type = other DNA
gtgatccacccgctttggcctc

SEQ ID NO: 8284 - DNA, 22 bp, synthetic construct
  misc_feature 1..22: note = chemically synthesized
  source 1..22: mol_type = other DNA
tggcctcccaaagtgctgggat

SEQ ID NO: 8285 - DNA, 22 bp, synthetic construct
  misc_feature 1..22: note = chemically synthesized
  source 1..22: mol_type = other DNA
ggcctcccaaagtgctgggatt

SEQ ID NO: 8286 - DNA, 22 bp, synthetic construct
  misc_feature 1..22: note = chemically synthesized
  source 1..22: mol_type = other DNA
gcctcccaaagtgctgggatta

SEQ ID NO: 8287 - DNA, 22 bp, synthetic construct
  misc_feature 1..22: note = chemically synthesized
  source 1..22: mol_type = other DNA
ccaaagtgctgggattacaggc

SEQ ID NO: 8288 - DNA, 22 bp, synthetic construct
  misc_feature 1..22: note = chemically synthesized
  source 1..22: mol_type = other DNA
ggattacaggcgtgagccaccg

SEQ ID NO: 8289 - DNA, 22 bp, synthetic construct
  misc_feature 1..22: note = chemically synthesized
  source 1..22: mol_type = other DNA
caggcgtgagccaccgtgcccg

SEQ ID NO: 8290 - DNA, 22 bp, synthetic construct
  misc_feature 1..22: note = chemically synthesized
  source 1..22: mol_type = other DNA
cttcactttcttcatttaaaaa

SEQ ID NO: 8291 - DNA, 22 bp, synthetic construct
  misc_feature 1..22: note = chemically synthesized
  source 1..22: mol_type = other DNA
cactttcttcatttaaaaaaga

SEQ ID NO: 8292 - DNA, 22 bp, synthetic construct
  misc_feature 1..22: note = chemically synthesized
  source 1..22: mol_type = other DNA
actttcttcatttaaaaaagaa

SEQ ID NO: 8293 - DNA, 22 bp, synthetic construct
  misc_feature 1..22: note = chemically synthesized
  source 1..22: mol_type = other DNA
tcttcatttaaaaaagaaatgg

SEQ ID NO: 8294 - DNA, 22 bp, synthetic construct
  misc_feature 1..22: note = chemically synthesized
  source 1..22: mol_type = other DNA
cttcatttaaaaaagaaatggg

SEQ ID NO: 8295 - DNA, 22 bp, synthetic construct
  misc_feature 1..22: note = chemically synthesized
  source 1..22: mol_type = other DNA
ttcatttaaaaaagaaatgggg

SEQ ID NO: 8296 - DNA, 22 bp, synthetic construct
  misc_feature 1..22: note = chemically synthesized
  source 1..22: mol_type = other DNA
catttaaaaaagaaatggggat

SEQ ID NO: 8297 - DNA, 22 bp, synthetic construct
  misc_feature 1..22: note = chemically synthesized
  source 1..22: mol_type = other DNA
atttaaaaaagaaatggggata

SEQ ID NO: 8298 - DNA, 22 bp, synthetic construct
  misc_feature 1..22: note = chemically synthesized
  source 1..22: mol_type = other DNA
aaaaaagaaatggggataatag

SEQ ID NO: 8299 - DNA, 22 bp, synthetic construct
  misc_feature 1..22: note = chemically synthesized
  source 1..22: mol_type = other DNA
aaaaagaaatggggataatagt

SEQ ID NO: 8300 - DNA, 22 bp, synthetic construct
  misc_feature 1..22: note = chemically synthesized
  source 1..22: mol_type = other DNA
tctcatagaattattgtaagaa

SEQ ID NO: 8301 - DNA, 22 bp, synthetic construct
  misc_feature 1..22: note = chemically synthesized
  source 1..22: mol_type = other DNA
atagaattattgtaagaagtgc

SEQ ID NO: 8302 - DNA, 22 bp, synthetic construct
  misc_feature 1..22: note = chemically synthesized
  source 1..22: mol_type = other DNA
ttgtaagaagtgcatgcagtaa

SEQ ID NO: 8303 - DNA, 22 bp, synthetic construct
  misc_feature 1..22: note = chemically synthesized
  source 1..22: mol_type = other DNA
taagaagtgcatgcagtaatgc

SEQ ID NO: 8304 - DNA, 22 bp, synthetic construct
  misc_feature 1..22: note = chemically synthesized
  source 1..22: mol_type = other DNA
agaagagtcggacacgaagtaa

SEQ ID NO: 8305 - DNA, 22 bp, synthetic construct
  misc_feature 1..22: note = chemically synthesized
  source 1..22: mol_type = other DNA
ttatcatccttatcataatttt

SEQ ID NO: 8306 - DNA, 22 bp, synthetic construct
  misc_feature 1..22: note = chemically synthesized
  source 1..22: mol_type = other DNA
tatcatccttatcataattttc

SEQ ID NO: 8307 - DNA, 22 bp, synthetic construct
  misc_feature 1..22: note = chemically synthesized
  source 1..22: mol_type = other DNA
atcatccttatcataattttca

SEQ ID NO: 8308 - DNA, 22 bp, synthetic construct
  misc_feature 1..22: note = chemically synthesized
  source 1..22: mol_type = other DNA
tcatccttatcataattttcat

SEQ ID NO: 8309 - DNA, 22 bp, synthetic construct
  misc_feature 1..22: note = chemically synthesized
  source 1..22: mol_type = other DNA
atcataattttcattatcagaa

SEQ ID NO: 8310 - DNA, 22 bp, synthetic construct
  misc_feature 1..22: note = chemically synthesized
  source 1..22: mol_type = other DNA
tcataattttcattatcagaac

SEQ ID NO: 8311 - DNA, 22 bp, synthetic construct
  misc_feature 1..22: note = chemically synthesized
  source 1..22: mol_type = other DNA
tcattatcagaacaaggagaga

SEQ ID NO: 8312 - DNA, 22 bp, synthetic construct
  misc_feature 1..22: note = chemically synthesized
  source 1..22: mol_type = other DNA
cattatcagaacaaggagagac

SEQ ID NO: 8313 - DNA, 22 bp, synthetic construct
  misc_feature 1..22: note = chemically synthesized
  source 1..22: mol_type = other DNA
attatcagaacaaggagagacc

SEQ ID NO: 8314 - DNA, 22 bp, synthetic construct
  misc_feature 1..22: note = chemically synthesized
  source 1..22: mol_type = other DNA
tcagaacaaggagagaccaggt

SEQ ID NO: 8315 - DNA, 22 bp, synthetic construct
  misc_feature 1..22: note = chemically synthesized
  source 1..22: mol_type = other DNA
ttgtgattcttcaggtctggaa

SEQ ID NO: 8316 - DNA, 22 bp, synthetic construct
  misc_feature 1..22: note = chemically synthesized
  source 1..22: mol_type = other DNA
tgattcttcaggtctggaatac

SEQ ID NO: 8317 - DNA, 22 bp, synthetic construct
  misc_feature 1..22: note = chemically synthesized
  source 1..22: mol_type = other DNA
ttcaggtctggaatactagagt

SEQ ID NO: 8318 - DNA, 22 bp, synthetic construct
  misc_feature 1..22: note = chemically synthesized
  source 1..22: mol_type = other DNA
caggtctggaatactagagtag

SEQ ID NO: 8319 - DNA, 22 bp, synthetic construct
  misc_feature 1..22: note = chemically synthesized
  source 1..22: mol_type = other DNA
aggtctggaatactagagtagc

SEQ ID NO: 8320 - DNA, 22 bp, synthetic construct
  misc_feature 1..22: note = chemically synthesized
  source 1..22: mol_type = other DNA
gaatactagagtagcatcccaa

SEQ ID NO: 8321 - DNA, 22 bp, synthetic construct
  misc_feature 1..22: note = chemically synthesized
  source 1..22: mol_type = other DNA
gagtagcatcccaaatgaaggc

SEQ ID NO: 8322 - DNA, 22 bp, synthetic construct
  misc_feature 1..22: note = chemically synthesized
  source 1..22: mol_type = other DNA
aactttgcaaatctgtatgaca

SEQ ID NO: 8323 - DNA, 22 bp, synthetic construct
  misc_feature 1..22: note = chemically synthesized
  source 1..22: mol_type = other DNA
tgcaaatctgtatgacaccttc

SEQ ID NO: 8324 - DNA, 22 bp, synthetic construct
  misc_feature 1..22: note = chemically synthesized
  source 1..22: mol_type = other DNA
gcaaatctgtatgacaccttca

SEQ ID NO: 8325 - DNA, 22 bp, synthetic construct
  misc_feature 1..22: note = chemically synthesized
  source 1..22: mol_type = other DNA
caaatctgtatgacaccttcat

SEQ ID NO: 8326 - DNA, 22 bp, synthetic construct
  misc_feature 1..22: note = chemically synthesized
  source 1..22: mol_type = other DNA
tatgacaccttcatgccaatta

SEQ ID NO: 8327 - DNA, 22 bp, synthetic construct
  misc_feature 1..22: note = chemically synthesized
  source 1..22: mol_type = other DNA
catgccaattagaaaaaacacc

SEQ ID NO: 8328 - DNA, 22 bp, synthetic construct
  misc_feature 1..22: note = chemically synthesized
  source 1..22: mol_type = other DNA
atgccaattagaaaaaacacct

SEQ ID NO: 8329 - DNA, 22 bp, synthetic construct
  misc_feature 1..22: note = chemically synthesized
  source 1..22: mol_type = other DNA
gaaaaaacacctcttcacaacc

SEQ ID NO: 8330 - DNA, 22 bp, synthetic construct
  misc_feature 1..22: note = chemically synthesized
  source 1..22: mol_type = other DNA
ttcacaacccctttcaagatat

SEQ ID NO: 8331 - DNA, 22 bp, synthetic construct
  misc_feature 1..22: note = chemically synthesized
  source 1..22: mol_type = other DNA
cacaacccctttcaagatattt

SEQ ID NO: 8332 - DNA, 22 bp, synthetic construct
  misc_feature 1..22: note = chemically synthesized
  source 1..22: mol_type = other DNA
acaacccctttcaagatatttg

SEQ ID NO: 8333 - DNA, 22 bp, synthetic construct
  misc_feature 1..22: note = chemically synthesized
  source 1..22: mol_type = other DNA
tcaagatatttgcctcctacct

SEQ ID NO: 8334 - DNA, 22 bp, synthetic construct
  misc_feature 1..22: note = chemically synthesized
  source 1..22: mol_type = other DNA
caagatatttgcctcctacctg

SEQ ID NO: 8335 - DNA, 22 bp, synthetic construct
  misc_feature 1..22: note = chemically synthesized
  source 1..22: mol_type = other DNA
aagatatttgcctcctacctgc

SEQ ID NO: 8336 - DNA, 22 bp, synthetic construct
  misc_feature 1..22: note = chemically synthesized
  source 1..22: mol_type = other DNA
gcctcctacctgctaaaaacac

SEQ ID NO: 8337 - DNA, 22 bp, synthetic construct
  misc_feature 1..22: note = chemically synthesized
  source 1..22: mol_type = other DNA
cctcctacctgctaaaaacacc

SEQ ID NO: 8338 - DNA, 22 bp, synthetic construct
  misc_feature 1..22: note = chemically synthesized
  source 1..22: mol_type = other DNA
ctacctgctaaaaacacccatc

SEQ ID NO: 8339 - DNA, 22 bp, synthetic construct
  misc_feature 1..22: note = chemically synthesized
  source 1..22: mol_type = other DNA
cctgctaaaaacacccatcata

SEQ ID NO: 8340 - DNA, 22 bp, synthetic construct
  misc_feature 1..22: note = chemically synthesized
  source 1..22: mol_type = other DNA
ctaaaaacacccatcatactac

SEQ ID NO: 8341 - DNA, 22 bp, synthetic construct
  misc_feature 1..22: note = chemically synthesized
  source 1..22: mol_type = other DNA
aaaacacccatcatactaccca

SEQ ID NO: 8342 - DNA, 22 bp, synthetic construct
  misc_feature 1..22: note = chemically synthesized
  source 1..22: mol_type = other DNA
cccacagatagccatgatgctt

SEQ ID NO: 8343 - DNA, 22 bp, synthetic construct
  misc_feature 1..22: note = chemically synthesized
  source 1..22: mol_type = other DNA
tttctgggacaggtgcctcttc

SEQ ID NO: 8344 - DNA, 22 bp, synthetic construct
  misc_feature 1..22: note = chemically synthesized
  source 1..22: mol_type = other DNA
ttctgggacaggtgcctcttcc

SEQ ID NO: 8345 - DNA, 22 bp, synthetic construct
  misc_feature 1..22: note = chemically synthesized
  source 1..22: mol_type = other DNA
tctgggacaggtgcctcttcca

SEQ ID NO: 8346 - DNA, 22 bp, synthetic construct
  misc_feature 1..22: note = chemically synthesized
  source 1..22: mol_type = other DNA
ctgggacaggtgcctcttccat

SEQ ID NO: 8347 - DNA, 22 bp, synthetic construct
  misc_feature 1..22: note = chemically synthesized
  source 1..22: mol_type = other DNA
tgggacaggtgcctcttccatt

SEQ ID NO: 8348 - DNA, 22 bp, synthetic construct
  misc_feature 1..22: note = chemically synthesized
  source 1..22: mol_type = other DNA
ggacaggtgcctcttccattcg

SEQ ID NO: 8349 - DNA, 22 bp, synthetic construct
  misc_feature 1..22: note = chemically synthesized
  source 1..22: mol_type = other DNA
ttccattcgtgcagtgtacagc

SEQ ID NO: 8350 - DNA, 22 bp, synthetic construct
  misc_feature 1..22: note = chemically synthesized
  source 1..22: mol_type = other DNA
ccattcgtgcagtgtacagcct

SEQ ID NO: 8351 - DNA, 22 bp, synthetic construct
  misc_feature 1..22: note = chemically synthesized
  source 1..22: mol_type = other DNA
cattcgtgcagtgtacagcctt

SEQ ID NO: 8352 - DNA, 22 bp, synthetic construct
  misc_feature 1..22: note = chemically synthesized
  source 1..22: mol_type = other DNA
gtgcagtgtacagccttcatag

SEQ ID NO: 8353 - DNA, 22 bp, synthetic construct
  misc_feature 1..22: note = chemically synthesized
  source 1..22: mol_type = other DNA
catagctgtgcaactcacatca

SEQ ID NO: 8354 - DNA, 22 bp, synthetic construct
  misc_feature 1..22: note = chemically synthesized
  source 1..22: mol_type = other DNA
atagctgtgcaactcacatcac

SEQ ID NO: 8355 - DNA, 22 bp, synthetic construct
  misc_feature 1..22: note = chemically synthesized
  source 1..22: mol_type = other DNA
tgcaactcacatcacaatcaga

SEQ ID NO: 8356 - DNA, 22 bp, synthetic construct
  misc_feature 1..22: note = chemically synthesized
  source 1..22: mol_type = other DNA
acatcacaatcagatggaagaa

SEQ ID NO: 8357 - DNA, 22 bp, synthetic construct
  misc_feature 1..22: note = chemically synthesized
  source 1..22: mol_type = other DNA
ggtgacagatgagttactgggt

SEQ ID NO: 8358 - DNA, 22 bp, synthetic construct
  misc_feature 1..22: note = chemically synthesized
  source 1..22: mol_type = other DNA
gtgacagatgagttactgggta

SEQ ID NO: 8359 - DNA, 22 bp, synthetic construct
  misc_feature 1..22: note = chemically synthesized
  source 1..22: mol_type = other DNA
ctgggtaacacagagagaggat

SEQ ID NO: 8360 - DNA, 22 bp, synthetic construct
  misc_feature 1..22: note = chemically synthesized
  source 1..22: mol_type = other DNA
ggtaacacagagagaggattca

SEQ ID NO: 8361 - DNA, 22 bp, synthetic construct
  misc_feature 1..22: note = chemically synthesized
  source 1..22: mol_type = other DNA
aaaggaaaagttgaacgggtcc

SEQ ID NO: 8362 - DNA, 22 bp, synthetic construct
  misc_feature 1..22: note = chemically synthesized
  source 1..22: mol_type = other DNA
aacgggtccagaaaatgcatag

SEQ ID NO: 8363 - DNA, 22 bp, synthetic construct
  misc_feature 1..22: note = chemically synthesized
  source 1..22: mol_type = other DNA
gtaaggttatgactagccacgt

SEQ ID NO: 8364 - DNA, 22 bp, synthetic construct
  misc_feature 1..22: note = chemically synthesized
  source 1..22: mol_type = other DNA
tgactagccacgtcccagggtt

SEQ ID NO: 8365 - DNA, 22 bp, synthetic construct
  misc_feature 1..22: note = chemically synthesized
  source 1..22: mol_type = other DNA
gccacgtcccagggttcaaagc

SEQ ID NO: 8366 - DNA, 22 bp, synthetic construct
  misc_feature 1..22: note = chemically synthesized
  source 1..22: mol_type = other DNA
aaagcttttctcagatgttaaa

SEQ ID NO: 8367 - DNA, 22 bp, synthetic construct
  misc_feature 1..22: note = chemically synthesized
  source 1..22: mol_type = other DNA
ttctcagatgttaaaatgaatc

SEQ ID NO: 8368 - DNA, 22 bp, synthetic construct
  misc_feature 1..22: note = chemically synthesized
  source 1..22: mol_type = other DNA
tctcagatgttaaaatgaatca

SEQ ID NO: 8369 - DNA, 22 bp, synthetic construct
  misc_feature 1..22: note = chemically synthesized
  source 1..22: mol_type = other DNA
ctcagatgttaaaatgaatcat

SEQ ID NO: 8370 - DNA, 22 bp, synthetic construct
  misc_feature 1..22: note = chemically synthesized
  source 1..22: mol_type = other DNA
tcagatgttaaaatgaatcatg

SEQ ID NO: 8371 - DNA, 22 bp, synthetic construct
  misc_feature 1..22: note = chemically synthesized
  source 1..22: mol_type = other DNA
agatgttaaaatgaatcatgta

SEQ ID NO: 8372 - DNA, 22 bp, synthetic construct
  misc_feature 1..22: note = chemically synthesized
  source 1..22: mol_type = other DNA
aaatgaatcatgtaagtccccc

SEQ ID NO: 8373 - DNA, 22 bp, synthetic construct
  misc_feature 1..22: note = chemically synthesized
  source 1..22: mol_type = other DNA
aaggagtcctcttccaaaaata

SEQ ID NO: 8374 - DNA, 22 bp, synthetic construct
  misc_feature 1..22: note = chemically synthesized
  source 1..22: mol_type = other DNA
aggagtcctcttccaaaaatag

SEQ ID NO: 8375 - DNA, 22 bp, synthetic construct
  misc_feature 1..22: note = chemically synthesized
  source 1..22: mol_type = other DNA
ttccaaaaataggaaatgaaat

SEQ ID NO: 8376 - DNA, 22 bp, synthetic construct
  misc_feature 1..22: note = chemically synthesized
  source 1..22: mol_type = other DNA
ccaaaaataggaaatgaaatga

SEQ ID NO: 8377 - DNA, 22 bp, synthetic construct
  misc_feature 1..22: note = chemically synthesized
  source 1..22: mol_type = other DNA
caaaaataggaaatgaaatgac

SEQ ID NO: 8378 - DNA, 22 bp, synthetic construct
  misc_feature 1..22: note = chemically synthesized
  source 1..22: mol_type = other DNA
tgaggtgacggaggaaatgaag

SEQ ID NO: 8379 - DNA, 22 bp, synthetic construct
  misc_feature 1..22: note = chemically synthesized
  source 1..22: mol_type = other DNA
aggtgacggaggaaatgaagga

SEQ ID NO: 8380 - DNA, 22 bp, synthetic construct
  misc_feature 1..22: note = chemically synthesized
  source 1..22: mol_type = other DNA
tagatgcagcttgaggttcatg

SEQ ID NO: 8381 - DNA, 22 bp, synthetic construct
  misc_feature 1..22: note = chemically synthesized
  source 1..22: mol_type = other DNA
gatgcagcttgaggttcatgag

SEQ ID NO: 8382 - DNA, 22 bp, synthetic construct
  misc_feature 1..22: note = chemically synthesized
  source 1..22: mol_type = other DNA
gaggttcatgagagacagttcc

SEQ ID NO: 8383 - DNA, 22 bp, synthetic construct
  misc_feature 1..22: note = chemically synthesized
  source 1..22: mol_type = other DNA
aggttcatgagagacagttcca

SEQ ID NO: 8384 - DNA, 22 bp, synthetic construct
  misc_feature 1..22: note = chemically synthesized
  source 1..22: mol_type = other DNA
atgagagacagttccaggggag

SEQ ID NO: 8385 - DNA, 22 bp, synthetic construct
  misc_feature 1..22: note = chemically synthesized
  source 1..22: mol_type = other DNA
caggggagaggtcacagctagg

SEQ ID NO: 8386 - DNA, 22 bp, synthetic construct
  misc_feature 1..22: note = chemically synthesized
  source 1..22: mol_type = other DNA
gggatcaccggcatgcaggaac

SEQ ID NO: 8387 - DNA, 22 bp, synthetic construct
  misc_feature 1..22: note = chemically synthesized
  source 1..22: mol_type = other DNA
agaaacctaaatggggaaatct

SEQ ID NO: 8388 - DNA, 22 bp, synthetic construct
  misc_feature 1..22: note = chemically synthesized
  source 1..22: mol_type = other DNA
aatggggaaatctttttgagga

SEQ ID NO: 8389 - DNA, 22 bp, synthetic construct
  misc_feature 1..22: note = chemically synthesized
  source 1..22: mol_type = other DNA
tttgaggaaatgaacagagaag

SEQ ID NO: 8390 - DNA, 22 bp, synthetic construct
  misc_feature 1..22: note = chemically synthesized
  source 1..22: mol_type = other DNA
ttgaggaaatgaacagagaagg

SEQ ID NO: 8391 - DNA, 22 bp, synthetic construct
  misc_feature 1..22: note = chemically synthesized
  source 1..22: mol_type = other DNA
tgaggaaatgaacagagaaggc

SEQ ID NO: 8392 - DNA, 22 bp, synthetic construct
  misc_feature 1..22: note = chemically synthesized
  source 1..22: mol_type = other DNA
gaggaaatgaacagagaaggct

SEQ ID NO: 8393 - DNA, 22 bp, synthetic construct
  misc_feature 1..22: note = chemically synthesized
  source 1..22: mol_type = other DNA
aggaaatgaacagagaaggcta

SEQ ID NO: 8394 - DNA, 22 bp, synthetic construct
  misc_feature 1..22: note = chemically synthesized
  source 1..22: mol_type = other DNA
aaatcaaggagttcgtcaggca

SEQ ID NO: 8395 - DNA, 22 bp, synthetic construct
  misc_feature 1..22: note = chemically synthesized
  source 1..22: mol_type = other DNA
gtcaggcaatttctatgtttag

SEQ ID NO: 8396 - DNA, 22 bp, synthetic construct
  misc_feature 1..22: note = chemically synthesized
  source 1..22: mol_type = other DNA
ctatgtttaggttcaactctct

SEQ ID NO: 8397 - DNA, 22 bp, synthetic construct
  misc_feature 1..22: note = chemically synthesized
  source 1..22: mol_type = other DNA
tatgtttaggttcaactctctc

SEQ ID NO: 8398 - DNA, 22 bp, synthetic construct
  misc_feature 1..22: note = chemically synthesized
  source 1..22: mol_type = other DNA
tgtttaggttcaactctctcct

SEQ ID NO: 8399 - DNA, 22 bp, synthetic construct
  misc_feature 1..22: note = chemically synthesized
  source 1..22: mol_type = other DNA
aggttcaactctctcctgaaac

SEQ ID NO: 8400 - DNA, 22 bp, synthetic construct
  misc_feature 1..22: note = chemically synthesized
  source 1..22: mol_type = other DNA
ggttcaactctctcctgaaaca

SEQ ID NO: 8401 - DNA, 22 bp, synthetic construct
  misc_feature 1..22: note = chemically synthesized
  source 1..22: mol_type = other DNA
aactctctcctgaaacatgaag

SEQ ID NO: 8402 - DNA, 22 bp, synthetic construct
  misc_feature 1..22: note = chemically synthesized
  source 1..22: mol_type = other DNA
tctcctgaaacatgaagagctc

SEQ ID NO: 8403 - DNA, 22 bp, synthetic construct
  misc_feature 1..22: note = chemically synthesized
  source 1..22: mol_type = other DNA
tcctgaaacatgaagagctcat

SEQ ID NO: 8404 - DNA, 22 bp, synthetic construct
  misc_feature 1..22: note = chemically synthesized
  source 1..22: mol_type = other DNA
ctgaaacatgaagagctcataa

SEQ ID NO: 8405 - DNA, 22 bp, synthetic construct
  misc_feature 1..22: note = chemically synthesized
  source 1..22: mol_type = other DNA
aaacatgaagagctcataaatg

SEQ ID NO: 8406 - DNA, 22 bp, synthetic construct
  misc_feature 1..22: note = chemically synthesized
  source 1..22: mol_type = other DNA
ataaatgcactccctctttgag

SEQ ID NO: 8407 - DNA, 22 bp, synthetic construct
  misc_feature 1..22: note = chemically synthesized
  source 1..22: mol_type = other DNA
cctctttgagtctctagttttg

SEQ ID NO: 8408 - DNA, 22 bp, synthetic construct
  misc_feature 1..22: note = chemically synthesized
  source 1..22: mol_type = other DNA
tttgagtctctagttttgtctc

SEQ ID NO: 8409 - DNA, 22 bp, synthetic construct
  misc_feature 1..22: note = chemically synthesized
  source 1..22: mol_type = other DNA
tgagtctctagttttgtctcct

SEQ ID NO: 8410 - DNA, 22 bp, synthetic construct
  misc_feature 1..22: note = chemically synthesized
  source 1..22: mol_type = other DNA
gagtctctagttttgtctcctt

SEQ ID NO: 8411 - DNA, 22 bp, synthetic construct
  misc_feature 1..22: note = chemically synthesized
  source 1..22: mol_type = other DNA
agtctctagttttgtctccttc

SEQ ID NO: 8412 - DNA, 22 bp, synthetic construct
  misc_feature 1..22: note = chemically synthesized
  source 1..22: mol_type = other DNA
tagttttgtctccttcccacag

SEQ ID NO: 8413 - DNA, 22 bp, synthetic construct
  misc_feature 1..22: note = chemically synthesized
  source 1..22: mol_type = other DNA
gttttgtctccttcccacagtg

SEQ ID NO: 8414 - DNA, 22 bp, synthetic construct
  misc_feature 1..22: note = chemically synthesized
  source 1..22: mol_type = other DNA
tgtctccttcccacagtgagtc

SEQ ID NO: 8415 - DNA, 22 bp, synthetic construct
  misc_feature 1..22: note = chemically synthesized
  source 1..22: mol_type = other DNA
gtctccttcccacagtgagtct

SEQ ID NO: 8416 - DNA, 22 bp, synthetic construct
  misc_feature 1..22: note = chemically synthesized
  source 1..22: mol_type = other DNA
tctccttcccacagtgagtctg

SEQ ID NO: 8417 - DNA, 22 bp, synthetic construct
  misc_feature 1..22: note = chemically synthesized
  source 1..22: mol_type = other DNA
cttcccacagtgagtctgcagg

SEQ ID NO: 8418 - DNA, 22 bp, synthetic construct
  misc_feature 1..22: note = chemically synthesized
  source 1..22: mol_type = other DNA
cccacagtgagtctgcaggctg

SEQ ID NO: 8419 - DNA, 22 bp, synthetic construct
  misc_feature 1..22: note = chemically synthesized
  source 1..22: mol_type = other DNA
ccacagtgagtctgcaggctgc

SEQ ID NO: 8420 - DNA, 22 bp, synthetic construct
  misc_feature 1..22: note = chemically synthesized
  source 1..22: mol_type = other DNA
caggctgcgtgtcactcacgtt

SEQ ID NO: 8421 - DNA, 22 bp, synthetic construct
  misc_feature 1..22: note = chemically synthesized
  source 1..22: mol_type = other DNA
cgtgtcactcacgttcagctaa

SEQ ID NO: 8422 - DNA, 22 bp, synthetic construct
  misc_feature 1..22: note = chemically synthesized
  source 1..22: mol_type = other DNA
acgttcagctaagacgtagtgc

SEQ ID NO: 8423 - DNA, 22 bp, synthetic construct
  misc_feature 1..22: note = chemically synthesized
  source 1..22: mol_type = other DNA
agctaagacgtagtgccccatg

SEQ ID NO: 8424 - DNA, 22 bp, synthetic construct
  misc_feature 1..22: note = chemically synthesized
  source 1..22: mol_type = other DNA
agacgtagtgccccatggctcc

SEQ ID NO: 8425 - DNA, 22 bp, synthetic construct
  misc_feature 1..22: note = chemically synthesized
  source 1..22: mol_type = other DNA
ctcctgtggagacaagagaccc

SEQ ID NO: 8426 - DNA, 22 bp, synthetic construct
  misc_feature 1..22: note = chemically synthesized
  source 1..22: mol_type = other DNA
ctgtggagacaagagacccagg

SEQ ID NO: 8427 - DNA, 22 bp, synthetic construct
  misc_feature 1..22: note = chemically synthesized
  source 1..22: mol_type = other DNA
tggagacaagagacccaggaaa

SEQ ID NO: 8428 - DNA, 22 bp, synthetic construct
  misc_feature 1..22: note = chemically synthesized
  source 1..22: mol_type = other DNA
ggcaccatcttgcctcttctct

SEQ ID NO: 8429 - DNA, 22 bp, synthetic construct
  misc_feature 1..22: note = chemically synthesized
  source 1..22: mol_type = other DNA
gcctcttctctcttccttattt

SEQ ID NO: 8430 - DNA, 22 bp, synthetic construct
  misc_feature 1..22: note = chemically synthesized
  source 1..22: mol_type = other DNA
cctcttctctcttccttatttt

SEQ ID NO: 8431 - DNA, 22 bp, synthetic construct
  misc_feature 1..22: note = chemically synthesized
  source 1..22: mol_type = other DNA
ttctctcttccttattttcctc

SEQ ID NO: 8432 - DNA, 22 bp, synthetic construct
  misc_feature 1..22: note = chemically synthesized
  source 1..22: mol_type = other DNA
ctctcttccttattttcctcat

SEQ ID NO: 8433 - DNA, 22 bp, synthetic construct
  misc_feature 1..22: note = chemically synthesized
  source 1..22: mol_type = other DNA
tctcttccttattttcctcatt

SEQ ID NO: 8434 - DNA, 22 bp, synthetic construct
  misc_feature 1..22: note = chemically synthesized
  source 1..22: mol_type = other DNA
tcttccttattttcctcattca

SEQ ID NO: 8435 - DNA, 22 bp, synthetic construct
  misc_feature 1..22: note = chemically synthesized
  source 1..22: mol_type = other DNA
ttccttattttcctcattcacc

SEQ ID NO: 8436 - DNA, 22 bp, synthetic construct
  misc_feature 1..22: note = chemically synthesized
  source 1..22: mol_type = other DNA
ccttattttcctcattcaccca

SEQ ID NO: 8437 - DNA, 22 bp, synthetic construct
  misc_feature 1..22: note = chemically synthesized
  source 1..22: mol_type = other DNA
cttattttcctcattcacccat

SEQ ID NO: 8438 - DNA, 22 bp, synthetic construct
  misc_feature 1..22: note = chemically synthesized
  source 1..22: mol_type = other DNA
attttcctcattcacccatctc

SEQ ID NO: 8439 - DNA, 22 bp, synthetic construct
  misc_feature 1..22: note = chemically synthesized
  source 1..22: mol_type = other DNA
ttttcctcattcacccatctca

SEQ ID NO: 8440 - DNA, 22 bp, synthetic construct
  misc_feature 1..22: note = chemically synthesized
  source 1..22: mol_type = other DNA
tcctcattcacccatctcaatt

SEQ ID NO: 8441 - DNA, 22 bp, synthetic construct
  misc_feature 1..22: note = chemically synthesized
  source 1..22: mol_type = other DNA
cctcattcacccatctcaattt

SEQ ID NO: 8442 - DNA, 22 bp, synthetic construct
  misc_feature 1..22: note = chemically synthesized
  source 1..22: mol_type = other DNA
ctcattcacccatctcaattta

SEQ ID NO: 8443 - DNA, 22 bp, synthetic construct
  misc_feature 1..22: note = chemically synthesized
  source 1..22: mol_type = other DNA
attcacccatctcaatttagac

SEQ ID NO: 8444 - DNA, 22 bp, synthetic construct
  misc_feature 1..22: note = chemically synthesized
  source 1..22: mol_type = other DNA
acccatctcaatttagacctgg

SEQ ID NO: 8445 - DNA, 22 bp, synthetic construct
  misc_feature 1..22: note = chemically synthesized
  source 1..22: mol_type = other DNA
aatttagacctgggcactattg

SEQ ID NO: 8446 - DNA, 22 bp, synthetic construct
  misc_feature 1..22: note = chemically synthesized
  source 1..22: mol_type = other DNA
agacctgggcactattggattt

SEQ ID NO: 8447 - DNA, 22 bp, synthetic construct
  misc_feature 1..22: note = chemically synthesized
  source 1..22: mol_type = other DNA
gacctgggcactattggatttc

SEQ ID NO: 8448 - DNA, 22 bp, synthetic construct
  misc_feature 1..22: note = chemically synthesized
  source 1..22: mol_type = other DNA
ggcactattggatttcaagaac

SEQ ID NO: 8449 - DNA, 22 bp, synthetic construct
  misc_feature 1..22: note = chemically synthesized
  source 1..22: mol_type = other DNA
ttggatttcaagaaccattatc

SEQ ID NO: 8450 - DNA, 22 bp, synthetic construct
  misc_feature 1..22: note = chemically synthesized
  source 1..22: mol_type = other DNA
gatttcaagaaccattatctct

SEQ ID NO: 8451 - DNA, 22 bp, synthetic construct
  misc_feature 1..22: note = chemically synthesized
  source 1..22: mol_type = other DNA
caagaaccattatctctcatct

SEQ ID NO: 8452 - DNA, 22 bp, synthetic construct
  misc_feature 1..22: note = chemically synthesized
  source 1..22: mol_type = other DNA
aagaaccattatctctcatctg

SEQ ID NO: 8453 - DNA, 22 bp, synthetic construct
  misc_feature 1..22: note = chemically synthesized
  source 1..22: mol_type = other DNA
tctctcatctggaaatgcttat

SEQ ID NO: 8454 - DNA, 22 bp, synthetic construct
  misc_feature 1..22: note = chemically synthesized
  source 1..22: mol_type = other DNA
tcatctggaaatgcttattggc

SEQ ID NO: 8455 - DNA, 22 bp, synthetic construct
  misc_feature 1..22: note = chemically synthesized
  source 1..22: mol_type = other DNA
atctggaaatgcttattggctt

SEQ ID NO: 8456 - DNA, 22 bp, synthetic construct
  misc_feature 1..22: note = chemically synthesized
  source 1..22: mol_type = other DNA
gaaatgcttattggctttctaa

SEQ ID NO: 8457 - DNA, 22 bp, synthetic construct
  misc_feature 1..22: note = chemically synthesized
  source 1..22: mol_type = other DNA
attggctttctaactggtctcc

SEQ ID NO: 8458 - DNA, 22 bp, synthetic construct
  misc_feature 1..22: note = chemically synthesized
  source 1..22: mol_type = other DNA
ttggctttctaactggtctcct

SEQ ID NO: 8459 - DNA, 22 bp, synthetic construct
  misc_feature 1..22: note = chemically synthesized
  source 1..22: mol_type = other DNA
gctttctaactggtctcctcac

SEQ ID NO: 8460 - DNA, 22 bp, synthetic construct
  misc_feature 1..22: note = chemically synthesized
  source 1..22: mol_type = other DNA
tctaactggtctcctcacctct

SEQ ID NO: 8461 - DNA, 22 bp, synthetic construct
  misc_feature 1..22: note = chemically synthesized
  source 1..22: mol_type = other DNA
ctaactggtctcctcacctctc

SEQ ID NO: 8462 - DNA, 22 bp, synthetic construct
  misc_feature 1..22: note = chemically synthesized
  source 1..22: mol_type = other DNA
taactggtctcctcacctctca

SEQ ID NO: 8463 - DNA, 22 bp, synthetic construct
  misc_feature 1..22: note = chemically synthesized
  source 1..22: mol_type = other DNA
actggtctcctcacctctcatc

SEQ ID NO: 8464 - DNA, 22 bp, synthetic construct
  misc_feature 1..22: note = chemically synthesized
  source 1..22: mol_type = other DNA
gtctcctcacctctcatctaac

SEQ ID NO: 8465 - DNA, 22 bp, synthetic construct
  misc_feature 1..22: note = chemically synthesized
  source 1..22: mol_type = other DNA
ctcacctctcatctaacttctt

SEQ ID NO: 8466 - DNA, 22 bp, synthetic construct
  misc_feature 1..22: note = chemically synthesized
  source 1..22: mol_type = other DNA
acctctcatctaacttcttaac

SEQ ID NO: 8467 - DNA, 22 bp, synthetic construct
  misc_feature 1..22: note = chemically synthesized
  source 1..22: mol_type = other DNA
tcatctaacttcttaacaacac

SEQ ID NO: 8468 - DNA, 22 bp, synthetic construct
  misc_feature 1..22: note = chemically synthesized
  source 1..22: mol_type = other DNA
atctaacttcttaacaacacat

SEQ ID NO: 8469 - DNA, 22 bp, synthetic construct
  misc_feature 1..22: note = chemically synthesized
  source 1..22: mol_type = other DNA
acttcttaacaacacattcacc

SEQ ID NO: 8470 - DNA, 22 bp, synthetic construct
  misc_feature 1..22: note = chemically synthesized
  source 1..22: mol_type = other DNA
cttaacaacacattcaccatat

SEQ ID NO: 8471 - DNA, 22 bp, synthetic construct
  misc_feature 1..22: note = chemically synthesized
  source 1..22: mol_type = other DNA
ttaacaacacattcaccatata

SEQ ID NO: 8472 - DNA, 22 bp, synthetic construct
  misc_feature 1..22: note = chemically synthesized
  source 1..22: mol_type = other DNA
aacaacacattcaccatataag

SEQ ID NO: 8473 - DNA, 22 bp, synthetic construct
  misc_feature 1..22: note = chemically synthesized
  source 1..22: mol_type = other DNA
acaacacattcaccatataagg

SEQ ID NO: 8474 - DNA, 22 bp, synthetic construct
  misc_feature 1..22: note = chemically synthesized
  source 1..22: mol_type = other DNA
accatataagggagatcgtggt

SEQ ID NO: 8475 - DNA, 22 bp, synthetic construct
  misc_feature 1..22: note = chemically synthesized
  source 1..22: mol_type = other DNA
ctttcttaggatccttcaatga

SEQ ID NO: 8476 - DNA, 22 bp, synthetic construct
  misc_feature 1..22: note = chemically synthesized
  source 1..22: mol_type = other DNA
tcttaggatccttcaatgacac

SEQ ID NO: 8477 - DNA, 22 bp, synthetic construct
  misc_feature 1..22: note = chemically synthesized
  source 1..22: mol_type = other DNA
cttaggatccttcaatgacacc

SEQ ID NO: 8478 - DNA, 22 bp, synthetic construct
  misc_feature 1..22: note = chemically synthesized
  source 1..22: mol_type = other DNA
ttaggatccttcaatgacaccc

SEQ ID NO: 8479 - DNA, 22 bp, synthetic construct
  misc_feature 1..22: note = chemically synthesized
  source 1..22: mol_type = other DNA
aggatccttcaatgacacccca

SEQ ID NO: 8480 - DNA, 22 bp, synthetic construct
  misc_feature 1..22: note = chemically synthesized
  source 1..22: mol_type = other DNA
ggatccttcaatgacaccccag

SEQ ID NO: 8481 - DNA, 22 bp, synthetic construct
  misc_feature 1..22: note = chemically synthesized
  source 1..22: mol_type = other DNA
caatgacaccccagtgatcata

SEQ ID NO: 8482 - DNA, 22 bp, synthetic construct
  misc_feature 1..22: note = chemically synthesized
  source 1..22: mol_type = other DNA
aatgacaccccagtgatcataa

SEQ ID NO: 8483 - DNA, 22 bp, synthetic construct
  misc_feature 1..22: note = chemically synthesized
  source 1..22: mol_type = other DNA
ggactctgtatgagctggcttc

SEQ ID NO: 8484 - DNA, 22 bp, synthetic construct
  misc_feature 1..22: note = chemically synthesized
  source 1..22: mol_type = other DNA
gactctgtatgagctggcttct

SEQ ID NO: 8485 - DNA, 22 bp, synthetic construct
  misc_feature 1..22: note = chemically synthesized
  source 1..22: mol_type = other DNA
tgtatgagctggcttctttctg

SEQ ID NO: 8486 - DNA, 22 bp, synthetic construct
  misc_feature 1..22: note = chemically synthesized
  source 1..22: mol_type = other DNA
tatgagctggcttctttctgat

SEQ ID NO: 8487 - DNA, 22 bp, synthetic construct
  misc_feature 1..22: note = chemically synthesized
  source 1..22: mol_type = other DNA
gcttctttctgattctcttttc

SEQ ID NO: 8488 - DNA, 22 bp, synthetic construct
  misc_feature 1..22: note = chemically synthesized
  source 1..22: mol_type = other DNA
ctttctgattctcttttcccta

SEQ ID NO: 8489 - DNA, 22 bp, synthetic construct
  misc_feature 1..22: note = chemically synthesized
  source 1..22: mol_type = other DNA
tttctgattctcttttccctac

SEQ ID NO: 8490 - DNA, 22 bp, synthetic construct
  misc_feature 1..22: note = chemically synthesized
  source 1..22: mol_type = other DNA
tctgattctcttttccctacac

SEQ ID NO: 8491 - DNA, 22 bp, synthetic construct
  misc_feature 1..22: note = chemically synthesized
  source 1..22: mol_type = other DNA
ctgattctcttttccctacacc

SEQ ID NO: 8492 - DNA, 22 bp, synthetic construct
  misc_feature 1..22: note = chemically synthesized
  source 1..22: mol_type = other DNA
tgattctcttttccctacacca

SEQ ID NO: 8493 - DNA, 22 bp, synthetic construct
  misc_feature 1..22: note = chemically synthesized
  source 1..22: mol_type = other DNA
attctcttttccctacaccaca

SEQ ID NO: 8494 - DNA, 22 bp, synthetic construct
  misc_feature 1..22: note = chemically synthesized
  source 1..22: mol_type = other DNA
tcttttccctacaccacagatg

SEQ ID NO: 8495 - DNA, 22 bp, synthetic construct
  misc_feature 1..22: note = chemically synthesized
  source 1..22: mol_type = other DNA
ttttccctacaccacagatgtt

SEQ ID NO: 8496 - DNA, 22 bp, synthetic construct
  misc_feature 1..22: note = chemically synthesized
  source 1..22: mol_type = other DNA
ttccctacaccacagatgttca

SEQ ID NO: 8497 - DNA, 22 bp, synthetic construct
  misc_feature 1..22: note = chemically synthesized
  source 1..22: mol_type = other DNA
tccctacaccacagatgttcag

SEQ ID NO: 8498 - DNA, 22 bp, synthetic construct
  misc_feature 1..22: note = chemically synthesized
  source 1..22: mol_type = other DNA
ccctacaccacagatgttcagg

SEQ ID NO: 8499 - DNA, 22 bp, synthetic construct
  misc_feature 1..22: note = chemically synthesized
  source 1..22: mol_type = other DNA
cctacaccacagatgttcaggg

SEQ ID NO: 8500 - DNA, 22 bp, synthetic construct
  misc_feature 1..22: note = chemically synthesized
  source 1..22: mol_type = other DNA
caccacagatgttcagggggta

SEQ ID NO: 8501 - DNA, 22 bp, synthetic construct
  misc_feature 1..22: note = chemically synthesized
  source 1..22: mol_type = other DNA
agggggtagaaatgcataattg

SEQ ID NO: 8502 - DNA, 22 bp, synthetic construct
  misc_feature 1..22: note = chemically synthesized
  source 1..22: mol_type = other DNA
gtgagtgatagctacgcaaact

SEQ ID NO: 8503 - DNA, 22 bp, synthetic construct
  misc_feature 1..22: note = chemically synthesized
  source 1..22: mol_type = other DNA
cgcaaactcagggttaaggtac

SEQ ID NO: 8504 - DNA, 22 bp, synthetic construct
  misc_feature 1..22: note = chemically synthesized
  source 1..22: mol_type = other DNA
agggttaaggtacagtaattat

SEQ ID NO: 8505 - DNA, 22 bp, synthetic construct
  misc_feature 1..22: note = chemically synthesized
  source 1..22: mol_type = other DNA
aggtacagtaattatttctaat

SEQ ID NO: 8506 - DNA, 22 bp, synthetic construct
  misc_feature 1..22: note = chemically synthesized
  source 1..22: mol_type = other DNA
tttctaatctcccagtatgcct

SEQ ID NO: 8507 - DNA, 22 bp, synthetic construct
  misc_feature 1..22: note = chemically synthesized
  source 1..22: mol_type = other DNA
ctaatctcccagtatgccttat

SEQ ID NO: 8508 - DNA, 22 bp, synthetic construct
  misc_feature 1..22: note = chemically synthesized
  source 1..22: mol_type = other DNA
taatctcccagtatgccttata

SEQ ID NO: 8509 - DNA, 22 bp, synthetic construct
  misc_feature 1..22: note = chemically synthesized
  source 1..22: mol_type = other DNA
atctcccagtatgccttatact

SEQ ID NO: 8510 - DNA, 22 bp, synthetic construct
  misc_feature 1..22: note = chemically synthesized
  source 1..22: mol_type = other DNA
ccagtatgccttatactctcct

SEQ ID NO: 8511 - DNA, 22 bp, synthetic construct
  misc_feature 1..22: note = chemically synthesized
  source 1..22: mol_type = other DNA
atactctcctacttggcatggt

SEQ ID NO: 8512 - DNA, 22 bp, synthetic construct
  misc_feature 1..22: note = chemically synthesized
  source 1..22: mol_type = other DNA
tactctcctacttggcatggtt

SEQ ID NO: 8513 - DNA, 22 bp, synthetic construct
  misc_feature 1..22: note = chemically synthesized
  source 1..22: mol_type = other DNA
tcctacttggcatggttgctcc

SEQ ID NO: 8514 - DNA, 22 bp, synthetic construct
  misc_feature 1..22: note = chemically synthesized
  source 1..22: mol_type = other DNA
ctacttggcatggttgctccgt

SEQ ID NO: 8515 - DNA, 22 bp, synthetic construct
  misc_feature 1..22: note = chemically synthesized
  source 1..22: mol_type = other DNA
cttggcatggttgctccgtctg

SEQ ID NO: 8516 - DNA, 22 bp, synthetic construct
  misc_feature 1..22: note = chemically synthesized
  source 1..22: mol_type = other DNA
ggcatggttgctccgtctgtgt

SEQ ID NO: 8517 - DNA, 22 bp, synthetic construct
  misc_feature 1..22: note = chemically synthesized
  source 1..22: mol_type = other DNA
gcatggttgctccgtctgtgta

SEQ ID NO: 8518 - DNA, 22 bp, synthetic construct
  misc_feature 1..22: note = chemically synthesized
  source 1..22: mol_type = other DNA
ctccgtctgtgtagacctccca

SEQ ID NO: 8519 - DNA, 22 bp, synthetic construct
  misc_feature 1..22: note = chemically synthesized
  source 1..22: mol_type = other DNA
cgtctgtgtagacctcccatca

SEQ ID NO: 8520 - DNA, 22 bp, synthetic construct
  misc_feature 1..22: note = chemically synthesized
  source 1..22: mol_type = other DNA
tgtagacctcccatcatcttca

SEQ ID NO: 8521 - DNA, 22 bp, synthetic construct
  misc_feature 1..22: note = chemically synthesized
  source 1..22: mol_type = other DNA
ccatcatcttcaacctcaccta

SEQ ID NO: 8522 - DNA, 22 bp, synthetic construct
  misc_feature 1..22: note = chemically synthesized
  source 1..22: mol_type = other DNA
caacctcacctaatggaatcca

SEQ ID NO: 8523 - DNA, 22 bp, synthetic construct
  misc_feature 1..22: note = chemically synthesized
  source 1..22: mol_type = other DNA
aacctcacctaatggaatccag

SEQ ID NO: 8524 - DNA, 22 bp, synthetic construct
  misc_feature 1..22: note = chemically synthesized
  source 1..22: mol_type = other DNA
acctaatggaatccagcttctc

SEQ ID NO: 8525 - DNA, 22 bp, synthetic construct
  misc_feature 1..22: note = chemically synthesized
  source 1..22: mol_type = other DNA
atggaatccagcttctccttca

SEQ ID NO: 8526 - DNA, 22 bp, synthetic construct
  misc_feature 1..22: note = chemically synthesized
  source 1..22: mol_type = other DNA
ctccttcaagatccagaaggct

SEQ ID NO: 8527 - DNA, 22 bp, synthetic construct
  misc_feature 1..22: note = chemically synthesized
  source 1..22: mol_type = other DNA
tccttcaagatccagaaggcta

SEQ ID NO: 8528 - DNA, 22 bp, synthetic construct
  misc_feature 1..22: note = chemically synthesized
  source 1..22: mol_type = other DNA
cttcaagatccagaaggctatc

SEQ ID NO: 8529 - DNA, 22 bp, synthetic construct
  misc_feature 1..22: note = chemically synthesized
  source 1..22: mol_type = other DNA
caagatccagaaggctatcttg

SEQ ID NO: 8530 - DNA, 22 bp, synthetic construct
  misc_feature 1..22: note = chemically synthesized
  source 1..22: mol_type = other DNA
aagatccagaaggctatcttga

SEQ ID NO: 8531 - DNA, 22 bp, synthetic construct
  misc_feature 1..22: note = chemically synthesized
  source 1..22: mol_type = other DNA
tcttgatccccagctgaatgtg

SEQ ID NO: 8532 - DNA, 22 bp, synthetic construct
  misc_feature 1..22: note = chemically synthesized
  source 1..22: mol_type = other DNA
gatccccagctgaatgtgatca

SEQ ID NO: 8533 - DNA, 22 bp, synthetic construct
  misc_feature 1..22: note = chemically synthesized
  source 1..22: mol_type = other DNA
atccccagctgaatgtgatcat

SEQ ID NO: 8534 - DNA, 22 bp, synthetic construct
  misc_feature 1..22: note = chemically synthesized
  source 1..22: mol_type = other DNA
aatgtgatcattctttcctttg

SEQ ID NO: 8535 - DNA, 22 bp, synthetic construct
  misc_feature 1..22: note = chemically synthesized
  source 1..22: mol_type = other DNA
tttcctttgacaccctaagcat

SEQ ID NO: 8536 - DNA, 22 bp, synthetic construct
  misc_feature 1..22: note = chemically synthesized
  source 1..22: mol_type = other DNA
tcctttgacaccctaagcattt

SEQ ID NO: 8537 - DNA, 22 bp, synthetic construct
  misc_feature 1..22: note = chemically synthesized
  source 1..22: mol_type = other DNA
cctttgacaccctaagcatttg

SEQ ID NO: 8538 - DNA, 22 bp, synthetic construct
  misc_feature 1..22: note = chemically synthesized
  source 1..22: mol_type = other DNA
ctttgacaccctaagcatttgc

SEQ ID NO: 8539 - DNA, 22 bp, synthetic construct
  misc_feature 1..22: note = chemically synthesized
  source 1..22: mol_type = other DNA
tgacaccctaagcatttgcttc

SEQ ID NO: 8540 - DNA, 22 bp, synthetic construct
  misc_feature 1..22: note = chemically synthesized
  source 1..22: mol_type = other DNA
gacaccctaagcatttgcttcc

SEQ ID NO: 8541 - DNA, 22 bp, synthetic construct
  misc_feature 1..22: note = chemically synthesized
  source 1..22: mol_type = other DNA
acaccctaagcatttgcttcct

SEQ ID NO: 8542 - DNA, 22 bp, synthetic construct
  misc_feature 1..22: note = chemically synthesized
  source 1..22: mol_type = other DNA
agcatttgcttcctgcctgctt

SEQ ID NO: 8543 - DNA, 22 bp, synthetic construct
  misc_feature 1..22: note = chemically synthesized
  source 1..22: mol_type = other DNA
gcttcctgcctgctttaggacc

SEQ ID NO: 8544 - DNA, 22 bp, synthetic construct
  misc_feature 1..22: note = chemically synthesized
  source 1..22: mol_type = other DNA
cttcctgcctgctttaggacct

SEQ ID NO: 8545 - DNA, 22 bp, synthetic construct
  misc_feature 1..22: note = chemically synthesized
  source 1..22: mol_type = other DNA
cctgcctgctttaggacctcat

SEQ ID NO: 8546 - DNA, 22 bp, synthetic construct
  misc_feature 1..22: note = chemically synthesized
  source 1..22: mol_type = other DNA
ctgcctgctttaggacctcatg

SEQ ID NO: 8547 - DNA, 22 bp, synthetic construct
  misc_feature 1..22: note = chemically synthesized
  source 1..22: mol_type = other DNA
cctgctttaggacctcatgggg

SEQ ID NO: 8548 - DNA, 22 bp, synthetic construct
  misc_feature 1..22: note = chemically synthesized
  source 1..22: mol_type = other DNA
ctttaggacctcatggggtctt

SEQ ID NO: 8549 - DNA, 22 bp, synthetic construct
  misc_feature 1..22: note = chemically synthesized
  source 1..22: mol_type = other DNA
taggacctcatggggtcttctt

SEQ ID NO: 8550 - DNA, 22 bp, synthetic construct
  misc_feature 1..22: note = chemically synthesized
  source 1..22: mol_type = other DNA
aggacctcatggggtcttcttt

SEQ ID NO: 8551 - DNA, 22 bp, synthetic construct
  misc_feature 1..22: note = chemically synthesized
  source 1..22: mol_type = other DNA
ggacctcatggggtcttcttta

SEQ ID NO: 8552 - DNA, 22 bp, synthetic construct
  misc_feature 1..22: note = chemically synthesized
  source 1..22: mol_type = other DNA
atggggtcttctttaactacat

SEQ ID NO: 8553 - DNA, 22 bp, synthetic construct
  misc_feature 1..22: note = chemically synthesized
  source 1..22: mol_type = other DNA
ctttaactacatttacttgcta

SEQ ID NO: 8554 - DNA, 22 bp, synthetic construct
  misc_feature 1..22: note = chemically synthesized
  source 1..22: mol_type = other DNA
tttaactacatttacttgctat

SEQ ID NO: 8555 - DNA, 22 bp, synthetic construct
  misc_feature 1..22: note = chemically synthesized
  source 1..22: mol_type = other DNA
taactacatttacttgctatca

SEQ ID NO: 8556 - DNA, 22 bp, synthetic construct
  misc_feature 1..22: note = chemically synthesized
  source 1..22: mol_type = other DNA
aactacatttacttgctatcaa

SEQ ID NO: 8557 - DNA, 22 bp, synthetic construct
  misc_feature 1..22: note = chemically synthesized
  source 1..22: mol_type = other DNA
actacatttacttgctatcaat

SEQ ID NO: 8558 - DNA, 22 bp, synthetic construct
  misc_feature 1..22: note = chemically synthesized
  source 1..22: mol_type = other DNA
catttacttgctatcaatttca

SEQ ID NO: 8559 - DNA, 22 bp, synthetic construct
  misc_feature 1..22: note = chemically synthesized
  source 1..22: mol_type = other DNA
acttgctatcaatttcattccc

SEQ ID NO: 8560 - DNA, 22 bp, synthetic construct
  misc_feature 1..22: note = chemically synthesized
  source 1..22: mol_type = other DNA
cttgctatcaatttcattccct

SEQ ID NO: 8561 - DNA, 22 bp, synthetic construct
  misc_feature 1..22: note = chemically synthesized
  source 1..22: mol_type = other DNA
gctatcaatttcattccctacc

SEQ ID NO: 8562 - DNA, 22 bp, synthetic construct
  misc_feature 1..22: note = chemically synthesized
  source 1..22: mol_type = other DNA
ctatcaatttcattccctacca

SEQ ID NO: 8563 - DNA, 22 bp, synthetic construct
  misc_feature 1..22: note = chemically synthesized
  source 1..22: mol_type = other DNA
tcaatttcattccctaccagat

SEQ ID NO: 8564 - DNA, 22 bp, synthetic construct
  misc_feature 1..22: note = chemically synthesized
  source 1..22: mol_type = other DNA
cattccctaccagatttgggtt

SEQ ID NO: 8565 - DNA, 22 bp, synthetic construct
  misc_feature 1..22: note = chemically synthesized
  source 1..22: mol_type = other DNA
attccctaccagatttgggttc

SEQ ID NO: 8566 - DNA, 22 bp, synthetic construct
  misc_feature 1..22: note = chemically synthesized
  source 1..22: mol_type = other DNA
cctaccagatttgggttctgag

SEQ ID NO: 8567 - DNA, 22 bp, synthetic construct
  misc_feature 1..22: note = chemically synthesized
  source 1..22: mol_type = other DNA
ccagatttgggttctgagaata

SEQ ID NO: 8568 - DNA, 22 bp, synthetic construct
  misc_feature 1..22: note = chemically synthesized
  source 1..22: mol_type = other DNA
gggttctgagaatagccacagt

SEQ ID NO: 8569 - DNA, 22 bp, synthetic construct
  misc_feature 1..22: note = chemically synthesized
  source 1..22: mol_type = other DNA
ggttctgagaatagccacagtg

SEQ ID NO: 8570 - DNA, 22 bp, synthetic construct
  misc_feature 1..22: note = chemically synthesized
  source 1..22: mol_type = other DNA
tgagaatagccacagtgacttc

SEQ ID NO: 8571 - DNA, 22 bp, synthetic construct
  misc_feature 1..22: note = chemically synthesized
  source 1..22: mol_type = other DNA
agaatagccacagtgacttctc

SEQ ID NO: 8572 - DNA, 22 bp, synthetic construct
  misc_feature 1..22: note = chemically synthesized
  source 1..22: mol_type = other DNA
ctcaacctcaaagcccctgtac

SEQ ID NO: 8573 - DNA, 22 bp, synthetic construct
  misc_feature 1..22: note = chemically synthesized
  source 1..22: mol_type = other DNA
tcaacctcaaagcccctgtact

SEQ ID NO: 8574 - DNA, 22 bp, synthetic construct
  misc_feature 1..22: note = chemically synthesized
  source 1..22: mol_type = other DNA
aacctcaaagcccctgtactac

SEQ ID NO: 8575 - DNA, 22 bp, synthetic construct
  misc_feature 1..22: note = chemically synthesized
  source 1..22: mol_type = other DNA
aaagcccctgtactaccttaaa

SEQ ID NO: 8576 - DNA, 22 bp, synthetic construct
  misc_feature 1..22: note = chemically synthesized
  source 1..22: mol_type = other DNA
tactaccttaaacagctcttgc

SEQ ID NO: 8577 - DNA, 22 bp, synthetic construct
  misc_feature 1..22: note = chemically synthesized
  source 1..22: mol_type = other DNA
ccttaaacagctcttgcaaaat

SEQ ID NO: 8578 - DNA, 22 bp, synthetic construct
  misc_feature 1..22: note = chemically synthesized
  source 1..22: mol_type = other DNA
aaacagctcttgcaaaatagta

SEQ ID NO: 8579 - DNA, 22 bp, synthetic construct
  misc_feature 1..22: note = chemically synthesized
  source 1..22: mol_type = other DNA
aacagctcttgcaaaatagtag

SEQ ID NO: 8580 - DNA, 22 bp, synthetic construct
  misc_feature 1..22: note = chemically synthesized
  source 1..22: mol_type = other DNA
ttgcaaaatagtaggtgctctg

SEQ ID NO: 8581 - DNA, 22 bp, synthetic construct
  misc_feature 1..22: note = chemically synthesized
  source 1..22: mol_type = other DNA
gcaaaatagtaggtgctctgaa

SEQ ID NO: 8582 - DNA, 22 bp, synthetic construct
  misc_feature 1..22: note = chemically synthesized
  source 1..22: mol_type = other DNA
caaaatagtaggtgctctgaag

SEQ ID NO: 8583 - DNA, 22 bp, synthetic construct
  misc_feature 1..22: note = chemically synthesized
  source 1..22: mol_type = other DNA
tgaagatgtttgttgaattaga

SEQ ID NO: 8584 - DNA, 22 bp, synthetic construct
  misc_feature 1..22: note = chemically synthesized
  source 1..22: mol_type = other DNA
aagatgtttgttgaattagaga

SEQ ID NO: 8585 - DNA, 22 bp, synthetic construct
  misc_feature 1..22: note = chemically synthesized
  source 1..22: mol_type = other DNA
gttgaattagagactttcattc

SEQ ID NO: 8586 - DNA, 22 bp, synthetic construct
  misc_feature 1..22: note = chemically synthesized
  source 1..22: mol_type = other DNA
ttgaattagagactttcattct

SEQ ID NO: 8587 - DNA, 22 bp, synthetic construct
  misc_feature 1..22: note = chemically synthesized
  source 1..22: mol_type = other DNA
aattagagactttcattctggg

SEQ ID NO: 8588 - DNA, 22 bp, synthetic construct
  misc_feature 1..22: note = chemically synthesized
  source 1..22: mol_type = other DNA
gagactttcattctggggagaa

SEQ ID NO: 8589 - DNA, 22 bp, synthetic construct
  misc_feature 1..22: note = chemically synthesized
  source 1..22: mol_type = other DNA
tcattctggggagaaccattat

SEQ ID NO: 8590 - DNA, 22 bp, synthetic construct
  misc_feature 1..22: note = chemically synthesized
  source 1..22: mol_type = other DNA
cattctggggagaaccattatt

SEQ ID NO: 8591 - DNA, 22 bp, synthetic construct
  misc_feature 1..22: note = chemically synthesized
  source 1..22: mol_type = other DNA
attctggggagaaccattattt

SEQ ID NO: 8592 - DNA, 22 bp, synthetic construct
  misc_feature 1..22: note = chemically synthesized
  source 1..22: mol_type = other DNA
tggggagaaccattattttctg

SEQ ID NO: 8593 - DNA, 22 bp, synthetic construct
  misc_feature 1..22: note = chemically synthesized
  source 1..22: mol_type = other DNA
gggagaaccattattttctgtc

SEQ ID NO: 8594 - DNA, 22 bp, synthetic construct
  misc_feature 1..22: note = chemically synthesized
  source 1..22: mol_type = other DNA
ttttctgtctcccagggagctg

SEQ ID NO: 8595 - DNA, 22 bp, synthetic construct
  misc_feature 1..22: note = chemically synthesized
  source 1..22: mol_type = other DNA
tctgtctcccagggagctgctg

SEQ ID NO: 8596 - DNA, 22 bp, synthetic construct
  misc_feature 1..22: note = chemically synthesized
  source 1..22: mol_type = other DNA
ctgtctcccagggagctgctgg

SEQ ID NO: 8597 - DNA, 22 bp, synthetic construct
  misc_feature 1..22: note = chemically synthesized
  source 1..22: mol_type = other DNA
tgtctcccagggagctgctggt

SEQ ID NO: 8598 - DNA, 22 bp, synthetic construct
  misc_feature 1..22: note = chemically synthesized
  source 1..22: mol_type = other DNA
tctcccagggagctgctggtgt

SEQ ID NO: 8599 - DNA, 22 bp, synthetic construct
  misc_feature 1..22: note = chemically synthesized
  source 1..22: mol_type = other DNA
ccagggagctgctggtgtcccc

SEQ ID NO: 8600 - DNA, 22 bp, synthetic construct
  misc_feature 1..22: note = chemically synthesized
  source 1..22: mol_type = other DNA
ctggtgtccccaaagaatataa

SEQ ID NO: 8601 - DNA, 22 bp, synthetic construct
  misc_feature 1..22: note = chemically synthesized
  source 1..22: mol_type = other DNA
gtgtccccaaagaatataaatg

SEQ ID NO: 8602 - DNA, 22 bp, synthetic construct
  misc_feature 1..22: note = chemically synthesized
  source 1..22: mol_type = other DNA
cccatggatgccagatcccctc

SEQ ID NO: 8603 - DNA, 22 bp, synthetic construct
  misc_feature 1..22: note = chemically synthesized
  source 1..22: mol_type = other DNA
ccatggatgccagatcccctct

SEQ ID NO: 8604 - DNA, 22 bp, synthetic construct
  misc_feature 1..22: note = chemically synthesized
  source 1..22: mol_type = other DNA
tgcccctcttcccactgtgccc

SEQ ID NO: 8605 - DNA, 22 bp, synthetic construct
  misc_feature 1..22: note = chemically synthesized
  source 1..22: mol_type = other DNA
cccctcttcccactgtgccctg

SEQ ID NO: 8606 - DNA, 22 bp, synthetic construct
  misc_feature 1..22: note = chemically synthesized
  source 1..22: mol_type = other DNA
ttcccactgtgccctggggcag

SEQ ID NO: 8607 - DNA, 22 bp, synthetic construct
  misc_feature 1..22: note = chemically synthesized
  source 1..22: mol_type = other DNA
cccactgtgccctggggcagag

SEQ ID NO: 8608 - DNA, 22 bp, synthetic construct
  misc_feature 1..22: note = chemically synthesized
  source 1..22: mol_type = other DNA
ccactgtgccctggggcagagg

SEQ ID NO: 8609 - DNA, 22 bp, synthetic construct
  misc_feature 1..22: note = chemically synthesized
  source 1..22: mol_type = other DNA
tgccctggggcagaggtactaa

SEQ ID NO: 8610 - DNA, 22 bp, synthetic construct
  misc_feature 1..22: note = chemically synthesized
  source 1..22: mol_type = other DNA
gggcagaggtactaagagactt

SEQ ID NO: 8611 - DNA, 22 bp, synthetic construct
  misc_feature 1..22: note = chemically synthesized
  source 1..22: mol_type = other DNA
agagacttcccccttgttccta

SEQ ID NO: 8612 - DNA, 22 bp, synthetic construct
  misc_feature 1..22: note = chemically synthesized
  source 1..22: mol_type = other DNA
cccccttgttcctactcacttg

SEQ ID NO: 8613 - DNA, 22 bp, synthetic construct
  misc_feature 1..22: note = chemically synthesized
  source 1..22: mol_type = other DNA
ccccttgttcctactcacttga

SEQ ID NO: 8614 - DNA, 22 bp, synthetic construct
  misc_feature 1..22: note = chemically synthesized
  source 1..22: mol_type = other DNA
gttcctactcacttgaaccctg

SEQ ID NO: 8615 - DNA, 22 bp, synthetic construct
  misc_feature 1..22: note = chemically synthesized
  source 1..22: mol_type = other DNA
ttcctactcacttgaaccctgc

SEQ ID NO: 8616 - DNA, 22 bp, synthetic construct
  misc_feature 1..22: note = chemically synthesized
  source 1..22: mol_type = other DNA
ctactcacttgaaccctgcctc

SEQ ID NO: 8617 - DNA, 22 bp, synthetic construct
  misc_feature 1..22: note = chemically synthesized
  source 1..22: mol_type = other DNA
ctcacttgaaccctgcctcttc

SEQ ID NO: 8618 - DNA, 22 bp, synthetic construct
  misc_feature 1..22: note = chemically synthesized
  source 1..22: mol_type = other DNA
acttgaaccctgcctcttcctt

SEQ ID NO: 8619 - DNA, 22 bp, synthetic construct
  misc_feature 1..22: note = chemically synthesized
  source 1..22: mol_type = other DNA
gaaccctgcctcttccttaata

SEQ ID NO: 8620 - DNA, 22 bp, synthetic construct
  misc_feature 1..22: note = chemically synthesized
  source 1..22: mol_type = other DNA
aaccctgcctcttccttaatat

SEQ ID NO: 8621 - DNA, 22 bp, synthetic construct
  misc_feature 1..22: note = chemically synthesized
  source 1..22: mol_type = other DNA
cctcttccttaatattatgaac

SEQ ID NO: 8622 - DNA, 22 bp, synthetic construct
  misc_feature 1..22: note = chemically synthesized
  source 1..22: mol_type = other DNA
ttccttaatattatgaacaaaa

SEQ ID NO: 8623 - DNA, 22 bp, synthetic construct
  misc_feature 1..22: note = chemically synthesized
  source 1..22: mol_type = other DNA
ccttaatattatgaacaaaatt

SEQ ID NO: 8624 - DNA, 22 bp, synthetic construct
  misc_feature 1..22: note = chemically synthesized
  source 1..22: mol_type = other DNA
cttaatattatgaacaaaattc

SEQ ID NO: 8625 - DNA, 22 bp, synthetic construct
  misc_feature 1..22: note = chemically synthesized
  source 1..22: mol_type = other DNA
aatattatgaacaaaattccaa

SEQ ID NO: 8626 - DNA, 22 bp, synthetic construct
  misc_feature 1..22: note = chemically synthesized
  source 1..22: mol_type = other DNA
atattatgaacaaaattccaat

SEQ ID NO: 8627 - DNA, 22 bp, synthetic construct
  misc_feature 1..22: note = chemically synthesized
  source 1..22: mol_type = other DNA
tgaacaaaattccaatgaacaa

SEQ ID NO: 8628 - DNA, 22 bp, synthetic construct
  misc_feature 1..22: note = chemically synthesized
  source 1..22: mol_type = other DNA
caatgaacaagatgacgacaaa

SEQ ID NO: 8629 - DNA, 22 bp, synthetic construct
  misc_feature 1..22: note = chemically synthesized
  source 1..22: mol_type = other DNA
cactgatgactccaatgactag

SEQ ID NO: 8630 - DNA, 22 bp, synthetic construct
  misc_feature 1..22: note = chemically synthesized
  source 1..22: mol_type = other DNA
atgactccaatgactagggtgc

SEQ ID NO: 8631 - DNA, 22 bp, synthetic construct
  misc_feature 1..22: note = chemically synthesized
  source 1..22: mol_type = other DNA
caatgactagggtgccagacgg

SEQ ID NO: 8632 - DNA, 22 bp, synthetic construct
  misc_feature 1..22: note = chemically synthesized
  source 1..22: mol_type = other DNA
gggtgccagacggtgagggctc

SEQ ID NO: 8633 - DNA, 22 bp, synthetic construct
  misc_feature 1..22: note = chemically synthesized
  source 1..22: mol_type = other DNA
taaaacagaaaaagcaagttaa

SEQ ID NO: 8634 - DNA, 22 bp, synthetic construct
  misc_feature 1..22: note = chemically synthesized
  source 1..22: mol_type = other DNA
aaacagaaaaagcaagttaaag

SEQ ID NO: 8635 - DNA, 22 bp, synthetic construct
  misc_feature 1..22: note = chemically synthesized
  source 1..22: mol_type = other DNA
aagcctttgattgccaccctca

SEQ ID NO: 8636 - DNA, 22 bp, synthetic construct
  misc_feature 1..22: note = chemically synthesized
  source 1..22: mol_type = other DNA
tgattgccaccctcagcccacc

SEQ ID NO: 8637 - DNA, 22 bp, synthetic construct
  misc_feature 1..22: note = chemically synthesized
  source 1..22: mol_type = other DNA
gattgccaccctcagcccaccc

SEQ ID NO: 8638 - DNA, 22 bp, synthetic construct
  misc_feature 1..22: note = chemically synthesized
  source 1..22: mol_type = other DNA
attgccaccctcagcccacccc

SEQ ID NO: 8639 - DNA, 22 bp, synthetic construct
  misc_feature 1..22: note = chemically synthesized
  source 1..22: mol_type = other DNA
ccaccctcagcccaccccctaa

SEQ ID NO: 8640 - DNA, 22 bp, synthetic construct
  misc_feature 1..22: note = chemically synthesized
  source 1..22: mol_type = other DNA
agcccaccccctaacaaagagc

SEQ ID NO: 8641 - DNA, 22 bp, synthetic construct
  misc_feature 1..22: note = chemically synthesized
  source 1..22: mol_type = other DNA
acaaagagcagatcctcatctc

SEQ ID NO: 8642 - DNA, 22 bp, synthetic construct
  misc_feature 1..22: note = chemically synthesized
  source 1..22: mol_type = other DNA
atctcactgccataattacctc

SEQ ID NO: 8643 - DNA, 22 bp, synthetic construct
  misc_feature 1..22: note = chemically synthesized
  source 1..22: mol_type = other DNA
actgccataattacctcctcag

SEQ ID NO: 8644 - DNA, 22 bp, synthetic construct
  misc_feature 1..22: note = chemically synthesized
  source 1..22: mol_type = other DNA
ccataattacctcctcaggcac

SEQ ID NO: 8645 - DNA, 22 bp, synthetic construct
  misc_feature 1..22: note = chemically synthesized
  source 1..22: mol_type = other DNA
cctcctcaggcactcctctcaa

SEQ ID NO: 8646 - DNA, 22 bp, synthetic construct
  misc_feature 1..22: note = chemically synthesized
  source 1..22: mol_type = other DNA
ctcaggcactcctctcaacccc

SEQ ID NO: 8647 - DNA, 22 bp, synthetic construct
  misc_feature 1..22: note = chemically synthesized
  source 1..22: mol_type = other DNA
aggcactcctctcaacccccaa

SEQ ID NO: 8648 - DNA, 22 bp, synthetic construct
  misc_feature 1..22: note = chemically synthesized
  source 1..22: mol_type = other DNA
ctctcaacccccaatagatttt

SEQ ID NO: 8649 - DNA, 22 bp, synthetic construct
  misc_feature 1..22: note = chemically synthesized
  source 1..22: mol_type = other DNA
tcaacccccaatagattttctc

SEQ ID NO: 8650 - DNA, 22 bp, synthetic construct
  misc_feature 1..22: note = chemically synthesized
  source 1..22: mol_type = other DNA
aacccccaatagattttctcag

SEQ ID NO: 8651 - DNA, 22 bp, synthetic construct
  misc_feature 1..22: note = chemically synthesized
  source 1..22: mol_type = other DNA
tctcagctcctggctctcatca

SEQ ID NO: 8652 - DNA, 22 bp, synthetic construct
  misc_feature 1..22: note = chemically synthesized
  source 1..22: mol_type = other DNA
ctcagctcctggctctcatcag

SEQ ID NO: 8653 - DNA, 22 bp, synthetic construct
  misc_feature 1..22: note = chemically synthesized
  source 1..22: mol_type = other DNA
tcagctcctggctctcatcagt

SEQ ID NO: 8654 - DNA, 22 bp, synthetic construct
  misc_feature 1..22: note = chemically synthesized
  source 1..22: mol_type = other DNA
agctcctggctctcatcagtca

SEQ ID NO: 8655 - DNA, 22 bp, synthetic construct
  misc_feature 1..22: note = chemically synthesized
  source 1..22: mol_type = other DNA
ctggctctcatcagtcacatac

SEQ ID NO: 8656 - DNA, 22 bp, synthetic construct
  misc_feature 1..22: note = chemically synthesized
  source 1..22: mol_type = other DNA
gctctcatcagtcacatacccc

SEQ ID NO: 8657 - DNA, 22 bp, synthetic construct
  misc_feature 1..22: note = chemically synthesized
  source 1..22: mol_type = other DNA
tcatcagtcacataccccagat

SEQ ID NO: 8658 - DNA, 22 bp, synthetic construct
  misc_feature 1..22: note = chemically synthesized
  source 1..22: mol_type = other DNA
atcagtcacataccccagatca

SEQ ID NO: 8659 - DNA, 22 bp, synthetic construct
  misc_feature 1..22: note = chemically synthesized
  source 1..22: mol_type = other DNA
atccaggcctgggtgctccacc

SEQ ID NO: 8660 - DNA, 22 bp, synthetic construct
  misc_feature 1..22: note = chemically synthesized
  source 1..22: mol_type = other DNA
ggtgctccacctggcacgtata

SEQ ID NO: 8661 - DNA, 22 bp, synthetic construct
  misc_feature 1..22: note = chemically synthesized
  source 1..22: mol_type = other DNA
cacctggcacgtatatctctgc

SEQ ID NO: 8662 - DNA, 22 bp, synthetic construct
  misc_feature 1..22: note = chemically synthesized
  source 1..22: mol_type = other DNA
gcacgtatatctctgctcttcc

SEQ ID NO: 8663 - DNA, 22 bp, synthetic construct
  misc_feature 1..22: note = chemically synthesized
  source 1..22: mol_type = other DNA
tgctcttccccagggggtacag

SEQ ID NO: 8664 - DNA, 22 bp, synthetic construct
  misc_feature 1..22: note = chemically synthesized
  source 1..22: mol_type = other DNA
ctcttccccagggggtacagcc

SEQ ID NO: 8665 - DNA, 22 bp, synthetic construct
  misc_feature 1..22: note = chemically synthesized
  source 1..22: mol_type = other DNA
ttccccagggggtacagccaag

SEQ ID NO: 8666 - DNA, 22 bp, synthetic construct
  misc_feature 1..22: note = chemically synthesized
  source 1..22: mol_type = other DNA
ccccagggggtacagccaaggt

SEQ ID NO: 8667 - DNA, 22 bp, synthetic construct
  misc_feature 1..22: note = chemically synthesized
  source 1..22: mol_type = other DNA
cccagggggtacagccaaggtt

SEQ ID NO: 8668 - DNA, 22 bp, synthetic construct
  misc_feature 1..22: note = chemically synthesized
  source 1..22: mol_type = other DNA
tccagccctggtaggtcccatc

SEQ ID NO: 8669 - DNA, 22 bp, synthetic construct
  misc_feature 1..22: note = chemically synthesized
  source 1..22: mol_type = other DNA
gtaggtcccatccccattgggc

SEQ ID NO: 8670 - DNA, 22 bp, synthetic construct
  misc_feature 1..22: note = chemically synthesized
  source 1..22: mol_type = other DNA
ggcaatacgtctttaggttcga

SEQ ID NO: 8671 - DNA, 22 bp, synthetic construct
  misc_feature 1..22: note = chemically synthesized
  source 1..22: mol_type = other DNA
taggttcgaactccttggcatc

SEQ ID NO: 8672 - DNA, 22 bp, synthetic construct
  misc_feature 1..22: note = chemically synthesized
  source 1..22: mol_type = other DNA
aggttcgaactccttggcatcc

SEQ ID NO: 8673 - DNA, 22 bp, synthetic construct
  misc_feature 1..22: note = chemically synthesized
  source 1..22: mol_type = other DNA
ggttcgaactccttggcatcca

SEQ ID NO: 8674 - DNA, 22 bp, synthetic construct
  misc_feature 1..22: note = chemically synthesized
  source 1..22: mol_type = other DNA
gaactccttggcatccattggc

SEQ ID NO: 8675 - DNA, 22 bp, synthetic construct
  misc_feature 1..22: note = chemically synthesized
  source 1..22: mol_type = other DNA
cttggcatccattggctgctta

SEQ ID NO: 8676 - DNA, 22 bp, synthetic construct
  misc_feature 1..22: note = chemically synthesized
  source 1..22: mol_type = other DNA
ggcatccattggctgcttatcc

SEQ ID NO: 8677 - DNA, 22 bp, synthetic construct
  misc_feature 1..22: note = chemically synthesized
  source 1..22: mol_type = other DNA
gcatccattggctgcttatcct

SEQ ID NO: 8678 - DNA, 22 bp, synthetic construct
  misc_feature 1..22: note = chemically synthesized
  source 1..22: mol_type = other DNA
gctgcttatccttcagccactt

SEQ ID NO: 8679 - DNA, 22 bp, synthetic construct
  misc_feature 1..22: note = chemically synthesized
  source 1..22: mol_type = other DNA
cttatccttcagccacttcatg

SEQ ID NO: 8680 - DNA, 22 bp, synthetic construct
  misc_feature 1..22: note = chemically synthesized
  source 1..22: mol_type = other DNA
atccttcagccacttcatggtg

SEQ ID NO: 8681 - DNA, 22 bp, synthetic construct
  misc_feature 1..22: note = chemically synthesized
  source 1..22: mol_type = other DNA
tccttcagccacttcatggtga

SEQ ID NO: 8682 - DNA, 22 bp, synthetic construct
  misc_feature 1..22: note = chemically synthesized
  source 1..22: mol_type = other DNA
cagccacttcatggtgatgttc

SEQ ID NO: 8683 - DNA, 22 bp, synthetic construct
  misc_feature 1..22: note = chemically synthesized
  source 1..22: mol_type = other DNA
agccacttcatggtgatgttct

SEQ ID NO: 8684 - DNA, 22 bp, synthetic construct
  misc_feature 1..22: note = chemically synthesized
  source 1..22: mol_type = other DNA
catggtgatgttctgggggtag

SEQ ID NO: 8685 - DNA, 22 bp, synthetic construct
  misc_feature 1..22: note = chemically synthesized
  source 1..22: mol_type = other DNA
atggtgatgttctgggggtagt

SEQ ID NO: 8686 - DNA, 22 bp, synthetic construct
  misc_feature 1..22: note = chemically synthesized
  source 1..22: mol_type = other DNA
tgggggtagtagttcaaggccc

SEQ ID NO: 8687 - DNA, 22 bp, synthetic construct
  misc_feature 1..22: note = chemically synthesized
  source 1..22: mol_type = other DNA
ggggtagtagttcaaggcccga

SEQ ID NO: 8688 - DNA, 22 bp, synthetic construct
  misc_feature 1..22: note = chemically synthesized
  source 1..22: mol_type = other DNA
aaggcccgacaccgtagagtgg

SEQ ID NO: 8689 - DNA, 22 bp, synthetic construct
  misc_feature 1..22: note = chemically synthesized
  source 1..22: mol_type = other DNA
aagaggtcacatgatgtgtcac

SEQ ID NO: 8690 - DNA, 22 bp, synthetic construct
  misc_feature 1..22: note = chemically synthesized
  source 1..22: mol_type = other DNA
caccaaaggaggcacttgacag

SEQ ID NO: 8691 - DNA, 22 bp, synthetic construct
  misc_feature 1..22: note = chemically synthesized
  source 1..22: mol_type = other DNA
accaaaggaggcacttgacagg

SEQ ID NO: 8692 - DNA, 22 bp, synthetic construct
  misc_feature 1..22: note = chemically synthesized
  source 1..22: mol_type = other DNA
gacaggaaagaggaaggatgag

SEQ ID NO: 8693 - DNA, 22 bp, synthetic construct
  misc_feature 1..22: note = chemically synthesized
  source 1..22: mol_type = other DNA
acaggaaagaggaaggatgagg

SEQ ID NO: 8694 - DNA, 22 bp, synthetic construct
  misc_feature 1..22: note = chemically synthesized
  source 1..22: mol_type = other DNA
tttacccttgccaggaagactg

SEQ ID NO: 8695 - DNA, 22 bp, synthetic construct
  misc_feature 1..22: note = chemically synthesized
  source 1..22: mol_type = other DNA
acccttgccaggaagactggaa

SEQ ID NO: 8696 - DNA, 22 bp, synthetic construct
  misc_feature 1..22: note = chemically synthesized
  source 1..22: mol_type = other DNA
cccttgccaggaagactggaac

SEQ ID NO: 8697 - DNA, 22 bp, synthetic construct
  misc_feature 1..22: note = chemically synthesized
  source 1..22: mol_type = other DNA
gccaggaagactggaactttca

SEQ ID NO: 8698 - DNA, 22 bp, synthetic construct
  misc_feature 1..22: note = chemically synthesized
  source 1..22: mol_type = other DNA
ccaggaagactggaactttcac

SEQ ID NO: 8699 - DNA, 22 bp, synthetic construct
  misc_feature 1..22: note = chemically synthesized
  source 1..22: mol_type = other DNA
gaactttcacttccttctatag

SEQ ID NO: 8700 - DNA, 22 bp, synthetic construct
  misc_feature 1..22: note = chemically synthesized
  source 1..22: mol_type = other DNA
tcacttccttctataggttgga

SEQ ID NO: 8701 - DNA, 22 bp, synthetic construct
  misc_feature 1..22: note = chemically synthesized
  source 1..22: mol_type = other DNA
cacttccttctataggttggag

SEQ ID NO: 8702 - DNA, 22 bp, synthetic construct
  misc_feature 1..22: note = chemically synthesized
  source 1..22: mol_type = other DNA
acttccttctataggttggagg

SEQ ID NO: 8703 - DNA, 22 bp, synthetic construct
  misc_feature 1..22: note = chemically synthesized
  source 1..22: mol_type = other DNA
ccttctataggttggaggaagg

SEQ ID NO: 8704 - DNA, 22 bp, synthetic construct
  misc_feature 1..22: note = chemically synthesized
  source 1..22: mol_type = other DNA
cttctataggttggaggaagga

SEQ ID NO: 8705 - DNA, 22 bp, synthetic construct
  misc_feature 1..22: note = chemically synthesized
  source 1..22: mol_type = other DNA
ctataggttggaggaaggaaat

SEQ ID NO: 8706 - DNA, 22 bp, synthetic construct
  misc_feature 1..22: note = chemically synthesized
  source 1..22: mol_type = other DNA
tataggttggaggaaggaaata

SEQ ID NO: 8707 - DNA, 22 bp, synthetic construct
  misc_feature 1..22: note = chemically synthesized
  source 1..22: mol_type = other DNA
taggttggaggaaggaaatacc

SEQ ID NO: 8708 - DNA, 22 bp, synthetic construct
  misc_feature 1..22: note = chemically synthesized
  source 1..22: mol_type = other DNA
gaggaaggaaatacccttttca

SEQ ID NO: 8709 - DNA, 22 bp, synthetic construct
  misc_feature 1..22: note = chemically synthesized
  source 1..22: mol_type = other DNA
ttcagaaaaaaacaagctacag

SEQ ID NO: 8710 - DNA, 22 bp, synthetic construct
  misc_feature 1..22: note = chemically synthesized
  source 1..22: mol_type = other DNA
tcagaaaaaaacaagctacagg

SEQ ID NO: 8711 - DNA, 22 bp, synthetic construct
  misc_feature 1..22: note = chemically synthesized
  source 1..22: mol_type = other DNA
cagaaaaaaacaagctacagga

SEQ ID NO: 8712 - DNA, 22 bp, synthetic construct
  misc_feature 1..22: note = chemically synthesized
  source 1..22: mol_type = other DNA
agaaaaaaacaagctacaggag

SEQ ID NO: 8713 - DNA, 22 bp, synthetic construct
  misc_feature 1..22: note = chemically synthesized
  source 1..22: mol_type = other DNA
caggagagacaccattttgtgt

SEQ ID NO: 8714 - DNA, 22 bp, synthetic construct
  misc_feature 1..22: note = chemically synthesized
  source 1..22: mol_type = other DNA
tgtgtcctaagattggactcta

SEQ ID NO: 8715 - DNA, 22 bp, synthetic construct
  misc_feature 1..22: note = chemically synthesized
  source 1..22: mol_type = other DNA
gtgtcctaagattggactctaa

SEQ ID NO: 8716 - DNA, 22 bp, synthetic construct
  misc_feature 1..22: note = chemically synthesized
  source 1..22: mol_type = other DNA
tgtcctaagattggactctaac

SEQ ID NO: 8717 - DNA, 22 bp, synthetic construct
  misc_feature 1..22: note = chemically synthesized
  source 1..22: mol_type = other DNA
agattggactctaacacagtgt

SEQ ID NO: 8718 - DNA, 22 bp, synthetic construct
  misc_feature 1..22: note = chemically synthesized
  source 1..22: mol_type = other DNA
gactctaacacagtgtcacttg

SEQ ID NO: 8719 - DNA, 22 bp, synthetic construct
  misc_feature 1..22: note = chemically synthesized
  source 1..22: mol_type = other DNA
taacacagtgtcacttggagag

SEQ ID NO: 8720 - DNA, 22 bp, synthetic construct
  misc_feature 1..22: note = chemically synthesized
  source 1..22: mol_type = other DNA
acacagtgtcacttggagagca

SEQ ID NO: 8721 - DNA, 22 bp, synthetic construct
  misc_feature 1..22: note = chemically synthesized
  source 1..22: mol_type = other DNA
ggagagcagtcagatcagcttg

SEQ ID NO: 8722 - DNA, 22 bp, synthetic construct
  misc_feature 1..22: note = chemically synthesized
  source 1..22: mol_type = other DNA
gagagcagtcagatcagcttgt

SEQ ID NO: 8723 - DNA, 22 bp, synthetic construct
  misc_feature 1..22: note = chemically synthesized
  source 1..22: mol_type = other DNA
gttctcctcacatgtaaatata

SEQ ID NO: 8724 - DNA, 22 bp, synthetic construct
  misc_feature 1..22: note = chemically synthesized
  source 1..22: mol_type = other DNA
ttctcctcacatgtaaatatac

SEQ ID NO: 8725 - DNA, 22 bp, synthetic construct
  misc_feature 1..22: note = chemically synthesized
  source 1..22: mol_type = other DNA
tcctcacatgtaaatatacata

SEQ ID NO: 8726 - DNA, 22 bp, synthetic construct
  misc_feature 1..22: note = chemically synthesized
  source 1..22: mol_type = other DNA
ctcacatgtaaatatacatatc

SEQ ID NO: 8727 - DNA, 22 bp, synthetic construct
  misc_feature 1..22: note = chemically synthesized
  source 1..22: mol_type = other DNA
acatgtaaatatacatatctgt

SEQ ID NO: 8728 - DNA, 22 bp, synthetic construct
  misc_feature 1..22: note = chemically synthesized
  source 1..22: mol_type = other DNA
ttacccatgttctttgttctga

SEQ ID NO: 8729 - DNA, 22 bp, synthetic construct
  misc_feature 1..22: note = chemically synthesized
  source 1..22: mol_type = other DNA
cccatgttctttgttctgatag

SEQ ID NO: 8730 - DNA, 22 bp, synthetic construct
  misc_feature 1..22: note = chemically synthesized
  source 1..22: mol_type = other DNA
tttgttctgatagataaaattg

SEQ ID NO: 8731 - DNA, 22 bp, synthetic construct
  misc_feature 1..22: note = chemically synthesized
  source 1..22: mol_type = other DNA
tgttctgatagataaaattgcc

SEQ ID NO: 8732 - DNA, 22 bp, synthetic construct
  misc_feature 1..22: note = chemically synthesized
  source 1..22: mol_type = other DNA
gttctgatagataaaattgccc

SEQ ID NO: 8733 - DNA, 22 bp, synthetic construct
  misc_feature 1..22: note = chemically synthesized
  source 1..22: mol_type = other DNA
ttctgatagataaaattgccct

SEQ ID NO: 8734 - DNA, 22 bp, synthetic construct
  misc_feature 1..22: note = chemically synthesized
  source 1..22: mol_type = other DNA
tgatagataaaattgcccttta

SEQ ID NO: 8735 - DNA, 22 bp, synthetic construct
  misc_feature 1..22: note = chemically synthesized
  source 1..22: mol_type = other DNA
atagataaaattgccctttatg

SEQ ID NO: 8736 - DNA, 22 bp, synthetic construct
  misc_feature 1..22: note = chemically synthesized
  source 1..22: mol_type = other DNA
ccctttatgtgcattgaaaatg

SEQ ID NO: 8737 - DNA, 22 bp, synthetic construct
  misc_feature 1..22: note = chemically synthesized
  source 1..22: mol_type = other DNA
tatgtgcattgaaaatgattga

SEQ ID NO: 8738 - DNA, 22 bp, synthetic construct
  misc_feature 1..22: note = chemically synthesized
  source 1..22: mol_type = other DNA
atgtgcattgaaaatgattgaa

SEQ ID NO: 8739 - DNA, 22 bp, synthetic construct
  misc_feature 1..22: note = chemically synthesized
  source 1..22: mol_type = other DNA
tgtgcattgaaaatgattgaat

SEQ ID NO: 8740 - DNA, 22 bp, synthetic construct
  misc_feature 1..22: note = chemically synthesized
  source 1..22: mol_type = other DNA
aaaatgattgaatacagatggt

SEQ ID NO: 8741 - DNA, 22 bp, synthetic construct
  misc_feature 1..22: note = chemically synthesized
  source 1..22: mol_type = other DNA
aatacagatggtcagtttcacc

SEQ ID NO: 8742 - DNA, 22 bp, synthetic construct
  misc_feature 1..22: note = chemically synthesized
  source 1..22: mol_type = other DNA
cacctgggtcaacctaggaggc

SEQ ID NO: 8743 - DNA, 22 bp, synthetic construct
  misc_feature 1..22: note = chemically synthesized
  source 1..22: mol_type = other DNA
acctgggtcaacctaggaggca

SEQ ID NO: 8744 - DNA, 22 bp, synthetic construct
  misc_feature 1..22: note = chemically synthesized
  source 1..22: mol_type = other DNA
ggtcaacctaggaggcattgtt

SEQ ID NO: 8745 - DNA, 22 bp, synthetic construct
  misc_feature 1..22: note = chemically synthesized
  source 1..22: mol_type = other DNA
ggaggcattgttataagaagcg

SEQ ID NO: 8746 - DNA, 22 bp, synthetic construct
  misc_feature 1..22: note = chemically synthesized
  source 1..22: mol_type = other DNA
ttataagaagcggacttgtaag

SEQ ID NO: 8747 - DNA, 22 bp, synthetic construct
  misc_feature 1..22: note = chemically synthesized
  source 1..22: mol_type = other DNA
taagaagcggacttgtaagata

SEQ ID NO: 8748 - DNA, 22 bp, synthetic construct
  misc_feature 1..22: note = chemically synthesized
  source 1..22: mol_type = other DNA
gtaagataggtagcttcagtga

SEQ ID NO: 8749 - DNA, 22 bp, synthetic construct
  misc_feature 1..22: note = chemically synthesized
  source 1..22: mol_type = other DNA
taagataggtagcttcagtgat

SEQ ID NO: 8750 - DNA, 22 bp, synthetic construct
  misc_feature 1..22: note = chemically synthesized
  source 1..22: mol_type = other DNA
cagtgattattgctatgttcta

SEQ ID NO: 8751 - DNA, 22 bp, synthetic construct
  misc_feature 1..22: note = chemically synthesized
  source 1..22: mol_type = other DNA
agtgattattgctatgttctat

SEQ ID NO: 8752 - DNA, 22 bp, synthetic construct
  misc_feature 1..22: note = chemically synthesized
  source 1..22: mol_type = other DNA
ttgctatgttctatgaaagaaa

SEQ ID NO: 8753 - DNA, 22 bp, synthetic construct
  misc_feature 1..22: note = chemically synthesized
  source 1..22: mol_type = other DNA
ctatgttctatgaaagaaactt

SEQ ID NO: 8754 - DNA, 22 bp, synthetic construct
  misc_feature 1..22: note = chemically synthesized
  source 1..22: mol_type = other DNA
tgttctatgaaagaaactttta

SEQ ID NO: 8755 - DNA, 22 bp, synthetic construct
  misc_feature 1..22: note = chemically synthesized
  source 1..22: mol_type = other DNA
tatgaaagaaacttttaaccta

SEQ ID NO: 8756 - DNA, 22 bp, synthetic construct
  misc_feature 1..22: note = chemically synthesized
  source 1..22: mol_type = other DNA
tgaaagaaacttttaacctaaa

SEQ ID NO: 8757 - DNA, 22 bp, synthetic construct
  misc_feature 1..22: note = chemically synthesized
  source 1..22: mol_type = other DNA
ttaacctaaaggattcttctac

SEQ ID NO: 8758 - DNA, 22 bp, synthetic construct
  misc_feature 1..22: note = chemically synthesized
  source 1..22: mol_type = other DNA
taacctaaaggattcttctact

SEQ ID NO: 8759 - DNA, 22 bp, synthetic construct
  misc_feature 1..22: note = chemically synthesized
  source 1..22: mol_type = other DNA
aacctaaaggattcttctactc

SEQ ID NO: 8760 - DNA, 22 bp, synthetic construct
  misc_feature 1..22: note = chemically synthesized
  source 1..22: mol_type = other DNA
acctaaaggattcttctactct

SEQ ID NO: 8761 - DNA, 22 bp, synthetic construct
  misc_feature 1..22: note = chemically synthesized
  source 1..22: mol_type = other DNA
aaggattcttctactctgataa

SEQ ID NO: 8762 - DNA, 22 bp, synthetic construct
  misc_feature 1..22: note = chemically synthesized
  source 1..22: mol_type = other DNA
ttctactctgataagtggcctc

SEQ ID NO: 8763 - DNA, 22 bp, synthetic construct
  misc_feature 1..22: note = chemically synthesized
  source 1..22: mol_type = other DNA
ctactctgataagtggcctcac

SEQ ID NO: 8764 - DNA, 22 bp, synthetic construct
  misc_feature 1..22: note = chemically synthesized
  source 1..22: mol_type = other DNA
tactctgataagtggcctcact

SEQ ID NO: 8765 - DNA, 22 bp, synthetic construct
  misc_feature 1..22: note = chemically synthesized
  source 1..22: mol_type = other DNA
ctctgataagtggcctcacttg

SEQ ID NO: 8766 - DNA, 22 bp, synthetic construct
  misc_feature 1..22: note = chemically synthesized
  source 1..22: mol_type = other DNA
tgataagtggcctcacttgata

SEQ ID NO: 8767 - DNA, 22 bp, synthetic construct
  misc_feature 1..22: note = chemically synthesized
  source 1..22: mol_type = other DNA
ataagtggcctcacttgatatt

SEQ ID NO: 8768 - DNA, 22 bp, synthetic construct
  misc_feature 1..22: note = chemically synthesized
  source 1..22: mol_type = other DNA
acttgatattttgtcctggtat

SEQ ID NO: 8769 - DNA, 22 bp, synthetic construct
  misc_feature 1..22: note = chemically synthesized
  source 1..22: mol_type = other DNA
gatattttgtcctggtattcat

SEQ ID NO: 8770 - DNA, 22 bp, synthetic construct
  misc_feature 1..22: note = chemically synthesized
  source 1..22: mol_type = other DNA
atattttgtcctggtattcata

SEQ ID NO: 8771 - DNA, 22 bp, synthetic construct
  misc_feature 1..22: note = chemically synthesized
  source 1..22: mol_type = other DNA
tgtcctggtattcatatgatag

SEQ ID NO: 8772 - DNA, 22 bp, synthetic construct
  misc_feature 1..22: note = chemically synthesized
  source 1..22: mol_type = other DNA
gtcctggtattcatatgatagc

SEQ ID NO: 8773 - DNA, 22 bp, synthetic construct
  misc_feature 1..22: note = chemically synthesized
  source 1..22: mol_type = other DNA
tcctggtattcatatgatagct

SEQ ID NO: 8774 - DNA, 22 bp, synthetic construct
  misc_feature 1..22: note = chemically synthesized
  source 1..22: mol_type = other DNA
gtattcatatgatagctgagat

SEQ ID NO: 8775 - DNA, 22 bp, synthetic construct
  misc_feature 1..22: note = chemically synthesized
  source 1..22: mol_type = other DNA
atatgatagctgagatctctga

SEQ ID NO: 8776 - DNA, 22 bp, synthetic construct
  misc_feature 1..22: note = chemically synthesized
  source 1..22: mol_type = other DNA
agatctctgaattctctttttt

SEQ ID NO: 8777 - DNA, 22 bp, synthetic construct
  misc_feature 1..22: note = chemically synthesized
  source 1..22: mol_type = other DNA
tgaattctcttttttttttttt

SEQ ID NO: 8778 - DNA, 22 bp, synthetic construct
  misc_feature 1..22: note = chemically synthesized
  source 1..22: mol_type = other DNA
aattctcttttttttttttttt

SEQ ID NO: 8779 - DNA, 22 bp, synthetic construct
  misc_feature 1..22: note = chemically synthesized
  source 1..22: mol_type = other DNA
tctttttttttttttttttttt

SEQ ID NO: 8780 - DNA, 22 bp, synthetic construct
  misc_feature 1..22: note = chemically synthesized
  source 1..22: mol_type = other DNA
tttttttttttttttttttttt

SEQ ID NO: 8781 - DNA, 22 bp, synthetic construct
  misc_feature 1..22: note = chemically synthesized
  source 1..22: mol_type = other DNA
ttttttttttttttttttttta

SEQ ID NO: 8782 - DNA, 22 bp, synthetic construct
  misc_feature 1..22: note = chemically synthesized
  source 1..22: mol_type = other DNA
ttttttttttttttttttttaa

SEQ ID NO: 8783 - DNA, 22 bp, synthetic construct
  misc_feature 1..22: note = chemically synthesized
  source 1..22: mol_type = other DNA
tttttttttttttttttttaag

SEQ ID NO: 8784 - DNA, 22 bp, synthetic construct
  misc_feature 1..22: note = chemically synthesized
  source 1..22: mol_type = other DNA
ttttttttttttttttttaaga

SEQ ID NO: 8785 - DNA, 22 bp, synthetic construct
  misc_feature 1..22: note = chemically synthesized
  source 1..22: mol_type = other DNA
tttttttttttttttttaagat

SEQ ID NO: 8786 - DNA, 22 bp, synthetic construct
  misc_feature 1..22: note = chemically synthesized
  source 1..22: mol_type = other DNA
ttttttttttttttttaagatg

SEQ ID NO: 8787 - DNA, 22 bp, synthetic construct
  misc_feature 1..22: note = chemically synthesized
  source 1..22: mol_type = other DNA
tttttttttttttttaagatgg

SEQ ID NO: 8788 - DNA, 22 bp, synthetic construct
  misc_feature 1..22: note = chemically synthesized
  source 1..22: mol_type = other DNA
ttttttttttttttaagatgga

SEQ ID NO: 8789 - DNA, 22 bp, synthetic construct
  misc_feature 1..22: note = chemically synthesized
  source 1..22: mol_type = other DNA
tttttttttttttaagatggag

SEQ ID NO: 8790 - DNA, 22 bp, synthetic construct
  misc_feature 1..22: note = chemically synthesized
  source 1..22: mol_type = other DNA
ttttttttttttaagatggagt

SEQ ID NO: 8791 - DNA, 22 bp, synthetic construct
  misc_feature 1..22: note = chemically synthesized
  source 1..22: mol_type = other DNA
tttttttttttaagatggagtc

SEQ ID NO: 8792 - DNA, 22 bp, synthetic construct
  misc_feature 1..22: note = chemically synthesized
  source 1..22: mol_type = other DNA
ttttttttttaagatggagtct

SEQ ID NO: 8793 - DNA, 22 bp, synthetic construct
  misc_feature 1..22: note = chemically synthesized
  source 1..22: mol_type = other DNA
tttttttttaagatggagtctc

SEQ ID NO: 8794 - DNA, 22 bp, synthetic construct
  misc_feature 1..22: note = chemically synthesized
  source 1..22: mol_type = other DNA
ttttttttaagatggagtctca

SEQ ID NO: 8795 - DNA, 22 bp, synthetic construct
  misc_feature 1..22: note = chemically synthesized
  source 1..22: mol_type = other DNA
tttttttaagatggagtctcac

SEQ ID NO: 8796 - DNA, 22 bp, synthetic construct
  misc_feature 1..22: note = chemically synthesized
  source 1..22: mol_type = other DNA
ttttttaagatggagtctcact

SEQ ID NO: 8797 - DNA, 22 bp, synthetic construct
  misc_feature 1..22: note = chemically synthesized
  source 1..22: mol_type = other DNA
tttttaagatggagtctcactc

SEQ ID NO: 8798 - DNA, 22 bp, synthetic construct
  misc_feature 1..22: note = chemically synthesized
  source 1..22: mol_type = other DNA
ttttaagatggagtctcactct

SEQ ID NO: 8799 - DNA, 22 bp, synthetic construct
  misc_feature 1..22: note = chemically synthesized
  source 1..22: mol_type = other DNA
tttaagatggagtctcactctg

SEQ ID NO: 8800 - DNA, 22 bp, synthetic construct
  misc_feature 1..22: note = chemically synthesized
  source 1..22: mol_type = other DNA
ttaagatggagtctcactctgc

SEQ ID NO: 8801 - DNA, 22 bp, synthetic construct
  misc_feature 1..22: note = chemically synthesized
  source 1..22: mol_type = other DNA
taagatggagtctcactctgct

SEQ ID NO: 8802 - DNA, 22 bp, synthetic construct
  misc_feature 1..22: note = chemically synthesized
  source 1..22: mol_type = other DNA
aagatggagtctcactctgctg

SEQ ID NO: 8803 - DNA, 22 bp, synthetic construct
  misc_feature 1..22: note = chemically synthesized
  source 1..22: mol_type = other DNA
agatggagtctcactctgctgc

SEQ ID NO: 8804 - DNA, 22 bp, synthetic construct
  misc_feature 1..22: note = chemically synthesized
  source 1..22: mol_type = other DNA
actctgctgcctaggctggagt

SEQ ID NO: 8805 - DNA, 22 bp, synthetic construct
  misc_feature 1..22: note = chemically synthesized
  source 1..22: mol_type = other DNA
tgctgcctaggctggagtgcag

SEQ ID NO: 8806 - DNA, 22 bp, synthetic construct
  misc_feature 1..22: note = chemically synthesized
  source 1..22: mol_type = other DNA
ctgcctaggctggagtgcagtg

SEQ ID NO: 8807 - DNA, 22 bp, synthetic construct
  misc_feature 1..22: note = chemically synthesized
  source 1..22: mol_type = other DNA
cctaggctggagtgcagtggcg

SEQ ID NO: 8808 - DNA, 22 bp, synthetic construct
  misc_feature 1..22: note = chemically synthesized
  source 1..22: mol_type = other DNA
ggctggagtgcagtggcgcgat

SEQ ID NO: 8809 - DNA, 22 bp, synthetic construct
  misc_feature 1..22: note = chemically synthesized
  source 1..22: mol_type = other DNA
gagtgcagtggcgcgatcttgg

SEQ ID NO: 8810 - DNA, 22 bp, synthetic construct
  misc_feature 1..22: note = chemically synthesized
  source 1..22: mol_type = other DNA
ggctcagtgcaacttccgcttc

SEQ ID NO: 8811 - DNA, 22 bp, synthetic construct
  misc_feature 1..22: note = chemically synthesized
  source 1..22: mol_type = other DNA
gctcagtgcaacttccgcttcc

SEQ ID NO: 8812 - DNA, 22 bp, synthetic construct
  misc_feature 1..22: note = chemically synthesized
  source 1..22: mol_type = other DNA
agtgcaacttccgcttcccagg

SEQ ID NO: 8813 - DNA, 22 bp, synthetic construct
  misc_feature 1..22: note = chemically synthesized
  source 1..22: mol_type = other DNA
ccgcttcccaggttcaagcgat

SEQ ID NO: 8814 - DNA, 22 bp, synthetic construct
  misc_feature 1..22: note = chemically synthesized
  source 1..22: mol_type = other DNA
cgcttcccaggttcaagcgatg

SEQ ID NO: 8815 - DNA, 22 bp, synthetic construct
  misc_feature 1..22: note = chemically synthesized
  source 1..22: mol_type = other DNA
cccaggttcaagcgatgctcct

SEQ ID NO: 8816 - DNA, 22 bp, synthetic construct
  misc_feature 1..22: note = chemically synthesized
  source 1..22: mol_type = other DNA
ccaggttcaagcgatgctcctg

SEQ ID NO: 8817 - DNA, 22 bp, synthetic construct
  misc_feature 1..22: note = chemically synthesized
  source 1..22: mol_type = other DNA
aagcgatgctcctgcctcagcc

SEQ ID NO: 8818 - DNA, 22 bp, synthetic construct
  misc_feature 1..22: note = chemically synthesized
  source 1..22: mol_type = other DNA
ctgcctcagccttccaattagc

SEQ ID NO: 8819 - DNA, 22 bp, synthetic construct
  misc_feature 1..22: note = chemically synthesized
  source 1..22: mol_type = other DNA
cctcagccttccaattagctgg

SEQ ID NO: 8820 - DNA, 22 bp, synthetic construct
  misc_feature 1..22: note = chemically synthesized
  source 1..22: mol_type = other DNA
agccttccaattagctgggact

SEQ ID NO: 8821 - DNA, 22 bp, synthetic construct
  misc_feature 1..22: note = chemically synthesized
  source 1..22: mol_type = other DNA
ccaattagctgggactacaggt

SEQ ID NO: 8822 - DNA, 22 bp, synthetic construct
  misc_feature 1..22: note = chemically synthesized
  source 1..22: mol_type = other DNA
caattagctgggactacaggtg

SEQ ID NO: 8823 - DNA, 22 bp, synthetic construct
  misc_feature 1..22: note = chemically synthesized
  source 1..22: mol_type = other DNA
gctgggactacaggtgcgcatg

SEQ ID NO: 8824 - DNA, 22 bp, synthetic construct
  misc_feature 1..22: note = chemically synthesized
  source 1..22: mol_type = other DNA
ggactacaggtgcgcatgactg

SEQ ID NO: 8825 - DNA, 22 bp, synthetic construct
  misc_feature 1..22: note = chemically synthesized
  source 1..22: mol_type = other DNA
caggtgcgcatgactgtgacca

SEQ ID NO: 8826 - DNA, 22 bp, synthetic construct
  misc_feature 1..22: note = chemically synthesized
  source 1..22: mol_type = other DNA
tgaccagctaatttttgtattt

SEQ ID NO: 8827 - DNA, 22 bp, synthetic construct
  misc_feature 1..22: note = chemically synthesized
  source 1..22: mol_type = other DNA
atttttgtatttttttagagac

SEQ ID NO: 8828 - DNA, 22 bp, synthetic construct
  misc_feature 1..22: note = chemically synthesized
  source 1..22: mol_type = other DNA
ttgtatttttttagagacgggt

SEQ ID NO: 8829 - DNA, 22 bp, synthetic construct
  misc_feature 1..22: note = chemically synthesized
  source 1..22: mol_type = other DNA
tgtatttttttagagacgggtt

SEQ ID NO: 8830 - DNA, 22 bp, synthetic construct
  misc_feature 1..22: note = chemically synthesized
  source 1..22: mol_type = other DNA
gtatttttttagagacgggttt

SEQ ID NO: 8831 - DNA, 22 bp, synthetic construct
  misc_feature 1..22: note = chemically synthesized
  source 1..22: mol_type = other DNA
tatttttttagagacgggtttc

SEQ ID NO: 8832 - DNA, 22 bp, synthetic construct
  misc_feature 1..22: note = chemically synthesized
  source 1..22: mol_type = other DNA
ttttagagacgggtttcaccat

SEQ ID NO: 8833 - DNA, 22 bp, synthetic construct
  misc_feature 1..22: note = chemically synthesized
  source 1..22: mol_type = other DNA
tttagagacgggtttcaccatg

SEQ ID NO: 8834 - DNA, 22 bp, synthetic construct
  misc_feature 1..22: note = chemically synthesized
  source 1..22: mol_type = other DNA
ttagagacgggtttcaccatgt

SEQ ID NO: 8835 - DNA, 22 bp, synthetic construct
  misc_feature 1..22: note = chemically synthesized
  source 1..22: mol_type = other DNA
tagagacgggtttcaccatgtt

SEQ ID NO: 8836 - DNA, 22 bp, synthetic construct
  misc_feature 1..22: note = chemically synthesized
  source 1..22: mol_type = other DNA
agagacgggtttcaccatgttg

SEQ ID NO: 8837 - DNA, 22 bp, synthetic construct
  misc_feature 1..22: note = chemically synthesized
  source 1..22: mol_type = other DNA
gagacgggtttcaccatgttgg

SEQ ID NO: 8838 - DNA, 22 bp, synthetic construct
  misc_feature 1..22: note = chemically synthesized
  source 1..22: mol_type = other DNA
caccatgttggtcaggctggtc

SEQ ID NO: 8839 - DNA, 22 bp, synthetic construct
  misc_feature 1..22: note = chemically synthesized
  source 1..22: mol_type = other DNA
accatgttggtcaggctggtct

SEQ ID NO: 8840 - DNA, 22 bp, synthetic construct
  misc_feature 1..22: note = chemically synthesized
  source 1..22: mol_type = other DNA
gtcaggctggtctcaaactcct

SEQ ID NO: 8841 - DNA, 22 bp, synthetic construct
  misc_feature 1..22: note = chemically synthesized
  source 1..22: mol_type = other DNA
gtctcaaactcctgaccttgtg

SEQ ID NO: 8842 - DNA, 22 bp, synthetic construct
  misc_feature 1..22: note = chemically synthesized
  source 1..22: mol_type = other DNA
aaactcctgaccttgtgaccac

SEQ ID NO: 8843 - DNA, 22 bp, synthetic construct
  misc_feature 1..22: note = chemically synthesized
  source 1..22: mol_type = other DNA
ctgaccttgtgaccacccgcct

SEQ ID NO: 8844 - DNA, 22 bp, synthetic construct
  misc_feature 1..22: note = chemically synthesized
  source 1..22: mol_type = other DNA
accttgtgaccacccgcctcgg

SEQ ID NO: 8845 - DNA, 22 bp, synthetic construct
  misc_feature 1..22: note = chemically synthesized
  source 1..22: mol_type = other DNA
gtgaccacccgcctcggcctcc

SEQ ID NO: 8846 - DNA, 22 bp, synthetic construct
  misc_feature 1..22: note = chemically synthesized
  source 1..22: mol_type = other DNA
tgaccacccgcctcggcctccc

SEQ ID NO: 8847 - DNA, 22 bp, synthetic construct
  misc_feature 1..22: note = chemically synthesized
  source 1..22: mol_type = other DNA
ggcctcccaaagtgctgggatt

SEQ ID NO: 8848 - DNA, 22 bp, synthetic construct
  misc_feature 1..22: note = chemically synthesized
  source 1..22: mol_type = other DNA
ccaaagtgctgggattacaggg

SEQ ID NO: 8849 - DNA, 22 bp, synthetic construct
  misc_feature 1..22: note = chemically synthesized
  source 1..22: mol_type = other DNA
ggattacaggggtgagccaccg

SEQ ID NO: 8850 - DNA, 22 bp, synthetic construct
  misc_feature 1..22: note = chemically synthesized
  source 1..22: mol_type = other DNA
caggggtgagccaccgtgcccg

SEQ ID NO: 8851 - DNA, 22 bp, synthetic construct
  misc_feature 1..22: note = chemically synthesized
  source 1..22: mol_type = other DNA
gacatttctgaatttttaacag

SEQ ID NO: 8852 - DNA, 22 bp, synthetic construct
  misc_feature 1..22: note = chemically synthesized
  source 1..22: mol_type = other DNA
acatttctgaatttttaacagg

SEQ ID NO: 8853 - DNA, 22 bp, synthetic construct
  misc_feature 1..22: note = chemically synthesized
  source 1..22: mol_type = other DNA
ctgaatttttaacaggtataaa

SEQ ID NO: 8854 - DNA, 22 bp, synthetic construct
  misc_feature 1..22: note = chemically synthesized
  source 1..22: mol_type = other DNA
tgaatttttaacaggtataaat

SEQ ID NO: 8855 - DNA, 22 bp, synthetic construct
  misc_feature 1..22: note = chemically synthesized
  source 1..22: mol_type = other DNA
aatttttaacaggtataaatat

SEQ ID NO: 8856 - DNA, 22 bp, synthetic construct
  misc_feature 1..22: note = chemically synthesized
  source 1..22: mol_type = other DNA
ttaacaggtataaatatacaaa

SEQ ID NO: 8857 - DNA, 22 bp, synthetic construct
  misc_feature 1..22: note = chemically synthesized
  source 1..22: mol_type = other DNA
taacaggtataaatatacaaaa

SEQ ID NO: 8858 - DNA, 22 bp, synthetic construct
  misc_feature 1..22: note = chemically synthesized
  source 1..22: mol_type = other DNA
aacaggtataaatatacaaaag

SEQ ID NO: 8859 - DNA, 22 bp, synthetic construct
  misc_feature 1..22: note = chemically synthesized
  source 1..22: mol_type = other DNA
acaggtataaatatacaaaaga

SEQ ID NO: 8860 - DNA, 22 bp, synthetic construct
  misc_feature 1..22: note = chemically synthesized
  source 1..22: mol_type = other DNA
ttggttaaataaaaagcaaggg

SEQ ID NO: 8861 - DNA, 22 bp, synthetic construct
  misc_feature 1..22: note = chemically synthesized
  source 1..22: mol_type = other DNA
gttaaataaaaagcaagggcca

SEQ ID NO: 8862 - DNA, 22 bp, synthetic construct
  misc_feature 1..22: note = chemically synthesized
  source 1..22: mol_type = other DNA
aataaaaagcaagggccataga

SEQ ID NO: 8863 - DNA, 22 bp, synthetic construct
  misc_feature 1..22: note = chemically synthesized
  source 1..22: mol_type = other DNA
ccctttgagccatatgcatgga

SEQ ID NO: 8864 - DNA, 22 bp, synthetic construct
  misc_feature 1..22: note = chemically synthesized
  source 1..22: mol_type = other DNA
cctttgagccatatgcatggag

SEQ ID NO: 8865 - DNA, 22 bp, synthetic construct
  misc_feature 1..22: note = chemically synthesized
  source 1..22: mol_type = other DNA
tgagccatatgcatggagaaaa

SEQ ID NO: 8866 - DNA, 22 bp, synthetic construct
  misc_feature 1..22: note = chemically synthesized
  source 1..22: mol_type = other DNA
gagccatatgcatggagaaaag

SEQ ID NO: 8867 - DNA, 22 bp, synthetic construct
  misc_feature 1..22: note = chemically synthesized
  source 1..22: mol_type = other DNA
agccatatgcatggagaaaaga

SEQ ID NO: 8868 - DNA, 22 bp, synthetic construct
  misc_feature 1..22: note = chemically synthesized
  source 1..22: mol_type = other DNA
aacccatgacttgtggctgtct

SEQ ID NO: 8869 - DNA, 22 bp, synthetic construct
  misc_feature 1..22: note = chemically synthesized
  source 1..22: mol_type = other DNA
gtggctgtctcatacatctcaa

SEQ ID NO: 8870 - DNA, 22 bp, synthetic construct
  misc_feature 1..22: note = chemically synthesized
  source 1..22: mol_type = other DNA
tggctgtctcatacatctcaat

SEQ ID NO: 8871 - DNA, 22 bp, synthetic construct
  misc_feature 1..22: note = chemically synthesized
  source 1..22: mol_type = other DNA
tctcatacatctcaattataag

SEQ ID NO: 8872 - DNA, 22 bp, synthetic construct
  misc_feature 1..22: note = chemically synthesized
  source 1..22: mol_type = other DNA
atacatctcaattataaggtag

SEQ ID NO: 8873 - DNA, 22 bp, synthetic construct
  misc_feature 1..22: note = chemically synthesized
  source 1..22: mol_type = other DNA
aattataaggtagagactctag

SEQ ID NO: 8874 - DNA, 22 bp, synthetic construct
  misc_feature 1..22: note = chemically synthesized
  source 1..22: mol_type = other DNA
taaggtagagactctaggattg

SEQ ID NO: 8875 - DNA, 22 bp, synthetic construct
  misc_feature 1..22: note = chemically synthesized
  source 1..22: mol_type = other DNA
taggattgagaaagtcccttcc

SEQ ID NO: 8876 - DNA, 22 bp, synthetic construct
  misc_feature 1..22: note = chemically synthesized
  source 1..22: mol_type = other DNA
ggattgagaaagtcccttccca

SEQ ID NO: 8877 - DNA, 22 bp, synthetic construct
  misc_feature 1..22: note = chemically synthesized
  source 1..22: mol_type = other DNA
agaaagtcccttcccagaattt

SEQ ID NO: 8878 - DNA, 22 bp, synthetic construct
  misc_feature 1..22: note = chemically synthesized
  source 1..22: mol_type = other DNA
cccagaatttggagaggcacac

SEQ ID NO: 8879 - DNA, 22 bp, synthetic construct
  misc_feature 1..22: note = chemically synthesized
  source 1..22: mol_type = other DNA
ccagaatttggagaggcacaca

SEQ ID NO: 8880 - DNA, 22 bp, synthetic construct
  misc_feature 1..22: note = chemically synthesized
  source 1..22: mol_type = other DNA
ggagaggcacacagcctcagcc

SEQ ID NO: 8881 - DNA, 22 bp, synthetic construct
  misc_feature 1..22: note = chemically synthesized
  source 1..22: mol_type = other DNA
gagaggcacacagcctcagcca

SEQ ID NO: 8882 - DNA, 22 bp, synthetic construct
  misc_feature 1..22: note = chemically synthesized
  source 1..22: mol_type = other DNA
agccacctctgaaactccaacc

SEQ ID NO: 8883 - DNA, 22 bp, synthetic construct
  misc_feature 1..22: note = chemically synthesized
  source 1..22: mol_type = other DNA
tgaaactccaaccagggattcc

SEQ ID NO: 8884 - DNA, 22 bp, synthetic construct
  misc_feature 1..22: note = chemically synthesized
  source 1..22: mol_type = other DNA
aaactccaaccagggattccgt

SEQ ID NO: 8885 - DNA, 22 bp, synthetic construct
  misc_feature 1..22: note = chemically synthesized
  source 1..22: mol_type = other DNA
caaccagggattccgtgccctg

SEQ ID NO: 8886 - DNA, 22 bp, synthetic construct
  misc_feature 1..22: note = chemically synthesized
  source 1..22: mol_type = other DNA
cgtgccctgcaacctcctccac

SEQ ID NO: 8887 - DNA, 22 bp, synthetic construct
  misc_feature 1..22: note = chemically synthesized
  source 1..22: mol_type = other DNA
caacctcctccactctgccact

SEQ ID NO: 8888 - DNA, 22 bp, synthetic construct
  misc_feature 1..22: note = chemically synthesized
  source 1..22: mol_type = other DNA
ctccactctgccactagagtat

SEQ ID NO: 8889 - DNA, 22 bp, synthetic construct
  misc_feature 1..22: note = chemically synthesized
  source 1..22: mol_type = other DNA
cactctgccactagagtatagg

SEQ ID NO: 8890 - DNA, 22 bp, synthetic construct
  misc_feature 1..22: note = chemically synthesized
  source 1..22: mol_type = other DNA
tgccactagagtataggggcag

SEQ ID NO: 8891 - DNA, 22 bp, synthetic construct
  misc_feature 1..22: note = chemically synthesized
  source 1..22: mol_type = other DNA
ccactagagtataggggcagaa

SEQ ID NO: 8892 - DNA, 22 bp, synthetic construct
  misc_feature 1..22: note = chemically synthesized
  source 1..22: mol_type = other DNA
gagtataggggcagaagtgtgt

SEQ ID NO: 8893 - DNA, 22 bp, synthetic construct
  misc_feature 1..22: note = chemically synthesized
  source 1..22: mol_type = other DNA
ccaccataccttgttggtccaa

SEQ ID NO: 8894 - DNA, 22 bp, synthetic construct
  misc_feature 1..22: note = chemically synthesized
  source 1..22: mol_type = other DNA
caccataccttgttggtccaaa

SEQ ID NO: 8895 - DNA, 22 bp, synthetic construct
  misc_feature 1..22: note = chemically synthesized
  source 1..22: mol_type = other DNA
gttggtccaaaacacctctccc

SEQ ID NO: 8896 - DNA, 22 bp, synthetic construct
  misc_feature 1..22: note = chemically synthesized
  source 1..22: mol_type = other DNA
ttggtccaaaacacctctcccc

SEQ ID NO: 8897 - DNA, 22 bp, synthetic construct
  misc_feature 1..22: note = chemically synthesized
  source 1..22: mol_type = other DNA
gtccaaaacacctctccccagc

SEQ ID NO: 8898 - DNA, 22 bp, synthetic construct
  misc_feature 1..22: note = chemically synthesized
  source 1..22: mol_type = other DNA
tccccagctccagcaactgctg

SEQ ID NO: 8899 - DNA, 22 bp, synthetic construct
  misc_feature 1..22: note = chemically synthesized
  source 1..22: mol_type = other DNA
cccagctccagcaactgctgca

SEQ ID NO: 8900 - DNA, 22 bp, synthetic construct
  misc_feature 1..22: note = chemically synthesized
  source 1..22: mol_type = other DNA
cagcaactgctgcagctgtgca

SEQ ID NO: 8901 - DNA, 22 bp, synthetic construct
  misc_feature 1..22: note = chemically synthesized
  source 1..22: mol_type = other DNA
ctgcagctgtgcagggcagtcc

SEQ ID NO: 8902 - DNA, 22 bp, synthetic construct
  misc_feature 1..22: note = chemically synthesized
  source 1..22: mol_type = other DNA
cagctgtgcagggcagtccctc

SEQ ID NO: 8903 - DNA, 22 bp, synthetic construct
  misc_feature 1..22: note = chemically synthesized
  source 1..22: mol_type = other DNA
tgcagggcagtccctctccagg

SEQ ID NO: 8904 - DNA, 22 bp, synthetic construct
  misc_feature 1..22: note = chemically synthesized
  source 1..22: mol_type = other DNA
tccaggtaggccctgttctgcc

SEQ ID NO: 8905 - DNA, 22 bp, synthetic construct
  misc_feature 1..22: note = chemically synthesized
  source 1..22: mol_type = other DNA
caggtaggccctgttctgcctg

SEQ ID NO: 8906 - DNA, 22 bp, synthetic construct
  misc_feature 1..22: note = chemically synthesized
  source 1..22: mol_type = other DNA
ttctgcctggcccgaatcttgt

SEQ ID NO: 8907 - DNA, 22 bp, synthetic construct
  misc_feature 1..22: note = chemically synthesized
  source 1..22: mol_type = other DNA
tgcctggcccgaatcttgtgcc

SEQ ID NO: 8908 - DNA, 22 bp, synthetic construct
  misc_feature 1..22: note = chemically synthesized
  source 1..22: mol_type = other DNA
cctggcccgaatcttgtgcctt

SEQ ID NO: 8909 - DNA, 22 bp, synthetic construct
  misc_feature 1..22: note = chemically synthesized
  source 1..22: mol_type = other DNA
gcccgaatcttgtgcctttccc

SEQ ID NO: 8910 - DNA, 22 bp, synthetic construct
  misc_feature 1..22: note = chemically synthesized
  source 1..22: mol_type = other DNA
gtgcctttcccactccagcttg

SEQ ID NO: 8911 - DNA, 22 bp, synthetic construct
  misc_feature 1..22: note = chemically synthesized
  source 1..22: mol_type = other DNA
tgcctttcccactccagcttgg

SEQ ID NO: 8912 - DNA, 22 bp, synthetic construct
  misc_feature 1..22: note = chemically synthesized
  source 1..22: mol_type = other DNA
tcccactccagcttggtgggcc

SEQ ID NO: 8913 - DNA, 22 bp, synthetic construct
  misc_feature 1..22: note = chemically synthesized
  source 1..22: mol_type = other DNA
cccactccagcttggtgggcca

SEQ ID NO: 8914 - DNA, 22 bp, synthetic construct
  misc_feature 1..22: note = chemically synthesized
  source 1..22: mol_type = other DNA
ccactccagcttggtgggccag

SEQ ID NO: 8915 - DNA, 22 bp, synthetic construct
  misc_feature 1..22: note = chemically synthesized
  source 1..22: mol_type = other DNA
cagcttggtgggccaggccctg

SEQ ID NO: 8916 - DNA, 22 bp, synthetic construct
  misc_feature 1..22: note = chemically synthesized
  source 1..22: mol_type = other DNA
ggtgggccaggccctgggttct

SEQ ID NO: 8917 - DNA, 22 bp, synthetic construct
  misc_feature 1..22: note = chemically synthesized
  source 1..22: mol_type = other DNA
gtgggccaggccctgggttctg

SEQ ID NO: 8918 - DNA, 22 bp, synthetic construct
  misc_feature 1..22: note = chemically synthesized
  source 1..22: mol_type = other DNA
ggttctgctgctctccaatcca

SEQ ID NO: 8919 - DNA, 22 bp, synthetic construct
  misc_feature 1..22: note = chemically synthesized
  source 1..22: mol_type = other DNA
tgctgctctccaatccagtgtg

SEQ ID NO: 8920 - DNA, 22 bp, synthetic construct
  misc_feature 1..22: note = chemically synthesized
  source 1..22: mol_type = other DNA
ctgctctccaatccagtgtgtc

SEQ ID NO: 8921 - DNA, 22 bp, synthetic construct
  misc_feature 1..22: note = chemically synthesized
  source 1..22: mol_type = other DNA
ctctccaatccagtgtgtcagg

SEQ ID NO: 8922 - DNA, 22 bp, synthetic construct
  misc_feature 1..22: note = chemically synthesized
  source 1..22: mol_type = other DNA
tccaatccagtgtgtcagggca

SEQ ID NO: 8923 - DNA, 22 bp, synthetic construct
  misc_feature 1..22: note = chemically synthesized
  source 1..22: mol_type = other DNA
caatccagtgtgtcagggcaga

SEQ ID NO: 8924 - DNA, 22 bp, synthetic construct
  misc_feature 1..22: note = chemically synthesized
  source 1..22: mol_type = other DNA
aaggtggtcctgcccatcatac

SEQ ID NO: 8925 - DNA, 22 bp, synthetic construct
  misc_feature 1..22: note = chemically synthesized
  source 1..22: mol_type = other DNA
cccatcatacccgtacttccag

SEQ ID NO: 8926 - DNA, 22 bp, synthetic construct
  misc_feature 1..22: note = chemically synthesized
  source 1..22: mol_type = other DNA
ccagtagccctcggtactgttg

SEQ ID NO: 8927 - DNA, 22 bp, synthetic construct
  misc_feature 1..22: note = chemically synthesized
  source 1..22: mol_type = other DNA
cagtagccctcggtactgttgt

SEQ ID NO: 8928 - DNA, 22 bp, synthetic construct
  misc_feature 1..22: note = chemically synthesized
  source 1..22: mol_type = other DNA
ggtactgttgtcttcttgcatt

SEQ ID NO: 8929 - DNA, 22 bp, synthetic construct
  misc_feature 1..22: note = chemically synthesized
  source 1..22: mol_type = other DNA
ttgtcttcttgcatttcacagc

SEQ ID NO: 8930 - DNA, 22 bp, synthetic construct
  misc_feature 1..22: note = chemically synthesized
  source 1..22: mol_type = other DNA
tcttcttgcatttcacagccca

SEQ ID NO: 8931 - DNA, 22 bp, synthetic construct
  misc_feature 1..22: note = chemically synthesized
  source 1..22: mol_type = other DNA
cttgcatttcacagcccaggat

SEQ ID NO: 8932 - DNA, 22 bp, synthetic construct
  misc_feature 1..22: note = chemically synthesized
  source 1..22: mol_type = other DNA
ttgcatttcacagcccaggatg

SEQ ID NO: 8933 - DNA, 22 bp, synthetic construct
  misc_feature 1..22: note = chemically synthesized
  source 1..22: mol_type = other DNA
gcatttcacagcccaggatgac

SEQ ID NO: 8934 - DNA, 22 bp, synthetic construct
  misc_feature 1..22: note = chemically synthesized
  source 1..22: mol_type = other DNA
catttcacagcccaggatgacc

SEQ ID NO: 8935 - DNA, 22 bp, synthetic construct
  misc_feature 1..22: note = chemically synthesized
  source 1..22: mol_type = other DNA
cacagcccaggatgacctgcag

SEQ ID NO: 8936 - DNA, 22 bp, synthetic construct
  misc_feature 1..22: note = chemically synthesized
  source 1..22: mol_type = other DNA
acagcccaggatgacctgcagg

SEQ ID NO: 8937 - DNA, 22 bp, synthetic construct
  misc_feature 1..22: note = chemically synthesized
  source 1..22: mol_type = other DNA
cagggtgtgggactctggaaaa

SEQ ID NO: 8938 - DNA, 22 bp, synthetic construct
  misc_feature 1..22: note = chemically synthesized
  source 1..22: mol_type = other DNA
tggaaaaatccccagccttgtt

SEQ ID NO: 8939 - DNA, 22 bp, synthetic construct
  misc_feature 1..22: note = chemically synthesized
  source 1..22: mol_type = other DNA
gaaaaatccccagccttgttaa

SEQ ID NO: 8940 - DNA, 22 bp, synthetic construct
  misc_feature 1..22: note = chemically synthesized
  source 1..22: mol_type = other DNA
gttaactgcaaccaaaggaata

SEQ ID NO: 8941 - DNA, 22 bp, synthetic construct
  misc_feature 1..22: note = chemically synthesized
  source 1..22: mol_type = other DNA
ttaactgcaaccaaaggaatag

SEQ ID NO: 8942 - DNA, 22 bp, synthetic construct
  misc_feature 1..22: note = chemically synthesized
  source 1..22: mol_type = other DNA
actgcaaccaaaggaataggtc

SEQ ID NO: 8943 - DNA, 22 bp, synthetic construct
  misc_feature 1..22: note = chemically synthesized
  source 1..22: mol_type = other DNA
caaccaaaggaataggtcccta

SEQ ID NO: 8944 - DNA, 22 bp, synthetic construct
  misc_feature 1..22: note = chemically synthesized
  source 1..22: mol_type = other DNA
tttccaccatccccaaggacca

SEQ ID NO: 8945 - DNA, 22 bp, synthetic construct
  misc_feature 1..22: note = chemically synthesized
  source 1..22: mol_type = other DNA
ccaccatccccaaggaccaaat

SEQ ID NO: 8946 - DNA, 22 bp, synthetic construct
  misc_feature 1..22: note = chemically synthesized
  source 1..22: mol_type = other DNA
caccatccccaaggaccaaatg

SEQ ID NO: 8947 - DNA, 22 bp, synthetic construct
  misc_feature 1..22: note = chemically synthesized
  source 1..22: mol_type = other DNA
aggaagcaaattccttccctct

SEQ ID NO: 8948 - DNA, 22 bp, synthetic construct
  misc_feature 1..22: note = chemically synthesized
  source 1..22: mol_type = other DNA
cttccctcttccctgctcccac

SEQ ID NO: 8949 - DNA, 22 bp, synthetic construct
  misc_feature 1..22: note = chemically synthesized
  source 1..22: mol_type = other DNA
ccctcttccctgctcccacaag

SEQ ID NO: 8950 - DNA, 22 bp, synthetic construct
  misc_feature 1..22: note = chemically synthesized
  source 1..22: mol_type = other DNA
cctcttccctgctcccacaaga

SEQ ID NO: 8951 - DNA, 22 bp, synthetic construct
  misc_feature 1..22: note = chemically synthesized
  source 1..22: mol_type = other DNA
ttccctgctcccacaagacctc

SEQ ID NO: 8952 - DNA, 22 bp, synthetic construct
  misc_feature 1..22: note = chemically synthesized
  source 1..22: mol_type = other DNA
ccctgctcccacaagacctcag

SEQ ID NO: 8953 - DNA, 22 bp, synthetic construct
  misc_feature 1..22: note = chemically synthesized
  source 1..22: mol_type = other DNA
cctgctcccacaagacctcaga

SEQ ID NO: 8954 - DNA, 22 bp, synthetic construct
  misc_feature 1..22: note = chemically synthesized
  source 1..22: mol_type = other DNA
ctcccacaagacctcagacttc

SEQ ID NO: 8955 - DNA, 22 bp, synthetic construct
  misc_feature 1..22: note = chemically synthesized
  source 1..22: mol_type = other DNA
ccacaagacctcagacttccag

SEQ ID NO: 8956 - DNA, 22 bp, synthetic construct
  misc_feature 1..22: note = chemically synthesized
  source 1..22: mol_type = other DNA
agacttccagctgtttccttca

SEQ ID NO: 8957 - DNA, 22 bp, synthetic construct
  misc_feature 1..22: note = chemically synthesized
  source 1..22: mol_type = other DNA
ccagctgtttccttcaagatgc

SEQ ID NO: 8958 - DNA, 22 bp, synthetic construct
  misc_feature 1..22: note = chemically synthesized
  source 1..22: mol_type = other DNA
cagctgtttccttcaagatgca

SEQ ID NO: 8959 - DNA, 22 bp, synthetic construct
  misc_feature 1..22: note = chemically synthesized
  source 1..22: mol_type = other DNA
tttccttcaagatgcatgaaaa

SEQ ID NO: 8960 - DNA, 22 bp, synthetic construct
  misc_feature 1..22: note = chemically synthesized
  source 1..22: mol_type = other DNA
ccttcaagatgcatgaaaagat

SEQ ID NO: 8961 - DNA, 22 bp, synthetic construct
  misc_feature 1..22: note = chemically synthesized
  source 1..22: mol_type = other DNA
cttcaagatgcatgaaaagatg

SEQ ID NO: 8962 - DNA, 22 bp, synthetic construct
  misc_feature 1..22: note = chemically synthesized
  source 1..22: mol_type = other DNA
caagatgcatgaaaagatgaaa

SEQ ID NO: 8963 - DNA, 22 bp, synthetic construct
  misc_feature 1..22: note = chemically synthesized
  source 1..22: mol_type = other DNA
aagatgcatgaaaagatgaaaa

SEQ ID NO: 8964 - DNA, 22 bp, synthetic construct
  misc_feature 1..22: note = chemically synthesized
  source 1..22: mol_type = other DNA
tgacaacctcaggaaggtgagg

SEQ ID NO: 8965 - DNA, 22 bp, synthetic construct
  misc_feature 1..22: note = chemically synthesized
  source 1..22: mol_type = other DNA
acaacctcaggaaggtgaggcc

SEQ ID NO: 8966 - DNA, 22 bp, synthetic construct
  misc_feature 1..22: note = chemically synthesized
  source 1..22: mol_type = other DNA
aggaaggtgaggccccctctcc

SEQ ID NO: 8967 - DNA, 22 bp, synthetic construct
  misc_feature 1..22: note = chemically synthesized
  source 1..22: mol_type = other DNA
tccacatacccttgctgtggtt

SEQ ID NO: 8968 - DNA, 22 bp, synthetic construct
  misc_feature 1..22: note = chemically synthesized
  source 1..22: mol_type = other DNA
cacatacccttgctgtggttgt

SEQ ID NO: 8969 - DNA, 22 bp, synthetic construct
  misc_feature 1..22: note = chemically synthesized
  source 1..22: mol_type = other DNA
gctgtggttgtgattttccata

SEQ ID NO: 8970 - DNA, 22 bp, synthetic construct
  misc_feature 1..22: note = chemically synthesized
  source 1..22: mol_type = other DNA
ctgtggttgtgattttccataa

SEQ ID NO: 8971 - DNA, 22 bp, synthetic construct
  misc_feature 1..22: note = chemically synthesized
  source 1..22: mol_type = other DNA
tggttgtgattttccataatag

SEQ ID NO: 8972 - DNA, 22 bp, synthetic construct
  misc_feature 1..22: note = chemically synthesized
  source 1..22: mol_type = other DNA
tgattttccataatagtccaga

SEQ ID NO: 8973 - DNA, 22 bp, synthetic construct
  misc_feature 1..22: note = chemically synthesized
  source 1..22: mol_type = other DNA
tccataatagtccagaagtcaa

SEQ ID NO: 8974 - DNA, 22 bp, synthetic construct
  misc_feature 1..22: note = chemically synthesized
  source 1..22: mol_type = other DNA
ccataatagtccagaagtcaac

SEQ ID NO: 8975 - DNA, 22 bp, synthetic construct
  misc_feature 1..22: note = chemically synthesized
  source 1..22: mol_type = other DNA
cataatagtccagaagtcaaca

SEQ ID NO: 8976 - DNA, 22 bp, synthetic construct
  misc_feature 1..22: note = chemically synthesized
  source 1..22: mol_type = other DNA
tcagactctgactcagctgcag

SEQ ID NO: 8977 - DNA, 22 bp, synthetic construct
  misc_feature 1..22: note = chemically synthesized
  source 1..22: mol_type = other DNA
cagactctgactcagctgcagc

SEQ ID NO: 8978 - DNA, 22 bp, synthetic construct
  misc_feature 1..22: note = chemically synthesized
  source 1..22: mol_type = other DNA
agactctgactcagctgcagcc

SEQ ID NO: 8979 - DNA, 22 bp, synthetic construct
  misc_feature 1..22: note = chemically synthesized
  source 1..22: mol_type = other DNA
tgactcagctgcagccacatct

SEQ ID NO: 8980 - DNA, 22 bp, synthetic construct
  misc_feature 1..22: note = chemically synthesized
  source 1..22: mol_type = other DNA
actcagctgcagccacatctgg

SEQ ID NO: 8981 - DNA, 22 bp, synthetic construct
  misc_feature 1..22: note = chemically synthesized
  source 1..22: mol_type = other DNA
agctgcagccacatctggcttg

SEQ ID NO: 8982 - DNA, 22 bp, synthetic construct
  misc_feature 1..22: note = chemically synthesized
  source 1..22: mol_type = other DNA
cagccacatctggcttgaaatt

SEQ ID NO: 8983 - DNA, 22 bp, synthetic construct
  misc_feature 1..22: note = chemically synthesized
  source 1..22: mol_type = other DNA
gcttgaaattctactggaaacc

SEQ ID NO: 8984 - DNA, 22 bp, synthetic construct
  misc_feature 1..22: note = chemically synthesized
  source 1..22: mol_type = other DNA
gaaattctactggaaacccatg

SEQ ID NO: 8985 - DNA, 22 bp, synthetic construct
  misc_feature 1..22: note = chemically synthesized
  source 1..22: mol_type = other DNA
aaattctactggaaacccatgg

SEQ ID NO: 8986 - DNA, 22 bp, synthetic construct
  misc_feature 1..22: note = chemically synthesized
  source 1..22: mol_type = other DNA
tactggaaacccatggagttcg

SEQ ID NO: 8987 - DNA, 22 bp, synthetic construct
  misc_feature 1..22: note = chemically synthesized
  source 1..22: mol_type = other DNA
ctggaaacccatggagttcggg

SEQ ID NO: 8988 - DNA, 22 bp, synthetic construct
  misc_feature 1..22: note = chemically synthesized
  source 1..22: mol_type = other DNA
gaaacccatggagttcggggct

SEQ ID NO: 8989 - DNA, 22 bp, synthetic construct
  misc_feature 1..22: note = chemically synthesized
  source 1..22: mol_type = other DNA
ggggctccacacggcgactctc

SEQ ID NO: 8990 - DNA, 22 bp, synthetic construct
  misc_feature 1..22: note = chemically synthesized
  source 1..22: mol_type = other DNA
cacacggcgactctcatgatca

SEQ ID NO: 8991 - DNA, 22 bp, synthetic construct
  misc_feature 1..22: note = chemically synthesized
  source 1..22: mol_type = other DNA
tcatgatcatagaacacgaaca

SEQ ID NO: 8992 - DNA, 22 bp, synthetic construct
  misc_feature 1..22: note = chemically synthesized
  source 1..22: mol_type = other DNA
atgatcatagaacacgaacagc

SEQ ID NO: 8993 - DNA, 22 bp, synthetic construct
  misc_feature 1..22: note = chemically synthesized
  source 1..22: mol_type = other DNA
gtcatccacgtagcccaaagct

SEQ ID NO: 8994 - DNA, 22 bp, synthetic construct
  misc_feature 1..22: note = chemically synthesized
  source 1..22: mol_type = other DNA
caaacaaggaaagaccaaggtc

SEQ ID NO: 8995 - DNA, 22 bp, synthetic construct
  misc_feature 1..22: note = chemically synthesized
  source 1..22: mol_type = other DNA
aaacaaggaaagaccaaggtcc

SEQ ID NO: 8996 - DNA, 22 bp, synthetic construct
  misc_feature 1..22: note = chemically synthesized
  source 1..22: mol_type = other DNA
ctctgaggcacccatgaagagg

SEQ ID NO: 8997 - DNA, 22 bp, synthetic construct
  misc_feature 1..22: note = chemically synthesized
  source 1..22: mol_type = other DNA
tgaggcacccatgaagaggtag

SEQ ID NO: 8998 - DNA, 22 bp, synthetic construct
  misc_feature 1..22: note = chemically synthesized
  source 1..22: mol_type = other DNA
aggcacccatgaagaggtagtg

SEQ ID NO: 8999 - DNA, 22 bp, synthetic construct
  misc_feature 1..22: note = chemically synthesized
  source 1..22: mol_type = other DNA
gagacagagcaacaggccttaa

SEQ ID NO: 9000 - DNA, 22 bp, synthetic construct
  misc_feature 1..22: note = chemically synthesized
  source 1..22: mol_type = other DNA
aaccatgtgtagtaggagggga

SEQ ID NO: 9001 - DNA, 22 bp, synthetic construct
  misc_feature 1..22: note = chemically synthesized
  source 1..22: mol_type = other DNA
accatgtgtagtaggaggggag

SEQ ID NO: 9002 - DNA, 22 bp, synthetic construct
  misc_feature 1..22: note = chemically synthesized
  source 1..22: mol_type = other DNA
aggctccacacacctgcatcaa

SEQ ID NO: 9003 - DNA, 22 bp, synthetic construct
  misc_feature 1..22: note = chemically synthesized
  source 1..22: mol_type = other DNA
cacacacctgcatcaactcata

SEQ ID NO: 9004 - DNA, 22 bp, synthetic construct
  misc_feature 1..22: note = chemically synthesized
  source 1..22: mol_type = other DNA
catcaactcataccatcagctg

SEQ ID NO: 9005 - DNA, 22 bp, synthetic construct
  misc_feature 1..22: note = chemically synthesized
  source 1..22: mol_type = other DNA
ataccatcagctgtgtctggtc

SEQ ID NO: 9006 - DNA, 22 bp, synthetic construct
  misc_feature 1..22: note = chemically synthesized
  source 1..22: mol_type = other DNA
tgtctggtcctcattttgtgaa

SEQ ID NO: 9007 - DNA, 22 bp, synthetic construct
  misc_feature 1..22: note = chemically synthesized
  source 1..22: mol_type = other DNA
gtcctcattttgtgaagggtga

SEQ ID NO: 9008 - DNA, 22 bp, synthetic construct
  misc_feature 1..22: note = chemically synthesized
  source 1..22: mol_type = other DNA
attttgtgaagggtgagttgca

SEQ ID NO: 9009 - DNA, 22 bp, synthetic construct
  misc_feature 1..22: note = chemically synthesized
  source 1..22: mol_type = other DNA
tgtgaagggtgagttgcagtcc

SEQ ID NO: 9010 - DNA, 22 bp, synthetic construct
  misc_feature 1..22: note = chemically synthesized
  source 1..22: mol_type = other DNA
gtgaagggtgagttgcagtcct

SEQ ID NO: 9011 - DNA, 22 bp, synthetic construct
  misc_feature 1..22: note = chemically synthesized
  source 1..22: mol_type = other DNA
tgaagggtgagttgcagtcctg

SEQ ID NO: 9012 - DNA, 22 bp, synthetic construct
  misc_feature 1..22: note = chemically synthesized
  source 1..22: mol_type = other DNA
cagtcctgtctttcttccatat

SEQ ID NO: 9013 - DNA, 22 bp, synthetic construct
  misc_feature 1..22: note = chemically synthesized
  source 1..22: mol_type = other DNA
tctttcttccatatgacagtcc

SEQ ID NO: 9014 - DNA, 22 bp, synthetic construct
  misc_feature 1..22: note = chemically synthesized
  source 1..22: mol_type = other DNA
tcttccatatgacagtcctggg

SEQ ID NO: 9015 - DNA, 22 bp, synthetic construct
  misc_feature 1..22: note = chemically synthesized
  source 1..22: mol_type = other DNA
cttccatatgacagtcctgggt

SEQ ID NO: 9016 - DNA, 22 bp, synthetic construct
  misc_feature 1..22: note = chemically synthesized
  source 1..22: mol_type = other DNA
ttccatatgacagtcctgggtg

SEQ ID NO: 9017 - DNA, 22 bp, synthetic construct
  misc_feature 1..22: note = chemically synthesized
  source 1..22: mol_type = other DNA
ccatatgacagtcctgggtgct

SEQ ID NO: 9018 - DNA, 22 bp, synthetic construct
  misc_feature 1..22: note = chemically synthesized
  source 1..22: mol_type = other DNA
catatgacagtcctgggtgctc

SEQ ID NO: 9019 - DNA, 22 bp, synthetic construct
  misc_feature 1..22: note = chemically synthesized
  source 1..22: mol_type = other DNA
ggtgctctttccttgtgtgctt

SEQ ID NO: 9020 - DNA, 22 bp, synthetic construct
  misc_feature 1..22: note = chemically synthesized
  source 1..22: mol_type = other DNA
tttccttgtgtgcttttctctg

SEQ ID NO: 9021 - DNA, 22 bp, synthetic construct
  misc_feature 1..22: note = chemically synthesized
  source 1..22: mol_type = other DNA
tccttgtgtgcttttctctgcc

SEQ ID NO: 9022 - DNA, 22 bp, synthetic construct
  misc_feature 1..22: note = chemically synthesized
  source 1..22: mol_type = other DNA
ccttgtgtgcttttctctgcca

SEQ ID NO: 9023 - DNA, 22 bp, synthetic construct
  misc_feature 1..22: note = chemically synthesized
  source 1..22: mol_type = other DNA
cttgtgtgcttttctctgccac

SEQ ID NO: 9024 - DNA, 22 bp, synthetic construct
  misc_feature 1..22: note = chemically synthesized
  source 1..22: mol_type = other DNA
gtgtgcttttctctgccacacg

SEQ ID NO: 9025 - DNA, 22 bp, synthetic construct
  misc_feature 1..22: note = chemically synthesized
  source 1..22: mol_type = other DNA
tgtgcttttctctgccacacgt

SEQ ID NO: 9026 - DNA, 22 bp, synthetic construct
  misc_feature 1..22: note = chemically synthesized
  source 1..22: mol_type = other DNA
ttctctgccacacgtggctgcc

SEQ ID NO: 9027 - DNA, 22 bp, synthetic construct
  misc_feature 1..22: note = chemically synthesized
  source 1..22: mol_type = other DNA
tctctgccacacgtggctgcca

SEQ ID NO: 9028 - DNA, 22 bp, synthetic construct
  misc_feature 1..22: note = chemically synthesized
  source 1..22: mol_type = other DNA
ctctgccacacgtggctgccac

SEQ ID NO: 9029 - DNA, 22 bp, synthetic construct
  misc_feature 1..22: note = chemically synthesized
  source 1..22: mol_type = other DNA
tctgccacacgtggctgccacc

SEQ ID NO: 9030 - DNA, 22 bp, synthetic construct
  misc_feature 1..22: note = chemically synthesized
  source 1..22: mol_type = other DNA
tgccacacgtggctgccacccc

SEQ ID NO: 9031 - DNA, 22 bp, synthetic construct
  misc_feature 1..22: note = chemically synthesized
  source 1..22: mol_type = other DNA
ccacacgtggctgccaccccct

SEQ ID NO: 9032 - DNA, 22 bp, synthetic construct
  misc_feature 1..22: note = chemically synthesized
  source 1..22: mol_type = other DNA
ccaccccctcactgcccccaga

SEQ ID NO: 9033 - DNA, 22 bp, synthetic construct
  misc_feature 1..22: note = chemically synthesized
  source 1..22: mol_type = other DNA
actgcccccagatcctattcca

SEQ ID NO: 9034 - DNA, 22 bp, synthetic construct
  misc_feature 1..22: note = chemically synthesized
  source 1..22: mol_type = other DNA
cccccagatcctattccaatac

SEQ ID NO: 9035 - DNA, 22 bp, synthetic construct
  misc_feature 1..22: note = chemically synthesized
  source 1..22: mol_type = other DNA
ttccaatactcatgattagaca

SEQ ID NO: 9036 - DNA, 22 bp, synthetic construct
  misc_feature 1..22: note = chemically synthesized
  source 1..22: mol_type = other DNA
caatactcatgattagacagac

SEQ ID NO: 9037 - DNA, 22 bp, synthetic construct
  misc_feature 1..22: note = chemically synthesized
  source 1..22: mol_type = other DNA
atgattagacagactccactaa

SEQ ID NO: 9038 - DNA, 22 bp, synthetic construct
  misc_feature 1..22: note = chemically synthesized
  source 1..22: mol_type = other DNA
gacagactccactaaagctggt

SEQ ID NO: 9039 - DNA, 22 bp, synthetic construct
  misc_feature 1..22: note = chemically synthesized
  source 1..22: mol_type = other DNA
cactaaagctggtggattctag

SEQ ID NO: 9040 - DNA, 22 bp, synthetic construct
  misc_feature 1..22: note = chemically synthesized
  source 1..22: mol_type = other DNA
aagctggtggattctagaaaat

SEQ ID NO: 9041 - DNA, 22 bp, synthetic construct
  misc_feature 1..22: note = chemically synthesized
  source 1..22: mol_type = other DNA
gtggattctagaaaatgttaag

SEQ ID NO: 9042 - DNA, 22 bp, synthetic construct
  misc_feature 1..22: note = chemically synthesized
  source 1..22: mol_type = other DNA
tagaaaatgttaaggtgtgtct

SEQ ID NO: 9043 - DNA, 22 bp, synthetic construct
  misc_feature 1..22: note = chemically synthesized
  source 1..22: mol_type = other DNA
gaaaatgttaaggtgtgtctag

SEQ ID NO: 9044 - DNA, 22 bp, synthetic construct
  misc_feature 1..22: note = chemically synthesized
  source 1..22: mol_type = other DNA
aggtgtgtctagccatggtagt

SEQ ID NO: 9045 - DNA, 22 bp, synthetic construct
  misc_feature 1..22: note = chemically synthesized
  source 1..22: mol_type = other DNA
gccatggtagttgaactcagga

SEQ ID NO: 9046 - DNA, 22 bp, synthetic construct
  misc_feature 1..22: note = chemically synthesized
  source 1..22: mol_type = other DNA
aactcaggagttggtgctcagg

SEQ ID NO: 9047 - DNA, 22 bp, synthetic construct
  misc_feature 1..22: note = chemically synthesized
  source 1..22: mol_type = other DNA
aggagttggtgctcagggcaaa

SEQ ID NO: 9048 - DNA, 22 bp, synthetic construct
  misc_feature 1..22: note = chemically synthesized
  source 1..22: mol_type = other DNA
gtgctcagggcaaattagaccc

SEQ ID NO: 9049 - DNA, 22 bp, synthetic construct
  misc_feature 1..22: note = chemically synthesized
  source 1..22: mol_type = other DNA
agggcaaattagacccaaatcc

SEQ ID NO: 9050 - DNA, 22 bp, synthetic construct
  misc_feature 1..22: note = chemically synthesized
  source 1..22: mol_type = other DNA
gacccaaatcctgaggaataat

SEQ ID NO: 9051 - DNA, 22 bp, synthetic construct
  misc_feature 1..22: note = chemically synthesized
  source 1..22: mol_type = other DNA
aggaataattccttcagttttt

SEQ ID NO: 9052 - DNA, 22 bp, synthetic construct
  misc_feature 1..22: note = chemically synthesized
  source 1..22: mol_type = other DNA
cttcagtttttttttttttttt

SEQ ID NO: 9053 - DNA, 22 bp, synthetic construct
  misc_feature 1..22: note = chemically synthesized
  source 1..22: mol_type = other DNA
cagttttttttttttttttttt

SEQ ID NO: 9054 - DNA, 22 bp, synthetic construct
  misc_feature 1..22: note = chemically synthesized
  source 1..22: mol_type = other DNA
agtttttttttttttttttttt

SEQ ID NO: 9055 - DNA, 22 bp, synthetic construct
  misc_feature 1..22: note = chemically synthesized
  source 1..22: mol_type = other DNA
tttttttttttttttttttttt

SEQ ID NO: 9056 - DNA, 22 bp, synthetic construct
  misc_feature 1..22: note = chemically synthesized
  source 1..22: mol_type = other DNA
tttttttttttttttttttttt

SEQ ID NO: 9057 - DNA, 22 bp, synthetic construct
  misc_feature 1..22: note = chemically synthesized
  source 1..22: mol_type = other DNA
tttttttttttttttttttttt

SEQ ID NO: 9058 - DNA, 22 bp, synthetic construct
  misc_feature 1..22: note = chemically synthesized
  source 1..22: mol_type = other DNA
tttttttttttttttttttttt

SEQ ID NO: 9059 - DNA, 22 bp, synthetic construct
  misc_feature 1..22: note = chemically synthesized
  source 1..22: mol_type = other DNA
tttttttttttttttttttttt

SEQ ID NO: 9060 - DNA, 22 bp, synthetic construct
  misc_feature 1..22: note = chemically synthesized
  source 1..22: mol_type = other DNA
tttttttttttttttttttttg

SEQ ID NO: 9061 - DNA, 22 bp, synthetic construct
  misc_feature 1..22: note = chemically synthesized
  source 1..22: mol_type = other DNA
ttttttttttttttttttttga

SEQ ID NO: 9062 - DNA, 22 bp, synthetic construct
  misc_feature 1..22: note = chemically synthesized
  source 1..22: mol_type = other DNA
tttttttttttttttttttgag

SEQ ID NO: 9063 - DNA, 22 bp, synthetic construct
  misc_feature 1..22: note = chemically synthesized
  source 1..22: mol_type = other DNA
ttttttttttttttttttgaga

SEQ ID NO: 9064 - DNA, 22 bp, synthetic construct
  misc_feature 1..22: note = chemically synthesized
  source 1..22: mol_type = other DNA
tttttttttttttttttgagac

SEQ ID NO: 9065 - DNA, 22 bp, synthetic construct
  misc_feature 1..22: note = chemically synthesized
  source 1..22: mol_type = other DNA
ttttttttttttttttgagaca

SEQ ID NO: 9066 - DNA, 22 bp, synthetic construct
  misc_feature 1..22: note = chemically synthesized
  source 1..22: mol_type = other DNA
tttttttttttttttgagacag

SEQ ID NO: 9067 - DNA, 22 bp, synthetic construct
  misc_feature 1..22: note = chemically synthesized
  source 1..22: mol_type = other DNA
ttttttttttttttgagacaga

SEQ ID NO: 9068 - DNA, 22 bp, synthetic construct
  misc_feature 1..22: note = chemically synthesized
  source 1..22: mol_type = other DNA
tttttttttttttgagacagag

SEQ ID NO: 9069 - DNA, 22 bp, synthetic construct
  misc_feature 1..22: note = chemically synthesized
  source 1..22: mol_type = other DNA
ttttttttttttgagacagagt

SEQ ID NO: 9070 - DNA, 22 bp, synthetic construct
  misc_feature 1..22: note = chemically synthesized
  source 1..22: mol_type = other DNA
tttttttttttgagacagagtc

SEQ ID NO: 9071 - DNA, 22 bp, synthetic construct
  misc_feature 1..22: note = chemically synthesized
  source 1..22: mol_type = other DNA
ttttttttttgagacagagtct

SEQ ID NO: 9072 - DNA, 22 bp, synthetic construct
  misc_feature 1..22: note = chemically synthesized
  source 1..22: mol_type = other DNA
tttttttttgagacagagtctc

SEQ ID NO: 9073 - DNA, 22 bp, synthetic construct
  misc_feature 1..22: note = chemically synthesized
  source 1..22: mol_type = other DNA
ttttttttgagacagagtctca

SEQ ID NO: 9074 - DNA, 22 bp, synthetic construct
  misc_feature 1..22: note = chemically synthesized
  source 1..22: mol_type = other DNA
tttttttgagacagagtctcac

SEQ ID NO: 9075 - DNA, 22 bp, synthetic construct
  misc_feature 1..22: note = chemically synthesized
  source 1..22: mol_type = other DNA
ttttttgagacagagtctcact

SEQ ID NO: 9076 - DNA, 22 bp, synthetic construct
  misc_feature 1..22: note = chemically synthesized
  source 1..22: mol_type = other DNA
tttttgagacagagtctcactc

SEQ ID NO: 9077 - DNA, 22 bp, synthetic construct
  misc_feature 1..22: note = chemically synthesized
  source 1..22: mol_type = other DNA
ttttgagacagagtctcactct

SEQ ID NO: 9078 - DNA, 22 bp, synthetic construct
  misc_feature 1..22: note = chemically synthesized
  source 1..22: mol_type = other DNA
tttgagacagagtctcactcta

SEQ ID NO: 9079 - DNA, 22 bp, synthetic construct
  misc_feature 1..22: note = chemically synthesized
  source 1..22: mol_type = other DNA
ttgagacagagtctcactctat

SEQ ID NO: 9080 - DNA, 22 bp, synthetic construct
  misc_feature 1..22: note = chemically synthesized
  source 1..22: mol_type = other DNA
tgagacagagtctcactctatc

SEQ ID NO: 9081 - DNA, 22 bp, synthetic construct
  misc_feature 1..22: note = chemically synthesized
  source 1..22: mol_type = other DNA
gagacagagtctcactctatca

SEQ ID NO: 9082 - DNA, 22 bp, synthetic construct
  misc_feature 1..22: note = chemically synthesized
  source 1..22: mol_type = other DNA
agacagagtctcactctatcac

SEQ ID NO: 9083 - DNA, 22 bp, synthetic construct
  misc_feature 1..22: note = chemically synthesized
  source 1..22: mol_type = other DNA
actctatcacccaggctggagt

SEQ ID NO: 9084 - DNA, 22 bp, synthetic construct
  misc_feature 1..22: note = chemically synthesized
  source 1..22: mol_type = other DNA
tatcacccaggctggagtgcag

SEQ ID NO: 9085 - DNA, 22 bp, synthetic construct
  misc_feature 1..22: note = chemically synthesized
  source 1..22: mol_type = other DNA
tcacccaggctggagtgcagtg

SEQ ID NO: 9086 - DNA, 22 bp, synthetic construct
  misc_feature 1..22: note = chemically synthesized
  source 1..22: mol_type = other DNA
gagtgcagtggcacaatctcag

SEQ ID NO: 9087 - DNA, 22 bp, synthetic construct
  misc_feature 1..22: note = chemically synthesized
  source 1..22: mol_type = other DNA
agctcactgcaacctgcacctc

SEQ ID NO: 9088 - DNA, 22 bp, synthetic construct
  misc_feature 1..22: note = chemically synthesized
  source 1..22: mol_type = other DNA
actgcaacctgcacctcctggg

SEQ ID NO: 9089 - DNA, 22 bp, synthetic construct
  misc_feature 1..22: note = chemically synthesized
  source 1..22: mol_type = other DNA
caacctgcacctcctgggttca

SEQ ID NO: 9090 - DNA, 22 bp, synthetic construct
  misc_feature 1..22: note = chemically synthesized
  source 1..22: mol_type = other DNA
cacctcctgggttcaagggatt

SEQ ID NO: 9091 - DNA, 22 bp, synthetic construct
  misc_feature 1..22: note = chemically synthesized
  source 1..22: mol_type = other DNA
ctgggttcaagggattctccta

SEQ ID NO: 9092 - DNA, 22 bp, synthetic construct
  misc_feature 1..22: note = chemically synthesized
  source 1..22: mol_type = other DNA
ggttcaagggattctcctacct

SEQ ID NO: 9093 - DNA, 22 bp, synthetic construct
  misc_feature 1..22: note = chemically synthesized
  source 1..22: mol_type = other DNA
aagggattctcctacctaagcc

SEQ ID NO: 9094 - DNA, 22 bp, synthetic construct
  misc_feature 1..22: note = chemically synthesized
  source 1..22: mol_type = other DNA
tcctacctaagcctcctgaaaa

SEQ ID NO: 9095 - DNA, 22 bp, synthetic construct
  misc_feature 1..22: note = chemically synthesized
  source 1..22: mol_type = other DNA
ctacctaagcctcctgaaaacc

SEQ ID NO: 9096 - DNA, 22 bp, synthetic construct
  misc_feature 1..22: note = chemically synthesized
  source 1..22: mol_type = other DNA
cctaagcctcctgaaaacctgg

SEQ ID NO: 9097 - DNA, 22 bp, synthetic construct
  misc_feature 1..22: note = chemically synthesized
  source 1..22: mol_type = other DNA
agcctcctgaaaacctgggact

SEQ ID NO: 9098 - DNA, 22 bp, synthetic construct
  misc_feature 1..22: note = chemically synthesized
  source 1..22: mol_type = other DNA
ctgaaaacctgggactataggc

SEQ ID NO: 9099 - DNA, 22 bp, synthetic construct
  misc_feature 1..22: note = chemically synthesized
  source 1..22: mol_type = other DNA
aaaacctgggactataggcgtg

SEQ ID NO: 9100 - DNA, 22 bp, synthetic construct
  misc_feature 1..22: note = chemically synthesized
  source 1..22: mol_type = other DNA
ggactataggcgtgcgccacca

SEQ ID NO: 9101 - DNA, 22 bp, synthetic construct
  misc_feature 1..22: note = chemically synthesized
  source 1..22: mol_type = other DNA
taggcgtgcgccaccacaccag

SEQ ID NO: 9102 - DNA, 22 bp, synthetic construct
  misc_feature 1..22: note = chemically synthesized
  source 1..22: mol_type = other DNA
atttttgtatttttagtagaca

SEQ ID NO: 9103 - DNA, 22 bp, synthetic construct
  misc_feature 1..22: note = chemically synthesized
  source 1..22: mol_type = other DNA
ttgtatttttagtagacatggg

SEQ ID NO: 9104 - DNA, 22 bp, synthetic construct
  misc_feature 1..22: note = chemically synthesized
  source 1..22: mol_type = other DNA
tgtatttttagtagacatgggg

SEQ ID NO: 9105 - DNA, 22 bp, synthetic construct
  misc_feature 1..22: note = chemically synthesized
  source 1..22: mol_type = other DNA
gtatttttagtagacatggggt

SEQ ID NO: 9106 - DNA, 22 bp, synthetic construct
  misc_feature 1..22: note = chemically synthesized
  source 1..22: mol_type = other DNA
tatttttagtagacatggggtt

SEQ ID NO: 9107 - DNA, 22 bp, synthetic construct
  misc_feature 1..22: note = chemically synthesized
  source 1..22: mol_type = other DNA
ttagtagacatggggtttcacc

SEQ ID NO: 9108 - DNA, 22 bp, synthetic construct
  misc_feature 1..22: note = chemically synthesized
  source 1..22: mol_type = other DNA
tagtagacatggggtttcacca

SEQ ID NO: 9109 - DNA, 22 bp, synthetic construct
  misc_feature 1..22: note = chemically synthesized
  source 1..22: mol_type = other DNA
agtagacatggggtttcaccat

SEQ ID NO: 9110 - DNA, 22 bp, synthetic construct
  misc_feature 1..22: note = chemically synthesized
  source 1..22: mol_type = other DNA
gtagacatggggtttcaccatg

SEQ ID NO: 9111 - DNA, 22 bp, synthetic construct
  misc_feature 1..22: note = chemically synthesized
  source 1..22: mol_type = other DNA
caccatgttggccaagcttgtc

SEQ ID NO: 9112 - DNA, 22 bp, synthetic construct
  misc_feature 1..22: note = chemically synthesized
  source 1..22: mol_type = other DNA
accatgttggccaagcttgtct

SEQ ID NO: 9113 - DNA, 22 bp, synthetic construct
  misc_feature 1..22: note = chemically synthesized
  source 1..22: mol_type = other DNA
gccaagcttgtctcaaactcct

SEQ ID NO: 9114 - DNA, 22 bp, synthetic construct
  misc_feature 1..22: note = chemically synthesized
  source 1..22: mol_type = other DNA
gtctcaaactcctgacctcaaa

SEQ ID NO: 9115 - DNA, 22 bp, synthetic construct
  misc_feature 1..22: note = chemically synthesized
  source 1..22: mol_type = other DNA
tctcaaactcctgacctcaaat

SEQ ID NO: 9116 - DNA, 22 bp, synthetic construct
  misc_feature 1..22: note = chemically synthesized
  source 1..22: mol_type = other DNA
aaactcctgacctcaaatgatc

SEQ ID NO: 9117 - DNA, 22 bp, synthetic construct
  misc_feature 1..22: note = chemically synthesized
  source 1..22: mol_type = other DNA
ctgacctcaaatgatctacctg

SEQ ID NO: 9118 - DNA, 22 bp, synthetic construct
  misc_feature 1..22: note = chemically synthesized
  source 1..22: mol_type = other DNA
acctcaaatgatctacctgcct

SEQ ID NO: 9119 - DNA, 22 bp, synthetic construct
  misc_feature 1..22: note = chemically synthesized
  source 1..22: mol_type = other DNA
aaatgatctacctgcctcagcc

SEQ ID NO: 9120 - DNA, 22 bp, synthetic construct
  misc_feature 1..22: note = chemically synthesized
  source 1..22: mol_type = other DNA
cctgcctcagccaccaaagtgc

SEQ ID NO: 9121 - DNA, 22 bp, synthetic construct
  misc_feature 1..22: note = chemically synthesized
  source 1..22: mol_type = other DNA
cctcagccaccaaagtgctggg

SEQ ID NO: 9122 - DNA, 22 bp, synthetic construct
  misc_feature 1..22: note = chemically synthesized
  source 1..22: mol_type = other DNA
agccaccaaagtgctgggatta

SEQ ID NO: 9123 - DNA, 22 bp, synthetic construct
  misc_feature 1..22: note = chemically synthesized
  source 1..22: mol_type = other DNA
ggattacagaagtgagccaccg

SEQ ID NO: 9124 - DNA, 22 bp, synthetic construct
  misc_feature 1..22: note = chemically synthesized
  source 1..22: mol_type = other DNA
cagaagtgagccaccgtgccca

SEQ ID NO: 9125 - DNA, 22 bp, synthetic construct
  misc_feature 1..22: note = chemically synthesized
  source 1..22: mol_type = other DNA
ggtcctgaattcttacactgaa

SEQ ID NO: 9126 - DNA, 22 bp, synthetic construct
  misc_feature 1..22: note = chemically synthesized
  source 1..22: mol_type = other DNA
gtcctgaattcttacactgaac

SEQ ID NO: 9127 - DNA, 22 bp, synthetic construct
  misc_feature 1..22: note = chemically synthesized
  source 1..22: mol_type = other DNA
aattcttacactgaactgccta

SEQ ID NO: 9128 - DNA, 22 bp, synthetic construct
  misc_feature 1..22: note = chemically synthesized
  source 1..22: mol_type = other DNA
ttacactgaactgcctatgtgg

SEQ ID NO: 9129 - DNA, 22 bp, synthetic construct
  misc_feature 1..22: note = chemically synthesized
  source 1..22: mol_type = other DNA
acactgaactgcctatgtggcc

SEQ ID NO: 9130 - DNA, 22 bp, synthetic construct
  misc_feature 1..22: note = chemically synthesized
  source 1..22: mol_type = other DNA
cactgaactgcctatgtggcct

SEQ ID NO: 9131 - DNA, 22 bp, synthetic construct
  misc_feature 1..22: note = chemically synthesized
  source 1..22: mol_type = other DNA
aactgcctatgtggcctcacca

SEQ ID NO: 9132 - DNA, 22 bp, synthetic construct
  misc_feature 1..22: note = chemically synthesized
  source 1..22: mol_type = other DNA
cctatgtggcctcaccacttgg

SEQ ID NO: 9133 - DNA, 22 bp, synthetic construct
  misc_feature 1..22: note = chemically synthesized
  source 1..22: mol_type = other DNA
tgtggcctcaccacttggaagc

SEQ ID NO: 9134 - DNA, 22 bp, synthetic construct
  misc_feature 1..22: note = chemically synthesized
  source 1..22: mol_type = other DNA
accacttggaagcctgactgga

SEQ ID NO: 9135 - DNA, 22 bp, synthetic construct
  misc_feature 1..22: note = chemically synthesized
  source 1..22: mol_type = other DNA
ggaagcctgactggaatctcaa

SEQ ID NO: 9136 - DNA, 22 bp, synthetic construct
  misc_feature 1..22: note = chemically synthesized
  source 1..22: mol_type = other DNA
gaagcctgactggaatctcaaa

SEQ ID NO: 9137 - DNA, 22 bp, synthetic construct
  misc_feature 1..22: note = chemically synthesized
  source 1..22: mol_type = other DNA
actggaatctcaaacttaacat

SEQ ID NO: 9138 - DNA, 22 bp, synthetic construct
  misc_feature 1..22: note = chemically synthesized
  source 1..22: mol_type = other DNA
gaatctcaaacttaacatgtcc

SEQ ID NO: 9139 - DNA, 22 bp, synthetic construct
  misc_feature 1..22: note = chemically synthesized
  source 1..22: mol_type = other DNA
aaacttaacatgtccaaatgca

SEQ ID NO: 9140 - DNA, 22 bp, synthetic construct
  misc_feature 1..22: note = chemically synthesized
  source 1..22: mol_type = other DNA
aacatgtccaaatgcagatcct

SEQ ID NO: 9141 - DNA, 22 bp, synthetic construct
  misc_feature 1..22: note = chemically synthesized
  source 1..22: mol_type = other DNA
acatgtccaaatgcagatcctt

SEQ ID NO: 9142 - DNA, 22 bp, synthetic construct
  misc_feature 1..22: note = chemically synthesized
  source 1..22: mol_type = other DNA
gatttaccccaaactgctcttt

SEQ ID NO: 9143 - DNA, 22 bp, synthetic construct
  misc_feature 1..22: note = chemically synthesized
  source 1..22: mol_type = other DNA
atttaccccaaactgctctttc

SEQ ID NO: 9144 - DNA, 22 bp, synthetic construct
  misc_feature 1..22: note = chemically synthesized
  source 1..22: mol_type = other DNA
accccaaactgctctttcctct

SEQ ID NO: 9145 - DNA, 22 bp, synthetic construct
  misc_feature 1..22: note = chemically synthesized
  source 1..22: mol_type = other DNA
ccccaaactgctctttcctctg

SEQ ID NO: 9146 - DNA, 22 bp, synthetic construct
  misc_feature 1..22: note = chemically synthesized
  source 1..22: mol_type = other DNA
ctctttcctctgccttcaccat

SEQ ID NO: 9147 - DNA, 22 bp, synthetic construct
  misc_feature 1..22: note = chemically synthesized
  source 1..22: mol_type = other DNA
tttcctctgccttcaccatctc

SEQ ID NO: 9148 - DNA, 22 bp, synthetic construct
  misc_feature 1..22: note = chemically synthesized
  source 1..22: mol_type = other DNA
tcctctgccttcaccatctcag

SEQ ID NO: 9149 - DNA, 22 bp, synthetic construct
  misc_feature 1..22: note = chemically synthesized
  source 1..22: mol_type = other DNA
cctctgccttcaccatctcaga

SEQ ID NO: 9150 - DNA, 22 bp, synthetic construct
  misc_feature 1..22: note = chemically synthesized
  source 1..22: mol_type = other DNA
ctctgccttcaccatctcagaa

SEQ ID NO: 9151 - DNA, 22 bp, synthetic construct
  misc_feature 1..22: note = chemically synthesized
  source 1..22: mol_type = other DNA
tgccttcaccatctcagaaatg

SEQ ID NO: 9152 - DNA, 22 bp, synthetic construct
  misc_feature 1..22: note = chemically synthesized
  source 1..22: mol_type = other DNA
ccttcaccatctcagaaatggc

SEQ ID NO: 9153 - DNA, 22 bp, synthetic construct
  misc_feature 1..22: note = chemically synthesized
  source 1..22: mol_type = other DNA
caccatctcagaaatggcattg

SEQ ID NO: 9154 - DNA, 22 bp, synthetic construct
  misc_feature 1..22: note = chemically synthesized
  source 1..22: mol_type = other DNA
accatctcagaaatggcattgc

SEQ ID NO: 9155 - DNA, 22 bp, synthetic construct
  misc_feature 1..22: note = chemically synthesized
  source 1..22: mol_type = other DNA
agaaatggcattgccaattacc

SEQ ID NO: 9156 - DNA, 22 bp, synthetic construct
  misc_feature 1..22: note = chemically synthesized
  source 1..22: mol_type = other DNA
ccaattaccccactgctcaggc

SEQ ID NO: 9157 - DNA, 22 bp, synthetic construct
  misc_feature 1..22: note = chemically synthesized
  source 1..22: mol_type = other DNA
ccccactgctcaggccaataaa

SEQ ID NO: 9158 - DNA, 22 bp, synthetic construct
  misc_feature 1..22: note = chemically synthesized
  source 1..22: mol_type = other DNA
ctcaggccaataaaattaaaat

SEQ ID NO: 9159 - DNA, 22 bp, synthetic construct
  misc_feature 1..22: note = chemically synthesized
  source 1..22: mol_type = other DNA
aggccaataaaattaaaataaa

SEQ ID NO: 9160 - DNA, 22 bp, synthetic construct
  misc_feature 1..22: note = chemically synthesized
  source 1..22: mol_type = other DNA
aaataaagaacaaagtcaactt

SEQ ID NO: 9161 - DNA, 22 bp, synthetic construct
  misc_feature 1..22: note = chemically synthesized
  source 1..22: mol_type = other DNA
taactcttctctttttcagggg

SEQ ID NO: 9162 - DNA, 22 bp, synthetic construct
  misc_feature 1..22: note = chemically synthesized
  source 1..22: mol_type = other DNA
aactcttctctttttcaggggg

SEQ ID NO: 9163 - DNA, 22 bp, synthetic construct
  misc_feature 1..22: note = chemically synthesized
  source 1..22: mol_type = other DNA
actcttctctttttcagggggt

SEQ ID NO: 9164 - DNA, 22 bp, synthetic construct
  misc_feature 1..22: note = chemically synthesized
  source 1..22: mol_type = other DNA
ttctctttttcagggggtcagg

SEQ ID NO: 9165 - DNA, 22 bp, synthetic construct
  misc_feature 1..22: note = chemically synthesized
  source 1..22: mol_type = other DNA
ctctttttcagggggtcagggg

SEQ ID NO: 9166 - DNA, 22 bp, synthetic construct
  misc_feature 1..22: note = chemically synthesized
  source 1..22: mol_type = other DNA
tctttttcagggggtcagggga

SEQ ID NO: 9167 - DNA, 22 bp, synthetic construct
  misc_feature 1..22: note = chemically synthesized
  source 1..22: mol_type = other DNA
tttttcagggggtcaggggaga

SEQ ID NO: 9168 - DNA, 22 bp, synthetic construct
  misc_feature 1..22: note = chemically synthesized
  source 1..22: mol_type = other DNA
tttcagggggtcaggggagaca

SEQ ID NO: 9169 - DNA, 22 bp, synthetic construct
  misc_feature 1..22: note = chemically synthesized
  source 1..22: mol_type = other DNA
ttcagggggtcaggggagacag

SEQ ID NO: 9170 - DNA, 22 bp, synthetic construct
  misc_feature 1..22: note = chemically synthesized
  source 1..22: mol_type = other DNA
tcagggggtcaggggagacagg

SEQ ID NO: 9171 - DNA, 22 bp, synthetic construct
  misc_feature 1..22: note = chemically synthesized
  source 1..22: mol_type = other DNA
cagggggtcaggggagacaggg

SEQ ID NO: 9172 - DNA, 22 bp, synthetic construct
  misc_feature 1..22: note = chemically synthesized
  source 1..22: mol_type = other DNA
agggggtcaggggagacagggt

SEQ ID NO: 9173 - DNA, 22 bp, synthetic construct
  misc_feature 1..22: note = chemically synthesized
  source 1..22: mol_type = other DNA
gctctgtcacctaggctgaagt

SEQ ID NO: 9174 - DNA, 22 bp, synthetic construct
  misc_feature 1..22: note = chemically synthesized
  source 1..22: mol_type = other DNA
ctctgtcacctaggctgaagta

SEQ ID NO: 9175 - DNA, 22 bp, synthetic construct
  misc_feature 1..22: note = chemically synthesized
  source 1..22: mol_type = other DNA
tgtcacctaggctgaagtacag

SEQ ID NO: 9176 - DNA, 22 bp, synthetic construct
  misc_feature 1..22: note = chemically synthesized
  source 1..22: mol_type = other DNA
tcacctaggctgaagtacagtg

SEQ ID NO: 9177 - DNA, 22 bp, synthetic construct
  misc_feature 1..22: note = chemically synthesized
  source 1..22: mol_type = other DNA
ggctgaagtacagtggcacagt

SEQ ID NO: 9178 - DNA, 22 bp, synthetic construct
  misc_feature 1..22: note = chemically synthesized
  source 1..22: mol_type = other DNA
aagtacagtggcacagtcatgg

SEQ ID NO: 9179 - DNA, 22 bp, synthetic construct
  misc_feature 1..22: note = chemically synthesized
  source 1..22: mol_type = other DNA
actgcagcctcaacttcctggg

SEQ ID NO: 9180 - DNA, 22 bp, synthetic construct
  misc_feature 1..22: note = chemically synthesized
  source 1..22: mol_type = other DNA
cagcctcaacttcctgggctca

SEQ ID NO: 9181 - DNA, 22 bp, synthetic construct
  misc_feature 1..22: note = chemically synthesized
  source 1..22: mol_type = other DNA
aacttcctgggctcaagcaata

SEQ ID NO: 9182 - DNA, 22 bp, synthetic construct
  misc_feature 1..22: note = chemically synthesized
  source 1..22: mol_type = other DNA
cctgggctcaagcaataccctc

SEQ ID NO: 9183 - DNA, 22 bp, synthetic construct
  misc_feature 1..22: note = chemically synthesized
  source 1..22: mol_type = other DNA
ctgggctcaagcaataccctcc

SEQ ID NO: 9184 - DNA, 22 bp, synthetic construct
  misc_feature 1..22: note = chemically synthesized
  source 1..22: mol_type = other DNA
ggctcaagcaataccctccacc

SEQ ID NO: 9185 - DNA, 22 bp, synthetic construct
  misc_feature 1..22: note = chemically synthesized
  source 1..22: mol_type = other DNA
aagcaataccctccacctcagc

SEQ ID NO: 9186 - DNA, 22 bp, synthetic construct
  misc_feature 1..22: note = chemically synthesized
  source 1..22: mol_type = other DNA
cacctcagcctcccgagtagct

SEQ ID NO: 9187 - DNA, 22 bp, synthetic construct
  misc_feature 1..22: note = chemically synthesized
  source 1..22: mol_type = other DNA
agcctcccgagtagctaggatc

SEQ ID NO: 9188 - DNA, 22 bp, synthetic construct
  misc_feature 1..22: note = chemically synthesized
  source 1..22: mol_type = other DNA
ccgagtagctaggatcacaggt

SEQ ID NO: 9189 - DNA, 22 bp, synthetic construct
  misc_feature 1..22: note = chemically synthesized
  source 1..22: mol_type = other DNA
ggatcacaggtgcatgccacca

SEQ ID NO: 9190 - DNA, 22 bp, synthetic construct
  misc_feature 1..22: note = chemically synthesized
  source 1..22: mol_type = other DNA
atttttgtattttttgtagaga

SEQ ID NO: 9191 - DNA, 22 bp, synthetic construct
  misc_feature 1..22: note = chemically synthesized
  source 1..22: mol_type = other DNA
ttgtattttttgtagagaaggg

SEQ ID NO: 9192 - DNA, 22 bp, synthetic construct
  misc_feature 1..22: note = chemically synthesized
  source 1..22: mol_type = other DNA
tgtattttttgtagagaagggg

SEQ ID NO: 9193 - DNA, 22 bp, synthetic construct
  misc_feature 1..22: note = chemically synthesized
  source 1..22: mol_type = other DNA
gtattttttgtagagaaggggt

SEQ ID NO: 9194 - DNA, 22 bp, synthetic construct
  misc_feature 1..22: note = chemically synthesized
  source 1..22: mol_type = other DNA
tattttttgtagagaaggggtt

SEQ ID NO: 9195 - DNA, 22 bp, synthetic construct
  misc_feature 1..22: note = chemically synthesized
  source 1..22: mol_type = other DNA
tttgtagagaaggggttttgct

SEQ ID NO: 9196 - DNA, 22 bp, synthetic construct
  misc_feature 1..22: note = chemically synthesized
  source 1..22: mol_type = other DNA
ttgtagagaaggggttttgctg

SEQ ID NO: 9197 - DNA, 22 bp, synthetic construct
  misc_feature 1..22: note = chemically synthesized
  source 1..22: mol_type = other DNA
tgtagagaaggggttttgctgt

SEQ ID NO: 9198 - DNA, 22 bp, synthetic construct
  misc_feature 1..22: note = chemically synthesized
  source 1..22: mol_type = other DNA
gtagagaaggggttttgctgtg

SEQ ID NO: 9199 - DNA, 22 bp, synthetic construct
  misc_feature 1..22: note = chemically synthesized
  source 1..22: mol_type = other DNA
tagagaaggggttttgctgtgt

SEQ ID NO: 9200 - DNA, 22 bp, synthetic construct
  misc_feature 1..22: note = chemically synthesized
  source 1..22: mol_type = other DNA
tgctgtgttgcccaggctggtc

SEQ ID NO: 9201 - DNA, 22 bp, synthetic construct
  misc_feature 1..22: note = chemically synthesized
  source 1..22: mol_type = other DNA
gctgtgttgcccaggctggtct

SEQ ID NO: 9202 - DNA, 22 bp, synthetic construct
  misc_feature 1..22: note = chemically synthesized
  source 1..22: mol_type = other DNA
ctgtgttgcccaggctggtctt

SEQ ID NO: 9203 - DNA, 22 bp, synthetic construct
  misc_feature 1..22: note = chemically synthesized
  source 1..22: mol_type = other DNA
tgttgcccaggctggtcttgaa

SEQ ID NO: 9204 - DNA, 22 bp, synthetic construct
  misc_feature 1..22: note = chemically synthesized
  source 1..22: mol_type = other DNA
cccaggctggtcttgaactcct

SEQ ID NO: 9205 - DNA, 22 bp, synthetic construct
  misc_feature 1..22: note = chemically synthesized
  source 1..22: mol_type = other DNA
gtcttgaactcctgagctcagg

SEQ ID NO: 9206 - DNA, 22 bp, synthetic construct
  misc_feature 1..22: note = chemically synthesized
  source 1..22: mol_type = other DNA
gaactcctgagctcaggaatct

SEQ ID NO: 9207 - DNA, 22 bp, synthetic construct
  misc_feature 1..22: note = chemically synthesized
  source 1..22: mol_type = other DNA
aactcctgagctcaggaatctg

SEQ ID NO: 9208 - DNA, 22 bp, synthetic construct
  misc_feature 1..22: note = chemically synthesized
  source 1..22: mol_type = other DNA
ctgagctcaggaatctgctctc

SEQ ID NO: 9209 - DNA, 22 bp, synthetic construct
  misc_feature 1..22: note = chemically synthesized
  source 1..22: mol_type = other DNA
agctcaggaatctgctctcctt

SEQ ID NO: 9210 - DNA, 22 bp, synthetic construct
  misc_feature 1..22: note = chemically synthesized
  source 1..22: mol_type = other DNA
aggaatctgctctccttggcct

SEQ ID NO: 9211 - DNA, 22 bp, synthetic construct
  misc_feature 1..22: note = chemically synthesized
  source 1..22: mol_type = other DNA
ctctccttggcctcctccttgg

SEQ ID NO: 9212 - DNA, 22 bp, synthetic construct
  misc_feature 1..22: note = chemically synthesized
  source 1..22: mol_type = other DNA
tccttggcctcctccttggcat

SEQ ID NO: 9213 - DNA, 22 bp, synthetic construct
  misc_feature 1..22: note = chemically synthesized
  source 1..22: mol_type = other DNA
cttggcctcctccttggcatga

SEQ ID NO: 9214 - DNA, 22 bp, synthetic construct
  misc_feature 1..22: note = chemically synthesized
  source 1..22: mol_type = other DNA
ggcctcctccttggcatgagct

SEQ ID NO: 9215 - DNA, 22 bp, synthetic construct
  misc_feature 1..22: note = chemically synthesized
  source 1..22: mol_type = other DNA
gcctcctccttggcatgagcta

SEQ ID NO: 9216 - DNA, 22 bp, synthetic construct
  misc_feature 1..22: note = chemically synthesized
  source 1..22: mol_type = other DNA
ctccttggcatgagctactaca

SEQ ID NO: 9217 - DNA, 22 bp, synthetic construct
  misc_feature 1..22: note = chemically synthesized
  source 1..22: mol_type = other DNA
cttggcatgagctactacaccc

SEQ ID NO: 9218 - DNA, 22 bp, synthetic construct
  misc_feature 1..22: note = chemically synthesized
  source 1..22: mol_type = other DNA
ggcatgagctactacacccagc

SEQ ID NO: 9219 - DNA, 22 bp, synthetic construct
  misc_feature 1..22: note = chemically synthesized
  source 1..22: mol_type = other DNA
gcatgagctactacacccagcc

SEQ ID NO: 9220 - DNA, 22 bp, synthetic construct
  misc_feature 1..22: note = chemically synthesized
  source 1..22: mol_type = other DNA
ctacacccagccaattcttctc

SEQ ID NO: 9221 - DNA, 22 bp, synthetic construct
  misc_feature 1..22: note = chemically synthesized
  source 1..22: mol_type = other DNA
cacccagccaattcttctcttt

SEQ ID NO: 9222 - DNA, 22 bp, synthetic construct
  misc_feature 1..22: note = chemically synthesized
  source 1..22: mol_type = other DNA
ttctctttctctcacacaacat

SEQ ID NO: 9223 - DNA, 22 bp, synthetic construct
  misc_feature 1..22: note = chemically synthesized
  source 1..22: mol_type = other DNA
ctctttctctcacacaacatag

SEQ ID NO: 9224 - DNA, 22 bp, synthetic construct
  misc_feature 1..22: note = chemically synthesized
  source 1..22: mol_type = other DNA
tctttctctcacacaacataga

SEQ ID NO: 9225 - DNA, 22 bp, synthetic construct
  misc_feature 1..22: note = chemically synthesized
  source 1..22: mol_type = other DNA
tttctctcacacaacatagaat

SEQ ID NO: 9226 - DNA, 22 bp, synthetic construct
  misc_feature 1..22: note = chemically synthesized
  source 1..22: mol_type = other DNA
tctctcacacaacatagaatcc

SEQ ID NO: 9227 - DNA, 22 bp, synthetic construct
  misc_feature 1..22: note = chemically synthesized
  source 1..22: mol_type = other DNA
ctctcacacaacatagaatcct

SEQ ID NO: 9228 - DNA, 22 bp, synthetic construct
  misc_feature 1..22: note = chemically synthesized
  source 1..22: mol_type = other DNA
tctcacacaacatagaatcctt

SEQ ID NO: 9229 - DNA, 22 bp, synthetic construct
  misc_feature 1..22: note = chemically synthesized
  source 1..22: mol_type = other DNA
tcacacaacatagaatccttca

SEQ ID NO: 9230 - DNA, 22 bp, synthetic construct
  misc_feature 1..22: note = chemically synthesized
  source 1..22: mol_type = other DNA
acacaacatagaatccttcagc

SEQ ID NO: 9231 - DNA, 22 bp, synthetic construct
  misc_feature 1..22: note = chemically synthesized
  source 1..22: mol_type = other DNA
cagcaacttccttcagaatata

SEQ ID NO: 9232 - DNA, 22 bp, synthetic construct
  misc_feature 1..22: note = chemically synthesized
  source 1..22: mol_type = other DNA
agcaacttccttcagaatatat

SEQ ID NO: 9233 - DNA, 22 bp, synthetic construct
  misc_feature 1..22: note = chemically synthesized
  source 1..22: mol_type = other DNA
ccttcagaatatattcaggaga

SEQ ID NO: 9234 - DNA, 22 bp, synthetic construct
  misc_feature 1..22: note = chemically synthesized
  source 1..22: mol_type = other DNA
cttcagaatatattcaggagac

SEQ ID NO: 9235 - DNA, 22 bp, synthetic construct
  misc_feature 1..22: note = chemically synthesized
  source 1..22: mol_type = other DNA
cagaatatattcaggagacaat

SEQ ID NO: 9236 - DNA, 22 bp, synthetic construct
  misc_feature 1..22: note = chemically synthesized
  source 1..22: mol_type = other DNA
agaatatattcaggagacaatg

SEQ ID NO: 9237 - DNA, 22 bp, synthetic construct
  misc_feature 1..22: note = chemically synthesized
  source 1..22: mol_type = other DNA
aggagacaatggtttgtcactc

SEQ ID NO: 9238 - DNA, 22 bp, synthetic construct
  misc_feature 1..22: note = chemically synthesized
  source 1..22: mol_type = other DNA
gtcactcccttttctgttccca

SEQ ID NO: 9239 - DNA, 22 bp, synthetic construct
  misc_feature 1..22: note = chemically synthesized
  source 1..22: mol_type = other DNA
tcactcccttttctgttcccac

SEQ ID NO: 9240 - DNA, 22 bp, synthetic construct
  misc_feature 1..22: note = chemically synthesized
  source 1..22: mol_type = other DNA
ccttttctgttcccacccagcc

SEQ ID NO: 9241 - DNA, 22 bp, synthetic construct
  misc_feature 1..22: note = chemically synthesized
  source 1..22: mol_type = other DNA
ttctgttcccacccagcccact

SEQ ID NO: 9242 - DNA, 22 bp, synthetic construct
  misc_feature 1..22: note = chemically synthesized
  source 1..22: mol_type = other DNA
tctgttcccacccagcccactc

SEQ ID NO: 9243 - DNA, 22 bp, synthetic construct
  misc_feature 1..22: note = chemically synthesized
  source 1..22: mol_type = other DNA
ctgttcccacccagcccactcc

SEQ ID NO: 9244 - DNA, 22 bp, synthetic construct
  misc_feature 1..22: note = chemically synthesized
  source 1..22: mol_type = other DNA
tgttcccacccagcccactcca

SEQ ID NO: 9245 - DNA, 22 bp, synthetic construct
  misc_feature 1..22: note = chemically synthesized
  source 1..22: mol_type = other DNA
ttcccacccagcccactccact

SEQ ID NO: 9246 - DNA, 22 bp, synthetic construct
  misc_feature 1..22: note = chemically synthesized
  source 1..22: mol_type = other DNA
ccacccagcccactccactacc

SEQ ID NO: 9247 - DNA, 22 bp, synthetic construct
  misc_feature 1..22: note = chemically synthesized
  source 1..22: mol_type = other DNA
cactacctcttgcctggactgt

SEQ ID NO: 9248 - DNA, 22 bp, synthetic construct
  misc_feature 1..22: note = chemically synthesized
  source 1..22: mol_type = other DNA
cctcttgcctggactgtgtaac

SEQ ID NO: 9249 - DNA, 22 bp, synthetic construct
  misc_feature 1..22: note = chemically synthesized
  source 1..22: mol_type = other DNA
ttgcctggactgtgtaacagct

SEQ ID NO: 9250 - DNA, 22 bp, synthetic construct
  misc_feature 1..22: note = chemically synthesized
  source 1..22: mol_type = other DNA
gcctggactgtgtaacagcttc

SEQ ID NO: 9251 - DNA, 22 bp, synthetic construct
  misc_feature 1..22: note = chemically synthesized
  source 1..22: mol_type = other DNA
cctggactgtgtaacagcttcc

SEQ ID NO: 9252 - DNA, 22 bp, synthetic construct
  misc_feature 1..22: note = chemically synthesized
  source 1..22: mol_type = other DNA
gactgtgtaacagcttcctggc

SEQ ID NO: 9253 - DNA, 22 bp, synthetic construct
  misc_feature 1..22: note = chemically synthesized
  source 1..22: mol_type = other DNA
tgtaacagcttcctggctgggc

SEQ ID NO: 9254 - DNA, 22 bp, synthetic construct
  misc_feature 1..22: note = chemically synthesized
  source 1..22: mol_type = other DNA
cctggctgggctccctgctttt

SEQ ID NO: 9255 - DNA, 22 bp, synthetic construct
  misc_feature 1..22: note = chemically synthesized
  source 1..22: mol_type = other DNA
ctggctgggctccctgctttta

SEQ ID NO: 9256 - DNA, 22 bp, synthetic construct
  misc_feature 1..22: note = chemically synthesized
  source 1..22: mol_type = other DNA
gctgggctccctgcttttactg

SEQ ID NO: 9257 - DNA, 22 bp, synthetic construct
  misc_feature 1..22: note = chemically synthesized
  source 1..22: mol_type = other DNA
ggctccctgcttttactgttgc

SEQ ID NO: 9258 - DNA, 22 bp, synthetic construct
  misc_feature 1..22: note = chemically synthesized
  source 1..22: mol_type = other DNA
cctgcttttactgttgctccct

SEQ ID NO: 9259 - DNA, 22 bp, synthetic construct
  misc_feature 1..22: note = chemically synthesized
  source 1..22: mol_type = other DNA
cttttactgttgctcccttcat

SEQ ID NO: 9260 - DNA, 22 bp, synthetic construct
  misc_feature 1..22: note = chemically synthesized
  source 1..22: mol_type = other DNA
ttactgttgctcccttcattct

SEQ ID NO: 9261 - DNA, 22 bp, synthetic construct
  misc_feature 1..22: note = chemically synthesized
  source 1..22: mol_type = other DNA
tactgttgctcccttcattctg

SEQ ID NO: 9262 - DNA, 22 bp, synthetic construct
  misc_feature 1..22: note = chemically synthesized
  source 1..22: mol_type = other DNA
actgttgctcccttcattctgc

SEQ ID NO: 9263 - DNA, 22 bp, synthetic construct
  misc_feature 1..22: note = chemically synthesized
  source 1..22: mol_type = other DNA
ctgttgctcccttcattctgct

SEQ ID NO: 9264 - DNA, 22 bp, synthetic construct
  misc_feature 1..22: note = chemically synthesized
  source 1..22: mol_type = other DNA
ttgctcccttcattctgctttc

SEQ ID NO: 9265 - DNA, 22 bp, synthetic construct
  misc_feature 1..22: note = chemically synthesized
  source 1..22: mol_type = other DNA
ctcccttcattctgctttccac

SEQ ID NO: 9266 - DNA, 22 bp, synthetic construct
  misc_feature 1..22: note = chemically synthesized
  source 1..22: mol_type = other DNA
ccttcattctgctttccacata

SEQ ID NO: 9267 - DNA, 22 bp, synthetic construct
  misc_feature 1..22: note = chemically synthesized
  source 1..22: mol_type = other DNA
cattctgctttccacatagcag

SEQ ID NO: 9268 - DNA, 22 bp, synthetic construct
  misc_feature 1..22: note = chemically synthesized
  source 1..22: mol_type = other DNA
attctgctttccacatagcagc

SEQ ID NO: 9269 - DNA, 22 bp, synthetic construct
  misc_feature 1..22: note = chemically synthesized
  source 1..22: mol_type = other DNA
tgctttccacatagcagccaga

SEQ ID NO: 9270 - DNA, 22 bp, synthetic construct
  misc_feature 1..22: note = chemically synthesized
  source 1..22: mol_type = other DNA
ctttccacatagcagccagagc

SEQ ID NO: 9271 - DNA, 22 bp, synthetic construct
  misc_feature 1..22: note = chemically synthesized
  source 1..22: mol_type = other DNA
tccacatagcagccagagcaat

SEQ ID NO: 9272 - DNA, 22 bp, synthetic construct
  misc_feature 1..22: note = chemically synthesized
  source 1..22: mol_type = other DNA
ccacatagcagccagagcaatc

SEQ ID NO: 9273 - DNA, 22 bp, synthetic construct
  misc_feature 1..22: note = chemically synthesized
  source 1..22: mol_type = other DNA
cacatagcagccagagcaatct

SEQ ID NO: 9274 - DNA, 22 bp, synthetic construct
  misc_feature 1..22: note = chemically synthesized
  source 1..22: mol_type = other DNA
ttaaaagcctgtgacagatcac

SEQ ID NO: 9275 - DNA, 22 bp, synthetic construct
  misc_feature 1..22: note = chemically synthesized
  source 1..22: mol_type = other DNA
taaaagcctgtgacagatcact

SEQ ID NO: 9276 - DNA, 22 bp, synthetic construct
  misc_feature 1..22: note = chemically synthesized
  source 1..22: mol_type = other DNA
aaaagcctgtgacagatcactg

SEQ ID NO: 9277 - DNA, 22 bp, synthetic construct
  misc_feature 1..22: note = chemically synthesized
  source 1..22: mol_type = other DNA
aaagcctgtgacagatcactgt

SEQ ID NO: 9278 - DNA, 22 bp, synthetic construct
  misc_feature 1..22: note = chemically synthesized
  source 1..22: mol_type = other DNA
tgacagatcactgttactcctt

SEQ ID NO: 9279 - DNA, 22 bp, synthetic construct
  misc_feature 1..22: note = chemically synthesized
  source 1..22: mol_type = other DNA
ttactccttggctagaattcac

SEQ ID NO: 9280 - DNA, 22 bp, synthetic construct
  misc_feature 1..22: note = chemically synthesized
  source 1..22: mol_type = other DNA
ctccttggctagaattcacacc

SEQ ID NO: 9281 - DNA, 22 bp, synthetic construct
  misc_feature 1..22: note = chemically synthesized
  source 1..22: mol_type = other DNA
cttggctagaattcacaccaca

SEQ ID NO: 9282 - DNA, 22 bp, synthetic construct
  misc_feature 1..22: note = chemically synthesized
  source 1..22: mol_type = other DNA
ggctagaattcacaccacagcc

SEQ ID NO: 9283 - DNA, 22 bp, synthetic construct
  misc_feature 1..22: note = chemically synthesized
  source 1..22: mol_type = other DNA
gctagaattcacaccacagcct

SEQ ID NO: 9284 - DNA, 22 bp, synthetic construct
  misc_feature 1..22: note = chemically synthesized
  source 1..22: mol_type = other DNA
gaattcacaccacagcctacag

SEQ ID NO: 9285 - DNA, 22 bp, synthetic construct
  misc_feature 1..22: note = chemically synthesized
  source 1..22: mol_type = other DNA
acaccacagcctacaggcgcct

SEQ ID NO: 9286 - DNA, 22 bp, synthetic construct
  misc_feature 1..22: note = chemically synthesized
  source 1..22: mol_type = other DNA
caggcgcctgcacaaccttgtt

SEQ ID NO: 9287 - DNA, 22 bp, synthetic construct
  misc_feature 1..22: note = chemically synthesized
  source 1..22: mol_type = other DNA
cacaaccttgtttgtggctcct

SEQ ID NO: 9288 - DNA, 22 bp, synthetic construct
  misc_feature 1..22: note = chemically synthesized
  source 1..22: mol_type = other DNA
gtttgtggctcctcttctgagc

SEQ ID NO: 9289 - DNA, 22 bp, synthetic construct
  misc_feature 1..22: note = chemically synthesized
  source 1..22: mol_type = other DNA
tttgtggctcctcttctgagcc

SEQ ID NO: 9290 - DNA, 22 bp, synthetic construct
  misc_feature 1..22: note = chemically synthesized
  source 1..22: mol_type = other DNA
gtggctcctcttctgagcccat

SEQ ID NO: 9291 - DNA, 22 bp, synthetic construct
  misc_feature 1..22: note = chemically synthesized
  source 1..22: mol_type = other DNA
tggctcctcttctgagcccatt

SEQ ID NO: 9292 - DNA, 22 bp, synthetic construct
  misc_feature 1..22: note = chemically synthesized
  source 1..22: mol_type = other DNA
ctcttctgagcccattacctac

SEQ ID NO: 9293 - DNA, 22 bp, synthetic construct
  misc_feature 1..22: note = chemically synthesized
  source 1..22: mol_type = other DNA
ttctgagcccattacctacttc

SEQ ID NO: 9294 - DNA, 22 bp, synthetic construct
  misc_feature 1..22: note = chemically synthesized
  source 1..22: mol_type = other DNA
ctgagcccattacctacttctt

SEQ ID NO: 9295 - DNA, 22 bp, synthetic construct
  misc_feature 1..22: note = chemically synthesized
  source 1..22: mol_type = other DNA
tgagcccattacctacttcttg

SEQ ID NO: 9296 - DNA, 22 bp, synthetic construct
  misc_feature 1..22: note = chemically synthesized
  source 1..22: mol_type = other DNA
agcccattacctacttcttggc

SEQ ID NO: 9297 - DNA, 22 bp, synthetic construct
  misc_feature 1..22: note = chemically synthesized
  source 1..22: mol_type = other DNA
cctacttcttggcctctactcc

SEQ ID NO: 9298 - DNA, 22 bp, synthetic construct
  misc_feature 1..22: note = chemically synthesized
  source 1..22: mol_type = other DNA
cttcttggcctctactccccag

SEQ ID NO: 9299 - DNA, 22 bp, synthetic construct
  misc_feature 1..22: note = chemically synthesized
  source 1..22: mol_type = other DNA
cttggcctctactccccagcac

SEQ ID NO: 9300 - DNA, 22 bp, synthetic construct
  misc_feature 1..22: note = chemically synthesized
  source 1..22: mol_type = other DNA
ttggcctctactccccagcact

SEQ ID NO: 9301 - DNA, 22 bp, synthetic construct
  misc_feature 1..22: note = chemically synthesized
  source 1..22: mol_type = other DNA
ggcctctactccccagcactac

SEQ ID NO: 9302 - DNA, 22 bp, synthetic construct
  misc_feature 1..22: note = chemically synthesized
  source 1..22: mol_type = other DNA
gcctctactccccagcactact

SEQ ID NO: 9303 - DNA, 22 bp, synthetic construct
  misc_feature 1..22: note = chemically synthesized
  source 1..22: mol_type = other DNA
tactccccagcactacttgttt

SEQ ID NO: 9304 - DNA, 22 bp, synthetic construct
  misc_feature 1..22: note = chemically synthesized
  source 1..22: mol_type = other DNA
ctccccagcactacttgtttat

SEQ ID NO: 9305 - DNA, 22 bp, synthetic construct
  misc_feature 1..22: note = chemically synthesized
  source 1..22: mol_type = other DNA
cccagcactacttgtttatttt

SEQ ID NO: 9306 - DNA, 22 bp, synthetic construct
  misc_feature 1..22: note = chemically synthesized
  source 1..22: mol_type = other DNA
cttgtttatttttttcaacccg

SEQ ID NO: 9307 - DNA, 22 bp, synthetic construct
  misc_feature 1..22: note = chemically synthesized
  source 1..22: mol_type = other DNA
gtttatttttttcaacccgagc

SEQ ID NO: 9308 - DNA, 22 bp, synthetic construct
  misc_feature 1..22: note = chemically synthesized
  source 1..22: mol_type = other DNA
tttatttttttcaacccgagct

SEQ ID NO: 9309 - DNA, 22 bp, synthetic construct
  misc_feature 1..22: note = chemically synthesized
  source 1..22: mol_type = other DNA
atttttttcaacccgagcttct

SEQ ID NO: 9310 - DNA, 22 bp, synthetic construct
  misc_feature 1..22: note = chemically synthesized
  source 1..22: mol_type = other DNA
tttttttcaacccgagcttctt

SEQ ID NO: 9311 - DNA, 22 bp, synthetic construct
  misc_feature 1..22: note = chemically synthesized
  source 1..22: mol_type = other DNA
ttttcaacccgagcttcttaac

SEQ ID NO: 9312 - DNA, 22 bp, synthetic construct
  misc_feature 1..22: note = chemically synthesized
  source 1..22: mol_type = other DNA
tttcaacccgagcttcttaacc

SEQ ID NO: 9313 - DNA, 22 bp, synthetic construct
  misc_feature 1..22: note = chemically synthesized
  source 1..22: mol_type = other DNA
ttcaacccgagcttcttaacca

SEQ ID NO: 9314 - DNA, 22 bp, synthetic construct
  misc_feature 1..22: note = chemically synthesized
  source 1..22: mol_type = other DNA
tcaacccgagcttcttaaccag

SEQ ID NO: 9315 - DNA, 22 bp, synthetic construct
  misc_feature 1..22: note = chemically synthesized
  source 1..22: mol_type = other DNA
caacccgagcttcttaaccagg

SEQ ID NO: 9316 - DNA, 22 bp, synthetic construct
  misc_feature 1..22: note = chemically synthesized
  source 1..22: mol_type = other DNA
aacccgagcttcttaaccagga

SEQ ID NO: 9317 - DNA, 22 bp, synthetic construct
  misc_feature 1..22: note = chemically synthesized
  source 1..22: mol_type = other DNA
cttaaccaggagtttgtctact

SEQ ID NO: 9318 - DNA, 22 bp, synthetic construct
  misc_feature 1..22: note = chemically synthesized
  source 1..22: mol_type = other DNA
ttaaccaggagtttgtctacta

SEQ ID NO: 9319 - DNA, 22 bp, synthetic construct
  misc_feature 1..22: note = chemically synthesized
  source 1..22: mol_type = other DNA
aaccaggagtttgtctactagg

SEQ ID NO: 9320 - DNA, 22 bp, synthetic construct
  misc_feature 1..22: note = chemically synthesized
  source 1..22: mol_type = other DNA
accaggagtttgtctactaggt

SEQ ID NO: 9321 - DNA, 22 bp, synthetic construct
  misc_feature 1..22: note = chemically synthesized
  source 1..22: mol_type = other DNA
gtctactaggtgacatgtggca

SEQ ID NO: 9322 - DNA, 22 bp, synthetic construct
  misc_feature 1..22: note = chemically synthesized
  source 1..22: mol_type = other DNA
tctactaggtgacatgtggcaa

SEQ ID NO: 9323 - DNA, 22 bp, synthetic construct
  misc_feature 1..22: note = chemically synthesized
  source 1..22: mol_type = other DNA
ctaggtgacatgtggcaaagtt

SEQ ID NO: 9324 - DNA, 22 bp, synthetic construct
  misc_feature 1..22: note = chemically synthesized
  source 1..22: mol_type = other DNA
ggtgacatgtggcaaagtttag

SEQ ID NO: 9325 - DNA, 22 bp, synthetic construct
  misc_feature 1..22: note = chemically synthesized
  source 1..22: mol_type = other DNA
agagacatttttggttgtcaag

SEQ ID NO: 9326 - DNA, 22 bp, synthetic construct
  misc_feature 1..22: note = chemically synthesized
  source 1..22: mol_type = other DNA
gagacatttttggttgtcaaga

SEQ ID NO: 9327 - DNA, 22 bp, synthetic construct
  misc_feature 1..22: note = chemically synthesized
  source 1..22: mol_type = other DNA
ttggttgtcaagactgggggag

SEQ ID NO: 9328 - DNA, 22 bp, synthetic construct
  misc_feature 1..22: note = chemically synthesized
  source 1..22: mol_type = other DNA
tggttgtcaagactgggggagt

SEQ ID NO: 9329 - DNA, 22 bp, synthetic construct
  misc_feature 1..22: note = chemically synthesized
  source 1..22: mol_type = other DNA
ggttgtcaagactgggggagtg

SEQ ID NO: 9330 - DNA, 22 bp, synthetic construct
  misc_feature 1..22: note = chemically synthesized
  source 1..22: mol_type = other DNA
gttgtcaagactgggggagtgc

SEQ ID NO: 9331 - DNA, 22 bp, synthetic construct
  misc_feature 1..22: note = chemically synthesized
  source 1..22: mol_type = other DNA
tcaagactgggggagtgctcct

SEQ ID NO: 9332 - DNA, 22 bp, synthetic construct
  misc_feature 1..22: note = chemically synthesized
  source 1..22: mol_type = other DNA
ggggagtgctcctagcacctag

SEQ ID NO: 9333 - DNA, 22 bp, synthetic construct
  misc_feature 1..22: note = chemically synthesized
  source 1..22: mol_type = other DNA
ctagcacctagtgagtagggag

SEQ ID NO: 9334 - DNA, 22 bp, synthetic construct
  misc_feature 1..22: note = chemically synthesized
  source 1..22: mol_type = other DNA
gcacctagtgagtagggaggac

SEQ ID NO: 9335 - DNA, 22 bp, synthetic construct
  misc_feature 1..22: note = chemically synthesized
  source 1..22: mol_type = other DNA
gtgagtagggaggacaggatac

SEQ ID NO: 9336 - DNA, 22 bp, synthetic construct
  misc_feature 1..22: note = chemically synthesized
  source 1..22: mol_type = other DNA
ctagacatcctacatgcagatg

SEQ ID NO: 9337 - DNA, 22 bp, synthetic construct
  misc_feature 1..22: note = chemically synthesized
  source 1..22: mol_type = other DNA
gacatcctacatgcagatggta

SEQ ID NO: 9338 - DNA, 22 bp, synthetic construct
  misc_feature 1..22: note = chemically synthesized
  source 1..22: mol_type = other DNA
catgcagatggtagtccccctt

SEQ ID NO: 9339 - DNA, 22 bp, synthetic construct
  misc_feature 1..22: note = chemically synthesized
  source 1..22: mol_type = other DNA
cccacccccacgccgccccccc

SEQ ID NO: 9340 - DNA, 22 bp, synthetic construct
  misc_feature 1..22: note = chemically synthesized
  source 1..22: mol_type = other DNA
ccacccccacgccgcccccccc

SEQ ID NO: 9341 - DNA, 22 bp, synthetic construct
  misc_feature 1..22: note = chemically synthesized
  source 1..22: mol_type = other DNA
agaaaacccgctttttaatcca

SEQ ID NO: 9342 - DNA, 22 bp, synthetic construct
  misc_feature 1..22: note = chemically synthesized
  source 1..22: mol_type = other DNA
tttaatccaacttgccaggccc

SEQ ID NO: 9343 - DNA, 22 bp, synthetic construct
  misc_feature 1..22: note = chemically synthesized
  source 1..22: mol_type = other DNA
ttaatccaacttgccaggccca

SEQ ID NO: 9344 - DNA, 22 bp, synthetic construct
  misc_feature 1..22: note = chemically synthesized
  source 1..22: mol_type = other DNA
taatccaacttgccaggcccac

SEQ ID NO: 9345 - DNA, 22 bp, synthetic construct
  misc_feature 1..22: note = chemically synthesized
  source 1..22: mol_type = other DNA
aatccaacttgccaggcccact

SEQ ID NO: 9346 - DNA, 22 bp, synthetic construct
  misc_feature 1..22: note = chemically synthesized
  source 1..22: mol_type = other DNA
atccaacttgccaggcccactc

SEQ ID NO: 9347 - DNA, 22 bp, synthetic construct
  misc_feature 1..22: note = chemically synthesized
  source 1..22: mol_type = other DNA
gccaggcccactcagtttgcct

SEQ ID NO: 9348 - DNA, 22 bp, synthetic construct
  misc_feature 1..22: note = chemically synthesized
  source 1..22: mol_type = other DNA
ccaggcccactcagtttgcctg

SEQ ID NO: 9349 - DNA, 22 bp, synthetic construct
  misc_feature 1..22: note = chemically synthesized
  source 1..22: mol_type = other DNA
agtttgcctgggaaatactgct

SEQ ID NO: 9350 - DNA, 22 bp, synthetic construct
  misc_feature 1..22: note = chemically synthesized
  source 1..22: mol_type = other DNA
gcctgggaaatactgctcccag

SEQ ID NO: 9351 - DNA, 22 bp, synthetic construct
  misc_feature 1..22: note = chemically synthesized
  source 1..22: mol_type = other DNA
cctgggaaatactgctcccagt

SEQ ID NO: 9352 - DNA, 22 bp, synthetic construct
  misc_feature 1..22: note = chemically synthesized
  source 1..22: mol_type = other DNA
ggaaatactgctcccagtcaat

SEQ ID NO: 9353 - DNA, 22 bp, synthetic construct
  misc_feature 1..22: note = chemically synthesized
  source 1..22: mol_type = other DNA
ctcccagtcaatatcattctta

SEQ ID NO: 9354 - DNA, 22 bp, synthetic construct
  misc_feature 1..22: note = chemically synthesized
  source 1..22: mol_type = other DNA
ccagtcaatatcattcttattt

SEQ ID NO: 9355 - DNA, 22 bp, synthetic construct
  misc_feature 1..22: note = chemically synthesized
  source 1..22: mol_type = other DNA
ttatttccttcatgtctctgct

SEQ ID NO: 9356 - DNA, 22 bp, synthetic construct
  misc_feature 1..22: note = chemically synthesized
  source 1..22: mol_type = other DNA
atttccttcatgtctctgctca

SEQ ID NO: 9357 - DNA, 22 bp, synthetic construct
  misc_feature 1..22: note = chemically synthesized
  source 1..22: mol_type = other DNA
tttccttcatgtctctgctcaa

SEQ ID NO: 9358 - DNA, 22 bp, synthetic construct
  misc_feature 1..22: note = chemically synthesized
  source 1..22: mol_type = other DNA
ccttcatgtctctgctcaagtg

SEQ ID NO: 9359 - DNA, 22 bp, synthetic construct
  misc_feature 1..22: note = chemically synthesized
  source 1..22: mol_type = other DNA
cttcatgtctctgctcaagtgt

SEQ ID NO: 9360 - DNA, 22 bp, synthetic construct
  misc_feature 1..22: note = chemically synthesized
  source 1..22: mol_type = other DNA
catgtctctgctcaagtgtcag

SEQ ID NO: 9361 - DNA, 22 bp, synthetic construct
  misc_feature 1..22: note = chemically synthesized
  source 1..22: mol_type = other DNA
atgtctctgctcaagtgtcagc

SEQ ID NO: 9362 - DNA, 22 bp, synthetic construct
  misc_feature 1..22: note = chemically synthesized
  source 1..22: mol_type = other DNA
tgctcaagtgtcagccccagag

SEQ ID NO: 9363 - DNA, 22 bp, synthetic construct
  misc_feature 1..22: note = chemically synthesized
  source 1..22: mol_type = other DNA
ctcaagtgtcagccccagagtg

SEQ ID NO: 9364 - DNA, 22 bp, synthetic construct
  misc_feature 1..22: note = chemically synthesized
  source 1..22: mol_type = other DNA
aagtgtcagccccagagtgact

SEQ ID NO: 9365 - DNA, 22 bp, synthetic construct
  misc_feature 1..22: note = chemically synthesized
  source 1..22: mol_type = other DNA
gccctgacttctctgcttctca

SEQ ID NO: 9366 - DNA, 22 bp, synthetic construct
  misc_feature 1..22: note = chemically synthesized
  source 1..22: mol_type = other DNA
ccctgacttctctgcttctcac

SEQ ID NO: 9367 - DNA, 22 bp, synthetic construct
  misc_feature 1..22: note = chemically synthesized
  source 1..22: mol_type = other DNA
acttctctgcttctcacaacac

SEQ ID NO: 9368 - DNA, 22 bp, synthetic construct
  misc_feature 1..22: note = chemically synthesized
  source 1..22: mol_type = other DNA
ctctgcttctcacaacacccat

SEQ ID NO: 9369 - DNA, 22 bp, synthetic construct
  misc_feature 1..22: note = chemically synthesized
  source 1..22: mol_type = other DNA
tctgcttctcacaacacccatg

SEQ ID NO: 9370 - DNA, 22 bp, synthetic construct
  misc_feature 1..22: note = chemically synthesized
  source 1..22: mol_type = other DNA
tgcttctcacaacacccatgat

SEQ ID NO: 9371 - DNA, 22 bp, synthetic construct
  misc_feature 1..22: note = chemically synthesized
  source 1..22: mol_type = other DNA
cttctcacaacacccatgattt

SEQ ID NO: 9372 - DNA, 22 bp, synthetic construct
  misc_feature 1..22: note = chemically synthesized
  source 1..22: mol_type = other DNA
ctcacaacacccatgatttcct

SEQ ID NO: 9373 - DNA, 22 bp, synthetic construct
  misc_feature 1..22: note = chemically synthesized
  source 1..22: mol_type = other DNA
tcacaacacccatgatttcctg

SEQ ID NO: 9374 - DNA, 22 bp, synthetic construct
  misc_feature 1..22: note = chemically synthesized
  source 1..22: mol_type = other DNA
acaacacccatgatttcctgat

SEQ ID NO: 9375 - DNA, 22 bp, synthetic construct
  misc_feature 1..22: note = chemically synthesized
  source 1..22: mol_type = other DNA
cctgatgttgtatatctttctg

SEQ ID NO: 9376 - DNA, 22 bp, synthetic construct
  misc_feature 1..22: note = chemically synthesized
  source 1..22: mol_type = other DNA
ctgatgttgtatatctttctgc

SEQ ID NO: 9377 - DNA, 22 bp, synthetic construct
  misc_feature 1..22: note = chemically synthesized
  source 1..22: mol_type = other DNA
atgttgtatatctttctgctca

SEQ ID NO: 9378 - DNA, 22 bp, synthetic construct
  misc_feature 1..22: note = chemically synthesized
  source 1..22: mol_type = other DNA
tatatctttctgctcatttgct

SEQ ID NO: 9379 - DNA, 22 bp, synthetic construct
  misc_feature 1..22: note = chemically synthesized
  source 1..22: mol_type = other DNA
tctgctcatttgcttattgtca

SEQ ID NO: 9380 - DNA, 22 bp, synthetic construct
  misc_feature 1..22: note = chemically synthesized
  source 1..22: mol_type = other DNA
ctgctcatttgcttattgtcat

SEQ ID NO: 9381 - DNA, 22 bp, synthetic construct
  misc_feature 1..22: note = chemically synthesized
  source 1..22: mol_type = other DNA
tgctcatttgcttattgtcatc

SEQ ID NO: 9382 - DNA, 22 bp, synthetic construct
  misc_feature 1..22: note = chemically synthesized
  source 1..22: mol_type = other DNA
ctcatttgcttattgtcatctc

SEQ ID NO: 9383 - DNA, 22 bp, synthetic construct
  misc_feature 1..22: note = chemically synthesized
  source 1..22: mol_type = other DNA
atttgcttattgtcatctctcc

SEQ ID NO: 9384 - DNA, 22 bp, synthetic construct
  misc_feature 1..22: note = chemically synthesized
  source 1..22: mol_type = other DNA
gcttattgtcatctctcccact

SEQ ID NO: 9385 - DNA, 22 bp, synthetic construct
  misc_feature 1..22: note = chemically synthesized
  source 1..22: mol_type = other DNA
cttattgtcatctctcccacta

SEQ ID NO: 9386 - DNA, 22 bp, synthetic construct
  misc_feature 1..22: note = chemically synthesized
  source 1..22: mol_type = other DNA
attgtcatctctcccactagaa

SEQ ID NO: 9387 - DNA, 22 bp, synthetic construct
  misc_feature 1..22: note = chemically synthesized
  source 1..22: mol_type = other DNA
ttgtcatctctcccactagaat

SEQ ID NO: 9388 - DNA, 22 bp, synthetic construct
  misc_feature 1..22: note = chemically synthesized
  source 1..22: mol_type = other DNA
tcatctctcccactagaatgca

SEQ ID NO: 9389 - DNA, 22 bp, synthetic construct
  misc_feature 1..22: note = chemically synthesized
  source 1..22: mol_type = other DNA
tcccactagaatgcaaaatatc

SEQ ID NO: 9390 - DNA, 22 bp, synthetic construct
  misc_feature 1..22: note = chemically synthesized
  source 1..22: mol_type = other DNA
ccactagaatgcaaaatatcaa

SEQ ID NO: 9391 - DNA, 22 bp, synthetic construct
  misc_feature 1..22: note = chemically synthesized
  source 1..22: mol_type = other DNA
gaatgcaaaatatcaaagggta

SEQ ID NO: 9392 - DNA, 22 bp, synthetic construct
  misc_feature 1..22: note = chemically synthesized
  source 1..22: mol_type = other DNA
gtttccctgctctctcccttgg

SEQ ID NO: 9393 - DNA, 22 bp, synthetic construct
  misc_feature 1..22: note = chemically synthesized
  source 1..22: mol_type = other DNA
tttccctgctctctcccttggg

SEQ ID NO: 9394 - DNA, 22 bp, synthetic construct
  misc_feature 1..22: note = chemically synthesized
  source 1..22: mol_type = other DNA
ccctgctctctcccttggggct

SEQ ID NO: 9395 - DNA, 22 bp, synthetic construct
  misc_feature 1..22: note = chemically synthesized
  source 1..22: mol_type = other DNA
cctgctctctcccttggggctt

SEQ ID NO: 9396 - DNA, 22 bp, synthetic construct
  misc_feature 1..22: note = chemically synthesized
  source 1..22: mol_type = other DNA
ctctctcccttggggcttgaac

SEQ ID NO: 9397 - DNA, 22 bp, synthetic construct
  misc_feature 1..22: note = chemically synthesized
  source 1..22: mol_type = other DNA
tctcccttggggcttgaacagt

SEQ ID NO: 9398 - DNA, 22 bp, synthetic construct
  misc_feature 1..22: note = chemically synthesized
  source 1..22: mol_type = other DNA
tcccttggggcttgaacagtgc

SEQ ID NO: 9399 - DNA, 22 bp, synthetic construct
  misc_feature 1..22: note = chemically synthesized
  source 1..22: mol_type = other DNA
ccttggggcttgaacagtgcaa

SEQ ID NO: 9400 - DNA, 22 bp, synthetic construct
  misc_feature 1..22: note = chemically synthesized
  source 1..22: mol_type = other DNA
ggggcttgaacagtgcaacaca

SEQ ID NO: 9401 - DNA, 22 bp, synthetic construct
  misc_feature 1..22: note = chemically synthesized
  source 1..22: mol_type = other DNA
gggcttgaacagtgcaacacat

SEQ ID NO: 9402 - DNA, 22 bp, synthetic construct
  misc_feature 1..22: note = chemically synthesized
  source 1..22: mol_type = other DNA
gaacagtgcaacacatggctgg

SEQ ID NO: 9403 - DNA, 22 bp, synthetic construct
  misc_feature 1..22: note = chemically synthesized
  source 1..22: mol_type = other DNA
aacagtgcaacacatggctggg

SEQ ID NO: 9404 - DNA, 22 bp, synthetic construct
  misc_feature 1..22: note = chemically synthesized
  source 1..22: mol_type = other DNA
ggactcatttacacttgtaaac

SEQ ID NO: 9405 - DNA, 22 bp, synthetic construct
  misc_feature 1..22: note = chemically synthesized
  source 1..22: mol_type = other DNA
atttacacttgtaaacaatgaa

SEQ ID NO: 9406 - DNA, 22 bp, synthetic construct
  misc_feature 1..22: note = chemically synthesized
  source 1..22: mol_type = other DNA
acacttgtaaacaatgaatatt

SEQ ID NO: 9407 - DNA, 22 bp, synthetic construct
  misc_feature 1..22: note = chemically synthesized
  source 1..22: mol_type = other DNA
cacttgtaaacaatgaatattt

SEQ ID NO: 9408 - DNA, 22 bp, synthetic construct
  misc_feature 1..22: note = chemically synthesized
  source 1..22: mol_type = other DNA
gtaaacaatgaatatttctgct

SEQ ID NO: 9409 - DNA, 22 bp, synthetic construct
  misc_feature 1..22: note = chemically synthesized
  source 1..22: mol_type = other DNA
taaacaatgaatatttctgctc

SEQ ID NO: 9410 - DNA, 22 bp, synthetic construct
  misc_feature 1..22: note = chemically synthesized
  source 1..22: mol_type = other DNA
ctgctcaacatgaaattttatt

SEQ ID NO: 9411 - DNA, 22 bp, synthetic construct
  misc_feature 1..22: note = chemically synthesized
  source 1..22: mol_type = other DNA
tgctcaacatgaaattttatta

SEQ ID NO: 9412 - DNA, 22 bp, synthetic construct
  misc_feature 1..22: note = chemically synthesized
  source 1..22: mol_type = other DNA
ctcaacatgaaattttattatt

SEQ ID NO: 9413 - DNA, 22 bp, synthetic construct
  misc_feature 1..22: note = chemically synthesized
  source 1..22: mol_type = other DNA
aacatgaaattttattattcaa

SEQ ID NO: 9414 - DNA, 22 bp, synthetic construct
  misc_feature 1..22: note = chemically synthesized
  source 1..22: mol_type = other DNA
tattattcaacctctaatgcag

SEQ ID NO: 9415 - DNA, 22 bp, synthetic construct
  misc_feature 1..22: note = chemically synthesized
  source 1..22: mol_type = other DNA
attattcaacctctaatgcagt

SEQ ID NO: 9416 - DNA, 22 bp, synthetic construct
  misc_feature 1..22: note = chemically synthesized
  source 1..22: mol_type = other DNA
ttattcaacctctaatgcagtg

SEQ ID NO: 9417 - DNA, 22 bp, synthetic construct
  misc_feature 1..22: note = chemically synthesized
  source 1..22: mol_type = other DNA
ttcaacctctaatgcagtgtga

SEQ ID NO: 9418 - DNA, 22 bp, synthetic construct
  misc_feature 1..22: note = chemically synthesized
  source 1..22: mol_type = other DNA
aacctctaatgcagtgtgatgt

SEQ ID NO: 9419 - DNA, 22 bp, synthetic construct
  misc_feature 1..22: note = chemically synthesized
  source 1..22: mol_type = other DNA
taatgcagtgtgatgtttaaga

SEQ ID NO: 9420 - DNA, 22 bp, synthetic construct
  misc_feature 1..22: note = chemically synthesized
  source 1..22: mol_type = other DNA
atgcagtgtgatgtttaagaat

SEQ ID NO: 9421 - DNA, 22 bp, synthetic construct
  misc_feature 1..22: note = chemically synthesized
  source 1..22: mol_type = other DNA
aagaatcatagctatgaagtgg

SEQ ID NO: 9422 - DNA, 22 bp, synthetic construct
  misc_feature 1..22: note = chemically synthesized
  source 1..22: mol_type = other DNA
agaatcatagctatgaagtgga

SEQ ID NO: 9423 - DNA, 22 bp, synthetic construct
  misc_feature 1..22: note = chemically synthesized
  source 1..22: mol_type = other DNA
tgaagtggagacatgagctctg

SEQ ID NO: 9424 - DNA, 22 bp, synthetic construct
  misc_feature 1..22: note = chemically synthesized
  source 1..22: mol_type = other DNA
tgccaccaaagcccagtgtacc

SEQ ID NO: 9425 - DNA, 22 bp, synthetic construct
  misc_feature 1..22: note = chemically synthesized
  source 1..22: mol_type = other DNA
ccaccaaagcccagtgtaccat

SEQ ID NO: 9426 - DNA, 22 bp, synthetic construct
  misc_feature 1..22: note = chemically synthesized
  source 1..22: mol_type = other DNA
aataaatttgccaggaagcagg

SEQ ID NO: 9427 - DNA, 22 bp, synthetic construct
  misc_feature 1..22: note = chemically synthesized
  source 1..22: mol_type = other DNA
gccaggaagcaggccgtgccat

SEQ ID NO: 9428 - DNA, 22 bp, synthetic construct
  misc_feature 1..22: note = chemically synthesized
  source 1..22: mol_type = other DNA
ccaggaagcaggccgtgccatg

SEQ ID NO: 9429 - DNA, 22 bp, synthetic construct
  misc_feature 1..22: note = chemically synthesized
  source 1..22: mol_type = other DNA
attcttgtcatgtgtaaaatgt

SEQ ID NO: 9430 - DNA, 22 bp, synthetic construct
  misc_feature 1..22: note = chemically synthesized
  source 1..22: mol_type = other DNA
ttgtcatgtgtaaaatgtggat

SEQ ID NO: 9431 - DNA, 22 bp, synthetic construct
  misc_feature 1..22: note = chemically synthesized
  source 1..22: mol_type = other DNA
gtcatgtgtaaaatgtggatac

SEQ ID NO: 9432 - DNA, 22 bp, synthetic construct
  misc_feature 1..22: note = chemically synthesized
  source 1..22: mol_type = other DNA
tcatgtgtaaaatgtggataca

SEQ ID NO: 9433 - DNA, 22 bp, synthetic construct
  misc_feature 1..22: note = chemically synthesized
  source 1..22: mol_type = other DNA
aaagtgctgtgctgaggccggc

SEQ ID NO: 9434 - DNA, 22 bp, synthetic construct
  misc_feature 1..22: note = chemically synthesized
  source 1..22: mol_type = other DNA
tgctgaggccggcgtgtgaccc

SEQ ID NO: 9435 - DNA, 22 bp, synthetic construct
  misc_feature 1..22: note = chemically synthesized
  source 1..22: mol_type = other DNA
aggccggcgtgtgacccacaga

SEQ ID NO: 9436 - DNA, 22 bp, synthetic construct
  misc_feature 1..22: note = chemically synthesized
  source 1..22: mol_type = other DNA
tgctacactacagggcaaaatc

SEQ ID NO: 9437 - DNA, 22 bp, synthetic construct
  misc_feature 1..22: note = chemically synthesized
  source 1..22: mol_type = other DNA
cactacagggcaaaatcactgt

SEQ ID NO: 9438 - DNA, 22 bp, synthetic construct
  misc_feature 1..22: note = chemically synthesized
  source 1..22: mol_type = other DNA
cagggcaaaatcactgtcaact

SEQ ID NO: 9439 - DNA, 22 bp, synthetic construct
  misc_feature 1..22: note = chemically synthesized
  source 1..22: mol_type = other DNA
tcaactaagattagaagcagct

SEQ ID NO: 9440 - DNA, 22 bp, synthetic construct
  misc_feature 1..22: note = chemically synthesized
  source 1..22: mol_type = other DNA
agattagaagcagctgtagtac

SEQ ID NO: 9441 - DNA, 22 bp, synthetic construct
  misc_feature 1..22: note = chemically synthesized
  source 1..22: mol_type = other DNA
gaagcagctgtagtacttgaaa

SEQ ID NO: 9442 - DNA, 22 bp, synthetic construct
  misc_feature 1..22: note = chemically synthesized
  source 1..22: mol_type = other DNA
tagtacttgaaataacatcaga

SEQ ID NO: 9443 - DNA, 22 bp, synthetic construct
  misc_feature 1..22: note = chemically synthesized
  source 1..22: mol_type = other DNA
gaaataacatcagaaaaccaga

SEQ ID NO: 9444 - DNA, 22 bp, synthetic construct
  misc_feature 1..22: note = chemically synthesized
  source 1..22: mol_type = other DNA
aaataacatcagaaaaccagat

SEQ ID NO: 9445 - DNA, 22 bp, synthetic construct
  misc_feature 1..22: note = chemically synthesized
  source 1..22: mol_type = other DNA
tttatgttctttgtaacctgaa

SEQ ID NO: 9446 - DNA, 22 bp, synthetic construct
  misc_feature 1..22: note = chemically synthesized
  source 1..22: mol_type = other DNA
atgttctttgtaacctgaaaag

SEQ ID NO: 9447 - DNA, 22 bp, synthetic construct
  misc_feature 1..22: note = chemically synthesized
  source 1..22: mol_type = other DNA
tgttctttgtaacctgaaaaga

SEQ ID NO: 9448 - DNA, 22 bp, synthetic construct
  misc_feature 1..22: note = chemically synthesized
  source 1..22: mol_type = other DNA
tttgtaacctgaaaagagttat

SEQ ID NO: 9449 - DNA, 22 bp, synthetic construct
  misc_feature 1..22: note = chemically synthesized
  source 1..22: mol_type = other DNA
tgtaacctgaaaagagttatat

SEQ ID NO: 9450 - DNA, 22 bp, synthetic construct
  misc_feature 1..22: note = chemically synthesized
  source 1..22: mol_type = other DNA
gtaacctgaaaagagttatata

SEQ ID NO: 9451 - DNA, 22 bp, synthetic construct
  misc_feature 1..22: note = chemically synthesized
  source 1..22: mol_type = other DNA
taacctgaaaagagttatataa

SEQ ID NO: 9452 - DNA, 22 bp, synthetic construct
  misc_feature 1..22: note = chemically synthesized
  source 1..22: mol_type = other DNA
aaaagagttatataatctgaat

SEQ ID NO: 9453 - DNA, 22 bp, synthetic construct
  misc_feature 1..22: note = chemically synthesized
  source 1..22: mol_type = other DNA
tataatctgaattccagttaac

SEQ ID NO: 9454 - DNA, 22 bp, synthetic construct
  misc_feature 1..22: note = chemically synthesized
  source 1..22: mol_type = other DNA
aattccagttaacttctagtaa

SEQ ID NO: 9455 - DNA, 22 bp, synthetic construct
  misc_feature 1..22: note = chemically synthesized
  source 1..22: mol_type = other DNA
cagttaacttctagtaaaataa

SEQ ID NO: 9456 - DNA, 22 bp, synthetic construct
  misc_feature 1..22: note = chemically synthesized
  source 1..22: mol_type = other DNA
acttctagtaaaataaacgtat

SEQ ID NO: 9457 - DNA, 22 bp, synthetic construct
  misc_feature 1..22: note = chemically synthesized
  source 1..22: mol_type = other DNA
ctagtaaaataaacgtattatt

SEQ ID NO: 9458 - DNA, 22 bp, synthetic construct
  misc_feature 1..22: note = chemically synthesized
  source 1..22: mol_type = other DNA
tagtaaaataaacgtattatta

SEQ ID NO: 9459 - DNA, 22 bp, synthetic construct
  misc_feature 1..22: note = chemically synthesized
  source 1..22: mol_type = other DNA
gtaaaataaacgtattattagc

SEQ ID NO: 9460 - DNA, 22 bp, synthetic construct
  misc_feature 1..22: note = chemically synthesized
  source 1..22: mol_type = other DNA
ttagctcctacctccctatgcc

SEQ ID NO: 9461 - DNA, 22 bp, synthetic construct
  misc_feature 1..22: note = chemically synthesized
  source 1..22: mol_type = other DNA
gctcctacctccctatgcctag

SEQ ID NO: 9462 - DNA, 22 bp, synthetic construct
  misc_feature 1..22: note = chemically synthesized
  source 1..22: mol_type = other DNA
ctacctccctatgcctagtgaa

SEQ ID NO: 9463 - DNA, 22 bp, synthetic construct
  misc_feature 1..22: note = chemically synthesized
  source 1..22: mol_type = other DNA
cctccctatgcctagtgaaaat

SEQ ID NO: 9464 - DNA, 22 bp, synthetic construct
  misc_feature 1..22: note = chemically synthesized
  source 1..22: mol_type = other DNA
cctatgcctagtgaaaatcaaa

SEQ ID NO: 9465 - DNA, 22 bp, synthetic construct
  misc_feature 1..22: note = chemically synthesized
  source 1..22: mol_type = other DNA
tgcctagtgaaaatcaaataag

SEQ ID NO: 9466 - DNA, 22 bp, synthetic construct
  misc_feature 1..22: note = chemically synthesized
  source 1..22: mol_type = other DNA
gtgaaaatcaaataagatcaga

SEQ ID NO: 9467 - DNA, 22 bp, synthetic construct
  misc_feature 1..22: note = chemically synthesized
  source 1..22: mol_type = other DNA
agaagtgagtgcattgcttaca

SEQ ID NO: 9468 - DNA, 22 bp, synthetic construct
  misc_feature 1..22: note = chemically synthesized
  source 1..22: mol_type = other DNA
gaagtgagtgcattgcttacat

SEQ ID NO: 9469 - DNA, 22 bp, synthetic construct
  misc_feature 1..22: note = chemically synthesized
  source 1..22: mol_type = other DNA
cttacatgttcattatcagtac

SEQ ID NO: 9470 - DNA, 22 bp, synthetic construct
  misc_feature 1..22: note = chemically synthesized
  source 1..22: mol_type = other DNA
acatgttcattatcagtacttt

SEQ ID NO: 9471 - DNA, 22 bp, synthetic construct
  misc_feature 1..22: note = chemically synthesized
  source 1..22: mol_type = other DNA
catgttcattatcagtactttg

SEQ ID NO: 9472 - DNA, 22 bp, synthetic construct
  misc_feature 1..22: note = chemically synthesized
  source 1..22: mol_type = other DNA
attatcagtactttgtagagag

SEQ ID NO: 9473 - DNA, 22 bp, synthetic construct
  misc_feature 1..22: note = chemically synthesized
  source 1..22: mol_type = other DNA
tcagtactttgtagagaggcct

SEQ ID NO: 9474 - DNA, 22 bp, synthetic construct
  misc_feature 1..22: note = chemically synthesized
  source 1..22: mol_type = other DNA
tgtagagaggcctcttaattac

SEQ ID NO: 9475 - DNA, 22 bp, synthetic construct
  misc_feature 1..22: note = chemically synthesized
  source 1..22: mol_type = other DNA
gtagagaggcctcttaattaca

SEQ ID NO: 9476 - DNA, 22 bp, synthetic construct
  misc_feature 1..22: note = chemically synthesized
  source 1..22: mol_type = other DNA
tagagaggcctcttaattacac

SEQ ID NO: 9477 - DNA, 22 bp, synthetic construct
  misc_feature 1..22: note = chemically synthesized
  source 1..22: mol_type = other DNA
ttaattacacagcacattgcaa

SEQ ID NO: 9478 - DNA, 22 bp, synthetic construct
  misc_feature 1..22: note = chemically synthesized
  source 1..22: mol_type = other DNA
aattacacagcacattgcaaat

SEQ ID NO: 9479 - DNA, 22 bp, synthetic construct
  misc_feature 1..22: note = chemically synthesized
  source 1..22: mol_type = other DNA
attacacagcacattgcaaatc

SEQ ID NO: 9480 - DNA, 22 bp, synthetic construct
  misc_feature 1..22: note = chemically synthesized
  source 1..22: mol_type = other DNA
cacagcacattgcaaatcaata

SEQ ID NO: 9481 - DNA, 22 bp, synthetic construct
  misc_feature 1..22: note = chemically synthesized
  source 1..22: mol_type = other DNA
caaatcaataaagcctagccga

SEQ ID NO: 9482 - DNA, 22 bp, synthetic construct
  misc_feature 1..22: note = chemically synthesized
  source 1..22: mol_type = other DNA
gccgaaaagagaattgttcagt

SEQ ID NO: 9483 - DNA, 22 bp, synthetic construct
  misc_feature 1..22: note = chemically synthesized
  source 1..22: mol_type = other DNA
ttcagttcaaacgttcaaaact

SEQ ID NO: 9484 - DNA, 22 bp, synthetic construct
  misc_feature 1..22: note = chemically synthesized
  source 1..22: mol_type = other DNA
agttcaaacgttcaaaactaac

SEQ ID NO: 9485 - DNA, 22 bp, synthetic construct
  misc_feature 1..22: note = chemically synthesized
  source 1..22: mol_type = other DNA
aaacgttcaaaactaacatata

SEQ ID NO: 9486 - DNA, 22 bp, synthetic construct
  misc_feature 1..22: note = chemically synthesized
  source 1..22: mol_type = other DNA
aaaactaacatatacttaattt

SEQ ID NO: 9487 - DNA, 22 bp, synthetic construct
  misc_feature 1..22: note = chemically synthesized
  source 1..22: mol_type = other DNA
acatatacttaattttccaggc

SEQ ID NO: 9488 - DNA, 22 bp, synthetic construct
  misc_feature 1..22: note = chemically synthesized
  source 1..22: mol_type = other DNA
aattttccaggcaaaagaacaa

SEQ ID NO: 9489 - DNA, 22 bp, synthetic construct
  misc_feature 1..22: note = chemically synthesized
  source 1..22: mol_type = other DNA
attttccaggcaaaagaacaat

SEQ ID NO: 9490 - DNA, 22 bp, synthetic construct
  misc_feature 1..22: note = chemically synthesized
  source 1..22: mol_type = other DNA
tccaggcaaaagaacaattgcc

SEQ ID NO: 9491 - DNA, 22 bp, synthetic construct
  misc_feature 1..22: note = chemically synthesized
  source 1..22: mol_type = other DNA
ccaggcaaaagaacaattgcca

SEQ ID NO: 9492 - DNA, 22 bp, synthetic construct
  misc_feature 1..22: note = chemically synthesized
  source 1..22: mol_type = other DNA
caggcaaaagaacaattgccaa

SEQ ID NO: 9493 - DNA, 22 bp, synthetic construct
  misc_feature 1..22: note = chemically synthesized
  source 1..22: mol_type = other DNA
ccaagagtggggaaaggcccga

SEQ ID NO: 9494 - DNA, 22 bp, synthetic construct
  misc_feature 1..22: note = chemically synthesized
  source 1..22: mol_type = other DNA
tctcaggagcctcccaccctag

SEQ ID NO: 9495 - DNA, 22 bp, synthetic construct
  misc_feature 1..22: note = chemically synthesized
  source 1..22: mol_type = other DNA
tcaggagcctcccaccctagag

SEQ ID NO: 9496 - DNA, 22 bp, synthetic construct
  misc_feature 1..22: note = chemically synthesized
  source 1..22: mol_type = other DNA
aggagcctcccaccctagagac

SEQ ID NO: 9497 - DNA, 22 bp, synthetic construct
  misc_feature 1..22: note = chemically synthesized
  source 1..22: mol_type = other DNA
ccaccctagagacctccacccc

SEQ ID NO: 9498 - DNA, 22 bp, synthetic construct
  misc_feature 1..22: note = chemically synthesized
  source 1..22: mol_type = other DNA
gagacctccaccccaggtctca

SEQ ID NO: 9499 - DNA, 22 bp, synthetic construct
  misc_feature 1..22: note = chemically synthesized
  source 1..22: mol_type = other DNA
caccccaggtctcaccaaaagt

SEQ ID NO: 9500 - DNA, 22 bp, synthetic construct
  misc_feature 1..22: note = chemically synthesized
  source 1..22: mol_type = other DNA
accaaaagtgggtggaatggtg

SEQ ID NO: 9501 - DNA, 22 bp, synthetic construct
  misc_feature 1..22: note = chemically synthesized
  source 1..22: mol_type = other DNA
agatccccaacgccactctttc

SEQ ID NO: 9502 - DNA, 22 bp, synthetic construct
  misc_feature 1..22: note = chemically synthesized
  source 1..22: mol_type = other DNA
tttcgcgcccccaccgcccaac

SEQ ID NO: 9503 - DNA, 22 bp, synthetic construct
  misc_feature 1..22: note = chemically synthesized
  source 1..22: mol_type = other DNA
tcgcgcccccaccgcccaacgc

SEQ ID NO: 9504 - DNA, 22 bp, synthetic construct
  misc_feature 1..22: note = chemically synthesized
  source 1..22: mol_type = other DNA
cgcgcccccaccgcccaacgca

SEQ ID NO: 9505 - DNA, 22 bp, synthetic construct
  misc_feature 1..22: note = chemically synthesized
  source 1..22: mol_type = other DNA
gcgcccccaccgcccaacgcat

SEQ ID NO: 9506 - DNA, 22 bp, synthetic construct
  misc_feature 1..22: note = chemically synthesized
  source 1..22: mol_type = other DNA
gttctgaggtggaaaccccgtg

SEQ ID NO: 9507 - DNA, 22 bp, synthetic construct
  misc_feature 1..22: note = chemically synthesized
  source 1..22: mol_type = other DNA
tgaggtggaaaccccgtgcgga

SEQ ID NO: 9508 - DNA, 22 bp, synthetic construct
  misc_feature 1..22: note = chemically synthesized
  source 1..22: mol_type = other DNA
aggtggaaaccccgtgcggatc

SEQ ID NO: 9509 - DNA, 22 bp, synthetic construct
  misc_feature 1..22: note = chemically synthesized
  source 1..22: mol_type = other DNA
ctgtgggtttgctcagccttct

SEQ ID NO: 9510 - DNA, 22 bp, synthetic construct
  misc_feature 1..22: note = chemically synthesized
  source 1..22: mol_type = other DNA
tgggtttgctcagccttctcgg

SEQ ID NO: 9511 - DNA, 22 bp, synthetic construct
  misc_feature 1..22: note = chemically synthesized
  source 1..22: mol_type = other DNA
gctcagccttctcggcaagcac

SEQ ID NO: 9512 - DNA, 22 bp, synthetic construct
  misc_feature 1..22: note = chemically synthesized
  source 1..22: mol_type = other DNA
ctcagccttctcggcaagcact

SEQ ID NO: 9513 - DNA, 22 bp, synthetic construct
  misc_feature 1..22: note = chemically synthesized
  source 1..22: mol_type = other DNA
agccttctcggcaagcactcag

SEQ ID NO: 9514 - DNA, 22 bp, synthetic construct
  misc_feature 1..22: note = chemically synthesized
  source 1..22: mol_type = other DNA
ctcggcaagcactcagggaaga

SEQ ID NO: 9515 - DNA, 22 bp, synthetic construct
  misc_feature 1..22: note = chemically synthesized
  source 1..22: mol_type = other DNA
tcggcaagcactcagggaagaa

SEQ ID NO: 9516 - DNA, 22 bp, synthetic construct
  misc_feature 1..22: note = chemically synthesized
  source 1..22: mol_type = other DNA
ggcaagcactcagggaagaact

SEQ ID NO: 9517 - DNA, 22 bp, synthetic construct
  misc_feature 1..22: note = chemically synthesized
  source 1..22: mol_type = other DNA
agggaagaacttcctgtttgga

SEQ ID NO: 9518 - DNA, 22 bp, synthetic construct
  misc_feature 1..22: note = chemically synthesized
  source 1..22: mol_type = other DNA
cctgtttggagatgactgggga

SEQ ID NO: 9519 - DNA, 22 bp, synthetic construct
  misc_feature 1..22: note = chemically synthesized
  source 1..22: mol_type = other DNA
ctgtttggagatgactggggaa

SEQ ID NO: 9520 - DNA, 22 bp, synthetic construct
  misc_feature 1..22: note = chemically synthesized
  source 1..22: mol_type = other DNA
tttggagatgactggggaaaaa

SEQ ID NO: 9521 - DNA, 22 bp, synthetic construct
  misc_feature 1..22: note = chemically synthesized
  source 1..22: mol_type = other DNA
ggagatgactggggaaaaaact

SEQ ID NO: 9522 - DNA, 22 bp, synthetic construct
  misc_feature 1..22: note = chemically synthesized
  source 1..22: mol_type = other DNA
gagatgactggggaaaaaactg

SEQ ID NO: 9523 - DNA, 22 bp, synthetic construct
  misc_feature 1..22: note = chemically synthesized
  source 1..22: mol_type = other DNA
gggaaaaaactgcacagctgac

SEQ ID NO: 9524 - DNA, 22 bp, synthetic construct
  misc_feature 1..22: note = chemically synthesized
  source 1..22: mol_type = other DNA
cacagctgacattggaaataaa

SEQ ID NO: 9525 - DNA, 22 bp, synthetic construct
  misc_feature 1..22: note = chemically synthesized
  source 1..22: mol_type = other DNA
acattggaaataaacccgagtt

SEQ ID NO: 9526 - DNA, 22 bp, synthetic construct
  misc_feature 1..22: note = chemically synthesized
  source 1..22: mol_type = other DNA
gaaataaacccgagttccaggt

SEQ ID NO: 9527 - DNA, 22 bp, synthetic construct
  misc_feature 1..22: note = chemically synthesized
  source 1..22: mol_type = other DNA
caggttcaaggagccccaggct

SEQ ID NO: 9528 - DNA, 22 bp, synthetic construct
  misc_feature 1..22: note = chemically synthesized
  source 1..22: mol_type = other DNA
aaggagccccaggcttagctca

SEQ ID NO: 9529 - DNA, 22 bp, synthetic construct
  misc_feature 1..22: note = chemically synthesized
  source 1..22: mol_type = other DNA
agctcagctcaagtgaggaact

SEQ ID NO: 9530 - DNA, 22 bp, synthetic construct
  misc_feature 1..22: note = chemically synthesized
  source 1..22: mol_type = other DNA
gctcagctcaagtgaggaacta

SEQ ID NO: 9531 - DNA, 22 bp, synthetic construct
  misc_feature 1..22: note = chemically synthesized
  source 1..22: mol_type = other DNA
agctcaagtgaggaactacgag

SEQ ID NO: 9532 - DNA, 22 bp, synthetic construct
  misc_feature 1..22: note = chemically synthesized
  source 1..22: mol_type = other DNA
aagtgaggaactacgagattta

SEQ ID NO: 9533 - DNA, 22 bp, synthetic construct
  misc_feature 1..22: note = chemically synthesized
  source 1..22: mol_type = other DNA
cgagatttatttaaaagcattc

SEQ ID NO: 9534 - DNA, 22 bp, synthetic construct
  misc_feature 1..22: note = chemically synthesized
  source 1..22: mol_type = other DNA
atttaaaagcattctagttggg

SEQ ID NO: 9535 - DNA, 22 bp, synthetic construct
  misc_feature 1..22: note = chemically synthesized
  source 1..22: mol_type = other DNA
tttaaaagcattctagttgggg

SEQ ID NO: 9536 - DNA, 22 bp, synthetic construct
  misc_feature 1..22: note = chemically synthesized
  source 1..22: mol_type = other DNA
aaaagcattctagttgggggaa

SEQ ID NO: 9537 - DNA, 22 bp, synthetic construct
  misc_feature 1..22: note = chemically synthesized
  source 1..22: mol_type = other DNA
aaagcattctagttgggggaag

SEQ ID NO: 9538 - DNA, 22 bp, synthetic construct
  misc_feature 1..22: note = chemically synthesized
  source 1..22: mol_type = other DNA
tagttgggggaagggagtgggc

SEQ ID NO: 9539 - DNA, 22 bp, synthetic construct
  misc_feature 1..22: note = chemically synthesized
  source 1..22: mol_type = other DNA
gttgggggaagggagtgggcgg

SEQ ID NO: 9540 - DNA, 22 bp, synthetic construct
  misc_feature 1..22: note = chemically synthesized
  source 1..22: mol_type = other DNA
ggggaagggagtgggcggttcc

SEQ ID NO: 9541 - DNA, 22 bp, synthetic construct
  misc_feature 1..22: note = chemically synthesized
  source 1..22: mol_type = other DNA
caaaagtcactccgcagagccg

SEQ ID NO: 9542 - DNA, 22 bp, synthetic construct
  misc_feature 1..22: note = chemically synthesized
  source 1..22: mol_type = other DNA
cgcagagccgggacagccgggg

SEQ ID NO: 9543 - DNA, 22 bp, synthetic construct
  misc_feature 1..22: note = chemically synthesized
  source 1..22: mol_type = other DNA
gggcgagggacccctatctgca

SEQ ID NO: 9544 - DNA, 22 bp, synthetic construct
  misc_feature 1..22: note = chemically synthesized
  source 1..22: mol_type = other DNA
tctgcagttcagtggtaggcac

SEQ ID NO: 9545 - DNA, 22 bp, synthetic construct
  misc_feature 1..22: note = chemically synthesized
  source 1..22: mol_type = other DNA
cagttcagtggtaggcactccc

SEQ ID NO: 9546 - DNA, 22 bp, synthetic construct
  misc_feature 1..22: note = chemically synthesized
  source 1..22: mol_type = other DNA
agtggtaggcactccctcacgg

SEQ ID NO: 9547 - DNA, 22 bp, synthetic construct
  misc_feature 1..22: note = chemically synthesized
  source 1..22: mol_type = other DNA
cctcacggggtctggacgcaga

SEQ ID NO: 9548 - DNA, 22 bp, synthetic construct
  misc_feature 1..22: note = chemically synthesized
  source 1..22: mol_type = other DNA
acggggtctggacgcagaaagt

SEQ ID NO: 9549 - DNA, 22 bp, synthetic construct
  misc_feature 1..22: note = chemically synthesized
  source 1..22: mol_type = other DNA
gacgcagaaagtagggagaggg

SEQ ID NO: 9550 - DNA, 22 bp, synthetic construct
  misc_feature 1..22: note = chemically synthesized
  source 1..22: mol_type = other DNA
gcggatagggttgagcaggtcc

SEQ ID NO: 9551 - DNA, 22 bp, synthetic construct
  misc_feature 1..22: note = chemically synthesized
  source 1..22: mol_type = other DNA
cggatagggttgagcaggtcct

SEQ ID NO: 9552 - DNA, 22 bp, synthetic construct
  misc_feature 1..22: note = chemically synthesized
  source 1..22: mol_type = other DNA
agcaggtcctccaaagttagca

SEQ ID NO: 9553 - DNA, 22 bp, synthetic construct
  misc_feature 1..22: note = chemically synthesized
  source 1..22: mol_type = other DNA
caaagttagcaaactcccaagc

SEQ ID NO: 9554 - DNA, 22 bp, synthetic construct
  misc_feature 1..22: note = chemically synthesized
  source 1..22: mol_type = other DNA
gcaaactcccaagcgcaaagaa

SEQ ID NO: 9555 - DNA, 22 bp, synthetic construct
  misc_feature 1..22: note = chemically synthesized
  source 1..22: mol_type = other DNA
ccaagcgcaaagaaaaagctag

SEQ ID NO: 9556 - DNA, 22 bp, synthetic construct
  misc_feature 1..22: note = chemically synthesized
  source 1..22: mol_type = other DNA
gtttcgatttttccacccccgc

SEQ ID NO: 9557 - DNA, 22 bp, synthetic construct
  misc_feature 1..22: note = chemically synthesized
  source 1..22: mol_type = other DNA
cgatttttccacccccgccgcg

SEQ ID NO: 9558 - DNA, 22 bp, synthetic construct
  misc_feature 1..22: note = chemically synthesized
  source 1..22: mol_type = other DNA
gatttttccacccccgccgcgc

SEQ ID NO: 9559 - DNA, 22 bp, synthetic construct
  misc_feature 1..22: note = chemically synthesized
  source 1..22: mol_type = other DNA
ttccacccccgccgcgccccta

SEQ ID NO: 9560 - DNA, 22 bp, synthetic construct
  misc_feature 1..22: note = chemically synthesized
  source 1..22: mol_type = other DNA
tccacccccgccgcgcccctag

SEQ ID NO: 9561 - DNA, 22 bp, synthetic construct
  misc_feature 1..22: note = chemically synthesized
  source 1..22: mol_type = other DNA
ccacccccgccgcgcccctagt

SEQ ID NO: 9562 - DNA, 22 bp, synthetic construct
  misc_feature 1..22: note = chemically synthesized
  source 1..22: mol_type = other DNA
cacccccgccgcgcccctagtt

SEQ ID NO: 9563 - DNA, 22 bp, synthetic construct
  misc_feature 1..22: note = chemically synthesized
  source 1..22: mol_type = other DNA
gttcgcccgcagccctcggact

SEQ ID NO: 9564 - DNA, 22 bp, synthetic construct
  misc_feature 1..22: note = chemically synthesized
  source 1..22: mol_type = other DNA
gcccgcagccctcggactcacg

SEQ ID NO: 9565 - DNA, 22 bp, synthetic construct
  misc_feature 1..22: note = chemically synthesized
  source 1..22: mol_type = other DNA
ggactcacgcagcaagcgcccc

SEQ ID NO: 9566 - DNA, 22 bp, synthetic construct
  misc_feature 1..22: note = chemically synthesized
  source 1..22: mol_type = other DNA
acgcagcaagcgcccctgcagg

SEQ ID NO: 9567 - DNA, 22 bp, synthetic construct
  misc_feature 1..22: note = chemically synthesized
  source 1..22: mol_type = other DNA
caggaccgcggtctgcaaaagc

SEQ ID NO: 9568 - DNA, 22 bp, synthetic construct
  misc_feature 1..22: note = chemically synthesized
  source 1..22: mol_type = other DNA
caaaagcatcaggaggagaagc

SEQ ID NO: 9569 - DNA, 22 bp, synthetic construct
  misc_feature 1..22: note = chemically synthesized
  source 1..22: mol_type = other DNA
gctcgcgggcccatttccccag

SEQ ID NO: 9570 - DNA, 22 bp, synthetic construct
  misc_feature 1..22: note = chemically synthesized
  source 1..22: mol_type = other DNA
gcgggcccatttccccagctct

SEQ ID NO: 9571 - DNA, 22 bp, synthetic construct
  misc_feature 1..22: note = chemically synthesized
  source 1..22: mol_type = other DNA
ccccagctctggccgcacgtcc

SEQ ID NO: 9572 - DNA, 22 bp, synthetic construct
  misc_feature 1..22: note = chemically synthesized
  source 1..22: mol_type = other DNA
cccagctctggccgcacgtccc

SEQ ID NO: 9573 - DNA, 22 bp, synthetic construct
  misc_feature 1..22: note = chemically synthesized
  source 1..22: mol_type = other DNA
tggccgcacgtccccgttaaat

SEQ ID NO: 9574 - DNA, 22 bp, synthetic construct
  misc_feature 1..22: note = chemically synthesized
  source 1..22: mol_type = other DNA
gccgcacgtccccgttaaatct

SEQ ID NO: 9575 - DNA, 22 bp, synthetic construct
  misc_feature 1..22: note = chemically synthesized
  source 1..22: mol_type = other DNA
aatctccgcttcttttgggggg

SEQ ID NO: 9576 - DNA, 22 bp, synthetic construct
  misc_feature 1..22: note = chemically synthesized
  source 1..22: mol_type = other DNA
cgcttcttttggggggcgggga

SEQ ID NO: 9577 - DNA, 22 bp, synthetic construct
  misc_feature 1..22: note = chemically synthesized
  source 1..22: mol_type = other DNA
cttttggggggcggggaaacgg

SEQ ID NO: 9578 - DNA, 22 bp, synthetic construct
  misc_feature 1..22: note = chemically synthesized
  source 1..22: mol_type = other DNA
ttttggggggcggggaaacggg

SEQ ID NO: 9579 - DNA, 22 bp, synthetic construct
  misc_feature 1..22: note = chemically synthesized
  source 1..22: mol_type = other DNA
ttggggggcggggaaacgggga

SEQ ID NO: 9580 - DNA, 22 bp, synthetic construct
  misc_feature 1..22: note = chemically synthesized
  source 1..22: mol_type = other DNA
tggggggcggggaaacggggat

SEQ ID NO: 9581 - DNA, 22 bp, synthetic construct
  misc_feature 1..22: note = chemically synthesized
  source 1..22: mol_type = other DNA
ggggggcggggaaacggggatg

SEQ ID NO: 9582 - DNA, 22 bp, synthetic construct
  misc_feature 1..22: note = chemically synthesized
  source 1..22: mol_type = other DNA
gggggcggggaaacggggatgg

SEQ ID NO: 9583 - DNA, 22 bp, synthetic construct
  misc_feature 1..22: note = chemically synthesized
  source 1..22: mol_type = other DNA
cagaagtcaccctacagctatt

SEQ ID NO: 9584 - DNA, 22 bp, synthetic construct
  misc_feature 1..22: note = chemically synthesized
  source 1..22: mol_type = other DNA
cagctattgcctaggctcagga

SEQ ID NO: 9585 - DNA, 22 bp, synthetic construct
  misc_feature 1..22: note = chemically synthesized
  source 1..22: mol_type = other DNA
ttgcctaggctcaggagatgcc

SEQ ID NO: 9586 - DNA, 22 bp, synthetic construct
  misc_feature 1..22: note = chemically synthesized
  source 1..22: mol_type = other DNA
cctaggctcaggagatgcccag

SEQ ID NO: 9587 - DNA, 22 bp, synthetic construct
  misc_feature 1..22: note = chemically synthesized
  source 1..22: mol_type = other DNA
ggctcaggagatgcccagtaaa

SEQ ID NO: 9588 - DNA, 22 bp, synthetic construct
  misc_feature 1..22: note = chemically synthesized
  source 1..22: mol_type = other DNA
aggagatgcccagtaaaacttc

SEQ ID NO: 9589 - DNA, 22 bp, synthetic construct
  misc_feature 1..22: note = chemically synthesized
  source 1..22: mol_type = other DNA
cctggtgaaaagcaacaggtct

SEQ ID NO: 9590 - DNA, 22 bp, synthetic construct
  misc_feature 1..22: note = chemically synthesized
  source 1..22: mol_type = other DNA
ctggtgaaaagcaacaggtctt

SEQ ID NO: 9591 - DNA, 22 bp, synthetic construct
  misc_feature 1..22: note = chemically synthesized
  source 1..22: mol_type = other DNA
gtgaaaagcaacaggtctttca

SEQ ID NO: 9592 - DNA, 22 bp, synthetic construct
  misc_feature 1..22: note = chemically synthesized
  source 1..22: mol_type = other DNA
tcagaactttagttctctctct

SEQ ID NO: 9593 - DNA, 22 bp, synthetic construct
  misc_feature 1..22: note = chemically synthesized
  source 1..22: mol_type = other DNA
cagaactttagttctctctctc

SEQ ID NO: 9594 - DNA, 22 bp, synthetic construct
  misc_feature 1..22: note = chemically synthesized
  source 1..22: mol_type = other DNA
agaactttagttctctctctcc

SEQ ID NO: 9595 - DNA, 22 bp, synthetic construct
  misc_feature 1..22: note = chemically synthesized
  source 1..22: mol_type = other DNA
tagttctctctctcctacagca

SEQ ID NO: 9596 - DNA, 22 bp, synthetic construct
  misc_feature 1..22: note = chemically synthesized
  source 1..22: mol_type = other DNA
agttctctctctcctacagcag

SEQ ID NO: 9597 - DNA, 22 bp, synthetic construct
  misc_feature 1..22: note = chemically synthesized
  source 1..22: mol_type = other DNA
gttctctctctcctacagcaga

SEQ ID NO: 9598 - DNA, 22 bp, synthetic construct
  misc_feature 1..22: note = chemically synthesized
  source 1..22: mol_type = other DNA
tctctctcctacagcagaaggt

SEQ ID NO: 9599 - DNA, 22 bp, synthetic construct
  misc_feature 1..22: note = chemically synthesized
  source 1..22: mol_type = other DNA
tctctcctacagcagaaggtac

SEQ ID NO: 9600 - DNA, 22 bp, synthetic construct
  misc_feature 1..22: note = chemically synthesized
  source 1..22: mol_type = other DNA
tctcctacagcagaaggtacct

SEQ ID NO: 9601 - DNA, 22 bp, synthetic construct
  misc_feature 1..22: note = chemically synthesized
  source 1..22: mol_type = other DNA
tcctacagcagaaggtacctgc

SEQ ID NO: 9602 - DNA, 22 bp, synthetic construct
  misc_feature 1..22: note = chemically synthesized
  source 1..22: mol_type = other DNA
ctacagcagaaggtacctgctt

SEQ ID NO: 9603 - DNA, 22 bp, synthetic construct
  misc_feature 1..22: note = chemically synthesized
  source 1..22: mol_type = other DNA
cagcagaaggtacctgcttgtg

SEQ ID NO: 9604 - DNA, 22 bp, synthetic construct
  misc_feature 1..22: note = chemically synthesized
  source 1..22: mol_type = other DNA
cttgtgaaacactaggtgatcc

SEQ ID NO: 9605 - DNA, 22 bp, synthetic construct
  misc_feature 1..22: note = chemically synthesized
  source 1..22: mol_type = other DNA
gtgaaacactaggtgatccagt

SEQ ID NO: 9606 - DNA, 22 bp, synthetic construct
  misc_feature 1..22: note = chemically synthesized
  source 1..22: mol_type = other DNA
tgaaacactaggtgatccagtg

SEQ ID NO: 9607 - DNA, 22 bp, synthetic construct
  misc_feature 1..22: note = chemically synthesized
  source 1..22: mol_type = other DNA
ggtgatccagtgtcccccttgg

SEQ ID NO: 9608 - DNA, 22 bp, synthetic construct
  misc_feature 1..22: note = chemically synthesized
  source 1..22: mol_type = other DNA
ggtttttaaatcctgaaggggt

SEQ ID NO: 9609 - DNA, 22 bp, synthetic construct
  misc_feature 1..22: note = chemically synthesized
  source 1..22: mol_type = other DNA
gtttttaaatcctgaaggggtg

SEQ ID NO: 9610 - DNA, 22 bp, synthetic construct
  misc_feature 1..22: note = chemically synthesized
  source 1..22: mol_type = other DNA
ttaaatcctgaaggggtgttgt

SEQ ID NO: 9611 - DNA, 22 bp, synthetic construct
  misc_feature 1..22: note = chemically synthesized
  source 1..22: mol_type = other DNA
taaatcctgaaggggtgttgtt

SEQ ID NO: 9612 - DNA, 22 bp, synthetic construct
  misc_feature 1..22: note = chemically synthesized
  source 1..22: mol_type = other DNA
aaatcctgaaggggtgttgttg

SEQ ID NO: 9613 - DNA, 22 bp, synthetic construct
  misc_feature 1..22: note = chemically synthesized
  source 1..22: mol_type = other DNA
aatcctgaaggggtgttgttga

SEQ ID NO: 9614 - DNA, 22 bp, synthetic construct
  misc_feature 1..22: note = chemically synthesized
  source 1..22: mol_type = other DNA
aaggggtgttgttgattgggga

SEQ ID NO: 9615 - DNA, 22 bp, synthetic construct
  misc_feature 1..22: note = chemically synthesized
  source 1..22: mol_type = other DNA
ttgattggggaaagtagcttcg

SEQ ID NO: 9616 - DNA, 22 bp, synthetic construct
  misc_feature 1..22: note = chemically synthesized
  source 1..22: mol_type = other DNA
attggggaaagtagcttcgcaa

SEQ ID NO: 9617 - DNA, 22 bp, synthetic construct
  misc_feature 1..22: note = chemically synthesized
  source 1..22: mol_type = other DNA
gggaaagtagcttcgcaatgtt

SEQ ID NO: 9618 - DNA, 22 bp, synthetic construct
  misc_feature 1..22: note = chemically synthesized
  source 1..22: mol_type = other DNA
cgcaatgttctgatctgaactt

SEQ ID NO: 9619 - DNA, 22 bp, synthetic construct
  misc_feature 1..22: note = chemically synthesized
  source 1..22: mol_type = other DNA
gcaatgttctgatctgaacttt

SEQ ID NO: 9620 - DNA, 22 bp, synthetic construct
  misc_feature 1..22: note = chemically synthesized
  source 1..22: mol_type = other DNA
tgatctgaactttagatattta

SEQ ID NO: 9621 - DNA, 22 bp, synthetic construct
  misc_feature 1..22: note = chemically synthesized
  source 1..22: mol_type = other DNA
atctgaactttagatatttaaa

SEQ ID NO: 9622 - DNA, 22 bp, synthetic construct
  misc_feature 1..22: note = chemically synthesized
  source 1..22: mol_type = other DNA
aactttagatatttaaatattt

SEQ ID NO: 9623 - DNA, 22 bp, synthetic construct
  misc_feature 1..22: note = chemically synthesized
  source 1..22: mol_type = other DNA
tagatatttaaatatttatgat

SEQ ID NO: 9624 - DNA, 22 bp, synthetic construct
  misc_feature 1..22: note = chemically synthesized
  source 1..22: mol_type = other DNA
agatatttaaatatttatgatt

SEQ ID NO: 9625 - DNA, 22 bp, synthetic construct
  misc_feature 1..22: note = chemically synthesized
  source 1..22: mol_type = other DNA
gatatttaaatatttatgattt

SEQ ID NO: 9626 - DNA, 22 bp, synthetic construct
  misc_feature 1..22: note = chemically synthesized
  source 1..22: mol_type = other DNA
aaatatttatgattttcaaaat

SEQ ID NO: 9627 - DNA, 22 bp, synthetic construct
  misc_feature 1..22: note = chemically synthesized
  source 1..22: mol_type = other DNA
aatatttatgattttcaaaatt

SEQ ID NO: 9628 - DNA, 22 bp, synthetic construct
  misc_feature 1..22: note = chemically synthesized
  source 1..22: mol_type = other DNA
atgattttcaaaattcaatcat

SEQ ID NO: 9629 - DNA, 22 bp, synthetic construct
  misc_feature 1..22: note = chemically synthesized
  source 1..22: mol_type = other DNA
tgattttcaaaattcaatcata

SEQ ID NO: 9630 - DNA, 22 bp, synthetic construct
  misc_feature 1..22: note = chemically synthesized
  source 1..22: mol_type = other DNA
tcaaaattcaatcatacattta

SEQ ID NO: 9631 - DNA, 22 bp, synthetic construct
  misc_feature 1..22: note = chemically synthesized
  source 1..22: mol_type = other DNA
caaaattcaatcatacatttaa

SEQ ID NO: 9632 - DNA, 22 bp, synthetic construct
  misc_feature 1..22: note = chemically synthesized
  source 1..22: mol_type = other DNA
aaaattcaatcatacatttaaa

SEQ ID NO: 9633 - DNA, 22 bp, synthetic construct
  misc_feature 1..22: note = chemically synthesized
  source 1..22: mol_type = other DNA
aatcatacatttaaaaatttta

SEQ ID NO: 9634 - DNA, 22 bp, synthetic construct
  misc_feature 1..22: note = chemically synthesized
  source 1..22: mol_type = other DNA
aaaaattttatctcaaccttag

SEQ ID NO: 9635 - DNA, 22 bp, synthetic construct
  misc_feature 1..22: note = chemically synthesized
  source 1..22: mol_type = other DNA
aaaattttatctcaaccttaga

SEQ ID NO: 9636 - DNA, 22 bp, synthetic construct
  misc_feature 1..22: note = chemically synthesized
  source 1..22: mol_type = other DNA
tatctcaaccttagaccaactt

SEQ ID NO: 9637 - DNA, 22 bp, synthetic construct
  misc_feature 1..22: note = chemically synthesized
  source 1..22: mol_type = other DNA
atctcaaccttagaccaactta

SEQ ID NO: 9638 - DNA, 22 bp, synthetic construct
  misc_feature 1..22: note = chemically synthesized
  source 1..22: mol_type = other DNA
tctcaaccttagaccaacttat

SEQ ID NO: 9639 - DNA, 22 bp, synthetic construct
  misc_feature 1..22: note = chemically synthesized
  source 1..22: mol_type = other DNA
aaccttagaccaacttatgtct

SEQ ID NO: 9640 - DNA, 22 bp, synthetic construct
  misc_feature 1..22: note = chemically synthesized
  source 1..22: mol_type = other DNA
agaccaacttatgtcttatttg

SEQ ID NO: 9641 - DNA, 22 bp, synthetic construct
  misc_feature 1..22: note = chemically synthesized
  source 1..22: mol_type = other DNA
gaccaacttatgtcttatttga

SEQ ID NO: 9642 - DNA, 22 bp, synthetic construct
  misc_feature 1..22: note = chemically synthesized
  source 1..22: mol_type = other DNA
atgtcttatttgacttagaaat

SEQ ID NO: 9643 - DNA, 22 bp, synthetic construct
  misc_feature 1..22: note = chemically synthesized
  source 1..22: mol_type = other DNA
tgtcttatttgacttagaaata

SEQ ID NO: 9644 - DNA, 22 bp, synthetic construct
  misc_feature 1..22: note = chemically synthesized
  source 1..22: mol_type = other DNA
atttgacttagaaatataaagc

SEQ ID NO: 9645 - DNA, 22 bp, synthetic construct
  misc_feature 1..22: note = chemically synthesized
  source 1..22: mol_type = other DNA
tttgacttagaaatataaagct

SEQ ID NO: 9646 - DNA, 22 bp, synthetic construct
  misc_feature 1..22: note = chemically synthesized
  source 1..22: mol_type = other DNA
gacttagaaatataaagctttt

SEQ ID NO: 9647 - DNA, 22 bp, synthetic construct
  misc_feature 1..22: note = chemically synthesized
  source 1..22: mol_type = other DNA
acttagaaatataaagcttttt

SEQ ID NO: 9648 - DNA, 22 bp, synthetic construct
  misc_feature 1..22: note = chemically synthesized
  source 1..22: mol_type = other DNA
agaaatataaagctttttcatt

SEQ ID NO: 9649 - DNA, 22 bp, synthetic construct
  misc_feature 1..22: note = chemically synthesized
  source 1..22: mol_type = other DNA
gaaatataaagctttttcattt

SEQ ID NO: 9650 - DNA, 22 bp, synthetic construct
  misc_feature 1..22: note = chemically synthesized
  source 1..22: mol_type = other DNA
tttcattttgttttttgattca

SEQ ID NO: 9651 - DNA, 22 bp, synthetic construct
  misc_feature 1..22: note = chemically synthesized
  source 1..22: mol_type = other DNA
ttcattttgttttttgattcaa

SEQ ID NO: 9652 - DNA, 22 bp, synthetic construct
  misc_feature 1..22: note = chemically synthesized
  source 1..22: mol_type = other DNA
tcattttgttttttgattcaaa

SEQ ID NO: 9653 - DNA, 22 bp, synthetic construct
  misc_feature 1..22: note = chemically synthesized
  source 1..22: mol_type = other DNA
cattttgttttttgattcaaat

SEQ ID NO: 9654 - DNA, 22 bp, synthetic construct
  misc_feature 1..22: note = chemically synthesized
  source 1..22: mol_type = other DNA
attttgttttttgattcaaatt

SEQ ID NO: 9655 - DNA, 22 bp, synthetic construct
  misc_feature 1..22: note = chemically synthesized
  source 1..22: mol_type = other DNA
tgttttttgattcaaattaatt

SEQ ID NO: 9656 - DNA, 22 bp, synthetic construct
  misc_feature 1..22: note = chemically synthesized
  source 1..22: mol_type = other DNA
gttttttgattcaaattaatta

SEQ ID NO: 9657 - DNA, 22 bp, synthetic construct
  misc_feature 1..22: note = chemically synthesized
  source 1..22: mol_type = other DNA
ttttttgattcaaattaattaa

SEQ ID NO: 9658 - DNA, 22 bp, synthetic construct
  misc_feature 1..22: note = chemically synthesized
  source 1..22: mol_type = other DNA
tttgattcaaattaattaagtc

SEQ ID NO: 9659 - DNA, 22 bp, synthetic construct
  misc_feature 1..22: note = chemically synthesized
  source 1..22: mol_type = other DNA
ttgattcaaattaattaagtca

SEQ ID NO: 9660 - DNA, 22 bp, synthetic construct
  misc_feature 1..22: note = chemically synthesized
  source 1..22: mol_type = other DNA
tgattcaaattaattaagtcat

SEQ ID NO: 9661 - DNA, 22 bp, synthetic construct
  misc_feature 1..22: note = chemically synthesized
  source 1..22: mol_type = other DNA
gattcaaattaattaagtcata

SEQ ID NO: 9662 - DNA, 22 bp, synthetic construct
  misc_feature 1..22: note = chemically synthesized
  source 1..22: mol_type = other DNA
attcaaattaattaagtcataa

SEQ ID NO: 9663 - DNA, 22 bp, synthetic construct
  misc_feature 1..22: note = chemically synthesized
  source 1..22: mol_type = other DNA
aaattaattaagtcataacatt

SEQ ID NO: 9664 - DNA, 22 bp, synthetic construct
  misc_feature 1..22: note = chemically synthesized
  source 1..22: mol_type = other DNA
attaagtcataacattaaccaa

SEQ ID NO: 9665 - DNA, 22 bp, synthetic construct
  misc_feature 1..22: note = chemically synthesized
  source 1..22: mol_type = other DNA
agtcataacattaaccaattag

SEQ ID NO: 9666 - DNA, 22 bp, synthetic construct
  misc_feature 1..22: note = chemically synthesized
  source 1..22: mol_type = other DNA
accaattagatcctactgaaac

SEQ ID NO: 9667 - DNA, 22 bp, synthetic construct
  misc_feature 1..22: note = chemically synthesized
  source 1..22: mol_type = other DNA
gatcctactgaaacaccttcca

SEQ ID NO: 9668 - DNA, 22 bp, synthetic construct
  misc_feature 1..22: note = chemically synthesized
  source 1..22: mol_type = other DNA
ctgaaacaccttccacagcctt

SEQ ID NO: 9669 - DNA, 22 bp, synthetic construct
  misc_feature 1..22: note = chemically synthesized
  source 1..22: mol_type = other DNA
aaacaccttccacagccttcat

SEQ ID NO: 9670 - DNA, 22 bp, synthetic construct
  misc_feature 1..22: note = chemically synthesized
  source 1..22: mol_type = other DNA
ccacagccttcataattgaatt

SEQ ID NO: 9671 - DNA, 22 bp, synthetic construct
  misc_feature 1..22: note = chemically synthesized
  source 1..22: mol_type = other DNA
cacagccttcataattgaatta

SEQ ID NO: 9672 - DNA, 22 bp, synthetic construct
  misc_feature 1..22: note = chemically synthesized
  source 1..22: mol_type = other DNA
cataattgaattatctgacaag

SEQ ID NO: 9673 - DNA, 22 bp, synthetic construct
  misc_feature 1..22: note = chemically synthesized
  source 1..22: mol_type = other DNA
ataattgaattatctgacaagt

SEQ ID NO: 9674 - DNA, 22 bp, synthetic construct
  misc_feature 1..22: note = chemically synthesized
  source 1..22: mol_type = other DNA
aattatctgacaagtgtttcac

SEQ ID NO: 9675 - DNA, 22 bp, synthetic construct
  misc_feature 1..22: note = chemically synthesized
  source 1..22: mol_type = other DNA
tctgacaagtgtttcacaaact

SEQ ID NO: 9676 - DNA, 22 bp, synthetic construct
  misc_feature 1..22: note = chemically synthesized
  source 1..22: mol_type = other DNA
acaagtgtttcacaaactttac

SEQ ID NO: 9677 - DNA, 22 bp, synthetic construct
  misc_feature 1..22: note = chemically synthesized
  source 1..22: mol_type = other DNA
cacaaactttacagtattggga

SEQ ID NO: 9678 - DNA, 22 bp, synthetic construct
  misc_feature 1..22: note = chemically synthesized
  source 1..22: mol_type = other DNA
acaaactttacagtattgggat

SEQ ID NO: 9679 - DNA, 22 bp, synthetic construct
  misc_feature 1..22: note = chemically synthesized
  source 1..22: mol_type = other DNA
tacagtattgggattatctgga

SEQ ID NO: 9680 - DNA, 22 bp, synthetic construct
  misc_feature 1..22: note = chemically synthesized
  source 1..22: mol_type = other DNA
acagtattgggattatctggag

SEQ ID NO: 9681 - DNA, 22 bp, synthetic construct
  misc_feature 1..22: note = chemically synthesized
  source 1..22: mol_type = other DNA
cagtattgggattatctggaga

SEQ ID NO: 9682 - DNA, 22 bp, synthetic construct
  misc_feature 1..22: note = chemically synthesized
  source 1..22: mol_type = other DNA
ggattatctggagaatgattaa

SEQ ID NO: 9683 - DNA, 22 bp, synthetic construct
  misc_feature 1..22: note = chemically synthesized
  source 1..22: mol_type = other DNA
tctggagaatgattaaacatat

SEQ ID NO: 9684 - DNA, 22 bp, synthetic construct
  misc_feature 1..22: note = chemically synthesized
  source 1..22: mol_type = other DNA
gagaatgattaaacatattgag

SEQ ID NO: 9685 - DNA, 22 bp, synthetic construct
  misc_feature 1..22: note = chemically synthesized
  source 1..22: mol_type = other DNA
aacatattgaggcctgctccta

SEQ ID NO: 9686 - DNA, 22 bp, synthetic construct
  misc_feature 1..22: note = chemically synthesized
  source 1..22: mol_type = other DNA
aggcctgctcctaaccccagac

SEQ ID NO: 9687 - DNA, 22 bp, synthetic construct
  misc_feature 1..22: note = chemically synthesized
  source 1..22: mol_type = other DNA
ctcctaaccccagacacactga

SEQ ID NO: 9688 - DNA, 22 bp, synthetic construct
  misc_feature 1..22: note = chemically synthesized
  source 1..22: mol_type = other DNA
ctaaccccagacacactgattt

SEQ ID NO: 9689 - DNA, 22 bp, synthetic construct
  misc_feature 1..22: note = chemically synthesized
  source 1..22: mol_type = other DNA
accccagacacactgatttaat

SEQ ID NO: 9690 - DNA, 22 bp, synthetic construct
  misc_feature 1..22: note = chemically synthesized
  source 1..22: mol_type = other DNA
atttaatgggtaattgttaggt

SEQ ID NO: 9691 - DNA, 22 bp, synthetic construct
  misc_feature 1..22: note = chemically synthesized
  source 1..22: mol_type = other DNA
aatgggtaattgttaggtagtt

SEQ ID NO: 9692 - DNA, 22 bp, synthetic construct
  misc_feature 1..22: note = chemically synthesized
  source 1..22: mol_type = other DNA
atgggtaattgttaggtagtta

SEQ ID NO: 9693 - DNA, 22 bp, synthetic construct
  misc_feature 1..22: note = chemically synthesized
  source 1..22: mol_type = other DNA
ttaggtagttagacattagcag

SEQ ID NO: 9694 - DNA, 22 bp, synthetic construct
  misc_feature 1..22: note = chemically synthesized
  source 1..22: mol_type = other DNA
ggtagttagacattagcagttg

SEQ ID NO: 9695 - DNA, 22 bp, synthetic construct
  misc_feature 1..22: note = chemically synthesized
  source 1..22: mol_type = other DNA
gacattagcagttgggagggga

SEQ ID NO: 9696 - DNA, 22 bp, synthetic construct
  misc_feature 1..22: note = chemically synthesized
  source 1..22: mol_type = other DNA
gcagttgggaggggatgacaga

SEQ ID NO: 9697 - DNA, 22 bp, synthetic construct
  misc_feature 1..22: note = chemically synthesized
  source 1..22: mol_type = other DNA
ggaggggatgacagaagagagc

SEQ ID NO: 9698 - DNA, 22 bp, synthetic construct
  misc_feature 1..22: note = chemically synthesized
  source 1..22: mol_type = other DNA
tcactaagacagccactggccc

SEQ ID NO: 9699 - DNA, 22 bp, synthetic construct
  misc_feature 1..22: note = chemically synthesized
  source 1..22: mol_type = other DNA
agacagccactggcccacctaa

SEQ ID NO: 9700 - DNA, 22 bp, synthetic construct
  misc_feature 1..22: note = chemically synthesized
  source 1..22: mol_type = other DNA
gcccacctaaattcaggcccaa

SEQ ID NO: 9701 - DNA, 22 bp, synthetic construct
  misc_feature 1..22: note = chemically synthesized
  source 1..22: mol_type = other DNA
aattcaggcccaagactaccct

SEQ ID NO: 9702 - DNA, 22 bp, synthetic construct
  misc_feature 1..22: note = chemically synthesized
  source 1..22: mol_type = other DNA
aggcccaagactaccctaatgc

SEQ ID NO: 9703 - DNA, 22 bp, synthetic construct
  misc_feature 1..22: note = chemically synthesized
  source 1..22: mol_type = other DNA
ccctaatgccaccctaagggat

SEQ ID NO: 9704 - DNA, 22 bp, synthetic construct
  misc_feature 1..22: note = chemically synthesized
  source 1..22: mol_type = other DNA
atgccaccctaagggatggagt

SEQ ID NO: 9705 - DNA, 22 bp, synthetic construct
  misc_feature 1..22: note = chemically synthesized
  source 1..22: mol_type = other DNA
agggatggagtttatgataaag

SEQ ID NO: 9706 - DNA, 22 bp, synthetic construct
  misc_feature 1..22: note = chemically synthesized
  source 1..22: mol_type = other DNA
atgataaagtctgtggccaaaa

SEQ ID NO: 9707 - DNA, 22 bp, synthetic construct
  misc_feature 1..22: note = chemically synthesized
  source 1..22: mol_type = other DNA
tgataaagtctgtggccaaaat

SEQ ID NO: 9708 - DNA, 22 bp, synthetic construct
  misc_feature 1..22: note = chemically synthesized
  source 1..22: mol_type = other DNA
tggccaaaatatcctggagaaa

SEQ ID NO: 9709 - DNA, 22 bp, synthetic construct
  misc_feature 1..22: note = chemically synthesized
  source 1..22: mol_type = other DNA
gagaaagagaaaggagggtaca

SEQ ID NO: 9710 - DNA, 22 bp, synthetic construct
  misc_feature 1..22: note = chemically synthesized
  source 1..22: mol_type = other DNA
cctaaggtggcacatgcccaac

SEQ ID NO: 9711 - DNA, 22 bp, synthetic construct
  misc_feature 1..22: note = chemically synthesized
  source 1..22: mol_type = other DNA
aggtggcacatgcccaacaaca

SEQ ID NO: 9712 - DNA, 22 bp, synthetic construct
  misc_feature 1..22: note = chemically synthesized
  source 1..22: mol_type = other DNA
tcttcaagttcaccccaagttc

SEQ ID NO: 9713 - DNA, 22 bp, synthetic construct
  misc_feature 1..22: note = chemically synthesized
  source 1..22: mol_type = other DNA
caagttcaccccaagttcatca

SEQ ID NO: 9714 - DNA, 22 bp, synthetic construct
  misc_feature 1..22: note = chemically synthesized
  source 1..22: mol_type = other DNA
aagttcaccccaagttcatcat

SEQ ID NO: 9715 - DNA, 22 bp, synthetic construct
  misc_feature 1..22: note = chemically synthesized
  source 1..22: mol_type = other DNA
accccaagttcatcatgccatc

SEQ ID NO: 9716 - DNA, 22 bp, synthetic construct
  misc_feature 1..22: note = chemically synthesized
  source 1..22: mol_type = other DNA
atcatgccatcattataataga

SEQ ID NO: 9717 - DNA, 22 bp, synthetic construct
  misc_feature 1..22: note = chemically synthesized
  source 1..22: mol_type = other DNA
taatagaatttacatacagttt

SEQ ID NO: 9718 - DNA, 22 bp, synthetic construct
  misc_feature 1..22: note = chemically synthesized
  source 1..22: mol_type = other DNA
acatacagttttgcccccccat

SEQ ID NO: 9719 - DNA, 22 bp, synthetic construct
  misc_feature 1..22: note = chemically synthesized
  source 1..22: mol_type = other DNA
catacagttttgcccccccatc

SEQ ID NO: 9720 - DNA, 22 bp, synthetic construct
  misc_feature 1..22: note = chemically synthesized
  source 1..22: mol_type = other DNA
tgcccccccatccctgggaggc

SEQ ID NO: 9721 - DNA, 22 bp, synthetic construct
  misc_feature 1..22: note = chemically synthesized
  source 1..22: mol_type = other DNA
gcccccccatccctgggaggct

SEQ ID NO: 9722 - DNA, 22 bp, synthetic construct
  misc_feature 1..22: note = chemically synthesized
  source 1..22: mol_type = other DNA
cccccccatccctgggaggctt

SEQ ID NO: 9723 - DNA, 22 bp, synthetic construct
  misc_feature 1..22: note = chemically synthesized
  source 1..22: mol_type = other DNA
ggaggcttttcttaacaaatta

SEQ ID NO: 9724 - DNA, 22 bp, synthetic construct
  misc_feature 1..22: note = chemically synthesized
  source 1..22: mol_type = other DNA
ttcttaacaaattataggtaag

SEQ ID NO: 9725 - DNA, 22 bp, synthetic construct
  misc_feature 1..22: note = chemically synthesized
  source 1..22: mol_type = other DNA
tcttaacaaattataggtaaga

SEQ ID NO: 9726 - DNA, 22 bp, synthetic construct
  misc_feature 1..22: note = chemically synthesized
  source 1..22: mol_type = other DNA
cttaacaaattataggtaagac

SEQ ID NO: 9727 - DNA, 22 bp, synthetic construct
  misc_feature 1..22: note = chemically synthesized
  source 1..22: mol_type = other DNA
ttaacaaattataggtaagacc

SEQ ID NO: 9728 - DNA, 22 bp, synthetic construct
  misc_feature 1..22: note = chemically synthesized
  source 1..22: mol_type = other DNA
aacaaattataggtaagaccat

SEQ ID NO: 9729 - DNA, 22 bp, synthetic construct
  misc_feature 1..22: note = chemically synthesized
  source 1..22: mol_type = other DNA
acaaattataggtaagaccatg

SEQ ID NO: 9730 - DNA, 22 bp, synthetic construct
  misc_feature 1..22: note = chemically synthesized
  source 1..22: mol_type = other DNA
taggtaagaccatgcacagttt

SEQ ID NO: 9731 - DNA, 22 bp, synthetic construct
  misc_feature 1..22: note = chemically synthesized
  source 1..22: mol_type = other DNA
aattttagattgtatagctata

SEQ ID NO: 9732 - DNA, 22 bp, synthetic construct
  misc_feature 1..22: note = chemically synthesized
  source 1..22: mol_type = other DNA
attttagattgtatagctatac

SEQ ID NO: 9733 - DNA, 22 bp, synthetic construct
  misc_feature 1..22: note = chemically synthesized
  source 1..22: mol_type = other DNA
tagattgtatagctatacactt

SEQ ID NO: 9734 - DNA, 22 bp, synthetic construct
  misc_feature 1..22: note = chemically synthesized
  source 1..22: mol_type = other DNA
agattgtatagctatacacttc

SEQ ID NO: 9735 - DNA, 22 bp, synthetic construct
  misc_feature 1..22: note = chemically synthesized
  source 1..22: mol_type = other DNA
gattgtatagctatacacttca

SEQ ID NO: 9736 - DNA, 22 bp, synthetic construct
  misc_feature 1..22: note = chemically synthesized
  source 1..22: mol_type = other DNA
tatagctatacacttcaatcaa

SEQ ID NO: 9737 - DNA, 22 bp, synthetic construct
  misc_feature 1..22: note = chemically synthesized
  source 1..22: mol_type = other DNA
tacacttcaatcaaataacatc

SEQ ID NO: 9738 - DNA, 22 bp, synthetic construct
  misc_feature 1..22: note = chemically synthesized
  source 1..22: mol_type = other DNA
caatcaaataacatcatcctgt

SEQ ID NO: 9739 - DNA, 22 bp, synthetic construct
  misc_feature 1..22: note = chemically synthesized
  source 1..22: mol_type = other DNA
aatcaaataacatcatcctgtc

SEQ ID NO: 9740 - DNA, 22 bp, synthetic construct
  misc_feature 1..22: note = chemically synthesized
  source 1..22: mol_type = other DNA
tcactcagatacagcccaaacc

SEQ ID NO: 9741 - DNA, 22 bp, synthetic construct
  misc_feature 1..22: note = chemically synthesized
  source 1..22: mol_type = other DNA
agatacagcccaaacctcaact

SEQ ID NO: 9742 - DNA, 22 bp, synthetic construct
  misc_feature 1..22: note = chemically synthesized
  source 1..22: mol_type = other DNA
aactcctccccacaaaccccat

SEQ ID NO: 9743 - DNA, 22 bp, synthetic construct
  misc_feature 1..22: note = chemically synthesized
  source 1..22: mol_type = other DNA
ctccccacaaaccccataaaag

SEQ ID NO: 9744 - DNA, 22 bp, synthetic construct
  misc_feature 1..22: note = chemically synthesized
  source 1..22: mol_type = other DNA
cccacaaaccccataaaagcac

SEQ ID NO: 9745 - DNA, 22 bp, synthetic construct
  misc_feature 1..22: note = chemically synthesized
  source 1..22: mol_type = other DNA
gagctctgtaaagaagtgctga

SEQ ID NO: 9746 - DNA, 22 bp, synthetic construct
  misc_feature 1..22: note = chemically synthesized
  source 1..22: mol_type = other DNA
agctctgtaaagaagtgctgag

SEQ ID NO: 9747 - DNA, 22 bp, synthetic construct
  misc_feature 1..22: note = chemically synthesized
  source 1..22: mol_type = other DNA
tgtaaagaagtgctgagttcac

SEQ ID NO: 9748 - DNA, 22 bp, synthetic construct
  misc_feature 1..22: note = chemically synthesized
  source 1..22: mol_type = other DNA
taaagaagtgctgagttcactt

SEQ ID NO: 9749 - DNA, 22 bp, synthetic construct
  misc_feature 1..22: note = chemically synthesized
  source 1..22: mol_type = other DNA
agttcacttcgcagaaataagc

SEQ ID NO: 9750 - DNA, 22 bp, synthetic construct
  misc_feature 1..22: note = chemically synthesized
  source 1..22: mol_type = other DNA
acttcgcagaaataagcccgct

SEQ ID NO: 9751 - DNA, 22 bp, synthetic construct
  misc_feature 1..22: note = chemically synthesized
  source 1..22: mol_type = other DNA
cgcagaaataagcccgctgtcc

SEQ ID NO: 9752 - DNA, 22 bp, synthetic construct
  misc_feature 1..22: note = chemically synthesized
  source 1..22: mol_type = other DNA
gcagaaataagcccgctgtccc

SEQ ID NO: 9753 - DNA, 22 bp, synthetic construct
  misc_feature 1..22: note = chemically synthesized
  source 1..22: mol_type = other DNA
tccctcagagtgtattattgtg

SEQ ID NO: 9754 - DNA, 22 bp, synthetic construct
  misc_feature 1..22: note = chemically synthesized
  source 1..22: mol_type = other DNA
agagtgtattattgtgcttcaa

SEQ ID NO: 9755 - DNA, 22 bp, synthetic construct
  misc_feature 1..22: note = chemically synthesized
  source 1..22: mol_type = other DNA
ttgtgcttcaataaactttgct

SEQ ID NO: 9756 - DNA, 22 bp, synthetic construct
  misc_feature 1..22: note = chemically synthesized
  source 1..22: mol_type = other DNA
tgcttcaataaactttgcttta

SEQ ID NO: 9757 - DNA, 22 bp, synthetic construct
  misc_feature 1..22: note = chemically synthesized
  source 1..22: mol_type = other DNA
caataaactttgctttaagctt

SEQ ID NO: 9758 - DNA, 22 bp, synthetic construct
  misc_feature 1..22: note = chemically synthesized
  source 1..22: mol_type = other DNA
aataaactttgctttaagcttg

SEQ ID NO: 9759 - DNA, 22 bp, synthetic construct
  misc_feature 1..22: note = chemically synthesized
  source 1..22: mol_type = other DNA
tgctttaagcttgcattttggt

SEQ ID NO: 9760 - DNA, 22 bp, synthetic construct
  misc_feature 1..22: note = chemically synthesized
  source 1..22: mol_type = other DNA
gctttaagcttgcattttggtg

SEQ ID NO: 9761 - DNA, 22 bp, synthetic construct
  misc_feature 1..22: note = chemically synthesized
  source 1..22: mol_type = other DNA
ctttaagcttgcattttggtgt

SEQ ID NO: 9762 - DNA, 22 bp, synthetic construct
  misc_feature 1..22: note = chemically synthesized
  source 1..22: mol_type = other DNA
taagcttgcattttggtgttag

SEQ ID NO: 9763 - DNA, 22 bp, synthetic construct
  misc_feature 1..22: note = chemically synthesized
  source 1..22: mol_type = other DNA
aagcttgcattttggtgttagt

SEQ ID NO: 9764 - DNA, 22 bp, synthetic construct
  misc_feature 1..22: note = chemically synthesized
  source 1..22: mol_type = other DNA
agcttgcattttggtgttagtt

SEQ ID NO: 9765 - DNA, 22 bp, synthetic construct
  misc_feature 1..22: note = chemically synthesized
  source 1..22: mol_type = other DNA
gcattttggtgttagtttgtag

SEQ ID NO: 9766 - DNA, 22 bp, synthetic construct
  misc_feature 1..22: note = chemically synthesized
  source 1..22: mol_type = other DNA
cattttggtgttagtttgtagt

SEQ ID NO: 9767 - DNA, 22 bp, synthetic construct
  misc_feature 1..22: note = chemically synthesized
  source 1..22: mol_type = other DNA
tggtgttagtttgtagttcttt

SEQ ID NO: 9768 - DNA, 22 bp, synthetic construct
  misc_feature 1..22: note = chemically synthesized
  source 1..22: mol_type = other DNA
ggtgttagtttgtagttctttg

SEQ ID NO: 9769 - DNA, 22 bp, synthetic construct
  misc_feature 1..22: note = chemically synthesized
  source 1..22: mol_type = other DNA
gtgttagtttgtagttctttgc

SEQ ID NO: 9770 - DNA, 22 bp, synthetic construct
  misc_feature 1..22: note = chemically synthesized
  source 1..22: mol_type = other DNA
gtttgtagttctttgctcacta

SEQ ID NO: 9771 - DNA, 22 bp, synthetic construct
  misc_feature 1..22: note = chemically synthesized
  source 1..22: mol_type = other DNA
gtagttctttgctcactatcac

SEQ ID NO: 9772 - DNA, 22 bp, synthetic construct
  misc_feature 1..22: note = chemically synthesized
  source 1..22: mol_type = other DNA
tagttctttgctcactatcaca

SEQ ID NO: 9773 - DNA, 22 bp, synthetic construct
  misc_feature 1..22: note = chemically synthesized
  source 1..22: mol_type = other DNA
tttgctcactatcacaagaact

SEQ ID NO: 9774 - DNA, 22 bp, synthetic construct
  misc_feature 1..22: note = chemically synthesized
  source 1..22: mol_type = other DNA
tgctcactatcacaagaactga

SEQ ID NO: 9775 - DNA, 22 bp, synthetic construct
  misc_feature 1..22: note = chemically synthesized
  source 1..22: mol_type = other DNA
gctcactatcacaagaactgag

SEQ ID NO: 9776 - DNA, 22 bp, synthetic construct
  misc_feature 1..22: note = chemically synthesized
  source 1..22: mol_type = other DNA
ctcactatcacaagaactgaga

SEQ ID NO: 9777 - DNA, 22 bp, synthetic construct
  misc_feature 1..22: note = chemically synthesized
  source 1..22: mol_type = other DNA
actatcacaagaactgagattg

SEQ ID NO: 9778 - DNA, 22 bp, synthetic construct
  misc_feature 1..22: note = chemically synthesized
  source 1..22: mol_type = other DNA
tcacaagaactgagattgctgg

SEQ ID NO: 9779 - DNA, 22 bp, synthetic construct
  misc_feature 1..22: note = chemically synthesized
  source 1..22: mol_type = other DNA
agattgctggttcagagctccg

SEQ ID NO: 9780 - DNA, 22 bp, synthetic construct
  misc_feature 1..22: note = chemically synthesized
  source 1..22: mol_type = other DNA
ctggttcagagctccggctata

SEQ ID NO: 9781 - DNA, 22 bp, synthetic construct
  misc_feature 1..22: note = chemically synthesized
  source 1..22: mol_type = other DNA
gttcagagctccggctataata

SEQ ID NO: 9782 - DNA, 22 bp, synthetic construct
  misc_feature 1..22: note = chemically synthesized
  source 1..22: mol_type = other DNA
agagctccggctataataatct

SEQ ID NO: 9783 - DNA, 22 bp, synthetic construct
  misc_feature 1..22: note = chemically synthesized
  source 1..22: mol_type = other DNA
cggctataataatctcctcggt

SEQ ID NO: 9784 - DNA, 22 bp, synthetic construct
  misc_feature 1..22: note = chemically synthesized
  source 1..22: mol_type = other DNA
taataatctcctcggttaaagg

SEQ ID NO: 9785 - DNA, 22 bp, synthetic construct
  misc_feature 1..22: note = chemically synthesized
  source 1..22: mol_type = other DNA
ctcggttaaaggatccatccca

SEQ ID NO: 9786 - DNA, 22 bp, synthetic construct
  misc_feature 1..22: note = chemically synthesized
  source 1..22: mol_type = other DNA
ggttaaaggatccatcccaatg

SEQ ID NO: 9787 - DNA, 22 bp, synthetic construct
  misc_feature 1..22: note = chemically synthesized
  source 1..22: mol_type = other DNA
aaggatccatcccaatgcataa

SEQ ID NO: 9788 - DNA, 22 bp, synthetic construct
  misc_feature 1..22: note = chemically synthesized
  source 1..22: mol_type = other DNA
ccagtaacagtatgggatgcca

SEQ ID NO: 9789 - DNA, 22 bp, synthetic construct
  misc_feature 1..22: note = chemically synthesized
  source 1..22: mol_type = other DNA
ggcaatgggattttaaaagctt

SEQ ID NO: 9790 - DNA, 22 bp, synthetic construct
  misc_feature 1..22: note = chemically synthesized
  source 1..22: mol_type = other DNA
taaaagctttccttctccctca

SEQ ID NO: 9791 - DNA, 22 bp, synthetic construct
  misc_feature 1..22: note = chemically synthesized
  source 1..22: mol_type = other DNA
aaaagctttccttctccctcaa

SEQ ID NO: 9792 - DNA, 22 bp, synthetic construct
  misc_feature 1..22: note = chemically synthesized
  source 1..22: mol_type = other DNA
aaagctttccttctccctcaac

SEQ ID NO: 9793 - DNA, 22 bp, synthetic construct
  misc_feature 1..22: note = chemically synthesized
  source 1..22: mol_type = other DNA
tccttctccctcaacgaagttt

SEQ ID NO: 9794 - DNA, 22 bp, synthetic construct
  misc_feature 1..22: note = chemically synthesized
  source 1..22: mol_type = other DNA
ccttctccctcaacgaagtttg

SEQ ID NO: 9795 - DNA, 22 bp, synthetic construct
  misc_feature 1..22: note = chemically synthesized
  source 1..22: mol_type = other DNA
cttctccctcaacgaagtttgg

SEQ ID NO: 9796 - DNA, 22 bp, synthetic construct
  misc_feature 1..22: note = chemically synthesized
  source 1..22: mol_type = other DNA
ctccctcaacgaagtttgggaa

SEQ ID NO: 9797 - DNA, 22 bp, synthetic construct
  misc_feature 1..22: note = chemically synthesized
  source 1..22: mol_type = other DNA
tccctcaacgaagtttgggaat

SEQ ID NO: 9798 - DNA, 22 bp, synthetic construct
  misc_feature 1..22: note = chemically synthesized
  source 1..22: mol_type = other DNA
cctcaacgaagtttgggaatta

SEQ ID NO: 9799 - DNA, 22 bp, synthetic construct
  misc_feature 1..22: note = chemically synthesized
  source 1..22: mol_type = other DNA
aacgaagtttgggaattattgc

SEQ ID NO: 9800 - DNA, 22 bp, synthetic construct
  misc_feature 1..22: note = chemically synthesized
  source 1..22: mol_type = other DNA
gggaattattgccttagacatt

SEQ ID NO: 9801 - DNA, 22 bp, synthetic construct
  misc_feature 1..22: note = chemically synthesized
  source 1..22: mol_type = other DNA
ggaattattgccttagacattt

SEQ ID NO: 9802 - DNA, 22 bp, synthetic construct
  misc_feature 1..22: note = chemically synthesized
  source 1..22: mol_type = other DNA
ttgccttagacatttcaaacaa

SEQ ID NO: 9803 - DNA, 22 bp, synthetic construct
  misc_feature 1..22: note = chemically synthesized
  source 1..22: mol_type = other DNA
ccttagacatttcaaacaatat

SEQ ID NO: 9804 - DNA, 22 bp, synthetic construct
  misc_feature 1..22: note = chemically synthesized
  source 1..22: mol_type = other DNA
agacatttcaaacaatattaat

SEQ ID NO: 9805 - DNA, 22 bp, synthetic construct
  misc_feature 1..22: note = chemically synthesized
  source 1..22: mol_type = other DNA
gacatttcaaacaatattaata

SEQ ID NO: 9806 - DNA, 22 bp, synthetic construct
  misc_feature 1..22: note = chemically synthesized
  source 1..22: mol_type = other DNA
caaacaatattaataaatttaa

SEQ ID NO: 9807 - DNA, 22 bp, synthetic construct
  misc_feature 1..22: note = chemically synthesized
  source 1..22: mol_type = other DNA
aaacaatattaataaatttaat

SEQ ID NO: 9808 - DNA, 22 bp, synthetic construct
  misc_feature 1..22: note = chemically synthesized
  source 1..22: mol_type = other DNA
ataaatttaatacacctgattt

SEQ ID NO: 9809 - DNA, 22 bp, synthetic construct
  misc_feature 1..22: note = chemically synthesized
  source 1..22: mol_type = other DNA
aatacacctgatttgctccaaa

SEQ ID NO: 9810 - DNA, 22 bp, synthetic construct
  misc_feature 1..22: note = chemically synthesized
  source 1..22: mol_type = other DNA
atacacctgatttgctccaaac

SEQ ID NO: 9811 - DNA, 22 bp, synthetic construct
  misc_feature 1..22: note = chemically synthesized
  source 1..22: mol_type = other DNA
atttgctccaaacctttacata

SEQ ID NO: 9812 - DNA, 22 bp, synthetic construct
  misc_feature 1..22: note = chemically synthesized
  source 1..22: mol_type = other DNA
gctccaaacctttacatatcta

SEQ ID NO: 9813 - DNA, 22 bp, synthetic construct
  misc_feature 1..22: note = chemically synthesized
  source 1..22: mol_type = other DNA
ctccaaacctttacatatctag

SEQ ID NO: 9814 - DNA, 22 bp, synthetic construct
  misc_feature 1..22: note = chemically synthesized
  source 1..22: mol_type = other DNA
caaacctttacatatctagcaa

SEQ ID NO: 9815 - DNA, 22 bp, synthetic construct
  misc_feature 1..22: note = chemically synthesized
  source 1..22: mol_type = other DNA
tacatatctagcaaattcaaca

SEQ ID NO: 9816 - DNA, 22 bp, synthetic construct
  misc_feature 1..22: note = chemically synthesized
  source 1..22: mol_type = other DNA
acatatctagcaaattcaacag

SEQ ID NO: 9817 - DNA, 22 bp, synthetic construct
  misc_feature 1..22: note = chemically synthesized
  source 1..22: mol_type = other DNA
catatctagcaaattcaacagg

SEQ ID NO: 9818 - DNA, 22 bp, synthetic construct
  misc_feature 1..22: note = chemically synthesized
  source 1..22: mol_type = other DNA
gcaaattcaacaggcattattt

SEQ ID NO: 9819 - DNA, 22 bp, synthetic construct
  misc_feature 1..22: note = chemically synthesized
  source 1..22: mol_type = other DNA
aacaggcattatttttgtaagc

SEQ ID NO: 9820 - DNA, 22 bp, synthetic construct
  misc_feature 1..22: note = chemically synthesized
  source 1..22: mol_type = other DNA
tttttgtaagcatgtatgcaaa

SEQ ID NO: 9821 - DNA, 22 bp, synthetic construct
  misc_feature 1..22: note = chemically synthesized
  source 1..22: mol_type = other DNA
ttgtaagcatgtatgcaaattt

SEQ ID NO: 9822 - DNA, 22 bp, synthetic construct
  misc_feature 1..22: note = chemically synthesized
  source 1..22: mol_type = other DNA
tgtaagcatgtatgcaaatttt

SEQ ID NO: 9823 - DNA, 22 bp, synthetic construct
  misc_feature 1..22: note = chemically synthesized
  source 1..22: mol_type = other DNA
gtaagcatgtatgcaaattttg

SEQ ID NO: 9824 - DNA, 22 bp, synthetic construct
  misc_feature 1..22: note = chemically synthesized
  source 1..22: mol_type = other DNA
taagcatgtatgcaaattttgg

SEQ ID NO: 9825 - DNA, 22 bp, synthetic construct
  misc_feature 1..22: note = chemically synthesized
  source 1..22: mol_type = other DNA
tggcaattcaagaaaatcaaac

SEQ ID NO: 9826 - DNA, 22 bp, synthetic construct
  misc_feature 1..22: note = chemically synthesized
  source 1..22: mol_type = other DNA
ggcaattcaagaaaatcaaaca

SEQ ID NO: 9827 - DNA, 22 bp, synthetic construct
  misc_feature 1..22: note = chemically synthesized
  source 1..22: mol_type = other DNA
gcaattcaagaaaatcaaacag

SEQ ID NO: 9828 - DNA, 22 bp, synthetic construct
  misc_feature 1..22: note = chemically synthesized
  source 1..22: mol_type = other DNA
aagaaaatcaaacaggatatca

SEQ ID NO: 9829 - DNA, 22 bp, synthetic construct
  misc_feature 1..22: note = chemically synthesized
  source 1..22: mol_type = other DNA
gactgtaggcaaacagatacaa

SEQ ID NO: 9830 - DNA, 22 bp, synthetic construct
  misc_feature 1..22: note = chemically synthesized
  source 1..22: mol_type = other DNA
taggcaaacagatacaataaca

SEQ ID NO: 9831 - DNA, 22 bp, synthetic construct
  misc_feature 1..22: note = chemically synthesized
  source 1..22: mol_type = other DNA
gaaacatgtagaatattgatga

SEQ ID NO: 9832 - DNA, 22 bp, synthetic construct
  misc_feature 1..22: note = chemically synthesized
  source 1..22: mol_type = other DNA
atgatgggcacattggggctga

SEQ ID NO: 9833 - DNA, 22 bp, synthetic construct
  misc_feature 1..22: note = chemically synthesized
  source 1..22: mol_type = other DNA
gggctgatagtactattccttt

SEQ ID NO: 9834 - DNA, 22 bp, synthetic construct
  misc_feature 1..22: note = chemically synthesized
  source 1..22: mol_type = other DNA
atagtactattcctttttttca

SEQ ID NO: 9835 - DNA, 22 bp, synthetic construct
  misc_feature 1..22: note = chemically synthesized
  source 1..22: mol_type = other DNA
ttcctttttttcaatttttggt

SEQ ID NO: 9836 - DNA, 22 bp, synthetic construct
  misc_feature 1..22: note = chemically synthesized
  source 1..22: mol_type = other DNA
ctttttttcaatttttggtaag

SEQ ID NO: 9837 - DNA, 22 bp, synthetic construct
  misc_feature 1..22: note = chemically synthesized
  source 1..22: mol_type = other DNA
tttttcaatttttggtaagata

SEQ ID NO: 9838 - DNA, 22 bp, synthetic construct
  misc_feature 1..22: note = chemically synthesized
  source 1..22: mol_type = other DNA
ttttcaatttttggtaagatat

SEQ ID NO: 9839 - DNA, 22 bp, synthetic construct
  misc_feature 1..22: note = chemically synthesized
  source 1..22: mol_type = other DNA
tttcaatttttggtaagatata

SEQ ID NO: 9840 - DNA, 22 bp, synthetic construct
  misc_feature 1..22: note = chemically synthesized
  source 1..22: mol_type = other DNA
ttcaatttttggtaagatataa

SEQ ID NO: 9841 - DNA, 22 bp, synthetic construct
  misc_feature 1..22: note = chemically synthesized
  source 1..22: mol_type = other DNA
tcaatttttggtaagatataat

SEQ ID NO: 9842 - DNA, 22 bp, synthetic construct
  misc_feature 1..22: note = chemically synthesized
  source 1..22: mol_type = other DNA
caatttttggtaagatataatt

SEQ ID NO: 9843 - DNA, 22 bp, synthetic construct
  misc_feature 1..22: note = chemically synthesized
  source 1..22: mol_type = other DNA
aatttttggtaagatataatta

SEQ ID NO: 9844 - DNA, 22 bp, synthetic construct
  misc_feature 1..22: note = chemically synthesized
  source 1..22: mol_type = other DNA
ttggtaagatataattagcata

SEQ ID NO: 9845 - DNA, 22 bp, synthetic construct
  misc_feature 1..22: note = chemically synthesized
  source 1..22: mol_type = other DNA
tggtaagatataattagcatac

SEQ ID NO: 9846 - DNA, 22 bp, synthetic construct
  misc_feature 1..22: note = chemically synthesized
  source 1..22: mol_type = other DNA
ggtaagatataattagcatacc

SEQ ID NO: 9847 - DNA, 22 bp, synthetic construct
  misc_feature 1..22: note = chemically synthesized
  source 1..22: mol_type = other DNA
gtaagatataattagcatacca

SEQ ID NO: 9848 - DNA, 22 bp, synthetic construct
  misc_feature 1..22: note = chemically synthesized
  source 1..22: mol_type = other DNA
gcataccatataattcatctat

SEQ ID NO: 9849 - DNA, 22 bp, synthetic construct
  misc_feature 1..22: note = chemically synthesized
  source 1..22: mol_type = other DNA
atctatgtaaaatgcaaaaatt

SEQ ID NO: 9850 - DNA, 22 bp, synthetic construct
  misc_feature 1..22: note = chemically synthesized
  source 1..22: mol_type = other DNA
tgtaaaatgcaaaaattggccc

SEQ ID NO: 9851 - DNA, 22 bp, synthetic construct
  misc_feature 1..22: note = chemically synthesized
  source 1..22: mol_type = other DNA
gcccggctcagtggctcacgct

SEQ ID NO: 9852 - DNA, 22 bp, synthetic construct
  misc_feature 1..22: note = chemically synthesized
  source 1..22: mol_type = other DNA
agtggctcacgcttgtaatccc

SEQ ID NO: 9853 - DNA, 22 bp, synthetic construct
  misc_feature 1..22: note = chemically synthesized
  source 1..22: mol_type = other DNA
acgcttgtaatcccagcacttt

SEQ ID NO: 9854 - DNA, 22 bp, synthetic construct
  misc_feature 1..22: note = chemically synthesized
  source 1..22: mol_type = other DNA
gtaatcccagcactttgggcgg

SEQ ID NO: 9855 - DNA, 22 bp, synthetic construct
  misc_feature 1..22: note = chemically synthesized
  source 1..22: mol_type = other DNA
taatcccagcactttgggcggc

SEQ ID NO: 9856 - DNA, 22 bp, synthetic construct
  misc_feature 1..22: note = chemically synthesized
  source 1..22: mol_type = other DNA
tgggcggccgaggaaggcagat

SEQ ID NO: 9857 - DNA, 22 bp, synthetic construct
  misc_feature 1..22: note = chemically synthesized
  source 1..22: mol_type = other DNA
gggcggccgaggaaggcagatc

SEQ ID NO: 9858 - DNA, 22 bp, synthetic construct
  misc_feature 1..22: note = chemically synthesized
  source 1..22: mol_type = other DNA
ggcggccgaggaaggcagatca

SEQ ID NO: 9859 - DNA, 22 bp, synthetic construct
  misc_feature 1..22: note = chemically synthesized
  source 1..22: mol_type = other DNA
agatcaggggttcgagaccagc

SEQ ID NO: 9860 - DNA, 22 bp, synthetic construct
  misc_feature 1..22: note = chemically synthesized
  source 1..22: mol_type = other DNA
gagaccagcctggccaacatgg

SEQ ID NO: 9861 - DNA, 22 bp, synthetic construct
  misc_feature 1..22: note = chemically synthesized
  source 1..22: mol_type = other DNA
gccaacatggtgaaaccccgtc

SEQ ID NO: 9862 - DNA, 22 bp, synthetic construct
  misc_feature 1..22: note = chemically synthesized
  source 1..22: mol_type = other DNA
tactaaaaatacaaaaattagc

SEQ ID NO: 9863 - DNA, 22 bp, synthetic construct
  misc_feature 1..22: note = chemically synthesized
  source 1..22: mol_type = other DNA
actaaaaatacaaaaattagcc

SEQ ID NO: 9864 - DNA, 22 bp, synthetic construct
  misc_feature 1..22: note = chemically synthesized
  source 1..22: mol_type = other DNA
ctaaaaatacaaaaattagccg

SEQ ID NO: 9865 - DNA, 22 bp, synthetic construct
  misc_feature 1..22: note = chemically synthesized
  source 1..22: mol_type = other DNA
aaaatacaaaaattagccgggc

SEQ ID NO: 9866 - DNA, 22 bp, synthetic construct
  misc_feature 1..22: note = chemically synthesized
  source 1..22: mol_type = other DNA
gccgggcgtgatagcaggcaac

SEQ ID NO: 9867 - DNA, 22 bp, synthetic construct
  misc_feature 1..22: note = chemically synthesized
  source 1..22: mol_type = other DNA
taatcccagctacattagaggc

SEQ ID NO: 9868 - DNA, 22 bp, synthetic construct
  misc_feature 1..22: note = chemically synthesized
  source 1..22: mol_type = other DNA
cattagaggctgaggcaggaga

SEQ ID NO: 9869 - DNA, 22 bp, synthetic construct
  misc_feature 1..22: note = chemically synthesized
  source 1..22: mol_type = other DNA
gaggctgaggcaggagaatcgc

SEQ ID NO: 9870 - DNA, 22 bp, synthetic construct
  misc_feature 1..22: note = chemically synthesized
  source 1..22: mol_type = other DNA
aggcaggagaatcgcttgaacc

SEQ ID NO: 9871 - DNA, 22 bp, synthetic construct
  misc_feature 1..22: note = chemically synthesized
  source 1..22: mol_type = other DNA
gaacccgggaggcgtaggttgc

SEQ ID NO: 9872 - DNA, 22 bp, synthetic construct
  misc_feature 1..22: note = chemically synthesized
  source 1..22: mol_type = other DNA
aacccgggaggcgtaggttgca

SEQ ID NO: 9873 - DNA, 22 bp, synthetic construct
  misc_feature 1..22: note = chemically synthesized
  source 1..22: mol_type = other DNA
cagtgagctaagatcgtgccat

SEQ ID NO: 9874 - DNA, 22 bp, synthetic construct
  misc_feature 1..22: note = chemically synthesized
  source 1..22: mol_type = other DNA
agatcgtgccatcacactccag

SEQ ID NO: 9875 - DNA, 22 bp, synthetic construct
  misc_feature 1..22: note = chemically synthesized
  source 1..22: mol_type = other DNA
cagcatgggagacaagagcaag

SEQ ID NO: 9876 - DNA, 22 bp, synthetic construct
  misc_feature 1..22: note = chemically synthesized
  source 1..22: mol_type = other DNA
catctcaaaaaaaaaaaattag

SEQ ID NO: 9877 - DNA, 22 bp, synthetic construct
  misc_feature 1..22: note = chemically synthesized
  source 1..22: mol_type = other DNA
atctcaaaaaaaaaaaattagc

SEQ ID NO: 9878 - DNA, 22 bp, synthetic construct
  misc_feature 1..22: note = chemically synthesized
  source 1..22: mol_type = other DNA
aaaaaaaaaaaattagctgggt

SEQ ID NO: 9879 - DNA, 22 bp, synthetic construct
  misc_feature 1..22: note = chemically synthesized
  source 1..22: mol_type = other DNA
gctgggtgtggtggcatgcacc

SEQ ID NO: 9880 - DNA, 22 bp, synthetic construct
  misc_feature 1..22: note = chemically synthesized
  source 1..22: mol_type = other DNA
ggtgtggtggcatgcacctgta

SEQ ID NO: 9881 - DNA, 22 bp, synthetic construct
  misc_feature 1..22: note = chemically synthesized
  source 1..22: mol_type = other DNA
taattccagctactcgggaagc

SEQ ID NO: 9882 - DNA, 22 bp, synthetic construct
  misc_feature 1..22: note = chemically synthesized
  source 1..22: mol_type = other DNA
cagctactcgggaagctgagac

SEQ ID NO: 9883 - DNA, 22 bp, synthetic construct
  misc_feature 1..22: note = chemically synthesized
  source 1..22: mol_type = other DNA
ctcgggaagctgagacaggaga

SEQ ID NO: 9884 - DNA, 22 bp, synthetic construct
  misc_feature 1..22: note = chemically synthesized
  source 1..22: mol_type = other DNA
gggaagctgagacaggagaatc

SEQ ID NO: 9885 - DNA, 22 bp, synthetic construct
  misc_feature 1..22: note = chemically synthesized
  source 1..22: mol_type = other DNA
agacaggagaatcgcttgaacc

SEQ ID NO: 9886 - DNA, 22 bp, synthetic construct
  misc_feature 1..22: note = chemically synthesized
  source 1..22: mol_type = other DNA
gaacctgggaggcggaggttgt

SEQ ID NO: 9887 - DNA, 22 bp, synthetic construct
  misc_feature 1..22: note = chemically synthesized
  source 1..22: mol_type = other DNA
aacctgggaggcggaggttgtg

SEQ ID NO: 9888 - DNA, 22 bp, synthetic construct
  misc_feature 1..22: note = chemically synthesized
  source 1..22: mol_type = other DNA
ggaggcggaggttgtggtgagc

SEQ ID NO: 9889 - DNA, 22 bp, synthetic construct
  misc_feature 1..22: note = chemically synthesized
  source 1..22: mol_type = other DNA
tggtgagccgagatcatgccat

SEQ ID NO: 9890 - DNA, 22 bp, synthetic construct
  misc_feature 1..22: note = chemically synthesized
  source 1..22: mol_type = other DNA
cactccagcctgggcaacaaga

SEQ ID NO: 9891 - DNA, 22 bp, synthetic construct
  misc_feature 1..22: note = chemically synthesized
  source 1..22: mol_type = other DNA
cagcctgggcaacaagagcgaa

SEQ ID NO: 9892 - DNA, 22 bp, synthetic construct
  misc_feature 1..22: note = chemically synthesized
  source 1..22: mol_type = other DNA
ggcaacaagagcgaaactccgt

SEQ ID NO: 9893 - DNA, 22 bp, synthetic construct
  misc_feature 1..22: note = chemically synthesized
  source 1..22: mol_type = other DNA
cgtctcaaaaataaaataaata

SEQ ID NO: 9894 - DNA, 22 bp, synthetic construct
  misc_feature 1..22: note = chemically synthesized
  source 1..22: mol_type = other DNA
aaaaataaaataaataaaataa

SEQ ID NO: 9895 - DNA, 22 bp, synthetic construct
  misc_feature 1..22: note = chemically synthesized
  source 1..22: mol_type = other DNA
atggattttagtatatttacag

SEQ ID NO: 9896 - DNA, 22 bp, synthetic construct
  misc_feature 1..22: note = chemically synthesized
  source 1..22: mol_type = other DNA
tagtatatttacagagatgtgc

SEQ ID NO: 9897 - DNA, 22 bp, synthetic construct
  misc_feature 1..22: note = chemically synthesized
  source 1..22: mol_type = other DNA
agtatatttacagagatgtgca

SEQ ID NO: 9898 - DNA, 22 bp, synthetic construct
  misc_feature 1..22: note = chemically synthesized
  source 1..22: mol_type = other DNA
gtatatttacagagatgtgcaa

SEQ ID NO: 9899 - DNA, 22 bp, synthetic construct
  misc_feature 1..22: note = chemically synthesized
  source 1..22: mol_type = other DNA
acagagatgtgcaaccattacc

SEQ ID NO: 9900 - DNA, 22 bp, synthetic construct
  misc_feature 1..22: note = chemically synthesized
  source 1..22: mol_type = other DNA
cagagatgtgcaaccattacca

SEQ ID NO: 9901 - DNA, 22 bp, synthetic construct
  misc_feature 1..22: note = chemically synthesized
  source 1..22: mol_type = other DNA
ccaaaattttacatttctatct

SEQ ID NO: 9902 - DNA, 22 bp, synthetic construct
  misc_feature 1..22: note = chemically synthesized
  source 1..22: mol_type = other DNA
tacatttctatctccccaaaaa

SEQ ID NO: 9903 - DNA, 22 bp, synthetic construct
  misc_feature 1..22: note = chemically synthesized
  source 1..22: mol_type = other DNA
acatttctatctccccaaaaag

SEQ ID NO: 9904 - DNA, 22 bp, synthetic construct
  misc_feature 1..22: note = chemically synthesized
  source 1..22: mol_type = other DNA
catttctatctccccaaaaaga

SEQ ID NO: 9905 - DNA, 22 bp, synthetic construct
  misc_feature 1..22: note = chemically synthesized
  source 1..22: mol_type = other DNA
ctatctccccaaaaagaaacca

SEQ ID NO: 9906 - DNA, 22 bp, synthetic construct
  misc_feature 1..22: note = chemically synthesized
  source 1..22: mol_type = other DNA
tatctccccaaaaagaaaccat

SEQ ID NO: 9907 - DNA, 22 bp, synthetic construct
  misc_feature 1..22: note = chemically synthesized
  source 1..22: mol_type = other DNA
tctccccaaaaagaaaccatgt

SEQ ID NO: 9908 - DNA, 22 bp, synthetic construct
  misc_feature 1..22: note = chemically synthesized
  source 1..22: mol_type = other DNA
cccaaaaagaaaccatgttccc

SEQ ID NO: 9909 - DNA, 22 bp, synthetic construct
  misc_feature 1..22: note = chemically synthesized
  source 1..22: mol_type = other DNA
ccctaattcagtacccttaatt

SEQ ID NO: 9910 - DNA, 22 bp, synthetic construct
  misc_feature 1..22: note = chemically synthesized
  source 1..22: mol_type = other DNA
attcagtacccttaattcatcg

SEQ ID NO: 9911 - DNA, 22 bp, synthetic construct
  misc_feature 1..22: note = chemically synthesized
  source 1..22: mol_type = other DNA
agtacccttaattcatcgcctc

SEQ ID NO: 9912 - DNA, 22 bp, synthetic construct
  misc_feature 1..22: note = chemically synthesized
  source 1..22: mol_type = other DNA
aattcatcgcctcccagattcc

SEQ ID NO: 9913 - DNA, 22 bp, synthetic construct
  misc_feature 1..22: note = chemically synthesized
  source 1..22: mol_type = other DNA
attcatcgcctcccagattcct

SEQ ID NO: 9914 - DNA, 22 bp, synthetic construct
  misc_feature 1..22: note = chemically synthesized
  source 1..22: mol_type = other DNA
atcgcctcccagattcctccat

SEQ ID NO: 9915 - DNA, 22 bp, synthetic construct
  misc_feature 1..22: note = chemically synthesized
  source 1..22: mol_type = other DNA
ccagattcctccattctcctcc

SEQ ID NO: 9916 - DNA, 22 bp, synthetic construct
  misc_feature 1..22: note = chemically synthesized
  source 1..22: mol_type = other DNA
ctccattctcctcctcctcccc

SEQ ID NO: 9917 - DNA, 22 bp, synthetic construct
  misc_feature 1..22: note = chemically synthesized
  source 1..22: mol_type = other DNA
cattctcctcctcctcccctcc

SEQ ID NO: 9918 - DNA, 22 bp, synthetic construct
  misc_feature 1..22: note = chemically synthesized
  source 1..22: mol_type = other DNA
tcctcctcctcccctcccagcc

SEQ ID NO: 9919 - DNA, 22 bp, synthetic construct
  misc_feature 1..22: note = chemically synthesized
  source 1..22: mol_type = other DNA
ctcctcctcccctcccagccct

SEQ ID NO: 9920 - DNA, 22 bp, synthetic construct
  misc_feature 1..22: note = chemically synthesized
  source 1..22: mol_type = other DNA
ctcctcccctcccagccctaga

SEQ ID NO: 9921 - DNA, 22 bp, synthetic construct
  misc_feature 1..22: note = chemically synthesized
  source 1..22: mol_type = other DNA
ctcccctcccagccctagacaa

SEQ ID NO: 9922 - DNA, 22 bp, synthetic construct
  misc_feature 1..22: note = chemically synthesized
  source 1..22: mol_type = other DNA
ccctcccagccctagacaatct

SEQ ID NO: 9923 - DNA, 22 bp, synthetic construct
  misc_feature 1..22: note = chemically synthesized
  source 1..22: mol_type = other DNA
ccagccctagacaatctttaat

SEQ ID NO: 9924 - DNA, 22 bp, synthetic construct
  misc_feature 1..22: note = chemically synthesized
  source 1..22: mol_type = other DNA
gacaatctttaatctactttct

SEQ ID NO: 9925 - DNA, 22 bp, synthetic construct
  misc_feature 1..22: note = chemically synthesized
  source 1..22: mol_type = other DNA
taatctactttctttctatttg

SEQ ID NO: 9926 - DNA, 22 bp, synthetic construct
  misc_feature 1..22: note = chemically synthesized
  source 1..22: mol_type = other DNA
aatctactttctttctatttgg

SEQ ID NO: 9927 - DNA, 22 bp, synthetic construct
  misc_feature 1..22: note = chemically synthesized
  source 1..22: mol_type = other DNA
atctactttctttctatttgga

SEQ ID NO: 9928 - DNA, 22 bp, synthetic construct
  misc_feature 1..22: note = chemically synthesized
  source 1..22: mol_type = other DNA
ctttctttctatttggaacatt

SEQ ID NO: 9929 - DNA, 22 bp, synthetic construct
  misc_feature 1..22: note = chemically synthesized
  source 1..22: mol_type = other DNA
tctttctatttggaacatttag

SEQ ID NO: 9930 - DNA, 22 bp, synthetic construct
  misc_feature 1..22: note = chemically synthesized
  source 1..22: mol_type = other DNA
ctttctatttggaacatttagt

SEQ ID NO: 9931 - DNA, 22 bp, synthetic construct
  misc_feature 1..22: note = chemically synthesized
  source 1..22: mol_type = other DNA
tttctatttggaacatttagta

SEQ ID NO: 9932 - DNA, 22 bp, synthetic construct
  misc_feature 1..22: note = chemically synthesized
  source 1..22: mol_type = other DNA
tctatttggaacatttagtata

SEQ ID NO: 9933 - DNA, 22 bp, synthetic construct
  misc_feature 1..22: note = chemically synthesized
  source 1..22: mol_type = other DNA
ctatttggaacatttagtatac

SEQ ID NO: 9934 - DNA, 22 bp, synthetic construct
  misc_feature 1..22: note = chemically synthesized
  source 1..22: mol_type = other DNA
tatttggaacatttagtataca

SEQ ID NO: 9935 - DNA, 22 bp, synthetic construct
  misc_feature 1..22: note = chemically synthesized
  source 1..22: mol_type = other DNA
tttggaacatttagtatacata

SEQ ID NO: 9936 - DNA, 22 bp, synthetic construct
  misc_feature 1..22: note = chemically synthesized
  source 1..22: mol_type = other DNA
ggaacatttagtatacatagag

SEQ ID NO: 9937 - DNA, 22 bp, synthetic construct
  misc_feature 1..22: note = chemically synthesized
  source 1..22: mol_type = other DNA
gaacatttagtatacatagagg

SEQ ID NO: 9938 - DNA, 22 bp, synthetic construct
  misc_feature 1..22: note = chemically synthesized
  source 1..22: mol_type = other DNA
agtatacatagaggcatataat

SEQ ID NO: 9939 - DNA, 22 bp, synthetic construct
  misc_feature 1..22: note = chemically synthesized
  source 1..22: mol_type = other DNA
gtatacatagaggcatataata

SEQ ID NO: 9940 - DNA, 22 bp, synthetic construct
  misc_feature 1..22: note = chemically synthesized
  source 1..22: mol_type = other DNA
ctttgccgtgactggcttcttt

SEQ ID NO: 9941 - DNA, 22 bp, synthetic construct
  misc_feature 1..22: note = chemically synthesized
  source 1..22: mol_type = other DNA
tgccgtgactggcttctttcat

SEQ ID NO: 9942 - DNA, 22 bp, synthetic construct
  misc_feature 1..22: note = chemically synthesized
  source 1..22: mol_type = other DNA
gccgtgactggcttctttcatt

SEQ ID NO: 9943 - DNA, 22 bp, synthetic construct
  misc_feature 1..22: note = chemically synthesized
  source 1..22: mol_type = other DNA
ccgtgactggcttctttcattt

SEQ ID NO: 9944 - DNA, 22 bp, synthetic construct
  misc_feature 1..22: note = chemically synthesized
  source 1..22: mol_type = other DNA
gcttctttcatttagcataatg

SEQ ID NO: 9945 - DNA, 22 bp, synthetic construct
  misc_feature 1..22: note = chemically synthesized
  source 1..22: mol_type = other DNA
ctttcatttagcataatgtttt

SEQ ID NO: 9946 - DNA, 22 bp, synthetic construct
  misc_feature 1..22: note = chemically synthesized
  source 1..22: mol_type = other DNA
tttcatttagcataatgttttt

SEQ ID NO: 9947 - DNA, 22 bp, synthetic construct
  misc_feature 1..22: note = chemically synthesized
  source 1..22: mol_type = other DNA
tcatttagcataatgtttttat

SEQ ID NO: 9948 - DNA, 22 bp, synthetic construct
  misc_feature 1..22: note = chemically synthesized
  source 1..22: mol_type = other DNA
catttagcataatgtttttatg

SEQ ID NO: 9949 - DNA, 22 bp, synthetic construct
  misc_feature 1..22: note = chemically synthesized
  source 1..22: mol_type = other DNA
atttagcataatgtttttatgt

SEQ ID NO: 9950 - DNA, 22 bp, synthetic construct
  misc_feature 1..22: note = chemically synthesized
  source 1..22: mol_type = other DNA
agcataatgtttttatgtatgt

SEQ ID NO: 9951 - DNA, 22 bp, synthetic construct
  misc_feature 1..22: note = chemically synthesized
  source 1..22: mol_type = other DNA
gcataatgtttttatgtatgtt

SEQ ID NO: 9952 - DNA, 22 bp, synthetic construct
  misc_feature 1..22: note = chemically synthesized
  source 1..22: mol_type = other DNA
ttatgtatgtttttcatggacc

SEQ ID NO: 9953 - DNA, 22 bp, synthetic construct
  misc_feature 1..22: note = chemically synthesized
  source 1..22: mol_type = other DNA
tatgtatgtttttcatggacca

SEQ ID NO: 9954 - DNA, 22 bp, synthetic construct
  misc_feature 1..22: note = chemically synthesized
  source 1..22: mol_type = other DNA
atgtatgtttttcatggaccaa

SEQ ID NO: 9955 - DNA, 22 bp, synthetic construct
  misc_feature 1..22: note = chemically synthesized
  source 1..22: mol_type = other DNA
tgtatgtttttcatggaccaat

SEQ ID NO: 9956 - DNA, 22 bp, synthetic construct
  misc_feature 1..22: note = chemically synthesized
  source 1..22: mol_type = other DNA
ttcatggaccaataatatctat

SEQ ID NO: 9957 - DNA, 22 bp, synthetic construct
  misc_feature 1..22: note = chemically synthesized
  source 1..22: mol_type = other DNA
tcatggaccaataatatctatt

SEQ ID NO: 9958 - DNA, 22 bp, synthetic construct
  misc_feature 1..22: note = chemically synthesized
  source 1..22: mol_type = other DNA
catggaccaataatatctatta

SEQ ID NO: 9959 - DNA, 22 bp, synthetic construct
  misc_feature 1..22: note = chemically synthesized
  source 1..22: mol_type = other DNA
atggaccaataatatctattat

SEQ ID NO: 9960 - DNA, 22 bp, synthetic construct
  misc_feature 1..22: note = chemically synthesized
  source 1..22: mol_type = other DNA
ttataaggacataccacaacat

SEQ ID NO: 9961 - DNA, 22 bp, synthetic construct
  misc_feature 1..22: note = chemically synthesized
  source 1..22: mol_type = other DNA
taaggacataccacaacatatt

SEQ ID NO: 9962 - DNA, 22 bp, synthetic construct
  misc_feature 1..22: note = chemically synthesized
  source 1..22: mol_type = other DNA
tatttattcattcatcagccga

SEQ ID NO: 9963 - DNA, 22 bp, synthetic construct
  misc_feature 1..22: note = chemically synthesized
  source 1..22: mol_type = other DNA
atttattcattcatcagccgat

SEQ ID NO: 9964 - DNA, 22 bp, synthetic construct
  misc_feature 1..22: note = chemically synthesized
  source 1..22: mol_type = other DNA
tttattcattcatcagccgatg

SEQ ID NO: 9965 - DNA, 22 bp, synthetic construct
  misc_feature 1..22: note = chemically synthesized
  source 1..22: mol_type = other DNA
attcattcatcagccgatggac

SEQ ID NO: 9966 - DNA, 22 bp, synthetic construct
  misc_feature 1..22: note = chemically synthesized
  source 1..22: mol_type = other DNA
ttcattcatcagccgatggaca

SEQ ID NO: 9967 - DNA, 22 bp, synthetic construct
  misc_feature 1..22: note = chemically synthesized
  source 1..22: mol_type = other DNA
attcatcagccgatggacattg

SEQ ID NO: 9968 - DNA, 22 bp, synthetic construct
  misc_feature 1..22: note = chemically synthesized
  source 1..22: mol_type = other DNA
atcagccgatggacattggttt

SEQ ID NO: 9969 - DNA, 22 bp, synthetic construct
  misc_feature 1..22: note = chemically synthesized
  source 1..22: mol_type = other DNA
gtttgtttctactttatggcta

SEQ ID NO: 9970 - DNA, 22 bp, synthetic construct
  misc_feature 1..22: note = chemically synthesized
  source 1..22: mol_type = other DNA
gtttctactttatggctattgg

SEQ ID NO: 9971 - DNA, 22 bp, synthetic construct
  misc_feature 1..22: note = chemically synthesized
  source 1..22: mol_type = other DNA
tttctactttatggctattggg

SEQ ID NO: 9972 - DNA, 22 bp, synthetic construct
  misc_feature 1..22: note = chemically synthesized
  source 1..22: mol_type = other DNA
ctactttatggctattgggaat

SEQ ID NO: 9973 - DNA, 22 bp, synthetic construct
  misc_feature 1..22: note = chemically synthesized
  source 1..22: mol_type = other DNA
tactttatggctattgggaata

SEQ ID NO: 9974 - DNA, 22 bp, synthetic construct
  misc_feature 1..22: note = chemically synthesized
  source 1..22: mol_type = other DNA
ctttatggctattgggaatagt

SEQ ID NO: 9975 - DNA, 22 bp, synthetic construct
  misc_feature 1..22: note = chemically synthesized
  source 1..22: mol_type = other DNA
tatggctattgggaatagtgct

SEQ ID NO: 9976 - DNA, 22 bp, synthetic construct
  misc_feature 1..22: note = chemically synthesized
  source 1..22: mol_type = other DNA
atggctattgggaatagtgctg

SEQ ID NO: 9977 - DNA, 22 bp, synthetic construct
  misc_feature 1..22: note = chemically synthesized
  source 1..22: mol_type = other DNA
tggctattgggaatagtgctgt

SEQ ID NO: 9978 - DNA, 22 bp, synthetic construct
  misc_feature 1..22: note = chemically synthesized
  source 1..22: mol_type = other DNA
ttgggaatagtgctgttataaa

SEQ ID NO: 9979 - DNA, 22 bp, synthetic construct
  misc_feature 1..22: note = chemically synthesized
  source 1..22: mol_type = other DNA
ggaatagtgctgttataaacat

SEQ ID NO: 9980 - DNA, 22 bp, synthetic construct
  misc_feature 1..22: note = chemically synthesized
  source 1..22: mol_type = other DNA
ttataaacatttatgtacaagt

SEQ ID NO: 9981 - DNA, 22 bp, synthetic construct
  misc_feature 1..22: note = chemically synthesized
  source 1..22: mol_type = other DNA
taaacatttatgtacaagtttt

SEQ ID NO: 9982 - DNA, 22 bp, synthetic construct
  misc_feature 1..22: note = chemically synthesized
  source 1..22: mol_type = other DNA
atgtacaagtttttttgtagac

SEQ ID NO: 9983 - DNA, 22 bp, synthetic construct
  misc_feature 1..22: note = chemically synthesized
  source 1..22: mol_type = other DNA
tgtacaagtttttttgtagact

SEQ ID NO: 9984 - DNA, 22 bp, synthetic construct
  misc_feature 1..22: note = chemically synthesized
  source 1..22: mol_type = other DNA
ttttgtagacttatgttttgat

SEQ ID NO: 9985 - DNA, 22 bp, synthetic construct
  misc_feature 1..22: note = chemically synthesized
  source 1..22: mol_type = other DNA
tttgtagacttatgttttgatt

SEQ ID NO: 9986 - DNA, 22 bp, synthetic construct
  misc_feature 1..22: note = chemically synthesized
  source 1..22: mol_type = other DNA
ttgtagacttatgttttgattt

SEQ ID NO: 9987 - DNA, 22 bp, synthetic construct
  misc_feature 1..22: note = chemically synthesized
  source 1..22: mol_type = other DNA
tgtagacttatgttttgatttc

SEQ ID NO: 9988 - DNA, 22 bp, synthetic construct
  misc_feature 1..22: note = chemically synthesized
  source 1..22: mol_type = other DNA
gtagacttatgttttgatttct

SEQ ID NO: 9989 - DNA, 22 bp, synthetic construct
  misc_feature 1..22: note = chemically synthesized
  source 1..22: mol_type = other DNA
tagacttatgttttgatttctt

SEQ ID NO: 9990 - DNA, 22 bp, synthetic construct
  misc_feature 1..22: note = chemically synthesized
  source 1..22: mol_type = other DNA
atgttttgatttcttttggtta

SEQ ID NO: 9991 - DNA, 22 bp, synthetic construct
  misc_feature 1..22: note = chemically synthesized
  source 1..22: mol_type = other DNA
tgttttgatttcttttggttat

SEQ ID NO: 9992 - DNA, 22 bp, synthetic construct
  misc_feature 1..22: note = chemically synthesized
  source 1..22: mol_type = other DNA
tgatttcttttggttatatatc

SEQ ID NO: 9993 - DNA, 22 bp, synthetic construct
  misc_feature 1..22: note = chemically synthesized
  source 1..22: mol_type = other DNA
gatttcttttggttatatatct

SEQ ID NO: 9994 - DNA, 22 bp, synthetic construct
  misc_feature 1..22: note = chemically synthesized
  source 1..22: mol_type = other DNA
atttcttttggttatatatcta

SEQ ID NO: 9995 - DNA, 22 bp, synthetic construct
  misc_feature 1..22: note = chemically synthesized
  source 1..22: mol_type = other DNA
cttttggttatatatctagaag

SEQ ID NO: 9996 - DNA, 22 bp, synthetic construct
  misc_feature 1..22: note = chemically synthesized
  source 1..22: mol_type = other DNA
ttttggttatatatctagaagt

SEQ ID NO: 9997 - DNA, 22 bp, synthetic construct
  misc_feature 1..22: note = chemically synthesized
  source 1..22: mol_type = other DNA
ttggttatatatctagaagtgg

SEQ ID NO: 9998 - DNA, 22 bp, synthetic construct
  misc_feature 1..22: note = chemically synthesized
  source 1..22: mol_type = other DNA
tggttatatatctagaagtggg

SEQ ID NO: 9999 - DNA, 22 bp, synthetic construct
  misc_feature 1..22: note = chemically synthesized
  source 1..22: mol_type = other DNA
ggttatatatctagaagtgggt

SEQ ID NO: 10000 - DNA, 22 bp, synthetic construct
  misc_feature 1..22: note = chemically synthesized
  source 1..22: mol_type = other DNA
gttatatatctagaagtgggtt

SEQ ID NO: 10001 - DNA, 22 bp, synthetic construct
  misc_feature 1..22: note = chemically synthesized
  source 1..22: mol_type = other DNA
tatatctagaagtgggtttgct

SEQ ID NO: 10002 - DNA, 22 bp, synthetic construct
  misc_feature 1..22: note = chemically synthesized
  source 1..22: mol_type = other DNA
gaagtgggtttgctgggtcata

SEQ ID NO: 10003 - DNA, 22 bp, synthetic construct
  misc_feature 1..22: note = chemically synthesized
  source 1..22: mol_type = other DNA
gctgggtcatatggtaacactg

SEQ ID NO: 10004 - DNA, 22 bp, synthetic construct
  misc_feature 1..22: note = chemically synthesized
  source 1..22: mol_type = other DNA
ctgggtcatatggtaacactgt

SEQ ID NO: 10005 - DNA, 22 bp, synthetic construct
  misc_feature 1..22: note = chemically synthesized
  source 1..22: mol_type = other DNA
ggtcatatggtaacactgttta

SEQ ID NO: 10006 - DNA, 22 bp, synthetic construct
  misc_feature 1..22: note = chemically synthesized
  source 1..22: mol_type = other DNA
tttaaccttttgaggaattgcc

SEQ ID NO: 10007 - DNA, 22 bp, synthetic construct
  misc_feature 1..22: note = chemically synthesized
  source 1..22: mol_type = other DNA
aaccttttgaggaattgccaca

SEQ ID NO: 10008 - DNA, 22 bp, synthetic construct
  misc_feature 1..22: note = chemically synthesized
  source 1..22: mol_type = other DNA
accttttgaggaattgccacat

SEQ ID NO: 10009 - DNA, 22 bp, synthetic construct
  misc_feature 1..22: note = chemically synthesized
  source 1..22: mol_type = other DNA
ttgaggaattgccacattcttt

SEQ ID NO: 10010 - DNA, 22 bp, synthetic construct
  misc_feature 1..22: note = chemically synthesized
  source 1..22: mol_type = other DNA
tgaggaattgccacattctttt

SEQ ID NO: 10011 - DNA, 22 bp, synthetic construct
  misc_feature 1..22: note = chemically synthesized
  source 1..22: mol_type = other DNA
gaggaattgccacattcttttc

SEQ ID NO: 10012 - DNA, 22 bp, synthetic construct
  misc_feature 1..22: note = chemically synthesized
  source 1..22: mol_type = other DNA
aggaattgccacattcttttcc

SEQ ID NO: 10013 - DNA, 22 bp, synthetic construct
  misc_feature 1..22: note = chemically synthesized
  source 1..22: mol_type = other DNA
ccacattcttttccaaagtaag

SEQ ID NO: 10014 - DNA, 22 bp, synthetic construct
  misc_feature 1..22: note = chemically synthesized
  source 1..22: mol_type = other DNA
ttttccaaagtaagcattttat

SEQ ID NO: 10015 - DNA, 22 bp, synthetic construct
  misc_feature 1..22: note = chemically synthesized
  source 1..22: mol_type = other DNA
ttccaaagtaagcattttatcc

SEQ ID NO: 10016 - DNA, 22 bp, synthetic construct
  misc_feature 1..22: note = chemically synthesized
  source 1..22: mol_type = other DNA
tccaaagtaagcattttatcct

SEQ ID NO: 10017 - DNA, 22 bp, synthetic construct
  misc_feature 1..22: note = chemically synthesized
  source 1..22: mol_type = other DNA
ccaaagtaagcattttatcctc

SEQ ID NO: 10018 - DNA, 22 bp, synthetic construct
  misc_feature 1..22: note = chemically synthesized
  source 1..22: mol_type = other DNA
caaagtaagcattttatcctcc

SEQ ID NO: 10019 - DNA, 22 bp, synthetic construct
  misc_feature 1..22: note = chemically synthesized
  source 1..22: mol_type = other DNA
tatcctcctatcagcagtgtat

SEQ ID NO: 10020 - DNA, 22 bp, synthetic construct
  misc_feature 1..22: note = chemically synthesized
  source 1..22: mol_type = other DNA
atcctcctatcagcagtgtatg

SEQ ID NO: 10021 - DNA, 22 bp, synthetic construct
  misc_feature 1..22: note = chemically synthesized
  source 1..22: mol_type = other DNA
tcctcctatcagcagtgtatga

SEQ ID NO: 10022 - DNA, 22 bp, synthetic construct
  misc_feature 1..22: note = chemically synthesized
  source 1..22: mol_type = other DNA
ctatcagcagtgtatgagagtt

SEQ ID NO: 10023 - DNA, 22 bp, synthetic construct
  misc_feature 1..22: note = chemically synthesized
  source 1..22: mol_type = other DNA
tcagcagtgtatgagagttctg

SEQ ID NO: 10024 - DNA, 22 bp, synthetic construct
  misc_feature 1..22: note = chemically synthesized
  source 1..22: mol_type = other DNA
tgatttctctccatctttgcct

SEQ ID NO: 10025 - DNA, 22 bp, synthetic construct
  misc_feature 1..22: note = chemically synthesized
  source 1..22: mol_type = other DNA
atttctctccatctttgcctgg

SEQ ID NO: 10026 - DNA, 22 bp, synthetic construct
  misc_feature 1..22: note = chemically synthesized
  source 1..22: mol_type = other DNA
ctctccatctttgcctgggttt

SEQ ID NO: 10027 - DNA, 22 bp, synthetic construct
  misc_feature 1..22: note = chemically synthesized
  source 1..22: mol_type = other DNA
tctccatctttgcctgggtttt

SEQ ID NO: 10028 - DNA, 22 bp, synthetic construct
  misc_feature 1..22: note = chemically synthesized
  source 1..22: mol_type = other DNA
tccatctttgcctgggtttttg

SEQ ID NO: 10029 - DNA, 22 bp, synthetic construct
  misc_feature 1..22: note = chemically synthesized
  source 1..22: mol_type = other DNA
catctttgcctgggtttttgaa

SEQ ID NO: 10030 - DNA, 22 bp, synthetic construct
  misc_feature 1..22: note = chemically synthesized
  source 1..22: mol_type = other DNA
tgcctgggtttttgaatcaggg

SEQ ID NO: 10031 - DNA, 22 bp, synthetic construct
  misc_feature 1..22: note = chemically synthesized
  source 1..22: mol_type = other DNA
gcctgggtttttgaatcagggc

SEQ ID NO: 10032 - DNA, 22 bp, synthetic construct
  misc_feature 1..22: note = chemically synthesized
  source 1..22: mol_type = other DNA
cctgggtttttgaatcagggcc

SEQ ID NO: 10033 - DNA, 22 bp, synthetic construct
  misc_feature 1..22: note = chemically synthesized
  source 1..22: mol_type = other DNA
ggtttttgaatcagggccccag

SEQ ID NO: 10034 - DNA, 22 bp, synthetic construct
  misc_feature 1..22: note = chemically synthesized
  source 1..22: mol_type = other DNA
ttgaatcagggccccagataga

SEQ ID NO: 10035 - DNA, 22 bp, synthetic construct
  misc_feature 1..22: note = chemically synthesized
  source 1..22: mol_type = other DNA
tgaatcagggccccagatagaa

SEQ ID NO: 10036 - DNA, 22 bp, synthetic construct
  misc_feature 1..22: note = chemically synthesized
  source 1..22: mol_type = other DNA
gaatcagggccccagatagaac

SEQ ID NO: 10037 - DNA, 22 bp, synthetic construct
  misc_feature 1..22: note = chemically synthesized
  source 1..22: mol_type = other DNA
aatcagggccccagatagaaca

SEQ ID NO: 10038 - DNA, 22 bp, synthetic construct
  misc_feature 1..22: note = chemically synthesized
  source 1..22: mol_type = other DNA
ttcagttgttccaccatcactt

SEQ ID NO: 10039 - DNA, 22 bp, synthetic construct
  misc_feature 1..22: note = chemically synthesized
  source 1..22: mol_type = other DNA
agttgttccaccatcacttgtt

SEQ ID NO: 10040 - DNA, 22 bp, synthetic construct
  misc_feature 1..22: note = chemically synthesized
  source 1..22: mol_type = other DNA
ttccaccatcacttgttgagaa

SEQ ID NO: 10041 - DNA, 22 bp, synthetic construct
  misc_feature 1..22: note = chemically synthesized
  source 1..22: mol_type = other DNA
caccatcacttgttgagaagac

SEQ ID NO: 10042 - DNA, 22 bp, synthetic construct
  misc_feature 1..22: note = chemically synthesized
  source 1..22: mol_type = other DNA
gttgagaagactcttttttcat

SEQ ID NO: 10043 - DNA, 22 bp, synthetic construct
  misc_feature 1..22: note = chemically synthesized
  source 1..22: mol_type = other DNA
ttgagaagactcttttttcatt

SEQ ID NO: 10044 - DNA, 22 bp, synthetic construct
  misc_feature 1..22: note = chemically synthesized
  source 1..22: mol_type = other DNA
agaagactcttttttcattgaa

SEQ ID NO: 10045 - DNA, 22 bp, synthetic construct
  misc_feature 1..22: note = chemically synthesized
  source 1..22: mol_type = other DNA
ttttttcattgaagtgttttgg

SEQ ID NO: 10046 - DNA, 22 bp, synthetic construct
  misc_feature 1..22: note = chemically synthesized
  source 1..22: mol_type = other DNA
ttttcattgaagtgttttggca

SEQ ID NO: 10047 - DNA, 22 bp, synthetic construct
  misc_feature 1..22: note = chemically synthesized
  source 1..22: mol_type = other DNA
tttcattgaagtgttttggcac

SEQ ID NO: 10048 - DNA, 22 bp, synthetic construct
  misc_feature 1..22: note = chemically synthesized
  source 1..22: mol_type = other DNA
ttcattgaagtgttttggcacc

SEQ ID NO: 10049 - DNA, 22 bp, synthetic construct
  misc_feature 1..22: note = chemically synthesized
  source 1..22: mol_type = other DNA
tcattgaagtgttttggcaccc

SEQ ID NO: 10050 - DNA, 22 bp, synthetic construct
  misc_feature 1..22: note = chemically synthesized
  source 1..22: mol_type = other DNA
cattgaagtgttttggcaccct

SEQ ID NO: 10051 - DNA, 22 bp, synthetic construct
  misc_feature 1..22: note = chemically synthesized
  source 1..22: mol_type = other DNA
attgaagtgttttggcaccctt

SEQ ID NO: 10052 - DNA, 22 bp, synthetic construct
  misc_feature 1..22: note = chemically synthesized
  source 1..22: mol_type = other DNA
aagtgttttggcacccttatca

SEQ ID NO: 10053 - DNA, 22 bp, synthetic construct
  misc_feature 1..22: note = chemically synthesized
  source 1..22: mol_type = other DNA
tggcacccttatcaaaaatcaa

SEQ ID NO: 10054 - DNA, 22 bp, synthetic construct
  misc_feature 1..22: note = chemically synthesized
  source 1..22: mol_type = other DNA
ggcacccttatcaaaaatcaat

SEQ ID NO: 10055 - DNA, 22 bp, synthetic construct
  misc_feature 1..22: note = chemically synthesized
  source 1..22: mol_type = other DNA
gcacccttatcaaaaatcaatc

SEQ ID NO: 10056 - DNA, 22 bp, synthetic construct
  misc_feature 1..22: note = chemically synthesized
  source 1..22: mol_type = other DNA
atcaaaaatcaatctaccataa

SEQ ID NO: 10057 - DNA, 22 bp, synthetic construct
  misc_feature 1..22: note = chemically synthesized
  source 1..22: mol_type = other DNA
tcaaaaatcaatctaccataaa

SEQ ID NO: 10058 - DNA, 22 bp, synthetic construct
  misc_feature 1..22: note = chemically synthesized
  source 1..22: mol_type = other DNA
ccataaatgtgagagtttattt

SEQ ID NO: 10059 - DNA, 22 bp, synthetic construct
  misc_feature 1..22: note = chemically synthesized
  source 1..22: mol_type = other DNA
atttctggagtctcaattttat

SEQ ID NO: 10060 - DNA, 22 bp, synthetic construct
  misc_feature 1..22: note = chemically synthesized
  source 1..22: mol_type = other DNA
tttctggagtctcaattttatc

SEQ ID NO: 10061 - DNA, 22 bp, synthetic construct
  misc_feature 1..22: note = chemically synthesized
  source 1..22: mol_type = other DNA
ctggagtctcaattttatccca

SEQ ID NO: 10062 - DNA, 22 bp, synthetic construct
  misc_feature 1..22: note = chemically synthesized
  source 1..22: mol_type = other DNA
tggagtctcaattttatcccat

SEQ ID NO: 10063 - DNA, 22 bp, synthetic construct
  misc_feature 1..22: note = chemically synthesized
  source 1..22: mol_type = other DNA
gagtctcaattttatcccatta

SEQ ID NO: 10064 - DNA, 22 bp, synthetic construct
  misc_feature 1..22: note = chemically synthesized
  source 1..22: mol_type = other DNA
aattttatcccattatgctata

SEQ ID NO: 10065 - DNA, 22 bp, synthetic construct
  misc_feature 1..22: note = chemically synthesized
  source 1..22: mol_type = other DNA
tatcccattatgctataatcta

SEQ ID NO: 10066 - DNA, 22 bp, synthetic construct
  misc_feature 1..22: note = chemically synthesized
  source 1..22: mol_type = other DNA
atcccattatgctataatctat

SEQ ID NO: 10067 - DNA, 22 bp, synthetic construct
  misc_feature 1..22: note = chemically synthesized
  source 1..22: mol_type = other DNA
tcccattatgctataatctata

SEQ ID NO: 10068 - DNA, 22 bp, synthetic construct
  misc_feature 1..22: note = chemically synthesized
  source 1..22: mol_type = other DNA
tgctataatctataatcctatc

SEQ ID NO: 10069 - DNA, 22 bp, synthetic construct
  misc_feature 1..22: note = chemically synthesized
  source 1..22: mol_type = other DNA
taatctataatcctatcttttt

SEQ ID NO: 10070 - DNA, 22 bp, synthetic construct
  misc_feature 1..22: note = chemically synthesized
  source 1..22: mol_type = other DNA
taatcctatctttttttttttt

SEQ ID NO: 10071 - DNA, 22 bp, synthetic construct
  misc_feature 1..22: note = chemically synthesized
  source 1..22: mol_type = other DNA
tctttttttttttttgacagag

SEQ ID NO: 10072 - DNA, 22 bp, synthetic construct
  misc_feature 1..22: note = chemically synthesized
  source 1..22: mol_type = other DNA
tttttttttttgacagagcctc

SEQ ID NO: 10073 - DNA, 22 bp, synthetic construct
  misc_feature 1..22: note = chemically synthesized
  source 1..22: mol_type = other DNA
ttttttttttgacagagcctca

SEQ ID NO: 10074 - DNA, 22 bp, synthetic construct
  misc_feature 1..22: note = chemically synthesized
  source 1..22: mol_type = other DNA
tttttttttgacagagcctcac

SEQ ID NO: 10075 - DNA, 22 bp, synthetic construct
  misc_feature 1..22: note = chemically synthesized
  source 1..22: mol_type = other DNA
ttttttttgacagagcctcact

SEQ ID NO: 10076 - DNA, 22 bp, synthetic construct
  misc_feature 1..22: note = chemically synthesized
  source 1..22: mol_type = other DNA
tttttttgacagagcctcactc

SEQ ID NO: 10077 - DNA, 22 bp, synthetic construct
  misc_feature 1..22: note = chemically synthesized
  source 1..22: mol_type = other DNA
ttttttgacagagcctcactct

SEQ ID NO: 10078 - DNA, 22 bp, synthetic construct
  misc_feature 1..22: note = chemically synthesized
  source 1..22: mol_type = other DNA
tttttgacagagcctcactcta

SEQ ID NO: 10079 - DNA, 22 bp, synthetic construct
  misc_feature 1..22: note = chemically synthesized
  source 1..22: mol_type = other DNA
ttttgacagagcctcactctat

SEQ ID NO: 10080 - DNA, 22 bp, synthetic construct
  misc_feature 1..22: note = chemically synthesized
  source 1..22: mol_type = other DNA
tttgacagagcctcactctatt

SEQ ID NO: 10081 - DNA, 22 bp, synthetic construct
  misc_feature 1..22: note = chemically synthesized
  source 1..22: mol_type = other DNA
ttgacagagcctcactctattg

SEQ ID NO: 10082 - DNA, 22 bp, synthetic construct
  misc_feature 1..22: note = chemically synthesized
  source 1..22: mol_type = other DNA
tgacagagcctcactctattgc

SEQ ID NO: 10083 - DNA, 22 bp, synthetic construct
  misc_feature 1..22: note = chemically synthesized
  source 1..22: mol_type = other DNA
gacagagcctcactctattgcc

SEQ ID NO: 10084 - DNA, 22 bp, synthetic construct
  misc_feature 1..22: note = chemically synthesized
  source 1..22: mol_type = other DNA
acagagcctcactctattgccc

SEQ ID NO: 10085 - DNA, 22 bp, synthetic construct
  misc_feature 1..22: note = chemically synthesized
  source 1..22: mol_type = other DNA
actctattgcccaggttggagt

SEQ ID NO: 10086 - DNA, 22 bp, synthetic construct
  misc_feature 1..22: note = chemically synthesized
  source 1..22: mol_type = other DNA
tattgcccaggttggagtgcag

SEQ ID NO: 10087 - DNA, 22 bp, synthetic construct
  misc_feature 1..22: note = chemically synthesized
  source 1..22: mol_type = other DNA
ttgcccaggttggagtgcagtg

SEQ ID NO: 10088 - DNA, 22 bp, synthetic construct
  misc_feature 1..22: note = chemically synthesized
  source 1..22: mol_type = other DNA
cccaggttggagtgcagtggcc

SEQ ID NO: 10089 - DNA, 22 bp, synthetic construct
  misc_feature 1..22: note = chemically synthesized
  source 1..22: mol_type = other DNA
gagtgcagtggcccaatcccgg

SEQ ID NO: 10090 - DNA, 22 bp, synthetic construct
  misc_feature 1..22: note = chemically synthesized
  source 1..22: mol_type = other DNA
gctcctcctcccaggttcaagc

SEQ ID NO: 10091 - DNA, 22 bp, synthetic construct
  misc_feature 1..22: note = chemically synthesized
  source 1..22: mol_type = other DNA
ctcctcccaggttcaagcaatt

SEQ ID NO: 10092 - DNA, 22 bp, synthetic construct
  misc_feature 1..22: note = chemically synthesized
  source 1..22: mol_type = other DNA
ctcccaggttcaagcaattctc

SEQ ID NO: 10093 - DNA, 22 bp, synthetic construct
  misc_feature 1..22: note = chemically synthesized
  source 1..22: mol_type = other DNA
ccaggttcaagcaattctcctg

SEQ ID NO: 10094 - DNA, 22 bp, synthetic construct
  misc_feature 1..22: note = chemically synthesized
  source 1..22: mol_type = other DNA
aagcaattctcctgcctcagcc

SEQ ID NO: 10095 - DNA, 22 bp, synthetic construct
  misc_feature 1..22: note = chemically synthesized
  source 1..22: mol_type = other DNA
tcctgcctcagcctcccaagca

SEQ ID NO: 10096 - DNA, 22 bp, synthetic construct
  misc_feature 1..22: note = chemically synthesized
  source 1..22: mol_type = other DNA
ctgcctcagcctcccaagcagc

SEQ ID NO: 10097 - DNA, 22 bp, synthetic construct
  misc_feature 1..22: note = chemically synthesized
  source 1..22: mol_type = other DNA
cctcagcctcccaagcagctgg

SEQ ID NO: 10098 - DNA, 22 bp, synthetic construct
  misc_feature 1..22: note = chemically synthesized
  source 1..22: mol_type = other DNA
agcctcccaagcagctgggatt

SEQ ID NO: 10099 - DNA, 22 bp, synthetic construct
  misc_feature 1..22: note = chemically synthesized
  source 1..22: mol_type = other DNA
ccaagcagctgggattacaggt

SEQ ID NO: 10100 - DNA, 22 bp, synthetic construct
  misc_feature 1..22: note = chemically synthesized
  source 1..22: mol_type = other DNA
ggattacaggtacctgccacca

SEQ ID NO: 10101 - DNA, 22 bp, synthetic construct
  misc_feature 1..22: note = chemically synthesized
  source 1..22: mol_type = other DNA
caggtacctgccaccatgcctg

SEQ ID NO: 10102 - DNA, 22 bp, synthetic construct
  misc_feature 1..22: note = chemically synthesized
  source 1..22: mol_type = other DNA
ccaccatgcctggttaattttt

SEQ ID NO: 10103 - DNA, 22 bp, synthetic construct
  misc_feature 1..22: note = chemically synthesized
  source 1..22: mol_type = other DNA
gttaatttttgtatttttagta

SEQ ID NO: 10104 - DNA, 22 bp, synthetic construct
  misc_feature 1..22: note = chemically synthesized
  source 1..22: mol_type = other DNA
atttttgtatttttagtagaga

SEQ ID NO: 10105 - DNA, 22 bp, synthetic construct
  misc_feature 1..22: note = chemically synthesized
  source 1..22: mol_type = other DNA
ttgtatttttagtagagacggg

SEQ ID NO: 10106 - DNA, 22 bp, synthetic construct
  misc_feature 1..22: note = chemically synthesized
  source 1..22: mol_type = other DNA
tgtatttttagtagagacgggg

SEQ ID NO: 10107 - DNA, 22 bp, synthetic construct
  misc_feature 1..22: note = chemically synthesized
  source 1..22: mol_type = other DNA
gtatttttagtagagacggggt

SEQ ID NO: 10108 - DNA, 22 bp, synthetic construct
  misc_feature 1..22: note = chemically synthesized
  source 1..22: mol_type = other DNA
tatttttagtagagacggggtt

SEQ ID NO: 10109 - DNA, 22 bp, synthetic construct
  misc_feature 1..22: note = chemically synthesized
  source 1..22: mol_type = other DNA
ttagtagagacggggtttcacc

SEQ ID NO: 10110 - DNA, 22 bp, synthetic construct
  misc_feature 1..22: note = chemically synthesized
  source 1..22: mol_type = other DNA
tagtagagacggggtttcacca

SEQ ID NO: 10111 - DNA, 22 bp, synthetic construct
  misc_feature 1..22: note = chemically synthesized
  source 1..22: mol_type = other DNA
agtagagacggggtttcaccat

SEQ ID NO: 10112 - DNA, 22 bp, synthetic construct
  misc_feature 1..22: note = chemically synthesized
  source 1..22: mol_type = other DNA
gtagagacggggtttcaccatg

SEQ ID NO: 10113 - DNA, 22 bp, synthetic construct
  misc_feature 1..22: note = chemically synthesized
  source 1..22: mol_type = other DNA
caccatgttggtcaggctggtc

SEQ ID NO: 10114 - DNA, 22 bp, synthetic construct
  misc_feature 1..22: note = chemically synthesized
  source 1..22: mol_type = other DNA
accatgttggtcaggctggtct

SEQ ID NO: 10115 - DNA, 22 bp, synthetic construct
  misc_feature 1..22: note = chemically synthesized
  source 1..22: mol_type = other DNA
gtcaggctggtctggaactcct

SEQ ID NO: 10116 - DNA, 22 bp, synthetic construct
  misc_feature 1..22: note = chemically synthesized
  source 1..22: mol_type = other DNA
gtctggaactcctgacctcagg

SEQ ID NO: 10117 - DNA, 22 bp, synthetic construct
  misc_feature 1..22: note = chemically synthesized
  source 1..22: mol_type = other DNA
gaactcctgacctcaggtgatc

SEQ ID NO: 10118 - DNA, 22 bp, synthetic construct
  misc_feature 1..22: note = chemically synthesized
  source 1..22: mol_type = other DNA
ctgacctcaggtgatctgccca

SEQ ID NO: 10119 - DNA, 22 bp, synthetic construct
  misc_feature 1..22: note = chemically synthesized
  source 1..22: mol_type = other DNA
acctcaggtgatctgcccacct

SEQ ID NO: 10120 - DNA, 22 bp, synthetic construct
  misc_feature 1..22: note = chemically synthesized
  source 1..22: mol_type = other DNA
aggtgatctgcccacctcagcc

SEQ ID NO: 10121 - DNA, 22 bp, synthetic construct
  misc_feature 1..22: note = chemically synthesized
  source 1..22: mol_type = other DNA
cccacctcagcctcccaaagtg

SEQ ID NO: 10122 - DNA, 20 bp, synthetic construct
  misc_feature 1..20: note = chemically synthesized
  source 1..20: mol_type = other DNA
tggcgatatctaggtagcca

SEQ ID NO: 10123 - DNA, 20 bp, synthetic construct
  misc_feature 1..20: note = chemically synthesized
  source 1..20: mol_type = other DNA
ggcgatatctaggtagccac

SEQ ID NO: 10124 - DNA, 20 bp, synthetic construct
  misc_feature 1..20: note = chemically synthesized
  source 1..20: mol_type = other DNA
cgatatctaggtagccacag

SEQ ID NO: 10125 - DNA, 20 bp, synthetic construct
  misc_feature 1..20: note = chemically synthesized
  source 1..20: mol_type = other DNA
gatatctaggtagccacagg

SEQ ID NO: 10126 - DNA, 20 bp, synthetic construct
  misc_feature 1..20: note = chemically synthesized
  source 1..20: mol_type = other DNA
atctaggtagccacaggagg

SEQ ID NO: 10127 - DNA, 20 bp, synthetic construct
  misc_feature 1..20: note = chemically synthesized
  source 1..20: mol_type = other DNA
ccacaggaggcggccacgtg

SEQ ID NO: 10128 - DNA, 20 bp, synthetic construct
  misc_feature 1..20: note = chemically synthesized
  source 1..20: mol_type = other DNA
caggaggcggccacgtgcag

SEQ ID NO: 10129 - DNA, 20 bp, synthetic construct
  misc_feature 1..20: note = chemically synthesized
  source 1..20: mol_type = other DNA
cggccacgtgcagtggcgtc

SEQ ID NO: 10130 - DNA, 20 bp, synthetic construct
  misc_feature 1..20: note = chemically synthesized
  source 1..20: mol_type = other DNA
tccagccctcgttgtctgcc

SEQ ID NO: 10131 - DNA, 20 bp, synthetic construct
  misc_feature 1..20: note = chemically synthesized
  source 1..20: mol_type = other DNA
ctcgttgtctgcctggttca

SEQ ID NO: 10132 - DNA, 20 bp, synthetic construct
  misc_feature 1..20: note = chemically synthesized
  source 1..20: mol_type = other DNA
gttgtctgcctggttcacag

SEQ ID NO: 10133 - DNA, 20 bp, synthetic construct
  misc_feature 1..20: note = chemically synthesized
  source 1..20: mol_type = other DNA
cagtggcgccctgctccacc

SEQ ID NO: 10134 - DNA, 20 bp, synthetic construct
  misc_feature 1..20: note = chemically synthesized
  source 1..20: mol_type = other DNA
tggcgccctgctccaccaag

SEQ ID NO: 10135 - DNA, 20 bp, synthetic construct
  misc_feature 1..20: note = chemically synthesized
  source 1..20: mol_type = other DNA
accaagaagcgcaccacctc

SEQ ID NO: 10136 - DNA, 20 bp, synthetic construct
  misc_feature 1..20: note = chemically synthesized
  source 1..20: mol_type = other DNA
ccaagaagcgcaccacctcc

SEQ ID NO: 10137 - DNA, 20 bp, synthetic construct
  misc_feature 1..20: note = chemically synthesized
  source 1..20: mol_type = other DNA
cctccaggttctcatcaatg

SEQ ID NO: 10138 - DNA, 20 bp, synthetic construct
  misc_feature 1..20: note = chemically synthesized
  source 1..20: mol_type = other DNA
ctccaggttctcatcaatgc

SEQ ID NO: 10139 - DNA, 20 bp, synthetic construct
  misc_feature 1..20: note = chemically synthesized
  source 1..20: mol_type = other DNA
ggttctcatcaatgcaggcc

SEQ ID NO: 10140 - DNA, 20 bp, synthetic construct
  misc_feature 1..20: note = chemically synthesized
  source 1..20: mol_type = other DNA
gttctcatcaatgcaggcct

SEQ ID NO: 10141 - DNA, 20 bp, synthetic construct
  misc_feature 1..20: note = chemically synthesized
  source 1..20: mol_type = other DNA
ttctcatcaatgcaggcctg

SEQ ID NO: 10142 - DNA, 20 bp, synthetic construct
  misc_feature 1..20: note = chemically synthesized
  source 1..20: mol_type = other DNA
tctcatcaatgcaggcctgg

SEQ ID NO: 10143 - DNA, 20 bp, synthetic construct
  misc_feature 1..20: note = chemically synthesized
  source 1..20: mol_type = other DNA
catcaatgcaggcctggggg

SEQ ID NO: 10144 - DNA, 20 bp, synthetic construct
  misc_feature 1..20: note = chemically synthesized
  source 1..20: mol_type = other DNA
atcaatgcaggcctgggggt

SEQ ID NO: 10145 - DNA, 20 bp, synthetic construct
  misc_feature 1..20: note = chemically synthesized
  source 1..20: mol_type = other DNA
gcaggcctgggggtgggaaa

SEQ ID NO: 10146 - DNA, 20 bp, synthetic construct
  misc_feature 1..20: note = chemically synthesized
  source 1..20: mol_type = other DNA
tgggggtgggaaacagccgt

SEQ ID NO: 10147 - DNA, 20 bp, synthetic construct
  misc_feature 1..20: note = chemically synthesized
  source 1..20: mol_type = other DNA
gccgtcagccgcacctaccc

SEQ ID NO: 10148 - DNA, 20 bp, synthetic construct
  misc_feature 1..20: note = chemically synthesized
  source 1..20: mol_type = other DNA
agccgcacctaccccagcca

SEQ ID NO: 10149 - DNA, 20 bp, synthetic construct
  misc_feature 1..20: note = chemically synthesized
  source 1..20: mol_type = other DNA
ctaccccagccacggtgtcc

SEQ ID NO: 10150 - DNA, 20 bp, synthetic construct
  misc_feature 1..20: note = chemically synthesized
  source 1..20: mol_type = other DNA
cccagccacggtgtcccagc

SEQ ID NO: 10151 - DNA, 20 bp, synthetic construct
  misc_feature 1..20: note = chemically synthesized
  source 1..20: mol_type = other DNA
gccacggtgtcccagcaagt

SEQ ID NO: 10152 - DNA, 20 bp, synthetic construct
  misc_feature 1..20: note = chemically synthesized
  source 1..20: mol_type = other DNA
ccacggtgtcccagcaagtc

SEQ ID NO: 10153 - DNA, 20 bp, synthetic construct
  misc_feature 1..20: note = chemically synthesized
  source 1..20: mol_type = other DNA
gtcccagcaagtcgggactc

SEQ ID NO: 10154 - DNA, 20 bp, synthetic construct
  misc_feature 1..20: note = chemically synthesized
  source 1..20: mol_type = other DNA
cccagcaagtcgggactcca

SEQ ID NO: 10155 - DNA, 20 bp, synthetic construct
  misc_feature 1..20: note = chemically synthesized
  source 1..20: mol_type = other DNA
ccagcaagtcgggactccag

SEQ ID NO: 10156 - DNA, 20 bp, synthetic construct
  misc_feature 1..20: note = chemically synthesized
  source 1..20: mol_type = other DNA
cagcaagtcgggactccaga

SEQ ID NO: 10157 - DNA, 20 bp, synthetic construct
  misc_feature 1..20: note = chemically synthesized
  source 1..20: mol_type = other DNA
gcaagtcgggactccagagg

SEQ ID NO: 10158 - DNA, 20 bp, synthetic construct
  misc_feature 1..20: note = chemically synthesized
  source 1..20: mol_type = other DNA
tccagagggagccacgaaaa

SEQ ID NO: 10159 - DNA, 20 bp, synthetic construct
  misc_feature 1..20: note = chemically synthesized
  source 1..20: mol_type = other DNA
gggagccacgaaaacagatc

SEQ ID NO: 10160 - DNA, 20 bp, synthetic construct
  misc_feature 1..20: note = chemically synthesized
  source 1..20: mol_type = other DNA
ggagccacgaaaacagatcc

SEQ ID NO: 10161 - DNA, 20 bp, synthetic construct
  misc_feature 1..20: note = chemically synthesized
  source 1..20: mol_type = other DNA
gagccacgaaaacagatcca

SEQ ID NO: 10162 - DNA, 20 bp, synthetic construct
  misc_feature 1..20: note = chemically synthesized
  source 1..20: mol_type = other DNA
cgaaaacagatccagggaca

SEQ ID NO: 10163 - DNA, 20 bp, synthetic construct
  misc_feature 1..20: note = chemically synthesized
  source 1..20: mol_type = other DNA
cagatccagggacacggtgc

SEQ ID NO: 10164 - DNA, 20 bp, synthetic construct
  misc_feature 1..20: note = chemically synthesized
  source 1..20: mol_type = other DNA
agatccagggacacggtgct

SEQ ID NO: 10165 - DNA, 20 bp, synthetic construct
  misc_feature 1..20: note = chemically synthesized
  source 1..20: mol_type = other DNA
ccagggacacggtgctagga

SEQ ID NO: 10166 - DNA, 20 bp, synthetic construct
  misc_feature 1..20: note = chemically synthesized
  source 1..20: mol_type = other DNA
gggacacggtgctaggacag

SEQ ID NO: 10167 - DNA, 20 bp, synthetic construct
  misc_feature 1..20: note = chemically synthesized
  source 1..20: mol_type = other DNA
ggacacggtgctaggacagt

SEQ ID NO: 10168 - DNA, 20 bp, synthetic construct
  misc_feature 1..20: note = chemically synthesized
  source 1..20: mol_type = other DNA
gacacggtgctaggacagtg

SEQ ID NO: 10169 - DNA, 20 bp, synthetic construct
  misc_feature 1..20: note = chemically synthesized
  source 1..20: mol_type = other DNA
cagtggggaaaatgacccaa

SEQ ID NO: 10170 - DNA, 20 bp, synthetic construct
  misc_feature 1..20: note = chemically synthesized
  source 1..20: mol_type = other DNA
gaaaatgacccaacagcctc

SEQ ID NO: 10171 - DNA, 20 bp, synthetic construct
  misc_feature 1..20: note = chemically synthesized
  source 1..20: mol_type = other DNA
acccaacagcctctggccac

SEQ ID NO: 10172 - DNA, 20 bp, synthetic construct
  misc_feature 1..20: note = chemically synthesized
  source 1..20: mol_type = other DNA
cctctggccactggctgttt

SEQ ID NO: 10173 - DNA, 20 bp, synthetic construct
  misc_feature 1..20: note = chemically synthesized
  source 1..20: mol_type = other DNA
ctggctgtttaagatacgcc

SEQ ID NO: 10174 - DNA, 20 bp, synthetic construct
  misc_feature 1..20: note = chemically synthesized
  source 1..20: mol_type = other DNA
ttaagatacgcctggttgcc

SEQ ID NO: 10175 - DNA, 20 bp, synthetic construct
  misc_feature 1..20: note = chemically synthesized
  source 1..20: mol_type = other DNA
agatacgcctggttgcccag

SEQ ID NO: 10176 - DNA, 20 bp, synthetic construct
  misc_feature 1..20: note = chemically synthesized
  source 1..20: mol_type = other DNA
acgcctggttgcccagtggt

SEQ ID NO: 10177 - DNA, 20 bp, synthetic construct
  misc_feature 1..20: note = chemically synthesized
  source 1..20: mol_type = other DNA
cgcctggttgcccagtggtc

SEQ ID NO: 10178 - DNA, 20 bp, synthetic construct
  misc_feature 1..20: note = chemically synthesized
  source 1..20: mol_type = other DNA
tggttgcccagtggtcaggc

SEQ ID NO: 10179 - DNA, 20 bp, synthetic construct
  misc_feature 1..20: note = chemically synthesized
  source 1..20: mol_type = other DNA
tgcccagtggtcaggccggc

SEQ ID NO: 10180 - DNA, 20 bp, synthetic construct
  misc_feature 1..20: note = chemically synthesized
  source 1..20: mol_type = other DNA
gcccagtggtcaggccggcc

SEQ ID NO: 10181 - DNA, 20 bp, synthetic construct
  misc_feature 1..20: note = chemically synthesized
  source 1..20: mol_type = other DNA
ggtcaggccggccaggcctt

SEQ ID NO: 10182 - DNA, 20 bp, synthetic construct
  misc_feature 1..20: note = chemically synthesized
  source 1..20: mol_type = other DNA
ccggccaggccttcagtgct

SEQ ID NO: 10183 - DNA, 20 bp, synthetic construct
  misc_feature 1..20: note = chemically synthesized
  source 1..20: mol_type = other DNA
gccaggccttcagtgctcag

SEQ ID NO: 10184 - DNA, 20 bp, synthetic construct
  misc_feature 1..20: note = chemically synthesized
  source 1..20: mol_type = other DNA
gtgctcagtggaaaccacga

SEQ ID NO: 10185 - DNA, 20 bp, synthetic construct
  misc_feature 1..20: note = chemically synthesized
  source 1..20: mol_type = other DNA
tgctcagtggaaaccacgaa

SEQ ID NO: 10186 - DNA, 20 bp, synthetic construct
  misc_feature 1..20: note = chemically synthesized
  source 1..20: mol_type = other DNA
ggaaaccacgaaaggactcc

SEQ ID NO: 10187 - DNA, 20 bp, synthetic construct
  misc_feature 1..20: note = chemically synthesized
  source 1..20: mol_type = other DNA
gactcctggctatctgcaaa

SEQ ID NO: 10188 - DNA, 20 bp, synthetic construct
  misc_feature 1..20: note = chemically synthesized
  source 1..20: mol_type = other DNA
actcctggctatctgcaaac

SEQ ID NO: 10189 - DNA, 20 bp, synthetic construct
  misc_feature 1..20: note = chemically synthesized
  source 1..20: mol_type = other DNA
cctggctatctgcaaacagg

SEQ ID NO: 10190 - DNA, 20 bp, synthetic construct
  misc_feature 1..20: note = chemically synthesized
  source 1..20: mol_type = other DNA
atctgcaaacaggaagtgaa

SEQ ID NO: 10191 - DNA, 20 bp, synthetic construct
  misc_feature 1..20: note = chemically synthesized
  source 1..20: mol_type = other DNA
tctgcaaacaggaagtgaac

SEQ ID NO: 10192 - DNA, 20 bp, synthetic construct
  misc_feature 1..20: note = chemically synthesized
  source 1..20: mol_type = other DNA
ctgcaaacaggaagtgaacg

SEQ ID NO: 10193 - DNA, 20 bp, synthetic construct
  misc_feature 1..20: note = chemically synthesized
  source 1..20: mol_type = other DNA
caaacaggaagtgaacgggg

SEQ ID NO: 10194 - DNA, 20 bp, synthetic construct
  misc_feature 1..20: note = chemically synthesized
  source 1..20: mol_type = other DNA
aaacaggaagtgaacgggga

SEQ ID NO: 10195 - DNA, 20 bp, synthetic construct
  misc_feature 1..20: note = chemically synthesized
  source 1..20: mol_type = other DNA
aacaggaagtgaacggggaa

SEQ ID NO: 10196 - DNA, 20 bp, synthetic construct
  misc_feature 1..20: note = chemically synthesized
  source 1..20: mol_type = other DNA
caggaagtgaacggggaagg

SEQ ID NO: 10197 - DNA, 20 bp, synthetic construct
  misc_feature 1..20: note = chemically synthesized
  source 1..20: mol_type = other DNA
aggaagtgaacggggaaggg

SEQ ID NO: 10198 - DNA, 20 bp, synthetic construct
  misc_feature 1..20: note = chemically synthesized
  source 1..20: mol_type = other DNA
ggaagtgaacggggaaggga

SEQ ID NO: 10199 - DNA, 20 bp, synthetic construct
  misc_feature 1..20: note = chemically synthesized
  source 1..20: mol_type = other DNA
gaagtgaacggggaagggag

SEQ ID NO: 10200 - DNA, 20 bp, synthetic construct
  misc_feature 1..20: note = chemically synthesized
  source 1..20: mol_type = other DNA
aagtgaacggggaagggagg

SEQ ID NO: 10201 - DNA, 20 bp, synthetic construct
  misc_feature 1..20: note = chemically synthesized
  source 1..20: mol_type = other DNA
aagggagggggcttctcatc

SEQ ID NO: 10202 - DNA, 20 bp, synthetic construct
  misc_feature 1..20: note = chemically synthesized
  source 1..20: mol_type = other DNA
agggagggggcttctcatct

SEQ ID NO: 10203 - DNA, 20 bp, synthetic construct
  misc_feature 1..20: note = chemically synthesized
  source 1..20: mol_type = other DNA
gggggcttctcatctgggtg

SEQ ID NO: 10204 - DNA, 20 bp, synthetic construct
  misc_feature 1..20: note = chemically synthesized
  source 1..20: mol_type = other DNA
ggggcttctcatctgggtgc

SEQ ID NO: 10205 - DNA, 20 bp, synthetic construct
  misc_feature 1..20: note = chemically synthesized
  source 1..20: mol_type = other DNA
ctgggtgcgggaaccccaca

SEQ ID NO: 10206 - DNA, 20 bp, synthetic construct
  misc_feature 1..20: note = chemically synthesized
  source 1..20: mol_type = other DNA
gaaccccacatggtacctgt

SEQ ID NO: 10207 - DNA, 20 bp, synthetic construct
  misc_feature 1..20: note = chemically synthesized
  source 1..20: mol_type = other DNA
cacatggtacctgttagaca

SEQ ID NO: 10208 - DNA, 20 bp, synthetic construct
  misc_feature 1..20: note = chemically synthesized
  source 1..20: mol_type = other DNA
aaaacccccgtcaccaccca

SEQ ID NO: 10209 - DNA, 20 bp, synthetic construct
  misc_feature 1..20: note = chemically synthesized
  source 1..20: mol_type = other DNA
aaacccccgtcaccacccac

SEQ ID NO: 10210 - DNA, 20 bp, synthetic construct
  misc_feature 1..20: note = chemically synthesized
  source 1..20: mol_type = other DNA
cccccgtcaccacccacagg

SEQ ID NO: 10211 - DNA, 20 bp, synthetic construct
  misc_feature 1..20: note = chemically synthesized
  source 1..20: mol_type = other DNA
ccacccacaggtggcgcttc

SEQ ID NO: 10212 - DNA, 20 bp, synthetic construct
  misc_feature 1..20: note = chemically synthesized
  source 1..20: mol_type = other DNA
caggtggcgcttccagtgct

SEQ ID NO: 10213 - DNA, 20 bp, synthetic construct
  misc_feature 1..20: note = chemically synthesized
  source 1..20: mol_type = other DNA
ggcgcttccagtgctcagac

SEQ ID NO: 10214 - DNA, 20 bp, synthetic construct
  misc_feature 1..20: note = chemically synthesized
  source 1..20: mol_type = other DNA
gcgcttccagtgctcagact

SEQ ID NO: 10215 - DNA, 20 bp, synthetic construct
  misc_feature 1..20: note = chemically synthesized
  source 1..20: mol_type = other DNA
cgcttccagtgctcagacta

SEQ ID NO: 10216 - DNA, 20 bp, synthetic construct
  misc_feature 1..20: note = chemically synthesized
  source 1..20: mol_type = other DNA
ttccagtgctcagactaggg

SEQ ID NO: 10217 - DNA, 20 bp, synthetic construct
  misc_feature 1..20: note = chemically synthesized
  source 1..20: mol_type = other DNA
ccagtgctcagactagggaa

SEQ ID NO: 10218 - DNA, 20 bp, synthetic construct
  misc_feature 1..20: note = chemically synthesized
  source 1..20: mol_type = other DNA
cagtgctcagactagggaag

SEQ ID NO: 10219 - DNA, 20 bp, synthetic construct
  misc_feature 1..20: note = chemically synthesized
  source 1..20: mol_type = other DNA
tcagactagggaagaggttc

SEQ ID NO: 10220 - DNA, 20 bp, synthetic construct
  misc_feature 1..20: note = chemically synthesized
  source 1..20: mol_type = other DNA
ggttccagcccctcctcctt

SEQ ID NO: 10221 - DNA, 20 bp, synthetic construct
  misc_feature 1..20: note = chemically synthesized
  source 1..20: mol_type = other DNA
ttccagcccctcctccttca

SEQ ID NO: 10222 - DNA, 20 bp, synthetic construct
  misc_feature 1..20: note = chemically synthesized
  source 1..20: mol_type = other DNA
agcccctcctccttcagagc

SEQ ID NO: 10223 - DNA, 20 bp, synthetic construct
  misc_feature 1..20: note = chemically synthesized
  source 1..20: mol_type = other DNA
gcccctcctccttcagagcc

SEQ ID NO: 10224 - DNA, 20 bp, synthetic construct
  misc_feature 1..20: note = chemically synthesized
  source 1..20: mol_type = other DNA
ccctcctccttcagagccag

SEQ ID NO: 10225 - DNA, 20 bp, synthetic construct
  misc_feature 1..20: note = chemically synthesized
  source 1..20: mol_type = other DNA
tccttcagagccaggagtcc

SEQ ID NO: 10226 - DNA, 20 bp, synthetic construct
  misc_feature 1..20: note = chemically synthesized
  source 1..20: mol_type = other DNA
gagccaggagtcctggcccc

SEQ ID NO: 10227 - DNA, 20 bp, synthetic construct
  misc_feature 1..20: note = chemically synthesized
  source 1..20: mol_type = other DNA
agcccctcctgccttaaacc

SEQ ID NO: 10228 - DNA, 20 bp, synthetic construct
  misc_feature 1..20: note = chemically synthesized
  source 1..20: mol_type = other DNA
cctcctgccttaaacccagc

SEQ ID NO: 10229 - DNA, 20 bp, synthetic construct
  misc_feature 1..20: note = chemically synthesized
  source 1..20: mol_type = other DNA
ctcctgccttaaacccagcc

SEQ ID NO: 10230 - DNA, 20 bp, synthetic construct
  misc_feature 1..20: note = chemically synthesized
  source 1..20: mol_type = other DNA
aaacccagccaggtccttcc

SEQ ID NO: 10231 - DNA, 20 bp, synthetic construct
  misc_feature 1..20: note = chemically synthesized
  source 1..20: mol_type = other DNA
aacccagccaggtccttcca

SEQ ID NO: 10232 - DNA, 20 bp, synthetic construct
  misc_feature 1..20: note = chemically synthesized
  source 1..20: mol_type = other DNA
acccagccaggtccttccaa

SEQ ID NO: 10233 - DNA, 20 bp, synthetic construct
  misc_feature 1..20: note = chemically synthesized
  source 1..20: mol_type = other DNA
gccaggtccttccaagggtc

SEQ ID NO: 10234 - DNA, 20 bp, synthetic construct
  misc_feature 1..20: note = chemically synthesized
  source 1..20: mol_type = other DNA
gtccttccaagggtcaagct

SEQ ID NO: 10235 - DNA, 20 bp, synthetic construct
  misc_feature 1..20: note = chemically synthesized
  source 1..20: mol_type = other DNA
gtcaagctcggaaaccaccc

SEQ ID NO: 10236 - DNA, 20 bp, synthetic construct
  misc_feature 1..20: note = chemically synthesized
  source 1..20: mol_type = other DNA
aagctcggaaaccaccccag

SEQ ID NO: 10237 - DNA, 20 bp, synthetic construct
  misc_feature 1..20: note = chemically synthesized
  source 1..20: mol_type = other DNA
ccaccccagcagatactctg

SEQ ID NO: 10238 - DNA, 20 bp, synthetic construct
  misc_feature 1..20: note = chemically synthesized
  source 1..20: mol_type = other DNA
caccccagcagatactctgc

SEQ ID NO: 10239 - DNA, 20 bp, synthetic construct
  misc_feature 1..20: note = chemically synthesized
  source 1..20: mol_type = other DNA
gcagatactctgcaggaacg

SEQ ID NO: 10240 - DNA, 20 bp, synthetic construct
  misc_feature 1..20: note = chemically synthesized
  source 1..20: mol_type = other DNA
actctgcaggaacgaagccg

SEQ ID NO: 10241 - DNA, 20 bp, synthetic construct
  misc_feature 1..20: note = chemically synthesized
  source 1..20: mol_type = other DNA
ctctgcaggaacgaagccgt

SEQ ID NO: 10242 - DNA, 20 bp, synthetic construct
  misc_feature 1..20: note = chemically synthesized
  source 1..20: mol_type = other DNA
caggaacgaagccgtgggcc

SEQ ID NO: 10243 - DNA, 20 bp, synthetic construct
  misc_feature 1..20: note = chemically synthesized
  source 1..20: mol_type = other DNA
aggaacgaagccgtgggccc

SEQ ID NO: 10244 - DNA, 20 bp, synthetic construct
  misc_feature 1..20: note = chemically synthesized
  source 1..20: mol_type = other DNA
ggaacgaagccgtgggccca

SEQ ID NO: 10245 - DNA, 20 bp, synthetic construct
  misc_feature 1..20: note = chemically synthesized
  source 1..20: mol_type = other DNA
gccgtgggcccagggctatg

SEQ ID NO: 10246 - DNA, 20 bp, synthetic construct
  misc_feature 1..20: note = chemically synthesized
  source 1..20: mol_type = other DNA
ccgtgggcccagggctatgc

SEQ ID NO: 10247 - DNA, 20 bp, synthetic construct
  misc_feature 1..20: note = chemically synthesized
  source 1..20: mol_type = other DNA
cgtgggcccagggctatgca

SEQ ID NO: 10248 - DNA, 20 bp, synthetic construct
  misc_feature 1..20: note = chemically synthesized
  source 1..20: mol_type = other DNA
gggcccagggctatgcaggg

SEQ ID NO: 10249 - DNA, 20 bp, synthetic construct
  misc_feature 1..20: note = chemically synthesized
  source 1..20: mol_type = other DNA
gcccagggctatgcagggtg

SEQ ID NO: 10250 - DNA, 20 bp, synthetic construct
  misc_feature 1..20: note = chemically synthesized
  source 1..20: mol_type = other DNA
cccagggctatgcagggtgg

SEQ ID NO: 10251 - DNA, 20 bp, synthetic construct
  misc_feature 1..20: note = chemically synthesized
  source 1..20: mol_type = other DNA
agggctatgcagggtggagg

SEQ ID NO: 10252 - DNA, 20 bp, synthetic construct
  misc_feature 1..20: note = chemically synthesized
  source 1..20: mol_type = other DNA
gggctatgcagggtggagga

SEQ ID NO: 10253 - DNA, 20 bp, synthetic construct
  misc_feature 1..20: note = chemically synthesized
  source 1..20: mol_type = other DNA
ggaggaaggccaccctgtgc

SEQ ID NO: 10254 - DNA, 20 bp, synthetic construct
  misc_feature 1..20: note = chemically synthesized
  source 1..20: mol_type = other DNA
gaggaaggccaccctgtgct

SEQ ID NO: 10255 - DNA, 20 bp, synthetic construct
  misc_feature 1..20: note = chemically synthesized
  source 1..20: mol_type = other DNA
aaggccaccctgtgctggga

SEQ ID NO: 10256 - DNA, 20 bp, synthetic construct
  misc_feature 1..20: note = chemically synthesized
  source 1..20: mol_type = other DNA
accctgtgctgggacagact

SEQ ID NO: 10257 - DNA, 20 bp, synthetic construct
  misc_feature 1..20: note = chemically synthesized
  source 1..20: mol_type = other DNA
ccctgtgctgggacagactc

SEQ ID NO: 10258 - DNA, 20 bp, synthetic construct
  misc_feature 1..20: note = chemically synthesized
  source 1..20: mol_type = other DNA
cctgtgctgggacagactca

SEQ ID NO: 10259 - DNA, 20 bp, synthetic construct
  misc_feature 1..20: note = chemically synthesized
  source 1..20: mol_type = other DNA
ctgtgctgggacagactcag

SEQ ID NO: 10260 - DNA, 20 bp, synthetic construct
  misc_feature 1..20: note = chemically synthesized
  source 1..20: mol_type = other DNA
ctgggacagactcaggggcc

SEQ ID NO: 10261 - DNA, 20 bp, synthetic construct
  misc_feature 1..20: note = chemically synthesized
  source 1..20: mol_type = other DNA
tgggacagactcaggggcct

SEQ ID NO: 10262 - DNA, 20 bp, synthetic construct
  misc_feature 1..20: note = chemically synthesized
  source 1..20: mol_type = other DNA
gacagactcaggggcctggg

SEQ ID NO: 10263 - DNA, 20 bp, synthetic construct
  misc_feature 1..20: note = chemically synthesized
  source 1..20: mol_type = other DNA
acagactcaggggcctgggc

SEQ ID NO: 10264 - DNA, 20 bp, synthetic construct
  misc_feature 1..20: note = chemically synthesized
  source 1..20: mol_type = other DNA
aggggcctgggcgggactcc

SEQ ID NO: 10265 - DNA, 20 bp, synthetic construct
  misc_feature 1..20: note = chemically synthesized
  source 1..20: mol_type = other DNA
gggcctgggcgggactccca

SEQ ID NO: 10266 - DNA, 20 bp, synthetic construct
  misc_feature 1..20: note = chemically synthesized
  source 1..20: mol_type = other DNA
ggcctgggcgggactcccag

SEQ ID NO: 10267 - DNA, 20 bp, synthetic construct
  misc_feature 1..20: note = chemically synthesized
  source 1..20: mol_type = other DNA
gcctgggcgggactcccaga

SEQ ID NO: 10268 - DNA, 20 bp, synthetic construct
  misc_feature 1..20: note = chemically synthesized
  source 1..20: mol_type = other DNA
cctgggcgggactcccagag

SEQ ID NO: 10269 - DNA, 20 bp, synthetic construct
  misc_feature 1..20: note = chemically synthesized
  source 1..20: mol_type = other DNA
ggcgggactcccagaggggt

SEQ ID NO: 10270 - DNA, 20 bp, synthetic construct
  misc_feature 1..20: note = chemically synthesized
  source 1..20: mol_type = other DNA
ggactcccagaggggtgaga

SEQ ID NO: 10271 - DNA, 20 bp, synthetic construct
  misc_feature 1..20: note = chemically synthesized
  source 1..20: mol_type = other DNA
cagctgcacacctgtgtgcc

SEQ ID NO: 10272 - DNA, 20 bp, synthetic construct
  misc_feature 1..20: note = chemically synthesized
  source 1..20: mol_type = other DNA
agctgcacacctgtgtgcct

SEQ ID NO: 10273 - DNA, 20 bp, synthetic construct
  misc_feature 1..20: note = chemically synthesized
  source 1..20: mol_type = other DNA
acacctgtgtgcctgggccc

SEQ ID NO: 10274 - DNA, 20 bp, synthetic construct
  misc_feature 1..20: note = chemically synthesized
  source 1..20: mol_type = other DNA
cacctgtgtgcctgggcccc

SEQ ID NO: 10275 - DNA, 20 bp, synthetic construct
  misc_feature 1..20: note = chemically synthesized
  source 1..20: mol_type = other DNA
ggccccaggctgtcacactc

SEQ ID NO: 10276 - DNA, 20 bp, synthetic construct
  misc_feature 1..20: note = chemically synthesized
  source 1..20: mol_type = other DNA
ctgtcacactccagttcact

SEQ ID NO: 10277 - DNA, 20 bp, synthetic construct
  misc_feature 1..20: note = chemically synthesized
  source 1..20: mol_type = other DNA
tgtcacactccagttcactg

SEQ ID NO: 10278 - DNA, 20 bp, synthetic construct
  misc_feature 1..20: note = chemically synthesized
  source 1..20: mol_type = other DNA
tcactgaggccccctctgca

SEQ ID NO: 10279 - DNA, 20 bp, synthetic construct
  misc_feature 1..20: note = chemically synthesized
  source 1..20: mol_type = other DNA
cactgaggccccctctgcac

SEQ ID NO: 10280 - DNA, 20 bp, synthetic construct
  misc_feature 1..20: note = chemically synthesized
  source 1..20: mol_type = other DNA
actgaggccccctctgcacg

SEQ ID NO: 10281 - DNA, 20 bp, synthetic construct
  misc_feature 1..20: note = chemically synthesized
  source 1..20: mol_type = other DNA
cccctctgcacggggccctg

SEQ ID NO: 10282 - DNA, 20 bp, synthetic construct
  misc_feature 1..20: note = chemically synthesized
  source 1..20: mol_type = other DNA
tctgcacggggccctgcagc

SEQ ID NO: 10283 - DNA, 20 bp, synthetic construct
  misc_feature 1..20: note = chemically synthesized
  source 1..20: mol_type = other DNA
ctgcacggggccctgcagcc

SEQ ID NO: 10284 - DNA, 20 bp, synthetic construct
  misc_feature 1..20: note = chemically synthesized
  source 1..20: mol_type = other DNA
tgcacggggccctgcagcca

SEQ ID NO: 10285 - DNA, 20 bp, synthetic construct
  misc_feature 1..20: note = chemically synthesized
  source 1..20: mol_type = other DNA
gcacggggccctgcagccag

SEQ ID NO: 10286 - DNA, 20 bp, synthetic construct
  misc_feature 1..20: note = chemically synthesized
  source 1..20: mol_type = other DNA
cctgcagccaggggctgaca

SEQ ID NO: 10287 - DNA, 20 bp, synthetic construct
  misc_feature 1..20: note = chemically synthesized
  source 1..20: mol_type = other DNA
ctgcagccaggggctgacac

SEQ ID NO: 10288 - DNA, 20 bp, synthetic construct
  misc_feature 1..20: note = chemically synthesized
  source 1..20: mol_type = other DNA
accgtttctcattcttccct

SEQ ID NO: 10289 - DNA, 20 bp, synthetic construct
  misc_feature 1..20: note = chemically synthesized
  source 1..20: mol_type = other DNA
ccgtttctcattcttccctt

SEQ ID NO: 10290 - DNA, 20 bp, synthetic construct
  misc_feature 1..20: note = chemically synthesized
  source 1..20: mol_type = other DNA
cgtttctcattcttccctta

SEQ ID NO: 10291 - DNA, 20 bp, synthetic construct
  misc_feature 1..20: note = chemically synthesized
  source 1..20: mol_type = other DNA
gtttctcattcttcccttag

SEQ ID NO: 10292 - DNA, 20 bp, synthetic construct
  misc_feature 1..20: note = chemically synthesized
  source 1..20: mol_type = other DNA
tcccttaggggtccaaaact

SEQ ID NO: 10293 - DNA, 20 bp, synthetic construct
  misc_feature 1..20: note = chemically synthesized
  source 1..20: mol_type = other DNA
cccttaggggtccaaaactt

SEQ ID NO: 10294 - DNA, 20 bp, synthetic construct
  misc_feature 1..20: note = chemically synthesized
  source 1..20: mol_type = other DNA
ccttaggggtccaaaacttg

SEQ ID NO: 10295 - DNA, 20 bp, synthetic construct
  misc_feature 1..20: note = chemically synthesized
  source 1..20: mol_type = other DNA
cttaggggtccaaaacttgg

SEQ ID NO: 10296 - DNA, 20 bp, synthetic construct
  misc_feature 1..20: note = chemically synthesized
  source 1..20: mol_type = other DNA
ttaggggtccaaaacttggg

SEQ ID NO: 10297 - DNA, 20 bp, synthetic construct
  misc_feature 1..20: note = chemically synthesized
  source 1..20: mol_type = other DNA
tccaaaacttggggggacaa

SEQ ID NO: 10298 - DNA, 20 bp, synthetic construct
  misc_feature 1..20: note = chemically synthesized
  source 1..20: mol_type = other DNA
acttggggggacaaaagccg

SEQ ID NO: 10299 - DNA, 20 bp, synthetic construct
  misc_feature 1..20: note = chemically synthesized
  source 1..20: mol_type = other DNA
gggggacaaaagccgaagtc

SEQ ID NO: 10300 - DNA, 20 bp, synthetic construct
  misc_feature 1..20: note = chemically synthesized
  source 1..20: mol_type = other DNA
ggggacaaaagccgaagtcc

SEQ ID NO: 10301 - DNA, 20 bp, synthetic construct
  misc_feature 1..20: note = chemically synthesized
  source 1..20: mol_type = other DNA
gggacaaaagccgaagtcca

SEQ ID NO: 10302 - DNA, 20 bp, synthetic construct
  misc_feature 1..20: note = chemically synthesized
  source 1..20: mol_type = other DNA
ggacaaaagccgaagtccag

SEQ ID NO: 10303 - DNA, 20 bp, synthetic construct
  misc_feature 1..20: note = chemically synthesized
  source 1..20: mol_type = other DNA
gacaaaagccgaagtccagg

SEQ ID NO: 10304 - DNA, 20 bp, synthetic construct
  misc_feature 1..20: note = chemically synthesized
  source 1..20: mol_type = other DNA
aaagccgaagtccagggggt

SEQ ID NO: 10305 - DNA, 20 bp, synthetic construct
  misc_feature 1..20: note = chemically synthesized
  source 1..20: mol_type = other DNA
agccgaagtccagggggtcg

SEQ ID NO: 10306 - DNA, 20 bp, synthetic construct
  misc_feature 1..20: note = chemically synthesized
  source 1..20: mol_type = other DNA
gccgaagtccagggggtcgg

SEQ ID NO: 10307 - DNA, 20 bp, synthetic construct
  misc_feature 1..20: note = chemically synthesized
  source 1..20: mol_type = other DNA
cgaagtccagggggtcggag

SEQ ID NO: 10308 - DNA, 20 bp, synthetic construct
  misc_feature 1..20: note = chemically synthesized
  source 1..20: mol_type = other DNA
gaagtccagggggtcggagg

SEQ ID NO: 10309 - DNA, 20 bp, synthetic construct
  misc_feature 1..20: note = chemically synthesized
  source 1..20: mol_type = other DNA
aagtccagggggtcggagga

SEQ ID NO: 10310 - DNA, 20 bp, synthetic construct
  misc_feature 1..20: note = chemically synthesized
  source 1..20: mol_type = other DNA
gtcggaggagggacttgccc

SEQ ID NO: 10311 - DNA, 20 bp, synthetic construct
  misc_feature 1..20: note = chemically synthesized
  source 1..20: mol_type = other DNA
tcggaggagggacttgcccc

SEQ ID NO: 10312 - DNA, 20 bp, synthetic construct
  misc_feature 1..20: note = chemically synthesized
  source 1..20: mol_type = other DNA
gggacttgccccaggccttg

SEQ ID NO: 10313 - DNA, 20 bp, synthetic construct
  misc_feature 1..20: note = chemically synthesized
  source 1..20: mol_type = other DNA
gccccaggccttgtggacac

SEQ ID NO: 10314 - DNA, 20 bp, synthetic construct
  misc_feature 1..20: note = chemically synthesized
  source 1..20: mol_type = other DNA
ccccaggccttgtggacact

SEQ ID NO: 10315 - DNA, 20 bp, synthetic construct
  misc_feature 1..20: note = chemically synthesized
  source 1..20: mol_type = other DNA
caggccttgtggacactggg

SEQ ID NO: 10316 - DNA, 20 bp, synthetic construct
  misc_feature 1..20: note = chemically synthesized
  source 1..20: mol_type = other DNA
aggccttgtggacactgggt

SEQ ID NO: 10317 - DNA, 20 bp, synthetic construct
  misc_feature 1..20: note = chemically synthesized
  source 1..20: mol_type = other DNA
tgtggacactgggtgggctc

SEQ ID NO: 10318 - DNA, 20 bp, synthetic construct
  misc_feature 1..20: note = chemically synthesized
  source 1..20: mol_type = other DNA
gtggacactgggtgggctcc

SEQ ID NO: 10319 - DNA, 20 bp, synthetic construct
  misc_feature 1..20: note = chemically synthesized
  source 1..20: mol_type = other DNA
gtgggctccgggacctgaac

SEQ ID NO: 10320 - DNA, 20 bp, synthetic construct
  misc_feature 1..20: note = chemically synthesized
  source 1..20: mol_type = other DNA
gggctccgggacctgaactg

SEQ ID NO: 10321 - DNA, 20 bp, synthetic construct
  misc_feature 1..20: note = chemically synthesized
  source 1..20: mol_type = other DNA
ccgggacctgaactggagct

SEQ ID NO: 10322 - DNA, 20 bp, synthetic construct
  misc_feature 1..20: note = chemically synthesized
  source 1..20: mol_type = other DNA
cgggacctgaactggagctg

SEQ ID NO: 10323 - DNA, 20 bp, synthetic construct
  misc_feature 1..20: note = chemically synthesized
  source 1..20: mol_type = other DNA
gacctgaactggagctgagg

SEQ ID NO: 10324 - DNA, 20 bp, synthetic construct
  misc_feature 1..20: note = chemically synthesized
  source 1..20: mol_type = other DNA
acctgaactggagctgagga

SEQ ID NO: 10325 - DNA, 20 bp, synthetic construct
  misc_feature 1..20: note = chemically synthesized
  source 1..20: mol_type = other DNA
ctgaactggagctgaggaag

SEQ ID NO: 10326 - DNA, 20 bp, synthetic construct
  misc_feature 1..20: note = chemically synthesized
  source 1..20: mol_type = other DNA
ctggagctgaggaaggagtg

SEQ ID NO: 10327 - DNA, 20 bp, synthetic construct
  misc_feature 1..20: note = chemically synthesized
  source 1..20: mol_type = other DNA
aaggagtgaagctaaactcc

SEQ ID NO: 10328 - DNA, 20 bp, synthetic construct
  misc_feature 1..20: note = chemically synthesized
  source 1..20: mol_type = other DNA
aagctaaactcctagatcca

SEQ ID NO: 10329 - DNA, 20 bp, synthetic construct
  misc_feature 1..20: note = chemically synthesized
  source 1..20: mol_type = other DNA
agctaaactcctagatccac

SEQ ID NO: 10330 - DNA, 20 bp, synthetic construct
  misc_feature 1..20: note = chemically synthesized
  source 1..20: mol_type = other DNA
cacgggataaattacccccc

SEQ ID NO: 10331 - DNA, 20 bp, synthetic construct
  misc_feature 1..20: note = chemically synthesized
  source 1..20: mol_type = other DNA
ccaagtccctcacctctcca

SEQ ID NO: 10332 - DNA, 20 bp, synthetic construct
  misc_feature 1..20: note = chemically synthesized
  source 1..20: mol_type = other DNA
cctctccaaagctgcccatc

SEQ ID NO: 10333 - DNA, 20 bp, synthetic construct
  misc_feature 1..20: note = chemically synthesized
  source 1..20: mol_type = other DNA
tctccaaagctgcccatctg

SEQ ID NO: 10334 - DNA, 20 bp, synthetic construct
  misc_feature 1..20: note = chemically synthesized
  source 1..20: mol_type = other DNA
ctccaaagctgcccatctgg

SEQ ID NO: 10335 - DNA, 20 bp, synthetic construct
  misc_feature 1..20: note = chemically synthesized
  source 1..20: mol_type = other DNA
ccaaagctgcccatctggag

SEQ ID NO: 10336 - DNA, 20 bp, synthetic construct
  misc_feature 1..20: note = chemically synthesized
  source 1..20: mol_type = other DNA
caaagctgcccatctggagg

SEQ ID NO: 10337 - DNA, 20 bp, synthetic construct
  misc_feature 1..20: note = chemically synthesized
  source 1..20: mol_type = other DNA
agctgcccatctggaggagg

SEQ ID NO: 10338 - DNA, 20 bp, synthetic construct
  misc_feature 1..20: note = chemically synthesized
  source 1..20: mol_type = other DNA
gctgcccatctggaggaggc

SEQ ID NO: 10339 - DNA, 20 bp, synthetic construct
  misc_feature 1..20: note = chemically synthesized
  source 1..20: mol_type = other DNA
tgcccatctggaggaggcgg

SEQ ID NO: 10340 - DNA, 20 bp, synthetic construct
  misc_feature 1..20: note = chemically synthesized
  source 1..20: mol_type = other DNA
gcccatctggaggaggcggg

SEQ ID NO: 10341 - DNA, 20 bp, synthetic construct
  misc_feature 1..20: note = chemically synthesized
  source 1..20: mol_type = other DNA
cccatctggaggaggcggga

SEQ ID NO: 10342 - DNA, 20 bp, synthetic construct
  misc_feature 1..20: note = chemically synthesized
  source 1..20: mol_type = other DNA
catctggaggaggcgggagg

SEQ ID NO: 10343 - DNA, 20 bp, synthetic construct
  misc_feature 1..20: note = chemically synthesized
  source 1..20: mol_type = other DNA
aggaggcgggagggagctac

SEQ ID NO: 10344 - DNA, 20 bp, synthetic construct
  misc_feature 1..20: note = chemically synthesized
  source 1..20: mol_type = other DNA
ggaggcgggagggagctacg

SEQ ID NO: 10345 - DNA, 20 bp, synthetic construct
  misc_feature 1..20: note = chemically synthesized
  source 1..20: mol_type = other DNA
gaggcgggagggagctacga

SEQ ID NO: 10346 - DNA, 20 bp, synthetic construct
  misc_feature 1..20: note = chemically synthesized
  source 1..20: mol_type = other DNA
gggagggagctacgagggcc

SEQ ID NO: 10347 - DNA, 20 bp, synthetic construct
  misc_feature 1..20: note = chemically synthesized
  source 1..20: mol_type = other DNA
gagggagctacgagggccaa

SEQ ID NO: 10348 - DNA, 20 bp, synthetic construct
  misc_feature 1..20: note = chemically synthesized
  source 1..20: mol_type = other DNA
gctacgagggccaagagcat

SEQ ID NO: 10349 - DNA, 20 bp, synthetic construct
  misc_feature 1..20: note = chemically synthesized
  source 1..20: mol_type = other DNA
ctacgagggccaagagcatg

SEQ ID NO: 10350 - DNA, 20 bp, synthetic construct
  misc_feature 1..20: note = chemically synthesized
  source 1..20: mol_type = other DNA
gggccaagagcatgaggtca

SEQ ID NO: 10351 - DNA, 20 bp, synthetic construct
  misc_feature 1..20: note = chemically synthesized
  source 1..20: mol_type = other DNA
agcatgaggtcatggaaact

SEQ ID NO: 10352 - DNA, 20 bp, synthetic construct
  misc_feature 1..20: note = chemically synthesized
  source 1..20: mol_type = other DNA
gcatgaggtcatggaaactc

SEQ ID NO: 10353 - DNA, 20 bp, synthetic construct
  misc_feature 1..20: note = chemically synthesized
  source 1..20: mol_type = other DNA
tcatggaaactcgggctgtg

SEQ ID NO: 10354 - DNA, 20 bp, synthetic construct
  misc_feature 1..20: note = chemically synthesized
  source 1..20: mol_type = other DNA
catggaaactcgggctgtga

SEQ ID NO: 10355 - DNA, 20 bp, synthetic construct
  misc_feature 1..20: note = chemically synthesized
  source 1..20: mol_type = other DNA
atggaaactcgggctgtgaa

SEQ ID NO: 10356 - DNA, 20 bp, synthetic construct
  misc_feature 1..20: note = chemically synthesized
  source 1..20: mol_type = other DNA
tggaaactcgggctgtgaag

SEQ ID NO: 10357 - DNA, 20 bp, synthetic construct
  misc_feature 1..20: note = chemically synthesized
  source 1..20: mol_type = other DNA
tgaaggggccgcacgtgccc

SEQ ID NO: 10358 - DNA, 20 bp, synthetic construct
  misc_feature 1..20: note = chemically synthesized
  source 1..20: mol_type = other DNA
gaaggggccgcacgtgccct

SEQ ID NO: 10359 - DNA, 20 bp, synthetic construct
  misc_feature 1..20: note = chemically synthesized
  source 1..20: mol_type = other DNA
ggccgcacgtgccctgggaa

SEQ ID NO: 10360 - DNA, 20 bp, synthetic construct
  misc_feature 1..20: note = chemically synthesized
  source 1..20: mol_type = other DNA
gccgcacgtgccctgggaac

SEQ ID NO: 10361 - DNA, 20 bp, synthetic construct
  misc_feature 1..20: note = chemically synthesized
  source 1..20: mol_type = other DNA
ccctgggaacgggatgaact

SEQ ID NO: 10362 - DNA, 20 bp, synthetic construct
  misc_feature 1..20: note = chemically synthesized
  source 1..20: mol_type = other DNA
tcggctcgtttatttccacc

SEQ ID NO: 10363 - DNA, 20 bp, synthetic construct
  misc_feature 1..20: note = chemically synthesized
  source 1..20: mol_type = other DNA
ttatttccacccagttgtca

SEQ ID NO: 10364 - DNA, 20 bp, synthetic construct
  misc_feature 1..20: note = chemically synthesized
  source 1..20: mol_type = other DNA
ccacccagttgtcatggcga

SEQ ID NO: 10365 - DNA, 20 bp, synthetic construct
  misc_feature 1..20: note = chemically synthesized
  source 1..20: mol_type = other DNA
cacccagttgtcatggcgat

SEQ ID NO: 10366 - DNA, 20 bp, synthetic construct
  misc_feature 1..20: note = chemically synthesized
  source 1..20: mol_type = other DNA
acccagttgtcatggcgata

SEQ ID NO: 10367 - DNA, 20 bp, synthetic construct
  misc_feature 1..20: note = chemically synthesized
  source 1..20: mol_type = other DNA
cccagttgtcatggcgatag

SEQ ID NO: 10368 - DNA, 20 bp, synthetic construct
  misc_feature 1..20: note = chemically synthesized
  source 1..20: mol_type = other DNA
cagttgtcatggcgataggg

SEQ ID NO: 10369 - DNA, 20 bp, synthetic construct
  misc_feature 1..20: note = chemically synthesized
  source 1..20: mol_type = other DNA
agttgtcatggcgatagggg

SEQ ID NO: 10370 - DNA, 20 bp, synthetic construct
  misc_feature 1..20: note = chemically synthesized
  source 1..20: mol_type = other DNA
gttgtcatggcgatagggga

SEQ ID NO: 10371 - DNA, 20 bp, synthetic construct
  misc_feature 1..20: note = chemically synthesized
  source 1..20: mol_type = other DNA
ttgtcatggcgataggggag

SEQ ID NO: 10372 - DNA, 20 bp, synthetic construct
  misc_feature 1..20: note = chemically synthesized
  source 1..20: mol_type = other DNA
tgtcatggcgataggggagg

SEQ ID NO: 10373 - DNA, 20 bp, synthetic construct
  misc_feature 1..20: note = chemically synthesized
  source 1..20: mol_type = other DNA
gtcatggcgataggggaggg

SEQ ID NO: 10374 - DNA, 20 bp, synthetic construct
  misc_feature 1..20: note = chemically synthesized
  source 1..20: mol_type = other DNA
tggcgataggggaggggggc

SEQ ID NO: 10375 - DNA, 20 bp, synthetic construct
  misc_feature 1..20: note = chemically synthesized
  source 1..20: mol_type = other DNA
ggcgataggggaggggggca

SEQ ID NO: 10376 - DNA, 20 bp, synthetic construct
  misc_feature 1..20: note = chemically synthesized
  source 1..20: mol_type = other DNA
cgataggggaggggggcaag

SEQ ID NO: 10377 - DNA, 20 bp, synthetic construct
  misc_feature 1..20: note = chemically synthesized
  source 1..20: mol_type = other DNA
ataggggaggggggcaagga

SEQ ID NO: 10378 - DNA, 20 bp, synthetic construct
  misc_feature 1..20: note = chemically synthesized
  source 1..20: mol_type = other DNA
gaggggggcaaggagagcaa

SEQ ID NO: 10379 - DNA, 20 bp, synthetic construct
  misc_feature 1..20: note = chemically synthesized
  source 1..20: mol_type = other DNA
aggggggcaaggagagcaat

SEQ ID NO: 10380 - DNA, 20 bp, synthetic construct
  misc_feature 1..20: note = chemically synthesized
  source 1..20: mol_type = other DNA
gcaatgggcctttccctttc

SEQ ID NO: 10381 - DNA, 20 bp, synthetic construct
  misc_feature 1..20: note = chemically synthesized
  source 1..20: mol_type = other DNA
caatgggcctttccctttca

SEQ ID NO: 10382 - DNA, 20 bp, synthetic construct
  misc_feature 1..20: note = chemically synthesized
  source 1..20: mol_type = other DNA
ttccctttcaaggacctgcc

SEQ ID NO: 10383 - DNA, 20 bp, synthetic construct
  misc_feature 1..20: note = chemically synthesized
  source 1..20: mol_type = other DNA
tttcaaggacctgcccagta

SEQ ID NO: 10384 - DNA, 20 bp, synthetic construct
  misc_feature 1..20: note = chemically synthesized
  source 1..20: mol_type = other DNA
ttcaaggacctgcccagtac

SEQ ID NO: 10385 - DNA, 20 bp, synthetic construct
  misc_feature 1..20: note = chemically synthesized
  source 1..20: mol_type = other DNA
cagtacaggcatccctgtga

SEQ ID NO: 10386 - DNA, 20 bp, synthetic construct
  misc_feature 1..20: note = chemically synthesized
  source 1..20: mol_type = other DNA
catccctgtgaaagatgcct

SEQ ID NO: 10387 - DNA, 20 bp, synthetic construct
  misc_feature 1..20: note = chemically synthesized
  source 1..20: mol_type = other DNA
atccctgtgaaagatgcctg

SEQ ID NO: 10388 - DNA, 20 bp, synthetic construct
  misc_feature 1..20: note = chemically synthesized
  source 1..20: mol_type = other DNA
tgtgaaagatgcctgaggcc

SEQ ID NO: 10389 - DNA, 20 bp, synthetic construct
  misc_feature 1..20: note = chemically synthesized
  source 1..20: mol_type = other DNA
gtgaaagatgcctgaggcct

SEQ ID NO: 10390 - DNA, 20 bp, synthetic construct
  misc_feature 1..20: note = chemically synthesized
  source 1..20: mol_type = other DNA
gatgcctgaggcctgggcac

SEQ ID NO: 10391 - DNA, 20 bp, synthetic construct
  misc_feature 1..20: note = chemically synthesized
  source 1..20: mol_type = other DNA
atgcctgaggcctgggcacc

SEQ ID NO: 10392 - DNA, 20 bp, synthetic construct
  misc_feature 1..20: note = chemically synthesized
  source 1..20: mol_type = other DNA
tgcctgaggcctgggcacca

SEQ ID NO: 10393 - DNA, 20 bp, synthetic construct
  misc_feature 1..20: note = chemically synthesized
  source 1..20: mol_type = other DNA
ggcctgggcaccagggactc

SEQ ID NO: 10394 - DNA, 20 bp, synthetic construct
  misc_feature 1..20: note = chemically synthesized
  source 1..20: mol_type = other DNA
cctgggcaccagggactcca

SEQ ID NO: 10395 - DNA, 20 bp, synthetic construct
  misc_feature 1..20: note = chemically synthesized
  source 1..20: mol_type = other DNA
gcaccagggactccagagtc

SEQ ID NO: 10396 - DNA, 20 bp, synthetic construct
  misc_feature 1..20: note = chemically synthesized
  source 1..20: mol_type = other DNA
caccagggactccagagtcc

SEQ ID NO: 10397 - DNA, 20 bp, synthetic construct
  misc_feature 1..20: note = chemically synthesized
  source 1..20: mol_type = other DNA
caacccctccccattcaacc

SEQ ID NO: 10398 - DNA, 20 bp, synthetic construct
  misc_feature 1..20: note = chemically synthesized
  source 1..20: mol_type = other DNA
aacccctccccattcaaccc

SEQ ID NO: 10399 - DNA, 20 bp, synthetic construct
  misc_feature 1..20: note = chemically synthesized
  source 1..20: mol_type = other DNA
cccctccccattcaacccag

SEQ ID NO: 10400 - DNA, 20 bp, synthetic construct
  misc_feature 1..20: note = chemically synthesized
  source 1..20: mol_type = other DNA
ccctccccattcaacccagg

SEQ ID NO: 10401 - DNA, 20 bp, synthetic construct
  misc_feature 1..20: note = chemically synthesized
  source 1..20: mol_type = other DNA
ccccattcaacccaggaggc

SEQ ID NO: 10402 - DNA, 20 bp, synthetic construct
  misc_feature 1..20: note = chemically synthesized
  source 1..20: mol_type = other DNA
cccattcaacccaggaggcc

SEQ ID NO: 10403 - DNA, 20 bp, synthetic construct
  misc_feature 1..20: note = chemically synthesized
  source 1..20: mol_type = other DNA
caacccaggaggccaggccc

SEQ ID NO: 10404 - DNA, 20 bp, synthetic construct
  misc_feature 1..20: note = chemically synthesized
  source 1..20: mol_type = other DNA
ggccccagcccttccgccct

SEQ ID NO: 10405 - DNA, 20 bp, synthetic construct
  misc_feature 1..20: note = chemically synthesized
  source 1..20: mol_type = other DNA
agcccttccgccctcagatg

SEQ ID NO: 10406 - DNA, 20 bp, synthetic construct
  misc_feature 1..20: note = chemically synthesized
  source 1..20: mol_type = other DNA
gcccttccgccctcagatga

SEQ ID NO: 10407 - DNA, 20 bp, synthetic construct
  misc_feature 1..20: note = chemically synthesized
  source 1..20: mol_type = other DNA
ccttccgccctcagatgaag

SEQ ID NO: 10408 - DNA, 20 bp, synthetic construct
  misc_feature 1..20: note = chemically synthesized
  source 1..20: mol_type = other DNA
cgccctcagatgaaggagtc

SEQ ID NO: 10409 - DNA, 20 bp, synthetic construct
  misc_feature 1..20: note = chemically synthesized
  source 1..20: mol_type = other DNA
gccctcagatgaaggagtcc

SEQ ID NO: 10410 - DNA, 20 bp, synthetic construct
  misc_feature 1..20: note = chemically synthesized
  source 1..20: mol_type = other DNA
gatgaaggagtccaggcccc

SEQ ID NO: 10411 - DNA, 20 bp, synthetic construct
  misc_feature 1..20: note = chemically synthesized
  source 1..20: mol_type = other DNA
gcccccagcctctccccatt

SEQ ID NO: 10412 - DNA, 20 bp, synthetic construct
  misc_feature 1..20: note = chemically synthesized
  source 1..20: mol_type = other DNA
agcctctccccattcagacc

SEQ ID NO: 10413 - DNA, 20 bp, synthetic construct
  misc_feature 1..20: note = chemically synthesized
  source 1..20: mol_type = other DNA
gcctctccccattcagaccc

SEQ ID NO: 10414 - DNA, 20 bp, synthetic construct
  misc_feature 1..20: note = chemically synthesized
  source 1..20: mol_type = other DNA
cctctccccattcagaccca

SEQ ID NO: 10415 - DNA, 20 bp, synthetic construct
  misc_feature 1..20: note = chemically synthesized
  source 1..20: mol_type = other DNA
ctctccccattcagacccag

SEQ ID NO: 10416 - DNA, 20 bp, synthetic construct
  misc_feature 1..20: note = chemically synthesized
  source 1..20: mol_type = other DNA
cccattcagacccaggggtc

SEQ ID NO: 10417 - DNA, 20 bp, synthetic construct
  misc_feature 1..20: note = chemically synthesized
  source 1..20: mol_type = other DNA
ccattcagacccaggggtcc

SEQ ID NO: 10418 - DNA, 20 bp, synthetic construct
  misc_feature 1..20: note = chemically synthesized
  source 1..20: mol_type = other DNA
cagacccaggggtccaggcc

SEQ ID NO: 10419 - DNA, 20 bp, synthetic construct
  misc_feature 1..20: note = chemically synthesized
  source 1..20: mol_type = other DNA
aggcccagccccgcctccct

SEQ ID NO: 10420 - DNA, 20 bp, synthetic construct
  misc_feature 1..20: note = chemically synthesized
  source 1..20: mol_type = other DNA
agccccgcctccctaagacc

SEQ ID NO: 10421 - DNA, 20 bp, synthetic construct
  misc_feature 1..20: note = chemically synthesized
  source 1..20: mol_type = other DNA
cccgcctccctaagacccag

SEQ ID NO: 10422 - DNA, 20 bp, synthetic construct
  misc_feature 1..20: note = chemically synthesized
  source 1..20: mol_type = other DNA
ctccctaagacccagaagtc

SEQ ID NO: 10423 - DNA, 20 bp, synthetic construct
  misc_feature 1..20: note = chemically synthesized
  source 1..20: mol_type = other DNA
tccctaagacccagaagtcc

SEQ ID NO: 10424 - DNA, 20 bp, synthetic construct
  misc_feature 1..20: note = chemically synthesized
  source 1..20: mol_type = other DNA
gacccagaagtccaggcccc

SEQ ID NO: 10425 - DNA, 20 bp, synthetic construct
  misc_feature 1..20: note = chemically synthesized
  source 1..20: mol_type = other DNA
gcccccagcccctcctccct

SEQ ID NO: 10426 - DNA, 20 bp, synthetic construct
  misc_feature 1..20: note = chemically synthesized
  source 1..20: mol_type = other DNA
ccctcctccctcagacccac

SEQ ID NO: 10427 - DNA, 20 bp, synthetic construct
  misc_feature 1..20: note = chemically synthesized
  source 1..20: mol_type = other DNA
ctccctcagacccacgagtc

SEQ ID NO: 10428 - DNA, 20 bp, synthetic construct
  misc_feature 1..20: note = chemically synthesized
  source 1..20: mol_type = other DNA
tccctcagacccacgagtcc

SEQ ID NO: 10429 - DNA, 20 bp, synthetic construct
  misc_feature 1..20: note = chemically synthesized
  source 1..20: mol_type = other DNA
agacccacgagtccaggccc

SEQ ID NO: 10430 - DNA, 20 bp, synthetic construct
  misc_feature 1..20: note = chemically synthesized
  source 1..20: mol_type = other DNA
ggccccagcccctcctccct

SEQ ID NO: 10431 - DNA, 20 bp, synthetic construct
  misc_feature 1..20: note = chemically synthesized
  source 1..20: mol_type = other DNA
agcccctcctccctcggacc

SEQ ID NO: 10432 - DNA, 20 bp, synthetic construct
  misc_feature 1..20: note = chemically synthesized
  source 1..20: mol_type = other DNA
gcccctcctccctcggaccc

SEQ ID NO: 10433 - DNA, 20 bp, synthetic construct
  misc_feature 1..20: note = chemically synthesized
  source 1..20: mol_type = other DNA
ccctcctccctcggacccag

SEQ ID NO: 10434 - DNA, 20 bp, synthetic construct
  misc_feature 1..20: note = chemically synthesized
  source 1..20: mol_type = other DNA
ctccctcggacccaggagtc

SEQ ID NO: 10435 - DNA, 20 bp, synthetic construct
  misc_feature 1..20: note = chemically synthesized
  source 1..20: mol_type = other DNA
tccctcggacccaggagtcc

SEQ ID NO: 10436 - DNA, 20 bp, synthetic construct
  misc_feature 1..20: note = chemically synthesized
  source 1..20: mol_type = other DNA
gacccaggagtccaggcccc

SEQ ID NO: 10437 - DNA, 20 bp, synthetic construct
  misc_feature 1..20: note = chemically synthesized
  source 1..20: mol_type = other DNA
gcccccagtccctccaccct

SEQ ID NO: 10438 - DNA, 20 bp, synthetic construct
  misc_feature 1..20: note = chemically synthesized
  source 1..20: mol_type = other DNA
agtccctccaccctcagacc

SEQ ID NO: 10439 - DNA, 20 bp, synthetic construct
  misc_feature 1..20: note = chemically synthesized
  source 1..20: mol_type = other DNA
gtccctccaccctcagaccc

SEQ ID NO: 10440 - DNA, 20 bp, synthetic construct
  misc_feature 1..20: note = chemically synthesized
  source 1..20: mol_type = other DNA
ccctccaccctcagacccag

SEQ ID NO: 10441 - DNA, 20 bp, synthetic construct
  misc_feature 1..20: note = chemically synthesized
  source 1..20: mol_type = other DNA
caccctcagacccaggagtc

SEQ ID NO: 10442 - DNA, 20 bp, synthetic construct
  misc_feature 1..20: note = chemically synthesized
  source 1..20: mol_type = other DNA
accctcagacccaggagtcc

SEQ ID NO: 10443 - DNA, 20 bp, synthetic construct
  misc_feature 1..20: note = chemically synthesized
  source 1..20: mol_type = other DNA
agacccaggagtccaggccc

SEQ ID NO: 10444 - DNA, 20 bp, synthetic construct
  misc_feature 1..20: note = chemically synthesized
  source 1..20: mol_type = other DNA
ggccccagcccctcctccct

SEQ ID NO: 10445 - DNA, 20 bp, synthetic construct
  misc_feature 1..20: note = chemically synthesized
  source 1..20: mol_type = other DNA
agcccctcctccctcggacc

SEQ ID NO: 10446 - DNA, 20 bp, synthetic construct
  misc_feature 1..20: note = chemically synthesized
  source 1..20: mol_type = other DNA
gcccctcctccctcggaccc

SEQ ID NO: 10447 - DNA, 20 bp, synthetic construct
  misc_feature 1..20: note = chemically synthesized
  source 1..20: mol_type = other DNA
ccctcctccctcggacccag

SEQ ID NO: 10448 - DNA, 20 bp, synthetic construct
  misc_feature 1..20: note = chemically synthesized
  source 1..20: mol_type = other DNA
ctccctcggacccaggagtc

SEQ ID NO: 10449 - DNA, 20 bp, synthetic construct
  misc_feature 1..20: note = chemically synthesized
  source 1..20: mol_type = other DNA
tccctcggacccaggagtcc

SEQ ID NO: 10450 - DNA, 20 bp, synthetic construct
  misc_feature 1..20: note = chemically synthesized
  source 1..20: mol_type = other DNA
ggacccaggagtccaggccc

SEQ ID NO: 10451 - DNA, 20 bp, synthetic construct
  misc_feature 1..20: note = chemically synthesized
  source 1..20: mol_type = other DNA
agcccctcctctctcaaacc

SEQ ID NO: 10452 - DNA, 20 bp, synthetic construct
  misc_feature 1..20: note = chemically synthesized
  source 1..20: mol_type = other DNA
gcccctcctctctcaaaccc

SEQ ID NO: 10453 - DNA, 20 bp, synthetic construct
  misc_feature 1..20: note = chemically synthesized
  source 1..20: mol_type = other DNA
ccctcctctctcaaacccag

SEQ ID NO: 10454 - DNA, 20 bp, synthetic construct
  misc_feature 1..20: note = chemically synthesized
  source 1..20: mol_type = other DNA
ctctctcaaacccaggagcc

SEQ ID NO: 10455 - DNA, 20 bp, synthetic construct
  misc_feature 1..20: note = chemically synthesized
  source 1..20: mol_type = other DNA
tctctcaaacccaggagccc

SEQ ID NO: 10456 - DNA, 20 bp, synthetic construct
  misc_feature 1..20: note = chemically synthesized
  source 1..20: mol_type = other DNA
aacccaggagcccaggcccc

SEQ ID NO: 10457 - DNA, 20 bp, synthetic construct
  misc_feature 1..20: note = chemically synthesized
  source 1..20: mol_type = other DNA
gcccccagctcttctctgtt

SEQ ID NO: 10458 - DNA, 20 bp, synthetic construct
  misc_feature 1..20: note = chemically synthesized
  source 1..20: mol_type = other DNA
gctcttctctgttcagccct

SEQ ID NO: 10459 - DNA, 20 bp, synthetic construct
  misc_feature 1..20: note = chemically synthesized
  source 1..20: mol_type = other DNA
ctgttcagccctaagaatcc

SEQ ID NO: 10460 - DNA, 20 bp, synthetic construct
  misc_feature 1..20: note = chemically synthesized
  source 1..20: mol_type = other DNA
agccctaagaatcctggctc

SEQ ID NO: 10461 - DNA, 20 bp, synthetic construct
  misc_feature 1..20: note = chemically synthesized
  source 1..20: mol_type = other DNA
ggctccagcccctcctactc

SEQ ID NO: 10462 - DNA, 20 bp, synthetic construct
  misc_feature 1..20: note = chemically synthesized
  source 1..20: mol_type = other DNA
tactctagcccccaaccccc

SEQ ID NO: 10463 - DNA, 20 bp, synthetic construct
  misc_feature 1..20: note = chemically synthesized
  source 1..20: mol_type = other DNA
cccccaaccccctagccact

SEQ ID NO: 10464 - DNA, 20 bp, synthetic construct
  misc_feature 1..20: note = chemically synthesized
  source 1..20: mol_type = other DNA
ccccaaccccctagccacta

SEQ ID NO: 10465 - DNA, 20 bp, synthetic construct
  misc_feature 1..20: note = chemically synthesized
  source 1..20: mol_type = other DNA
cccctagccactaaggcaat

SEQ ID NO: 10466 - DNA, 20 bp, synthetic construct
  misc_feature 1..20: note = chemically synthesized
  source 1..20: mol_type = other DNA
ccctagccactaaggcaatt

SEQ ID NO: 10467 - DNA, 20 bp, synthetic construct
  misc_feature 1..20: note = chemically synthesized
  source 1..20: mol_type = other DNA
cctagccactaaggcaattg

SEQ ID NO: 10468 - DNA, 20 bp, synthetic construct
  misc_feature 1..20: note = chemically synthesized
  source 1..20: mol_type = other DNA
ccactaaggcaattggggtg

SEQ ID NO: 10469 - DNA, 20 bp, synthetic construct
  misc_feature 1..20: note = chemically synthesized
  source 1..20: mol_type = other DNA
cactaaggcaattggggtgc

SEQ ID NO: 10470 - DNA, 20 bp, synthetic construct
  misc_feature 1..20: note = chemically synthesized
  source 1..20: mol_type = other DNA
aggcaattggggtgcaggaa

SEQ ID NO: 10471 - DNA, 20 bp, synthetic construct
  misc_feature 1..20: note = chemically synthesized
  source 1..20: mol_type = other DNA
ggcaattggggtgcaggaat

SEQ ID NO: 10472 - DNA, 20 bp, synthetic construct
  misc_feature 1..20: note = chemically synthesized
  source 1..20: mol_type = other DNA
gcaattggggtgcaggaatg

SEQ ID NO: 10473 - DNA, 20 bp, synthetic construct
  misc_feature 1..20: note = chemically synthesized
  source 1..20: mol_type = other DNA
caattggggtgcaggaatgg

SEQ ID NO: 10474 - DNA, 20 bp, synthetic construct
  misc_feature 1..20: note = chemically synthesized
  source 1..20: mol_type = other DNA
ttggggtgcaggaatggggg

SEQ ID NO: 10475 - DNA, 20 bp, synthetic construct
  misc_feature 1..20: note = chemically synthesized
  source 1..20: mol_type = other DNA
tggggtgcaggaatgggggc

SEQ ID NO: 10476 - DNA, 20 bp, synthetic construct
  misc_feature 1..20: note = chemically synthesized
  source 1..20: mol_type = other DNA
ggggtgcaggaatgggggca

SEQ ID NO: 10477 - DNA, 20 bp, synthetic construct
  misc_feature 1..20: note = chemically synthesized
  source 1..20: mol_type = other DNA
caggaatgggggcagggtac

SEQ ID NO: 10478 - DNA, 20 bp, synthetic construct
  misc_feature 1..20: note = chemically synthesized
  source 1..20: mol_type = other DNA
ggcagggtaccagcctcacc

SEQ ID NO: 10479 - DNA, 20 bp, synthetic construct
  misc_feature 1..20: note = chemically synthesized
  source 1..20: mol_type = other DNA
agggtaccagcctcaccaag

SEQ ID NO: 10480 - DNA, 20 bp, synthetic construct
  misc_feature 1..20: note = chemically synthesized
  source 1..20: mol_type = other DNA
aagtggttgataaacccacg

SEQ ID NO: 10481 - DNA, 20 bp, synthetic construct
  misc_feature 1..20: note = chemically synthesized
  source 1..20: mol_type = other DNA
agtggttgataaacccacgt

SEQ ID NO: 10482 - DNA, 20 bp, synthetic construct
  misc_feature 1..20: note = chemically synthesized
  source 1..20: mol_type = other DNA
gtggttgataaacccacgtg

SEQ ID NO: 10483 - DNA, 20 bp, synthetic construct
  misc_feature 1..20: note = chemically synthesized
  source 1..20: mol_type = other DNA
aaacccacgtggggtaccct

SEQ ID NO: 10484 - DNA, 20 bp, synthetic construct
  misc_feature 1..20: note = chemically synthesized
  source 1..20: mol_type = other DNA
cgtggggtaccctaagaact

SEQ ID NO: 10485 - DNA, 20 bp, synthetic construct
  misc_feature 1..20: note = chemically synthesized
  source 1..20: mol_type = other DNA
gtggggtaccctaagaactt

SEQ ID NO: 10486 - DNA, 20 bp, synthetic construct
  misc_feature 1..20: note = chemically synthesized
  source 1..20: mol_type = other DNA
gtaccctaagaacttgggaa

SEQ ID NO: 10487 - DNA, 20 bp, synthetic construct
  misc_feature 1..20: note = chemically synthesized
  source 1..20: mol_type = other DNA
taagaacttgggaacagcca

SEQ ID NO: 10488 - DNA, 20 bp, synthetic construct
  misc_feature 1..20: note = chemically synthesized
  source 1..20: mol_type = other DNA
gaacttgggaacagccacag

SEQ ID NO: 10489 - DNA, 20 bp, synthetic construct
  misc_feature 1..20: note = chemically synthesized
  source 1..20: mol_type = other DNA
aacttgggaacagccacagc

SEQ ID NO: 10490 - DNA, 20 bp, synthetic construct
  misc_feature 1..20: note = chemically synthesized
  source 1..20: mol_type = other DNA
acttgggaacagccacagca

SEQ ID NO: 10491 - DNA, 20 bp, synthetic construct
  misc_feature 1..20: note = chemically synthesized
  source 1..20: mol_type = other DNA
cttgggaacagccacagcag

SEQ ID NO: 10492 - DNA, 20 bp, synthetic construct
  misc_feature 1..20: note = chemically synthesized
  source 1..20: mol_type = other DNA
ttgggaacagccacagcagg

SEQ ID NO: 10493 - DNA, 20 bp, synthetic construct
  misc_feature 1..20: note = chemically synthesized
  source 1..20: mol_type = other DNA
tgggaacagccacagcaggg

SEQ ID NO: 10494 - DNA, 20 bp, synthetic construct
  misc_feature 1..20: note = chemically synthesized
  source 1..20: mol_type = other DNA
cacagcaggggggcgatgct

SEQ ID NO: 10495 - DNA, 20 bp, synthetic construct
  misc_feature 1..20: note = chemically synthesized
  source 1..20: mol_type = other DNA
acagcaggggggcgatgctt

SEQ ID NO: 10496 - DNA, 20 bp, synthetic construct
  misc_feature 1..20: note = chemically synthesized
  source 1..20: mol_type = other DNA
cagcaggggggcgatgcttg

SEQ ID NO: 10497 - DNA, 20 bp, synthetic construct
  misc_feature 1..20: note = chemically synthesized
  source 1..20: mol_type = other DNA
gcgatgcttggggacctgcc

SEQ ID NO: 10498 - DNA, 20 bp, synthetic construct
  misc_feature 1..20: note = chemically synthesized
  source 1..20: mol_type = other DNA
gatgcttggggacctgcctg

SEQ ID NO: 10499 - DNA, 20 bp, synthetic construct
  misc_feature 1..20: note = chemically synthesized
  source 1..20: mol_type = other DNA
gcttggggacctgcctggag

SEQ ID NO: 10500 - DNA, 20 bp, synthetic construct
  misc_feature 1..20: note = chemically synthesized
  source 1..20: mol_type = other DNA
cttggggacctgcctggaga

SEQ ID NO: 10501 - DNA, 20 bp, synthetic construct
  misc_feature 1..20: note = chemically synthesized
  source 1..20: mol_type = other DNA
gacctgcctggagaaggatg

SEQ ID NO: 10502 - DNA, 20 bp, synthetic construct
  misc_feature 1..20: note = chemically synthesized
  source 1..20: mol_type = other DNA
acctgcctggagaaggatgc

SEQ ID NO: 10503 - DNA, 20 bp, synthetic construct
  misc_feature 1..20: note = chemically synthesized
  source 1..20: mol_type = other DNA
cctggagaaggatgcaggac

SEQ ID NO: 10504 - DNA, 20 bp, synthetic construct
  misc_feature 1..20: note = chemically synthesized
  source 1..20: mol_type = other DNA
aggatgcaggacgagaaaca

SEQ ID NO: 10505 - DNA, 20 bp, synthetic construct
  misc_feature 1..20: note = chemically synthesized
  source 1..20: mol_type = other DNA
caggacgagaaacacagccc

SEQ ID NO: 10506 - DNA, 20 bp, synthetic construct
  misc_feature 1..20: note = chemically synthesized
  source 1..20: mol_type = other DNA
aggacgagaaacacagcccc

SEQ ID NO: 10507 - DNA, 20 bp, synthetic construct
  misc_feature 1..20: note = chemically synthesized
  source 1..20: mol_type = other DNA
acgagaaacacagccccagg

SEQ ID NO: 10508 - DNA, 20 bp, synthetic construct
  misc_feature 1..20: note = chemically synthesized
  source 1..20: mol_type = other DNA
gagaaacacagccccaggtg

SEQ ID NO: 10509 - DNA, 20 bp, synthetic construct
  misc_feature 1..20: note = chemically synthesized
  source 1..20: mol_type = other DNA
acagccccaggtggagaaac

SEQ ID NO: 10510 - DNA, 20 bp, synthetic construct
  misc_feature 1..20: note = chemically synthesized
  source 1..20: mol_type = other DNA
ccccaggtggagaaactggc

SEQ ID NO: 10511 - DNA, 20 bp, synthetic construct
  misc_feature 1..20: note = chemically synthesized
  source 1..20: mol_type = other DNA
cccaggtggagaaactggcc

SEQ ID NO: 10512 - DNA, 20 bp, synthetic construct
  misc_feature 1..20: note = chemically synthesized
  source 1..20: mol_type = other DNA
ggagaaactggccgggaatc

SEQ ID NO: 10513 - DNA, 20 bp, synthetic construct
  misc_feature 1..20: note = chemically synthesized
  source 1..20: mol_type = other DNA
agaaactggccgggaatcaa

SEQ ID NO: 10514 - DNA, 20 bp, synthetic construct
  misc_feature 1..20: note = chemically synthesized
  source 1..20: mol_type = other DNA
gccgggaatcaagagtcacc

SEQ ID NO: 10515 - DNA, 20 bp, synthetic construct
  misc_feature 1..20: note = chemically synthesized
  source 1..20: mol_type = other DNA
cgggaatcaagagtcaccca

SEQ ID NO: 10516 - DNA, 20 bp, synthetic construct
  misc_feature 1..20: note = chemically synthesized
  source 1..20: mol_type = other DNA
aatcaagagtcacccagaga

SEQ ID NO: 10517 - DNA, 20 bp, synthetic construct
  misc_feature 1..20: note = chemically synthesized
  source 1..20: mol_type = other DNA
accaaccatccctgttttcc

SEQ ID NO: 10518 - DNA, 20 bp, synthetic construct
  misc_feature 1..20: note = chemically synthesized
  source 1..20: mol_type = other DNA
ccaaccatccctgttttcct

SEQ ID NO: 10519 - DNA, 20 bp, synthetic construct
  misc_feature 1..20: note = chemically synthesized
  source 1..20: mol_type = other DNA
atccctgttttcctaggact

SEQ ID NO: 10520 - DNA, 20 bp, synthetic construct
  misc_feature 1..20: note = chemically synthesized
  source 1..20: mol_type = other DNA
tccctgttttcctaggactg

SEQ ID NO: 10521 - DNA, 20 bp, synthetic construct
  misc_feature 1..20: note = chemically synthesized
  source 1..20: mol_type = other DNA
ccctgttttcctaggactga

SEQ ID NO: 10522 - DNA, 20 bp, synthetic construct
  misc_feature 1..20: note = chemically synthesized
  source 1..20: mol_type = other DNA
tttcctaggactgagggttt

SEQ ID NO: 10523 - DNA, 20 bp, synthetic construct
  misc_feature 1..20: note = chemically synthesized
  source 1..20: mol_type = other DNA
gagggtttcagtgctaaaac

SEQ ID NO: 10524 - DNA, 20 bp, synthetic construct
  misc_feature 1..20: note = chemically synthesized
  source 1..20: mol_type = other DNA
agggtttcagtgctaaaact

SEQ ID NO: 10525 - DNA, 20 bp, synthetic construct
  misc_feature 1..20: note = chemically synthesized
  source 1..20: mol_type = other DNA
gtgctaaaactaggctgtcc

SEQ ID NO: 10526 - DNA, 20 bp, synthetic construct
  misc_feature 1..20: note = chemically synthesized
  source 1..20: mol_type = other DNA
tgctaaaactaggctgtcct

SEQ ID NO: 10527 - DNA, 20 bp, synthetic construct
  misc_feature 1..20: note = chemically synthesized
  source 1..20: mol_type = other DNA
actaggctgtcctgggcaaa

SEQ ID NO: 10528 - DNA, 20 bp, synthetic construct
  misc_feature 1..20: note = chemically synthesized
  source 1..20: mol_type = other DNA
ctgtcctgggcaaacagcat

SEQ ID NO: 10529 - DNA, 20 bp, synthetic construct
  misc_feature 1..20: note = chemically synthesized
  source 1..20: mol_type = other DNA
cctgggcaaacagcataagc

SEQ ID NO: 10530 - DNA, 20 bp, synthetic construct
  misc_feature 1..20: note = chemically synthesized
  source 1..20: mol_type = other DNA
taagctggtcaccccacacc

SEQ ID NO: 10531 - DNA, 20 bp, synthetic construct
  misc_feature 1..20: note = chemically synthesized
  source 1..20: mol_type = other DNA
acccagacctgacccaaacc

SEQ ID NO: 10532 - DNA, 20 bp, synthetic construct
  misc_feature 1..20: note = chemically synthesized
  source 1..20: mol_type = other DNA
aacccagctcccctgcttct

SEQ ID NO: 10533 - DNA, 20 bp, synthetic construct
  misc_feature 1..20: note = chemically synthesized
  source 1..20: mol_type = other DNA
gcttcttggccacgtaacct

SEQ ID NO: 10534 - DNA, 20 bp, synthetic construct
  misc_feature 1..20: note = chemically synthesized
  source 1..20: mol_type = other DNA
tcttggccacgtaacctgag

SEQ ID NO: 10535 - DNA, 20 bp, synthetic construct
  misc_feature 1..20: note = chemically synthesized
  source 1..20: mol_type = other DNA
cttggccacgtaacctgaga

SEQ ID NO: 10536 - DNA, 20 bp, synthetic construct
  misc_feature 1..20: note = chemically synthesized
  source 1..20: mol_type = other DNA
ttggccacgtaacctgagaa

SEQ ID NO: 10537 - DNA, 20 bp, synthetic construct
  misc_feature 1..20: note = chemically synthesized
  source 1..20: mol_type = other DNA
aatccctcctctctgaaccc

SEQ ID NO: 10538 - DNA, 20 bp, synthetic construct
  misc_feature 1..20: note = chemically synthesized
  source 1..20: mol_type = other DNA
cccagcccaccccaatgctc

SEQ ID NO: 10539 - DNA, 20 bp, synthetic construct
  misc_feature 1..20: note = chemically synthesized
  source 1..20: mol_type = other DNA
ccagcccaccccaatgctcc

SEQ ID NO: 10540 - DNA, 20 bp, synthetic construct
  misc_feature 1..20: note = chemically synthesized
  source 1..20: mol_type = other DNA
ccccaatgctccaggcctcc

SEQ ID NO: 10541 - DNA, 20 bp, synthetic construct
  misc_feature 1..20: note = chemically synthesized
  source 1..20: mol_type = other DNA
cccaatgctccaggcctcct

SEQ ID NO: 10542 - DNA, 20 bp, synthetic construct
  misc_feature 1..20: note = chemically synthesized
  source 1..20: mol_type = other DNA
aggcctcctgggataccccg

SEQ ID NO: 10543 - DNA, 20 bp, synthetic construct
  misc_feature 1..20: note = chemically synthesized
  source 1..20: mol_type = other DNA
gcctcctgggataccccgaa

SEQ ID NO: 10544 - DNA, 20 bp, synthetic construct
  misc_feature 1..20: note = chemically synthesized
  source 1..20: mol_type = other DNA
cctgggataccccgaagagt

SEQ ID NO: 10545 - DNA, 20 bp, synthetic construct
  misc_feature 1..20: note = chemically synthesized
  source 1..20: mol_type = other DNA
ccccgaagagtgagtttgcc

SEQ ID NO: 10546 - DNA, 20 bp, synthetic construct
  misc_feature 1..20: note = chemically synthesized
  source 1..20: mol_type = other DNA
cgaagagtgagtttgccaag

SEQ ID NO: 10547 - DNA, 20 bp, synthetic construct
  misc_feature 1..20: note = chemically synthesized
  source 1..20: mol_type = other DNA
tttgccaagcagtcacccca

SEQ ID NO: 10548 - DNA, 20 bp, synthetic construct
  misc_feature 1..20: note = chemically synthesized
  source 1..20: mol_type = other DNA
ccaagcagtcaccccacagt

SEQ ID NO: 10549 - DNA, 20 bp, synthetic construct
  misc_feature 1..20: note = chemically synthesized
  source 1..20: mol_type = other DNA
aagcagtcaccccacagttg

SEQ ID NO: 10550 - DNA, 20 bp, synthetic construct
  misc_feature 1..20: note = chemically synthesized
  source 1..20: mol_type = other DNA
agcagtcaccccacagttgg

SEQ ID NO: 10551 - DNA, 20 bp, synthetic construct
  misc_feature 1..20: note = chemically synthesized
  source 1..20: mol_type = other DNA
cagtcaccccacagttggag

SEQ ID NO: 10552 - DNA, 20 bp, synthetic construct
  misc_feature 1..20: note = chemically synthesized
  source 1..20: mol_type = other DNA
ttggaggagaatccacccaa

SEQ ID NO: 10553 - DNA, 20 bp, synthetic construct
  misc_feature 1..20: note = chemically synthesized
  source 1..20: mol_type = other DNA
tggaggagaatccacccaaa

SEQ ID NO: 10554 - DNA, 20 bp, synthetic construct
  misc_feature 1..20: note = chemically synthesized
  source 1..20: mol_type = other DNA
aggagaatccacccaaaagg

SEQ ID NO: 10555 - DNA, 20 bp, synthetic construct
  misc_feature 1..20: note = chemically synthesized
  source 1..20: mol_type = other DNA
aatccacccaaaaggcagcc

SEQ ID NO: 10556 - DNA, 20 bp, synthetic construct
  misc_feature 1..20: note = chemically synthesized
  source 1..20: mol_type = other DNA
ccacccaaaaggcagcctgg

SEQ ID NO: 10557 - DNA, 20 bp, synthetic construct
  misc_feature 1..20: note = chemically synthesized
  source 1..20: mol_type = other DNA
ccaaaaggcagcctggtaga

SEQ ID NO: 10558 - DNA, 20 bp, synthetic construct
  misc_feature 1..20: note = chemically synthesized
  source 1..20: mol_type = other DNA
caaaaggcagcctggtagac

SEQ ID NO: 10559 - DNA, 20 bp, synthetic construct
  misc_feature 1..20: note = chemically synthesized
  source 1..20: mol_type = other DNA
aaaaggcagcctggtagaca

SEQ ID NO: 10560 - DNA, 20 bp, synthetic construct
  misc_feature 1..20: note = chemically synthesized
  source 1..20: mol_type = other DNA
ggcagcctggtagacagggc

SEQ ID NO: 10561 - DNA, 20 bp, synthetic construct
  misc_feature 1..20: note = chemically synthesized
  source 1..20: mol_type = other DNA
gcagcctggtagacagggct

SEQ ID NO: 10562 - DNA, 20 bp, synthetic construct
  misc_feature 1..20: note = chemically synthesized
  source 1..20: mol_type = other DNA
cagcctggtagacagggctg

SEQ ID NO: 10563 - DNA, 20 bp, synthetic construct
  misc_feature 1..20: note = chemically synthesized
  source 1..20: mol_type = other DNA
cctggtagacagggctgggg

SEQ ID NO: 10564 - DNA, 20 bp, synthetic construct
  misc_feature 1..20: note = chemically synthesized
  source 1..20: mol_type = other DNA
agggctggggtggcctctcg

SEQ ID NO: 10565 - DNA, 20 bp, synthetic construct
  misc_feature 1..20: note = chemically synthesized
  source 1..20: mol_type = other DNA
gggctggggtggcctctcgt

SEQ ID NO: 10566 - DNA, 20 bp, synthetic construct
  misc_feature 1..20: note = chemically synthesized
  source 1..20: mol_type = other DNA
ggctggggtggcctctcgtg

SEQ ID NO: 10567 - DNA, 20 bp, synthetic construct
  misc_feature 1..20: note = chemically synthesized
  source 1..20: mol_type = other DNA
gggtggcctctcgtggggtc

SEQ ID NO: 10568 - DNA, 20 bp, synthetic construct
  misc_feature 1..20: note = chemically synthesized
  source 1..20: mol_type = other DNA
ggtggcctctcgtggggtcc

SEQ ID NO: 10569 - DNA, 20 bp, synthetic construct
  misc_feature 1..20: note = chemically synthesized
  source 1..20: mol_type = other DNA
cctctcgtggggtccaggcc

SEQ ID NO: 10570 - DNA, 20 bp, synthetic construct
  misc_feature 1..20: note = chemically synthesized
  source 1..20: mol_type = other DNA
ctcgtggggtccaggccaag

SEQ ID NO: 10571 - DNA, 20 bp, synthetic construct
  misc_feature 1..20: note = chemically synthesized
  source 1..20: mol_type = other DNA
tcgtggggtccaggccaagt

SEQ ID NO: 10572 - DNA, 20 bp, synthetic construct
  misc_feature 1..20: note = chemically synthesized
  source 1..20: mol_type = other DNA
tggggtccaggccaagtagg

SEQ ID NO: 10573 - DNA, 20 bp, synthetic construct
  misc_feature 1..20: note = chemically synthesized
  source 1..20: mol_type = other DNA
tccaggccaagtaggtggcc

SEQ ID NO: 10574 - DNA, 20 bp, synthetic construct
  misc_feature 1..20: note = chemically synthesized
  source 1..20: mol_type = other DNA
ccaggccaagtaggtggcct

SEQ ID NO: 10575 - DNA, 20 bp, synthetic construct
  misc_feature 1..20: note = chemically synthesized
  source 1..20: mol_type = other DNA
caggccaagtaggtggcctg

SEQ ID NO: 10576 - DNA, 20 bp, synthetic construct
  misc_feature 1..20: note = chemically synthesized
  source 1..20: mol_type = other DNA
agtaggtggcctggggcctc

SEQ ID NO: 10577 - DNA, 20 bp, synthetic construct
  misc_feature 1..20: note = chemically synthesized
  source 1..20: mol_type = other DNA
gtaggtggcctggggcctct

SEQ ID NO: 10578 - DNA, 20 bp, synthetic construct
  misc_feature 1..20: note = chemically synthesized
  source 1..20: mol_type = other DNA
taggtggcctggggcctctg

SEQ ID NO: 10579 - DNA, 20 bp, synthetic construct
  misc_feature 1..20: note = chemically synthesized
  source 1..20: mol_type = other DNA
aggtggcctggggcctctgg

SEQ ID NO: 10580 - DNA, 20 bp, synthetic construct
  misc_feature 1..20: note = chemically synthesized
  source 1..20: mol_type = other DNA
cctggggcctctgggggatg

SEQ ID NO: 10581 - DNA, 20 bp, synthetic construct
  misc_feature 1..20: note = chemically synthesized
  source 1..20: mol_type = other DNA
ctggggcctctgggggatgc

SEQ ID NO: 10582 - DNA, 20 bp, synthetic construct
  misc_feature 1..20: note = chemically synthesized
  source 1..20: mol_type = other DNA
tggggcctctgggggatgca

SEQ ID NO: 10583 - DNA, 20 bp, synthetic construct
  misc_feature 1..20: note = chemically synthesized
  source 1..20: mol_type = other DNA
ggggcctctgggggatgcag

SEQ ID NO: 10584 - DNA, 20 bp, synthetic construct
  misc_feature 1..20: note = chemically synthesized
  source 1..20: mol_type = other DNA
gcctctgggggatgcagggg

SEQ ID NO: 10585 - DNA, 20 bp, synthetic construct
  misc_feature 1..20: note = chemically synthesized
  source 1..20: mol_type = other DNA
cctctgggggatgcagggga

SEQ ID NO: 10586 - DNA, 20 bp, synthetic construct
  misc_feature 1..20: note = chemically synthesized
  source 1..20: mol_type = other DNA
ctctgggggatgcaggggaa

SEQ ID NO: 10587 - DNA, 20 bp, synthetic construct
  misc_feature 1..20: note = chemically synthesized
  source 1..20: mol_type = other DNA
tctgggggatgcaggggaag

SEQ ID NO: 10588 - DNA, 20 bp, synthetic construct
  misc_feature 1..20: note = chemically synthesized
  source 1..20: mol_type = other DNA
ctgggggatgcaggggaagg

SEQ ID NO: 10589 - DNA, 20 bp, synthetic construct
  misc_feature 1..20: note = chemically synthesized
  source 1..20: mol_type = other DNA
gatgcaggggaagggggatg

SEQ ID NO: 10590 - DNA, 20 bp, synthetic construct
  misc_feature 1..20: note = chemically synthesized
  source 1..20: mol_type = other DNA
atgcaggggaagggggatgc

SEQ ID NO: 10591 - DNA, 20 bp, synthetic construct
  misc_feature 1..20: note = chemically synthesized
  source 1..20: mol_type = other DNA
tgcaggggaagggggatgca

SEQ ID NO: 10592 - DNA, 20 bp, synthetic construct
  misc_feature 1..20: note = chemically synthesized
  source 1..20: mol_type = other DNA
gcaggggaagggggatgcag

SEQ ID NO: 10593 - DNA, 20 bp, synthetic construct
  misc_feature 1..20: note = chemically synthesized
  source 1..20: mol_type = other DNA
ggaagggggatgcaggggaa

SEQ ID NO: 10594 - DNA, 20 bp, synthetic construct
  misc_feature 1..20: note = chemically synthesized
  source 1..20: mol_type = other DNA
gaagggggatgcaggggaac

SEQ ID NO: 10595 - DNA, 20 bp, synthetic construct
  misc_feature 1..20: note = chemically synthesized
  source 1..20: mol_type = other DNA
aagggggatgcaggggaacg

SEQ ID NO: 10596 - DNA, 20 bp, synthetic construct
  misc_feature 1..20: note = chemically synthesized
  source 1..20: mol_type = other DNA
gatgcaggggaacggggatg

SEQ ID NO: 10597 - DNA, 20 bp, synthetic construct
  misc_feature 1..20: note = chemically synthesized
  source 1..20: mol_type = other DNA
atgcaggggaacggggatgc

SEQ ID NO: 10598 - DNA, 20 bp, synthetic construct
  misc_feature 1..20: note = chemically synthesized
  source 1..20: mol_type = other DNA
tgcaggggaacggggatgca

SEQ ID NO: 10599 - DNA, 20 bp, synthetic construct
  misc_feature 1..20: note = chemically synthesized
  source 1..20: mol_type = other DNA
gcaggggaacggggatgcag

SEQ ID NO: 10600 - DNA, 20 bp, synthetic construct
  misc_feature 1..20: note = chemically synthesized
  source 1..20: mol_type = other DNA
ggaacggggatgcaggggaa

SEQ ID NO: 10601 - DNA, 20 bp, synthetic construct
  misc_feature 1..20: note = chemically synthesized
  source 1..20: mol_type = other DNA
gaacggggatgcaggggaac

SEQ ID NO: 10602 - DNA, 20 bp, synthetic construct
  misc_feature 1..20: note = chemically synthesized
  source 1..20: mol_type = other DNA
aacggggatgcaggggaacg

SEQ ID NO: 10603 - DNA, 20 bp, synthetic construct
  misc_feature 1..20: note = chemically synthesized
  source 1..20: mol_type = other DNA
ggatgcaggggaacggggct

SEQ ID NO: 10604 - DNA, 20 bp, synthetic construct
  misc_feature 1..20: note = chemically synthesized
  source 1..20: mol_type = other DNA
ggggaacggggctcagtctg

SEQ ID NO: 10605 - DNA, 20 bp, synthetic construct
  misc_feature 1..20: note = chemically synthesized
  source 1..20: mol_type = other DNA
ggaacggggctcagtctgaa

SEQ ID NO: 10606 - DNA, 20 bp, synthetic construct
  misc_feature 1..20: note = chemically synthesized
  source 1..20: mol_type = other DNA
acggggctcagtctgaagag

SEQ ID NO: 10607 - DNA, 20 bp, synthetic construct
  misc_feature 1..20: note = chemically synthesized
  source 1..20: mol_type = other DNA
ggggctcagtctgaagagca

SEQ ID NO: 10608 - DNA, 20 bp, synthetic construct
  misc_feature 1..20: note = chemically synthesized
  source 1..20: mol_type = other DNA
ctcagtctgaagagcagagc

SEQ ID NO: 10609 - DNA, 20 bp, synthetic construct
  misc_feature 1..20: note = chemically synthesized
  source 1..20: mol_type = other DNA
tcagtctgaagagcagagcc

SEQ ID NO: 10610 - DNA, 20 bp, synthetic construct
  misc_feature 1..20: note = chemically synthesized
  source 1..20: mol_type = other DNA
agcagagccaggaacccctg

SEQ ID NO: 10611 - DNA, 20 bp, synthetic construct
  misc_feature 1..20: note = chemically synthesized
  source 1..20: mol_type = other DNA
gcagagccaggaacccctgt

SEQ ID NO: 10612 - DNA, 20 bp, synthetic construct
  misc_feature 1..20: note = chemically synthesized
  source 1..20: mol_type = other DNA
cagagccaggaacccctgta

SEQ ID NO: 10613 - DNA, 20 bp, synthetic construct
  misc_feature 1..20: note = chemically synthesized
  source 1..20: mol_type = other DNA
agccaggaacccctgtaggg

SEQ ID NO: 10614 - DNA, 20 bp, synthetic construct
  misc_feature 1..20: note = chemically synthesized
  source 1..20: mol_type = other DNA
gccaggaacccctgtaggga

SEQ ID NO: 10615 - DNA, 20 bp, synthetic construct
  misc_feature 1..20: note = chemically synthesized
  source 1..20: mol_type = other DNA
ccaggaacccctgtagggaa

SEQ ID NO: 10616 - DNA, 20 bp, synthetic construct
  misc_feature 1..20: note = chemically synthesized
  source 1..20: mol_type = other DNA
caggaacccctgtagggaag

SEQ ID NO: 10617 - DNA, 20 bp, synthetic construct
  misc_feature 1..20: note = chemically synthesized
  source 1..20: mol_type = other DNA
gaacccctgtagggaagggg

SEQ ID NO: 10618 - DNA, 20 bp, synthetic construct
  misc_feature 1..20: note = chemically synthesized
  source 1..20: mol_type = other DNA
aacccctgtagggaaggggc

SEQ ID NO: 10619 - DNA, 20 bp, synthetic construct
  misc_feature 1..20: note = chemically synthesized
  source 1..20: mol_type = other DNA
cccctgtagggaaggggcag

SEQ ID NO: 10620 - DNA, 20 bp, synthetic construct
  misc_feature 1..20: note = chemically synthesized
  source 1..20: mol_type = other DNA
cctgtagggaaggggcagga

SEQ ID NO: 10621 - DNA, 20 bp, synthetic construct
  misc_feature 1..20: note = chemically synthesized
  source 1..20: mol_type = other DNA
tagggaaggggcaggagagc

SEQ ID NO: 10622 - DNA, 20 bp, synthetic construct
  misc_feature 1..20: note = chemically synthesized
  source 1..20: mol_type = other DNA
agggaaggggcaggagagcc

SEQ ID NO: 10623 - DNA, 20 bp, synthetic construct
  misc_feature 1..20: note = chemically synthesized
  source 1..20: mol_type = other DNA
gggaaggggcaggagagcca

SEQ ID NO: 10624 - DNA, 20 bp, synthetic construct
  misc_feature 1..20: note = chemically synthesized
  source 1..20: mol_type = other DNA
ggaaggggcaggagagccag

SEQ ID NO: 10625 - DNA, 20 bp, synthetic construct
  misc_feature 1..20: note = chemically synthesized
  source 1..20: mol_type = other DNA
ggcaggagagccaggggcat

SEQ ID NO: 10626 - DNA, 20 bp, synthetic construct
  misc_feature 1..20: note = chemically synthesized
  source 1..20: mol_type = other DNA
ggagagccaggggcatgaga

SEQ ID NO: 10627 - DNA, 20 bp, synthetic construct
  misc_feature 1..20: note = chemically synthesized
  source 1..20: mol_type = other DNA
gagccaggggcatgagatgg

SEQ ID NO: 10628 - DNA, 20 bp, synthetic construct
  misc_feature 1..20: note = chemically synthesized
  source 1..20: mol_type = other DNA
aggggcatgagatggtggac

SEQ ID NO: 10629 - DNA, 20 bp, synthetic construct
  misc_feature 1..20: note = chemically synthesized
  source 1..20: mol_type = other DNA
ggggcatgagatggtggacg

SEQ ID NO: 10630 - DNA, 20 bp, synthetic construct
  misc_feature 1..20: note = chemically synthesized
  source 1..20: mol_type = other DNA
gcatgagatggtggacgagg

SEQ ID NO: 10631 - DNA, 20 bp, synthetic construct
  misc_feature 1..20: note = chemically synthesized
  source 1..20: mol_type = other DNA
catgagatggtggacgagga

SEQ ID NO: 10632 - DNA, 20 bp, synthetic construct
  misc_feature 1..20: note = chemically synthesized
  source 1..20: mol_type = other DNA
atgagatggtggacgaggaa

SEQ ID NO: 10633 - DNA, 20 bp, synthetic construct
  misc_feature 1..20: note = chemically synthesized
  source 1..20: mol_type = other DNA
tgagatggtggacgaggaag

SEQ ID NO: 10634 - DNA, 20 bp, synthetic construct
  misc_feature 1..20: note = chemically synthesized
  source 1..20: mol_type = other DNA
gagatggtggacgaggaagg

SEQ ID NO: 10635 - DNA, 20 bp, synthetic construct
  misc_feature 1..20: note = chemically synthesized
  source 1..20: mol_type = other DNA
tggtggacgaggaaggggga

SEQ ID NO: 10636 - DNA, 20 bp, synthetic construct
  misc_feature 1..20: note = chemically synthesized
  source 1..20: mol_type = other DNA
ggtggacgaggaagggggac

SEQ ID NO: 10637 - DNA, 20 bp, synthetic construct
  misc_feature 1..20: note = chemically synthesized
  source 1..20: mol_type = other DNA
gtggacgaggaagggggaca

SEQ ID NO: 10638 - DNA, 20 bp, synthetic construct
  misc_feature 1..20: note = chemically synthesized
  source 1..20: mol_type = other DNA
gacgaggaagggggacaggg

SEQ ID NO: 10639 - DNA, 20 bp, synthetic construct
  misc_feature 1..20: note = chemically synthesized
  source 1..20: mol_type = other DNA
gaagggggacagggaagcct

SEQ ID NO: 10640 - DNA, 20 bp, synthetic construct
  misc_feature 1..20: note = chemically synthesized
  source 1..20: mol_type = other DNA
ggaagcctgagcgcctctcc

SEQ ID NO: 10641 - DNA, 20 bp, synthetic construct
  misc_feature 1..20: note = chemically synthesized
  source 1..20: mol_type = other DNA
gaagcctgagcgcctctcct

SEQ ID NO: 10642 - DNA, 20 bp, synthetic construct
  misc_feature 1..20: note = chemically synthesized
  source 1..20: mol_type = other DNA
gcgcctctcctgggcttgcc

SEQ ID NO: 10643 - DNA, 20 bp, synthetic construct
  misc_feature 1..20: note = chemically synthesized
  source 1..20: mol_type = other DNA
cgcctctcctgggcttgcca

SEQ ID NO: 10644 - DNA, 20 bp, synthetic construct
  misc_feature 1..20: note = chemically synthesized
  source 1..20: mol_type = other DNA
gcttgccaaggactcaaacc

SEQ ID NO: 10645 - DNA, 20 bp, synthetic construct
  misc_feature 1..20: note = chemically synthesized
  source 1..20: mol_type = other DNA
tgccaaggactcaaacccag

SEQ ID NO: 10646 - DNA, 20 bp, synthetic construct
  misc_feature 1..20: note = chemically synthesized
  source 1..20: mol_type = other DNA
aggactcaaacccagaagcc

SEQ ID NO: 10647 - DNA, 20 bp, synthetic construct
  misc_feature 1..20: note = chemically synthesized
  source 1..20: mol_type = other DNA
gactcaaacccagaagccca

SEQ ID NO: 10648 - DNA, 20 bp, synthetic construct
  misc_feature 1..20: note = chemically synthesized
  source 1..20: mol_type = other DNA
tcaaacccagaagcccagag

SEQ ID NO: 10649 - DNA, 20 bp, synthetic construct
  misc_feature 1..20: note = chemically synthesized
  source 1..20: mol_type = other DNA
caaacccagaagcccagagc

SEQ ID NO: 10650 - DNA, 20 bp, synthetic construct
  misc_feature 1..20: note = chemically synthesized
  source 1..20: mol_type = other DNA
aaacccagaagcccagagca

SEQ ID NO: 10651 - DNA, 20 bp, synthetic construct
  misc_feature 1..20: note = chemically synthesized
  source 1..20: mol_type = other DNA
agaagcccagagcagggcct

SEQ ID NO: 10652 - DNA, 20 bp, synthetic construct
  misc_feature 1..20: note = chemically synthesized
  source 1..20: mol_type = other DNA
gaagcccagagcagggcctt

SEQ ID NO: 10653 - DNA, 20 bp, synthetic construct
  misc_feature 1..20: note = chemically synthesized
  source 1..20: mol_type = other DNA
aagcccagagcagggcctta

SEQ ID NO: 10654 - DNA, 20 bp, synthetic construct
  misc_feature 1..20: note = chemically synthesized
  source 1..20: mol_type = other DNA
cccagagcagggccttaggg

SEQ ID NO: 10655 - DNA, 20 bp, synthetic construct
  misc_feature 1..20: note = chemically synthesized
  source 1..20: mol_type = other DNA
agagcagggccttagggaag

SEQ ID NO: 10656 - DNA, 20 bp, synthetic construct
  misc_feature 1..20: note = chemically synthesized
  source 1..20: mol_type = other DNA
gagcagggccttagggaagc

SEQ ID NO: 10657 - DNA, 20 bp, synthetic construct
  misc_feature 1..20: note = chemically synthesized
  source 1..20: mol_type = other DNA
agggaagcgggaccctgctc

SEQ ID NO: 10658 - DNA, 20 bp, synthetic construct
  misc_feature 1..20: note = chemically synthesized
  source 1..20: mol_type = other DNA
gggaagcgggaccctgctct

SEQ ID NO: 10659 - DNA, 20 bp, synthetic construct
  misc_feature 1..20: note = chemically synthesized
  source 1..20: mol_type = other DNA
aagcgggaccctgctctggg

SEQ ID NO: 10660 - DNA, 20 bp, synthetic construct
  misc_feature 1..20: note = chemically synthesized
  source 1..20: mol_type = other DNA
gcgggaccctgctctgggcg

SEQ ID NO: 10661 - DNA, 20 bp, synthetic construct
  misc_feature 1..20: note = chemically synthesized
  source 1..20: mol_type = other DNA
cgggaccctgctctgggcgg

SEQ ID NO: 10662 - DNA, 20 bp, synthetic construct
  misc_feature 1..20: note = chemically synthesized
  source 1..20: mol_type = other DNA
ctgggcggaggaatatgtcc

SEQ ID NO: 10663 - DNA, 20 bp, synthetic construct
  misc_feature 1..20: note = chemically synthesized
  source 1..20: mol_type = other DNA
gcggaggaatatgtcccaga

SEQ ID NO: 10664 - DNA, 20 bp, synthetic construct
  misc_feature 1..20: note = chemically synthesized
  source 1..20: mol_type = other DNA
gaatatgtcccagatagcac

SEQ ID NO: 10665 - DNA, 20 bp, synthetic construct
  misc_feature 1..20: note = chemically synthesized
  source 1..20: mol_type = other DNA
aatatgtcccagatagcact

SEQ ID NO: 10666 - DNA, 20 bp, synthetic construct
  misc_feature 1..20: note = chemically synthesized
  source 1..20: mol_type = other DNA
atatgtcccagatagcactg

SEQ ID NO: 10667 - DNA, 20 bp, synthetic construct
  misc_feature 1..20: note = chemically synthesized
  source 1..20: mol_type = other DNA
gatagcactggggactcttt

SEQ ID NO: 10668 - DNA, 20 bp, synthetic construct
  misc_feature 1..20: note = chemically synthesized
  source 1..20: mol_type = other DNA
atagcactggggactcttta

SEQ ID NO: 10669 - DNA, 20 bp, synthetic construct
  misc_feature 1..20: note = chemically synthesized
  source 1..20: mol_type = other DNA
cactggggactctttaagga

SEQ ID NO: 10670 - DNA, 20 bp, synthetic construct
  misc_feature 1..20: note = chemically synthesized
  source 1..20: mol_type = other DNA
tggggactctttaaggaaag

SEQ ID NO: 10671 - DNA, 20 bp, synthetic construct
  misc_feature 1..20: note = chemically synthesized
  source 1..20: mol_type = other DNA
ggggactctttaaggaaaga

SEQ ID NO: 10672 - DNA, 20 bp, synthetic construct
  misc_feature 1..20: note = chemically synthesized
  source 1..20: mol_type = other DNA
actctttaaggaaagaagga

SEQ ID NO: 10673 - DNA, 20 bp, synthetic construct
  misc_feature 1..20: note = chemically synthesized
  source 1..20: mol_type = other DNA
tctttaaggaaagaaggatg

SEQ ID NO: 10674 - DNA, 20 bp, synthetic construct
  misc_feature 1..20: note = chemically synthesized
  source 1..20: mol_type = other DNA
taaggaaagaaggatggaga

SEQ ID NO: 10675 - DNA, 20 bp, synthetic construct
  misc_feature 1..20: note = chemically synthesized
  source 1..20: mol_type = other DNA
aggaaagaaggatggagaaa

SEQ ID NO: 10676 - DNA, 20 bp, synthetic construct
  misc_feature 1..20: note = chemically synthesized
  source 1..20: mol_type = other DNA
aagaaggatggagaaagaga

SEQ ID NO: 10677 - DNA, 20 bp, synthetic construct
  misc_feature 1..20: note = chemically synthesized
  source 1..20: mol_type = other DNA
agaaggatggagaaagagaa

SEQ ID NO: 10678 - DNA, 20 bp, synthetic construct
  misc_feature 1..20: note = chemically synthesized
  source 1..20: mol_type = other DNA
gaaggatggagaaagagaaa

SEQ ID NO: 10679 - DNA, 20 bp, synthetic construct
  misc_feature 1..20: note = chemically synthesized
  source 1..20: mol_type = other DNA
aggatggagaaagagaaagg

SEQ ID NO: 10680 - DNA, 20 bp, synthetic construct
  misc_feature 1..20: note = chemically synthesized
  source 1..20: mol_type = other DNA
atggagaaagagaaagggag

SEQ ID NO: 10681 - DNA, 20 bp, synthetic construct
  misc_feature 1..20: note = chemically synthesized
  source 1..20: mol_type = other DNA
ggagaaagagaaagggagta

SEQ ID NO: 10682 - DNA, 20 bp, synthetic construct
  misc_feature 1..20: note = chemically synthesized
  source 1..20: mol_type = other DNA
gagaaagagaaagggagtag

SEQ ID NO: 10683 - DNA, 20 bp, synthetic construct
  misc_feature 1..20: note = chemically synthesized
  source 1..20: mol_type = other DNA
aaagagaaagggagtagagg

SEQ ID NO: 10684 - DNA, 20 bp, synthetic construct
  misc_feature 1..20: note = chemically synthesized
  source 1..20: mol_type = other DNA
gagtagaggcggccacgacc

SEQ ID NO: 10685 - DNA, 20 bp, synthetic construct
  misc_feature 1..20: note = chemically synthesized
  source 1..20: mol_type = other DNA
gccacgacctggtgaacacc

SEQ ID NO: 10686 - DNA, 20 bp, synthetic construct
  misc_feature 1..20: note = chemically synthesized
  source 1..20: mol_type = other DNA
ccacgacctggtgaacacct

SEQ ID NO: 10687 - DNA, 20 bp, synthetic construct
  misc_feature 1..20: note = chemically synthesized
  source 1..20: mol_type = other DNA
taggacgcaccattctcaca

SEQ ID NO: 10688 - DNA, 20 bp, synthetic construct
  misc_feature 1..20: note = chemically synthesized
  source 1..20: mol_type = other DNA
aggacgcaccattctcacaa

SEQ ID NO: 10689 - DNA, 20 bp, synthetic construct
  misc_feature 1..20: note = chemically synthesized
  source 1..20: mol_type = other DNA
ggacgcaccattctcacaaa

SEQ ID NO: 10690 - DNA, 20 bp, synthetic construct
  misc_feature 1..20: note = chemically synthesized
  source 1..20: mol_type = other DNA
acgcaccattctcacaaagg

SEQ ID NO: 10691 - DNA, 20 bp, synthetic construct
  misc_feature 1..20: note = chemically synthesized
  source 1..20: mol_type = other DNA
cacaaagggagttttccaca

SEQ ID NO: 10692 - DNA, 20 bp, synthetic construct
  misc_feature 1..20: note = chemically synthesized
  source 1..20: mol_type = other DNA
ggacacccccctcctcacca

SEQ ID NO: 10693 - DNA, 20 bp, synthetic construct
  misc_feature 1..20: note = chemically synthesized
  source 1..20: mol_type = other DNA
cctcctcaccacagccctgc

SEQ ID NO: 10694 - DNA, 20 bp, synthetic construct
  misc_feature 1..20: note = chemically synthesized
  source 1..20: mol_type = other DNA
ctcctcaccacagccctgcc

SEQ ID NO: 10695 - DNA, 20 bp, synthetic construct
  misc_feature 1..20: note = chemically synthesized
  source 1..20: mol_type = other DNA
tcaccacagccctgccagga

SEQ ID NO: 10696 - DNA, 20 bp, synthetic construct
  misc_feature 1..20: note = chemically synthesized
  source 1..20: mol_type = other DNA
caccacagccctgccaggac

SEQ ID NO: 10697 - DNA, 20 bp, synthetic construct
  misc_feature 1..20: note = chemically synthesized
  source 1..20: mol_type = other DNA
accacagccctgccaggacg

SEQ ID NO: 10698 - DNA, 20 bp, synthetic construct
  misc_feature 1..20: note = chemically synthesized
  source 1..20: mol_type = other DNA
cagccctgccaggacggggc

SEQ ID NO: 10699 - DNA, 20 bp, synthetic construct
  misc_feature 1..20: note = chemically synthesized
  source 1..20: mol_type = other DNA
gccaggacggggctggctac

SEQ ID NO: 10700 - DNA, 20 bp, synthetic construct
  misc_feature 1..20: note = chemically synthesized
  source 1..20: mol_type = other DNA
tggctactggccttatctca

SEQ ID NO: 10701 - DNA, 20 bp, synthetic construct
  misc_feature 1..20: note = chemically synthesized
  source 1..20: mol_type = other DNA
ggctactggccttatctcac

SEQ ID NO: 10702 - DNA, 20 bp, synthetic construct
  misc_feature 1..20: note = chemically synthesized
  source 1..20: mol_type = other DNA
tcacaggtaaaactgacgca

SEQ ID NO: 10703 - DNA, 20 bp, synthetic construct
  misc_feature 1..20: note = chemically synthesized
  source 1..20: mol_type = other DNA
acaggtaaaactgacgcacg

SEQ ID NO: 10704 - DNA, 20 bp, synthetic construct
  misc_feature 1..20: note = chemically synthesized
  source 1..20: mol_type = other DNA
caggtaaaactgacgcacgg

SEQ ID NO: 10705 - DNA, 20 bp, synthetic construct
  misc_feature 1..20: note = chemically synthesized
  source 1..20: mol_type = other DNA
cacggaggaacaatataaat

SEQ ID NO: 10706 - DNA, 20 bp, synthetic construct
  misc_feature 1..20: note = chemically synthesized
  source 1..20: mol_type = other DNA
acggaggaacaatataaatt

SEQ ID NO: 10707 - DNA, 20 bp, synthetic construct
  misc_feature 1..20: note = chemically synthesized
  source 1..20: mol_type = other DNA
cggaggaacaatataaattg

SEQ ID NO: 10708 - DNA, 20 bp, synthetic construct
  misc_feature 1..20: note = chemically synthesized
  source 1..20: mol_type = other DNA
gaacaatataaattggggac

SEQ ID NO: 10709 - DNA, 20 bp, synthetic construct
  misc_feature 1..20: note = chemically synthesized
  source 1..20: mol_type = other DNA
aatataaattggggactaga

SEQ ID NO: 10710 - DNA, 20 bp, synthetic construct
  misc_feature 1..20: note = chemically synthesized
  source 1..20: mol_type = other DNA
atataaattggggactagaa

SEQ ID NO: 10711 - DNA, 20 bp, synthetic construct
  misc_feature 1..20: note = chemically synthesized
  source 1..20: mol_type = other DNA
aattggggactagaaaggtg

SEQ ID NO: 10712 - DNA, 20 bp, synthetic construct
  misc_feature 1..20: note = chemically synthesized
  source 1..20: mol_type = other DNA
ttggggactagaaaggtgaa

SEQ ID NO: 10713 - DNA, 20 bp, synthetic construct
  misc_feature 1..20: note = chemically synthesized
  source 1..20: mol_type = other DNA
actagaaaggtgaagagcca

SEQ ID NO: 10714 - DNA, 20 bp, synthetic construct
  misc_feature 1..20: note = chemically synthesized
  source 1..20: mol_type = other DNA
gaaaggtgaagagccaaagt

SEQ ID NO: 10715 - DNA, 20 bp, synthetic construct
  misc_feature 1..20: note = chemically synthesized
  source 1..20: mol_type = other DNA
gaagagccaaagttagaact

SEQ ID NO: 10716 - DNA, 20 bp, synthetic construct
  misc_feature 1..20: note = chemically synthesized
  source 1..20: mol_type = other DNA
aagagccaaagttagaactc

SEQ ID NO: 10717 - DNA, 20 bp, synthetic construct
  misc_feature 1..20: note = chemically synthesized
  source 1..20: mol_type = other DNA
ttccaaactgcttctcctct

SEQ ID NO: 10718 - DNA, 20 bp, synthetic construct
  misc_feature 1..20: note = chemically synthesized
  source 1..20: mol_type = other DNA
tccaaactgcttctcctctt

SEQ ID NO: 10719 - DNA, 20 bp, synthetic construct
  misc_feature 1..20: note = chemically synthesized
  source 1..20: mol_type = other DNA
aaactgcttctcctcttggg

SEQ ID NO: 10720 - DNA, 20 bp, synthetic construct
  misc_feature 1..20: note = chemically synthesized
  source 1..20: mol_type = other DNA
cttctcctcttgggaagtgt

SEQ ID NO: 10721 - DNA, 20 bp, synthetic construct
  misc_feature 1..20: note = chemically synthesized
  source 1..20: mol_type = other DNA
ttctcctcttgggaagtgta

SEQ ID NO: 10722 - DNA, 20 bp, synthetic construct
  misc_feature 1..20: note = chemically synthesized
  source 1..20: mol_type = other DNA
tcctcttgggaagtgtaagg

SEQ ID NO: 10723 - DNA, 20 bp, synthetic construct
  misc_feature 1..20: note = chemically synthesized
  source 1..20: mol_type = other DNA
tgggaagtgtaaggaagctg

SEQ ID NO: 10724 - DNA, 20 bp, synthetic construct
  misc_feature 1..20: note = chemically synthesized
  source 1..20: mol_type = other DNA
gtgtaaggaagctgcagcac

SEQ ID NO: 10725 - DNA, 20 bp, synthetic construct
  misc_feature 1..20: note = chemically synthesized
  source 1..20: mol_type = other DNA
tgtaaggaagctgcagcacc

SEQ ID NO: 10726 - DNA, 20 bp, synthetic construct
  misc_feature 1..20: note = chemically synthesized
  source 1..20: mol_type = other DNA
ggaagctgcagcaccaggat

SEQ ID NO: 10727 - DNA, 20 bp, synthetic construct
  misc_feature 1..20: note = chemically synthesized
  source 1..20: mol_type = other DNA
ccaggatcagtgaaacgcac

SEQ ID NO: 10728 - DNA, 20 bp, synthetic construct
  misc_feature 1..20: note = chemically synthesized
  source 1..20: mol_type = other DNA
gatcagtgaaacgcaccaga

SEQ ID NO: 10729 - DNA, 20 bp, synthetic construct
  misc_feature 1..20: note = chemically synthesized
  source 1..20: mol_type = other DNA
aacgcaccagacggccgcgt

SEQ ID NO: 10730 - DNA, 20 bp, synthetic construct
  misc_feature 1..20: note = chemically synthesized
  source 1..20: mol_type = other DNA
cgcaccagacggccgcgtca

SEQ ID NO: 10731 - DNA, 20 bp, synthetic construct
  misc_feature 1..20: note = chemically synthesized
  source 1..20: mol_type = other DNA
accagacggccgcgtcagag

SEQ ID NO: 10732 - DNA, 20 bp, synthetic construct
  misc_feature 1..20: note = chemically synthesized
  source 1..20: mol_type = other DNA
acggccgcgtcagagcagct

SEQ ID NO: 10733 - DNA, 20 bp, synthetic construct
  misc_feature 1..20: note = chemically synthesized
  source 1..20: mol_type = other DNA
cggccgcgtcagagcagctc

SEQ ID NO: 10734 - DNA, 20 bp, synthetic construct
  misc_feature 1..20: note = chemically synthesized
  source 1..20: mol_type = other DNA
cgtcagagcagctcaggttc

SEQ ID NO: 10735 - DNA, 20 bp, synthetic construct
  misc_feature 1..20: note = chemically synthesized
  source 1..20: mol_type = other DNA
gtcagagcagctcaggttct

SEQ ID NO: 10736 - DNA, 20 bp, synthetic construct
  misc_feature 1..20: note = chemically synthesized
  source 1..20: mol_type = other DNA
cagagcagctcaggttctgg

SEQ ID NO: 10737 - DNA, 20 bp, synthetic construct
  misc_feature 1..20: note = chemically synthesized
  source 1..20: mol_type = other DNA
gagcagctcaggttctggga

SEQ ID NO: 10738 - DNA, 20 bp, synthetic construct
  misc_feature 1..20: note = chemically synthesized
  source 1..20: mol_type = other DNA
agcagctcaggttctgggag

SEQ ID NO: 10739 - DNA, 20 bp, synthetic construct
  misc_feature 1..20: note = chemically synthesized
  source 1..20: mol_type = other DNA
gcagctcaggttctgggaga

SEQ ID NO: 10740 - DNA, 20 bp, synthetic construct
  misc_feature 1..20: note = chemically synthesized
  source 1..20: mol_type = other DNA
gctcaggttctgggagaggg

SEQ ID NO: 10741 - DNA, 20 bp, synthetic construct
  misc_feature 1..20: note = chemically synthesized
  source 1..20: mol_type = other DNA
ggttctgggagagggtagcg

SEQ ID NO: 10742 - DNA, 20 bp, synthetic construct
  misc_feature 1..20: note = chemically synthesized
  source 1..20: mol_type = other DNA
gttctgggagagggtagcgc

SEQ ID NO: 10743 - DNA, 20 bp, synthetic construct
  misc_feature 1..20: note = chemically synthesized
  source 1..20: mol_type = other DNA
ttctgggagagggtagcgca

SEQ ID NO: 10744 - DNA, 20 bp, synthetic construct
  misc_feature 1..20: note = chemically synthesized
  source 1..20: mol_type = other DNA
tgggagagggtagcgcaggg

SEQ ID NO: 10745 - DNA, 20 bp, synthetic construct
  misc_feature 1..20: note = chemically synthesized
  source 1..20: mol_type = other DNA
ggtagcgcagggtggccact

SEQ ID NO: 10746 - DNA, 20 bp, synthetic construct
  misc_feature 1..20: note = chemically synthesized
  source 1..20: mol_type = other DNA
gcagggtggccactgagaac

SEQ ID NO: 10747 - DNA, 20 bp, synthetic construct
  misc_feature 1..20: note = chemically synthesized
  source 1..20: mol_type = other DNA
cagggtggccactgagaacc

SEQ ID NO: 10748 - DNA, 20 bp, synthetic construct
  misc_feature 1..20: note = chemically synthesized
  source 1..20: mol_type = other DNA
ggtggccactgagaaccggg

SEQ ID NO: 10749 - DNA, 20 bp, synthetic construct
  misc_feature 1..20: note = chemically synthesized
  source 1..20: mol_type = other DNA
gtggccactgagaaccgggc

SEQ ID NO: 10750 - DNA, 20 bp, synthetic construct
  misc_feature 1..20: note = chemically synthesized
  source 1..20: mol_type = other DNA
cttccctcccaccccctgcc

SEQ ID NO: 10751 - DNA, 20 bp, synthetic construct
  misc_feature 1..20: note = chemically synthesized
  source 1..20: mol_type = other DNA
ccctgccaagctctccctcc

SEQ ID NO: 10752 - DNA, 20 bp, synthetic construct
  misc_feature 1..20: note = chemically synthesized
  source 1..20: mol_type = other DNA
cctgccaagctctccctccc

SEQ ID NO: 10753 - DNA, 20 bp, synthetic construct
  misc_feature 1..20: note = chemically synthesized
  source 1..20: mol_type = other DNA
ctccctcccaggatcctctc

SEQ ID NO: 10754 - DNA, 20 bp, synthetic construct
  misc_feature 1..20: note = chemically synthesized
  source 1..20: mol_type = other DNA
atcctctctggctccatcgt

SEQ ID NO: 10755 - DNA, 20 bp, synthetic construct
  misc_feature 1..20: note = chemically synthesized
  source 1..20: mol_type = other DNA
gctccatcgtaagcaaacct

SEQ ID NO: 10756 - DNA, 20 bp, synthetic construct
  misc_feature 1..20: note = chemically synthesized
  source 1..20: mol_type = other DNA
tccatcgtaagcaaacctta

SEQ ID NO: 10757 - DNA, 20 bp, synthetic construct
  misc_feature 1..20: note = chemically synthesized
  source 1..20: mol_type = other DNA
ccatcgtaagcaaaccttag

SEQ ID NO: 10758 - DNA, 20 bp, synthetic construct
  misc_feature 1..20: note = chemically synthesized
  source 1..20: mol_type = other DNA
taagcaaaccttagaggttc

SEQ ID NO: 10759 - DNA, 20 bp, synthetic construct
  misc_feature 1..20: note = chemically synthesized
  source 1..20: mol_type = other DNA
caaaccttagaggttctggc

SEQ ID NO: 10760 - DNA, 20 bp, synthetic construct
  misc_feature 1..20: note = chemically synthesized
  source 1..20: mol_type = other DNA
aaaccttagaggttctggca

SEQ ID NO: 10761 - DNA, 20 bp, synthetic construct
  misc_feature 1..20: note = chemically synthesized
  source 1..20: mol_type = other DNA
accttagaggttctggcaag

SEQ ID NO: 10762 - DNA, 20 bp, synthetic construct
  misc_feature 1..20: note = chemically synthesized
  source 1..20: mol_type = other DNA
cttagaggttctggcaagga

SEQ ID NO: 10763 - DNA, 20 bp, synthetic construct
  misc_feature 1..20: note = chemically synthesized
  source 1..20: mol_type = other DNA
tagaggttctggcaaggaga

SEQ ID NO: 10764 - DNA, 20 bp, synthetic construct
  misc_feature 1..20: note = chemically synthesized
  source 1..20: mol_type = other DNA
ggttctggcaaggagagaga

SEQ ID NO: 10765 - DNA, 20 bp, synthetic construct
  misc_feature 1..20: note = chemically synthesized
  source 1..20: mol_type = other DNA
ggcaaggagagagatggctc

SEQ ID NO: 10766 - DNA, 20 bp, synthetic construct
  misc_feature 1..20: note = chemically synthesized
  source 1..20: mol_type = other DNA
gcaaggagagagatggctcc

SEQ ID NO: 10767 - DNA, 20 bp, synthetic construct
  misc_feature 1..20: note = chemically synthesized
  source 1..20: mol_type = other DNA
agagagatggctccaggaaa

SEQ ID NO: 10768 - DNA, 20 bp, synthetic construct
  misc_feature 1..20: note = chemically synthesized
  source 1..20: mol_type = other DNA
gagagatggctccaggaaat

SEQ ID NO: 10769 - DNA, 20 bp, synthetic construct
  misc_feature 1..20: note = chemically synthesized
  source 1..20: mol_type = other DNA
agagatggctccaggaaatg

SEQ ID NO: 10770 - DNA, 20 bp, synthetic construct
  misc_feature 1..20: note = chemically synthesized
  source 1..20: mol_type = other DNA
gagatggctccaggaaatgg

SEQ ID NO: 10771 - DNA, 20 bp, synthetic construct
  misc_feature 1..20: note = chemically synthesized
  source 1..20: mol_type = other DNA
aggaaatgggggtgtgtcac

SEQ ID NO: 10772 - DNA, 20 bp, synthetic construct
  misc_feature 1..20: note = chemically synthesized
  source 1..20: mol_type = other DNA
atgggggtgtgtcaccagat

SEQ ID NO: 10773 - DNA, 20 bp, synthetic construct
  misc_feature 1..20: note = chemically synthesized
  source 1..20: mol_type = other DNA
tgggggtgtgtcaccagata

SEQ ID NO: 10774 - DNA, 20 bp, synthetic construct
  misc_feature 1..20: note = chemically synthesized
  source 1..20: mol_type = other DNA
cagataaggaatctgcctaa

SEQ ID NO: 10775 - DNA, 20 bp, synthetic construct
  misc_feature 1..20: note = chemically synthesized
  source 1..20: mol_type = other DNA
agataaggaatctgcctaac

SEQ ID NO: 10776 - DNA, 20 bp, synthetic construct
  misc_feature 1..20: note = chemically synthesized
  source 1..20: mol_type = other DNA
ataaggaatctgcctaacag

SEQ ID NO: 10777 - DNA, 20 bp, synthetic construct
  misc_feature 1..20: note = chemically synthesized
  source 1..20: mol_type = other DNA
taaggaatctgcctaacagg

SEQ ID NO: 10778 - DNA, 20 bp, synthetic construct
  misc_feature 1..20: note = chemically synthesized
  source 1..20: mol_type = other DNA
ggaatctgcctaacaggagg

SEQ ID NO: 10779 - DNA, 20 bp, synthetic construct
  misc_feature 1..20: note = chemically synthesized
  source 1..20: mol_type = other DNA
gaatctgcctaacaggaggt

SEQ ID NO: 10780 - DNA, 20 bp, synthetic construct
  misc_feature 1..20: note = chemically synthesized
  source 1..20: mol_type = other DNA
aatctgcctaacaggaggtg

SEQ ID NO: 10781 - DNA, 20 bp, synthetic construct
  misc_feature 1..20: note = chemically synthesized
  source 1..20: mol_type = other DNA
atctgcctaacaggaggtgg

SEQ ID NO: 10782 - DNA, 20 bp, synthetic construct
  misc_feature 1..20: note = chemically synthesized
  source 1..20: mol_type = other DNA
gcctaacaggaggtgggggt

SEQ ID NO: 10783 - DNA, 20 bp, synthetic construct
  misc_feature 1..20: note = chemically synthesized
  source 1..20: mol_type = other DNA
gtgggggttagacccaatat

SEQ ID NO: 10784 - DNA, 20 bp, synthetic construct
  misc_feature 1..20: note = chemically synthesized
  source 1..20: mol_type = other DNA
tgggggttagacccaatatc

SEQ ID NO: 10785 - DNA, 20 bp, synthetic construct
  misc_feature 1..20: note = chemically synthesized
  source 1..20: mol_type = other DNA
ggggttagacccaatatcag

SEQ ID NO: 10786 - DNA, 20 bp, synthetic construct
  misc_feature 1..20: note = chemically synthesized
  source 1..20: mol_type = other DNA
tagacccaatatcaggagac

SEQ ID NO: 10787 - DNA, 20 bp, synthetic construct
  misc_feature 1..20: note = chemically synthesized
  source 1..20: mol_type = other DNA
agacccaatatcaggagact

SEQ ID NO: 10788 - DNA, 20 bp, synthetic construct
  misc_feature 1..20: note = chemically synthesized
  source 1..20: mol_type = other DNA
cccaatatcaggagactagg

SEQ ID NO: 10789 - DNA, 20 bp, synthetic construct
  misc_feature 1..20: note = chemically synthesized
  source 1..20: mol_type = other DNA
ccaatatcaggagactagga

SEQ ID NO: 10790 - DNA, 20 bp, synthetic construct
  misc_feature 1..20: note = chemically synthesized
  source 1..20: mol_type = other DNA
aatatcaggagactaggaag

SEQ ID NO: 10791 - DNA, 20 bp, synthetic construct
  misc_feature 1..20: note = chemically synthesized
  source 1..20: mol_type = other DNA
atatcaggagactaggaagg

SEQ ID NO: 10792 - DNA, 20 bp, synthetic construct
  misc_feature 1..20: note = chemically synthesized
  source 1..20: mol_type = other DNA
atcaggagactaggaaggag

SEQ ID NO: 10793 - DNA, 20 bp, synthetic construct
  misc_feature 1..20: note = chemically synthesized
  source 1..20: mol_type = other DNA
tcaggagactaggaaggagg

SEQ ID NO: 10794 - DNA, 20 bp, synthetic construct
  misc_feature 1..20: note = chemically synthesized
  source 1..20: mol_type = other DNA
gactaggaaggaggaggcct

SEQ ID NO: 10795 - DNA, 20 bp, synthetic construct
  misc_feature 1..20: note = chemically synthesized
  source 1..20: mol_type = other DNA
actaggaaggaggaggccta

SEQ ID NO: 10796 - DNA, 20 bp, synthetic construct
  misc_feature 1..20: note = chemically synthesized
  source 1..20: mol_type = other DNA
ggaaggaggaggcctaagga

SEQ ID NO: 10797 - DNA, 20 bp, synthetic construct
  misc_feature 1..20: note = chemically synthesized
  source 1..20: mol_type = other DNA
gaaggaggaggcctaaggat

SEQ ID NO: 10798 - DNA, 20 bp, synthetic construct
  misc_feature 1..20: note = chemically synthesized
  source 1..20: mol_type = other DNA
aaggaggaggcctaaggatg

SEQ ID NO: 10799 - DNA, 20 bp, synthetic construct
  misc_feature 1..20: note = chemically synthesized
  source 1..20: mol_type = other DNA
tctgtcaccaatcctgtccc

SEQ ID NO: 10800 - DNA, 20 bp, synthetic construct
  misc_feature 1..20: note = chemically synthesized
  source 1..20: mol_type = other DNA
gtcaccaatcctgtccctag

SEQ ID NO: 10801 - DNA, 20 bp, synthetic construct
  misc_feature 1..20: note = chemically synthesized
  source 1..20: mol_type = other DNA
tgtccctagtggccccactg

SEQ ID NO: 10802 - DNA, 20 bp, synthetic construct
  misc_feature 1..20: note = chemically synthesized
  source 1..20: mol_type = other DNA
gtccctagtggccccactgt

SEQ ID NO: 10803 - DNA, 20 bp, synthetic construct
  misc_feature 1..20: note = chemically synthesized
  source 1..20: mol_type = other DNA
tccctagtggccccactgtg

SEQ ID NO: 10804 - DNA, 20 bp, synthetic construct
  misc_feature 1..20: note = chemically synthesized
  source 1..20: mol_type = other DNA
ctagtggccccactgtgggg

SEQ ID NO: 10805 - DNA, 20 bp, synthetic construct
  misc_feature 1..20: note = chemically synthesized
  source 1..20: mol_type = other DNA
agtggccccactgtggggtg

SEQ ID NO: 10806 - DNA, 20 bp, synthetic construct
  misc_feature 1..20: note = chemically synthesized
  source 1..20: mol_type = other DNA
gtggccccactgtggggtgg

SEQ ID NO: 10807 - DNA, 20 bp, synthetic construct
  misc_feature 1..20: note = chemically synthesized
  source 1..20: mol_type = other DNA
tggccccactgtggggtgga

SEQ ID NO: 10808 - DNA, 20 bp, synthetic construct
  misc_feature 1..20: note = chemically synthesized
  source 1..20: mol_type = other DNA
ggccccactgtggggtggag

SEQ ID NO: 10809 - DNA, 20 bp, synthetic construct
  misc_feature 1..20: note = chemically synthesized
  source 1..20: mol_type = other DNA
ccactgtggggtggagggga

SEQ ID NO: 10810 - DNA, 20 bp, synthetic construct
  misc_feature 1..20: note = chemically synthesized
  source 1..20: mol_type = other DNA
ggggtggaggggacagataa

SEQ ID NO: 10811 - DNA, 20 bp, synthetic construct
  misc_feature 1..20: note = chemically synthesized
  source 1..20: mol_type = other DNA
aggggacagataaaagtacc

SEQ ID NO: 10812 - DNA, 20 bp, synthetic construct
  misc_feature 1..20: note = chemically synthesized
  source 1..20: mol_type = other DNA
cagataaaagtacccagaac

SEQ ID NO: 10813 - DNA, 20 bp, synthetic construct
  misc_feature 1..20: note = chemically synthesized
  source 1..20: mol_type = other DNA
gataaaagtacccagaacca

SEQ ID NO: 10814 - DNA, 20 bp, synthetic construct
  misc_feature 1..20: note = chemically synthesized
  source 1..20: mol_type = other DNA
agaaccagagccacattaac

SEQ ID NO: 10815 - DNA, 20 bp, synthetic construct
  misc_feature 1..20: note = chemically synthesized
  source 1..20: mol_type = other DNA
agagccacattaaccggccc

SEQ ID NO: 10816 - DNA, 20 bp, synthetic construct
  misc_feature 1..20: note = chemically synthesized
  source 1..20: mol_type = other DNA
gagccacattaaccggccct

SEQ ID NO: 10817 - DNA, 20 bp, synthetic construct
  misc_feature 1..20: note = chemically synthesized
  source 1..20: mol_type = other DNA
ttaaccggccctgggaatat

SEQ ID NO: 10818 - DNA, 20 bp, synthetic construct
  misc_feature 1..20: note = chemically synthesized
  source 1..20: mol_type = other DNA
taaccggccctgggaatata

SEQ ID NO: 10819 - DNA, 20 bp, synthetic construct
  misc_feature 1..20: note = chemically synthesized
  source 1..20: mol_type = other DNA
ccggccctgggaatataagg

SEQ ID NO: 10820 - DNA, 20 bp, synthetic construct
  misc_feature 1..20: note = chemically synthesized
  source 1..20: mol_type = other DNA
ctgggaatataaggtggtcc

SEQ ID NO: 10821 - DNA, 20 bp, synthetic construct
  misc_feature 1..20: note = chemically synthesized
  source 1..20: mol_type = other DNA
aatataaggtggtcccagct

SEQ ID NO: 10822 - DNA, 20 bp, synthetic construct
  misc_feature 1..20: note = chemically synthesized
  source 1..20: mol_type = other DNA
atataaggtggtcccagctc

SEQ ID NO: 10823 - DNA, 20 bp, synthetic construct
  misc_feature 1..20: note = chemically synthesized
  source 1..20: mol_type = other DNA
tataaggtggtcccagctcg

SEQ ID NO: 10824 - DNA, 20 bp, synthetic construct
  misc_feature 1..20: note = chemically synthesized
  source 1..20: mol_type = other DNA
gtggtcccagctcggggaca

SEQ ID NO: 10825 - DNA, 20 bp, synthetic construct
  misc_feature 1..20: note = chemically synthesized
  source 1..20: mol_type = other DNA
tggtcccagctcggggacac

SEQ ID NO: 10826 - DNA, 20 bp, synthetic construct
  misc_feature 1..20: note = chemically synthesized
  source 1..20: mol_type = other DNA
gctcggggacacaggatccc

SEQ ID NO: 10827 - DNA, 20 bp, synthetic construct
  misc_feature 1..20: note = chemically synthesized
  source 1..20: mol_type = other DNA
tcggggacacaggatccctg

SEQ ID NO: 10828 - DNA, 20 bp, synthetic construct
  misc_feature 1..20: note = chemically synthesized
  source 1..20: mol_type = other DNA
cggggacacaggatccctgg

SEQ ID NO: 10829 - DNA, 20 bp, synthetic construct
  misc_feature 1..20: note = chemically synthesized
  source 1..20: mol_type = other DNA
ggacacaggatccctggagg

SEQ ID NO: 10830 - DNA, 20 bp, synthetic construct
  misc_feature 1..20: note = chemically synthesized
  source 1..20: mol_type = other DNA
gcagcaaacatgctgtcctg

SEQ ID NO: 10831 - DNA, 20 bp, synthetic construct
  misc_feature 1..20: note = chemically synthesized
  source 1..20: mol_type = other DNA
gcaaacatgctgtcctgaag

SEQ ID NO: 10832 - DNA, 20 bp, synthetic construct
  misc_feature 1..20: note = chemically synthesized
  source 1..20: mol_type = other DNA
atgctgtcctgaagtggaca

SEQ ID NO: 10833 - DNA, 20 bp, synthetic construct
  misc_feature 1..20: note = chemically synthesized
  source 1..20: mol_type = other DNA
tgctgtcctgaagtggacat

SEQ ID NO: 10834 - DNA, 20 bp, synthetic construct
  misc_feature 1..20: note = chemically synthesized
  source 1..20: mol_type = other DNA
gctgtcctgaagtggacata

SEQ ID NO: 10835 - DNA, 20 bp, synthetic construct
  misc_feature 1..20: note = chemically synthesized
  source 1..20: mol_type = other DNA
ctgtcctgaagtggacatag

SEQ ID NO: 10836 - DNA, 20 bp, synthetic construct
  misc_feature 1..20: note = chemically synthesized
  source 1..20: mol_type = other DNA
ctgaagtggacataggggcc

SEQ ID NO: 10837 - DNA, 20 bp, synthetic construct
  misc_feature 1..20: note = chemically synthesized
  source 1..20: mol_type = other DNA
tgaagtggacataggggccc

SEQ ID NO: 10838 - DNA, 20 bp, synthetic construct
  misc_feature 1..20: note = chemically synthesized
  source 1..20: mol_type = other DNA
gtggacataggggcccgggt

SEQ ID NO: 10839 - DNA, 20 bp, synthetic construct
  misc_feature 1..20: note = chemically synthesized
  source 1..20: mol_type = other DNA
ggacataggggcccgggttg

SEQ ID NO: 10840 - DNA, 20 bp, synthetic construct
  misc_feature 1..20: note = chemically synthesized
  source 1..20: mol_type = other DNA
gacataggggcccgggttgg

SEQ ID NO: 10841 - DNA, 20 bp, synthetic construct
  misc_feature 1..20: note = chemically synthesized
  source 1..20: mol_type = other DNA
ataggggcccgggttggagg

SEQ ID NO: 10842 - DNA, 20 bp, synthetic construct
  misc_feature 1..20: note = chemically synthesized
  source 1..20: mol_type = other DNA
ggggcccgggttggaggaag

SEQ ID NO: 10843 - DNA, 20 bp, synthetic construct
  misc_feature 1..20: note = chemically synthesized
  source 1..20: mol_type = other DNA
ccgggttggaggaagaagac

SEQ ID NO: 10844 - DNA, 20 bp, synthetic construct
  misc_feature 1..20: note = chemically synthesized
  source 1..20: mol_type = other DNA
ttggaggaagaagactagct

SEQ ID NO: 10845 - DNA, 20 bp, synthetic construct
  misc_feature 1..20: note = chemically synthesized
  source 1..20: mol_type = other DNA
aagaagactagctgagctct

SEQ ID NO: 10846 - DNA, 20 bp, synthetic construct
  misc_feature 1..20: note = chemically synthesized
  source 1..20: mol_type = other DNA
tagctgagctctcggacccc

SEQ ID NO: 10847 - DNA, 20 bp, synthetic construct
  misc_feature 1..20: note = chemically synthesized
  source 1..20: mol_type = other DNA
ctgagctctcggacccctgg

SEQ ID NO: 10848 - DNA, 20 bp, synthetic construct
  misc_feature 1..20: note = chemically synthesized
  source 1..20: mol_type = other DNA
acccctggaagatgccatga

SEQ ID NO: 10849 - DNA, 20 bp, synthetic construct
  misc_feature 1..20: note = chemically synthesized
  source 1..20: mol_type = other DNA
cccctggaagatgccatgac

SEQ ID NO: 10850 - DNA, 20 bp, synthetic construct
  misc_feature 1..20: note = chemically synthesized
  source 1..20: mol_type = other DNA
ccctggaagatgccatgaca

SEQ ID NO: 10851 - DNA, 20 bp, synthetic construct
  misc_feature 1..20: note = chemically synthesized
  source 1..20: mol_type = other DNA
cctggaagatgccatgacag

SEQ ID NO: 10852 - DNA, 20 bp, synthetic construct
  misc_feature 1..20: note = chemically synthesized
  source 1..20: mol_type = other DNA
ctggaagatgccatgacagg

SEQ ID NO: 10853 - DNA, 20 bp, synthetic construct
  misc_feature 1..20: note = chemically synthesized
  source 1..20: mol_type = other DNA
aagatgccatgacagggggc

SEQ ID NO: 10854 - DNA, 20 bp, synthetic construct
  misc_feature 1..20: note = chemically synthesized
  source 1..20: mol_type = other DNA
atgccatgacagggggctgg

SEQ ID NO: 10855 - DNA, 20 bp, synthetic construct
  misc_feature 1..20: note = chemically synthesized
  source 1..20: mol_type = other DNA
gccatgacagggggctggaa

SEQ ID NO: 10856 - DNA, 20 bp, synthetic construct
  misc_feature 1..20: note = chemically synthesized
  source 1..20: mol_type = other DNA
tgacagggggctggaagagc

SEQ ID NO: 10857 - DNA, 20 bp, synthetic construct
  misc_feature 1..20: note = chemically synthesized
  source 1..20: mol_type = other DNA
gggggctggaagagctagca

SEQ ID NO: 10858 - DNA, 20 bp, synthetic construct
  misc_feature 1..20: note = chemically synthesized
  source 1..20: mol_type = other DNA
ctggaagagctagcacagac

SEQ ID NO: 10859 - DNA, 20 bp, synthetic construct
  misc_feature 1..20: note = chemically synthesized
  source 1..20: mol_type = other DNA
ggaagagctagcacagacta

SEQ ID NO: 10860 - DNA, 20 bp, synthetic construct
  misc_feature 1..20: note = chemically synthesized
  source 1..20: mol_type = other DNA
aagagctagcacagactaga

SEQ ID NO: 10861 - DNA, 20 bp, synthetic construct
  misc_feature 1..20: note = chemically synthesized
  source 1..20: mol_type = other DNA
agagctagcacagactagag

SEQ ID NO: 10862 - DNA, 20 bp, synthetic construct
  misc_feature 1..20: note = chemically synthesized
  source 1..20: mol_type = other DNA
ctagcacagactagagaggt

SEQ ID NO: 10863 - DNA, 20 bp, synthetic construct
  misc_feature 1..20: note = chemically synthesized
  source 1..20: mol_type = other DNA
tagcacagactagagaggta

SEQ ID NO: 10864 - DNA, 20 bp, synthetic construct
  misc_feature 1..20: note = chemically synthesized
  source 1..20: mol_type = other DNA
agcacagactagagaggtaa

SEQ ID NO: 10865 - DNA, 20 bp, synthetic construct
  misc_feature 1..20: note = chemically synthesized
  source 1..20: mol_type = other DNA
gcacagactagagaggtaag

SEQ ID NO: 10866 - DNA, 20 bp, synthetic construct
  misc_feature 1..20: note = chemically synthesized
  source 1..20: mol_type = other DNA
cacagactagagaggtaagg

SEQ ID NO: 10867 - DNA, 20 bp, synthetic construct
  misc_feature 1..20: note = chemically synthesized
  source 1..20: mol_type = other DNA
acagactagagaggtaaggg

SEQ ID NO: 10868 - DNA, 20 bp, synthetic construct
  misc_feature 1..20: note = chemically synthesized
  source 1..20: mol_type = other DNA
gactagagaggtaagggggg

SEQ ID NO: 10869 - DNA, 20 bp, synthetic construct
  misc_feature 1..20: note = chemically synthesized
  source 1..20: mol_type = other DNA
actagagaggtaaggggggt

SEQ ID NO: 10870 - DNA, 20 bp, synthetic construct
  misc_feature 1..20: note = chemically synthesized
  source 1..20: mol_type = other DNA
ctagagaggtaaggggggta

SEQ ID NO: 10871 - DNA, 20 bp, synthetic construct
  misc_feature 1..20: note = chemically synthesized
  source 1..20: mol_type = other DNA
tagagaggtaaggggggtag

SEQ ID NO: 10872 - DNA, 20 bp, synthetic construct
  misc_feature 1..20: note = chemically synthesized
  source 1..20: mol_type = other DNA
gagaggtaaggggggtaggg

SEQ ID NO: 10873 - DNA, 20 bp, synthetic construct
  misc_feature 1..20: note = chemically synthesized
  source 1..20: mol_type = other DNA
taggggagctgcccaaatga

SEQ ID NO: 10874 - DNA, 20 bp, synthetic construct
  misc_feature 1..20: note = chemically synthesized
  source 1..20: mol_type = other DNA
aggggagctgcccaaatgaa

SEQ ID NO: 10875 - DNA, 20 bp, synthetic construct
  misc_feature 1..20: note = chemically synthesized
  source 1..20: mol_type = other DNA
gggagctgcccaaatgaaag

SEQ ID NO: 10876 - DNA, 20 bp, synthetic construct
  misc_feature 1..20: note = chemically synthesized
  source 1..20: mol_type = other DNA
gctgcccaaatgaaaggagt

SEQ ID NO: 10877 - DNA, 20 bp, synthetic construct
  misc_feature 1..20: note = chemically synthesized
  source 1..20: mol_type = other DNA
tgcccaaatgaaaggagtga

SEQ ID NO: 10878 - DNA, 20 bp, synthetic construct
  misc_feature 1..20: note = chemically synthesized
  source 1..20: mol_type = other DNA
gcccaaatgaaaggagtgag

SEQ ID NO: 10879 - DNA, 20 bp, synthetic construct
  misc_feature 1..20: note = chemically synthesized
  source 1..20: mol_type = other DNA
tgagaggtgacccgaatcca

SEQ ID NO: 10880 - DNA, 20 bp, synthetic construct
  misc_feature 1..20: note = chemically synthesized
  source 1..20: mol_type = other DNA
gagaggtgacccgaatccac

SEQ ID NO: 10881 - DNA, 20 bp, synthetic construct
  misc_feature 1..20: note = chemically synthesized
  source 1..20: mol_type = other DNA
gaggtgacccgaatccacag

SEQ ID NO: 10882 - DNA, 20 bp, synthetic construct
  misc_feature 1..20: note = chemically synthesized
  source 1..20: mol_type = other DNA
gacccgaatccacaggagaa

SEQ ID NO: 10883 - DNA, 20 bp, synthetic construct
  misc_feature 1..20: note = chemically synthesized
  source 1..20: mol_type = other DNA
acccgaatccacaggagaac

SEQ ID NO: 10884 - DNA, 20 bp, synthetic construct
  misc_feature 1..20: note = chemically synthesized
  source 1..20: mol_type = other DNA
cccgaatccacaggagaacg

SEQ ID NO: 10885 - DNA, 20 bp, synthetic construct
  misc_feature 1..20: note = chemically synthesized
  source 1..20: mol_type = other DNA
ccacaggagaacggggtgtc

SEQ ID NO: 10886 - DNA, 20 bp, synthetic construct
  misc_feature 1..20: note = chemically synthesized
  source 1..20: mol_type = other DNA
cacaggagaacggggtgtcc

SEQ ID NO: 10887 - DNA, 20 bp, synthetic construct
  misc_feature 1..20: note = chemically synthesized
  source 1..20: mol_type = other DNA
gagaacggggtgtccaggca

SEQ ID NO: 10888 - DNA, 20 bp, synthetic construct
  misc_feature 1..20: note = chemically synthesized
  source 1..20: mol_type = other DNA
acggggtgtccaggcaaaga

SEQ ID NO: 10889 - DNA, 20 bp, synthetic construct
  misc_feature 1..20: note = chemically synthesized
  source 1..20: mol_type = other DNA
ggtgtccaggcaaagaaagc

SEQ ID NO: 10890 - DNA, 20 bp, synthetic construct
  misc_feature 1..20: note = chemically synthesized
  source 1..20: mol_type = other DNA
tgtccaggcaaagaaagcaa

SEQ ID NO: 10891 - DNA, 20 bp, synthetic construct
  misc_feature 1..20: note = chemically synthesized
  source 1..20: mol_type = other DNA
gtccaggcaaagaaagcaag

SEQ ID NO: 10892 - DNA, 20 bp, synthetic construct
  misc_feature 1..20: note = chemically synthesized
  source 1..20: mol_type = other DNA
aggcaaagaaagcaagagga

SEQ ID NO: 10893 - DNA, 20 bp, synthetic construct
  misc_feature 1..20: note = chemically synthesized
  source 1..20: mol_type = other DNA
gcaaagaaagcaagaggatg

SEQ ID NO: 10894 - DNA, 20 bp, synthetic construct
  misc_feature 1..20: note = chemically synthesized
  source 1..20: mol_type = other DNA
aaagaaagcaagaggatgga

SEQ ID NO: 10895 - DNA, 20 bp, synthetic construct
  misc_feature 1..20: note = chemically synthesized
  source 1..20: mol_type = other DNA
aagaaagcaagaggatggag

SEQ ID NO: 10896 - DNA, 20 bp, synthetic construct
  misc_feature 1..20: note = chemically synthesized
  source 1..20: mol_type = other DNA
aaagcaagaggatggagagg

SEQ ID NO: 10897 - DNA, 20 bp, synthetic construct
  misc_feature 1..20: note = chemically synthesized
  source 1..20: mol_type = other DNA
agaggatggagaggtggcta

SEQ ID NO: 10898 - DNA, 20 bp, synthetic construct
  misc_feature 1..20: note = chemically synthesized
  source 1..20: mol_type = other DNA
gatggagaggtggctaaagc

SEQ ID NO: 10899 - DNA, 20 bp, synthetic construct
  misc_feature 1..20: note = chemically synthesized
  source 1..20: mol_type = other DNA
atggagaggtggctaaagcc

SEQ ID NO: 10900 - DNA, 20 bp, synthetic construct
  misc_feature 1..20: note = chemically synthesized
  source 1..20: mol_type = other DNA
tggagaggtggctaaagcca

SEQ ID NO: 10901 - DNA, 20 bp, synthetic construct
  misc_feature 1..20: note = chemically synthesized
  source 1..20: mol_type = other DNA
gagaggtggctaaagccagg

SEQ ID NO: 10902 - DNA, 20 bp, synthetic construct
  misc_feature 1..20: note = chemically synthesized
  source 1..20: mol_type = other DNA
ggtggctaaagccagggaga

SEQ ID NO: 10903 - DNA, 20 bp, synthetic construct
  misc_feature 1..20: note = chemically synthesized
  source 1..20: mol_type = other DNA
gtggctaaagccagggagac

SEQ ID NO: 10904 - DNA, 20 bp, synthetic construct
  misc_feature 1..20: note = chemically synthesized
  source 1..20: mol_type = other DNA
tggctaaagccagggagacg

SEQ ID NO: 10905 - DNA, 20 bp, synthetic construct
  misc_feature 1..20: note = chemically synthesized
  source 1..20: mol_type = other DNA
gccagggagacggggtactt

SEQ ID NO: 10906 - DNA, 20 bp, synthetic construct
  misc_feature 1..20: note = chemically synthesized
  source 1..20: mol_type = other DNA
ccagggagacggggtacttt

SEQ ID NO: 10907 - DNA, 20 bp, synthetic construct
  misc_feature 1..20: note = chemically synthesized
  source 1..20: mol_type = other DNA
cagggagacggggtactttg

SEQ ID NO: 10908 - DNA, 20 bp, synthetic construct
  misc_feature 1..20: note = chemically synthesized
  source 1..20: mol_type = other DNA
cggggtactttggggttgtc

SEQ ID NO: 10909 - DNA, 20 bp, synthetic construct
  misc_feature 1..20: note = chemically synthesized
  source 1..20: mol_type = other DNA
tttggggttgtccagaaaaa

SEQ ID NO: 10910 - DNA, 20 bp, synthetic construct
  misc_feature 1..20: note = chemically synthesized
  source 1..20: mol_type = other DNA
ccagaaaaacggtgatgatg

SEQ ID NO: 10911 - DNA, 20 bp, synthetic construct
  misc_feature 1..20: note = chemically synthesized
  source 1..20: mol_type = other DNA
cagaaaaacggtgatgatgc

SEQ ID NO: 10912 - DNA, 20 bp, synthetic construct
  misc_feature 1..20: note = chemically synthesized
  source 1..20: mol_type = other DNA
cggtgatgatgcaggcctac

SEQ ID NO: 10913 - DNA, 20 bp, synthetic construct
  misc_feature 1..20: note = chemically synthesized
  source 1..20: mol_type = other DNA
tgatgatgcaggcctacaag

SEQ ID NO: 10914 - DNA, 20 bp, synthetic construct
  misc_feature 1..20: note = chemically synthesized
  source 1..20: mol_type = other DNA
gatgatgcaggcctacaaga

SEQ ID NO: 10915 - DNA, 20 bp, synthetic construct
  misc_feature 1..20: note = chemically synthesized
  source 1..20: mol_type = other DNA
atgatgcaggcctacaagaa

SEQ ID NO: 10916 - DNA, 20 bp, synthetic construct
  misc_feature 1..20: note = chemically synthesized
  source 1..20: mol_type = other DNA
tgatgcaggcctacaagaag

SEQ ID NO: 10917 - DNA, 20 bp, synthetic construct
  misc_feature 1..20: note = chemically synthesized
  source 1..20: mol_type = other DNA
atgcaggcctacaagaaggg

SEQ ID NO: 10918 - DNA, 20 bp, synthetic construct
  misc_feature 1..20: note = chemically synthesized
  source 1..20: mol_type = other DNA
tgcaggcctacaagaagggg

SEQ ID NO: 10919 - DNA, 20 bp, synthetic construct
  misc_feature 1..20: note = chemically synthesized
  source 1..20: mol_type = other DNA
aggcctacaagaaggggagg

SEQ ID NO: 10920 - DNA, 20 bp, synthetic construct
  misc_feature 1..20: note = chemically synthesized
  source 1..20: mol_type = other DNA
ggcctacaagaaggggaggc

SEQ ID NO: 10921 - DNA, 20 bp, synthetic construct
  misc_feature 1..20: note = chemically synthesized
  source 1..20: mol_type = other DNA
aagaaggggaggcgggacgc

SEQ ID NO: 10922 - DNA, 20 bp, synthetic construct
  misc_feature 1..20: note = chemically synthesized
  source 1..20: mol_type = other DNA
agaaggggaggcgggacgca

SEQ ID NO: 10923 - DNA, 20 bp, synthetic construct
  misc_feature 1..20: note = chemically synthesized
  source 1..20: mol_type = other DNA
gaaggggaggcgggacgcaa

SEQ ID NO: 10924 - DNA, 20 bp, synthetic construct
  misc_feature 1..20: note = chemically synthesized
  source 1..20: mol_type = other DNA
aggggaggcgggacgcaagg

SEQ ID NO: 10925 - DNA, 20 bp, synthetic construct
  misc_feature 1..20: note = chemically synthesized
  source 1..20: mol_type = other DNA
gacgcaagggagacatccgt

SEQ ID NO: 10926 - DNA, 20 bp, synthetic construct
  misc_feature 1..20: note = chemically synthesized
  source 1..20: mol_type = other DNA
cgcaagggagacatccgtcg

SEQ ID NO: 10927 - DNA, 20 bp, synthetic construct
  misc_feature 1..20: note = chemically synthesized
  source 1..20: mol_type = other DNA
aagggagacatccgtcggag

SEQ ID NO: 10928 - DNA, 20 bp, synthetic construct
  misc_feature 1..20: note = chemically synthesized
  source 1..20: mol_type = other DNA
agggagacatccgtcggaga

SEQ ID NO: 10929 - DNA, 20 bp, synthetic construct
  misc_feature 1..20: note = chemically synthesized
  source 1..20: mol_type = other DNA
ccgtcggagaaggccatcct

SEQ ID NO: 10930 - DNA, 20 bp, synthetic construct
  misc_feature 1..20: note = chemically synthesized
  source 1..20: mol_type = other DNA
agaaggccatcctaagaaac

SEQ ID NO: 10931 - DNA, 20 bp, synthetic construct
  misc_feature 1..20: note = chemically synthesized
  source 1..20: mol_type = other DNA
aaggccatcctaagaaacga

SEQ ID NO: 10932 - DNA, 20 bp, synthetic construct
  misc_feature 1..20: note = chemically synthesized
  source 1..20: mol_type = other DNA
ccatcctaagaaacgagaga

SEQ ID NO: 10933 - DNA, 20 bp, synthetic construct
  misc_feature 1..20: note = chemically synthesized
  source 1..20: mol_type = other DNA
ctaagaaacgagagatggca

SEQ ID NO: 10934 - DNA, 20 bp, synthetic construct
  misc_feature 1..20: note = chemically synthesized
  source 1..20: mol_type = other DNA
taagaaacgagagatggcac

SEQ ID NO: 10935 - DNA, 20 bp, synthetic construct
  misc_feature 1..20: note = chemically synthesized
  source 1..20: mol_type = other DNA
acgagagatggcacaggccc

SEQ ID NO: 10936 - DNA, 20 bp, synthetic construct
  misc_feature 1..20: note = chemically synthesized
  source 1..20: mol_type = other DNA
agagatggcacaggccccag

SEQ ID NO: 10937 - DNA, 20 bp, synthetic construct
  misc_feature 1..20: note = chemically synthesized
  source 1..20: mol_type = other DNA
gagatggcacaggccccaga

SEQ ID NO: 10938 - DNA, 20 bp, synthetic construct
  misc_feature 1..20: note = chemically synthesized
  source 1..20: mol_type = other DNA
gatggcacaggccccagaag

SEQ ID NO: 10939 - DNA, 20 bp, synthetic construct
  misc_feature 1..20: note = chemically synthesized
  source 1..20: mol_type = other DNA
ggcacaggccccagaaggag

SEQ ID NO: 10940 - DNA, 20 bp, synthetic construct
  misc_feature 1..20: note = chemically synthesized
  source 1..20: mol_type = other DNA
gcacaggccccagaaggaga

SEQ ID NO: 10941 - DNA, 20 bp, synthetic construct
  misc_feature 1..20: note = chemically synthesized
  source 1..20: mol_type = other DNA
ggccccagaaggagaaggaa

SEQ ID NO: 10942 - DNA, 20 bp, synthetic construct
  misc_feature 1..20: note = chemically synthesized
  source 1..20: mol_type = other DNA
gccccagaaggagaaggaaa

SEQ ID NO: 10943 - DNA, 20 bp, synthetic construct
  misc_feature 1..20: note = chemically synthesized
  source 1..20: mol_type = other DNA
ccccagaaggagaaggaaaa

SEQ ID NO: 10944 - DNA, 20 bp, synthetic construct
  misc_feature 1..20: note = chemically synthesized
  source 1..20: mol_type = other DNA
aggagaaggaaaagggaacc

SEQ ID NO: 10945 - DNA, 20 bp, synthetic construct
  misc_feature 1..20: note = chemically synthesized
  source 1..20: mol_type = other DNA
gaaggaaaagggaacccagc

SEQ ID NO: 10946 - DNA, 20 bp, synthetic construct
  misc_feature 1..20: note = chemically synthesized
  source 1..20: mol_type = other DNA
aaaagggaacccagcgagtg

SEQ ID NO: 10947 - DNA, 20 bp, synthetic construct
  misc_feature 1..20: note = chemically synthesized
  source 1..20: mol_type = other DNA
gggaacccagcgagtgaaga

SEQ ID NO: 10948 - DNA, 20 bp, synthetic construct
  misc_feature 1..20: note = chemically synthesized
  source 1..20: mol_type = other DNA
cccagcgagtgaagacggca

SEQ ID NO: 10949 - DNA, 20 bp, synthetic construct
  misc_feature 1..20: note = chemically synthesized
  source 1..20: mol_type = other DNA
ccagcgagtgaagacggcat

SEQ ID NO: 10950 - DNA, 20 bp, synthetic construct
  misc_feature 1..20: note = chemically synthesized
  source 1..20: mol_type = other DNA
cagcgagtgaagacggcatg

SEQ ID NO: 10951 - DNA, 20 bp, synthetic construct
  misc_feature 1..20: note = chemically synthesized
  source 1..20: mol_type = other DNA
gagtgaagacggcatggggt

SEQ ID NO: 10952 - DNA, 20 bp, synthetic construct
  misc_feature 1..20: note = chemically synthesized
  source 1..20: mol_type = other DNA
agtgaagacggcatggggtt

SEQ ID NO: 10953 - DNA, 20 bp, synthetic construct
  misc_feature 1..20: note = chemically synthesized
  source 1..20: mol_type = other DNA
aagacggcatggggttgggt

SEQ ID NO: 10954 - DNA, 20 bp, synthetic construct
  misc_feature 1..20: note = chemically synthesized
  source 1..20: mol_type = other DNA
agacggcatggggttgggtg

SEQ ID NO: 10955 - DNA, 20 bp, synthetic construct
  misc_feature 1..20: note = chemically synthesized
  source 1..20: mol_type = other DNA
gacggcatggggttgggtga

SEQ ID NO: 10956 - DNA, 20 bp, synthetic construct
  misc_feature 1..20: note = chemically synthesized
  source 1..20: mol_type = other DNA
cggcatggggttgggtgagg

SEQ ID NO: 10957 - DNA, 20 bp, synthetic construct
  misc_feature 1..20: note = chemically synthesized
  source 1..20: mol_type = other DNA
ggcatggggttgggtgaggg

SEQ ID NO: 10958 - DNA, 20 bp, synthetic construct
  misc_feature 1..20: note = chemically synthesized
  source 1..20: mol_type = other DNA
catggggttgggtgagggag

SEQ ID NO: 10959 - DNA, 20 bp, synthetic construct
  misc_feature 1..20: note = chemically synthesized
  source 1..20: mol_type = other DNA
tggggttgggtgagggagga

SEQ ID NO: 10960 - DNA, 20 bp, synthetic construct
  misc_feature 1..20: note = chemically synthesized
  source 1..20: mol_type = other DNA
ggtgagggaggagagatgcc

SEQ ID NO: 10961 - DNA, 20 bp, synthetic construct
  misc_feature 1..20: note = chemically synthesized
  source 1..20: mol_type = other DNA
tgagggaggagagatgcccg

SEQ ID NO: 10962 - DNA, 20 bp, synthetic construct
  misc_feature 1..20: note = chemically synthesized
  source 1..20: mol_type = other DNA
agggaggagagatgcccgga

SEQ ID NO: 10963 - DNA, 20 bp, synthetic construct
  misc_feature 1..20: note = chemically synthesized
  source 1..20: mol_type = other DNA
gggaggagagatgcccggag

SEQ ID NO: 10964 - DNA, 20 bp, synthetic construct
  misc_feature 1..20: note = chemically synthesized
  source 1..20: mol_type = other DNA
agagatgcccggagaggacc

SEQ ID NO: 10965 - DNA, 20 bp, synthetic construct
  misc_feature 1..20: note = chemically synthesized
  source 1..20: mol_type = other DNA
gcccggagaggacccagaca

SEQ ID NO: 10966 - DNA, 20 bp, synthetic construct
  misc_feature 1..20: note = chemically synthesized
  source 1..20: mol_type = other DNA
cccggagaggacccagacac

SEQ ID NO: 10967 - DNA, 20 bp, synthetic construct
  misc_feature 1..20: note = chemically synthesized
  source 1..20: mol_type = other DNA
ccggagaggacccagacacg

SEQ ID NO: 10968 - DNA, 20 bp, synthetic construct
  misc_feature 1..20: note = chemically synthesized
  source 1..20: mol_type = other DNA
ggagaggacccagacacggg

SEQ ID NO: 10969 - DNA, 20 bp, synthetic construct
  misc_feature 1..20: note = chemically synthesized
  source 1..20: mol_type = other DNA
gagaggacccagacacgggg

SEQ ID NO: 10970 - DNA, 20 bp, synthetic construct
  misc_feature 1..20: note = chemically synthesized
  source 1..20: mol_type = other DNA
agacacggggaggatccgct

SEQ ID NO: 10971 - DNA, 20 bp, synthetic construct
  misc_feature 1..20: note = chemically synthesized
  source 1..20: mol_type = other DNA
acacggggaggatccgctca

SEQ ID NO: 10972 - DNA, 20 bp, synthetic construct
  misc_feature 1..20: note = chemically synthesized
  source 1..20: mol_type = other DNA
cacggggaggatccgctcag

SEQ ID NO: 10973 - DNA, 20 bp, synthetic construct
  misc_feature 1..20: note = chemically synthesized
  source 1..20: mol_type = other DNA
tccgctcagaggacatcacg

SEQ ID NO: 10974 - DNA, 20 bp, synthetic construct
  misc_feature 1..20: note = chemically synthesized
  source 1..20: mol_type = other DNA
tcagaggacatcacgtggtg

SEQ ID NO: 10975 - DNA, 20 bp, synthetic construct
  misc_feature 1..20: note = chemically synthesized
  source 1..20: mol_type = other DNA
acatcacgtggtgcagcgcc

SEQ ID NO: 10976 - DNA, 20 bp, synthetic construct
  misc_feature 1..20: note = chemically synthesized
  source 1..20: mol_type = other DNA
tcacgtggtgcagcgccgag

SEQ ID NO: 10977 - DNA, 20 bp, synthetic construct
  misc_feature 1..20: note = chemically synthesized
  source 1..20: mol_type = other DNA
cacgtggtgcagcgccgaga

SEQ ID NO: 10978 - DNA, 20 bp, synthetic construct
  misc_feature 1..20: note = chemically synthesized
  source 1..20: mol_type = other DNA
gtggtgcagcgccgagaagg

SEQ ID NO: 10979 - DNA, 20 bp, synthetic construct
  misc_feature 1..20: note = chemically synthesized
  source 1..20: mol_type = other DNA
gcgccgagaaggaagtgctc

SEQ ID NO: 10980 - DNA, 20 bp, synthetic construct
  misc_feature 1..20: note = chemically synthesized
  source 1..20: mol_type = other DNA
cgagaaggaagtgctccgga

SEQ ID NO: 10981 - DNA, 20 bp, synthetic construct
  misc_feature 1..20: note = chemically synthesized
  source 1..20: mol_type = other DNA
agaaggaagtgctccggaaa

SEQ ID NO: 10982 - DNA, 20 bp, synthetic construct
  misc_feature 1..20: note = chemically synthesized
  source 1..20: mol_type = other DNA
tgctccggaaagagcatcct

SEQ ID NO: 10983 - DNA, 20 bp, synthetic construct
  misc_feature 1..20: note = chemically synthesized
  source 1..20: mol_type = other DNA
gctccggaaagagcatcctt

SEQ ID NO: 10984 - DNA, 20 bp, synthetic construct
  misc_feature 1..20: note = chemically synthesized
  source 1..20: mol_type = other DNA
ccggaaagagcatccttggg

SEQ ID NO: 10985 - DNA, 20 bp, synthetic construct
  misc_feature 1..20: note = chemically synthesized
  source 1..20: mol_type = other DNA
agcatccttgggcagcaaca

SEQ ID NO: 10986 - DNA, 20 bp, synthetic construct
  misc_feature 1..20: note = chemically synthesized
  source 1..20: mol_type = other DNA
atccttgggcagcaacacag

SEQ ID NO: 10987 - DNA, 20 bp, synthetic construct
  misc_feature 1..20: note = chemically synthesized
  source 1..20: mol_type = other DNA
ccttgggcagcaacacagca

SEQ ID NO: 10988 - DNA, 20 bp, synthetic construct
  misc_feature 1..20: note = chemically synthesized
  source 1..20: mol_type = other DNA
ttgggcagcaacacagcaga

SEQ ID NO: 10989 - DNA, 20 bp, synthetic construct
  misc_feature 1..20: note = chemically synthesized
  source 1..20: mol_type = other DNA
gcagcaacacagcagagagc

SEQ ID NO: 10990 - DNA, 20 bp, synthetic construct
  misc_feature 1..20: note = chemically synthesized
  source 1..20: mol_type = other DNA
cagcaacacagcagagagca

SEQ ID NO: 10991 - DNA, 20 bp, synthetic construct
  misc_feature 1..20: note = chemically synthesized
  source 1..20: mol_type = other DNA
agcaacacagcagagagcaa

SEQ ID NO: 10992 - DNA, 20 bp, synthetic construct
  misc_feature 1..20: note = chemically synthesized
  source 1..20: mol_type = other DNA
gcaacacagcagagagcaag

SEQ ID NO: 10993 - DNA, 20 bp, synthetic construct
  misc_feature 1..20: note = chemically synthesized
  source 1..20: mol_type = other DNA
acacagcagagagcaagggg

SEQ ID NO: 10994 - DNA, 20 bp, synthetic construct
  misc_feature 1..20: note = chemically synthesized
  source 1..20: mol_type = other DNA
acagcagagagcaaggggaa

SEQ ID NO: 10995 - DNA, 20 bp, synthetic construct
  misc_feature 1..20: note = chemically synthesized
  source 1..20: mol_type = other DNA
cagcagagagcaaggggaag

SEQ ID NO: 10996 - DNA, 20 bp, synthetic construct
  misc_feature 1..20: note = chemically synthesized
  source 1..20: mol_type = other DNA
agcagagagcaaggggaaga

SEQ ID NO: 10997 - DNA, 20 bp, synthetic construct
  misc_feature 1..20: note = chemically synthesized
  source 1..20: mol_type = other DNA
cagagagcaaggggaagagg

SEQ ID NO: 10998 - DNA, 20 bp, synthetic construct
  misc_feature 1..20: note = chemically synthesized
  source 1..20: mol_type = other DNA
agagcaaggggaagagggag

SEQ ID NO: 10999 - DNA, 20 bp, synthetic construct
  misc_feature 1..20: note = chemically synthesized
  source 1..20: mol_type = other DNA
agcaaggggaagagggagtg

SEQ ID NO: 11000 - DNA, 20 bp, synthetic construct
  misc_feature 1..20: note = chemically synthesized
  source 1..20: mol_type = other DNA
gcaaggggaagagggagtgg

SEQ ID NO: 11001 - DNA, 20 bp, synthetic construct
  misc_feature 1..20: note = chemically synthesized
  source 1..20: mol_type = other DNA
aggggaagagggagtggagg

SEQ ID NO: 11002 - DNA, 20 bp, synthetic construct
  misc_feature 1..20: note = chemically synthesized
  source 1..20: mol_type = other DNA
gaagagggagtggaggaaga

SEQ ID NO: 11003 - DNA, 20 bp, synthetic construct
  misc_feature 1..20: note = chemically synthesized
  source 1..20: mol_type = other DNA
gtggaggaagacggaacctg

SEQ ID NO: 11004 - DNA, 20 bp, synthetic construct
  misc_feature 1..20: note = chemically synthesized
  source 1..20: mol_type = other DNA
tggaggaagacggaacctga

SEQ ID NO: 11005 - DNA, 20 bp, synthetic construct
  misc_feature 1..20: note = chemically synthesized
  source 1..20: mol_type = other DNA
gaggaagacggaacctgaag

SEQ ID NO: 11006 - DNA, 20 bp, synthetic construct
  misc_feature 1..20: note = chemically synthesized
  source 1..20: mol_type = other DNA
aggaagacggaacctgaagg

SEQ ID NO: 11007 - DNA, 20 bp, synthetic construct
  misc_feature 1..20: note = chemically synthesized
  source 1..20: mol_type = other DNA
aagacggaacctgaaggagg

SEQ ID NO: 11008 - DNA, 20 bp, synthetic construct
  misc_feature 1..20: note = chemically synthesized
  source 1..20: mol_type = other DNA
acggaacctgaaggaggcgg

SEQ ID NO: 11009 - DNA, 20 bp, synthetic construct
  misc_feature 1..20: note = chemically synthesized
  source 1..20: mol_type = other DNA
cggaacctgaaggaggcggc

SEQ ID NO: 11010 - DNA, 20 bp, synthetic construct
  misc_feature 1..20: note = chemically synthesized
  source 1..20: mol_type = other DNA
ggaacctgaaggaggcggca

SEQ ID NO: 11011 - DNA, 20 bp, synthetic construct
  misc_feature 1..20: note = chemically synthesized
  source 1..20: mol_type = other DNA
acctgaaggaggcggcaggg

SEQ ID NO: 11012 - DNA, 20 bp, synthetic construct
  misc_feature 1..20: note = chemically synthesized
  source 1..20: mol_type = other DNA
cctgaaggaggcggcaggga

SEQ ID NO: 11013 - DNA, 20 bp, synthetic construct
  misc_feature 1..20: note = chemically synthesized
  source 1..20: mol_type = other DNA
ggaggcggcagggaaggatc

SEQ ID NO: 11014 - DNA, 20 bp, synthetic construct
  misc_feature 1..20: note = chemically synthesized
  source 1..20: mol_type = other DNA
gaggcggcagggaaggatct

SEQ ID NO: 11015 - DNA, 20 bp, synthetic construct
  misc_feature 1..20: note = chemically synthesized
  source 1..20: mol_type = other DNA
cggcagggaaggatctgggc

SEQ ID NO: 11016 - DNA, 20 bp, synthetic construct
  misc_feature 1..20: note = chemically synthesized
  source 1..20: mol_type = other DNA
ggaaggatctgggccagccg

SEQ ID NO: 11017 - DNA, 20 bp, synthetic construct
  misc_feature 1..20: note = chemically synthesized
  source 1..20: mol_type = other DNA
aaggatctgggccagccgta

SEQ ID NO: 11018 - DNA, 20 bp, synthetic construct
  misc_feature 1..20: note = chemically synthesized
  source 1..20: mol_type = other DNA
aggatctgggccagccgtag

SEQ ID NO: 11019 - DNA, 20 bp, synthetic construct
  misc_feature 1..20: note = chemically synthesized
  source 1..20: mol_type = other DNA
ggccagccgtagaggtgacc

SEQ ID NO: 11020 - DNA, 20 bp, synthetic construct
  misc_feature 1..20: note = chemically synthesized
  source 1..20: mol_type = other DNA
gccagccgtagaggtgaccc

SEQ ID NO: 11021 - DNA, 20 bp, synthetic construct
  misc_feature 1..20: note = chemically synthesized
  source 1..20: mol_type = other DNA
gtagaggtgacccaggccac

SEQ ID NO: 11022 - DNA, 20 bp, synthetic construct
  misc_feature 1..20: note = chemically synthesized
  source 1..20: mol_type = other DNA
gtgacccaggccacaagctg

SEQ ID NO: 11023 - DNA, 20 bp, synthetic construct
  misc_feature 1..20: note = chemically synthesized
  source 1..20: mol_type = other DNA
cccaggccacaagctgcaga

SEQ ID NO: 11024 - DNA, 20 bp, synthetic construct
  misc_feature 1..20: note = chemically synthesized
  source 1..20: mol_type = other DNA
ggccacaagctgcagacaga

SEQ ID NO: 11025 - DNA, 20 bp, synthetic construct
  misc_feature 1..20: note = chemically synthesized
  source 1..20: mol_type = other DNA
cacaagctgcagacagaaag

SEQ ID NO: 11026 - DNA, 20 bp, synthetic construct
  misc_feature 1..20: note = chemically synthesized
  source 1..20: mol_type = other DNA
gctgcagacagaaagcggca

SEQ ID NO: 11027 - DNA, 20 bp, synthetic construct
  misc_feature 1..20: note = chemically synthesized
  source 1..20: mol_type = other DNA
ctgcagacagaaagcggcac

SEQ ID NO: 11028 - DNA, 20 bp, synthetic construct
  misc_feature 1..20: note = chemically synthesized
  source 1..20: mol_type = other DNA
gacagaaagcggcacaggcc

SEQ ID NO: 11029 - DNA, 20 bp, synthetic construct
  misc_feature 1..20: note = chemically synthesized
  source 1..20: mol_type = other DNA
acagaaagcggcacaggccc

SEQ ID NO: 11030 - DNA, 20 bp, synthetic construct
  misc_feature 1..20: note = chemically synthesized
  source 1..20: mol_type = other DNA
cagaaagcggcacaggccca

SEQ ID NO: 11031 - DNA, 20 bp, synthetic construct
  misc_feature 1..20: note = chemically synthesized
  source 1..20: mol_type = other DNA
agaaagcggcacaggcccag

SEQ ID NO: 11032 - DNA, 20 bp, synthetic construct
  misc_feature 1..20: note = chemically synthesized
  source 1..20: mol_type = other DNA
aaagcggcacaggcccaggg

SEQ ID NO: 11033 - DNA, 20 bp, synthetic construct
  misc_feature 1..20: note = chemically synthesized
  source 1..20: mol_type = other DNA
agcggcacaggcccagggga

SEQ ID NO: 11034 - DNA, 20 bp, synthetic construct
  misc_feature 1..20: note = chemically synthesized
  source 1..20: mol_type = other DNA
caggcccaggggagagaatg

SEQ ID NO: 11035 - DNA, 20 bp, synthetic construct
  misc_feature 1..20: note = chemically synthesized
  source 1..20: mol_type = other DNA
aggcccaggggagagaatgc

SEQ ID NO: 11036 - DNA, 20 bp, synthetic construct
  misc_feature 1..20: note = chemically synthesized
  source 1..20: mol_type = other DNA
ccaggggagagaatgcaggt

SEQ ID NO: 11037 - DNA, 20 bp, synthetic construct
  misc_feature 1..20: note = chemically synthesized
  source 1..20: mol_type = other DNA
aggggagagaatgcaggtca

SEQ ID NO: 11038 - DNA, 20 bp, synthetic construct
  misc_feature 1..20: note = chemically synthesized
  source 1..20: mol_type = other DNA
gagagaatgcaggtcagaga

SEQ ID NO: 11039 - DNA, 20 bp, synthetic construct
  misc_feature 1..20: note = chemically synthesized
  source 1..20: mol_type = other DNA
agaatgcaggtcagagaaag

SEQ ID NO: 11040 - DNA, 20 bp, synthetic construct
  misc_feature 1..20: note = chemically synthesized
  source 1..20: mol_type = other DNA
gaatgcaggtcagagaaagc

SEQ ID NO: 11041 - DNA, 20 bp, synthetic construct
  misc_feature 1..20: note = chemically synthesized
  source 1..20: mol_type = other DNA
cagagaaagcaggacctgcc

SEQ ID NO: 11042 - DNA, 20 bp, synthetic construct
  misc_feature 1..20: note = chemically synthesized
  source 1..20: mol_type = other DNA
agagaaagcaggacctgcct

SEQ ID NO: 11043 - DNA, 20 bp, synthetic construct
  misc_feature 1..20: note = chemically synthesized
  source 1..20: mol_type = other DNA
gaaagcaggacctgcctggg

SEQ ID NO: 11044 - DNA, 20 bp, synthetic construct
  misc_feature 1..20: note = chemically synthesized
  source 1..20: mol_type = other DNA
aaagcaggacctgcctggga

SEQ ID NO: 11045 - DNA, 20 bp, synthetic construct
  misc_feature 1..20: note = chemically synthesized
  source 1..20: mol_type = other DNA
aagcaggacctgcctgggaa

SEQ ID NO: 11046 - DNA, 20 bp, synthetic construct
  misc_feature 1..20: note = chemically synthesized
  source 1..20: mol_type = other DNA
agcaggacctgcctgggaag

SEQ ID NO: 11047 - DNA, 20 bp, synthetic construct
  misc_feature 1..20: note = chemically synthesized
  source 1..20: mol_type = other DNA
acctgcctgggaaggggaaa

SEQ ID NO: 11048 - DNA, 20 bp, synthetic construct
  misc_feature 1..20: note = chemically synthesized
  source 1..20: mol_type = other DNA
tgcctgggaaggggaaacag

SEQ ID NO: 11049 - DNA, 20 bp, synthetic construct
  misc_feature 1..20: note = chemically synthesized
  source 1..20: mol_type = other DNA
gcctgggaaggggaaacagt

SEQ ID NO: 11050 - DNA, 20 bp, synthetic construct
  misc_feature 1..20: note = chemically synthesized
  source 1..20: mol_type = other DNA
gggaaggggaaacagtgggc

SEQ ID NO: 11051 - DNA, 20 bp, synthetic construct
  misc_feature 1..20: note = chemically synthesized
  source 1..20: mol_type = other DNA
gaaggggaaacagtgggcca

SEQ ID NO: 11052 - DNA, 20 bp, synthetic construct
  misc_feature 1..20: note = chemically synthesized
  source 1..20: mol_type = other DNA
aaggggaaacagtgggccag

SEQ ID NO: 11053 - DNA, 20 bp, synthetic construct
  misc_feature 1..20: note = chemically synthesized
  source 1..20: mol_type = other DNA
gggaaacagtgggccagagg

SEQ ID NO: 11054 - DNA, 20 bp, synthetic construct
  misc_feature 1..20: note = chemically synthesized
  source 1..20: mol_type = other DNA
acagtgggccagaggcggcg

SEQ ID NO: 11055 - DNA, 20 bp, synthetic construct
  misc_feature 1..20: note = chemically synthesized
  source 1..20: mol_type = other DNA
gtgggccagaggcggcgcag

SEQ ID NO: 11056 - DNA, 20 bp, synthetic construct
  misc_feature 1..20: note = chemically synthesized
  source 1..20: mol_type = other DNA
gccagaggcggcgcagaagc

SEQ ID NO: 11057 - DNA, 20 bp, synthetic construct
  misc_feature 1..20: note = chemically synthesized
  source 1..20: mol_type = other DNA
agaggcggcgcagaagccag

SEQ ID NO: 11058 - DNA, 20 bp, synthetic construct
  misc_feature 1..20: note = chemically synthesized
  source 1..20: mol_type = other DNA
aggcggcgcagaagccagta

SEQ ID NO: 11059 - DNA, 20 bp, synthetic construct
  misc_feature 1..20: note = chemically synthesized
  source 1..20: mol_type = other DNA
gcagaagccagtagagctca

SEQ ID NO: 11060 - DNA, 20 bp, synthetic construct
  misc_feature 1..20: note = chemically synthesized
  source 1..20: mol_type = other DNA
gaagccagtagagctcaaag

SEQ ID NO: 11061 - DNA, 20 bp, synthetic construct
  misc_feature 1..20: note = chemically synthesized
  source 1..20: mol_type = other DNA
cagtagagctcaaagtggtc

SEQ ID NO: 11062 - DNA, 20 bp, synthetic construct
  misc_feature 1..20: note = chemically synthesized
  source 1..20: mol_type = other DNA
agctcaaagtggtccggact

SEQ ID NO: 11063 - DNA, 20 bp, synthetic construct
  misc_feature 1..20: note = chemically synthesized
  source 1..20: mol_type = other DNA
gctcaaagtggtccggactc

SEQ ID NO: 11064 - DNA, 20 bp, synthetic construct
  misc_feature 1..20: note = chemically synthesized
  source 1..20: mol_type = other DNA
tcaaagtggtccggactcag

SEQ ID NO: 11065 - DNA, 20 bp, synthetic construct
  misc_feature 1..20: note = chemically synthesized
  source 1..20: mol_type = other DNA
aaagtggtccggactcagga

SEQ ID NO: 11066 - DNA, 20 bp, synthetic construct
  misc_feature 1..20: note = chemically synthesized
  source 1..20: mol_type = other DNA
agtggtccggactcaggaga

SEQ ID NO: 11067 - DNA, 20 bp, synthetic construct
  misc_feature 1..20: note = chemically synthesized
  source 1..20: mol_type = other DNA
gtccggactcaggagagaga

SEQ ID NO: 11068 - DNA, 20 bp, synthetic construct
  misc_feature 1..20: note = chemically synthesized
  source 1..20: mol_type = other DNA
cggactcaggagagagacgg

SEQ ID NO: 11069 - DNA, 20 bp, synthetic construct
  misc_feature 1..20: note = chemically synthesized
  source 1..20: mol_type = other DNA
caggagagagacggcagcgt

SEQ ID NO: 11070 - DNA, 20 bp, synthetic construct
  misc_feature 1..20: note = chemically synthesized
  source 1..20: mol_type = other DNA
ggagagagacggcagcgtta

SEQ ID NO: 11071 - DNA, 20 bp, synthetic construct
  misc_feature 1..20: note = chemically synthesized
  source 1..20: mol_type = other DNA
gagagagacggcagcgttag

SEQ ID NO: 11072 - DNA, 20 bp, synthetic construct
  misc_feature 1..20: note = chemically synthesized
  source 1..20: mol_type = other DNA
agagagacggcagcgttaga

SEQ ID NO: 11073 - DNA, 20 bp, synthetic construct
  misc_feature 1..20: note = chemically synthesized
  source 1..20: mol_type = other DNA
gagacggcagcgttagaggg

SEQ ID NO: 11074 - DNA, 20 bp, synthetic construct
  misc_feature 1..20: note = chemically synthesized
  source 1..20: mol_type = other DNA
gacggcagcgttagagggca

SEQ ID NO: 11075 - DNA, 20 bp, synthetic construct
  misc_feature 1..20: note = chemically synthesized
  source 1..20: mol_type = other DNA
agcgttagagggcagagttc

SEQ ID NO: 11076 - DNA, 20 bp, synthetic construct
  misc_feature 1..20: note = chemically synthesized
  source 1..20: mol_type = other DNA
gttagagggcagagttccgg

SEQ ID NO: 11077 - DNA, 20 bp, synthetic construct
  misc_feature 1..20: note = chemically synthesized
  source 1..20: mol_type = other DNA
agggcagagttccggcggca

SEQ ID NO: 11078 - DNA, 20 bp, synthetic construct
  misc_feature 1..20: note = chemically synthesized
  source 1..20: mol_type = other DNA
cagagttccggcggcacagc

SEQ ID NO: 11079 - DNA, 20 bp, synthetic construct
  misc_feature 1..20: note = chemically synthesized
  source 1..20: mol_type = other DNA
agagttccggcggcacagca

SEQ ID NO: 11080 - DNA, 20 bp, synthetic construct
  misc_feature 1..20: note = chemically synthesized
  source 1..20: mol_type = other DNA
gagttccggcggcacagcaa

SEQ ID NO: 11081 - DNA, 20 bp, synthetic construct
  misc_feature 1..20: note = chemically synthesized
  source 1..20: mol_type = other DNA
ggcggcacagcaagggcact

SEQ ID NO: 11082 - DNA, 20 bp, synthetic construct
  misc_feature 1..20: note = chemically synthesized
  source 1..20: mol_type = other DNA
gcggcacagcaagggcactc

SEQ ID NO: 11083 - DNA, 20 bp, synthetic construct
  misc_feature 1..20: note = chemically synthesized
  source 1..20: mol_type = other DNA
cggcacagcaagggcactcg

SEQ ID NO: 11084 - DNA, 20 bp, synthetic construct
  misc_feature 1..20: note = chemically synthesized
  source 1..20: mol_type = other DNA
ggcacagcaagggcactcgg

SEQ ID NO: 11085 - DNA, 20 bp, synthetic construct
  misc_feature 1..20: note = chemically synthesized
  source 1..20: mol_type = other DNA
cagcaagggcactcgggggc

SEQ ID NO: 11086 - DNA, 20 bp, synthetic construct
  misc_feature 1..20: note = chemically synthesized
  source 1..20: mol_type = other DNA
gcaagggcactcgggggcga

SEQ ID NO: 11087 - DNA, 20 bp, synthetic construct
  misc_feature 1..20: note = chemically synthesized
  source 1..20: mol_type = other DNA
caagggcactcgggggcgag

SEQ ID NO: 11088 - DNA, 20 bp, synthetic construct
  misc_feature 1..20: note = chemically synthesized
  source 1..20: mol_type = other DNA
agggcactcgggggcgagag

SEQ ID NO: 11089 - DNA, 20 bp, synthetic construct
  misc_feature 1..20: note = chemically synthesized
  source 1..20: mol_type = other DNA
gggcactcgggggcgagagg

SEQ ID NO: 11090 - DNA, 20 bp, synthetic construct
  misc_feature 1..20: note = chemically synthesized
  source 1..20: mol_type = other DNA
ggcactcgggggcgagagga

SEQ ID NO: 11091 - DNA, 20 bp, synthetic construct
  misc_feature 1..20: note = chemically synthesized
  source 1..20: mol_type = other DNA
actcgggggcgagaggaggg

SEQ ID NO: 11092 - DNA, 20 bp, synthetic construct
  misc_feature 1..20: note = chemically synthesized
  source 1..20: mol_type = other DNA
ggcgagaggagggcagcgca

SEQ ID NO: 11093 - DNA, 20 bp, synthetic construct
  misc_feature 1..20: note = chemically synthesized
  source 1..20: mol_type = other DNA
agggcagcgcaaagtgacaa

SEQ ID NO: 11094 - DNA, 20 bp, synthetic construct
  misc_feature 1..20: note = chemically synthesized
  source 1..20: mol_type = other DNA
cagcgcaaagtgacaatggc

SEQ ID NO: 11095 - DNA, 20 bp, synthetic construct
  misc_feature 1..20: note = chemically synthesized
  source 1..20: mol_type = other DNA
agcgcaaagtgacaatggcc

SEQ ID NO: 11096 - DNA, 20 bp, synthetic construct
  misc_feature 1..20: note = chemically synthesized
  source 1..20: mol_type = other DNA
gcgcaaagtgacaatggcca

SEQ ID NO: 11097 - DNA, 20 bp, synthetic construct
  misc_feature 1..20: note = chemically synthesized
  source 1..20: mol_type = other DNA
aaagtgacaatggccagggc

SEQ ID NO: 11098 - DNA, 20 bp, synthetic construct
  misc_feature 1..20: note = chemically synthesized
  source 1..20: mol_type = other DNA
aagtgacaatggccagggcc

SEQ ID NO: 11099 - DNA, 20 bp, synthetic construct
  misc_feature 1..20: note = chemically synthesized
  source 1..20: mol_type = other DNA
tgacaatggccagggccagg

SEQ ID NO: 11100 - DNA, 20 bp, synthetic construct
  misc_feature 1..20: note = chemically synthesized
  source 1..20: mol_type = other DNA
aatggccagggccaggcaga

SEQ ID NO: 11101 - DNA, 20 bp, synthetic construct
  misc_feature 1..20: note = chemically synthesized
  source 1..20: mol_type = other DNA
ccagggccaggcagatagac

SEQ ID NO: 11102 - DNA, 20 bp, synthetic construct
  misc_feature 1..20: note = chemically synthesized
  source 1..20: mol_type = other DNA
ccaggcagatagaccagact

SEQ ID NO: 11103 - DNA, 20 bp, synthetic construct
  misc_feature 1..20: note = chemically synthesized
  source 1..20: mol_type = other DNA
agatagaccagactgagcta

SEQ ID NO: 11104 - DNA, 20 bp, synthetic construct
  misc_feature 1..20: note = chemically synthesized
  source 1..20: mol_type = other DNA
gatagaccagactgagctat

SEQ ID NO: 11105 - DNA, 20 bp, synthetic construct
  misc_feature 1..20: note = chemically synthesized
  source 1..20: mol_type = other DNA
tagaccagactgagctatgg

SEQ ID NO: 11106 - DNA, 20 bp, synthetic construct
  misc_feature 1..20: note = chemically synthesized
  source 1..20: mol_type = other DNA
ccagactgagctatgggagc

SEQ ID NO: 11107 - DNA, 20 bp, synthetic construct
  misc_feature 1..20: note = chemically synthesized
  source 1..20: mol_type = other DNA
ctgagctatgggagctggct

SEQ ID NO: 11108 - DNA, 20 bp, synthetic construct
  misc_feature 1..20: note = chemically synthesized
  source 1..20: mol_type = other DNA
tgagctatgggagctggctc

SEQ ID NO: 11109 - DNA, 20 bp, synthetic construct
  misc_feature 1..20: note = chemically synthesized
  source 1..20: mol_type = other DNA
tatgggagctggctcaggtt

SEQ ID NO: 11110 - DNA, 20 bp, synthetic construct
  misc_feature 1..20: note = chemically synthesized
  source 1..20: mol_type = other DNA
atgggagctggctcaggttc

SEQ ID NO: 11111 - DNA, 20 bp, synthetic construct
  misc_feature 1..20: note = chemically synthesized
  source 1..20: mol_type = other DNA
gggagctggctcaggttcag

SEQ ID NO: 11112 - DNA, 20 bp, synthetic construct
  misc_feature 1..20: note = chemically synthesized
  source 1..20: mol_type = other DNA
gagctggctcaggttcagga

SEQ ID NO: 11113 - DNA, 20 bp, synthetic construct
  misc_feature 1..20: note = chemically synthesized
  source 1..20: mol_type = other DNA
agctggctcaggttcaggag

SEQ ID NO: 11114 - DNA, 20 bp, synthetic construct
  misc_feature 1..20: note = chemically synthesized
  source 1..20: mol_type = other DNA
gctggctcaggttcaggaga

SEQ ID NO: 11115 - DNA, 20 bp, synthetic construct
  misc_feature 1..20: note = chemically synthesized
  source 1..20: mol_type = other DNA
ggctcaggttcaggagaggg

SEQ ID NO: 11116 - DNA, 20 bp, synthetic construct
  misc_feature 1..20: note = chemically synthesized
  source 1..20: mol_type = other DNA
gctcaggttcaggagagggc

SEQ ID NO: 11117 - DNA, 20 bp, synthetic construct
  misc_feature 1..20: note = chemically synthesized
  source 1..20: mol_type = other DNA
ctcaggttcaggagagggca

SEQ ID NO: 11118 - DNA, 20 bp, synthetic construct
  misc_feature 1..20: note = chemically synthesized
  source 1..20: mol_type = other DNA
aggttcaggagagggcaggg

SEQ ID NO: 11119 - DNA, 20 bp, synthetic construct
  misc_feature 1..20: note = chemically synthesized
  source 1..20: mol_type = other DNA
ggttcaggagagggcagggc

SEQ ID NO: 11120 - DNA, 20 bp, synthetic construct
  misc_feature 1..20: note = chemically synthesized
  source 1..20: mol_type = other DNA
gttcaggagagggcagggca

SEQ ID NO: 11121 - DNA, 20 bp, synthetic construct
  misc_feature 1..20: note = chemically synthesized
  source 1..20: mol_type = other DNA
caggagagggcagggcaggg

SEQ ID NO: 11122 - DNA, 20 bp, synthetic construct
  misc_feature 1..20: note = chemically synthesized
  source 1..20: mol_type = other DNA
aggagagggcagggcaggga

SEQ ID NO: 11123 - DNA, 20 bp, synthetic construct
  misc_feature 1..20: note = chemically synthesized
  source 1..20: mol_type = other DNA
gagagggcagggcagggaag

SEQ ID NO: 11124 - DNA, 20 bp, synthetic construct
  misc_feature 1..20: note = chemically synthesized
  source 1..20: mol_type = other DNA
gcagggcagggaaggagaca

SEQ ID NO: 11125 - DNA, 20 bp, synthetic construct
  misc_feature 1..20: note = chemically synthesized
  source 1..20: mol_type = other DNA
gcagggaaggagacaaagtc

SEQ ID NO: 11126 - DNA, 20 bp, synthetic construct
  misc_feature 1..20: note = chemically synthesized
  source 1..20: mol_type = other DNA
cagggaaggagacaaagtcc

SEQ ID NO: 11127 - DNA, 20 bp, synthetic construct
  misc_feature 1..20: note = chemically synthesized
  source 1..20: mol_type = other DNA
aaggagacaaagtccaggac

SEQ ID NO: 11128 - DNA, 20 bp, synthetic construct
  misc_feature 1..20: note = chemically synthesized
  source 1..20: mol_type = other DNA
agacaaagtccaggaccggc

SEQ ID NO: 11129 - DNA, 20 bp, synthetic construct
  misc_feature 1..20: note = chemically synthesized
  source 1..20: mol_type = other DNA
acaaagtccaggaccggctg

SEQ ID NO: 11130 - DNA, 20 bp, synthetic construct
  misc_feature 1..20: note = chemically synthesized
  source 1..20: mol_type = other DNA
caaagtccaggaccggctgg

SEQ ID NO: 11131 - DNA, 20 bp, synthetic construct
  misc_feature 1..20: note = chemically synthesized
  source 1..20: mol_type = other DNA
aaagtccaggaccggctgga

SEQ ID NO: 11132 - DNA, 20 bp, synthetic construct
  misc_feature 1..20: note = chemically synthesized
  source 1..20: mol_type = other DNA
aagtccaggaccggctggag

SEQ ID NO: 11133 - DNA, 20 bp, synthetic construct
  misc_feature 1..20: note = chemically synthesized
  source 1..20: mol_type = other DNA
cggctggaggggctcaacat

SEQ ID NO: 11134 - DNA, 20 bp, synthetic construct
  misc_feature 1..20: note = chemically synthesized
  source 1..20: mol_type = other DNA
ctggaggggctcaacatcgg

SEQ ID NO: 11135 - DNA, 20 bp, synthetic construct
  misc_feature 1..20: note = chemically synthesized
  source 1..20: mol_type = other DNA
ggaggggctcaacatcggaa

SEQ ID NO: 11136 - DNA, 20 bp, synthetic construct
  misc_feature 1..20: note = chemically synthesized
  source 1..20: mol_type = other DNA
gaggggctcaacatcggaag

SEQ ID NO: 11137 - DNA, 20 bp, synthetic construct
  misc_feature 1..20: note = chemically synthesized
  source 1..20: mol_type = other DNA
aggggctcaacatcggaaga

SEQ ID NO: 11138 - DNA, 20 bp, synthetic construct
  misc_feature 1..20: note = chemically synthesized
  source 1..20: mol_type = other DNA
ggggctcaacatcggaagag

SEQ ID NO: 11139 - DNA, 20 bp, synthetic construct
  misc_feature 1..20: note = chemically synthesized
  source 1..20: mol_type = other DNA
gctcaacatcggaagagggg

SEQ ID NO: 11140 - DNA, 20 bp, synthetic construct
  misc_feature 1..20: note = chemically synthesized
  source 1..20: mol_type = other DNA
acatcggaagaggggaagtc

SEQ ID NO: 11141 - DNA, 20 bp, synthetic construct
  misc_feature 1..20: note = chemically synthesized
  source 1..20: mol_type = other DNA
catcggaagaggggaagtcg

SEQ ID NO: 11142 - DNA, 20 bp, synthetic construct
  misc_feature 1..20: note = chemically synthesized
  source 1..20: mol_type = other DNA
atcggaagaggggaagtcga

SEQ ID NO: 11143 - DNA, 20 bp, synthetic construct
  misc_feature 1..20: note = chemically synthesized
  source 1..20: mol_type = other DNA
cggaagaggggaagtcgagg

SEQ ID NO: 11144 - DNA, 20 bp, synthetic construct
  misc_feature 1..20: note = chemically synthesized
  source 1..20: mol_type = other DNA
ggaagaggggaagtcgaggg

SEQ ID NO: 11145 - DNA, 20 bp, synthetic construct
  misc_feature 1..20: note = chemically synthesized
  source 1..20: mol_type = other DNA
gaagaggggaagtcgaggga

SEQ ID NO: 11146 - DNA, 20 bp, synthetic construct
  misc_feature 1..20: note = chemically synthesized
  source 1..20: mol_type = other DNA
aggggaagtcgagggaggga

SEQ ID NO: 11147 - DNA, 20 bp, synthetic construct
  misc_feature 1..20: note = chemically synthesized
  source 1..20: mol_type = other DNA
gaagtcgagggagggatggt

SEQ ID NO: 11148 - DNA, 20 bp, synthetic construct
  misc_feature 1..20: note = chemically synthesized
  source 1..20: mol_type = other DNA
aagtcgagggagggatggta

SEQ ID NO: 11149 - DNA, 20 bp, synthetic construct
  misc_feature 1..20: note = chemically synthesized
  source 1..20: mol_type = other DNA
gtcgagggagggatggtaag

SEQ ID NO: 11150 - DNA, 20 bp, synthetic construct
  misc_feature 1..20: note = chemically synthesized
  source 1..20: mol_type = other DNA
tcgagggagggatggtaagg

SEQ ID NO: 11151 - DNA, 20 bp, synthetic construct
  misc_feature 1..20: note = chemically synthesized
  source 1..20: mol_type = other DNA
ggatggtaaggaggactgca

SEQ ID NO: 11152 - DNA, 20 bp, synthetic construct
  misc_feature 1..20: note = chemically synthesized
  source 1..20: mol_type = other DNA
gatggtaaggaggactgcat

SEQ ID NO: 11153 - DNA, 20 bp, synthetic construct
  misc_feature 1..20: note = chemically synthesized
  source 1..20: mol_type = other DNA
gtaaggaggactgcatgggt

SEQ ID NO: 11154 - DNA, 20 bp, synthetic construct
  misc_feature 1..20: note = chemically synthesized
  source 1..20: mol_type = other DNA
gaggactgcatgggtcagca

SEQ ID NO: 11155 - DNA, 20 bp, synthetic construct
  misc_feature 1..20: note = chemically synthesized
  source 1..20: mol_type = other DNA
aggactgcatgggtcagcac

SEQ ID NO: 11156 - DNA, 20 bp, synthetic construct
  misc_feature 1..20: note = chemically synthesized
  source 1..20: mol_type = other DNA
tgggtcagcacaggctgcca

SEQ ID NO: 11157 - DNA, 20 bp, synthetic construct
  misc_feature 1..20: note = chemically synthesized
  source 1..20: mol_type = other DNA
tcagcacaggctgccaaagc

SEQ ID NO: 11158 - DNA, 20 bp, synthetic construct
  misc_feature 1..20: note = chemically synthesized
  source 1..20: mol_type = other DNA
cagcacaggctgccaaagcc

SEQ ID NO: 11159 - DNA, 20 bp, synthetic construct
  misc_feature 1..20: note = chemically synthesized
  source 1..20: mol_type = other DNA
agcacaggctgccaaagcca

SEQ ID NO: 11160 - DNA, 20 bp, synthetic construct
  misc_feature 1..20: note = chemically synthesized
  source 1..20: mol_type = other DNA
caggctgccaaagccagggc

SEQ ID NO: 11161 - DNA, 20 bp, synthetic construct
  misc_feature 1..20: note = chemically synthesized
  source 1..20: mol_type = other DNA
gccaaagccagggccagtta

SEQ ID NO: 11162 - DNA, 20 bp, synthetic construct
  misc_feature 1..20: note = chemically synthesized
  source 1..20: mol_type = other DNA
cagttaaagcgactccaatg

SEQ ID NO: 11163 - DNA, 20 bp, synthetic construct
  misc_feature 1..20: note = chemically synthesized
  source 1..20: mol_type = other DNA
ttaaagcgactccaatgcgg

SEQ ID NO: 11164 - DNA, 20 bp, synthetic construct
  misc_feature 1..20: note = chemically synthesized
  source 1..20: mol_type = other DNA
aaagcgactccaatgcggaa

SEQ ID NO: 11165 - DNA, 20 bp, synthetic construct
  misc_feature 1..20: note = chemically synthesized
  source 1..20: mol_type = other DNA
agcgactccaatgcggaaga

SEQ ID NO: 11166 - DNA, 20 bp, synthetic construct
  misc_feature 1..20: note = chemically synthesized
  source 1..20: mol_type = other DNA
gactccaatgcggaagagag

SEQ ID NO: 11167 - DNA, 20 bp, synthetic construct
  misc_feature 1..20: note = chemically synthesized
  source 1..20: mol_type = other DNA
actccaatgcggaagagagt

SEQ ID NO: 11168 - DNA, 20 bp, synthetic construct
  misc_feature 1..20: note = chemically synthesized
  source 1..20: mol_type = other DNA
atgcggaagagagtaggtcg

SEQ ID NO: 11169 - DNA, 20 bp, synthetic construct
  misc_feature 1..20: note = chemically synthesized
  source 1..20: mol_type = other DNA
tgcggaagagagtaggtcga

SEQ ID NO: 11170 - DNA, 20 bp, synthetic construct
  misc_feature 1..20: note = chemically synthesized
  source 1..20: mol_type = other DNA
gcggaagagagtaggtcgaa

SEQ ID NO: 11171 - DNA, 20 bp, synthetic construct
  misc_feature 1..20: note = chemically synthesized
  source 1..20: mol_type = other DNA
cggaagagagtaggtcgaag

SEQ ID NO: 11172 - DNA, 20 bp, synthetic construct
  misc_feature 1..20: note = chemically synthesized
  source 1..20: mol_type = other DNA
gagagtaggtcgaaggggaa

SEQ ID NO: 11173 - DNA, 20 bp, synthetic construct
  misc_feature 1..20: note = chemically synthesized
  source 1..20: mol_type = other DNA
gtaggtcgaaggggaatggt

SEQ ID NO: 11174 - DNA, 20 bp, synthetic construct
  misc_feature 1..20: note = chemically synthesized
  source 1..20: mol_type = other DNA
taggtcgaaggggaatggta

SEQ ID NO: 11175 - DNA, 20 bp, synthetic construct
  misc_feature 1..20: note = chemically synthesized
  source 1..20: mol_type = other DNA
ggtcgaaggggaatggtaag

SEQ ID NO: 11176 - DNA, 20 bp, synthetic construct
  misc_feature 1..20: note = chemically synthesized
  source 1..20: mol_type = other DNA
gtcgaaggggaatggtaagg

SEQ ID NO: 11177 - DNA, 20 bp, synthetic construct
  misc_feature 1..20: note = chemically synthesized
  source 1..20: mol_type = other DNA
aggggaatggtaaggaggcc

SEQ ID NO: 11178 - DNA, 20 bp, synthetic construct
  misc_feature 1..20: note = chemically synthesized
  source 1..20: mol_type = other DNA
ggggaatggtaaggaggcct

SEQ ID NO: 11179 - DNA, 20 bp, synthetic construct
  misc_feature 1..20: note = chemically synthesized
  source 1..20: mol_type = other DNA
gggaatggtaaggaggcctg

SEQ ID NO: 11180 - DNA, 20 bp, synthetic construct
  misc_feature 1..20: note = chemically synthesized
  source 1..20: mol_type = other DNA
aatggtaaggaggcctgggg

SEQ ID NO: 11181 - DNA, 20 bp, synthetic construct
  misc_feature 1..20: note = chemically synthesized
  source 1..20: mol_type = other DNA
tggtaaggaggcctggggca

SEQ ID NO: 11182 - DNA, 20 bp, synthetic construct
  misc_feature 1..20: note = chemically synthesized
  source 1..20: mol_type = other DNA
taaggaggcctggggcagag

SEQ ID NO: 11183 - DNA, 20 bp, synthetic construct
  misc_feature 1..20: note = chemically synthesized
  source 1..20: mol_type = other DNA
gaggcctggggcagagtggt

SEQ ID NO: 11184 - DNA, 20 bp, synthetic construct
  misc_feature 1..20: note = chemically synthesized
  source 1..20: mol_type = other DNA
ctggggcagagtggtcagca

SEQ ID NO: 11185 - DNA, 20 bp, synthetic construct
  misc_feature 1..20: note = chemically synthesized
  source 1..20: mol_type = other DNA
ggggcagagtggtcagcaca

SEQ ID NO: 11186 - DNA, 20 bp, synthetic construct
  misc_feature 1..20: note = chemically synthesized
  source 1..20: mol_type = other DNA
gcagagtggtcagcacagag

SEQ ID NO: 11187 - DNA, 20 bp, synthetic construct
  misc_feature 1..20: note = chemically synthesized
  source 1..20: mol_type = other DNA
gtggtcagcacagagtggct

SEQ ID NO: 11188 - DNA, 20 bp, synthetic construct
  misc_feature 1..20: note = chemically synthesized
  source 1..20: mol_type = other DNA
cagcacagagtggctaagcc

SEQ ID NO: 11189 - DNA, 20 bp, synthetic construct
  misc_feature 1..20: note = chemically synthesized
  source 1..20: mol_type = other DNA
agcacagagtggctaagccc

SEQ ID NO: 11190 - DNA, 20 bp, synthetic construct
  misc_feature 1..20: note = chemically synthesized
  source 1..20: mol_type = other DNA
gcacagagtggctaagccca

SEQ ID NO: 11191 - DNA, 20 bp, synthetic construct
  misc_feature 1..20: note = chemically synthesized
  source 1..20: mol_type = other DNA
agagtggctaagcccagggc

SEQ ID NO: 11192 - DNA, 20 bp, synthetic construct
  misc_feature 1..20: note = chemically synthesized
  source 1..20: mol_type = other DNA
gctaagcccagggccagttg

SEQ ID NO: 11193 - DNA, 20 bp, synthetic construct
  misc_feature 1..20: note = chemically synthesized
  source 1..20: mol_type = other DNA
aagcccagggccagttgaag

SEQ ID NO: 11194 - DNA, 20 bp, synthetic construct
  misc_feature 1..20: note = chemically synthesized
  source 1..20: mol_type = other DNA
cagttgaagcggctccaatt

SEQ ID NO: 11195 - DNA, 20 bp, synthetic construct
  misc_feature 1..20: note = chemically synthesized
  source 1..20: mol_type = other DNA
ttgaagcggctccaattcgg

SEQ ID NO: 11196 - DNA, 20 bp, synthetic construct
  misc_feature 1..20: note = chemically synthesized
  source 1..20: mol_type = other DNA
aagcggctccaattcggaag

SEQ ID NO: 11197 - DNA, 20 bp, synthetic construct
  misc_feature 1..20: note = chemically synthesized
  source 1..20: mol_type = other DNA
agcggctccaattcggaagt

SEQ ID NO: 11198 - DNA, 20 bp, synthetic construct
  misc_feature 1..20: note = chemically synthesized
  source 1..20: mol_type = other DNA
gcggctccaattcggaagtg

SEQ ID NO: 11199 - DNA, 20 bp, synthetic construct
  misc_feature 1..20: note = chemically synthesized
  source 1..20: mol_type = other DNA
gctccaattcggaagtgggg

SEQ ID NO: 11200 - DNA, 20 bp, synthetic construct
  misc_feature 1..20: note = chemically synthesized
  source 1..20: mol_type = other DNA
attcggaagtggggtggtcg

SEQ ID NO: 11201 - DNA, 20 bp, synthetic construct
  misc_feature 1..20: note = chemically synthesized
  source 1..20: mol_type = other DNA
ttcggaagtggggtggtcga

SEQ ID NO: 11202 - DNA, 20 bp, synthetic construct
  misc_feature 1..20: note = chemically synthesized
  source 1..20: mol_type = other DNA
tcggaagtggggtggtcgaa

SEQ ID NO: 11203 - DNA, 20 bp, synthetic construct
  misc_feature 1..20: note = chemically synthesized
  source 1..20: mol_type = other DNA
cggaagtggggtggtcgaag

SEQ ID NO: 11204 - DNA, 20 bp, synthetic construct
  misc_feature 1..20: note = chemically synthesized
  source 1..20: mol_type = other DNA
gtggggtggtcgaaggggaa

SEQ ID NO: 11205 - DNA, 20 bp, synthetic construct
  misc_feature 1..20: note = chemically synthesized
  source 1..20: mol_type = other DNA
ggtggtcgaaggggaatggt

SEQ ID NO: 11206 - DNA, 20 bp, synthetic construct
  misc_feature 1..20: note = chemically synthesized
  source 1..20: mol_type = other DNA
gtggtcgaaggggaatggta

SEQ ID NO: 11207 - DNA, 20 bp, synthetic construct
  misc_feature 1..20: note = chemically synthesized
  source 1..20: mol_type = other DNA
tggtcgaaggggaatggtaa

SEQ ID NO: 11208 - DNA, 20 bp, synthetic construct
  misc_feature 1..20: note = chemically synthesized
  source 1..20: mol_type = other DNA
ggtcgaaggggaatggtaag

SEQ ID NO: 11209 - DNA, 20 bp, synthetic construct
  misc_feature 1..20: note = chemically synthesized
  source 1..20: mol_type = other DNA
gtcgaaggggaatggtaagg

SEQ ID NO: 11210 - DNA, 20 bp, synthetic construct
  misc_feature 1..20: note = chemically synthesized
  source 1..20: mol_type = other DNA
aggggaatggtaagggggac

SEQ ID NO: 11211 - DNA, 20 bp, synthetic construct
  misc_feature 1..20: note = chemically synthesized
  source 1..20: mol_type = other DNA
ggggaatggtaagggggact

SEQ ID NO: 11212 - DNA, 20 bp, synthetic construct
  misc_feature 1..20: note = chemically synthesized
  source 1..20: mol_type = other DNA
aatggtaagggggactggga

SEQ ID NO: 11213 - DNA, 20 bp, synthetic construct
  misc_feature 1..20: note = chemically synthesized
  source 1..20: mol_type = other DNA
atggtaagggggactgggac

SEQ ID NO: 11214 - DNA, 20 bp, synthetic construct
  misc_feature 1..20: note = chemically synthesized
  source 1..20: mol_type = other DNA
tggtaagggggactgggacg

SEQ ID NO: 11215 - DNA, 20 bp, synthetic construct
  misc_feature 1..20: note = chemically synthesized
  source 1..20: mol_type = other DNA
gggggactgggacggggtgt

SEQ ID NO: 11216 - DNA, 20 bp, synthetic construct
  misc_feature 1..20: note = chemically synthesized
  source 1..20: mol_type = other DNA
actgggacggggtgtcagca

SEQ ID NO: 11217 - DNA, 20 bp, synthetic construct
  misc_feature 1..20: note = chemically synthesized
  source 1..20: mol_type = other DNA
ctgggacggggtgtcagcat

SEQ ID NO: 11218 - DNA, 20 bp, synthetic construct
  misc_feature 1..20: note = chemically synthesized
  source 1..20: mol_type = other DNA
tgggacggggtgtcagcata

SEQ ID NO: 11219 - DNA, 20 bp, synthetic construct
  misc_feature 1..20: note = chemically synthesized
  source 1..20: mol_type = other DNA
gacggggtgtcagcataggg

SEQ ID NO: 11220 - DNA, 20 bp, synthetic construct
  misc_feature 1..20: note = chemically synthesized
  source 1..20: mol_type = other DNA
ggtgtcagcatagggtggca

SEQ ID NO: 11221 - DNA, 20 bp, synthetic construct
  misc_feature 1..20: note = chemically synthesized
  source 1..20: mol_type = other DNA
cagcatagggtggcaaagcc

SEQ ID NO: 11222 - DNA, 20 bp, synthetic construct
  misc_feature 1..20: note = chemically synthesized
  source 1..20: mol_type = other DNA
agcatagggtggcaaagccc

SEQ ID NO: 11223 - DNA, 20 bp, synthetic construct
  misc_feature 1..20: note = chemically synthesized
  source 1..20: mol_type = other DNA
gcatagggtggcaaagccca

SEQ ID NO: 11224 - DNA, 20 bp, synthetic construct
  misc_feature 1..20: note = chemically synthesized
  source 1..20: mol_type = other DNA
agggtggcaaagcccagggc

SEQ ID NO: 11225 - DNA, 20 bp, synthetic construct
  misc_feature 1..20: note = chemically synthesized
  source 1..20: mol_type = other DNA
gggtggcaaagcccagggcc

SEQ ID NO: 11226 - DNA, 20 bp, synthetic construct
  misc_feature 1..20: note = chemically synthesized
  source 1..20: mol_type = other DNA
aagcccagggccaggaacga

SEQ ID NO: 11227 - DNA, 20 bp, synthetic construct
  misc_feature 1..20: note = chemically synthesized
  source 1..20: mol_type = other DNA
agcccagggccaggaacgac

SEQ ID NO: 11228 - DNA, 20 bp, synthetic construct
  misc_feature 1..20: note = chemically synthesized
  source 1..20: mol_type = other DNA
gcccagggccaggaacgacg

SEQ ID NO: 11229 - DNA, 20 bp, synthetic construct
  misc_feature 1..20: note = chemically synthesized
  source 1..20: mol_type = other DNA
cagggccaggaacgacgggg

SEQ ID NO: 11230 - DNA, 20 bp, synthetic construct
  misc_feature 1..20: note = chemically synthesized
  source 1..20: mol_type = other DNA
caggaacgacggggcggatc

SEQ ID NO: 11231 - DNA, 20 bp, synthetic construct
  misc_feature 1..20: note = chemically synthesized
  source 1..20: mol_type = other DNA
acgacggggcggatcgagac

SEQ ID NO: 11232 - DNA, 20 bp, synthetic construct
  misc_feature 1..20: note = chemically synthesized
  source 1..20: mol_type = other DNA
gggcggatcgagactggcaa

SEQ ID NO: 11233 - DNA, 20 bp, synthetic construct
  misc_feature 1..20: note = chemically synthesized
  source 1..20: mol_type = other DNA
ggcggatcgagactggcaac

SEQ ID NO: 11234 - DNA, 20 bp, synthetic construct
  misc_feature 1..20: note = chemically synthesized
  source 1..20: mol_type = other DNA
gcggatcgagactggcaacg

SEQ ID NO: 11235 - DNA, 20 bp, synthetic construct
  misc_feature 1..20: note = chemically synthesized
  source 1..20: mol_type = other DNA
gatcgagactggcaacgggg

SEQ ID NO: 11236 - DNA, 20 bp, synthetic construct
  misc_feature 1..20: note = chemically synthesized
  source 1..20: mol_type = other DNA
atcgagactggcaacgggga

SEQ ID NO: 11237 - DNA, 20 bp, synthetic construct
  misc_feature 1..20: note = chemically synthesized
  source 1..20: mol_type = other DNA
cgagactggcaacggggaag

SEQ ID NO: 11238 - DNA, 20 bp, synthetic construct
  misc_feature 1..20: note = chemically synthesized
  source 1..20: mol_type = other DNA
gagactggcaacggggaagg

SEQ ID NO: 11239 - DNA, 20 bp, synthetic construct
  misc_feature 1..20: note = chemically synthesized
  source 1..20: mol_type = other DNA
aacggggaaggaggatgccc

SEQ ID NO: 11240 - DNA, 20 bp, synthetic construct
  misc_feature 1..20: note = chemically synthesized
  source 1..20: mol_type = other DNA
acggggaaggaggatgcccc

SEQ ID NO: 11241 - DNA, 20 bp, synthetic construct
  misc_feature 1..20: note = chemically synthesized
  source 1..20: mol_type = other DNA
gggaaggaggatgccccagg

SEQ ID NO: 11242 - DNA, 20 bp, synthetic construct
  misc_feature 1..20: note = chemically synthesized
  source 1..20: mol_type = other DNA
ggaggatgccccaggtggcg

SEQ ID NO: 11243 - DNA, 20 bp, synthetic construct
  misc_feature 1..20: note = chemically synthesized
  source 1..20: mol_type = other DNA
ggatgccccaggtggcgcag

SEQ ID NO: 11244 - DNA, 20 bp, synthetic construct
  misc_feature 1..20: note = chemically synthesized
  source 1..20: mol_type = other DNA
atgccccaggtggcgcagca

SEQ ID NO: 11245 - DNA, 20 bp, synthetic construct
  misc_feature 1..20: note = chemically synthesized
  source 1..20: mol_type = other DNA
tgccccaggtggcgcagcag

SEQ ID NO: 11246 - DNA, 20 bp, synthetic construct
  misc_feature 1..20: note = chemically synthesized
  source 1..20: mol_type = other DNA
gccccaggtggcgcagcaga

SEQ ID NO: 11247 - DNA, 20 bp, synthetic construct
  misc_feature 1..20: note = chemically synthesized
  source 1..20: mol_type = other DNA
ccaggtggcgcagcagaggg

SEQ ID NO: 11248 - DNA, 20 bp, synthetic construct
  misc_feature 1..20: note = chemically synthesized
  source 1..20: mol_type = other DNA
ggcgcagcagagggtggacc

SEQ ID NO: 11249 - DNA, 20 bp, synthetic construct
  misc_feature 1..20: note = chemically synthesized
  source 1..20: mol_type = other DNA
gcagagggtggacctggccc

SEQ ID NO: 11250 - DNA, 20 bp, synthetic construct
  misc_feature 1..20: note = chemically synthesized
  source 1..20: mol_type = other DNA
cagagggtggacctggcccc

SEQ ID NO: 11251 - DNA, 20 bp, synthetic construct
  misc_feature 1..20: note = chemically synthesized
  source 1..20: mol_type = other DNA
gagggtggacctggccccgg

SEQ ID NO: 11252 - DNA, 20 bp, synthetic construct
  misc_feature 1..20: note = chemically synthesized
  source 1..20: mol_type = other DNA
gacctggccccgggagacgc

SEQ ID NO: 11253 - DNA, 20 bp, synthetic construct
  misc_feature 1..20: note = chemically synthesized
  source 1..20: mol_type = other DNA
acctggccccgggagacgcc

SEQ ID NO: 11254 - DNA, 20 bp, synthetic construct
  misc_feature 1..20: note = chemically synthesized
  source 1..20: mol_type = other DNA
tggccccgggagacgccggg

SEQ ID NO: 11255 - DNA, 20 bp, synthetic construct
  misc_feature 1..20: note = chemically synthesized
  source 1..20: mol_type = other DNA
ggccccgggagacgccgggc

SEQ ID NO: 11256 - DNA, 20 bp, synthetic construct
  misc_feature 1..20: note = chemically synthesized
  source 1..20: mol_type = other DNA
gccccgggagacgccgggcg

SEQ ID NO: 11257 - DNA, 20 bp, synthetic construct
  misc_feature 1..20: note = chemically synthesized
  source 1..20: mol_type = other DNA
ccccgggagacgccgggcgg

SEQ ID NO: 11258 - DNA, 20 bp, synthetic construct
  misc_feature 1..20: note = chemically synthesized
  source 1..20: mol_type = other DNA
cccgggagacgccgggcggg

SEQ ID NO: 11259 - DNA, 20 bp, synthetic construct
  misc_feature 1..20: note = chemically synthesized
  source 1..20: mol_type = other DNA
ccgggcggggggcgctgacc

SEQ ID NO: 11260 - DNA, 20 bp, synthetic construct
  misc_feature 1..20: note = chemically synthesized
  source 1..20: mol_type = other DNA
cggggggcgctgacctggtg

SEQ ID NO: 11261 - DNA, 20 bp, synthetic construct
  misc_feature 1..20: note = chemically synthesized
  source 1..20: mol_type = other DNA
ggggggcgctgacctggtgc

SEQ ID NO: 11262 - DNA, 20 bp, synthetic construct
  misc_feature 1..20: note = chemically synthesized
  source 1..20: mol_type = other DNA
gggggcgctgacctggtgca

SEQ ID NO: 11263 - DNA, 20 bp, synthetic construct
  misc_feature 1..20: note = chemically synthesized
  source 1..20: mol_type = other DNA
gtgcagggcgctgataccgt

SEQ ID NO: 11264 - DNA, 20 bp, synthetic construct
  misc_feature 1..20: note = chemically synthesized
  source 1..20: mol_type = other DNA
ggcgctgataccgtcggcgt

SEQ ID NO: 11265 - DNA, 20 bp, synthetic construct
  misc_feature 1..20: note = chemically synthesized
  source 1..20: mol_type = other DNA
gctgataccgtcggcgttgg

SEQ ID NO: 11266 - DNA, 20 bp, synthetic construct
  misc_feature 1..20: note = chemically synthesized
  source 1..20: mol_type = other DNA
tgataccgtcggcgttggtg

SEQ ID NO: 11267 - DNA, 20 bp, synthetic construct
  misc_feature 1..20: note = chemically synthesized
  source 1..20: mol_type = other DNA
ccgtcggcgttggtggagtc

SEQ ID NO: 11268 - DNA, 20 bp, synthetic construct
  misc_feature 1..20: note = chemically synthesized
  source 1..20: mol_type = other DNA
ggcgttggtggagtccagca

SEQ ID NO: 11269 - DNA, 20 bp, synthetic construct
  misc_feature 1..20: note = chemically synthesized
  source 1..20: mol_type = other DNA
tggtggagtccagcacggcg

SEQ ID NO: 11270 - DNA, 20 bp, synthetic construct
  misc_feature 1..20: note = chemically synthesized
  source 1..20: mol_type = other DNA
ggtggagtccagcacggcgc

SEQ ID NO: 11271 - DNA, 20 bp, synthetic construct
  misc_feature 1..20: note = chemically synthesized
  source 1..20: mol_type = other DNA
ggagtccagcacggcgcggg

SEQ ID NO: 11272 - DNA, 20 bp, synthetic construct
  misc_feature 1..20: note = chemically synthesized
  source 1..20: mol_type = other DNA
gagtccagcacggcgcgggc

SEQ ID NO: 11273 - DNA, 20 bp, synthetic construct
  misc_feature 1..20: note = chemically synthesized
  source 1..20: mol_type = other DNA
tccagcacggcgcgggcggg

SEQ ID NO: 11274 - DNA, 20 bp, synthetic construct
  misc_feature 1..20: note = chemically synthesized
  source 1..20: mol_type = other DNA
agcacggcgcgggcgggcgg

SEQ ID NO: 11275 - DNA, 20 bp, synthetic construct
  misc_feature 1..20: note = chemically synthesized
  source 1..20: mol_type = other DNA
ggcgcgggcgggcggcggcg

SEQ ID NO: 11276 - DNA, 20 bp, synthetic construct
  misc_feature 1..20: note = chemically synthesized
  source 1..20: mol_type = other DNA
gcgggcgggcggcggcgcgg

SEQ ID NO: 11277 - DNA, 20 bp, synthetic construct
  misc_feature 1..20: note = chemically synthesized
  source 1..20: mol_type = other DNA
cgggcgggcggcggcgcggc

SEQ ID NO: 11278 - DNA, 20 bp, synthetic construct
  misc_feature 1..20: note = chemically synthesized
  source 1..20: mol_type = other DNA
gggcgggcggcggcgcggcg

SEQ ID NO: 11279 - DNA, 20 bp, synthetic construct
  misc_feature 1..20: note = chemically synthesized
  source 1..20: mol_type = other DNA
ggcggcggcgcggcggggtc

SEQ ID NO: 11280 - DNA, 20 bp, synthetic construct
  misc_feature 1..20: note = chemically synthesized
  source 1..20: mol_type = other DNA
cggcgcggcggggtcgagct

SEQ ID NO: 11281 - DNA, 20 bp, synthetic construct
  misc_feature 1..20: note = chemically synthesized
  source 1..20: mol_type = other DNA
ggcggggtcgagctcggcgc

SEQ ID NO: 11282 - DNA, 20 bp, synthetic construct
  misc_feature 1..20: note = chemically synthesized
  source 1..20: mol_type = other DNA
gcggggtcgagctcggcgcc

SEQ ID NO: 11283 - DNA, 20 bp, synthetic construct
  misc_feature 1..20: note = chemically synthesized
  source 1..20: mol_type = other DNA
cggggtcgagctcggcgccg

SEQ ID NO: 11284 - DNA, 20 bp, synthetic construct
  misc_feature 1..20: note = chemically synthesized
  source 1..20: mol_type = other DNA
gtcgagctcggcgccggggc

SEQ ID NO: 11285 - DNA, 20 bp, synthetic construct
  misc_feature 1..20: note = chemically synthesized
  source 1..20: mol_type = other DNA
tcgagctcggcgccggggcc

SEQ ID NO: 11286 - DNA, 20 bp, synthetic construct
  misc_feature 1..20: note = chemically synthesized
  source 1..20: mol_type = other DNA
cgagctcggcgccggggcca

SEQ ID NO: 11287 - DNA, 20 bp, synthetic construct
  misc_feature 1..20: note = chemically synthesized
  source 1..20: mol_type = other DNA
ctcggcgccggggccagggt

SEQ ID NO: 11288 - DNA, 20 bp, synthetic construct
  misc_feature 1..20: note = chemically synthesized
  source 1..20: mol_type = other DNA
ggcgccggggccagggtcgg

SEQ ID NO: 11289 - DNA, 20 bp, synthetic construct
  misc_feature 1..20: note = chemically synthesized
  source 1..20: mol_type = other DNA
gggccagggtcggcggcgcg

SEQ ID NO: 11290 - DNA, 20 bp, synthetic construct
  misc_feature 1..20: note = chemically synthesized
  source 1..20: mol_type = other DNA
gggtcggcggcgcgcagcat

SEQ ID NO: 11291 - DNA, 20 bp, synthetic construct
  misc_feature 1..20: note = chemically synthesized
  source 1..20: mol_type = other DNA
agcatcagacgcgcctcgtc

SEQ ID NO: 11292 - DNA, 20 bp, synthetic construct
  misc_feature 1..20: note = chemically synthesized
  source 1..20: mol_type = other DNA
gcatcagacgcgcctcgtcc

SEQ ID NO: 11293 - DNA, 20 bp, synthetic construct
  misc_feature 1..20: note = chemically synthesized
  source 1..20: mol_type = other DNA
cgtccaggtcgccgcccgca

SEQ ID NO: 11294 - DNA, 20 bp, synthetic construct
  misc_feature 1..20: note = chemically synthesized
  source 1..20: mol_type = other DNA
gtccaggtcgccgcccgcac

SEQ ID NO: 11295 - DNA, 20 bp, synthetic construct
  misc_feature 1..20: note = chemically synthesized
  source 1..20: mol_type = other DNA
tcgccgcccgcacaggccgc

SEQ ID NO: 11296 - DNA, 20 bp, synthetic construct
  misc_feature 1..20: note = chemically synthesized
  source 1..20: mol_type = other DNA
cgccgcccgcacaggccgcc

SEQ ID NO: 11297 - DNA, 20 bp, synthetic construct
  misc_feature 1..20: note = chemically synthesized
  source 1..20: mol_type = other DNA
cgcacaggccgccaggaact

SEQ ID NO: 11298 - DNA, 20 bp, synthetic construct
  misc_feature 1..20: note = chemically synthesized
  source 1..20: mol_type = other DNA
acaggccgccaggaactcgg

SEQ ID NO: 11299 - DNA, 20 bp, synthetic construct
  misc_feature 1..20: note = chemically synthesized
  source 1..20: mol_type = other DNA
ggaactcggcggcgcgctcg

SEQ ID NO: 11300 - DNA, 20 bp, synthetic construct
  misc_feature 1..20: note = chemically synthesized
  source 1..20: mol_type = other DNA
actcggcggcgcgctcgaag

SEQ ID NO: 11301 - DNA, 20 bp, synthetic construct
  misc_feature 1..20: note = chemically synthesized
  source 1..20: mol_type = other DNA
ggcggcgcgctcgaagcgga

SEQ ID NO: 11302 - DNA, 20 bp, synthetic construct
  misc_feature 1..20: note = chemically synthesized
  source 1..20: mol_type = other DNA
cgcgctcgaagcggacggtg

SEQ ID NO: 11303 - DNA, 20 bp, synthetic construct
  misc_feature 1..20: note = chemically synthesized
  source 1..20: mol_type = other DNA
gcgctcgaagcggacggtgc

SEQ ID NO: 11304 - DNA, 20 bp, synthetic construct
  misc_feature 1..20: note = chemically synthesized
  source 1..20: mol_type = other DNA
cgaagcggacggtgcgggcg

SEQ ID NO: 11305 - DNA, 20 bp, synthetic construct
  misc_feature 1..20: note = chemically synthesized
  source 1..20: mol_type = other DNA
ggtgcgggcgcggcgctctc

SEQ ID NO: 11306 - DNA, 20 bp, synthetic construct
  misc_feature 1..20: note = chemically synthesized
  source 1..20: mol_type = other DNA
gtgcgggcgcggcgctctcc

SEQ ID NO: 11307 - DNA, 20 bp, synthetic construct
  misc_feature 1..20: note = chemically synthesized
  source 1..20: mol_type = other DNA
tgcgggcgcggcgctctccg

SEQ ID NO: 11308 - DNA, 20 bp, synthetic construct
  misc_feature 1..20: note = chemically synthesized
  source 1..20: mol_type = other DNA
ggcgcggcgctctccggggc

SEQ ID NO: 11309 - DNA, 20 bp, synthetic construct
  misc_feature 1..20: note = chemically synthesized
  source 1..20: mol_type = other DNA
gcgcggcgctctccggggcc

SEQ ID NO: 11310 - DNA, 20 bp, synthetic construct
  misc_feature 1..20: note = chemically synthesized
  source 1..20: mol_type = other DNA
gcgctctccggggccaggct

SEQ ID NO: 11311 - DNA, 20 bp, synthetic construct
  misc_feature 1..20: note = chemically synthesized
  source 1..20: mol_type = other DNA
gcccgcgccccccactgccg

SEQ ID NO: 11312 - DNA, 20 bp, synthetic construct
  misc_feature 1..20: note = chemically synthesized
  source 1..20: mol_type = other DNA
gctgctcccgtcgccgctcc

SEQ ID NO: 11313 - DNA, 20 bp, synthetic construct
  misc_feature 1..20: note = chemically synthesized
  source 1..20: mol_type = other DNA
ctgctcccgtcgccgctccc

SEQ ID NO: 11314 - DNA, 20 bp, synthetic construct
  misc_feature 1..20: note = chemically synthesized
  source 1..20: mol_type = other DNA
ctcccgtcgccgctcccggg

SEQ ID NO: 11315 - DNA, 20 bp, synthetic construct
  misc_feature 1..20: note = chemically synthesized
  source 1..20: mol_type = other DNA
gcagccgccgccgccgcccc

SEQ ID NO: 11316 - DNA, 20 bp, synthetic construct
  misc_feature 1..20: note = chemically synthesized
  source 1..20: mol_type = other DNA
cagccgccgccgccgccccc

SEQ ID NO: 11317 - DNA, 20 bp, synthetic construct
  misc_feature 1..20: note = chemically synthesized
  source 1..20: mol_type = other DNA
cgccgccgccgcccccgggc

SEQ ID NO: 11318 - DNA, 20 bp, synthetic construct
  misc_feature 1..20: note = chemically synthesized
  source 1..20: mol_type = other DNA
gccgcccccgggccagccgc

SEQ ID NO: 11319 - DNA, 20 bp, synthetic construct
  misc_feature 1..20: note = chemically synthesized
  source 1..20: mol_type = other DNA
ccgcccccgggccagccgcc

SEQ ID NO: 11320 - DNA, 20 bp, synthetic construct
  misc_feature 1..20: note = chemically synthesized
  source 1..20: mol_type = other DNA
agccgccgggccatcctctc

SEQ ID NO: 11321 - DNA, 20 bp, synthetic construct
  misc_feature 1..20: note = chemically synthesized
  source 1..20: mol_type = other DNA
catcgcaccgcccgcccgcc

SEQ ID NO: 11322 - DNA, 20 bp, synthetic construct
  misc_feature 1..20: note = chemically synthesized
  source 1..20: mol_type = other DNA
gcaccgcccgcccgcccagc

SEQ ID NO: 11323 - DNA, 20 bp, synthetic construct
  misc_feature 1..20: note = chemically synthesized
  source 1..20: mol_type = other DNA
cgcccgcccgcccagcgagc

SEQ ID NO: 11324 - DNA, 20 bp, synthetic construct
  misc_feature 1..20: note = chemically synthesized
  source 1..20: mol_type = other DNA
cgcccgcccagcgagcgagc

SEQ ID NO: 11325 - DNA, 20 bp, synthetic construct
  misc_feature 1..20: note = chemically synthesized
  source 1..20: mol_type = other DNA
ccagcgagcgagcgagcgcc

SEQ ID NO: 11326 - DNA, 20 bp, synthetic construct
  misc_feature 1..20: note = chemically synthesized
  source 1..20: mol_type = other DNA
tggtggcggcggttggggct

SEQ ID NO: 11327 - DNA, 20 bp, synthetic construct
  misc_feature 1..20: note = chemically synthesized
  source 1..20: mol_type = other DNA
ctcggcgctcgctcgctcgc

SEQ ID NO: 11328 - DNA, 20 bp, synthetic construct
  misc_feature 1..20: note = chemically synthesized
  source 1..20: mol_type = other DNA
tcggcgctcgctcgctcgct

SEQ ID NO: 11329 - DNA, 20 bp, synthetic construct
  misc_feature 1..20: note = chemically synthesized
  source 1..20: mol_type = other DNA
gcgctcgctcgctcgctggg

SEQ ID NO: 11330 - DNA, 20 bp, synthetic construct
  misc_feature 1..20: note = chemically synthesized
  source 1..20: mol_type = other DNA
cgctcgctcgctcgctgggc

SEQ ID NO: 11331 - DNA, 20 bp, synthetic construct
  misc_feature 1..20: note = chemically synthesized
  source 1..20: mol_type = other DNA
tcgctcgctcgctgggcggg

SEQ ID NO: 11332 - DNA, 20 bp, synthetic construct
  misc_feature 1..20: note = chemically synthesized
  source 1..20: mol_type = other DNA
cgctcgctcgctgggcgggc

SEQ ID NO: 11333 - DNA, 20 bp, synthetic construct
  misc_feature 1..20: note = chemically synthesized
  source 1..20: mol_type = other DNA
tcgctcgctgggcgggcggg

SEQ ID NO: 11334 - DNA, 20 bp, synthetic construct
  misc_feature 1..20: note = chemically synthesized
  source 1..20: mol_type = other DNA
cgggcgggcggtgcgatgtc

SEQ ID NO: 11335 - DNA, 20 bp, synthetic construct
  misc_feature 1..20: note = chemically synthesized
  source 1..20: mol_type = other DNA
ggcgggcggtgcgatgtccg

SEQ ID NO: 11336 - DNA, 20 bp, synthetic construct
  misc_feature 1..20: note = chemically synthesized
  source 1..20: mol_type = other DNA
cgggcggtgcgatgtccgga

SEQ ID NO: 11337 - DNA, 20 bp, synthetic construct
  misc_feature 1..20: note = chemically synthesized
  source 1..20: mol_type = other DNA
gggcggtgcgatgtccggag

SEQ ID NO: 11338 - DNA, 20 bp, synthetic construct
  misc_feature 1..20: note = chemically synthesized
  source 1..20: mol_type = other DNA
ggtgcgatgtccggagagga

SEQ ID NO: 11339 - DNA, 20 bp, synthetic construct
  misc_feature 1..20: note = chemically synthesized
  source 1..20: mol_type = other DNA
gatgtccggagaggatggcc

SEQ ID NO: 11340 - DNA, 20 bp, synthetic construct
  misc_feature 1..20: note = chemically synthesized
  source 1..20: mol_type = other DNA
gtccggagaggatggcccgg

SEQ ID NO: 11341 - DNA, 20 bp, synthetic construct
  misc_feature 1..20: note = chemically synthesized
  source 1..20: mol_type = other DNA
ggagaggatggcccggcggc

SEQ ID NO: 11342 - DNA, 20 bp, synthetic construct
  misc_feature 1..20: note = chemically synthesized
  source 1..20: mol_type = other DNA
ggatggcccggcggctggcc

SEQ ID NO: 11343 - DNA, 20 bp, synthetic construct
  misc_feature 1..20: note = chemically synthesized
  source 1..20: mol_type = other DNA
gatggcccggcggctggccc

SEQ ID NO: 11344 - DNA, 20 bp, synthetic construct
  misc_feature 1..20: note = chemically synthesized
  source 1..20: mol_type = other DNA
atggcccggcggctggcccg

SEQ ID NO: 11345 - DNA, 20 bp, synthetic construct
  misc_feature 1..20: note = chemically synthesized
  source 1..20: mol_type = other DNA
tggcccggcggctggcccgg

SEQ ID NO: 11346 - DNA, 20 bp, synthetic construct
  misc_feature 1..20: note = chemically synthesized
  source 1..20: mol_type = other DNA
cccggcggctggcccggggg

SEQ ID NO: 11347 - DNA, 20 bp, synthetic construct
  misc_feature 1..20: note = chemically synthesized
  source 1..20: mol_type = other DNA
ggcggctggcccgggggcgg

SEQ ID NO: 11348 - DNA, 20 bp, synthetic construct
  misc_feature 1..20: note = chemically synthesized
  source 1..20: mol_type = other DNA
ggctggcccgggggcggcgg

SEQ ID NO: 11349 - DNA, 20 bp, synthetic construct
  misc_feature 1..20: note = chemically synthesized
  source 1..20: mol_type = other DNA
tggcccgggggcggcggcgg

SEQ ID NO: 11350 - DNA, 20 bp, synthetic construct
  misc_feature 1..20: note = chemically synthesized
  source 1..20: mol_type = other DNA
gggcggcggcggcggctgcc

SEQ ID NO: 11351 - DNA, 20 bp, synthetic construct
  misc_feature 1..20: note = chemically synthesized
  source 1..20: mol_type = other DNA
ggcggcggcggcggctgccc

SEQ ID NO: 11352 - DNA, 20 bp, synthetic construct
  misc_feature 1..20: note = chemically synthesized
  source 1..20: mol_type = other DNA
cggcggcggcggctgcccgg

SEQ ID NO: 11353 - DNA, 20 bp, synthetic construct
  misc_feature 1..20: note = chemically synthesized
  source 1..20: mol_type = other DNA
cggcggcggctgcccgggag

SEQ ID NO: 11354 - DNA, 20 bp, synthetic construct
  misc_feature 1..20: note = chemically synthesized
  source 1..20: mol_type = other DNA
cggctgcccgggagcggcga

SEQ ID NO: 11355 - DNA, 20 bp, synthetic construct
  misc_feature 1..20: note = chemically synthesized
  source 1..20: mol_type = other DNA
ggctgcccgggagcggcgac

SEQ ID NO: 11356 - DNA, 20 bp, synthetic construct
  misc_feature 1..20: note = chemically synthesized
  source 1..20: mol_type = other DNA
ctgcccgggagcggcgacgg

SEQ ID NO: 11357 - DNA, 20 bp, synthetic construct
  misc_feature 1..20: note = chemically synthesized
  source 1..20: mol_type = other DNA
cccgggagcggcgacgggag

SEQ ID NO: 11358 - DNA, 20 bp, synthetic construct
  misc_feature 1..20: note = chemically synthesized
  source 1..20: mol_type = other DNA
agcggcgacgggagcagctg

SEQ ID NO: 11359 - DNA, 20 bp, synthetic construct
  misc_feature 1..20: note = chemically synthesized
  source 1..20: mol_type = other DNA
ggcgacgggagcagctgcgg

SEQ ID NO: 11360 - DNA, 20 bp, synthetic construct
  misc_feature 1..20: note = chemically synthesized
  source 1..20: mol_type = other DNA
gacgggagcagctgcggcag

SEQ ID NO: 11361 - DNA, 20 bp, synthetic construct
  misc_feature 1..20: note = chemically synthesized
  source 1..20: mol_type = other DNA
acgggagcagctgcggcagt

SEQ ID NO: 11362 - DNA, 20 bp, synthetic construct
  misc_feature 1..20: note = chemically synthesized
  source 1..20: mol_type = other DNA
cgggagcagctgcggcagtg

SEQ ID NO: 11363 - DNA, 20 bp, synthetic construct
  misc_feature 1..20: note = chemically synthesized
  source 1..20: mol_type = other DNA
gggagcagctgcggcagtgg

SEQ ID NO: 11364 - DNA, 20 bp, synthetic construct
  misc_feature 1..20: note = chemically synthesized
  source 1..20: mol_type = other DNA
ggagcagctgcggcagtggg

SEQ ID NO: 11365 - DNA, 20 bp, synthetic construct
  misc_feature 1..20: note = chemically synthesized
  source 1..20: mol_type = other DNA
agctgcggcagtggggggcg

SEQ ID NO: 11366 - DNA, 20 bp, synthetic construct
  misc_feature 1..20: note = chemically synthesized
  source 1..20: mol_type = other DNA
gctgcggcagtggggggcgc

SEQ ID NO: 11367 - DNA, 20 bp, synthetic construct
  misc_feature 1..20: note = chemically synthesized
  source 1..20: mol_type = other DNA
gcggcagtggggggcgcggg

SEQ ID NO: 11368 - DNA, 20 bp, synthetic construct
  misc_feature 1..20: note = chemically synthesized
  source 1..20: mol_type = other DNA
cggcagtggggggcgcgggc

SEQ ID NO: 11369 - DNA, 20 bp, synthetic construct
  misc_feature 1..20: note = chemically synthesized
  source 1..20: mol_type = other DNA
ggggggcgcgggcgggcgcc

SEQ ID NO: 11370 - DNA, 20 bp, synthetic construct
  misc_feature 1..20: note = chemically synthesized
  source 1..20: mol_type = other DNA
gcgcgggcgggcgccgagcc

SEQ ID NO: 11371 - DNA, 20 bp, synthetic construct
  misc_feature 1..20: note = chemically synthesized
  source 1..20: mol_type = other DNA
gcgggcgccgagcctggccc

SEQ ID NO: 11372 - DNA, 20 bp, synthetic construct
  misc_feature 1..20: note = chemically synthesized
  source 1..20: mol_type = other DNA
gggcgccgagcctggccccg

SEQ ID NO: 11373 - DNA, 20 bp, synthetic construct
  misc_feature 1..20: note = chemically synthesized
  source 1..20: mol_type = other DNA
gcgccgagcctggccccgga

SEQ ID NO: 11374 - DNA, 20 bp, synthetic construct
  misc_feature 1..20: note = chemically synthesized
  source 1..20: mol_type = other DNA
gcgcccgcaccgtccgcttc

SEQ ID NO: 11375 - DNA, 20 bp, synthetic construct
  misc_feature 1..20: note = chemically synthesized
  source 1..20: mol_type = other DNA
tccgcttcgagcgcgccgcc

SEQ ID NO: 11376 - DNA, 20 bp, synthetic construct
  misc_feature 1..20: note = chemically synthesized
  source 1..20: mol_type = other DNA
cgagcgcgccgccgagttcc

SEQ ID NO: 11377 - DNA, 20 bp, synthetic construct
  misc_feature 1..20: note = chemically synthesized
  source 1..20: mol_type = other DNA
gcgcgccgccgagttcctgg

SEQ ID NO: 11378 - DNA, 20 bp, synthetic construct
  misc_feature 1..20: note = chemically synthesized
  source 1..20: mol_type = other DNA
cgagttcctggcggcctgtg

SEQ ID NO: 11379 - DNA, 20 bp, synthetic construct
  misc_feature 1..20: note = chemically synthesized
  source 1..20: mol_type = other DNA
gagttcctggcggcctgtgc

SEQ ID NO: 11380 - DNA, 20 bp, synthetic construct
  misc_feature 1..20: note = chemically synthesized
  source 1..20: mol_type = other DNA
ttcctggcggcctgtgcggg

SEQ ID NO: 11381 - DNA, 20 bp, synthetic construct
  misc_feature 1..20: note = chemically synthesized
  source 1..20: mol_type = other DNA
ggcctgtgcgggcggcgacc

SEQ ID NO: 11382 - DNA, 20 bp, synthetic construct
  misc_feature 1..20: note = chemically synthesized
  source 1..20: mol_type = other DNA
gtgcgggcggcgacctggac

SEQ ID NO: 11383 - DNA, 20 bp, synthetic construct
  misc_feature 1..20: note = chemically synthesized
  source 1..20: mol_type = other DNA
tgcgggcggcgacctggacg

SEQ ID NO: 11384 - DNA, 20 bp, synthetic construct
  misc_feature 1..20: note = chemically synthesized
  source 1..20: mol_type = other DNA
atgctgcgcgccgccgaccc

SEQ ID NO: 11385 - DNA, 20 bp, synthetic construct
  misc_feature 1..20: note = chemically synthesized
  source 1..20: mol_type = other DNA
cgcgccgccgaccctggccc

SEQ ID NO: 11386 - DNA, 20 bp, synthetic construct
  misc_feature 1..20: note = chemically synthesized
  source 1..20: mol_type = other DNA
ccgaccctggccccggcgcc

SEQ ID NO: 11387 - DNA, 20 bp, synthetic construct
  misc_feature 1..20: note = chemically synthesized
  source 1..20: mol_type = other DNA
gccgcccgcccgcgccgtgc

SEQ ID NO: 11388 - DNA, 20 bp, synthetic construct
  misc_feature 1..20: note = chemically synthesized
  source 1..20: mol_type = other DNA
ctggactccaccaacgccga

SEQ ID NO: 11389 - DNA, 20 bp, synthetic construct
  misc_feature 1..20: note = chemically synthesized
  source 1..20: mol_type = other DNA
tccaccaacgccgacggtat

SEQ ID NO: 11390 - DNA, 20 bp, synthetic construct
  misc_feature 1..20: note = chemically synthesized
  source 1..20: mol_type = other DNA
acggtatcagcgccctgcac

SEQ ID NO: 11391 - DNA, 20 bp, synthetic construct
  misc_feature 1..20: note = chemically synthesized
  source 1..20: mol_type = other DNA
cggtatcagcgccctgcacc

SEQ ID NO: 11392 - DNA, 20 bp, synthetic construct
  misc_feature 1..20: note = chemically synthesized
  source 1..20: mol_type = other DNA
atcagcgccctgcaccaggt

SEQ ID NO: 11393 - DNA, 20 bp, synthetic construct
  misc_feature 1..20: note = chemically synthesized
  source 1..20: mol_type = other DNA
ccaggtcagcgccccccgcc

SEQ ID NO: 11394 - DNA, 20 bp, synthetic construct
  misc_feature 1..20: note = chemically synthesized
  source 1..20: mol_type = other DNA
gccccccgcccggcgtctcc

SEQ ID NO: 11395 - DNA, 20 bp, synthetic construct
  misc_feature 1..20: note = chemically synthesized
  source 1..20: mol_type = other DNA
ccccccgcccggcgtctccc

SEQ ID NO: 11396 - DNA, 20 bp, synthetic construct
  misc_feature 1..20: note = chemically synthesized
  source 1..20: mol_type = other DNA
cccccgcccggcgtctcccg

SEQ ID NO: 11397 - DNA, 20 bp, synthetic construct
  misc_feature 1..20: note = chemically synthesized
  source 1..20: mol_type = other DNA
cgcccggcgtctcccggggc

SEQ ID NO: 11398 - DNA, 20 bp, synthetic construct
  misc_feature 1..20: note = chemically synthesized
  source 1..20: mol_type = other DNA
gcccggcgtctcccggggcc

SEQ ID NO: 11399 - DNA, 20 bp, synthetic construct
  misc_feature 1..20: note = chemically synthesized
  source 1..20: mol_type = other DNA
ccaccctctgctgcgccacc

SEQ ID NO: 11400 - DNA, 20 bp, synthetic construct
  misc_feature 1..20: note = chemically synthesized
  source 1..20: mol_type = other DNA
caccctctgctgcgccacct

SEQ ID NO: 11401 - DNA, 20 bp, synthetic construct
  misc_feature 1..20: note = chemically synthesized
  source 1..20: mol_type = other DNA
accctctgctgcgccacctg

SEQ ID NO: 11402 - DNA, 20 bp, synthetic construct
  misc_feature 1..20: note = chemically synthesized
  source 1..20: mol_type = other DNA
gcatcctccttccccgttgc

SEQ ID NO: 11403 - DNA, 20 bp, synthetic construct
  misc_feature 1..20: note = chemically synthesized
  source 1..20: mol_type = other DNA
tcgatccgccccgtcgttcc

SEQ ID NO: 11404 - DNA, 20 bp, synthetic construct
  misc_feature 1..20: note = chemically synthesized
  source 1..20: mol_type = other DNA
cgccccgtcgttcctggccc

SEQ ID NO: 11405 - DNA, 20 bp, synthetic construct
  misc_feature 1..20: note = chemically synthesized
  source 1..20: mol_type = other DNA
gccccgtcgttcctggccct

SEQ ID NO: 11406 - DNA, 20 bp, synthetic construct
  misc_feature 1..20: note = chemically synthesized
  source 1..20: mol_type = other DNA
cctatgctgacaccccgtcc

SEQ ID NO: 11407 - DNA, 20 bp, synthetic construct
  misc_feature 1..20: note = chemically synthesized
  source 1..20: mol_type = other DNA
cgaccaccccacttccgaat

SEQ ID NO: 11408 - DNA, 20 bp, synthetic construct
  misc_feature 1..20: note = chemically synthesized
  source 1..20: mol_type = other DNA
accaccccacttccgaattg

SEQ ID NO: 11409 - DNA, 20 bp, synthetic construct
  misc_feature 1..20: note = chemically synthesized
  source 1..20: mol_type = other DNA
cgaattggagccgcttcaac

SEQ ID NO: 11410 - DNA, 20 bp, synthetic construct
  misc_feature 1..20: note = chemically synthesized
  source 1..20: mol_type = other DNA
ggagccgcttcaactggccc

SEQ ID NO: 11411 - DNA, 20 bp, synthetic construct
  misc_feature 1..20: note = chemically synthesized
  source 1..20: mol_type = other DNA
gagccgcttcaactggccct

SEQ ID NO: 11412 - DNA, 20 bp, synthetic construct
  misc_feature 1..20: note = chemically synthesized
  source 1..20: mol_type = other DNA
gcttcaactggccctgggct

SEQ ID NO: 11413 - DNA, 20 bp, synthetic construct
  misc_feature 1..20: note = chemically synthesized
  source 1..20: mol_type = other DNA
ctgtgctgaccactctgccc

SEQ ID NO: 11414 - DNA, 20 bp, synthetic construct
  misc_feature 1..20: note = chemically synthesized
  source 1..20: mol_type = other DNA
tgtgctgaccactctgcccc

SEQ ID NO: 11415 - DNA, 20 bp, synthetic construct
  misc_feature 1..20: note = chemically synthesized
  source 1..20: mol_type = other DNA
cgacctactctcttccgcat

SEQ ID NO: 11416 - DNA, 20 bp, synthetic construct
  misc_feature 1..20: note = chemically synthesized
  source 1..20: mol_type = other DNA
acctactctcttccgcattg

SEQ ID NO: 11417 - DNA, 20 bp, synthetic construct
  misc_feature 1..20: note = chemically synthesized
  source 1..20: mol_type = other DNA
cgcattggagtcgctttaac

SEQ ID NO: 11418 - DNA, 20 bp, synthetic construct
  misc_feature 1..20: note = chemically synthesized
  source 1..20: mol_type = other DNA
ggagtcgctttaactggccc

SEQ ID NO: 11419 - DNA, 20 bp, synthetic construct
  misc_feature 1..20: note = chemically synthesized
  source 1..20: mol_type = other DNA
gctttaactggccctggctt

SEQ ID NO: 11420 - DNA, 20 bp, synthetic construct
  misc_feature 1..20: note = chemically synthesized
  source 1..20: mol_type = other DNA
ttaactggccctggctttgg

SEQ ID NO: 11421 - DNA, 20 bp, synthetic construct
  misc_feature 1..20: note = chemically synthesized
  source 1..20: mol_type = other DNA
gcagcctgtgctgacccatg

SEQ ID NO: 11422 - DNA, 20 bp, synthetic construct
  misc_feature 1..20: note = chemically synthesized
  source 1..20: mol_type = other DNA
acttcccctcttccgatgtt

SEQ ID NO: 11423 - DNA, 20 bp, synthetic construct
  misc_feature 1..20: note = chemically synthesized
  source 1..20: mol_type = other DNA
cttccgatgttgagcccctc

SEQ ID NO: 11424 - DNA, 20 bp, synthetic construct
  misc_feature 1..20: note = chemically synthesized
  source 1..20: mol_type = other DNA
cgatgttgagcccctccagc

SEQ ID NO: 11425 - DNA, 20 bp, synthetic construct
  misc_feature 1..20: note = chemically synthesized
  source 1..20: mol_type = other DNA
tgagcccctccagccggtcc

SEQ ID NO: 11426 - DNA, 20 bp, synthetic construct
  misc_feature 1..20: note = chemically synthesized
  source 1..20: mol_type = other DNA
ccctgccctctcctgaacct

SEQ ID NO: 11427 - DNA, 20 bp, synthetic construct
  misc_feature 1..20: note = chemically synthesized
  source 1..20: mol_type = other DNA
gccctctcctgaacctgagc

SEQ ID NO: 11428 - DNA, 20 bp, synthetic construct
  misc_feature 1..20: note = chemically synthesized
  source 1..20: mol_type = other DNA
tgaacctgagccagctccca

SEQ ID NO: 11429 - DNA, 20 bp, synthetic construct
  misc_feature 1..20: note = chemically synthesized
  source 1..20: mol_type = other DNA
ctgagccagctcccatagct

SEQ ID NO: 11430 - DNA, 20 bp, synthetic construct
  misc_feature 1..20: note = chemically synthesized
  source 1..20: mol_type = other DNA
ccagctcccatagctcagtc

SEQ ID NO: 11431 - DNA, 20 bp, synthetic construct
  misc_feature 1..20: note = chemically synthesized
  source 1..20: mol_type = other DNA
ctcagtctggtctatctgcc

SEQ ID NO: 11432 - DNA, 20 bp, synthetic construct
  misc_feature 1..20: note = chemically synthesized
  source 1..20: mol_type = other DNA
ctggtctatctgcctggccc

SEQ ID NO: 11433 - DNA, 20 bp, synthetic construct
  misc_feature 1..20: note = chemically synthesized
  source 1..20: mol_type = other DNA
gctgccctcctctcgccccc

SEQ ID NO: 11434 - DNA, 20 bp, synthetic construct
  misc_feature 1..20: note = chemically synthesized
  source 1..20: mol_type = other DNA
gagtgcccttgctgtgccgc

SEQ ID NO: 11435 - DNA, 20 bp, synthetic construct
  misc_feature 1..20: note = chemically synthesized
  source 1..20: mol_type = other DNA
aacgctgccgtctctctcct

SEQ ID NO: 11436 - DNA, 20 bp, synthetic construct
  misc_feature 1..20: note = chemically synthesized
  source 1..20: mol_type = other DNA
tgccgtctctctcctgagtc

SEQ ID NO: 11437 - DNA, 20 bp, synthetic construct
  misc_feature 1..20: note = chemically synthesized
  source 1..20: mol_type = other DNA
tcctgagtccggaccacttt

SEQ ID NO: 11438 - DNA, 20 bp, synthetic construct
  misc_feature 1..20: note = chemically synthesized
  source 1..20: mol_type = other DNA
cggaccactttgagctctac

SEQ ID NO: 11439 - DNA, 20 bp, synthetic construct
  misc_feature 1..20: note = chemically synthesized
  source 1..20: mol_type = other DNA
actggcttctgcgccgcctc

SEQ ID NO: 11440 - DNA, 20 bp, synthetic construct
  misc_feature 1..20: note = chemically synthesized
  source 1..20: mol_type = other DNA
ggcccactgtttccccttcc

SEQ ID NO: 11441 - DNA, 20 bp, synthetic construct
  misc_feature 1..20: note = chemically synthesized
  source 1..20: mol_type = other DNA
gcccactgtttccccttccc

SEQ ID NO: 11442 - DNA, 20 bp, synthetic construct
  misc_feature 1..20: note = chemically synthesized
  source 1..20: mol_type = other DNA
cactgtttccccttcccagg

SEQ ID NO: 11443 - DNA, 20 bp, synthetic construct
  misc_feature 1..20: note = chemically synthesized
  source 1..20: mol_type = other DNA
actgtttccccttcccaggc

SEQ ID NO: 11444 - DNA, 20 bp, synthetic construct
  misc_feature 1..20: note = chemically synthesized
  source 1..20: mol_type = other DNA
ctgacctgcattctctcccc

SEQ ID NO: 11445 - DNA, 20 bp, synthetic construct
  misc_feature 1..20: note = chemically synthesized
  source 1..20: mol_type = other DNA
tgacctgcattctctcccct

SEQ ID NO: 11446 - DNA, 20 bp, synthetic construct
  misc_feature 1..20: note = chemically synthesized
  source 1..20: mol_type = other DNA
cctgtgccgctttctgtctg

SEQ ID NO: 11447 - DNA, 20 bp, synthetic construct
  misc_feature 1..20: note = chemically synthesized
  source 1..20: mol_type = other DNA
cgctttctgtctgcagcttg

SEQ ID NO: 11448 - DNA, 20 bp, synthetic construct
  misc_feature 1..20: note = chemically synthesized
  source 1..20: mol_type = other DNA
tctgtctgcagcttgtggcc

SEQ ID NO: 11449 - DNA, 20 bp, synthetic construct
  misc_feature 1..20: note = chemically synthesized
  source 1..20: mol_type = other DNA
ctgtctgcagcttgtggcct

SEQ ID NO: 11450 - DNA, 20 bp, synthetic construct
  misc_feature 1..20: note = chemically synthesized
  source 1..20: mol_type = other DNA
tgtggcctgggtcacctcta

SEQ ID NO: 11451 - DNA, 20 bp, synthetic construct
  misc_feature 1..20: note = chemically synthesized
  source 1..20: mol_type = other DNA
gcctgggtcacctctacggc

SEQ ID NO: 11452 - DNA, 20 bp, synthetic construct
  misc_feature 1..20: note = chemically synthesized
  source 1..20: mol_type = other DNA
ggtcacctctacggctggcc

SEQ ID NO: 11453 - DNA, 20 bp, synthetic construct
  misc_feature 1..20: note = chemically synthesized
  source 1..20: mol_type = other DNA
tccttccctgccgcctcctt

SEQ ID NO: 11454 - DNA, 20 bp, synthetic construct
  misc_feature 1..20: note = chemically synthesized
  source 1..20: mol_type = other DNA
ccttccctgccgcctccttc

SEQ ID NO: 11455 - DNA, 20 bp, synthetic construct
  misc_feature 1..20: note = chemically synthesized
  source 1..20: mol_type = other DNA
tctctgctgtgttgctgccc

SEQ ID NO: 11456 - DNA, 20 bp, synthetic construct
  misc_feature 1..20: note = chemically synthesized
  source 1..20: mol_type = other DNA
ctctgctgtgttgctgccca

SEQ ID NO: 11457 - DNA, 20 bp, synthetic construct
  misc_feature 1..20: note = chemically synthesized
  source 1..20: mol_type = other DNA
ctgcccaaggatgctctttc

SEQ ID NO: 11458 - DNA, 20 bp, synthetic construct
  misc_feature 1..20: note = chemically synthesized
  source 1..20: mol_type = other DNA
gcccaaggatgctctttccg

SEQ ID NO: 11459 - DNA, 20 bp, synthetic construct
  misc_feature 1..20: note = chemically synthesized
  source 1..20: mol_type = other DNA
tttccggagcacttccttct

SEQ ID NO: 11460 - DNA, 20 bp, synthetic construct
  misc_feature 1..20: note = chemically synthesized
  source 1..20: mol_type = other DNA
tgcaccacgtgatgtcctct

SEQ ID NO: 11461 - DNA, 20 bp, synthetic construct
  misc_feature 1..20: note = chemically synthesized
  source 1..20: mol_type = other DNA
accacgtgatgtcctctgag

SEQ ID NO: 11462 - DNA, 20 bp, synthetic construct
  misc_feature 1..20: note = chemically synthesized
  source 1..20: mol_type = other DNA
gagcggatcctccccgtgtc

SEQ ID NO: 11463 - DNA, 20 bp, synthetic construct
  misc_feature 1..20: note = chemically synthesized
  source 1..20: mol_type = other DNA
agcggatcctccccgtgtct

SEQ ID NO: 11464 - DNA, 20 bp, synthetic construct
  misc_feature 1..20: note = chemically synthesized
  source 1..20: mol_type = other DNA
ccccgtgtctgggtcctctc

SEQ ID NO: 11465 - DNA, 20 bp, synthetic construct
  misc_feature 1..20: note = chemically synthesized
  source 1..20: mol_type = other DNA
cccgtgtctgggtcctctcc

SEQ ID NO: 11466 - DNA, 20 bp, synthetic construct
  misc_feature 1..20: note = chemically synthesized
  source 1..20: mol_type = other DNA
cccatgccgtcttcactcgc

SEQ ID NO: 11467 - DNA, 20 bp, synthetic construct
  misc_feature 1..20: note = chemically synthesized
  source 1..20: mol_type = other DNA
ccatgccgtcttcactcgct

SEQ ID NO: 11468 - DNA, 20 bp, synthetic construct
  misc_feature 1..20: note = chemically synthesized
  source 1..20: mol_type = other DNA
ttcccttttccttctccttc

SEQ ID NO: 11469 - DNA, 20 bp, synthetic construct
  misc_feature 1..20: note = chemically synthesized
  source 1..20: mol_type = other DNA
tcccttttccttctccttct

SEQ ID NO: 11470 - DNA, 20 bp, synthetic construct
  misc_feature 1..20: note = chemically synthesized
  source 1..20: mol_type = other DNA
cccttttccttctccttctg

SEQ ID NO: 11471 - DNA, 20 bp, synthetic construct
  misc_feature 1..20: note = chemically synthesized
  source 1..20: mol_type = other DNA
ctgtgccatctctcgtttct

SEQ ID NO: 11472 - DNA, 20 bp, synthetic construct
  misc_feature 1..20: note = chemically synthesized
  source 1..20: mol_type = other DNA
tgtgccatctctcgtttctt

SEQ ID NO: 11473 - DNA, 20 bp, synthetic construct
  misc_feature 1..20: note = chemically synthesized
  source 1..20: mol_type = other DNA
ccatctctcgtttcttagga

SEQ ID NO: 11474 - DNA, 20 bp, synthetic construct
  misc_feature 1..20: note = chemically synthesized
  source 1..20: mol_type = other DNA
cttaggatggccttctccga

SEQ ID NO: 11475 - DNA, 20 bp, synthetic construct
  misc_feature 1..20: note = chemically synthesized
  source 1..20: mol_type = other DNA
cgtcccgcctccccttcttg

SEQ ID NO: 11476 - DNA, 20 bp, synthetic construct
  misc_feature 1..20: note = chemically synthesized
  source 1..20: mol_type = other DNA
gtcccgcctccccttcttgt

SEQ ID NO: 11477 - DNA, 20 bp, synthetic construct
  misc_feature 1..20: note = chemically synthesized
  source 1..20: mol_type = other DNA
ctgcatcatcaccgtttttc

SEQ ID NO: 11478 - DNA, 20 bp, synthetic construct
  misc_feature 1..20: note = chemically synthesized
  source 1..20: mol_type = other DNA
cgtttttctggacaacccca

SEQ ID NO: 11479 - DNA, 20 bp, synthetic construct
  misc_feature 1..20: note = chemically synthesized
  source 1..20: mol_type = other DNA
cccaaagtaccccgtctccc

SEQ ID NO: 11480 - DNA, 20 bp, synthetic construct
  misc_feature 1..20: note = chemically synthesized
  source 1..20: mol_type = other DNA
gtaccccgtctccctggctt

SEQ ID NO: 11481 - DNA, 20 bp, synthetic construct
  misc_feature 1..20: note = chemically synthesized
  source 1..20: mol_type = other DNA
atcctcttgctttctttgcc

SEQ ID NO: 11482 - DNA, 20 bp, synthetic construct
  misc_feature 1..20: note = chemically synthesized
  source 1..20: mol_type = other DNA
ctggacaccccgttctcctg

SEQ ID NO: 11483 - DNA, 20 bp, synthetic construct
  misc_feature 1..20: note = chemically synthesized
  source 1..20: mol_type = other DNA
accccgttctcctgtggatt

SEQ ID NO: 11484 - DNA, 20 bp, synthetic construct
  misc_feature 1..20: note = chemically synthesized
  source 1..20: mol_type = other DNA
ccccgttctcctgtggattc

SEQ ID NO: 11485 - DNA, 20 bp, synthetic construct
  misc_feature 1..20: note = chemically synthesized
  source 1..20: mol_type = other DNA
cacctctcactcctttcatt

SEQ ID NO: 11486 - DNA, 20 bp, synthetic construct
  misc_feature 1..20: note = chemically synthesized
  source 1..20: mol_type = other DNA
acctctcactcctttcattt

SEQ ID NO: 11487 - DNA, 20 bp, synthetic construct
  misc_feature 1..20: note = chemically synthesized
  source 1..20: mol_type = other DNA
tctcactcctttcatttggg

SEQ ID NO: 11488 - DNA, 20 bp, synthetic construct
  misc_feature 1..20: note = chemically synthesized
  source 1..20: mol_type = other DNA
ccctaccccccttacctctc

SEQ ID NO: 11489 - DNA, 20 bp, synthetic construct
  misc_feature 1..20: note = chemically synthesized
  source 1..20: mol_type = other DNA
cttacctctctagtctgtgc

SEQ ID NO: 11490 - DNA, 20 bp, synthetic construct
  misc_feature 1..20: note = chemically synthesized
  source 1..20: mol_type = other DNA
ctagtctgtgctagctcttc

SEQ ID NO: 11491 - DNA, 20 bp, synthetic construct
  misc_feature 1..20: note = chemically synthesized
  source 1..20: mol_type = other DNA
gctcttccagccccctgtca

SEQ ID NO: 11492 - DNA, 20 bp, synthetic construct
  misc_feature 1..20: note = chemically synthesized
  source 1..20: mol_type = other DNA
ccccctgtcatggcatcttc

SEQ ID NO: 11493 - DNA, 20 bp, synthetic construct
  misc_feature 1..20: note = chemically synthesized
  source 1..20: mol_type = other DNA
cccctgtcatggcatcttcc

SEQ ID NO: 11494 - DNA, 20 bp, synthetic construct
  misc_feature 1..20: note = chemically synthesized
  source 1..20: mol_type = other DNA
ccctgtcatggcatcttcca

SEQ ID NO: 11495 - DNA, 20 bp, synthetic construct
  misc_feature 1..20: note = chemically synthesized
  source 1..20: mol_type = other DNA
cctgtcatggcatcttccag

SEQ ID NO: 11496 - DNA, 20 bp, synthetic construct
  misc_feature 1..20: note = chemically synthesized
  source 1..20: mol_type = other DNA
atggcatcttccaggggtcc

SEQ ID NO: 11497 - DNA, 20 bp, synthetic construct
  misc_feature 1..20: note = chemically synthesized
  source 1..20: mol_type = other DNA
ggcatcttccaggggtccga

SEQ ID NO: 11498 - DNA, 20 bp, synthetic construct
  misc_feature 1..20: note = chemically synthesized
  source 1..20: mol_type = other DNA
cttccaggggtccgagagct

SEQ ID NO: 11499 - DNA, 20 bp, synthetic construct
  misc_feature 1..20: note = chemically synthesized
  source 1..20: mol_type = other DNA
caggggtccgagagctcagc

SEQ ID NO: 11500 - DNA, 20 bp, synthetic construct
  misc_feature 1..20: note = chemically synthesized
  source 1..20: mol_type = other DNA
ctagtcttcttcctccaacc

SEQ ID NO: 11501 - DNA, 20 bp, synthetic construct
  misc_feature 1..20: note = chemically synthesized
  source 1..20: mol_type = other DNA
tagtcttcttcctccaaccc

SEQ ID NO: 11502 - DNA, 20 bp, synthetic construct
  misc_feature 1..20: note = chemically synthesized
  source 1..20: mol_type = other DNA
ccgggcccctatgtccactt

SEQ ID NO: 11503 - DNA, 20 bp, synthetic construct
  misc_feature 1..20: note = chemically synthesized
  source 1..20: mol_type = other DNA
cgggcccctatgtccacttc

SEQ ID NO: 11504 - DNA, 20 bp, synthetic construct
  misc_feature 1..20: note = chemically synthesized
  source 1..20: mol_type = other DNA
cccctatgtccacttcagga

SEQ ID NO: 11505 - DNA, 20 bp, synthetic construct
  misc_feature 1..20: note = chemically synthesized
  source 1..20: mol_type = other DNA
gacagcatgtttgctgcctc

SEQ ID NO: 11506 - DNA, 20 bp, synthetic construct
  misc_feature 1..20: note = chemically synthesized
  source 1..20: mol_type = other DNA
acagcatgtttgctgcctcc

SEQ ID NO: 11507 - DNA, 20 bp, synthetic construct
  misc_feature 1..20: note = chemically synthesized
  source 1..20: mol_type = other DNA
cagcatgtttgctgcctcca

SEQ ID NO: 11508 - DNA, 20 bp, synthetic construct
  misc_feature 1..20: note = chemically synthesized
  source 1..20: mol_type = other DNA
tccagggatcctgtgtcccc

SEQ ID NO: 11509 - DNA, 20 bp, synthetic construct
  misc_feature 1..20: note = chemically synthesized
  source 1..20: mol_type = other DNA
gggatcctgtgtccccgagc

SEQ ID NO: 11510 - DNA, 20 bp, synthetic construct
  misc_feature 1..20: note = chemically synthesized
  source 1..20: mol_type = other DNA
ggatcctgtgtccccgagct

SEQ ID NO: 11511 - DNA, 20 bp, synthetic construct
  misc_feature 1..20: note = chemically synthesized
  source 1..20: mol_type = other DNA
ctgggaccaccttatattcc

SEQ ID NO: 11512 - DNA, 20 bp, synthetic construct
  misc_feature 1..20: note = chemically synthesized
  source 1..20: mol_type = other DNA
tgggaccaccttatattccc

SEQ ID NO: 11513 - DNA, 20 bp, synthetic construct
  misc_feature 1..20: note = chemically synthesized
  source 1..20: mol_type = other DNA
gggaccaccttatattccca

SEQ ID NO: 11514 - DNA, 20 bp, synthetic construct
  misc_feature 1..20: note = chemically synthesized
  source 1..20: mol_type = other DNA
ccaccttatattcccagggc

SEQ ID NO: 11515 - DNA, 20 bp, synthetic construct
  misc_feature 1..20: note = chemically synthesized
  source 1..20: mol_type = other DNA
attcccagggccggttaatg

SEQ ID NO: 11516 - DNA, 20 bp, synthetic construct
  misc_feature 1..20: note = chemically synthesized
  source 1..20: mol_type = other DNA
agggccggttaatgtggctc

SEQ ID NO: 11517 - DNA, 20 bp, synthetic construct
  misc_feature 1..20: note = chemically synthesized
  source 1..20: mol_type = other DNA
ggttaatgtggctctggttc

SEQ ID NO: 11518 - DNA, 20 bp, synthetic construct
  misc_feature 1..20: note = chemically synthesized
  source 1..20: mol_type = other DNA
gttaatgtggctctggttct

SEQ ID NO: 11519 - DNA, 20 bp, synthetic construct
  misc_feature 1..20: note = chemically synthesized
  source 1..20: mol_type = other DNA
tatctgtcccctccacccca

SEQ ID NO: 11520 - DNA, 20 bp, synthetic construct
  misc_feature 1..20: note = chemically synthesized
  source 1..20: mol_type = other DNA
ctgtcccctccaccccacag

SEQ ID NO: 11521 - DNA, 20 bp, synthetic construct
  misc_feature 1..20: note = chemically synthesized
  source 1..20: mol_type = other DNA
tgtcccctccaccccacagt

SEQ ID NO: 11522 - DNA, 20 bp, synthetic construct
  misc_feature 1..20: note = chemically synthesized
  source 1..20: mol_type = other DNA
gtcccctccaccccacagtg

SEQ ID NO: 11523 - DNA, 20 bp, synthetic construct
  misc_feature 1..20: note = chemically synthesized
  source 1..20: mol_type = other DNA
ccaccccacagtggggccac

SEQ ID NO: 11524 - DNA, 20 bp, synthetic construct
  misc_feature 1..20: note = chemically synthesized
  source 1..20: mol_type = other DNA
caccccacagtggggccact

SEQ ID NO: 11525 - DNA, 20 bp, synthetic construct
  misc_feature 1..20: note = chemically synthesized
  source 1..20: mol_type = other DNA
accccacagtggggccacta

SEQ ID NO: 11526 - DNA, 20 bp, synthetic construct
  misc_feature 1..20: note = chemically synthesized
  source 1..20: mol_type = other DNA
cacagtggggccactaggga

SEQ ID NO: 11527 - DNA, 20 bp, synthetic construct
  misc_feature 1..20: note = chemically synthesized
  source 1..20: mol_type = other DNA
acagtggggccactagggac

SEQ ID NO: 11528 - DNA, 20 bp, synthetic construct
  misc_feature 1..20: note = chemically synthesized
  source 1..20: mol_type = other DNA
ggggccactagggacaggat

SEQ ID NO: 11529 - DNA, 20 bp, synthetic construct
  misc_feature 1..20: note = chemically synthesized
  source 1..20: mol_type = other DNA
actagggacaggattggtga

SEQ ID NO: 11530 - DNA, 20 bp, synthetic construct
  misc_feature 1..20: note = chemically synthesized
  source 1..20: mol_type = other DNA
ggacaggattggtgacagaa

SEQ ID NO: 11531 - DNA, 20 bp, synthetic construct
  misc_feature 1..20: note = chemically synthesized
  source 1..20: mol_type = other DNA
tgacagaaaagccccatcct

SEQ ID NO: 11532 - DNA, 20 bp, synthetic construct
  misc_feature 1..20: note = chemically synthesized
  source 1..20: mol_type = other DNA
gacagaaaagccccatcctt

SEQ ID NO: 11533 - DNA, 20 bp, synthetic construct
  misc_feature 1..20: note = chemically synthesized
  source 1..20: mol_type = other DNA
tccttaggcctcctccttcc

SEQ ID NO: 11534 - DNA, 20 bp, synthetic construct
  misc_feature 1..20: note = chemically synthesized
  source 1..20: mol_type = other DNA
ccttcctagtctcctgatat

SEQ ID NO: 11535 - DNA, 20 bp, synthetic construct
  misc_feature 1..20: note = chemically synthesized
  source 1..20: mol_type = other DNA
cttcctagtctcctgatatt

SEQ ID NO: 11536 - DNA, 20 bp, synthetic construct
  misc_feature 1..20: note = chemically synthesized
  source 1..20: mol_type = other DNA
gtctaacccccacctcctgt

SEQ ID NO: 11537 - DNA, 20 bp, synthetic construct
  misc_feature 1..20: note = chemically synthesized
  source 1..20: mol_type = other DNA
tctaacccccacctcctgtt

SEQ ID NO: 11538 - DNA, 20 bp, synthetic construct
  misc_feature 1..20: note = chemically synthesized
  source 1..20: mol_type = other DNA
aacccccacctcctgttagg

SEQ ID NO: 11539 - DNA, 20 bp, synthetic construct
  misc_feature 1..20: note = chemically synthesized
  source 1..20: mol_type = other DNA
tgttaggcagattccttatc

SEQ ID NO: 11540 - DNA, 20 bp, synthetic construct
  misc_feature 1..20: note = chemically synthesized
  source 1..20: mol_type = other DNA
ggtgacacacccccatttcc

SEQ ID NO: 11541 - DNA, 20 bp, synthetic construct
  misc_feature 1..20: note = chemically synthesized
  source 1..20: mol_type = other DNA
tgacacacccccatttcctg

SEQ ID NO: 11542 - DNA, 20 bp, synthetic construct
  misc_feature 1..20: note = chemically synthesized
  source 1..20: mol_type = other DNA
ggagccatctctctccttgc

SEQ ID NO: 11543 - DNA, 20 bp, synthetic construct
  misc_feature 1..20: note = chemically synthesized
  source 1..20: mol_type = other DNA
ctctccttgccagaacctct

SEQ ID NO: 11544 - DNA, 20 bp, synthetic construct
  misc_feature 1..20: note = chemically synthesized
  source 1..20: mol_type = other DNA
tctccttgccagaacctcta

SEQ ID NO: 11545 - DNA, 20 bp, synthetic construct
  misc_feature 1..20: note = chemically synthesized
  source 1..20: mol_type = other DNA
cctctaaggtttgcttacga

SEQ ID NO: 11546 - DNA, 20 bp, synthetic construct
  misc_feature 1..20: note = chemically synthesized
  source 1..20: mol_type = other DNA
tctaaggtttgcttacgatg

SEQ ID NO: 11547 - DNA, 20 bp, synthetic construct
  misc_feature 1..20: note = chemically synthesized
  source 1..20: mol_type = other DNA
aggtttgcttacgatggagc

SEQ ID NO: 11548 - DNA, 20 bp, synthetic construct
  misc_feature 1..20: note = chemically synthesized
  source 1..20: mol_type = other DNA
gtttgcttacgatggagcca

SEQ ID NO: 11549 - DNA, 20 bp, synthetic construct
  misc_feature 1..20: note = chemically synthesized
  source 1..20: mol_type = other DNA
ttgcttacgatggagccaga

SEQ ID NO: 11550 - DNA, 20 bp, synthetic construct
  misc_feature 1..20: note = chemically synthesized
  source 1..20: mol_type = other DNA
tgcttacgatggagccagag

SEQ ID NO: 11551 - DNA, 20 bp, synthetic construct
  misc_feature 1..20: note = chemically synthesized
  source 1..20: mol_type = other DNA
gatggagccagagaggatcc

SEQ ID NO: 11552 - DNA, 20 bp, synthetic construct
  misc_feature 1..20: note = chemically synthesized
  source 1..20: mol_type = other DNA
atggagccagagaggatcct

SEQ ID NO: 11553 - DNA, 20 bp, synthetic construct
  misc_feature 1..20: note = chemically synthesized
  source 1..20: mol_type = other DNA
ggagccagagaggatcctgg

SEQ ID NO: 11554 - DNA, 20 bp, synthetic construct
  misc_feature 1..20: note = chemically synthesized
  source 1..20: mol_type = other DNA
gagccagagaggatcctggg

SEQ ID NO: 11555 - DNA, 20 bp, synthetic construct
  misc_feature 1..20: note = chemically synthesized
  source 1..20: mol_type = other DNA
agccagagaggatcctggga

SEQ ID NO: 11556 - DNA, 20 bp, synthetic construct
  misc_feature 1..20: note = chemically synthesized
  source 1..20: mol_type = other DNA
ccagagaggatcctgggagg

SEQ ID NO: 11557 - DNA, 20 bp, synthetic construct
  misc_feature 1..20: note = chemically synthesized
  source 1..20: mol_type = other DNA
agagaggatcctgggaggga

SEQ ID NO: 11558 - DNA, 20 bp, synthetic construct
  misc_feature 1..20: note = chemically synthesized
  source 1..20: mol_type = other DNA
ggatcctgggagggagagct

SEQ ID NO: 11559 - DNA, 20 bp, synthetic construct
  misc_feature 1..20: note = chemically synthesized
  source 1..20: mol_type = other DNA
tcctgggagggagagcttgg

SEQ ID NO: 11560 - DNA, 20 bp, synthetic construct
  misc_feature 1..20: note = chemically synthesized
  source 1..20: mol_type = other DNA
cctgggagggagagcttggc

SEQ ID NO: 11561 - DNA, 20 bp, synthetic construct
  misc_feature 1..20: note = chemically synthesized
  source 1..20: mol_type = other DNA
ctgggagggagagcttggca

SEQ ID NO: 11562 - DNA, 20 bp, synthetic construct
  misc_feature 1..20: note = chemically synthesized
  source 1..20: mol_type = other DNA
tgggagggagagcttggcag

SEQ ID NO: 11563 - DNA, 20 bp, synthetic construct
  misc_feature 1..20: note = chemically synthesized
  source 1..20: mol_type = other DNA
gggagggagagcttggcagg

SEQ ID NO: 11564 - DNA, 20 bp, synthetic construct
  misc_feature 1..20: note = chemically synthesized
  source 1..20: mol_type = other DNA
agggagagcttggcaggggg

SEQ ID NO: 11565 - DNA, 20 bp, synthetic construct
  misc_feature 1..20: note = chemically synthesized
  source 1..20: mol_type = other DNA
gggagagcttggcagggggt

SEQ ID NO: 11566 - DNA, 20 bp, synthetic construct
  misc_feature 1..20: note = chemically synthesized
  source 1..20: mol_type = other DNA
gagagcttggcagggggtgg

SEQ ID NO: 11567 - DNA, 20 bp, synthetic construct
  misc_feature 1..20: note = chemically synthesized
  source 1..20: mol_type = other DNA
agagcttggcagggggtggg

SEQ ID NO: 11568 - DNA, 20 bp, synthetic construct
  misc_feature 1..20: note = chemically synthesized
  source 1..20: mol_type = other DNA
gagcttggcagggggtggga

SEQ ID NO: 11569 - DNA, 20 bp, synthetic construct
  misc_feature 1..20: note = chemically synthesized
  source 1..20: mol_type = other DNA
cttggcagggggtgggaggg

SEQ ID NO: 11570 - DNA, 20 bp, synthetic construct
  misc_feature 1..20: note = chemically synthesized
  source 1..20: mol_type = other DNA
ttggcagggggtgggaggga

SEQ ID NO: 11571 - DNA, 20 bp, synthetic construct
  misc_feature 1..20: note = chemically synthesized
  source 1..20: mol_type = other DNA
tggcagggggtgggagggaa

SEQ ID NO: 11572 - DNA, 20 bp, synthetic construct
  misc_feature 1..20: note = chemically synthesized
  source 1..20: mol_type = other DNA
ggcagggggtgggagggaag

SEQ ID NO: 11573 - DNA, 20 bp, synthetic construct
  misc_feature 1..20: note = chemically synthesized
  source 1..20: mol_type = other DNA
gcagggggtgggagggaagg

SEQ ID NO: 11574 - DNA, 20 bp, synthetic construct
  misc_feature 1..20: note = chemically synthesized
  source 1..20: mol_type = other DNA
cagggggtgggagggaaggg

SEQ ID NO: 11575 - DNA, 20 bp, synthetic construct
  misc_feature 1..20: note = chemically synthesized
  source 1..20: mol_type = other DNA
agggggtgggagggaagggg

SEQ ID NO: 11576 - DNA, 20 bp, synthetic construct
  misc_feature 1..20: note = chemically synthesized
  source 1..20: mol_type = other DNA
ggggggatgcgtgacctgcc

SEQ ID NO: 11577 - DNA, 20 bp, synthetic construct
  misc_feature 1..20: note = chemically synthesized
  source 1..20: mol_type = other DNA
tgcgtgacctgcccggttct

SEQ ID NO: 11578 - DNA, 20 bp, synthetic construct
  misc_feature 1..20: note = chemically synthesized
  source 1..20: mol_type = other DNA
gtgacctgcccggttctcag

SEQ ID NO: 11579 - DNA, 20 bp, synthetic construct
  misc_feature 1..20: note = chemically synthesized
  source 1..20: mol_type = other DNA
caccctgcgctaccctctcc

SEQ ID NO: 11580 - DNA, 20 bp, synthetic construct
  misc_feature 1..20: note = chemically synthesized
  source 1..20: mol_type = other DNA
gctaccctctcccagaacct

SEQ ID NO: 11581 - DNA, 20 bp, synthetic construct
  misc_feature 1..20: note = chemically synthesized
  source 1..20: mol_type = other DNA
gaacctgagctgctctgacg

SEQ ID NO: 11582 - DNA, 20 bp, synthetic construct
  misc_feature 1..20: note = chemically synthesized
  source 1..20: mol_type = other DNA
gctgctctgacgcggccgtc

SEQ ID NO: 11583 - DNA, 20 bp, synthetic construct
  misc_feature 1..20: note = chemically synthesized
  source 1..20: mol_type = other DNA
ctggtgcgtttcactgatcc

SEQ ID NO: 11584 - DNA, 20 bp, synthetic construct
  misc_feature 1..20: note = chemically synthesized
  source 1..20: mol_type = other DNA
tttcactgatcctggtgctg

SEQ ID NO: 11585 - DNA, 20 bp, synthetic construct
  misc_feature 1..20: note = chemically synthesized
  source 1..20: mol_type = other DNA
gcagcttccttacacttccc

SEQ ID NO: 11586 - DNA, 20 bp, synthetic construct
  misc_feature 1..20: note = chemically synthesized
  source 1..20: mol_type = other DNA
agcttccttacacttcccaa

SEQ ID NO: 11587 - DNA, 20 bp, synthetic construct
  misc_feature 1..20: note = chemically synthesized
  source 1..20: mol_type = other DNA
gcttccttacacttcccaag

SEQ ID NO: 11588 - DNA, 20 bp, synthetic construct
  misc_feature 1..20: note = chemically synthesized
  source 1..20: mol_type = other DNA
ttccttacacttcccaagag

SEQ ID NO: 11589 - DNA, 20 bp, synthetic construct
  misc_feature 1..20: note = chemically synthesized
  source 1..20: mol_type = other DNA
cttacacttcccaagaggag

SEQ ID NO: 11590 - DNA, 20 bp, synthetic construct
  misc_feature 1..20: note = chemically synthesized
  source 1..20: mol_type = other DNA
acacttcccaagaggagaag

SEQ ID NO: 11591 - DNA, 20 bp, synthetic construct
  misc_feature 1..20: note = chemically synthesized
  source 1..20: mol_type = other DNA
tcccaagaggagaagcagtt

SEQ ID NO: 11592 - DNA, 20 bp, synthetic construct
  misc_feature 1..20: note = chemically synthesized
  source 1..20: mol_type = other DNA
gcagtttggaaaaacaaaat

SEQ ID NO: 11593 - DNA, 20 bp, synthetic construct
  misc_feature 1..20: note = chemically synthesized
  source 1..20: mol_type = other DNA
tggaaaaacaaaatcagaat

SEQ ID NO: 11594 - DNA, 20 bp, synthetic construct
  misc_feature 1..20: note = chemically synthesized
  source 1..20: mol_type = other DNA
aaaacaaaatcagaataagt

SEQ ID NO: 11595 - DNA, 20 bp, synthetic construct
  misc_feature 1..20: note = chemically synthesized
  source 1..20: mol_type = other DNA
aatcagaataagttggtcct

SEQ ID NO: 11596 - DNA, 20 bp, synthetic construct
  misc_feature 1..20: note = chemically synthesized
  source 1..20: mol_type = other DNA
ttggtcctgagttctaactt

SEQ ID NO: 11597 - DNA, 20 bp, synthetic construct
  misc_feature 1..20: note = chemically synthesized
  source 1..20: mol_type = other DNA
actttggctcttcacctttc

SEQ ID NO: 11598 - DNA, 20 bp, synthetic construct
  misc_feature 1..20: note = chemically synthesized
  source 1..20: mol_type = other DNA
tatattgttcctccgtgcgt

SEQ ID NO: 11599 - DNA, 20 bp, synthetic construct
  misc_feature 1..20: note = chemically synthesized
  source 1..20: mol_type = other DNA
cgtgcgtcagttttacctgt

SEQ ID NO: 11600 - DNA, 20 bp, synthetic construct
  misc_feature 1..20: note = chemically synthesized
  source 1..20: mol_type = other DNA
gtcagttttacctgtgagat

SEQ ID NO: 11601 - DNA, 20 bp, synthetic construct
  misc_feature 1..20: note = chemically synthesized
  source 1..20: mol_type = other DNA
tcagttttacctgtgagata

SEQ ID NO: 11602 - DNA, 20 bp, synthetic construct
  misc_feature 1..20: note = chemically synthesized
  source 1..20: mol_type = other DNA
ttttacctgtgagataaggc

SEQ ID NO: 11603 - DNA, 20 bp, synthetic construct
  misc_feature 1..20: note = chemically synthesized
  source 1..20: mol_type = other DNA
tacctgtgagataaggccag

SEQ ID NO: 11604 - DNA, 20 bp, synthetic construct
  misc_feature 1..20: note = chemically synthesized
  source 1..20: mol_type = other DNA
tgtgagataaggccagtagc

SEQ ID NO: 11605 - DNA, 20 bp, synthetic construct
  misc_feature 1..20: note = chemically synthesized
  source 1..20: mol_type = other DNA
gccagtagccagccccgtcc

SEQ ID NO: 11606 - DNA, 20 bp, synthetic construct
  misc_feature 1..20: note = chemically synthesized
  source 1..20: mol_type = other DNA
agtagccagccccgtcctgg

SEQ ID NO: 11607 - DNA, 20 bp, synthetic construct
  misc_feature 1..20: note = chemically synthesized
  source 1..20: mol_type = other DNA
gtagccagccccgtcctggc

SEQ ID NO: 11608 - DNA, 20 bp, synthetic construct
  misc_feature 1..20: note = chemically synthesized
  source 1..20: mol_type = other DNA
tagccagccccgtcctggca

SEQ ID NO: 11609 - DNA, 20 bp, synthetic construct
  misc_feature 1..20: note = chemically synthesized
  source 1..20: mol_type = other DNA
gccccgtcctggcagggctg

SEQ ID NO: 11610 - DNA, 20 bp, synthetic construct
  misc_feature 1..20: note = chemically synthesized
  source 1..20: mol_type = other DNA
cgtcctggcagggctgtggt

SEQ ID NO: 11611 - DNA, 20 bp, synthetic construct
  misc_feature 1..20: note = chemically synthesized
  source 1..20: mol_type = other DNA
gtcctggcagggctgtggtg

SEQ ID NO: 11612 - DNA, 20 bp, synthetic construct
  misc_feature 1..20: note = chemically synthesized
  source 1..20: mol_type = other DNA
cctggcagggctgtggtgag

SEQ ID NO: 11613 - DNA, 20 bp, synthetic construct
  misc_feature 1..20: note = chemically synthesized
  source 1..20: mol_type = other DNA
ctggcagggctgtggtgagg

SEQ ID NO: 11614 - DNA, 20 bp, synthetic construct
  misc_feature 1..20: note = chemically synthesized
  source 1..20: mol_type = other DNA
tggcagggctgtggtgagga

SEQ ID NO: 11615 - DNA, 20 bp, synthetic construct
  misc_feature 1..20: note = chemically synthesized
  source 1..20: mol_type = other DNA
ggcagggctgtggtgaggag

SEQ ID NO: 11616 - DNA, 20 bp, synthetic construct
  misc_feature 1..20: note = chemically synthesized
  source 1..20: mol_type = other DNA
gcagggctgtggtgaggagg

SEQ ID NO: 11617 - DNA, 20 bp, synthetic construct
  misc_feature 1..20: note = chemically synthesized
  source 1..20: mol_type = other DNA
cagggctgtggtgaggaggg

SEQ ID NO: 11618 - DNA, 20 bp, synthetic construct
  misc_feature 1..20: note = chemically synthesized
  source 1..20: mol_type = other DNA
tgaggaggggggtgtccgtg

SEQ ID NO: 11619 - DNA, 20 bp, synthetic construct
  misc_feature 1..20: note = chemically synthesized
  source 1..20: mol_type = other DNA
gtgtggaaaactccctttgt

SEQ ID NO: 11620 - DNA, 20 bp, synthetic construct
  misc_feature 1..20: note = chemically synthesized
  source 1..20: mol_type = other DNA
gaaaactccctttgtgagaa

SEQ ID NO: 11621 - DNA, 20 bp, synthetic construct
  misc_feature 1..20: note = chemically synthesized
  source 1..20: mol_type = other DNA
tttgtgagaatggtgcgtcc

SEQ ID NO: 11622 - DNA, 20 bp, synthetic construct
  misc_feature 1..20: note = chemically synthesized
  source 1..20: mol_type = other DNA
ttgtgagaatggtgcgtcct

SEQ ID NO: 11623 - DNA, 20 bp, synthetic construct
  misc_feature 1..20: note = chemically synthesized
  source 1..20: mol_type = other DNA
ggtgcgtcctaggtgttcac

SEQ ID NO: 11624 - DNA, 20 bp, synthetic construct
  misc_feature 1..20: note = chemically synthesized
  source 1..20: mol_type = other DNA
gtgcgtcctaggtgttcacc

SEQ ID NO: 11625 - DNA, 20 bp, synthetic construct
  misc_feature 1..20: note = chemically synthesized
  source 1..20: mol_type = other DNA
cctaggtgttcaccaggtcg

SEQ ID NO: 11626 - DNA, 20 bp, synthetic construct
  misc_feature 1..20: note = chemically synthesized
  source 1..20: mol_type = other DNA
tctccatccttctttcctta

SEQ ID NO: 11627 - DNA, 20 bp, synthetic construct
  misc_feature 1..20: note = chemically synthesized
  source 1..20: mol_type = other DNA
tccatccttctttccttaaa

SEQ ID NO: 11628 - DNA, 20 bp, synthetic construct
  misc_feature 1..20: note = chemically synthesized
  source 1..20: mol_type = other DNA
ttctttccttaaagagtccc

SEQ ID NO: 11629 - DNA, 20 bp, synthetic construct
  misc_feature 1..20: note = chemically synthesized
  source 1..20: mol_type = other DNA
aaagagtccccagtgctatc

SEQ ID NO: 11630 - DNA, 20 bp, synthetic construct
  misc_feature 1..20: note = chemically synthesized
  source 1..20: mol_type = other DNA
aagagtccccagtgctatct

SEQ ID NO: 11631 - DNA, 20 bp, synthetic construct
  misc_feature 1..20: note = chemically synthesized
  source 1..20: mol_type = other DNA
ctgggacatattcctccgcc

SEQ ID NO: 11632 - DNA, 20 bp, synthetic construct
  misc_feature 1..20: note = chemically synthesized
  source 1..20: mol_type = other DNA
gggacatattcctccgccca

SEQ ID NO: 11633 - DNA, 20 bp, synthetic construct
  misc_feature 1..20: note = chemically synthesized
  source 1..20: mol_type = other DNA
acatattcctccgcccagag

SEQ ID NO: 11634 - DNA, 20 bp, synthetic construct
  misc_feature 1..20: note = chemically synthesized
  source 1..20: mol_type = other DNA
catattcctccgcccagagc

SEQ ID NO: 11635 - DNA, 20 bp, synthetic construct
  misc_feature 1..20: note = chemically synthesized
  source 1..20: mol_type = other DNA
atattcctccgcccagagca

SEQ ID NO: 11636 - DNA, 20 bp, synthetic construct
  misc_feature 1..20: note = chemically synthesized
  source 1..20: mol_type = other DNA
gagcagggtcccgcttccct

SEQ ID NO: 11637 - DNA, 20 bp, synthetic construct
  misc_feature 1..20: note = chemically synthesized
  source 1..20: mol_type = other DNA
agcagggtcccgcttcccta

SEQ ID NO: 11638 - DNA, 20 bp, synthetic construct
  misc_feature 1..20: note = chemically synthesized
  source 1..20: mol_type = other DNA
gcttccctaaggccctgctc

SEQ ID NO: 11639 - DNA, 20 bp, synthetic construct
  misc_feature 1..20: note = chemically synthesized
  source 1..20: mol_type = other DNA
cttccctaaggccctgctct

SEQ ID NO: 11640 - DNA, 20 bp, synthetic construct
  misc_feature 1..20: note = chemically synthesized
  source 1..20: mol_type = other DNA
aaggccctgctctgggcttc

SEQ ID NO: 11641 - DNA, 20 bp, synthetic construct
  misc_feature 1..20: note = chemically synthesized
  source 1..20: mol_type = other DNA
aggccctgctctgggcttct

SEQ ID NO: 11642 - DNA, 20 bp, synthetic construct
  misc_feature 1..20: note = chemically synthesized
  source 1..20: mol_type = other DNA
tgctctgggcttctgggttt

SEQ ID NO: 11643 - DNA, 20 bp, synthetic construct
  misc_feature 1..20: note = chemically synthesized
  source 1..20: mol_type = other DNA
ggcttctgggtttgagtcct

SEQ ID NO: 11644 - DNA, 20 bp, synthetic construct
  misc_feature 1..20: note = chemically synthesized
  source 1..20: mol_type = other DNA
tctgggtttgagtccttggc

SEQ ID NO: 11645 - DNA, 20 bp, synthetic construct
  misc_feature 1..20: note = chemically synthesized
  source 1..20: mol_type = other DNA
gtttgagtccttggcaagcc

SEQ ID NO: 11646 - DNA, 20 bp, synthetic construct
  misc_feature 1..20: note = chemically synthesized
  source 1..20: mol_type = other DNA
tttgagtccttggcaagccc

SEQ ID NO: 11647 - DNA, 20 bp, synthetic construct
  misc_feature 1..20: note = chemically synthesized
  source 1..20: mol_type = other DNA
tgagtccttggcaagcccag

SEQ ID NO: 11648 - DNA, 20 bp, synthetic construct
  misc_feature 1..20: note = chemically synthesized
  source 1..20: mol_type = other DNA
agtccttggcaagcccagga

SEQ ID NO: 11649 - DNA, 20 bp, synthetic construct
  misc_feature 1..20: note = chemically synthesized
  source 1..20: mol_type = other DNA
gtccttggcaagcccaggag

SEQ ID NO: 11650 - DNA, 20 bp, synthetic construct
  misc_feature 1..20: note = chemically synthesized
  source 1..20: mol_type = other DNA
gcaagcccaggagaggcgct

SEQ ID NO: 11651 - DNA, 20 bp, synthetic construct
  misc_feature 1..20: note = chemically synthesized
  source 1..20: mol_type = other DNA
caagcccaggagaggcgctc

SEQ ID NO: 11652 - DNA, 20 bp, synthetic construct
  misc_feature 1..20: note = chemically synthesized
  source 1..20: mol_type = other DNA
cgtccaccatctcatgcccc

SEQ ID NO: 11653 - DNA, 20 bp, synthetic construct
  misc_feature 1..20: note = chemically synthesized
  source 1..20: mol_type = other DNA
gctctcctgccccttcccta

SEQ ID NO: 11654 - DNA, 20 bp, synthetic construct
  misc_feature 1..20: note = chemically synthesized
  source 1..20: mol_type = other DNA
ctctcctgccccttccctac

SEQ ID NO: 11655 - DNA, 20 bp, synthetic construct
  misc_feature 1..20: note = chemically synthesized
  source 1..20: mol_type = other DNA
tctcctgccccttccctaca

SEQ ID NO: 11656 - DNA, 20 bp, synthetic construct
  misc_feature 1..20: note = chemically synthesized
  source 1..20: mol_type = other DNA
ctcctgccccttccctacag

SEQ ID NO: 11657 - DNA, 20 bp, synthetic construct
  misc_feature 1..20: note = chemically synthesized
  source 1..20: mol_type = other DNA
cccttccctacaggggttcc

SEQ ID NO: 11658 - DNA, 20 bp, synthetic construct
  misc_feature 1..20: note = chemically synthesized
  source 1..20: mol_type = other DNA
gggttcctggctctgctctt

SEQ ID NO: 11659 - DNA, 20 bp, synthetic construct
  misc_feature 1..20: note = chemically synthesized
  source 1..20: mol_type = other DNA
ctggctctgctcttcagact

SEQ ID NO: 11660 - DNA, 20 bp, synthetic construct
  misc_feature 1..20: note = chemically synthesized
  source 1..20: mol_type = other DNA
cccccttcccctgcatcccc

SEQ ID NO: 11661 - DNA, 20 bp, synthetic construct
  misc_feature 1..20: note = chemically synthesized
  source 1..20: mol_type = other DNA
cccttcccctgcatccccca

SEQ ID NO: 11662 - DNA, 20 bp, synthetic construct
  misc_feature 1..20: note = chemically synthesized
  source 1..20: mol_type = other DNA
ccttcccctgcatcccccag

SEQ ID NO: 11663 - DNA, 20 bp, synthetic construct
  misc_feature 1..20: note = chemically synthesized
  source 1..20: mol_type = other DNA
cctgcatcccccagaggccc

SEQ ID NO: 11664 - DNA, 20 bp, synthetic construct
  misc_feature 1..20: note = chemically synthesized
  source 1..20: mol_type = other DNA
ctgcatcccccagaggcccc

SEQ ID NO: 11665 - DNA, 20 bp, synthetic construct
  misc_feature 1..20: note = chemically synthesized
  source 1..20: mol_type = other DNA
gaggccccaggccacctact

SEQ ID NO: 11666 - DNA, 20 bp, synthetic construct
  misc_feature 1..20: note = chemically synthesized
  source 1..20: mol_type = other DNA
cccaggccacctacttggcc

SEQ ID NO: 11667 - DNA, 20 bp, synthetic construct
  misc_feature 1..20: note = chemically synthesized
  source 1..20: mol_type = other DNA
ctacttggcctggaccccac

SEQ ID NO: 11668 - DNA, 20 bp, synthetic construct
  misc_feature 1..20: note = chemically synthesized
  source 1..20: mol_type = other DNA
acttggcctggaccccacga

SEQ ID NO: 11669 - DNA, 20 bp, synthetic construct
  misc_feature 1..20: note = chemically synthesized
  source 1..20: mol_type = other DNA
cttggcctggaccccacgag

SEQ ID NO: 11670 - DNA, 20 bp, synthetic construct
  misc_feature 1..20: note = chemically synthesized
  source 1..20: mol_type = other DNA
gaccccacgagaggccaccc

SEQ ID NO: 11671 - DNA, 20 bp, synthetic construct
  misc_feature 1..20: note = chemically synthesized
  source 1..20: mol_type = other DNA
gccaccccagccctgtctac

SEQ ID NO: 11672 - DNA, 20 bp, synthetic construct
  misc_feature 1..20: note = chemically synthesized
  source 1..20: mol_type = other DNA
ccaccccagccctgtctacc

SEQ ID NO: 11673 - DNA, 20 bp, synthetic construct
  misc_feature 1..20: note = chemically synthesized
  source 1..20: mol_type = other DNA
ctgtctaccaggctgccttt

SEQ ID NO: 11674 - DNA, 20 bp, synthetic construct
  misc_feature 1..20: note = chemically synthesized
  source 1..20: mol_type = other DNA
tgtctaccaggctgcctttt

SEQ ID NO: 11675 - DNA, 20 bp, synthetic construct
  misc_feature 1..20: note = chemically synthesized
  source 1..20: mol_type = other DNA
ctaccaggctgccttttggg

SEQ ID NO: 11676 - DNA, 20 bp, synthetic construct
  misc_feature 1..20: note = chemically synthesized
  source 1..20: mol_type = other DNA
ggtggattctcctccaactg

SEQ ID NO: 11677 - DNA, 20 bp, synthetic construct
  misc_feature 1..20: note = chemically synthesized
  source 1..20: mol_type = other DNA
gtggattctcctccaactgt

SEQ ID NO: 11678 - DNA, 20 bp, synthetic construct
  misc_feature 1..20: note = chemically synthesized
  source 1..20: mol_type = other DNA
tggattctcctccaactgtg

SEQ ID NO: 11679 - DNA, 20 bp, synthetic construct
  misc_feature 1..20: note = chemically synthesized
  source 1..20: mol_type = other DNA
ccaactgtggggtgactgct

SEQ ID NO: 11680 - DNA, 20 bp, synthetic construct
  misc_feature 1..20: note = chemically synthesized
  source 1..20: mol_type = other DNA
tgcttggcaaactcactctt

SEQ ID NO: 11681 - DNA, 20 bp, synthetic construct
  misc_feature 1..20: note = chemically synthesized
  source 1..20: mol_type = other DNA
gcttggcaaactcactcttc

SEQ ID NO: 11682 - DNA, 20 bp, synthetic construct
  misc_feature 1..20: note = chemically synthesized
  source 1..20: mol_type = other DNA
cttggcaaactcactcttcg

SEQ ID NO: 11683 - DNA, 20 bp, synthetic construct
  misc_feature 1..20: note = chemically synthesized
  source 1..20: mol_type = other DNA
actcactcttcggggtatcc

SEQ ID NO: 11684 - DNA, 20 bp, synthetic construct
  misc_feature 1..20: note = chemically synthesized
  source 1..20: mol_type = other DNA
ctcactcttcggggtatccc

SEQ ID NO: 11685 - DNA, 20 bp, synthetic construct
  misc_feature 1..20: note = chemically synthesized
  source 1..20: mol_type = other DNA
cactcttcggggtatcccag

SEQ ID NO: 11686 - DNA, 20 bp, synthetic construct
  misc_feature 1..20: note = chemically synthesized
  source 1..20: mol_type = other DNA
actcttcggggtatcccagg

SEQ ID NO: 11687 - DNA, 20 bp, synthetic construct
  misc_feature 1..20: note = chemically synthesized
  source 1..20: mol_type = other DNA
tcggggtatcccaggaggcc

SEQ ID NO: 11688 - DNA, 20 bp, synthetic construct
  misc_feature 1..20: note = chemically synthesized
  source 1..20: mol_type = other DNA
ggggtatcccaggaggcctg

SEQ ID NO: 11689 - DNA, 20 bp, synthetic construct
  misc_feature 1..20: note = chemically synthesized
  source 1..20: mol_type = other DNA
tcccaggaggcctggagcat

SEQ ID NO: 11690 - DNA, 20 bp, synthetic construct
  misc_feature 1..20: note = chemically synthesized
  source 1..20: mol_type = other DNA
cccaggaggcctggagcatt

SEQ ID NO: 11691 - DNA, 20 bp, synthetic construct
  misc_feature 1..20: note = chemically synthesized
  source 1..20: mol_type = other DNA
ccaggaggcctggagcattg

SEQ ID NO: 11692 - DNA, 20 bp, synthetic construct
  misc_feature 1..20: note = chemically synthesized
  source 1..20: mol_type = other DNA
ggaggcctggagcattgggg

SEQ ID NO: 11693 - DNA, 20 bp, synthetic construct
  misc_feature 1..20: note = chemically synthesized
  source 1..20: mol_type = other DNA
gaggcctggagcattggggt

SEQ ID NO: 11694 - DNA, 20 bp, synthetic construct
  misc_feature 1..20: note = chemically synthesized
  source 1..20: mol_type = other DNA
cctggagcattggggtgggc

SEQ ID NO: 11695 - DNA, 20 bp, synthetic construct
  misc_feature 1..20: note = chemically synthesized
  source 1..20: mol_type = other DNA
ctggagcattggggtgggct

SEQ ID NO: 11696 - DNA, 20 bp, synthetic construct
  misc_feature 1..20: note = chemically synthesized
  source 1..20: mol_type = other DNA
tggagcattggggtgggctg

SEQ ID NO: 11697 - DNA, 20 bp, synthetic construct
  misc_feature 1..20: note = chemically synthesized
  source 1..20: mol_type = other DNA
cattggggtgggctggggtt

SEQ ID NO: 11698 - DNA, 20 bp, synthetic construct
  misc_feature 1..20: note = chemically synthesized
  source 1..20: mol_type = other DNA
ttggggtgggctggggttca

SEQ ID NO: 11699 - DNA, 20 bp, synthetic construct
  misc_feature 1..20: note = chemically synthesized
  source 1..20: mol_type = other DNA
ggggtgggctggggttcaga

SEQ ID NO: 11700 - DNA, 20 bp, synthetic construct
  misc_feature 1..20: note = chemically synthesized
  source 1..20: mol_type = other DNA
gggtgggctggggttcagag

SEQ ID NO: 11701 - DNA, 20 bp, synthetic construct
  misc_feature 1..20: note = chemically synthesized
  source 1..20: mol_type = other DNA
gtgggctggggttcagagag

SEQ ID NO: 11702 - DNA, 20 bp, synthetic construct
  misc_feature 1..20: note = chemically synthesized
  source 1..20: mol_type = other DNA
tgggctggggttcagagagg

SEQ ID NO: 11703 - DNA, 20 bp, synthetic construct
  misc_feature 1..20: note = chemically synthesized
  source 1..20: mol_type = other DNA
gggctggggttcagagagga

SEQ ID NO: 11704 - DNA, 20 bp, synthetic construct
  misc_feature 1..20: note = chemically synthesized
  source 1..20: mol_type = other DNA
gagaggagggattcccttct

SEQ ID NO: 11705 - DNA, 20 bp, synthetic construct
  misc_feature 1..20: note = chemically synthesized
  source 1..20: mol_type = other DNA
agaggagggattcccttctc

SEQ ID NO: 11706 - DNA, 20 bp, synthetic construct
  misc_feature 1..20: note = chemically synthesized
  source 1..20: mol_type = other DNA
gattcccttctcaggttacg

SEQ ID NO: 11707 - DNA, 20 bp, synthetic construct
  misc_feature 1..20: note = chemically synthesized
  source 1..20: mol_type = other DNA
ccttctcaggttacgtggcc

SEQ ID NO: 11708 - DNA, 20 bp, synthetic construct
  misc_feature 1..20: note = chemically synthesized
  source 1..20: mol_type = other DNA
tctcaggttacgtggccaag

SEQ ID NO: 11709 - DNA, 20 bp, synthetic construct
  misc_feature 1..20: note = chemically synthesized
  source 1..20: mol_type = other DNA
caggttacgtggccaagaag

SEQ ID NO: 11710 - DNA, 20 bp, synthetic construct
  misc_feature 1..20: note = chemically synthesized
  source 1..20: mol_type = other DNA
aggttacgtggccaagaagc

SEQ ID NO: 11711 - DNA, 20 bp, synthetic construct
  misc_feature 1..20: note = chemically synthesized
  source 1..20: mol_type = other DNA
ggttacgtggccaagaagca

SEQ ID NO: 11712 - DNA, 20 bp, synthetic construct
  misc_feature 1..20: note = chemically synthesized
  source 1..20: mol_type = other DNA
gttacgtggccaagaagcag

SEQ ID NO: 11713 - DNA, 20 bp, synthetic construct
  misc_feature 1..20: note = chemically synthesized
  source 1..20: mol_type = other DNA
tacgtggccaagaagcaggg

SEQ ID NO: 11714 - DNA, 20 bp, synthetic construct
  misc_feature 1..20: note = chemically synthesized
  source 1..20: mol_type = other DNA
tggccaagaagcaggggagc

SEQ ID NO: 11715 - DNA, 20 bp, synthetic construct
  misc_feature 1..20: note = chemically synthesized
  source 1..20: mol_type = other DNA
ggccaagaagcaggggagct

SEQ ID NO: 11716 - DNA, 20 bp, synthetic construct
  misc_feature 1..20: note = chemically synthesized
  source 1..20: mol_type = other DNA
agaagcaggggagctgggtt

SEQ ID NO: 11717 - DNA, 20 bp, synthetic construct
  misc_feature 1..20: note = chemically synthesized
  source 1..20: mol_type = other DNA
gaagcaggggagctgggttt

SEQ ID NO: 11718 - DNA, 20 bp, synthetic construct
  misc_feature 1..20: note = chemically synthesized
  source 1..20: mol_type = other DNA
caggggagctgggtttgggt

SEQ ID NO: 11719 - DNA, 20 bp, synthetic construct
  misc_feature 1..20: note = chemically synthesized
  source 1..20: mol_type = other DNA
aggggagctgggtttgggtc

SEQ ID NO: 11720 - DNA, 20 bp, synthetic construct
  misc_feature 1..20: note = chemically synthesized
  source 1..20: mol_type = other DNA
agctgggtttgggtcaggtc

SEQ ID NO: 11721 - DNA, 20 bp, synthetic construct
  misc_feature 1..20: note = chemically synthesized
  source 1..20: mol_type = other DNA
gctgggtttgggtcaggtct

SEQ ID NO: 11722 - DNA, 20 bp, synthetic construct
  misc_feature 1..20: note = chemically synthesized
  source 1..20: mol_type = other DNA
gtttgggtcaggtctgggtg

SEQ ID NO: 11723 - DNA, 20 bp, synthetic construct
  misc_feature 1..20: note = chemically synthesized
  source 1..20: mol_type = other DNA
tttgggtcaggtctgggtgt

SEQ ID NO: 11724 - DNA, 20 bp, synthetic construct
  misc_feature 1..20: note = chemically synthesized
  source 1..20: mol_type = other DNA
ttgggtcaggtctgggtgtg

SEQ ID NO: 11725 - DNA, 20 bp, synthetic construct
  misc_feature 1..20: note = chemically synthesized
  source 1..20: mol_type = other DNA
aggtctgggtgtggggtgac

SEQ ID NO: 11726 - DNA, 20 bp, synthetic construct
  misc_feature 1..20: note = chemically synthesized
  source 1..20: mol_type = other DNA
accagcttatgctgtttgcc

SEQ ID NO: 11727 - DNA, 20 bp, synthetic construct
  misc_feature 1..20: note = chemically synthesized
  source 1..20: mol_type = other DNA
ccagcttatgctgtttgccc

SEQ ID NO: 11728 - DNA, 20 bp, synthetic construct
  misc_feature 1..20: note = chemically synthesized
  source 1..20: mol_type = other DNA
cttatgctgtttgcccagga

SEQ ID NO: 11729 - DNA, 20 bp, synthetic construct
  misc_feature 1..20: note = chemically synthesized
  source 1..20: mol_type = other DNA
gctgtttgcccaggacagcc

SEQ ID NO: 11730 - DNA, 20 bp, synthetic construct
  misc_feature 1..20: note = chemically synthesized
  source 1..20: mol_type = other DNA
tgcccaggacagcctagttt

SEQ ID NO: 11731 - DNA, 20 bp, synthetic construct
  misc_feature 1..20: note = chemically synthesized
  source 1..20: mol_type = other DNA
agttttagcactgaaaccct

SEQ ID NO: 11732 - DNA, 20 bp, synthetic construct
  misc_feature 1..20: note = chemically synthesized
  source 1..20: mol_type = other DNA
agcactgaaaccctcagtcc

SEQ ID NO: 11733 - DNA, 20 bp, synthetic construct
  misc_feature 1..20: note = chemically synthesized
  source 1..20: mol_type = other DNA
gcactgaaaccctcagtcct

SEQ ID NO: 11734 - DNA, 20 bp, synthetic construct
  misc_feature 1..20: note = chemically synthesized
  source 1..20: mol_type = other DNA
aaccctcagtcctaggaaaa

SEQ ID NO: 11735 - DNA, 20 bp, synthetic construct
  misc_feature 1..20: note = chemically synthesized
  source 1..20: mol_type = other DNA
accctcagtcctaggaaaac

SEQ ID NO: 11736 - DNA, 20 bp, synthetic construct
  misc_feature 1..20: note = chemically synthesized
  source 1..20: mol_type = other DNA
ccctcagtcctaggaaaaca

SEQ ID NO: 11737 - DNA, 20 bp, synthetic construct
  misc_feature 1..20: note = chemically synthesized
  source 1..20: mol_type = other DNA
cagtcctaggaaaacaggga

SEQ ID NO: 11738 - DNA, 20 bp, synthetic construct
  misc_feature 1..20: note = chemically synthesized
  source 1..20: mol_type = other DNA
cctaggaaaacagggatggt

SEQ ID NO: 11739 - DNA, 20 bp, synthetic construct
  misc_feature 1..20: note = chemically synthesized
  source 1..20: mol_type = other DNA
ggatggttggtcactgtctc

SEQ ID NO: 11740 - DNA, 20 bp, synthetic construct
  misc_feature 1..20: note = chemically synthesized
  source 1..20: mol_type = other DNA
gatggttggtcactgtctct

SEQ ID NO: 11741 - DNA, 20 bp, synthetic construct
  misc_feature 1..20: note = chemically synthesized
  source 1..20: mol_type = other DNA
tctgggtgactcttgattcc

SEQ ID NO: 11742 - DNA, 20 bp, synthetic construct
  misc_feature 1..20: note = chemically synthesized
  source 1..20: mol_type = other DNA
ggtgactcttgattcccggc

SEQ ID NO: 11743 - DNA, 20 bp, synthetic construct
  misc_feature 1..20: note = chemically synthesized
  source 1..20: mol_type = other DNA
tcccggccagtttctccacc

SEQ ID NO: 11744 - DNA, 20 bp, synthetic construct
  misc_feature 1..20: note = chemically synthesized
  source 1..20: mol_type = other DNA
cccggccagtttctccacct

SEQ ID NO: 11745 - DNA, 20 bp, synthetic construct
  misc_feature 1..20: note = chemically synthesized
  source 1..20: mol_type = other DNA
ccggccagtttctccacctg

SEQ ID NO: 11746 - DNA, 20 bp, synthetic construct
  misc_feature 1..20: note = chemically synthesized
  source 1..20: mol_type = other DNA
tctcgtcctgcatccttctc

SEQ ID NO: 11747 - DNA, 20 bp, synthetic construct
  misc_feature 1..20: note = chemically synthesized
  source 1..20: mol_type = other DNA
ctcgtcctgcatccttctcc

SEQ ID NO: 11748 - DNA, 20 bp, synthetic construct
  misc_feature 1..20: note = chemically synthesized
  source 1..20: mol_type = other DNA
gtcctgcatccttctccagg

SEQ ID NO: 11749 - DNA, 20 bp, synthetic construct
  misc_feature 1..20: note = chemically synthesized
  source 1..20: mol_type = other DNA
tcctgcatccttctccaggc

SEQ ID NO: 11750 - DNA, 20 bp, synthetic construct
  misc_feature 1..20: note = chemically synthesized
  source 1..20: mol_type = other DNA
ccttctccaggcaggtcccc

SEQ ID NO: 11751 - DNA, 20 bp, synthetic construct
  misc_feature 1..20: note = chemically synthesized
  source 1..20: mol_type = other DNA
caagcatcgcccccctgctg

SEQ ID NO: 11752 - DNA, 20 bp, synthetic construct
  misc_feature 1..20: note = chemically synthesized
  source 1..20: mol_type = other DNA
cccctgctgtggctgttccc

SEQ ID NO: 11753 - DNA, 20 bp, synthetic construct
  misc_feature 1..20: note = chemically synthesized
  source 1..20: mol_type = other DNA
tgtggctgttcccaagttct

SEQ ID NO: 11754 - DNA, 20 bp, synthetic construct
  misc_feature 1..20: note = chemically synthesized
  source 1..20: mol_type = other DNA
gtggctgttcccaagttctt

SEQ ID NO: 11755 - DNA, 20 bp, synthetic construct
  misc_feature 1..20: note = chemically synthesized
  source 1..20: mol_type = other DNA
tggctgttcccaagttctta

SEQ ID NO: 11756 - DNA, 20 bp, synthetic construct
  misc_feature 1..20: note = chemically synthesized
  source 1..20: mol_type = other DNA
agttcttagggtaccccacg

SEQ ID NO: 11757 - DNA, 20 bp, synthetic construct
  misc_feature 1..20: note = chemically synthesized
  source 1..20: mol_type = other DNA
gttcttagggtaccccacgt

SEQ ID NO: 11758 - DNA, 20 bp, synthetic construct
  misc_feature 1..20: note = chemically synthesized
  source 1..20: mol_type = other DNA
acgtgggtttatcaaccact

SEQ ID NO: 11759 - DNA, 20 bp, synthetic construct
  misc_feature 1..20: note = chemically synthesized
  source 1..20: mol_type = other DNA
gggtttatcaaccacttggt

SEQ ID NO: 11760 - DNA, 20 bp, synthetic construct
  misc_feature 1..20: note = chemically synthesized
  source 1..20: mol_type = other DNA
ggtttatcaaccacttggtg

SEQ ID NO: 11761 - DNA, 20 bp, synthetic construct
  misc_feature 1..20: note = chemically synthesized
  source 1..20: mol_type = other DNA
tatcaaccacttggtgaggc

SEQ ID NO: 11762 - DNA, 20 bp, synthetic construct
  misc_feature 1..20: note = chemically synthesized
  source 1..20: mol_type = other DNA
ttcctgcaccccaattgcct

SEQ ID NO: 11763 - DNA, 20 bp, synthetic construct
  misc_feature 1..20: note = chemically synthesized
  source 1..20: mol_type = other DNA
ctgcaccccaattgccttag

SEQ ID NO: 11764 - DNA, 20 bp, synthetic construct
  misc_feature 1..20: note = chemically synthesized
  source 1..20: mol_type = other DNA
accccaattgccttagtggc

SEQ ID NO: 11765 - DNA, 20 bp, synthetic construct
  misc_feature 1..20: note = chemically synthesized
  source 1..20: mol_type = other DNA
ccccaattgccttagtggct

SEQ ID NO: 11766 - DNA, 20 bp, synthetic construct
  misc_feature 1..20: note = chemically synthesized
  source 1..20: mol_type = other DNA
cccaattgccttagtggcta

SEQ ID NO: 11767 - DNA, 20 bp, synthetic construct
  misc_feature 1..20: note = chemically synthesized
  source 1..20: mol_type = other DNA
ccaattgccttagtggctag

SEQ ID NO: 11768 - DNA, 20 bp, synthetic construct
  misc_feature 1..20: note = chemically synthesized
  source 1..20: mol_type = other DNA
caattgccttagtggctagg

SEQ ID NO: 11769 - DNA, 20 bp, synthetic construct
  misc_feature 1..20: note = chemically synthesized
  source 1..20: mol_type = other DNA
tgccttagtggctagggggt

SEQ ID NO: 11770 - DNA, 20 bp, synthetic construct
  misc_feature 1..20: note = chemically synthesized
  source 1..20: mol_type = other DNA
gccttagtggctagggggtt

SEQ ID NO: 11771 - DNA, 20 bp, synthetic construct
  misc_feature 1..20: note = chemically synthesized
  source 1..20: mol_type = other DNA
ccttagtggctagggggttg

SEQ ID NO: 11772 - DNA, 20 bp, synthetic construct
  misc_feature 1..20: note = chemically synthesized
  source 1..20: mol_type = other DNA
cttagtggctagggggttgg

SEQ ID NO: 11773 - DNA, 20 bp, synthetic construct
  misc_feature 1..20: note = chemically synthesized
  source 1..20: mol_type = other DNA
gtggctagggggttgggggc

SEQ ID NO: 11774 - DNA, 20 bp, synthetic construct
  misc_feature 1..20: note = chemically synthesized
  source 1..20: mol_type = other DNA
ggctagggggttgggggcta

SEQ ID NO: 11775 - DNA, 20 bp, synthetic construct
  misc_feature 1..20: note = chemically synthesized
  source 1..20: mol_type = other DNA
tagggggttgggggctagag

SEQ ID NO: 11776 - DNA, 20 bp, synthetic construct
  misc_feature 1..20: note = chemically synthesized
  source 1..20: mol_type = other DNA
agggggttgggggctagagt

SEQ ID NO: 11777 - DNA, 20 bp, synthetic construct
  misc_feature 1..20: note = chemically synthesized
  source 1..20: mol_type = other DNA
ggggttgggggctagagtag

SEQ ID NO: 11778 - DNA, 20 bp, synthetic construct
  misc_feature 1..20: note = chemically synthesized
  source 1..20: mol_type = other DNA
gggttgggggctagagtagg

SEQ ID NO: 11779 - DNA, 20 bp, synthetic construct
  misc_feature 1..20: note = chemically synthesized
  source 1..20: mol_type = other DNA
ggttgggggctagagtagga

SEQ ID NO: 11780 - DNA, 20 bp, synthetic construct
  misc_feature 1..20: note = chemically synthesized
  source 1..20: mol_type = other DNA
gttgggggctagagtaggag

SEQ ID NO: 11781 - DNA, 20 bp, synthetic construct
  misc_feature 1..20: note = chemically synthesized
  source 1..20: mol_type = other DNA
ggggctagagtaggaggggc

SEQ ID NO: 11782 - DNA, 20 bp, synthetic construct
  misc_feature 1..20: note = chemically synthesized
  source 1..20: mol_type = other DNA
ggctagagtaggaggggctg

SEQ ID NO: 11783 - DNA, 20 bp, synthetic construct
  misc_feature 1..20: note = chemically synthesized
  source 1..20: mol_type = other DNA
agagtaggaggggctggagc

SEQ ID NO: 11784 - DNA, 20 bp, synthetic construct
  misc_feature 1..20: note = chemically synthesized
  source 1..20: mol_type = other DNA
gagtaggaggggctggagcc

SEQ ID NO: 11785 - DNA, 20 bp, synthetic construct
  misc_feature 1..20: note = chemically synthesized
  source 1..20: mol_type = other DNA
ggggctggagccaggattct

SEQ ID NO: 11786 - DNA, 20 bp, synthetic construct
  misc_feature 1..20: note = chemically synthesized
  source 1..20: mol_type = other DNA
gggctggagccaggattctt

SEQ ID NO: 11787 - DNA, 20 bp, synthetic construct
  misc_feature 1..20: note = chemically synthesized
  source 1..20: mol_type = other DNA
ggctggagccaggattctta

SEQ ID NO: 11788 - DNA, 20 bp, synthetic construct
  misc_feature 1..20: note = chemically synthesized
  source 1..20: mol_type = other DNA
ccaggattcttagggctgaa

SEQ ID NO: 11789 - DNA, 20 bp, synthetic construct
  misc_feature 1..20: note = chemically synthesized
  source 1..20: mol_type = other DNA
aggattcttagggctgaaca

SEQ ID NO: 11790 - DNA, 20 bp, synthetic construct
  misc_feature 1..20: note = chemically synthesized
  source 1..20: mol_type = other DNA
attcttagggctgaacagag

SEQ ID NO: 11791 - DNA, 20 bp, synthetic construct
  misc_feature 1..20: note = chemically synthesized
  source 1..20: mol_type = other DNA
tcttagggctgaacagagaa

SEQ ID NO: 11792 - DNA, 20 bp, synthetic construct
  misc_feature 1..20: note = chemically synthesized
  source 1..20: mol_type = other DNA
agggctgaacagagaagagc

SEQ ID NO: 11793 - DNA, 20 bp, synthetic construct
  misc_feature 1..20: note = chemically synthesized
  source 1..20: mol_type = other DNA
gggctgaacagagaagagct

SEQ ID NO: 11794 - DNA, 20 bp, synthetic construct
  misc_feature 1..20: note = chemically synthesized
  source 1..20: mol_type = other DNA
ggctgaacagagaagagctg

SEQ ID NO: 11795 - DNA, 20 bp, synthetic construct
  misc_feature 1..20: note = chemically synthesized
  source 1..20: mol_type = other DNA
gctgaacagagaagagctgg

SEQ ID NO: 11796 - DNA, 20 bp, synthetic construct
  misc_feature 1..20: note = chemically synthesized
  source 1..20: mol_type = other DNA
acagagaagagctgggggcc

SEQ ID NO: 11797 - DNA, 20 bp, synthetic construct
  misc_feature 1..20: note = chemically synthesized
  source 1..20: mol_type = other DNA
cagagaagagctgggggcct

SEQ ID NO: 11798 - DNA, 20 bp, synthetic construct
  misc_feature 1..20: note = chemically synthesized
  source 1..20: mol_type = other DNA
gagctgggggcctgggctcc

SEQ ID NO: 11799 - DNA, 20 bp, synthetic construct
  misc_feature 1..20: note = chemically synthesized
  source 1..20: mol_type = other DNA
agctgggggcctgggctcct

SEQ ID NO: 11800 - DNA, 20 bp, synthetic construct
  misc_feature 1..20: note = chemically synthesized
  source 1..20: mol_type = other DNA
gggcctgggctcctgggttt

SEQ ID NO: 11801 - DNA, 20 bp, synthetic construct
  misc_feature 1..20: note = chemically synthesized
  source 1..20: mol_type = other DNA
gcctgggctcctgggtttga

SEQ ID NO: 11802 - DNA, 20 bp, synthetic construct
  misc_feature 1..20: note = chemically synthesized
  source 1..20: mol_type = other DNA
ctgggctcctgggtttgaga

SEQ ID NO: 11803 - DNA, 20 bp, synthetic construct
  misc_feature 1..20: note = chemically synthesized
  source 1..20: mol_type = other DNA
tgggctcctgggtttgagag

SEQ ID NO: 11804 - DNA, 20 bp, synthetic construct
  misc_feature 1..20: note = chemically synthesized
  source 1..20: mol_type = other DNA
ggctcctgggtttgagagag

SEQ ID NO: 11805 - DNA, 20 bp, synthetic construct
  misc_feature 1..20: note = chemically synthesized
  source 1..20: mol_type = other DNA
gctcctgggtttgagagagg

SEQ ID NO: 11806 - DNA, 20 bp, synthetic construct
  misc_feature 1..20: note = chemically synthesized
  source 1..20: mol_type = other DNA
ctcctgggtttgagagagga

SEQ ID NO: 11807 - DNA, 20 bp, synthetic construct
  misc_feature 1..20: note = chemically synthesized
  source 1..20: mol_type = other DNA
tcctgggtttgagagaggag

SEQ ID NO: 11808 - DNA, 20 bp, synthetic construct
  misc_feature 1..20: note = chemically synthesized
  source 1..20: mol_type = other DNA
gggtttgagagaggaggggc

SEQ ID NO: 11809 - DNA, 20 bp, synthetic construct
  misc_feature 1..20: note = chemically synthesized
  source 1..20: mol_type = other DNA
ggtttgagagaggaggggct

SEQ ID NO: 11810 - DNA, 20 bp, synthetic construct
  misc_feature 1..20: note = chemically synthesized
  source 1..20: mol_type = other DNA
gtttgagagaggaggggctg

SEQ ID NO: 11811 - DNA, 20 bp, synthetic construct
  misc_feature 1..20: note = chemically synthesized
  source 1..20: mol_type = other DNA
agagaggaggggctggggcc

SEQ ID NO: 11812 - DNA, 20 bp, synthetic construct
  misc_feature 1..20: note = chemically synthesized
  source 1..20: mol_type = other DNA
ggggctggggcctggactcc

SEQ ID NO: 11813 - DNA, 20 bp, synthetic construct
  misc_feature 1..20: note = chemically synthesized
  source 1..20: mol_type = other DNA
gggctggggcctggactcct

SEQ ID NO: 11814 - DNA, 20 bp, synthetic construct
  misc_feature 1..20: note = chemically synthesized
  source 1..20: mol_type = other DNA
gggcctggactcctgggtcc

SEQ ID NO: 11815 - DNA, 20 bp, synthetic construct
  misc_feature 1..20: note = chemically synthesized
  source 1..20: mol_type = other DNA
ggcctggactcctgggtccg

SEQ ID NO: 11816 - DNA, 20 bp, synthetic construct
  misc_feature 1..20: note = chemically synthesized
  source 1..20: mol_type = other DNA
gcctggactcctgggtccga

SEQ ID NO: 11817 - DNA, 20 bp, synthetic construct
  misc_feature 1..20: note = chemically synthesized
  source 1..20: mol_type = other DNA
ctggactcctgggtccgagg

SEQ ID NO: 11818 - DNA, 20 bp, synthetic construct
  misc_feature 1..20: note = chemically synthesized
  source 1..20: mol_type = other DNA
tggactcctgggtccgaggg

SEQ ID NO: 11819 - DNA, 20 bp, synthetic construct
  misc_feature 1..20: note = chemically synthesized
  source 1..20: mol_type = other DNA
gactcctgggtccgagggag

SEQ ID NO: 11820 - DNA, 20 bp, synthetic construct
  misc_feature 1..20: note = chemically synthesized
  source 1..20: mol_type = other DNA
actcctgggtccgagggagg

SEQ ID NO: 11821 - DNA, 20 bp, synthetic construct
  misc_feature 1..20: note = chemically synthesized
  source 1..20: mol_type = other DNA
ctcctgggtccgagggagga

SEQ ID NO: 11822 - DNA, 20 bp, synthetic construct
  misc_feature 1..20: note = chemically synthesized
  source 1..20: mol_type = other DNA
tcctgggtccgagggaggag

SEQ ID NO: 11823 - DNA, 20 bp, synthetic construct
  misc_feature 1..20: note = chemically synthesized
  source 1..20: mol_type = other DNA
gggtccgagggaggaggggc

SEQ ID NO: 11824 - DNA, 20 bp, synthetic construct
  misc_feature 1..20: note = chemically synthesized
  source 1..20: mol_type = other DNA
ggtccgagggaggaggggct

SEQ ID NO: 11825 - DNA, 20 bp, synthetic construct
  misc_feature 1..20: note = chemically synthesized
  source 1..20: mol_type = other DNA
gtccgagggaggaggggctg

SEQ ID NO: 11826 - DNA, 20 bp, synthetic construct
  misc_feature 1..20: note = chemically synthesized
  source 1..20: mol_type = other DNA
agggaggaggggctggggcc

SEQ ID NO: 11827 - DNA, 20 bp, synthetic construct
  misc_feature 1..20: note = chemically synthesized
  source 1..20: mol_type = other DNA
ggggctggggcctggactcc

SEQ ID NO: 11828 - DNA, 20 bp, synthetic construct
  misc_feature 1..20: note = chemically synthesized
  source 1..20: mol_type = other DNA
gggctggggcctggactcct

SEQ ID NO: 11829 - DNA, 20 bp, synthetic construct
  misc_feature 1..20: note = chemically synthesized
  source 1..20: mol_type = other DNA
gggcctggactcctgggtct

SEQ ID NO: 11830 - DNA, 20 bp, synthetic construct
  misc_feature 1..20: note = chemically synthesized
  source 1..20: mol_type = other DNA
ggcctggactcctgggtctg

SEQ ID NO: 11831 - DNA, 20 bp, synthetic construct
  misc_feature 1..20: note = chemically synthesized
  source 1..20: mol_type = other DNA
gcctggactcctgggtctga

SEQ ID NO: 11832 - DNA, 20 bp, synthetic construct
  misc_feature 1..20: note = chemically synthesized
  source 1..20: mol_type = other DNA
tggactcctgggtctgaggg

SEQ ID NO: 11833 - DNA, 20 bp, synthetic construct
  misc_feature 1..20: note = chemically synthesized
  source 1..20: mol_type = other DNA
gactcctgggtctgagggtg

SEQ ID NO: 11834 - DNA, 20 bp, synthetic construct
  misc_feature 1..20: note = chemically synthesized
  source 1..20: mol_type = other DNA
actcctgggtctgagggtgg

SEQ ID NO: 11835 - DNA, 20 bp, synthetic construct
  misc_feature 1..20: note = chemically synthesized
  source 1..20: mol_type = other DNA
ctcctgggtctgagggtgga

SEQ ID NO: 11836 - DNA, 20 bp, synthetic construct
  misc_feature 1..20: note = chemically synthesized
  source 1..20: mol_type = other DNA
gggtctgagggtggagggac

SEQ ID NO: 11837 - DNA, 20 bp, synthetic construct
  misc_feature 1..20: note = chemically synthesized
  source 1..20: mol_type = other DNA
ggtctgagggtggagggact

SEQ ID NO: 11838 - DNA, 20 bp, synthetic construct
  misc_feature 1..20: note = chemically synthesized
  source 1..20: mol_type = other DNA
gtctgagggtggagggactg

SEQ ID NO: 11839 - DNA, 20 bp, synthetic construct
  misc_feature 1..20: note = chemically synthesized
  source 1..20: mol_type = other DNA
tctgagggtggagggactgg

SEQ ID NO: 11840 - DNA, 20 bp, synthetic construct
  misc_feature 1..20: note = chemically synthesized
  source 1..20: mol_type = other DNA
gggtggagggactgggggcc

SEQ ID NO: 11841 - DNA, 20 bp, synthetic construct
  misc_feature 1..20: note = chemically synthesized
  source 1..20: mol_type = other DNA
ggactgggggcctggactcc

SEQ ID NO: 11842 - DNA, 20 bp, synthetic construct
  misc_feature 1..20: note = chemically synthesized
  source 1..20: mol_type = other DNA
gactgggggcctggactcct

SEQ ID NO: 11843 - DNA, 20 bp, synthetic construct
  misc_feature 1..20: note = chemically synthesized
  source 1..20: mol_type = other DNA
gggcctggactcctgggtcc

SEQ ID NO: 11844 - DNA, 20 bp, synthetic construct
  misc_feature 1..20: note = chemically synthesized
  source 1..20: mol_type = other DNA
ggcctggactcctgggtccg

SEQ ID NO: 11845 - DNA, 20 bp, synthetic construct
  misc_feature 1..20: note = chemically synthesized
  source 1..20: mol_type = other DNA
gcctggactcctgggtccga

SEQ ID NO: 11846 - DNA, 20 bp, synthetic construct
  misc_feature 1..20: note = chemically synthesized
  source 1..20: mol_type = other DNA
ctggactcctgggtccgagg

SEQ ID NO: 11847 - DNA, 20 bp, synthetic construct
  misc_feature 1..20: note = chemically synthesized
  source 1..20: mol_type = other DNA
tggactcctgggtccgaggg

SEQ ID NO: 11848 - DNA, 20 bp, synthetic construct
  misc_feature 1..20: note = chemically synthesized
  source 1..20: mol_type = other DNA
gactcctgggtccgagggag

SEQ ID NO: 11849 - DNA, 20 bp, synthetic construct
  misc_feature 1..20: note = chemically synthesized
  source 1..20: mol_type = other DNA
actcctgggtccgagggagg

SEQ ID NO: 11850 - DNA, 20 bp, synthetic construct
  misc_feature 1..20: note = chemically synthesized
  source 1..20: mol_type = other DNA
ctcctgggtccgagggagga

SEQ ID NO: 11851 - DNA, 20 bp, synthetic construct
  misc_feature 1..20: note = chemically synthesized
  source 1..20: mol_type = other DNA
tcctgggtccgagggaggag

SEQ ID NO: 11852 - DNA, 20 bp, synthetic construct
  misc_feature 1..20: note = chemically synthesized
  source 1..20: mol_type = other DNA
gggtccgagggaggaggggc

SEQ ID NO: 11853 - DNA, 20 bp, synthetic construct
  misc_feature 1..20: note = chemically synthesized
  source 1..20: mol_type = other DNA
ggtccgagggaggaggggct

SEQ ID NO: 11854 - DNA, 20 bp, synthetic construct
  misc_feature 1..20: note = chemically synthesized
  source 1..20: mol_type = other DNA
gtccgagggaggaggggctg

SEQ ID NO: 11855 - DNA, 20 bp, synthetic construct
  misc_feature 1..20: note = chemically synthesized
  source 1..20: mol_type = other DNA
agggaggaggggctggggcc

SEQ ID NO: 11856 - DNA, 20 bp, synthetic construct
  misc_feature 1..20: note = chemically synthesized
  source 1..20: mol_type = other DNA
ggggctggggcctggactcg

SEQ ID NO: 11857 - DNA, 20 bp, synthetic construct
  misc_feature 1..20: note = chemically synthesized
  source 1..20: mol_type = other DNA
gggctggggcctggactcgt

SEQ ID NO: 11858 - DNA, 20 bp, synthetic construct
  misc_feature 1..20: note = chemically synthesized
  source 1..20: mol_type = other DNA
gggcctggactcgtgggtct

SEQ ID NO: 11859 - DNA, 20 bp, synthetic construct
  misc_feature 1..20: note = chemically synthesized
  source 1..20: mol_type = other DNA
ggcctggactcgtgggtctg

SEQ ID NO: 11860 - DNA, 20 bp, synthetic construct
  misc_feature 1..20: note = chemically synthesized
  source 1..20: mol_type = other DNA
gcctggactcgtgggtctga

SEQ ID NO: 11861 - DNA, 20 bp, synthetic construct
  misc_feature 1..20: note = chemically synthesized
  source 1..20: mol_type = other DNA
ctggactcgtgggtctgagg

SEQ ID NO: 11862 - DNA, 20 bp, synthetic construct
  misc_feature 1..20: note = chemically synthesized
  source 1..20: mol_type = other DNA
tggactcgtgggtctgaggg

SEQ ID NO: 11863 - DNA, 20 bp, synthetic construct
  misc_feature 1..20: note = chemically synthesized
  source 1..20: mol_type = other DNA
gactcgtgggtctgagggag

SEQ ID NO: 11864 - DNA, 20 bp, synthetic construct
  misc_feature 1..20: note = chemically synthesized
  source 1..20: mol_type = other DNA
actcgtgggtctgagggagg

SEQ ID NO: 11865 - DNA, 20 bp, synthetic construct
  misc_feature 1..20: note = chemically synthesized
  source 1..20: mol_type = other DNA
ctcgtgggtctgagggagga

SEQ ID NO: 11866 - DNA, 20 bp, synthetic construct
  misc_feature 1..20: note = chemically synthesized
  source 1..20: mol_type = other DNA
tcgtgggtctgagggaggag

SEQ ID NO: 11867 - DNA, 20 bp, synthetic construct
  misc_feature 1..20: note = chemically synthesized
  source 1..20: mol_type = other DNA
gggtctgagggaggaggggc

SEQ ID NO: 11868 - DNA, 20 bp, synthetic construct
  misc_feature 1..20: note = chemically synthesized
  source 1..20: mol_type = other DNA
ggtctgagggaggaggggct

SEQ ID NO: 11869 - DNA, 20 bp, synthetic construct
  misc_feature 1..20: note = chemically synthesized
  source 1..20: mol_type = other DNA
gtctgagggaggaggggctg

SEQ ID NO: 11870 - DNA, 20 bp, synthetic construct
  misc_feature 1..20: note = chemically synthesized
  source 1..20: mol_type = other DNA
tctgagggaggaggggctgg

SEQ ID NO: 11871 - DNA, 20 bp, synthetic construct
  misc_feature 1..20: note = chemically synthesized
  source 1..20: mol_type = other DNA
gggaggaggggctgggggcc

SEQ ID NO: 11872 - DNA, 20 bp, synthetic construct
  misc_feature 1..20: note = chemically synthesized
  source 1..20: mol_type = other DNA
gggctgggggcctggacttc

SEQ ID NO: 11873 - DNA, 20 bp, synthetic construct
  misc_feature 1..20: note = chemically synthesized
  source 1..20: mol_type = other DNA
ggctgggggcctggacttct

SEQ ID NO: 11874 - DNA, 20 bp, synthetic construct
  misc_feature 1..20: note = chemically synthesized
  source 1..20: mol_type = other DNA
gggcctggacttctgggtct

SEQ ID NO: 11875 - DNA, 20 bp, synthetic construct
  misc_feature 1..20: note = chemically synthesized
  source 1..20: mol_type = other DNA
ggcctggacttctgggtctt

SEQ ID NO: 11876 - DNA, 20 bp, synthetic construct
  misc_feature 1..20: note = chemically synthesized
  source 1..20: mol_type = other DNA
gcctggacttctgggtctta

SEQ ID NO: 11877 - DNA, 20 bp, synthetic construct
  misc_feature 1..20: note = chemically synthesized
  source 1..20: mol_type = other DNA
ctggacttctgggtcttagg

SEQ ID NO: 11878 - DNA, 20 bp, synthetic construct
  misc_feature 1..20: note = chemically synthesized
  source 1..20: mol_type = other DNA
tggacttctgggtcttaggg

SEQ ID NO: 11879 - DNA, 20 bp, synthetic construct
  misc_feature 1..20: note = chemically synthesized
  source 1..20: mol_type = other DNA
acttctgggtcttagggagg

SEQ ID NO: 11880 - DNA, 20 bp, synthetic construct
  misc_feature 1..20: note = chemically synthesized
  source 1..20: mol_type = other DNA
cttctgggtcttagggaggc

SEQ ID NO: 11881 - DNA, 20 bp, synthetic construct
  misc_feature 1..20: note = chemically synthesized
  source 1..20: mol_type = other DNA
ttctgggtcttagggaggcg

SEQ ID NO: 11882 - DNA, 20 bp, synthetic construct
  misc_feature 1..20: note = chemically synthesized
  source 1..20: mol_type = other DNA
gggtcttagggaggcggggc

SEQ ID NO: 11883 - DNA, 20 bp, synthetic construct
  misc_feature 1..20: note = chemically synthesized
  source 1..20: mol_type = other DNA
ggtcttagggaggcggggct

SEQ ID NO: 11884 - DNA, 20 bp, synthetic construct
  misc_feature 1..20: note = chemically synthesized
  source 1..20: mol_type = other DNA
tagggaggcggggctgggcc

SEQ ID NO: 11885 - DNA, 20 bp, synthetic construct
  misc_feature 1..20: note = chemically synthesized
  source 1..20: mol_type = other DNA
cggggctgggcctggacccc

SEQ ID NO: 11886 - DNA, 20 bp, synthetic construct
  misc_feature 1..20: note = chemically synthesized
  source 1..20: mol_type = other DNA
ggggctgggcctggacccct

SEQ ID NO: 11887 - DNA, 20 bp, synthetic construct
  misc_feature 1..20: note = chemically synthesized
  source 1..20: mol_type = other DNA
cctggacccctgggtctgaa

SEQ ID NO: 11888 - DNA, 20 bp, synthetic construct
  misc_feature 1..20: note = chemically synthesized
  source 1..20: mol_type = other DNA
ctggacccctgggtctgaat

SEQ ID NO: 11889 - DNA, 20 bp, synthetic construct
  misc_feature 1..20: note = chemically synthesized
  source 1..20: mol_type = other DNA
tggacccctgggtctgaatg

SEQ ID NO: 11890 - DNA, 20 bp, synthetic construct
  misc_feature 1..20: note = chemically synthesized
  source 1..20: mol_type = other DNA
gacccctgggtctgaatggg

SEQ ID NO: 11891 - DNA, 20 bp, synthetic construct
  misc_feature 1..20: note = chemically synthesized
  source 1..20: mol_type = other DNA
cccctgggtctgaatgggga

SEQ ID NO: 11892 - DNA, 20 bp, synthetic construct
  misc_feature 1..20: note = chemically synthesized
  source 1..20: mol_type = other DNA
ccctgggtctgaatggggag

SEQ ID NO: 11893 - DNA, 20 bp, synthetic construct
  misc_feature 1..20: note = chemically synthesized
  source 1..20: mol_type = other DNA
gggtctgaatggggagaggc

SEQ ID NO: 11894 - DNA, 20 bp, synthetic construct
  misc_feature 1..20: note = chemically synthesized
  source 1..20: mol_type = other DNA
ggtctgaatggggagaggct

SEQ ID NO: 11895 - DNA, 20 bp, synthetic construct
  misc_feature 1..20: note = chemically synthesized
  source 1..20: mol_type = other DNA
gtctgaatggggagaggctg

SEQ ID NO: 11896 - DNA, 20 bp, synthetic construct
  misc_feature 1..20: note = chemically synthesized
  source 1..20: mol_type = other DNA
tctgaatggggagaggctgg

SEQ ID NO: 11897 - DNA, 20 bp, synthetic construct
  misc_feature 1..20: note = chemically synthesized
  source 1..20: mol_type = other DNA
atggggagaggctgggggcc

SEQ ID NO: 11898 - DNA, 20 bp, synthetic construct
  misc_feature 1..20: note = chemically synthesized
  source 1..20: mol_type = other DNA
gggcctggactccttcatct

SEQ ID NO: 11899 - DNA, 20 bp, synthetic construct
  misc_feature 1..20: note = chemically synthesized
  source 1..20: mol_type = other DNA
ggcctggactccttcatctg

SEQ ID NO: 11900 - DNA, 20 bp, synthetic construct
  misc_feature 1..20: note = chemically synthesized
  source 1..20: mol_type = other DNA
gcctggactccttcatctga

SEQ ID NO: 11901 - DNA, 20 bp, synthetic construct
  misc_feature 1..20: note = chemically synthesized
  source 1..20: mol_type = other DNA
tggactccttcatctgaggg

SEQ ID NO: 11902 - DNA, 20 bp, synthetic construct
  misc_feature 1..20: note = chemically synthesized
  source 1..20: mol_type = other DNA
actccttcatctgagggcgg

SEQ ID NO: 11903 - DNA, 20 bp, synthetic construct
  misc_feature 1..20: note = chemically synthesized
  source 1..20: mol_type = other DNA
ctccttcatctgagggcgga

SEQ ID NO: 11904 - DNA, 20 bp, synthetic construct
  misc_feature 1..20: note = chemically synthesized
  source 1..20: mol_type = other DNA
tccttcatctgagggcggaa

SEQ ID NO: 11905 - DNA, 20 bp, synthetic construct
  misc_feature 1..20: note = chemically synthesized
  source 1..20: mol_type = other DNA
tcatctgagggcggaagggc

SEQ ID NO: 11906 - DNA, 20 bp, synthetic construct
  misc_feature 1..20: note = chemically synthesized
  source 1..20: mol_type = other DNA
catctgagggcggaagggct

SEQ ID NO: 11907 - DNA, 20 bp, synthetic construct
  misc_feature 1..20: note = chemically synthesized
  source 1..20: mol_type = other DNA
atctgagggcggaagggctg

SEQ ID NO: 11908 - DNA, 20 bp, synthetic construct
  misc_feature 1..20: note = chemically synthesized
  source 1..20: mol_type = other DNA
agggcggaagggctggggcc

SEQ ID NO: 11909 - DNA, 20 bp, synthetic construct
  misc_feature 1..20: note = chemically synthesized
  source 1..20: mol_type = other DNA
agggctggggcctggcctcc

SEQ ID NO: 11910 - DNA, 20 bp, synthetic construct
  misc_feature 1..20: note = chemically synthesized
  source 1..20: mol_type = other DNA
gggctggggcctggcctcct

SEQ ID NO: 11911 - DNA, 20 bp, synthetic construct
  misc_feature 1..20: note = chemically synthesized
  source 1..20: mol_type = other DNA
gcctggcctcctgggttgaa

SEQ ID NO: 11912 - DNA, 20 bp, synthetic construct
  misc_feature 1..20: note = chemically synthesized
  source 1..20: mol_type = other DNA
cctggcctcctgggttgaat

SEQ ID NO: 11913 - DNA, 20 bp, synthetic construct
  misc_feature 1..20: note = chemically synthesized
  source 1..20: mol_type = other DNA
ctggcctcctgggttgaatg

SEQ ID NO: 11914 - DNA, 20 bp, synthetic construct
  misc_feature 1..20: note = chemically synthesized
  source 1..20: mol_type = other DNA
ggcctcctgggttgaatggg

SEQ ID NO: 11915 - DNA, 20 bp, synthetic construct
  misc_feature 1..20: note = chemically synthesized
  source 1..20: mol_type = other DNA
gcctcctgggttgaatgggg

SEQ ID NO: 11916 - DNA, 20 bp, synthetic construct
  misc_feature 1..20: note = chemically synthesized
  source 1..20: mol_type = other DNA
cctcctgggttgaatgggga

SEQ ID NO: 11917 - DNA, 20 bp, synthetic construct
  misc_feature 1..20: note = chemically synthesized
  source 1..20: mol_type = other DNA
ctcctgggttgaatggggag

SEQ ID NO: 11918 - DNA, 20 bp, synthetic construct
  misc_feature 1..20: note = chemically synthesized
  source 1..20: mol_type = other DNA
tgggttgaatggggaggggt

SEQ ID NO: 11919 - DNA, 20 bp, synthetic construct
  misc_feature 1..20: note = chemically synthesized
  source 1..20: mol_type = other DNA
gggttgaatggggaggggtt

SEQ ID NO: 11920 - DNA, 20 bp, synthetic construct
  misc_feature 1..20: note = chemically synthesized
  source 1..20: mol_type = other DNA
gaatggggaggggttgggcc

SEQ ID NO: 11921 - DNA, 20 bp, synthetic construct
  misc_feature 1..20: note = chemically synthesized
  source 1..20: mol_type = other DNA
gaggggttgggcctggactc

SEQ ID NO: 11922 - DNA, 20 bp, synthetic construct
  misc_feature 1..20: note = chemically synthesized
  source 1..20: mol_type = other DNA
ggggttgggcctggactctg

SEQ ID NO: 11923 - DNA, 20 bp, synthetic construct
  misc_feature 1..20: note = chemically synthesized
  source 1..20: mol_type = other DNA
ggcctggactctggagtccc

SEQ ID NO: 11924 - DNA, 20 bp, synthetic construct
  misc_feature 1..20: note = chemically synthesized
  source 1..20: mol_type = other DNA
actctggagtccctggtgcc

SEQ ID NO: 11925 - DNA, 20 bp, synthetic construct
  misc_feature 1..20: note = chemically synthesized
  source 1..20: mol_type = other DNA
ctctggagtccctggtgccc

SEQ ID NO: 11926 - DNA, 20 bp, synthetic construct
  misc_feature 1..20: note = chemically synthesized
  source 1..20: mol_type = other DNA
agtccctggtgcccaggcct

SEQ ID NO: 11927 - DNA, 20 bp, synthetic construct
  misc_feature 1..20: note = chemically synthesized
  source 1..20: mol_type = other DNA
gtccctggtgcccaggcctc

SEQ ID NO: 11928 - DNA, 20 bp, synthetic construct
  misc_feature 1..20: note = chemically synthesized
  source 1..20: mol_type = other DNA
caggcctcaggcatctttca

SEQ ID NO: 11929 - DNA, 20 bp, synthetic construct
  misc_feature 1..20: note = chemically synthesized
  source 1..20: mol_type = other DNA
aggcctcaggcatctttcac

SEQ ID NO: 11930 - DNA, 20 bp, synthetic construct
  misc_feature 1..20: note = chemically synthesized
  source 1..20: mol_type = other DNA
ggcctcaggcatctttcaca

SEQ ID NO: 11931 - DNA, 20 bp, synthetic construct
  misc_feature 1..20: note = chemically synthesized
  source 1..20: mol_type = other DNA
tttcacagggatgcctgtac

SEQ ID NO: 11932 - DNA, 20 bp, synthetic construct
  misc_feature 1..20: note = chemically synthesized
  source 1..20: mol_type = other DNA
ttcacagggatgcctgtact

SEQ ID NO: 11933 - DNA, 20 bp, synthetic construct
  misc_feature 1..20: note = chemically synthesized
  source 1..20: mol_type = other DNA
acagggatgcctgtactggg

SEQ ID NO: 11934 - DNA, 20 bp, synthetic construct
  misc_feature 1..20: note = chemically synthesized
  source 1..20: mol_type = other DNA
cagggatgcctgtactgggc

SEQ ID NO: 11935 - DNA, 20 bp, synthetic construct
  misc_feature 1..20: note = chemically synthesized
  source 1..20: mol_type = other DNA
tgtactgggcaggtccttga

SEQ ID NO: 11936 - DNA, 20 bp, synthetic construct
  misc_feature 1..20: note = chemically synthesized
  source 1..20: mol_type = other DNA
gtactgggcaggtccttgaa

SEQ ID NO: 11937 - DNA, 20 bp, synthetic construct
  misc_feature 1..20: note = chemically synthesized
  source 1..20: mol_type = other DNA
tactgggcaggtccttgaaa

SEQ ID NO: 11938 - DNA, 20 bp, synthetic construct
  misc_feature 1..20: note = chemically synthesized
  source 1..20: mol_type = other DNA
gggcaggtccttgaaaggga

SEQ ID NO: 11939 - DNA, 20 bp, synthetic construct
  misc_feature 1..20: note = chemically synthesized
  source 1..20: mol_type = other DNA
ggcaggtccttgaaagggaa

SEQ ID NO: 11940 - DNA, 20 bp, synthetic construct
  misc_feature 1..20: note = chemically synthesized
  source 1..20: mol_type = other DNA
tcccctatcgccatgacaac

SEQ ID NO: 11941 - DNA, 20 bp, synthetic construct
  misc_feature 1..20: note = chemically synthesized
  source 1..20: mol_type = other DNA
cccctatcgccatgacaact

SEQ ID NO: 11942 - DNA, 20 bp, synthetic construct
  misc_feature 1..20: note = chemically synthesized
  source 1..20: mol_type = other DNA
ctatcgccatgacaactggg

SEQ ID NO: 11943 - DNA, 20 bp, synthetic construct
  misc_feature 1..20: note = chemically synthesized
  source 1..20: mol_type = other DNA
acaactgggtggaaataaac

SEQ ID NO: 11944 - DNA, 20 bp, synthetic construct
  misc_feature 1..20: note = chemically synthesized
  source 1..20: mol_type = other DNA
tgggtggaaataaacgagcc

SEQ ID NO: 11945 - DNA, 20 bp, synthetic construct
  misc_feature 1..20: note = chemically synthesized
  source 1..20: mol_type = other DNA
agccgagttcatcccgttcc

SEQ ID NO: 11946 - DNA, 20 bp, synthetic construct
  misc_feature 1..20: note = chemically synthesized
  source 1..20: mol_type = other DNA
gccgagttcatcccgttccc

SEQ ID NO: 11947 - DNA, 20 bp, synthetic construct
  misc_feature 1..20: note = chemically synthesized
  source 1..20: mol_type = other DNA
ccgagttcatcccgttccca

SEQ ID NO: 11948 - DNA, 20 bp, synthetic construct
  misc_feature 1..20: note = chemically synthesized
  source 1..20: mol_type = other DNA
tcccgttcccagggcacgtg

SEQ ID NO: 11949 - DNA, 20 bp, synthetic construct
  misc_feature 1..20: note = chemically synthesized
  source 1..20: mol_type = other DNA
gggcacgtgcggccccttca

SEQ ID NO: 11950 - DNA, 20 bp, synthetic construct
  misc_feature 1..20: note = chemically synthesized
  source 1..20: mol_type = other DNA
gtgcggccccttcacagccc

SEQ ID NO: 11951 - DNA, 20 bp, synthetic construct
  misc_feature 1..20: note = chemically synthesized
  source 1..20: mol_type = other DNA
tttccatgacctcatgctct

SEQ ID NO: 11952 - DNA, 20 bp, synthetic construct
  misc_feature 1..20: note = chemically synthesized
  source 1..20: mol_type = other DNA
cctcatgctcttggccctcg

SEQ ID NO: 11953 - DNA, 20 bp, synthetic construct
  misc_feature 1..20: note = chemically synthesized
  source 1..20: mol_type = other DNA
tagctccctcccgcctcctc

SEQ ID NO: 11954 - DNA, 20 bp, synthetic construct
  misc_feature 1..20: note = chemically synthesized
  source 1..20: mol_type = other DNA
tccctcccgcctcctccaga

SEQ ID NO: 11955 - DNA, 20 bp, synthetic construct
  misc_feature 1..20: note = chemically synthesized
  source 1..20: mol_type = other DNA
ccctcccgcctcctccagat

SEQ ID NO: 11956 - DNA, 20 bp, synthetic construct
  misc_feature 1..20: note = chemically synthesized
  source 1..20: mol_type = other DNA
tcccgcctcctccagatggg

SEQ ID NO: 11957 - DNA, 20 bp, synthetic construct
  misc_feature 1..20: note = chemically synthesized
  source 1..20: mol_type = other DNA
ctcctccagatgggcagctt

SEQ ID NO: 11958 - DNA, 20 bp, synthetic construct
  misc_feature 1..20: note = chemically synthesized
  source 1..20: mol_type = other DNA
cctccagatgggcagctttg

SEQ ID NO: 11959 - DNA, 20 bp, synthetic construct
  misc_feature 1..20: note = chemically synthesized
  source 1..20: mol_type = other DNA
tccagatgggcagctttgga

SEQ ID NO: 11960 - DNA, 20 bp, synthetic construct
  misc_feature 1..20: note = chemically synthesized
  source 1..20: mol_type = other DNA
ccagatgggcagctttggag

SEQ ID NO: 11961 - DNA, 20 bp, synthetic construct
  misc_feature 1..20: note = chemically synthesized
  source 1..20: mol_type = other DNA
atgggcagctttggagaggt

SEQ ID NO: 11962 - DNA, 20 bp, synthetic construct
  misc_feature 1..20: note = chemically synthesized
  source 1..20: mol_type = other DNA
tgggcagctttggagaggtg

SEQ ID NO: 11963 - DNA, 20 bp, synthetic construct
  misc_feature 1..20: note = chemically synthesized
  source 1..20: mol_type = other DNA
gggcagctttggagaggtga

SEQ ID NO: 11964 - DNA, 20 bp, synthetic construct
  misc_feature 1..20: note = chemically synthesized
  source 1..20: mol_type = other DNA
ctttggagaggtgagggact

SEQ ID NO: 11965 - DNA, 20 bp, synthetic construct
  misc_feature 1..20: note = chemically synthesized
  source 1..20: mol_type = other DNA
tttggagaggtgagggactt

SEQ ID NO: 11966 - DNA, 20 bp, synthetic construct
  misc_feature 1..20: note = chemically synthesized
  source 1..20: mol_type = other DNA
ttggagaggtgagggacttg

SEQ ID NO: 11967 - DNA, 20 bp, synthetic construct
  misc_feature 1..20: note = chemically synthesized
  source 1..20: mol_type = other DNA
tggagaggtgagggacttgg

SEQ ID NO: 11968 - DNA, 20 bp, synthetic construct
  misc_feature 1..20: note = chemically synthesized
  source 1..20: mol_type = other DNA
ggagaggtgagggacttggg

SEQ ID NO: 11969 - DNA, 20 bp, synthetic construct
  misc_feature 1..20: note = chemically synthesized
  source 1..20: mol_type = other DNA
ttggggggtaatttatcccg

SEQ ID NO: 11970 - DNA, 20 bp, synthetic construct
  misc_feature 1..20: note = chemically synthesized
  source 1..20: mol_type = other DNA
ggtaatttatcccgtggatc

SEQ ID NO: 11971 - DNA, 20 bp, synthetic construct
  misc_feature 1..20: note = chemically synthesized
  source 1..20: mol_type = other DNA
gtaatttatcccgtggatct

SEQ ID NO: 11972 - DNA, 20 bp, synthetic construct
  misc_feature 1..20: note = chemically synthesized
  source 1..20: mol_type = other DNA
aatttatcccgtggatctag

SEQ ID NO: 11973 - DNA, 20 bp, synthetic construct
  misc_feature 1..20: note = chemically synthesized
  source 1..20: mol_type = other DNA
atcccgtggatctaggagtt

SEQ ID NO: 11974 - DNA, 20 bp, synthetic construct
  misc_feature 1..20: note = chemically synthesized
  source 1..20: mol_type = other DNA
gtttagcttcactccttcct

SEQ ID NO: 11975 - DNA, 20 bp, synthetic construct
  misc_feature 1..20: note = chemically synthesized
  source 1..20: mol_type = other DNA
cttcactccttcctcagctc

SEQ ID NO: 11976 - DNA, 20 bp, synthetic construct
  misc_feature 1..20: note = chemically synthesized
  source 1..20: mol_type = other DNA
ctccttcctcagctccagtt

SEQ ID NO: 11977 - DNA, 20 bp, synthetic construct
  misc_feature 1..20: note = chemically synthesized
  source 1..20: mol_type = other DNA
tccttcctcagctccagttc

SEQ ID NO: 11978 - DNA, 20 bp, synthetic construct
  misc_feature 1..20: note = chemically synthesized
  source 1..20: mol_type = other DNA
ctcagctccagttcaggtcc

SEQ ID NO: 11979 - DNA, 20 bp, synthetic construct
  misc_feature 1..20: note = chemically synthesized
  source 1..20: mol_type = other DNA
cagctccagttcaggtcccg

SEQ ID NO: 11980 - DNA, 20 bp, synthetic construct
  misc_feature 1..20: note = chemically synthesized
  source 1..20: mol_type = other DNA
ttcaggtcccggagcccacc

SEQ ID NO: 11981 - DNA, 20 bp, synthetic construct
  misc_feature 1..20: note = chemically synthesized
  source 1..20: mol_type = other DNA
ggagcccacccagtgtccac

SEQ ID NO: 11982 - DNA, 20 bp, synthetic construct
  misc_feature 1..20: note = chemically synthesized
  source 1..20: mol_type = other DNA
gagcccacccagtgtccaca

SEQ ID NO: 11983 - DNA, 20 bp, synthetic construct
  misc_feature 1..20: note = chemically synthesized
  source 1..20: mol_type = other DNA
cacccagtgtccacaaggcc

SEQ ID NO: 11984 - DNA, 20 bp, synthetic construct
  misc_feature 1..20: note = chemically synthesized
  source 1..20: mol_type = other DNA
acccagtgtccacaaggcct

SEQ ID NO: 11985 - DNA, 20 bp, synthetic construct
  misc_feature 1..20: note = chemically synthesized
  source 1..20: mol_type = other DNA
cccagtgtccacaaggcctg

SEQ ID NO: 11986 - DNA, 20 bp, synthetic construct
  misc_feature 1..20: note = chemically synthesized
  source 1..20: mol_type = other DNA
gtgtccacaaggcctggggc

SEQ ID NO: 11987 - DNA, 20 bp, synthetic construct
  misc_feature 1..20: note = chemically synthesized
  source 1..20: mol_type = other DNA
aagtccctcctccgaccccc

SEQ ID NO: 11988 - DNA, 20 bp, synthetic construct
  misc_feature 1..20: note = chemically synthesized
  source 1..20: mol_type = other DNA
tcctccgaccccctggactt

SEQ ID NO: 11989 - DNA, 20 bp, synthetic construct
  misc_feature 1..20: note = chemically synthesized
  source 1..20: mol_type = other DNA
acttcggcttttgtcccccc

SEQ ID NO: 11990 - DNA, 20 bp, synthetic construct
  misc_feature 1..20: note = chemically synthesized
  source 1..20: mol_type = other DNA
gcttttgtccccccaagttt

SEQ ID NO: 11991 - DNA, 20 bp, synthetic construct
  misc_feature 1..20: note = chemically synthesized
  source 1..20: mol_type = other DNA
cccccaagttttggacccct

SEQ ID NO: 11992 - DNA, 20 bp, synthetic construct
  misc_feature 1..20: note = chemically synthesized
  source 1..20: mol_type = other DNA
ccccaagttttggaccccta

SEQ ID NO: 11993 - DNA, 20 bp, synthetic construct
  misc_feature 1..20: note = chemically synthesized
  source 1..20: mol_type = other DNA
cccaagttttggacccctaa

SEQ ID NO: 11994 - DNA, 20 bp, synthetic construct
  misc_feature 1..20: note = chemically synthesized
  source 1..20: mol_type = other DNA
aagttttggacccctaaggg

SEQ ID NO: 11995 - DNA, 20 bp, synthetic construct
  misc_feature 1..20: note = chemically synthesized
  source 1..20: mol_type = other DNA
tggacccctaagggaagaat

SEQ ID NO: 11996 - DNA, 20 bp, synthetic construct
  misc_feature 1..20: note = chemically synthesized
  source 1..20: mol_type = other DNA
cctaagggaagaatgagaaa

SEQ ID NO: 11997 - DNA, 20 bp, synthetic construct
  misc_feature 1..20: note = chemically synthesized
  source 1..20: mol_type = other DNA
aagggaagaatgagaaacgg

SEQ ID NO: 11998 - DNA, 20 bp, synthetic construct
  misc_feature 1..20: note = chemically synthesized
  source 1..20: mol_type = other DNA
tgagaaacggtggcccgtgt

SEQ ID NO: 11999 - DNA, 20 bp, synthetic construct
  misc_feature 1..20: note = chemically synthesized
  source 1..20: mol_type = other DNA
cggtggcccgtgtcagcccc

SEQ ID NO: 12000 - DNA, 20 bp, synthetic construct
  misc_feature 1..20: note = chemically synthesized
  source 1..20: mol_type = other DNA
cccgtgtcagcccctggctg

SEQ ID NO: 12001 - DNA, 20 bp, synthetic construct
  misc_feature 1..20: note = chemically synthesized
  source 1..20: mol_type = other DNA
ccgtgtcagcccctggctgc

SEQ ID NO: 12002 - DNA, 20 bp, synthetic construct
  misc_feature 1..20: note = chemically synthesized
  source 1..20: mol_type = other DNA
cgtgtcagcccctggctgca

SEQ ID NO: 12003 - DNA, 20 bp, synthetic construct
  misc_feature 1..20: note = chemically synthesized
  source 1..20: mol_type = other DNA
cctggctgcagggccccgtg

SEQ ID NO: 12004 - DNA, 20 bp, synthetic construct
  misc_feature 1..20: note = chemically synthesized
  source 1..20: mol_type = other DNA
tggctgcagggccccgtgca

SEQ ID NO: 12005 - DNA, 20 bp, synthetic construct
  misc_feature 1..20: note = chemically synthesized
  source 1..20: mol_type = other DNA
ggctgcagggccccgtgcag

SEQ ID NO: 12006 - DNA, 20 bp, synthetic construct
  misc_feature 1..20: note = chemically synthesized
  source 1..20: mol_type = other DNA
gctgcagggccccgtgcaga

SEQ ID NO: 12007 - DNA, 20 bp, synthetic construct
  misc_feature 1..20: note = chemically synthesized
  source 1..20: mol_type = other DNA
ctgcagggccccgtgcagag

SEQ ID NO: 12008 - DNA, 20 bp, synthetic construct
  misc_feature 1..20: note = chemically synthesized
  source 1..20: mol_type = other DNA
tgcagggccccgtgcagagg

SEQ ID NO: 12009 - DNA, 20 bp, synthetic construct
  misc_feature 1..20: note = chemically synthesized
  source 1..20: mol_type = other DNA
gccccgtgcagagggggcct

SEQ ID NO: 12010 - DNA, 20 bp, synthetic construct
  misc_feature 1..20: note = chemically synthesized
  source 1..20: mol_type = other DNA
cagagggggcctcagtgaac

SEQ ID NO: 12011 - DNA, 20 bp, synthetic construct
  misc_feature 1..20: note = chemically synthesized
  source 1..20: mol_type = other DNA
gagggggcctcagtgaactg

SEQ ID NO: 12012 - DNA, 20 bp, synthetic construct
  misc_feature 1..20: note = chemically synthesized
  source 1..20: mol_type = other DNA
ctcagtgaactggagtgtga

SEQ ID NO: 12013 - DNA, 20 bp, synthetic construct
  misc_feature 1..20: note = chemically synthesized
  source 1..20: mol_type = other DNA
tgaactggagtgtgacagcc

SEQ ID NO: 12014 - DNA, 20 bp, synthetic construct
  misc_feature 1..20: note = chemically synthesized
  source 1..20: mol_type = other DNA
gaactggagtgtgacagcct

SEQ ID NO: 12015 - DNA, 20 bp, synthetic construct
  misc_feature 1..20: note = chemically synthesized
  source 1..20: mol_type = other DNA
aactggagtgtgacagcctg

SEQ ID NO: 12016 - DNA, 20 bp, synthetic construct
  misc_feature 1..20: note = chemically synthesized
  source 1..20: mol_type = other DNA
gagtgtgacagcctggggcc

SEQ ID NO: 12017 - DNA, 20 bp, synthetic construct
  misc_feature 1..20: note = chemically synthesized
  source 1..20: mol_type = other DNA
agtgtgacagcctggggccc

SEQ ID NO: 12018 - DNA, 20 bp, synthetic construct
  misc_feature 1..20: note = chemically synthesized
  source 1..20: mol_type = other DNA
cagcctggggcccaggcaca

SEQ ID NO: 12019 - DNA, 20 bp, synthetic construct
  misc_feature 1..20: note = chemically synthesized
  source 1..20: mol_type = other DNA
agcctggggcccaggcacac

SEQ ID NO: 12020 - DNA, 20 bp, synthetic construct
  misc_feature 1..20: note = chemically synthesized
  source 1..20: mol_type = other DNA
ggcccaggcacacaggtgtg

SEQ ID NO: 12021 - DNA, 20 bp, synthetic construct
  misc_feature 1..20: note = chemically synthesized
  source 1..20: mol_type = other DNA
gtgcagctgtctcacccctc

SEQ ID NO: 12022 - DNA, 20 bp, synthetic construct
  misc_feature 1..20: note = chemically synthesized
  source 1..20: mol_type = other DNA
tgcagctgtctcacccctct

SEQ ID NO: 12023 - DNA, 20 bp, synthetic construct
  misc_feature 1..20: note = chemically synthesized
  source 1..20: mol_type = other DNA
cagctgtctcacccctctgg

SEQ ID NO: 12024 - DNA, 20 bp, synthetic construct
  misc_feature 1..20: note = chemically synthesized
  source 1..20: mol_type = other DNA
acccctctgggagtcccgcc

SEQ ID NO: 12025 - DNA, 20 bp, synthetic construct
  misc_feature 1..20: note = chemically synthesized
  source 1..20: mol_type = other DNA
cccctctgggagtcccgccc

SEQ ID NO: 12026 - DNA, 20 bp, synthetic construct
  misc_feature 1..20: note = chemically synthesized
  source 1..20: mol_type = other DNA
ggagtcccgcccaggcccct

SEQ ID NO: 12027 - DNA, 20 bp, synthetic construct
  misc_feature 1..20: note = chemically synthesized
  source 1..20: mol_type = other DNA
ccaggcccctgagtctgtcc

SEQ ID NO: 12028 - DNA, 20 bp, synthetic construct
  misc_feature 1..20: note = chemically synthesized
  source 1..20: mol_type = other DNA
cccctgagtctgtcccagca

SEQ ID NO: 12029 - DNA, 20 bp, synthetic construct
  misc_feature 1..20: note = chemically synthesized
  source 1..20: mol_type = other DNA
ccctgagtctgtcccagcac

SEQ ID NO: 12030 - DNA, 20 bp, synthetic construct
  misc_feature 1..20: note = chemically synthesized
  source 1..20: mol_type = other DNA
cctgagtctgtcccagcaca

SEQ ID NO: 12031 - DNA, 20 bp, synthetic construct
  misc_feature 1..20: note = chemically synthesized
  source 1..20: mol_type = other DNA
gagtctgtcccagcacaggg

SEQ ID NO: 12032 - DNA, 20 bp, synthetic construct
  misc_feature 1..20: note = chemically synthesized
  source 1..20: mol_type = other DNA
tggccttcctccaccctgca

SEQ ID NO: 12033 - DNA, 20 bp, synthetic construct
  misc_feature 1..20: note = chemically synthesized
  source 1..20: mol_type = other DNA
tcctccaccctgcatagccc

SEQ ID NO: 12034 - DNA, 20 bp, synthetic construct
  misc_feature 1..20: note = chemically synthesized
  source 1..20: mol_type = other DNA
cctccaccctgcatagccct

SEQ ID NO: 12035 - DNA, 20 bp, synthetic construct
  misc_feature 1..20: note = chemically synthesized
  source 1..20: mol_type = other DNA
cctgcatagccctgggccca

SEQ ID NO: 12036 - DNA, 20 bp, synthetic construct
  misc_feature 1..20: note = chemically synthesized
  source 1..20: mol_type = other DNA
ggcccacggcttcgttcctg

SEQ ID NO: 12037 - DNA, 20 bp, synthetic construct
  misc_feature 1..20: note = chemically synthesized
  source 1..20: mol_type = other DNA
cccacggcttcgttcctgca

SEQ ID NO: 12038 - DNA, 20 bp, synthetic construct
  misc_feature 1..20: note = chemically synthesized
  source 1..20: mol_type = other DNA
cgttcctgcagagtatctgc

SEQ ID NO: 12039 - DNA, 20 bp, synthetic construct
  misc_feature 1..20: note = chemically synthesized
  source 1..20: mol_type = other DNA
gttcctgcagagtatctgct

SEQ ID NO: 12040 - DNA, 20 bp, synthetic construct
  misc_feature 1..20: note = chemically synthesized
  source 1..20: mol_type = other DNA
ttcctgcagagtatctgctg

SEQ ID NO: 12041 - DNA, 20 bp, synthetic construct
  misc_feature 1..20: note = chemically synthesized
  source 1..20: mol_type = other DNA
ctgcagagtatctgctgggg

SEQ ID NO: 12042 - DNA, 20 bp, synthetic construct
  misc_feature 1..20: note = chemically synthesized
  source 1..20: mol_type = other DNA
tatctgctggggtggtttcc

SEQ ID NO: 12043 - DNA, 20 bp, synthetic construct
  misc_feature 1..20: note = chemically synthesized
  source 1..20: mol_type = other DNA
tggtttccgagcttgaccct

SEQ ID NO: 12044 - DNA, 20 bp, synthetic construct
  misc_feature 1..20: note = chemically synthesized
  source 1..20: mol_type = other DNA
tttccgagcttgacccttgg

SEQ ID NO: 12045 - DNA, 20 bp, synthetic construct
  misc_feature 1..20: note = chemically synthesized
  source 1..20: mol_type = other DNA
ttccgagcttgacccttgga

SEQ ID NO: 12046 - DNA, 20 bp, synthetic construct
  misc_feature 1..20: note = chemically synthesized
  source 1..20: mol_type = other DNA
gcttgacccttggaaggacc

SEQ ID NO: 12047 - DNA, 20 bp, synthetic construct
  misc_feature 1..20: note = chemically synthesized
  source 1..20: mol_type = other DNA
gacccttggaaggacctggc

SEQ ID NO: 12048 - DNA, 20 bp, synthetic construct
  misc_feature 1..20: note = chemically synthesized
  source 1..20: mol_type = other DNA
acccttggaaggacctggct

SEQ ID NO: 12049 - DNA, 20 bp, synthetic construct
  misc_feature 1..20: note = chemically synthesized
  source 1..20: mol_type = other DNA
ggaaggacctggctgggttt

SEQ ID NO: 12050 - DNA, 20 bp, synthetic construct
  misc_feature 1..20: note = chemically synthesized
  source 1..20: mol_type = other DNA
gaaggacctggctgggttta

SEQ ID NO: 12051 - DNA, 20 bp, synthetic construct
  misc_feature 1..20: note = chemically synthesized
  source 1..20: mol_type = other DNA
ggacctggctgggtttaagg

SEQ ID NO: 12052 - DNA, 20 bp, synthetic construct
  misc_feature 1..20: note = chemically synthesized
  source 1..20: mol_type = other DNA
gacctggctgggtttaaggc

SEQ ID NO: 12053 - DNA, 20 bp, synthetic construct
  misc_feature 1..20: note = chemically synthesized
  source 1..20: mol_type = other DNA
cctggctgggtttaaggcag

SEQ ID NO: 12054 - DNA, 20 bp, synthetic construct
  misc_feature 1..20: note = chemically synthesized
  source 1..20: mol_type = other DNA
ctggctgggtttaaggcagg

SEQ ID NO: 12055 - DNA, 20 bp, synthetic construct
  misc_feature 1..20: note = chemically synthesized
  source 1..20: mol_type = other DNA
tggctgggtttaaggcagga

SEQ ID NO: 12056 - DNA, 20 bp, synthetic construct
  misc_feature 1..20: note = chemically synthesized
  source 1..20: mol_type = other DNA
ggctgggtttaaggcaggag

SEQ ID NO: 12057 - DNA, 20 bp, synthetic construct
  misc_feature 1..20: note = chemically synthesized
  source 1..20: mol_type = other DNA
gggtttaaggcaggaggggc

SEQ ID NO: 12058 - DNA, 20 bp, synthetic construct
  misc_feature 1..20: note = chemically synthesized
  source 1..20: mol_type = other DNA
ggtttaaggcaggaggggct

SEQ ID NO: 12059 - DNA, 20 bp, synthetic construct
  misc_feature 1..20: note = chemically synthesized
  source 1..20: mol_type = other DNA
gtttaaggcaggaggggctg

SEQ ID NO: 12060 - DNA, 20 bp, synthetic construct
  misc_feature 1..20: note = chemically synthesized
  source 1..20: mol_type = other DNA
tttaaggcaggaggggctgg

SEQ ID NO: 12061 - DNA, 20 bp, synthetic construct
  misc_feature 1..20: note = chemically synthesized
  source 1..20: mol_type = other DNA
aggcaggaggggctgggggc

SEQ ID NO: 12062 - DNA, 20 bp, synthetic construct
  misc_feature 1..20: note = chemically synthesized
  source 1..20: mol_type = other DNA
ggcaggaggggctgggggcc

SEQ ID NO: 12063 - DNA, 20 bp, synthetic construct
  misc_feature 1..20: note = chemically synthesized
  source 1..20: mol_type = other DNA
gggctgggggccaggactcc

SEQ ID NO: 12064 - DNA, 20 bp, synthetic construct
  misc_feature 1..20: note = chemically synthesized
  source 1..20: mol_type = other DNA
ggccaggactcctggctctg

SEQ ID NO: 12065 - DNA, 20 bp, synthetic construct
  misc_feature 1..20: note = chemically synthesized
  source 1..20: mol_type = other DNA
gccaggactcctggctctga

SEQ ID NO: 12066 - DNA, 20 bp, synthetic construct
  misc_feature 1..20: note = chemically synthesized
  source 1..20: mol_type = other DNA
caggactcctggctctgaag

SEQ ID NO: 12067 - DNA, 20 bp, synthetic construct
  misc_feature 1..20: note = chemically synthesized
  source 1..20: mol_type = other DNA
aggactcctggctctgaagg

SEQ ID NO: 12068 - DNA, 20 bp, synthetic construct
  misc_feature 1..20: note = chemically synthesized
  source 1..20: mol_type = other DNA
gactcctggctctgaaggag

SEQ ID NO: 12069 - DNA, 20 bp, synthetic construct
  misc_feature 1..20: note = chemically synthesized
  source 1..20: mol_type = other DNA
actcctggctctgaaggagg

SEQ ID NO: 12070 - DNA, 20 bp, synthetic construct
  misc_feature 1..20: note = chemically synthesized
  source 1..20: mol_type = other DNA
ctcctggctctgaaggagga

SEQ ID NO: 12071 - DNA, 20 bp, synthetic construct
  misc_feature 1..20: note = chemically synthesized
  source 1..20: mol_type = other DNA
tcctggctctgaaggaggag

SEQ ID NO: 12072 - DNA, 20 bp, synthetic construct
  misc_feature 1..20: note = chemically synthesized
  source 1..20: mol_type = other DNA
ggctctgaaggaggaggggc

SEQ ID NO: 12073 - DNA, 20 bp, synthetic construct
  misc_feature 1..20: note = chemically synthesized
  source 1..20: mol_type = other DNA
aggggctggaacctcttccc

SEQ ID NO: 12074 - DNA, 20 bp, synthetic construct
  misc_feature 1..20: note = chemically synthesized
  source 1..20: mol_type = other DNA
tggaacctcttccctagtct

SEQ ID NO: 12075 - DNA, 20 bp, synthetic construct
  misc_feature 1..20: note = chemically synthesized
  source 1..20: mol_type = other DNA
ctcttccctagtctgagcac

SEQ ID NO: 12076 - DNA, 20 bp, synthetic construct
  misc_feature 1..20: note = chemically synthesized
  source 1..20: mol_type = other DNA
ttccctagtctgagcactgg

SEQ ID NO: 12077 - DNA, 20 bp, synthetic construct
  misc_feature 1..20: note = chemically synthesized
  source 1..20: mol_type = other DNA
agcactggaagcgccacctg

SEQ ID NO: 12078 - DNA, 20 bp, synthetic construct
  misc_feature 1..20: note = chemically synthesized
  source 1..20: mol_type = other DNA
gcactggaagcgccacctgt

SEQ ID NO: 12079 - DNA, 20 bp, synthetic construct
  misc_feature 1..20: note = chemically synthesized
  source 1..20: mol_type = other DNA
ctggaagcgccacctgtggg

SEQ ID NO: 12080 - DNA, 20 bp, synthetic construct
  misc_feature 1..20: note = chemically synthesized
  source 1..20: mol_type = other DNA
gcgccacctgtgggtggtga

SEQ ID NO: 12081 - DNA, 20 bp, synthetic construct
  misc_feature 1..20: note = chemically synthesized
  source 1..20: mol_type = other DNA
cgccacctgtgggtggtgac

SEQ ID NO: 12082 - DNA, 20 bp, synthetic construct
  misc_feature 1..20: note = chemically synthesized
  source 1..20: mol_type = other DNA
gccacctgtgggtggtgacg

SEQ ID NO: 12083 - DNA, 20 bp, synthetic construct
  misc_feature 1..20: note = chemically synthesized
  source 1..20: mol_type = other DNA
ccacctgtgggtggtgacgg

SEQ ID NO: 12084 - DNA, 20 bp, synthetic construct
  misc_feature 1..20: note = chemically synthesized
  source 1..20: mol_type = other DNA
gggggttttgccgtgtctaa

SEQ ID NO: 12085 - DNA, 20 bp, synthetic construct
  misc_feature 1..20: note = chemically synthesized
  source 1..20: mol_type = other DNA
ggggttttgccgtgtctaac

SEQ ID NO: 12086 - DNA, 20 bp, synthetic construct
  misc_feature 1..20: note = chemically synthesized
  source 1..20: mol_type = other DNA
cgtgtctaacaggtaccatg

SEQ ID NO: 12087 - DNA, 20 bp, synthetic construct
  misc_feature 1..20: note = chemically synthesized
  source 1..20: mol_type = other DNA
gtgtctaacaggtaccatgt

SEQ ID NO: 12088 - DNA, 20 bp, synthetic construct
  misc_feature 1..20: note = chemically synthesized
  source 1..20: mol_type = other DNA
tgtctaacaggtaccatgtg

SEQ ID NO: 12089 - DNA, 20 bp, synthetic construct
  misc_feature 1..20: note = chemically synthesized
  source 1..20: mol_type = other DNA
ccatgtggggttcccgcacc

SEQ ID NO: 12090 - DNA, 20 bp, synthetic construct
  misc_feature 1..20: note = chemically synthesized
  source 1..20: mol_type = other DNA
tggggttcccgcacccagat

SEQ ID NO: 12091 - DNA, 20 bp, synthetic construct
  misc_feature 1..20: note = chemically synthesized
  source 1..20: mol_type = other DNA
ggttcccgcacccagatgag

SEQ ID NO: 12092 - DNA, 20 bp, synthetic construct
  misc_feature 1..20: note = chemically synthesized
  source 1..20: mol_type = other DNA
ccccgttcacttcctgtttg

SEQ ID NO: 12093 - DNA, 20 bp, synthetic construct
  misc_feature 1..20: note = chemically synthesized
  source 1..20: mol_type = other DNA
gttcacttcctgtttgcaga

SEQ ID NO: 12094 - DNA, 20 bp, synthetic construct
  misc_feature 1..20: note = chemically synthesized
  source 1..20: mol_type = other DNA
acttcctgtttgcagatagc

SEQ ID NO: 12095 - DNA, 20 bp, synthetic construct
  misc_feature 1..20: note = chemically synthesized
  source 1..20: mol_type = other DNA
cttcctgtttgcagatagcc

SEQ ID NO: 12096 - DNA, 20 bp, synthetic construct
  misc_feature 1..20: note = chemically synthesized
  source 1..20: mol_type = other DNA
tcctgtttgcagatagccag

SEQ ID NO: 12097 - DNA, 20 bp, synthetic construct
  misc_feature 1..20: note = chemically synthesized
  source 1..20: mol_type = other DNA
gatagccaggagtcctttcg

SEQ ID NO: 12098 - DNA, 20 bp, synthetic construct
  misc_feature 1..20: note = chemically synthesized
  source 1..20: mol_type = other DNA
gtcctttcgtggtttccact

SEQ ID NO: 12099 - DNA, 20 bp, synthetic construct
  misc_feature 1..20: note = chemically synthesized
  source 1..20: mol_type = other DNA
gtggtttccactgagcactg

SEQ ID NO: 12100 - DNA, 20 bp, synthetic construct
  misc_feature 1..20: note = chemically synthesized
  source 1..20: mol_type = other DNA
tggtttccactgagcactga

SEQ ID NO: 12101 - DNA, 20 bp, synthetic construct
  misc_feature 1..20: note = chemically synthesized
  source 1..20: mol_type = other DNA
tccactgagcactgaaggcc

SEQ ID NO: 12102 - DNA, 20 bp, synthetic construct
  misc_feature 1..20: note = chemically synthesized
  source 1..20: mol_type = other DNA
ctgagcactgaaggcctggc

SEQ ID NO: 12103 - DNA, 20 bp, synthetic construct
  misc_feature 1..20: note = chemically synthesized
  source 1..20: mol_type = other DNA
ggcctggccggcctgaccac

SEQ ID NO: 12104 - DNA, 20 bp, synthetic construct
  misc_feature 1..20: note = chemically synthesized
  source 1..20: mol_type = other DNA
gcctggccggcctgaccact

SEQ ID NO: 12105 - DNA, 20 bp, synthetic construct
  misc_feature 1..20: note = chemically synthesized
  source 1..20: mol_type = other DNA
cggcctgaccactgggcaac

SEQ ID NO: 12106 - DNA, 20 bp, synthetic construct
  misc_feature 1..20: note = chemically synthesized
  source 1..20: mol_type = other DNA
ggcctgaccactgggcaacc

SEQ ID NO: 12107 - DNA, 20 bp, synthetic construct
  misc_feature 1..20: note = chemically synthesized
  source 1..20: mol_type = other DNA
gcaaccaggcgtatcttaaa

SEQ ID NO: 12108 - DNA, 20 bp, synthetic construct
  misc_feature 1..20: note = chemically synthesized
  source 1..20: mol_type = other DNA
ccaggcgtatcttaaacagc

SEQ ID NO: 12109 - DNA, 20 bp, synthetic construct
  misc_feature 1..20: note = chemically synthesized
  source 1..20: mol_type = other DNA
ggcgtatcttaaacagccag

SEQ ID NO: 12110 - DNA, 20 bp, synthetic construct
  misc_feature 1..20: note = chemically synthesized
  source 1..20: mol_type = other DNA
tatcttaaacagccagtggc

SEQ ID NO: 12111 - DNA, 20 bp, synthetic construct
  misc_feature 1..20: note = chemically synthesized
  source 1..20: mol_type = other DNA
tcttaaacagccagtggcca

SEQ ID NO: 12112 - DNA, 20 bp, synthetic construct
  misc_feature 1..20: note = chemically synthesized
  source 1..20: mol_type = other DNA
cttaaacagccagtggccag

SEQ ID NO: 12113 - DNA, 20 bp, synthetic construct
  misc_feature 1..20: note = chemically synthesized
  source 1..20: mol_type = other DNA
agccagtggccagaggctgt

SEQ ID NO: 12114 - DNA, 20 bp, synthetic construct
  misc_feature 1..20: note = chemically synthesized
  source 1..20: mol_type = other DNA
gccagtggccagaggctgtt

SEQ ID NO: 12115 - DNA, 20 bp, synthetic construct
  misc_feature 1..20: note = chemically synthesized
  source 1..20: mol_type = other DNA
ggtcattttccccactgtcc

SEQ ID NO: 12116 - DNA, 20 bp, synthetic construct
  misc_feature 1..20: note = chemically synthesized
  source 1..20: mol_type = other DNA
ctgtcctagcaccgtgtccc

SEQ ID NO: 12117 - DNA, 20 bp, synthetic construct
  misc_feature 1..20: note = chemically synthesized
  source 1..20: mol_type = other DNA
tgtccctggatctgttttcg

SEQ ID NO: 12118 - DNA, 20 bp, synthetic construct
  misc_feature 1..20: note = chemically synthesized
  source 1..20: mol_type = other DNA
tctgttttcgtggctccctc

SEQ ID NO: 12119 - DNA, 20 bp, synthetic construct
  misc_feature 1..20: note = chemically synthesized
  source 1..20: mol_type = other DNA
tgttttcgtggctccctctg

SEQ ID NO: 12120 - DNA, 20 bp, synthetic construct
  misc_feature 1..20: note = chemically synthesized
  source 1..20: mol_type = other DNA
cctctggagtcccgacttgc

SEQ ID NO: 12121 - DNA, 20 bp, synthetic construct
  misc_feature 1..20: note = chemically synthesized
  source 1..20: mol_type = other DNA
ctctggagtcccgacttgct

SEQ ID NO: 12122 - DNA, 20 bp, synthetic construct
  misc_feature 1..20: note = chemically synthesized
  source 1..20: mol_type = other DNA
cccgacttgctgggacaccg

SEQ ID NO: 12123 - DNA, 20 bp, synthetic construct
  misc_feature 1..20: note = chemically synthesized
  source 1..20: mol_type = other DNA
acttgctgggacaccgtggc

SEQ ID NO: 12124 - DNA, 20 bp, synthetic construct
  misc_feature 1..20: note = chemically synthesized
  source 1..20: mol_type = other DNA
cttgctgggacaccgtggct

SEQ ID NO: 12125 - DNA, 20 bp, synthetic construct
  misc_feature 1..20: note = chemically synthesized
  source 1..20: mol_type = other DNA
ttgctgggacaccgtggctg

SEQ ID NO: 12126 - DNA, 20 bp, synthetic construct
  misc_feature 1..20: note = chemically synthesized
  source 1..20: mol_type = other DNA
ctgggacaccgtggctgggg

SEQ ID NO: 12127 - DNA, 20 bp, synthetic construct
  misc_feature 1..20: note = chemically synthesized
  source 1..20: mol_type = other DNA
tgggacaccgtggctggggt

SEQ ID NO: 12128 - DNA, 20 bp, synthetic construct
  misc_feature 1..20: note = chemically synthesized
  source 1..20: mol_type = other DNA
caccgtggctggggtaggtg

SEQ ID NO: 12129 - DNA, 20 bp, synthetic construct
  misc_feature 1..20: note = chemically synthesized
  source 1..20: mol_type = other DNA
gctggggtaggtgcggctga

SEQ ID NO: 12130 - DNA, 20 bp, synthetic construct
  misc_feature 1..20: note = chemically synthesized
  source 1..20: mol_type = other DNA
tgacggctgtttcccacccc

SEQ ID NO: 12131 - DNA, 20 bp, synthetic construct
  misc_feature 1..20: note = chemically synthesized
  source 1..20: mol_type = other DNA
gacggctgtttcccaccccc

SEQ ID NO: 12132 - DNA, 20 bp, synthetic construct
  misc_feature 1..20: note = chemically synthesized
  source 1..20: mol_type = other DNA
acccccaggcctgcattgat

SEQ ID NO: 12133 - DNA, 20 bp, synthetic construct
  misc_feature 1..20: note = chemically synthesized
  source 1..20: mol_type = other DNA
ggcctgcattgatgagaacc

SEQ ID NO: 12134 - DNA, 20 bp, synthetic construct
  misc_feature 1..20: note = chemically synthesized
  source 1..20: mol_type = other DNA
cctgcattgatgagaacctg

SEQ ID NO: 12135 - DNA, 20 bp, synthetic construct
  misc_feature 1..20: note = chemically synthesized
  source 1..20: mol_type = other DNA
ctgcattgatgagaacctgg

SEQ ID NO: 12136 - DNA, 20 bp, synthetic construct
  misc_feature 1..20: note = chemically synthesized
  source 1..20: mol_type = other DNA
cattgatgagaacctggagg

SEQ ID NO: 12137 - DNA, 20 bp, synthetic construct
  misc_feature 1..20: note = chemically synthesized
  source 1..20: mol_type = other DNA
cctggaggtggtgcgcttct

SEQ ID NO: 12138 - DNA, 20 bp, synthetic construct
  misc_feature 1..20: note = chemically synthesized
  source 1..20: mol_type = other DNA
ggaggtggtgcgcttcttgg

SEQ ID NO: 12139 - DNA, 20 bp, synthetic construct
  misc_feature 1..20: note = chemically synthesized
  source 1..20: mol_type = other DNA
aggtggtgcgcttcttggtg

SEQ ID NO: 12140 - DNA, 20 bp, synthetic construct
  misc_feature 1..20: note = chemically synthesized
  source 1..20: mol_type = other DNA
tggtgcgcttcttggtggag

SEQ ID NO: 12141 - DNA, 20 bp, synthetic construct
  misc_feature 1..20: note = chemically synthesized
  source 1..20: mol_type = other DNA
ggtgcgcttcttggtggagc

SEQ ID NO: 12142 - DNA, 20 bp, synthetic construct
  misc_feature 1..20: note = chemically synthesized
  source 1..20: mol_type = other DNA
gtgcgcttcttggtggagca

SEQ ID NO: 12143 - DNA, 20 bp, synthetic construct
  misc_feature 1..20: note = chemically synthesized
  source 1..20: mol_type = other DNA
agcagggcgccactgtgaac

SEQ ID NO: 12144 - DNA, 20 bp, synthetic construct
  misc_feature 1..20: note = chemically synthesized
  source 1..20: mol_type = other DNA
gcagggcgccactgtgaacc

SEQ ID NO: 12145 - DNA, 20 bp, synthetic construct
  misc_feature 1..20: note = chemically synthesized
  source 1..20: mol_type = other DNA
gggcgccactgtgaaccagg

SEQ ID NO: 12146 - DNA, 20 bp, synthetic construct
  misc_feature 1..20: note = chemically synthesized
  source 1..20: mol_type = other DNA
ctgtgaaccaggcagacaac

SEQ ID NO: 12147 - DNA, 20 bp, synthetic construct
  misc_feature 1..20: note = chemically synthesized
  source 1..20: mol_type = other DNA
tgtgaaccaggcagacaacg

SEQ ID NO: 12148 - DNA, 20 bp, synthetic construct
  misc_feature 1..20: note = chemically synthesized
  source 1..20: mol_type = other DNA
gtgaaccaggcagacaacga

SEQ ID NO: 12149 - DNA, 20 bp, synthetic construct
  misc_feature 1..20: note = chemically synthesized
  source 1..20: mol_type = other DNA
accaggcagacaacgagggc

SEQ ID NO: 12150 - DNA, 20 bp, synthetic construct
  misc_feature 1..20: note = chemically synthesized
  source 1..20: mol_type = other DNA
gggctggacgccactgcacg

SEQ ID NO: 12151 - DNA, 20 bp, synthetic construct
  misc_feature 1..20: note = chemically synthesized
  source 1..20: mol_type = other DNA
ctgcacgtggccgcctcctg

SEQ ID NO: 12152 - DNA, 20 bp, synthetic construct
  misc_feature 1..20: note = chemically synthesized
  source 1..20: mol_type = other DNA
ggccgcctcctgtggctacc

SEQ ID NO: 12153 - DNA, 20 bp, synthetic construct
  misc_feature 1..20: note = chemically synthesized
  source 1..20: mol_type = other DNA
tgtggctacctagatatcgc

SEQ ID NO: 12154 - DNA, 20 bp, synthetic construct
  misc_feature 1..20: note = chemically synthesized
  source 1..20: mol_type = other DNA
gttctcatcaatgcaggcct

SEQ ID NO: 12155 - DNA, 20 bp, synthetic construct
  misc_feature 1..20: note = chemically synthesized
  source 1..20: mol_type = other DNA
gaagggagggggcttctcat

SEQ ID NO: 12156 - DNA, 20 bp, synthetic construct
  misc_feature 1..20: note = chemically synthesized
  source 1..20: mol_type = other DNA
gcccctcctccttcagagcc

SEQ ID NO: 12157 - DNA, 20 bp, synthetic construct
  misc_feature 1..20: note = chemically synthesized
  source 1..20: mol_type = other DNA
aaacccagccaggtccttcc

SEQ ID NO: 12158 - DNA, 20 bp, synthetic construct
  misc_feature 1..20: note = chemically synthesized
  source 1..20: mol_type = other DNA
gccgtgggcccagggctatg

SEQ ID NO: 12159 - DNA, 20 bp, synthetic construct
  misc_feature 1..20: note = chemically synthesized
  source 1..20: mol_type = other DNA
ggcctgggcgggactcccag

SEQ ID NO: 12160 - DNA, 20 bp, synthetic construct
  misc_feature 1..20: note = chemically synthesized
  source 1..20: mol_type = other DNA
ccgtttctcattcttccctt

SEQ ID NO: 12161 - DNA, 20 bp, synthetic construct
  misc_feature 1..20: note = chemically synthesized
  source 1..20: mol_type = other DNA
gggacaaaagccgaagtcca

SEQ ID NO: 12162 - DNA, 20 bp, synthetic construct
  misc_feature 1..20: note = chemically synthesized
  source 1..20: mol_type = other DNA
tgccccaggccttgtggaca

SEQ ID NO: 12163 - DNA, 20 bp, synthetic construct
  misc_feature 1..20: note = chemically synthesized
  source 1..20: mol_type = other DNA
acctgaactggagctgagga

SEQ ID NO: 12164 - DNA, 20 bp, synthetic construct
  misc_feature 1..20: note = chemically synthesized
  source 1..20: mol_type = other DNA
aagctaaactcctagatcca

SEQ ID NO: 12165 - DNA, 20 bp, synthetic construct
  misc_feature 1..20: note = chemically synthesized
  source 1..20: mol_type = other DNA
ggccgcacgtgccctgggaa

SEQ ID NO: 12166 - DNA, 20 bp, synthetic construct
  misc_feature 1..20: note = chemically synthesized
  source 1..20: mol_type = other DNA
ggcctgggcaccagggactc

SEQ ID NO: 12167 - DNA, 20 bp, synthetic construct
  misc_feature 1..20: note = chemically synthesized
  source 1..20: mol_type = other DNA
gcccttccgccctcagatga

SEQ ID NO: 12168 - DNA, 20 bp, synthetic construct
  misc_feature 1..20: note = chemically synthesized
  source 1..20: mol_type = other DNA
gcctctccccattcagaccc

SEQ ID NO: 12169 - DNA, 20 bp, synthetic construct
  misc_feature 1..20: note = chemically synthesized
  source 1..20: mol_type = other DNA
gcccctcctccctcagaccc

SEQ ID NO: 12170 - DNA, 20 bp, synthetic construct
  misc_feature 1..20: note = chemically synthesized
  source 1..20: mol_type = other DNA
gcccctcctccctcggaccc

SEQ ID NO: 12171 - DNA, 20 bp, synthetic construct
  misc_feature 1..20: note = chemically synthesized
  source 1..20: mol_type = other DNA
gtccctccaccctcagaccc

SEQ ID NO: 12172 - DNA, 20 bp, synthetic construct
  misc_feature 1..20: note = chemically synthesized
  source 1..20: mol_type = other DNA
gcccctcctccctcggaccc

SEQ ID NO: 12173 - DNA, 20 bp, synthetic construct
  misc_feature 1..20: note = chemically synthesized
  source 1..20: mol_type = other DNA
gctcttctctgttcagccct

SEQ ID NO: 12174 - DNA, 20 bp, synthetic construct
  misc_feature 1..20: note = chemically synthesized
  source 1..20: mol_type = other DNA
cccctagccactaaggcaat

SEQ ID NO: 12175 - DNA, 20 bp, synthetic construct
  misc_feature 1..20: note = chemically synthesized
  source 1..20: mol_type = other DNA
cactaaggcaattggggtgc

SEQ ID NO: 12176 - DNA, 20 bp, synthetic construct
  misc_feature 1..20: note = chemically synthesized
  source 1..20: mol_type = other DNA
ttggggtgcaggaatggggg

SEQ ID NO: 12177 - DNA, 20 bp, synthetic construct
  misc_feature 1..20: note = chemically synthesized
  source 1..20: mol_type = other DNA
aagtggttgataaacccacg

SEQ ID NO: 12178 - DNA, 20 bp, synthetic construct
  misc_feature 1..20: note = chemically synthesized
  source 1..20: mol_type = other DNA
gcttggggacctgcctggag

SEQ ID NO: 12179 - DNA, 20 bp, synthetic construct
  misc_feature 1..20: note = chemically synthesized
  source 1..20: mol_type = other DNA
cccaggtggagaaactggcc

SEQ ID NO: 12180 - DNA, 20 bp, synthetic construct
  misc_feature 1..20: note = chemically synthesized
  source 1..20: mol_type = other DNA
ggagaaactggccgggaatc

SEQ ID NO: 12181 - DNA, 20 bp, synthetic construct
  misc_feature 1..20: note = chemically synthesized
  source 1..20: mol_type = other DNA
atccctgttttcctaggact

SEQ ID NO: 12182 - DNA, 20 bp, synthetic construct
  misc_feature 1..20: note = chemically synthesized
  source 1..20: mol_type = other DNA
ttggccacgtaacctgagaa

SEQ ID NO: 12183 - DNA, 20 bp, synthetic construct
  misc_feature 1..20: note = chemically synthesized
  source 1..20: mol_type = other DNA
ccccaatgctccaggcctcc

SEQ ID NO: 12184 - DNA, 20 bp, synthetic construct
  misc_feature 1..20: note = chemically synthesized
  source 1..20: mol_type = other DNA
aggcctcctgggataccccg

SEQ ID NO: 12185 - DNA, 20 bp, synthetic construct
  misc_feature 1..20: note = chemically synthesized
  source 1..20: mol_type = other DNA
ctcctgggataccccgaaga

SEQ ID NO: 12186 - DNA, 20 bp, synthetic construct
  misc_feature 1..20: note = chemically synthesized
  source 1..20: mol_type = other DNA
cagtcaccccacagttggag

SEQ ID NO: 12187 - DNA, 20 bp, synthetic construct
  misc_feature 1..20: note = chemically synthesized
  source 1..20: mol_type = other DNA
ggcagcctggtagacagggc

SEQ ID NO: 12188 - DNA, 20 bp, synthetic construct
  misc_feature 1..20: note = chemically synthesized
  source 1..20: mol_type = other DNA
agggctggggtggcctctcg

SEQ ID NO: 12189 - DNA, 20 bp, synthetic construct
  misc_feature 1..20: note = chemically synthesized
  source 1..20: mol_type = other DNA
taggtggcctggggcctctg

SEQ ID NO: 12190 - DNA, 20 bp, synthetic construct
  misc_feature 1..20: note = chemically synthesized
  source 1..20: mol_type = other DNA
tctgggggatgcaggggaag

SEQ ID NO: 12191 - DNA, 20 bp, synthetic construct
  misc_feature 1..20: note = chemically synthesized
  source 1..20: mol_type = other DNA
gaagggggatgcaggggaac

SEQ ID NO: 12192 - DNA, 20 bp, synthetic construct
  misc_feature 1..20: note = chemically synthesized
  source 1..20: mol_type = other DNA
cgggaccctgctctgggcgg

SEQ ID NO: 12193 - DNA, 20 bp, synthetic construct
  misc_feature 1..20: note = chemically synthesized
  source 1..20: mol_type = other DNA
tggggactctttaaggaaag

SEQ ID NO: 12194 - DNA, 20 bp, synthetic construct
  misc_feature 1..20: note = chemically synthesized
  source 1..20: mol_type = other DNA
gaaggatggagaaagagaaa

SEQ ID NO: 12195 - DNA, 20 bp, synthetic construct
  misc_feature 1..20: note = chemically synthesized
  source 1..20: mol_type = other DNA
ggacgcaccattctcacaaa

SEQ ID NO: 12196 - DNA, 20 bp, synthetic construct
  misc_feature 1..20: note = chemically synthesized
  source 1..20: mol_type = other DNA
gtgtaaggaagctgcagcac

SEQ ID NO: 12197 - DNA, 20 bp, synthetic construct
  misc_feature 1..20: note = chemically synthesized
  source 1..20: mol_type = other DNA
gagcagctcaggttctggga

SEQ ID NO: 12198 - DNA, 20 bp, synthetic construct
  misc_feature 1..20: note = chemically synthesized
  source 1..20: mol_type = other DNA
ggttctgggagagggtagcg

SEQ ID NO: 12199 - DNA, 20 bp, synthetic construct
  misc_feature 1..20: note = chemically synthesized
  source 1..20: mol_type = other DNA
ccctgccaagctctccctcc

SEQ ID NO: 12200 - DNA, 20 bp, synthetic construct
  misc_feature 1..20: note = chemically synthesized
  source 1..20: mol_type = other DNA
gagagatggctccaggaaat

SEQ ID NO: 12201 - DNA, 20 bp, synthetic construct
  misc_feature 1..20: note = chemically synthesized
  source 1..20: mol_type = other DNA
tgggggtgtgtcaccagata

SEQ ID NO: 12202 - DNA, 20 bp, synthetic construct
  misc_feature 1..20: note = chemically synthesized
  source 1..20: mol_type = other DNA
gaatctgcctaacaggaggt

SEQ ID NO: 12203 - DNA, 20 bp, synthetic construct
  misc_feature 1..20: note = chemically synthesized
  source 1..20: mol_type = other DNA
gactaggaaggaggaggcct

SEQ ID NO: 12204 - DNA, 20 bp, synthetic construct
  misc_feature 1..20: note = chemically synthesized
  source 1..20: mol_type = other DNA
tgtccctagtggccccactg

SEQ ID NO: 12205 - DNA, 20 bp, synthetic construct
  misc_feature 1..20: note = chemically synthesized
  source 1..20: mol_type = other DNA
gagccacattaaccggccct

SEQ ID NO: 12206 - DNA, 20 bp, synthetic construct
  misc_feature 1..20: note = chemically synthesized
  source 1..20: mol_type = other DNA
gtggtcccagctcggggaca

SEQ ID NO: 12207 - DNA, 20 bp, synthetic construct
  misc_feature 1..20: note = chemically synthesized
  source 1..20: mol_type = other DNA
cctgaagtggacataggggc

SEQ ID NO: 12208 - DNA, 20 bp, synthetic construct
  misc_feature 1..20: note = chemically synthesized
  source 1..20: mol_type = other DNA
gcacagactagagaggtaag

SEQ ID NO: 12209 - DNA, 20 bp, synthetic construct
  misc_feature 1..20: note = chemically synthesized
  source 1..20: mol_type = other DNA
aggggagctgcccaaatgaa

SEQ ID NO: 12210 - DNA, 20 bp, synthetic construct
  misc_feature 1..20: note = chemically synthesized
  source 1..20: mol_type = other DNA
tgaaaggagtgagaggtgac

SEQ ID NO: 12211 - DNA, 20 bp, synthetic construct
  misc_feature 1..20: note = chemically synthesized
  source 1..20: mol_type = other DNA
gacccgaatccacaggagaa

SEQ ID NO: 12212 - DNA, 20 bp, synthetic construct
  misc_feature 1..20: note = chemically synthesized
  source 1..20: mol_type = other DNA
tgtccaggcaaagaaagcaa

SEQ ID NO: 12213 - DNA, 20 bp, synthetic construct
  misc_feature 1..20: note = chemically synthesized
  source 1..20: mol_type = other DNA
ggtggctaaagccagggaga

SEQ ID NO: 12214 - DNA, 20 bp, synthetic construct
  misc_feature 1..20: note = chemically synthesized
  source 1..20: mol_type = other DNA
gccagggagacggggtactt

SEQ ID NO: 12215 - DNA, 20 bp, synthetic construct
  misc_feature 1..20: note = chemically synthesized
  source 1..20: mol_type = other DNA
gagaaggaaaagggaaccca

SEQ ID NO: 12216 - DNA, 20 bp, synthetic construct
  misc_feature 1..20: note = chemically synthesized
  source 1..20: mol_type = other DNA
cccagcgagtgaagacggca

SEQ ID NO: 12217 - DNA, 20 bp, synthetic construct
  misc_feature 1..20: note = chemically synthesized
  source 1..20: mol_type = other DNA
cgagtgaagacggcatgggg

SEQ ID NO: 12218 - DNA, 20 bp, synthetic construct
  misc_feature 1..20: note = chemically synthesized
  source 1..20: mol_type = other DNA
ggagaggacccagacacggg

SEQ ID NO: 12219 - DNA, 20 bp, synthetic construct
  misc_feature 1..20: note = chemically synthesized
  source 1..20: mol_type = other DNA
agcagagagcaaggggaaga

SEQ ID NO: 12220 - DNA, 20 bp, synthetic construct
  misc_feature 1..20: note = chemically synthesized
  source 1..20: mol_type = other DNA
acctgaaggaggcggcaggg

SEQ ID NO: 12221 - DNA, 20 bp, synthetic construct
  misc_feature 1..20: note = chemically synthesized
  source 1..20: mol_type = other DNA
agcggcacaggcccagggga

SEQ ID NO: 12222 - DNA, 20 bp, synthetic construct
  misc_feature 1..20: note = chemically synthesized
  source 1..20: mol_type = other DNA
gagacggcagcgttagaggg

SEQ ID NO: 12223 - DNA, 20 bp, synthetic construct
  misc_feature 1..20: note = chemically synthesized
  source 1..20: mol_type = other DNA
ggaagaggggaagtcgaggg

SEQ ID NO: 12224 - DNA, 20 bp, synthetic construct
  misc_feature 1..20: note = chemically synthesized
  source 1..20: mol_type = other DNA
gggatggtaaggaggactgc

SEQ ID NO: 12225 - DNA, 20 bp, synthetic construct
  misc_feature 1..20: note = chemically synthesized
  source 1..20: mol_type = other DNA
aaagcgactccaatgcggaa

SEQ ID NO: 12226 - DNA, 20 bp, synthetic construct
  misc_feature 1..20: note = chemically synthesized
  source 1..20: mol_type = other DNA
cggaagagagtaggtcgaag

SEQ ID NO: 12227 - DNA, 20 bp, synthetic construct
  misc_feature 1..20: note = chemically synthesized
  source 1..20: mol_type = other DNA
aatggtaaggaggcctgggg

SEQ ID NO: 12228 - DNA, 20 bp, synthetic construct
  misc_feature 1..20: note = chemically synthesized
  source 1..20: mol_type = other DNA
ctggggcagagtggtcagca

SEQ ID NO: 12229 - DNA, 20 bp, synthetic construct
  misc_feature 1..20: note = chemically synthesized
  source 1..20: mol_type = other DNA
aagcggctccaattcggaag

SEQ ID NO: 12230 - DNA, 20 bp, synthetic construct
  misc_feature 1..20: note = chemically synthesized
  source 1..20: mol_type = other DNA
cggaagtggggtggtcgaag

SEQ ID NO: 12231 - DNA, 20 bp, synthetic construct
  misc_feature 1..20: note = chemically synthesized
  source 1..20: mol_type = other DNA
aatggtaagggggactggga

SEQ ID NO: 12232 - DNA, 20 bp, synthetic construct
  misc_feature 1..20: note = chemically synthesized
  source 1..20: mol_type = other DNA
actgggacggggtgtcagca

SEQ ID NO: 12233 - DNA, 20 bp, synthetic construct
  misc_feature 1..20: note = chemically synthesized
  source 1..20: mol_type = other DNA
ccagggccaggaacgacggg

SEQ ID NO: 12234 - DNA, 20 bp, synthetic construct
  misc_feature 1..20: note = chemically synthesized
  source 1..20: mol_type = other DNA
cgagactggcaacggggaag

SEQ ID NO: 12235 - DNA, 20 bp, synthetic construct
  misc_feature 1..20: note = chemically synthesized
  source 1..20: mol_type = other DNA
atgccccaggtggcgcagca

SEQ ID NO: 12236 - DNA, 20 bp, synthetic construct
  misc_feature 1..20: note = chemically synthesized
  source 1..20: mol_type = other DNA
gctgataccgtcggcgttgg

SEQ ID NO: 12237 - DNA, 20 bp, synthetic construct
  misc_feature 1..20: note = chemically synthesized
  source 1..20: mol_type = other DNA
gcgggcgggcggcggcgcgg

SEQ ID NO: 12238 - DNA, 20 bp, synthetic construct
  misc_feature 1..20: note = chemically synthesized
  source 1..20: mol_type = other DNA
gtcgagctcggcgccggggc

SEQ ID NO: 12239 - DNA, 20 bp, synthetic construct
  misc_feature 1..20: note = chemically synthesized
  source 1..20: mol_type = other DNA
cgggcggtgcgatgtccgga

SEQ ID NO: 12240 - DNA, 20 bp, synthetic construct
  misc_feature 1..20: note = chemically synthesized
  source 1..20: mol_type = other DNA
cgtccgcttcgagcgcgccg

SEQ ID NO: 12241 - DNA, 20 bp, synthetic construct
  misc_feature 1..20: note = chemically synthesized
  source 1..20: mol_type = other DNA
ccccttcgaccaccccactt

SEQ ID NO: 12242 - DNA, 20 bp, synthetic construct
  misc_feature 1..20: note = chemically synthesized
  source 1..20: mol_type = other DNA
cgacctactctcttccgcat

SEQ ID NO: 12243 - DNA, 20 bp, synthetic construct
  misc_feature 1..20: note = chemically synthesized
  source 1..20: mol_type = other DNA
gcgctgccctcctctcgccc

SEQ ID NO: 12244 - DNA, 20 bp, synthetic construct
  misc_feature 1..20: note = chemically synthesized
  source 1..20: mol_type = other DNA
ctaacgctgccgtctctctc

SEQ ID NO: 12245 - DNA, 20 bp, synthetic construct
  misc_feature 1..20: note = chemically synthesized
  source 1..20: mol_type = other DNA
ttctgtctgcagcttgtggc

SEQ ID NO: 12246 - DNA, 20 bp, synthetic construct
  misc_feature 1..20: note = chemically synthesized
  source 1..20: mol_type = other DNA
tctctgctgtgttgctgccc

SEQ ID NO: 12247 - DNA, 20 bp, synthetic construct
  misc_feature 1..20: note = chemically synthesized
  source 1..20: mol_type = other DNA
caccacgtgatgtcctctga

SEQ ID NO: 12248 - DNA, 20 bp, synthetic construct
  misc_feature 1..20: note = chemically synthesized
  source 1..20: mol_type = other DNA
tgagcggatcctccccgtgt

SEQ ID NO: 12249 - DNA, 20 bp, synthetic construct
  misc_feature 1..20: note = chemically synthesized
  source 1..20: mol_type = other DNA
ccccatgccgtcttcactcg

SEQ ID NO: 12250 - DNA, 20 bp, synthetic construct
  misc_feature 1..20: note = chemically synthesized
  source 1..20: mol_type = other DNA
ctgtgccatctctcgtttct

SEQ ID NO: 12251 - DNA, 20 bp, synthetic construct
  misc_feature 1..20: note = chemically synthesized
  source 1..20: mol_type = other DNA
tcttaggatggccttctccg

SEQ ID NO: 12252 - DNA, 20 bp, synthetic construct
  misc_feature 1..20: note = chemically synthesized
  source 1..20: mol_type = other DNA
cctggacaccccgttctcct

SEQ ID NO: 12253 - DNA, 20 bp, synthetic construct
  misc_feature 1..20: note = chemically synthesized
  source 1..20: mol_type = other DNA
caccccgttctcctgtggat

SEQ ID NO: 12254 - DNA, 20 bp, synthetic construct
  misc_feature 1..20: note = chemically synthesized
  source 1..20: mol_type = other DNA
cccctgtcatggcatcttcc

SEQ ID NO: 12255 - DNA, 20 bp, synthetic construct
  misc_feature 1..20: note = chemically synthesized
  source 1..20: mol_type = other DNA
acagcatgtttgctgcctcc

SEQ ID NO: 12256 - DNA, 20 bp, synthetic construct
  misc_feature 1..20: note = chemically synthesized
  source 1..20: mol_type = other DNA
cggttaatgtggctctggtt

SEQ ID NO: 12257 - DNA, 20 bp, synthetic construct
  misc_feature 1..20: note = chemically synthesized
  source 1..20: mol_type = other DNA
cacagtggggccactaggga

SEQ ID NO: 12258 - DNA, 20 bp, synthetic construct
  misc_feature 1..20: note = chemically synthesized
  source 1..20: mol_type = other DNA
tccttcctagtctcctgata

SEQ ID NO: 12259 - DNA, 20 bp, synthetic construct
  misc_feature 1..20: note = chemically synthesized
  source 1..20: mol_type = other DNA
ttgcttacgatggagccaga

SEQ ID NO: 12260 - DNA, 20 bp, synthetic construct
  misc_feature 1..20: note = chemically synthesized
  source 1..20: mol_type = other DNA
ctgggagggagagcttggca

SEQ ID NO: 12261 - DNA, 20 bp, synthetic construct
  misc_feature 1..20: note = chemically synthesized
  source 1..20: mol_type = other DNA
cagggggtgggagggaaggg

SEQ ID NO: 12262 - DNA, 20 bp, synthetic construct
  misc_feature 1..20: note = chemically synthesized
  source 1..20: mol_type = other DNA
gcagtttggaaaaacaaaat

SEQ ID NO: 12263 - DNA, 20 bp, synthetic construct
  misc_feature 1..20: note = chemically synthesized
  source 1..20: mol_type = other DNA
aaaatcagaataagttggtc

SEQ ID NO: 12264 - DNA, 20 bp, synthetic construct
  misc_feature 1..20: note = chemically synthesized
  source 1..20: mol_type = other DNA
ggcagggctgtggtgaggag

SEQ ID NO: 12265 - DNA, 20 bp, synthetic construct
  misc_feature 1..20: note = chemically synthesized
  source 1..20: mol_type = other DNA
gtgtggaaaactccctttgt

SEQ ID NO: 12266 - DNA, 20 bp, synthetic construct
  misc_feature 1..20: note = chemically synthesized
  source 1..20: mol_type = other DNA
tctccatccttctttcctta

SEQ ID NO: 12267 - DNA, 20 bp, synthetic construct
  misc_feature 1..20: note = chemically synthesized
  source 1..20: mol_type = other DNA
acatattcctccgcccagag

SEQ ID NO: 12268 - DNA, 20 bp, synthetic construct
  misc_feature 1..20: note = chemically synthesized
  source 1..20: mol_type = other DNA
taaggccctgctctgggctt

SEQ ID NO: 12269 - DNA, 20 bp, synthetic construct
  misc_feature 1..20: note = chemically synthesized
  source 1..20: mol_type = other DNA
cctgctctgggcttctgggt

SEQ ID NO: 12270 - DNA, 20 bp, synthetic construct
  misc_feature 1..20: note = chemically synthesized
  source 1..20: mol_type = other DNA
ctctcctgccccttccctac

SEQ ID NO: 12271 - DNA, 20 bp, synthetic construct
  misc_feature 1..20: note = chemically synthesized
  source 1..20: mol_type = other DNA
cctgtctaccaggctgcctt

SEQ ID NO: 12272 - DNA, 20 bp, synthetic construct
  misc_feature 1..20: note = chemically synthesized
  source 1..20: mol_type = other DNA
tctaccaggctgccttttgg

SEQ ID NO: 12273 - DNA, 20 bp, synthetic construct
  misc_feature 1..20: note = chemically synthesized
  source 1..20: mol_type = other DNA
ggtggattctcctccaactg

SEQ ID NO: 12274 - DNA, 20 bp, synthetic construct
  misc_feature 1..20: note = chemically synthesized
  source 1..20: mol_type = other DNA
tgcttggcaaactcactctt

SEQ ID NO: 12275 - DNA, 20 bp, synthetic construct
  misc_feature 1..20: note = chemically synthesized
  source 1..20: mol_type = other DNA
tcccaggaggcctggagcat

SEQ ID NO: 12276 - DNA, 20 bp, synthetic construct
  misc_feature 1..20: note = chemically synthesized
  source 1..20: mol_type = other DNA
cctggagcattggggtgggc

SEQ ID NO: 12277 - DNA, 20 bp, synthetic construct
  misc_feature 1..20: note = chemically synthesized
  source 1..20: mol_type = other DNA
tgggctggggttcagagagg

SEQ ID NO: 12278 - DNA, 20 bp, synthetic construct
  misc_feature 1..20: note = chemically synthesized
  source 1..20: mol_type = other DNA
gtggccaagaagcaggggag

SEQ ID NO: 12279 - DNA, 20 bp, synthetic construct
  misc_feature 1..20: note = chemically synthesized
  source 1..20: mol_type = other DNA
aagaagcaggggagctgggt

SEQ ID NO: 12280 - DNA, 20 bp, synthetic construct
  misc_feature 1..20: note = chemically synthesized
  source 1..20: mol_type = other DNA
gagctgggtttgggtcaggt

SEQ ID NO: 12281 - DNA, 20 bp, synthetic construct
  misc_feature 1..20: note = chemically synthesized
  source 1..20: mol_type = other DNA
gtttgggtcaggtctgggtg

SEQ ID NO: 12282 - DNA, 20 bp, synthetic construct
  misc_feature 1..20: note = chemically synthesized
  source 1..20: mol_type = other DNA
accctcagtcctaggaaaac

SEQ ID NO: 12283 - DNA, 20 bp, synthetic construct
  misc_feature 1..20: note = chemically synthesized
  source 1..20: mol_type = other DNA
gggatggttggtcactgtct

SEQ ID NO: 12284 - DNA, 20 bp, synthetic construct
  misc_feature 1..20: note = chemically synthesized
  source 1..20: mol_type = other DNA
tgtggctgttcccaagttct

SEQ ID NO: 12285 - DNA, 20 bp, synthetic construct
  misc_feature 1..20: note = chemically synthesized
  source 1..20: mol_type = other DNA
aagttcttagggtaccccac

SEQ ID NO: 12286 - DNA, 20 bp, synthetic construct
  misc_feature 1..20: note = chemically synthesized
  source 1..20: mol_type = other DNA
cccaattgccttagtggcta

SEQ ID NO: 12287 - DNA, 20 bp, synthetic construct
  misc_feature 1..20: note = chemically synthesized
  source 1..20: mol_type = other DNA
gtggctagggggttgggggc

SEQ ID NO: 12288 - DNA, 20 bp, synthetic construct
  misc_feature 1..20: note = chemically synthesized
  source 1..20: mol_type = other DNA
agagtaggaggggctggagc

SEQ ID NO: 12289 - DNA, 20 bp, synthetic construct
  misc_feature 1..20: note = chemically synthesized
  source 1..20: mol_type = other DNA
agagctgggggcctgggctc

SEQ ID NO: 12290 - DNA, 20 bp, synthetic construct
  misc_feature 1..20: note = chemically synthesized
  source 1..20: mol_type = other DNA
aggggctggggcctggactc

SEQ ID NO: 12291 - DNA, 20 bp, synthetic construct
  misc_feature 1..20: note = chemically synthesized
  source 1..20: mol_type = other DNA
aggggctggggcctggactc

SEQ ID NO: 12292 - DNA, 20 bp, synthetic construct
  misc_feature 1..20: note = chemically synthesized
  source 1..20: mol_type = other DNA
gggcctggactcctgggtct

SEQ ID NO: 12293 - DNA, 20 bp, synthetic construct
  misc_feature 1..20: note = chemically synthesized
  source 1..20: mol_type = other DNA
gggactgggggcctggactc

SEQ ID NO: 12294 - DNA, 20 bp, synthetic construct
  misc_feature 1..20: note = chemically synthesized
  source 1..20: mol_type = other DNA
aggggctggggcctggactc

SEQ ID NO: 12295 - DNA, 20 bp, synthetic construct
  misc_feature 1..20: note = chemically synthesized
  source 1..20: mol_type = other DNA
ggggctgggggcctggactt

SEQ ID NO: 12296 - DNA, 20 bp, synthetic construct
  misc_feature 1..20: note = chemically synthesized
  source 1..20: mol_type = other DNA
gcggggctgggcctggaccc

SEQ ID NO: 12297 - DNA, 20 bp, synthetic construct
  misc_feature 1..20: note = chemically synthesized
  source 1..20: mol_type = other DNA
ctgggcctggacccctgggt

SEQ ID NO: 12298 - DNA, 20 bp, synthetic construct
  misc_feature 1..20: note = chemically synthesized
  source 1..20: mol_type = other DNA
aagggctggggcctggcctc

SEQ ID NO: 12299 - DNA, 20 bp, synthetic construct
  misc_feature 1..20: note = chemically synthesized
  source 1..20: mol_type = other DNA
ctggggcctggcctcctggg

SEQ ID NO: 12300 - DNA, 20 bp, synthetic construct
  misc_feature 1..20: note = chemically synthesized
  source 1..20: mol_type = other DNA
gcctcctgggttgaatgggg

SEQ ID NO: 12301 - DNA, 20 bp, synthetic construct
  misc_feature 1..20: note = chemically synthesized
  source 1..20: mol_type = other DNA
gaggggttgggcctggactc

SEQ ID NO: 12302 - DNA, 20 bp, synthetic construct
  misc_feature 1..20: note = chemically synthesized
  source 1..20: mol_type = other DNA
aggcctcaggcatctttcac

SEQ ID NO: 12303 - DNA, 20 bp, synthetic construct
  misc_feature 1..20: note = chemically synthesized
  source 1..20: mol_type = other DNA
ctcccctatcgccatgacaa

SEQ ID NO: 12304 - DNA, 20 bp, synthetic construct
  misc_feature 1..20: note = chemically synthesized
  source 1..20: mol_type = other DNA
actgggtggaaataaacgag

SEQ ID NO: 12305 - DNA, 20 bp, synthetic construct
  misc_feature 1..20: note = chemically synthesized
  source 1..20: mol_type = other DNA
acgtgcggccccttcacagc

SEQ ID NO: 12306 - DNA, 20 bp, synthetic construct
  misc_feature 1..20: note = chemically synthesized
  source 1..20: mol_type = other DNA
ttggagaggtgagggacttg

SEQ ID NO: 12307 - DNA, 20 bp, synthetic construct
  misc_feature 1..20: note = chemically synthesized
  source 1..20: mol_type = other DNA
cttggggggtaatttatccc

SEQ ID NO: 12308 - DNA, 20 bp, synthetic construct
  misc_feature 1..20: note = chemically synthesized
  source 1..20: mol_type = other DNA
gtaatttatcccgtggatct

SEQ ID NO: 12309 - DNA, 20 bp, synthetic construct
  misc_feature 1..20: note = chemically synthesized
  source 1..20: mol_type = other DNA
aagttttggacccctaaggg

SEQ ID NO: 12310 - DNA, 20 bp, synthetic construct
  misc_feature 1..20: note = chemically synthesized
  source 1..20: mol_type = other DNA
cagagggggcctcagtgaac

SEQ ID NO: 12311 - DNA, 20 bp, synthetic construct
  misc_feature 1..20: note = chemically synthesized
  source 1..20: mol_type = other DNA
tgcagctgtctcacccctct

SEQ ID NO: 12312 - DNA, 20 bp, synthetic construct
  misc_feature 1..20: note = chemically synthesized
  source 1..20: mol_type = other DNA
tgggagtcccgcccaggccc

SEQ ID NO: 12313 - DNA, 20 bp, synthetic construct
  misc_feature 1..20: note = chemically synthesized
  source 1..20: mol_type = other DNA
cccctgagtctgtcccagca

SEQ ID NO: 12314 - DNA, 20 bp, synthetic construct
  misc_feature 1..20: note = chemically synthesized
  source 1..20: mol_type = other DNA
ggcccacggcttcgttcctg

SEQ ID NO: 12315 - DNA, 20 bp, synthetic construct
  misc_feature 1..20: note = chemically synthesized
  source 1..20: mol_type = other DNA
cgttcctgcagagtatctgc

SEQ ID NO: 12316 - DNA, 20 bp, synthetic construct
  misc_feature 1..20: note = chemically synthesized
  source 1..20: mol_type = other DNA
tgacccttggaaggacctgg

SEQ ID NO: 12317 - DNA, 20 bp, synthetic construct
  misc_feature 1..20: note = chemically synthesized
  source 1..20: mol_type = other DNA
gagcactggaagcgccacct

SEQ ID NO: 12318 - DNA, 20 bp, synthetic construct
  misc_feature 1..20: note = chemically synthesized
  source 1..20: mol_type = other DNA
cgccacctgtgggtggtgac

SEQ ID NO: 12319 - DNA, 20 bp, synthetic construct
  misc_feature 1..20: note = chemically synthesized
  source 1..20: mol_type = other DNA
cgtgtctaacaggtaccatg

SEQ ID NO: 12320 - DNA, 20 bp, synthetic construct
  misc_feature 1..20: note = chemically synthesized
  source 1..20: mol_type = other DNA
cttcctgtttgcagatagcc

SEQ ID NO: 12321 - DNA, 20 bp, synthetic construct
  misc_feature 1..20: note = chemically synthesized
  source 1..20: mol_type = other DNA
cagccagtggccagaggctg

SEQ ID NO: 12322 - DNA, 20 bp, synthetic construct
  misc_feature 1..20: note = chemically synthesized
  source 1..20: mol_type = other DNA
actgtcctagcaccgtgtcc

SEQ ID NO: 12323 - DNA, 20 bp, synthetic construct
  misc_feature 1..20: note = chemically synthesized
  source 1..20: mol_type = other DNA
tctgttttcgtggctccctc

SEQ ID NO: 12324 - DNA, 20 bp, synthetic construct
  misc_feature 1..20: note = chemically synthesized
  source 1..20: mol_type = other DNA
acttgctgggacaccgtggc

SEQ ID NO: 12325 - DNA, 20 bp, synthetic construct
  misc_feature 1..20: note = chemically synthesized
  source 1..20: mol_type = other DNA
agctcttctctgttcagccc

SEQ ID NO: 12326 - DNA, 20 bp, synthetic construct
  misc_feature 1..20: note = chemically synthesized
  source 1..20: mol_type = other DNA
gcctggagaaggatgcagga

SEQ ID NO: 12327 - DNA, 20 bp, synthetic construct
  misc_feature 1..20: note = chemically synthesized
  source 1..20: mol_type = other DNA
cgagaaacacagccccaggt

SEQ ID NO: 12328 - DNA, 20 bp, synthetic construct
  misc_feature 1..20: note = chemically synthesized
  source 1..20: mol_type = other DNA
gcagtcaccccacagttgga

SEQ ID NO: 12329 - DNA, 20 bp, synthetic construct
  misc_feature 1..20: note = chemically synthesized
  source 1..20: mol_type = other DNA
ctctttaaggaaagaaggat

SEQ ID NO: 12330 - DNA, 20 bp, synthetic construct
  misc_feature 1..20: note = chemically synthesized
  source 1..20: mol_type = other DNA
aaggaaagaaggatggagaa

SEQ ID NO: 12331 - DNA, 20 bp, synthetic construct
  misc_feature 1..20: note = chemically synthesized
  source 1..20: mol_type = other DNA
ggaacaatataaattgggga

SEQ ID NO: 12332 - DNA, 20 bp, synthetic construct
  misc_feature 1..20: note = chemically synthesized
  source 1..20: mol_type = other DNA
ggagaacggggtgtccaggc

SEQ ID NO: 12333 - DNA, 20 bp, synthetic construct
  misc_feature 1..20: note = chemically synthesized
  source 1..20: mol_type = other DNA
acggggtactttggggttgt

SEQ ID NO: 12334 - DNA, 20 bp, synthetic construct
  misc_feature 1..20: note = chemically synthesized
  source 1..20: mol_type = other DNA
tccgtcggagaaggccatcc

SEQ ID NO: 12335 - DNA, 20 bp, synthetic construct
  misc_feature 1..20: note = chemically synthesized
  source 1..20: mol_type = other DNA
acccaggccacaagctgcag

SEQ ID NO: 12336 - DNA, 20 bp, synthetic construct
  misc_feature 1..20: note = chemically synthesized
  source 1..20: mol_type = other DNA
aagcggcacaggcccagggg

SEQ ID NO: 12337 - DNA, 20 bp, synthetic construct
  misc_feature 1..20: note = chemically synthesized
  source 1..20: mol_type = other DNA
caggggagagaatgcaggtc

SEQ ID NO: 12338 - DNA, 20 bp, synthetic construct
  misc_feature 1..20: note = chemically synthesized
  source 1..20: mol_type = other DNA
cactagggacaggattggtg

SEQ ID NO: 12339 - DNA, 20 bp, synthetic construct
  misc_feature 1..20: note = chemically synthesized
  source 1..20: mol_type = other DNA
agcagtttggaaaaacaaaa

SEQ ID NO: 12340 - DNA, 20 bp, synthetic construct
  misc_feature 1..20: note = chemically synthesized
  source 1..20: mol_type = other DNA
cgtgtggaaaactccctttg

SEQ ID NO: 12341 - DNA, 20 bp, synthetic construct
  misc_feature 1..20: note = chemically synthesized
  source 1..20: mol_type = other DNA
caagttttggacccctaagg

SEQ ID NO: 12342 - DNA, 20 bp, synthetic construct
  misc_feature 1..20: note = chemically synthesized
  source 1..20: mol_type = other DNA
ttggacccctaagggaagaa

SEQ ID NO: 12343 - DNA, 20 bp, synthetic construct
  misc_feature 1..20: note = chemically synthesized
  source 1..20: mol_type = other DNA
gggactccagagggagccac

SEQ ID NO: 12344 - DNA, 20 bp, synthetic construct
  misc_feature 1..20: note = chemically synthesized
  source 1..20: mol_type = other DNA
atggtacctgttagacacgg

SEQ ID NO: 12345 - DNA, 20 bp, synthetic construct
  misc_feature 1..20: note = chemically synthesized
  source 1..20: mol_type = other DNA
tcattcttcccttaggggtc

SEQ ID NO: 12346 - DNA, 20 bp, synthetic construct
  misc_feature 1..20: note = chemically synthesized
  source 1..20: mol_type = other DNA
aggactgagggtttcagtgc

SEQ ID NO: 12347 - DNA, 20 bp, synthetic construct
  misc_feature 1..20: note = chemically synthesized
  source 1..20: mol_type = other DNA
tactggccttatctcacagg

SEQ ID NO: 12348 - DNA, 20 bp, synthetic construct
  misc_feature 1..20: note = chemically synthesized
  source 1..20: mol_type = other DNA
ggtactttggggttgtccag

SEQ ID NO: 12349 - DNA, 20 bp, synthetic construct
  misc_feature 1..20: note = chemically synthesized
  source 1..20: mol_type = other DNA
caagaggagaagcagtttgg

SEQ ID NO: 12350 - DNA, 20 bp, synthetic construct
  misc_feature 1..20: note = chemically synthesized
  source 1..20: mol_type = other DNA
aggaggggggtgtccgtgtg

SEQ ID NO: 12351 - DNA, 20 bp, synthetic construct
  misc_feature 1..20: note = chemically synthesized
  source 1..20: mol_type = other DNA
actgaaaccctcagtcctag

SEQ ID NO: 12352 - DNA, 20 bp, synthetic construct
  misc_feature 1..20: note = chemically synthesized
  source 1..20: mol_type = other DNA
cccaacagcctctggccact

SEQ ID NO: 12353 - DNA, 20 bp, synthetic construct
  misc_feature 1..20: note = chemically synthesized
  source 1..20: mol_type = other DNA
ggaagtgaacggggaaggga

SEQ ID NO: 12354 - DNA, 20 bp, synthetic construct
  misc_feature 1..20: note = chemically synthesized
  source 1..20: mol_type = other DNA
cccccgtcaccacccacagg

SEQ ID NO: 12355 - DNA, 20 bp, synthetic construct
  misc_feature 1..20: note = chemically synthesized
  source 1..20: mol_type = other DNA
agccaggggctgacacgggc

SEQ ID NO: 12356 - DNA, 20 bp, synthetic construct
  misc_feature 1..20: note = chemically synthesized
  source 1..20: mol_type = other DNA
ctgggaacgggatgaactcg

SEQ ID NO: 12357 - DNA, 20 bp, synthetic construct
  misc_feature 1..20: note = chemically synthesized
  source 1..20: mol_type = other DNA
gaacagccacagcagggggg

SEQ ID NO: 12358 - DNA, 20 bp, synthetic construct
  misc_feature 1..20: note = chemically synthesized
  source 1..20: mol_type = other DNA
cagagacagtgaccaaccat

SEQ ID NO: 12359 - DNA, 20 bp, synthetic construct
  misc_feature 1..20: note = chemically synthesized
  source 1..20: mol_type = other DNA
atccctgttttcctaggact

SEQ ID NO: 12360 - DNA, 20 bp, synthetic construct
  misc_feature 1..20: note = chemically synthesized
  source 1..20: mol_type = other DNA
acctgacccaaacccagctc

SEQ ID NO: 12361 - DNA, 20 bp, synthetic construct
  misc_feature 1..20: note = chemically synthesized
  source 1..20: mol_type = other DNA
ctcctgggataccccgaaga

SEQ ID NO: 12362 - DNA, 20 bp, synthetic construct
  misc_feature 1..20: note = chemically synthesized
  source 1..20: mol_type = other DNA
gggaagcctgagcgcctctc

SEQ ID NO: 12363 - DNA, 20 bp, synthetic construct
  misc_feature 1..20: note = chemically synthesized
  source 1..20: mol_type = other DNA
ggacgcaccattctcacaaa

SEQ ID NO: 12364 - DNA, 20 bp, synthetic construct
  misc_feature 1..20: note = chemically synthesized
  source 1..20: mol_type = other DNA
tagaactcaggaccaactta

SEQ ID NO: 12365 - DNA, 20 bp, synthetic construct
  misc_feature 1..20: note = chemically synthesized
  source 1..20: mol_type = other DNA
tcaggaccaacttattctga

SEQ ID NO: 12366 - DNA, 20 bp, synthetic construct
  misc_feature 1..20: note = chemically synthesized
  source 1..20: mol_type = other DNA
attctgattttgtttttcca

SEQ ID NO: 12367 - DNA, 20 bp, synthetic construct
  misc_feature 1..20: note = chemically synthesized
  source 1..20: mol_type = other DNA
ggaaggaggaggcctaagga

SEQ ID NO: 12368 - DNA, 20 bp, synthetic construct
  misc_feature 1..20: note = chemically synthesized
  source 1..20: mol_type = other DNA
gagagcgccgcgcccgcacc

SEQ ID NO: 12369 - DNA, 20 bp, synthetic construct
  misc_feature 1..20: note = chemically synthesized
  source 1..20: mol_type = other DNA
ccgccccgtcgttcctggcc

SEQ ID NO: 12370 - DNA, 20 bp, synthetic construct
  misc_feature 1..20: note = chemically synthesized
  source 1..20: mol_type = other DNA
ccaccccacttccgaattgg

SEQ ID NO: 12371 - DNA, 20 bp, synthetic construct
  misc_feature 1..20: note = chemically synthesized
  source 1..20: mol_type = other DNA
tggagccgcttcaactggcc

SEQ ID NO: 12372 - DNA, 20 bp, synthetic construct
  misc_feature 1..20: note = chemically synthesized
  source 1..20: mol_type = other DNA
cctactctcttccgcattgg

SEQ ID NO: 12373 - DNA, 20 bp, synthetic construct
  misc_feature 1..20: note = chemically synthesized
  source 1..20: mol_type = other DNA
ttggagtcgctttaactggc

SEQ ID NO: 12374 - DNA, 20 bp, synthetic construct
  misc_feature 1..20: note = chemically synthesized
  source 1..20: mol_type = other DNA
tccggaccactttgagctct

SEQ ID NO: 12375 - DNA, 20 bp, synthetic construct
  misc_feature 1..20: note = chemically synthesized
  source 1..20: mol_type = other DNA
cttctgcgccgcctctggcc

SEQ ID NO: 12376 - DNA, 20 bp, synthetic construct
  misc_feature 1..20: note = chemically synthesized
  source 1..20: mol_type = other DNA
gtttccccttcccaggcagg

SEQ ID NO: 12377 - DNA, 20 bp, synthetic construct
  misc_feature 1..20: note = chemically synthesized
  source 1..20: mol_type = other DNA
cattctctcccctgggcctg

SEQ ID NO: 12378 - DNA, 20 bp, synthetic construct
  misc_feature 1..20: note = chemically synthesized
  source 1..20: mol_type = other DNA
ggcctgtgccgctttctgtc

SEQ ID NO: 12379 - DNA, 20 bp, synthetic construct
  misc_feature 1..20: note = chemically synthesized
  source 1..20: mol_type = other DNA
cttctggggcctgtgccatc

SEQ ID NO: 12380 - DNA, 20 bp, synthetic construct
  misc_feature 1..20: note = chemically synthesized
  source 1..20: mol_type = other DNA
ttcttgtaggcctgcatcat

SEQ ID NO: 12381 - DNA, 20 bp, synthetic construct
  misc_feature 1..20: note = chemically synthesized
  source 1..20: mol_type = other DNA
accccaaagtaccccgtctc

SEQ ID NO: 12382 - DNA, 20 bp, synthetic construct
  misc_feature 1..20: note = chemically synthesized
  source 1..20: mol_type = other DNA
ctttagccacctctccatcc

SEQ ID NO: 12383 - DNA, 20 bp, synthetic construct
  misc_feature 1..20: note = chemically synthesized
  source 1..20: mol_type = other DNA
gcctggacaccccgttctcc

SEQ ID NO: 12384 - DNA, 20 bp, synthetic construct
  misc_feature 1..20: note = chemically synthesized
  source 1..20: mol_type = other DNA
cctatgtccacttcaggaca

SEQ ID NO: 12385 - DNA, 20 bp, synthetic construct
  misc_feature 1..20: note = chemically synthesized
  source 1..20: mol_type = other DNA
ccacagtggggccactaggg

SEQ ID NO: 12386 - DNA, 20 bp, synthetic construct
  misc_feature 1..20: note = chemically synthesized
  source 1..20: mol_type = other DNA
ctaacccccacctcctgtta

SEQ ID NO: 12387 - DNA, 20 bp, synthetic construct
  misc_feature 1..20: note = chemically synthesized
  source 1..20: mol_type = other DNA
tctctccttgccagaacctc

SEQ ID NO: 12388 - DNA, 20 bp, synthetic construct
  misc_feature 1..20: note = chemically synthesized
  source 1..20: mol_type = other DNA
tccttgccagaacctctaag

SEQ ID NO: 12389 - DNA, 20 bp, synthetic construct
  misc_feature 1..20: note = chemically synthesized
  source 1..20: mol_type = other DNA
ccagagaggatcctgggagg

SEQ ID NO: 12390 - DNA, 20 bp, synthetic construct
  misc_feature 1..20: note = chemically synthesized
  source 1..20: mol_type = other DNA
tgctctgacgcggccgtctg

SEQ ID NO: 12391 - DNA, 20 bp, synthetic construct
  misc_feature 1..20: note = chemically synthesized
  source 1..20: mol_type = other DNA
cgtttcactgatcctggtgc

SEQ ID NO: 12392 - DNA, 20 bp, synthetic construct
  misc_feature 1..20: note = chemically synthesized
  source 1..20: mol_type = other DNA
ttacacttcccaagaggaga

SEQ ID NO: 12393 - DNA, 20 bp, synthetic construct
  misc_feature 1..20: note = chemically synthesized
  source 1..20: mol_type = other DNA
tttatattgttcctccgtgc

SEQ ID NO: 12394 - DNA, 20 bp, synthetic construct
  misc_feature 1..20: note = chemically synthesized
  source 1..20: mol_type = other DNA
ttcctccgcccagagcaggg

SEQ ID NO: 12395 - DNA, 20 bp, synthetic construct
  misc_feature 1..20: note = chemically synthesized
  source 1..20: mol_type = other DNA
cgcttccctaaggccctgct

SEQ ID NO: 12396 - DNA, 20 bp, synthetic construct
  misc_feature 1..20: note = chemically synthesized
  source 1..20: mol_type = other DNA
taaggccctgctctgggctt

SEQ ID NO: 12397 - DNA, 20 bp, synthetic construct
  misc_feature 1..20: note = chemically synthesized
  source 1..20: mol_type = other DNA
ggcaagcccaggagaggcgc

SEQ ID NO: 12398 - DNA, 20 bp, synthetic construct
  misc_feature 1..20: note = chemically synthesized
  source 1..20: mol_type = other DNA
gtctaccaggctgccttttg

SEQ ID NO: 12399 - DNA, 20 bp, synthetic construct
  misc_feature 1..20: note = chemically synthesized
  source 1..20: mol_type = other DNA
ttctcctccaactgtggggt

SEQ ID NO: 12400 - DNA, 20 bp, synthetic construct
  misc_feature 1..20: note = chemically synthesized
  source 1..20: mol_type = other DNA
gtgggctggggttcagagag

SEQ ID NO: 12401 - DNA, 20 bp, synthetic construct
  misc_feature 1..20: note = chemically synthesized
  source 1..20: mol_type = other DNA
gtggccaagaagcaggggag

SEQ ID NO: 12402 - DNA, 20 bp, synthetic construct
  misc_feature 1..20: note = chemically synthesized
  source 1..20: mol_type = other DNA
tcaggtctgggtgtggggtg

SEQ ID NO: 12403 - DNA, 20 bp, synthetic construct
  misc_feature 1..20: note = chemically synthesized
  source 1..20: mol_type = other DNA
ggtgtggggtgaccagctta

SEQ ID NO: 12404 - DNA, 20 bp, synthetic construct
  misc_feature 1..20: note = chemically synthesized
  source 1..20: mol_type = other DNA
atgctgtttgcccaggacag

SEQ ID NO: 12405 - DNA, 20 bp, synthetic construct
  misc_feature 1..20: note = chemically synthesized
  source 1..20: mol_type = other DNA
ggtcactgtctctgggtgac

SEQ ID NO: 12406 - DNA, 20 bp, synthetic construct
  misc_feature 1..20: note = chemically synthesized
  source 1..20: mol_type = other DNA
tgggtgactcttgattcccg

SEQ ID NO: 12407 - DNA, 20 bp, synthetic construct
  misc_feature 1..20: note = chemically synthesized
  source 1..20: mol_type = other DNA
gccagtttctccacctgggg

SEQ ID NO: 12408 - DNA, 20 bp, synthetic construct
  misc_feature 1..20: note = chemically synthesized
  source 1..20: mol_type = other DNA
aagttcttagggtaccccac

SEQ ID NO: 12409 - DNA, 20 bp, synthetic construct
  misc_feature 1..20: note = chemically synthesized
  source 1..20: mol_type = other DNA
tagagtaggaggggctggag

SEQ ID NO: 12410 - DNA, 20 bp, synthetic construct
  misc_feature 1..20: note = chemically synthesized
  source 1..20: mol_type = other DNA
agagctgggggcctgggctc

SEQ ID NO: 12411 - DNA, 20 bp, synthetic construct
  misc_feature 1..20: note = chemically synthesized
  source 1..20: mol_type = other DNA
acgtgcggccccttcacagc

SEQ ID NO: 12412 - DNA, 20 bp, synthetic construct
  misc_feature 1..20: note = chemically synthesized
  source 1..20: mol_type = other DNA
cctcccgcctcctccagatg

SEQ ID NO: 12413 - DNA, 20 bp, synthetic construct
  misc_feature 1..20: note = chemically synthesized
  source 1..20: mol_type = other DNA
gtaatttatcccgtggatct

SEQ ID NO: 12414 - DNA, 20 bp, synthetic construct
  misc_feature 1..20: note = chemically synthesized
  source 1..20: mol_type = other DNA
ttatcccgtggatctaggag

SEQ ID NO: 12415 - DNA, 20 bp, synthetic construct
  misc_feature 1..20: note = chemically synthesized
  source 1..20: mol_type = other DNA
cctcctccgaccccctggac

SEQ ID NO: 12416 - DNA, 20 bp, synthetic construct
  misc_feature 1..20: note = chemically synthesized
  source 1..20: mol_type = other DNA
ggacttcggcttttgtcccc

SEQ ID NO: 12417 - DNA, 20 bp, synthetic construct
  misc_feature 1..20: note = chemically synthesized
  source 1..20: mol_type = other DNA
accctgcatagccctgggcc

SEQ ID NO: 12418 - DNA, 20 bp, synthetic construct
  misc_feature 1..20: note = chemically synthesized
  source 1..20: mol_type = other DNA
tcctgcagagtatctgctgg

SEQ ID NO: 12419 - DNA, 20 bp, synthetic construct
  misc_feature 1..20: note = chemically synthesized
  source 1..20: mol_type = other DNA
agtatctgctggggtggttt

SEQ ID NO: 12420 - DNA, 20 bp, synthetic construct
  misc_feature 1..20: note = chemically synthesized
  source 1..20: mol_type = other DNA
tgacccttggaaggacctgg

SEQ ID NO: 12421 - DNA, 20 bp, synthetic construct
  misc_feature 1..20: note = chemically synthesized
  source 1..20: mol_type = other DNA
cgccacctgtgggtggtgac

SEQ ID NO: 12422 - DNA, 20 bp, synthetic construct
  misc_feature 1..20: note = chemically synthesized
  source 1..20: mol_type = other DNA
ccctcccttccccgttcact

SEQ ID NO: 12423 - DNA, 20 bp, synthetic construct
  misc_feature 1..20: note = chemically synthesized
  source 1..20: mol_type = other DNA
cagatagccaggagtccttt

SEQ ID NO: 12424 - DNA, 20 bp, synthetic construct
  misc_feature 1..20: note = chemically synthesized
  source 1..20: mol_type = other DNA
tcctagcaccgtgtccctgg

SEQ ID NO: 12425 - DNA, 20 bp, synthetic construct
  misc_feature 1..20: note = chemically synthesized
  source 1..20: mol_type = other DNA
ctggggtaggtgcggctgac

SEQ ID NO: 12426 - DNA, 20 bp, synthetic construct
  misc_feature 1..20: note = chemically synthesized
  source 1..20: mol_type = other DNA
ttgatgagaacctggaggtg

SEQ ID NO: 12427 - DNA, 22 bp, synthetic construct
  misc_feature 1..22: note = chemically synthesized
  source 1..22: mol_type = other DNA
gcgatatctaggtagccacagg

SEQ ID NO: 12428 - DNA, 22 bp, synthetic construct
  misc_feature 1..22: note = chemically synthesized
  source 1..22: mol_type = other DNA
ggtagccacaggaggcggccac

SEQ ID NO: 12429 - DNA, 22 bp, synthetic construct
  misc_feature 1..22: note = chemically synthesized
  source 1..22: mol_type = other DNA
gttgtctgcctggttcacagtg

SEQ ID NO: 12430 - DNA, 22 bp, synthetic construct
  misc_feature 1..22: note = chemically synthesized
  source 1..22: mol_type = other DNA
tctgcctggttcacagtggcgc

SEQ ID NO: 12431 - DNA, 22 bp, synthetic construct
  misc_feature 1..22: note = chemically synthesized
  source 1..22: mol_type = other DNA
cctggttcacagtggcgccctg

SEQ ID NO: 12432 - DNA, 22 bp, synthetic construct
  misc_feature 1..22: note = chemically synthesized
  source 1..22: mol_type = other DNA
gttcacagtggcgccctgctcc

SEQ ID NO: 12433 - DNA, 22 bp, synthetic construct
  misc_feature 1..22: note = chemically synthesized
  source 1..22: mol_type = other DNA
acagtggcgccctgctccacca

SEQ ID NO: 12434 - DNA, 22 bp, synthetic construct
  misc_feature 1..22: note = chemically synthesized
  source 1..22: mol_type = other DNA
ctccaccaagaagcgcaccacc

SEQ ID NO: 12435 - DNA, 22 bp, synthetic construct
  misc_feature 1..22: note = chemically synthesized
  source 1..22: mol_type = other DNA
caccaagaagcgcaccacctcc

SEQ ID NO: 12436 - DNA, 22 bp, synthetic construct
  misc_feature 1..22: note = chemically synthesized
  source 1..22: mol_type = other DNA
caggttctcatcaatgcaggcc

SEQ ID NO: 12437 - DNA, 22 bp, synthetic construct
  misc_feature 1..22: note = chemically synthesized
  source 1..22: mol_type = other DNA
tcatcaatgcaggcctgggggt

SEQ ID NO: 12438 - DNA, 22 bp, synthetic construct
  misc_feature 1..22: note = chemically synthesized
  source 1..22: mol_type = other DNA
atcaatgcaggcctgggggtgg

SEQ ID NO: 12439 - DNA, 22 bp, synthetic construct
  misc_feature 1..22: note = chemically synthesized
  source 1..22: mol_type = other DNA
ggggtgggaaacagccgtcagc

SEQ ID NO: 12440 - DNA, 22 bp, synthetic construct
  misc_feature 1..22: note = chemically synthesized
  source 1..22: mol_type = other DNA
ccccagccacggtgtcccagca

SEQ ID NO: 12441 - DNA, 22 bp, synthetic construct
  misc_feature 1..22: note = chemically synthesized
  source 1..22: mol_type = other DNA
cagagggagccacgaaaacaga

SEQ ID NO: 12442 - DNA, 22 bp, synthetic construct
  misc_feature 1..22: note = chemically synthesized
  source 1..22: mol_type = other DNA
ggacagtggggaaaatgaccca

SEQ ID NO: 12443 - DNA, 22 bp, synthetic construct
  misc_feature 1..22: note = chemically synthesized
  source 1..22: mol_type = other DNA
tggccactggctgtttaagata

SEQ ID NO: 12444 - DNA, 22 bp, synthetic construct
  misc_feature 1..22: note = chemically synthesized
  source 1..22: mol_type = other DNA
gccactggctgtttaagatacg

SEQ ID NO: 12445 - DNA, 22 bp, synthetic construct
  misc_feature 1..22: note = chemically synthesized
  source 1..22: mol_type = other DNA
gctgtttaagatacgcctggtt

SEQ ID NO: 12446 - DNA, 22 bp, synthetic construct
  misc_feature 1..22: note = chemically synthesized
  source 1..22: mol_type = other DNA
tttaagatacgcctggttgccc

SEQ ID NO: 12447 - DNA, 22 bp, synthetic construct
  misc_feature 1..22: note = chemically synthesized
  source 1..22: mol_type = other DNA
aagatacgcctggttgcccagt

SEQ ID NO: 12448 - DNA, 22 bp, synthetic construct
  misc_feature 1..22: note = chemically synthesized
  source 1..22: mol_type = other DNA
agatacgcctggttgcccagtg

SEQ ID NO: 12449 - DNA, 22 bp, synthetic construct
  misc_feature 1..22: note = chemically synthesized
  source 1..22: mol_type = other DNA
gttgcccagtggtcaggccggc

SEQ ID NO: 12450 - DNA, 22 bp, synthetic construct
  misc_feature 1..22: note = chemically synthesized
  source 1..22: mol_type = other DNA
cccagtggtcaggccggccagg

SEQ ID NO: 12451 - DNA, 22 bp, synthetic construct
  misc_feature 1..22: note = chemically synthesized
  source 1..22: mol_type = other DNA
cagtgctcagtggaaaccacga

SEQ ID NO: 12452 - DNA, 22 bp, synthetic construct
  misc_feature 1..22: note = chemically synthesized
  source 1..22: mol_type = other DNA
agtgctcagtggaaaccacgaa

SEQ ID NO: 12453 - DNA, 22 bp, synthetic construct
  misc_feature 1..22: note = chemically synthesized
  source 1..22: mol_type = other DNA
agtggaaaccacgaaaggactc

SEQ ID NO: 12454 - DNA, 22 bp, synthetic construct
  misc_feature 1..22: note = chemically synthesized
  source 1..22: mol_type = other DNA
ctggctatctgcaaacaggaag

SEQ ID NO: 12455 - DNA, 22 bp, synthetic construct
  misc_feature 1..22: note = chemically synthesized
  source 1..22: mol_type = other DNA
gctatctgcaaacaggaagtga

SEQ ID NO: 12456 - DNA, 22 bp, synthetic construct
  misc_feature 1..22: note = chemically synthesized
  source 1..22: mol_type = other DNA
tctgcaaacaggaagtgaacgg

SEQ ID NO: 12457 - DNA, 22 bp, synthetic construct
  misc_feature 1..22: note = chemically synthesized
  source 1..22: mol_type = other DNA
caaacaggaagtgaacggggaa

SEQ ID NO: 12458 - DNA, 22 bp, synthetic construct
  misc_feature 1..22: note = chemically synthesized
  source 1..22: mol_type = other DNA
ctcatctgggtgcgggaacccc

SEQ ID NO: 12459 - DNA, 22 bp, synthetic construct
  misc_feature 1..22: note = chemically synthesized
  source 1..22: mol_type = other DNA
tcatctgggtgcgggaacccca

SEQ ID NO: 12460 - DNA, 22 bp, synthetic construct
  misc_feature 1..22: note = chemically synthesized
  source 1..22: mol_type = other DNA
atctgggtgcgggaaccccaca

SEQ ID NO: 12461 - DNA, 22 bp, synthetic construct
  misc_feature 1..22: note = chemically synthesized
  source 1..22: mol_type = other DNA
ggtgcgggaaccccacatggta

SEQ ID NO: 12462 - DNA, 22 bp, synthetic construct
  misc_feature 1..22: note = chemically synthesized
  source 1..22: mol_type = other DNA
ttagacacggcaaaacccccgt

SEQ ID NO: 12463 - DNA, 22 bp, synthetic construct
  misc_feature 1..22: note = chemically synthesized
  source 1..22: mol_type = other DNA
gacacggcaaaacccccgtcac

SEQ ID NO: 12464 - DNA, 22 bp, synthetic construct
  misc_feature 1..22: note = chemically synthesized
  source 1..22: mol_type = other DNA
ccagtgctcagactagggaaga

SEQ ID NO: 12465 - DNA, 22 bp, synthetic construct
  misc_feature 1..22: note = chemically synthesized
  source 1..22: mol_type = other DNA
cagtgctcagactagggaagag

SEQ ID NO: 12466 - DNA, 22 bp, synthetic construct
  misc_feature 1..22: note = chemically synthesized
  source 1..22: mol_type = other DNA
agactagggaagaggttccagc

SEQ ID NO: 12467 - DNA, 22 bp, synthetic construct
  misc_feature 1..22: note = chemically synthesized
  source 1..22: mol_type = other DNA
gggaagaggttccagcccctcc

SEQ ID NO: 12468 - DNA, 22 bp, synthetic construct
  misc_feature 1..22: note = chemically synthesized
  source 1..22: mol_type = other DNA
cagcccctcctccttcagagcc

SEQ ID NO: 12469 - DNA, 22 bp, synthetic construct
  misc_feature 1..22: note = chemically synthesized
  source 1..22: mol_type = other DNA
ctccttcagagccaggagtcct

SEQ ID NO: 12470 - DNA, 22 bp, synthetic construct
  misc_feature 1..22: note = chemically synthesized
  source 1..22: mol_type = other DNA
cttcagagccaggagtcctggc

SEQ ID NO: 12471 - DNA, 22 bp, synthetic construct
  misc_feature 1..22: note = chemically synthesized
  source 1..22: mol_type = other DNA
cagagccaggagtcctggcccc

SEQ ID NO: 12472 - DNA, 22 bp, synthetic construct
  misc_feature 1..22: note = chemically synthesized
  source 1..22: mol_type = other DNA
agagccaggagtcctggccccc

SEQ ID NO: 12473 - DNA, 22 bp, synthetic construct
  misc_feature 1..22: note = chemically synthesized
  source 1..22: mol_type = other DNA
gcccccagcccctcctgcctta

SEQ ID NO: 12474 - DNA, 22 bp, synthetic construct
  misc_feature 1..22: note = chemically synthesized
  source 1..22: mol_type = other DNA
ctgccttaaacccagccaggtc

SEQ ID NO: 12475 - DNA, 22 bp, synthetic construct
  misc_feature 1..22: note = chemically synthesized
  source 1..22: mol_type = other DNA
ccttaaacccagccaggtcctt

SEQ ID NO: 12476 - DNA, 22 bp, synthetic construct
  misc_feature 1..22: note = chemically synthesized
  source 1..22: mol_type = other DNA
aaacccagccaggtccttccaa

SEQ ID NO: 12477 - DNA, 22 bp, synthetic construct
  misc_feature 1..22: note = chemically synthesized
  source 1..22: mol_type = other DNA
aacccagccaggtccttccaag

SEQ ID NO: 12478 - DNA, 22 bp, synthetic construct
  misc_feature 1..22: note = chemically synthesized
  source 1..22: mol_type = other DNA
ccaagggtcaagctcggaaacc

SEQ ID NO: 12479 - DNA, 22 bp, synthetic construct
  misc_feature 1..22: note = chemically synthesized
  source 1..22: mol_type = other DNA
caagggtcaagctcggaaacca

SEQ ID NO: 12480 - DNA, 22 bp, synthetic construct
  misc_feature 1..22: note = chemically synthesized
  source 1..22: mol_type = other DNA
ggaaaccaccccagcagatact

SEQ ID NO: 12481 - DNA, 22 bp, synthetic construct
  misc_feature 1..22: note = chemically synthesized
  source 1..22: mol_type = other DNA
tgcaggaacgaagccgtgggcc

SEQ ID NO: 12482 - DNA, 22 bp, synthetic construct
  misc_feature 1..22: note = chemically synthesized
  source 1..22: mol_type = other DNA
caggaacgaagccgtgggccca

SEQ ID NO: 12483 - DNA, 22 bp, synthetic construct
  misc_feature 1..22: note = chemically synthesized
  source 1..22: mol_type = other DNA
tgcagggtggaggaaggccacc

SEQ ID NO: 12484 - DNA, 22 bp, synthetic construct
  misc_feature 1..22: note = chemically synthesized
  source 1..22: mol_type = other DNA
tgctgggacagactcaggggcc

SEQ ID NO: 12485 - DNA, 22 bp, synthetic construct
  misc_feature 1..22: note = chemically synthesized
  source 1..22: mol_type = other DNA
ggacagactcaggggcctgggc

SEQ ID NO: 12486 - DNA, 22 bp, synthetic construct
  misc_feature 1..22: note = chemically synthesized
  source 1..22: mol_type = other DNA
aggggcctgggcgggactccca

SEQ ID NO: 12487 - DNA, 22 bp, synthetic construct
  misc_feature 1..22: note = chemically synthesized
  source 1..22: mol_type = other DNA
ggcgggactcccagaggggtga

SEQ ID NO: 12488 - DNA, 22 bp, synthetic construct
  misc_feature 1..22: note = chemically synthesized
  source 1..22: mol_type = other DNA
ccagaggggtgagacagctgca

SEQ ID NO: 12489 - DNA, 22 bp, synthetic construct
  misc_feature 1..22: note = chemically synthesized
  source 1..22: mol_type = other DNA
cacacctgtgtgcctgggcccc

SEQ ID NO: 12490 - DNA, 22 bp, synthetic construct
  misc_feature 1..22: note = chemically synthesized
  source 1..22: mol_type = other DNA
tgtgcctgggccccaggctgtc

SEQ ID NO: 12491 - DNA, 22 bp, synthetic construct
  misc_feature 1..22: note = chemically synthesized
  source 1..22: mol_type = other DNA
ggccccaggctgtcacactcca

SEQ ID NO: 12492 - DNA, 22 bp, synthetic construct
  misc_feature 1..22: note = chemically synthesized
  source 1..22: mol_type = other DNA
tcacactccagttcactgaggc

SEQ ID NO: 12493 - DNA, 22 bp, synthetic construct
  misc_feature 1..22: note = chemically synthesized
  source 1..22: mol_type = other DNA
cagttcactgaggccccctctg

SEQ ID NO: 12494 - DNA, 22 bp, synthetic construct
  misc_feature 1..22: note = chemically synthesized
  source 1..22: mol_type = other DNA
actgaggccccctctgcacggg

SEQ ID NO: 12495 - DNA, 22 bp, synthetic construct
  misc_feature 1..22: note = chemically synthesized
  source 1..22: mol_type = other DNA
aggccccctctgcacggggccc

SEQ ID NO: 12496 - DNA, 22 bp, synthetic construct
  misc_feature 1..22: note = chemically synthesized
  source 1..22: mol_type = other DNA
tgcacggggccctgcagccagg

SEQ ID NO: 12497 - DNA, 22 bp, synthetic construct
  misc_feature 1..22: note = chemically synthesized
  source 1..22: mol_type = other DNA
cacggggccctgcagccagggg

SEQ ID NO: 12498 - DNA, 22 bp, synthetic construct
  misc_feature 1..22: note = chemically synthesized
  source 1..22: mol_type = other DNA
cagccaggggctgacacgggcc

SEQ ID NO: 12499 - DNA, 22 bp, synthetic construct
  misc_feature 1..22: note = chemically synthesized
  source 1..22: mol_type = other DNA
acacgggccaccgtttctcatt

SEQ ID NO: 12500 - DNA, 22 bp, synthetic construct
  misc_feature 1..22: note = chemically synthesized
  source 1..22: mol_type = other DNA
ctcattcttcccttaggggtcc

SEQ ID NO: 12501 - DNA, 22 bp, synthetic construct
  misc_feature 1..22: note = chemically synthesized
  source 1..22: mol_type = other DNA
tcattcttcccttaggggtcca

SEQ ID NO: 12502 - DNA, 22 bp, synthetic construct
  misc_feature 1..22: note = chemically synthesized
  source 1..22: mol_type = other DNA
attcttcccttaggggtccaaa

SEQ ID NO: 12503 - DNA, 22 bp, synthetic construct
  misc_feature 1..22: note = chemically synthesized
  source 1..22: mol_type = other DNA
ttcccttaggggtccaaaactt

SEQ ID NO: 12504 - DNA, 22 bp, synthetic construct
  misc_feature 1..22: note = chemically synthesized
  source 1..22: mol_type = other DNA
cccttaggggtccaaaacttgg

SEQ ID NO: 12505 - DNA, 22 bp, synthetic construct
  misc_feature 1..22: note = chemically synthesized
  source 1..22: mol_type = other DNA
ccttaggggtccaaaacttggg

SEQ ID NO: 12506 - DNA, 22 bp, synthetic construct
  misc_feature 1..22: note = chemically synthesized
  source 1..22: mol_type = other DNA
aggggtccaaaacttgggggga

SEQ ID NO: 12507 - DNA, 22 bp, synthetic construct
  misc_feature 1..22: note = chemically synthesized
  source 1..22: mol_type = other DNA
ggggtccaaaacttggggggac

SEQ ID NO: 12508 - DNA, 22 bp, synthetic construct
  misc_feature 1..22: note = chemically synthesized
  source 1..22: mol_type = other DNA
ggggggacaaaagccgaagtcc

SEQ ID NO: 12509 - DNA, 22 bp, synthetic construct
  misc_feature 1..22: note = chemically synthesized
  source 1..22: mol_type = other DNA
gggggacaaaagccgaagtcca

SEQ ID NO: 12510 - DNA, 22 bp, synthetic construct
  misc_feature 1..22: note = chemically synthesized
  source 1..22: mol_type = other DNA
gccccaggccttgtggacactg

SEQ ID NO: 12511 - DNA, 22 bp, synthetic construct
  misc_feature 1..22: note = chemically synthesized
  source 1..22: mol_type = other DNA
ccccaggccttgtggacactgg

SEQ ID NO: 12512 - DNA, 22 bp, synthetic construct
  misc_feature 1..22: note = chemically synthesized
  source 1..22: mol_type = other DNA
gtggacactgggtgggctccgg

SEQ ID NO: 12513 - DNA, 22 bp, synthetic construct
  misc_feature 1..22: note = chemically synthesized
  source 1..22: mol_type = other DNA
tggacactgggtgggctccggg

SEQ ID NO: 12514 - DNA, 22 bp, synthetic construct
  misc_feature 1..22: note = chemically synthesized
  source 1..22: mol_type = other DNA
ggtgggctccgggacctgaact

SEQ ID NO: 12515 - DNA, 22 bp, synthetic construct
  misc_feature 1..22: note = chemically synthesized
  source 1..22: mol_type = other DNA
cgggacctgaactggagctgag

SEQ ID NO: 12516 - DNA, 22 bp, synthetic construct
  misc_feature 1..22: note = chemically synthesized
  source 1..22: mol_type = other DNA
aactggagctgaggaaggagtg

SEQ ID NO: 12517 - DNA, 22 bp, synthetic construct
  misc_feature 1..22: note = chemically synthesized
  source 1..22: mol_type = other DNA
gagctgaggaaggagtgaagct

SEQ ID NO: 12518 - DNA, 22 bp, synthetic construct
  misc_feature 1..22: note = chemically synthesized
  source 1..22: mol_type = other DNA
aggaaggagtgaagctaaactc

SEQ ID NO: 12519 - DNA, 22 bp, synthetic construct
  misc_feature 1..22: note = chemically synthesized
  source 1..22: mol_type = other DNA
aactcctagatccacgggataa

SEQ ID NO: 12520 - DNA, 22 bp, synthetic construct
  misc_feature 1..22: note = chemically synthesized
  source 1..22: mol_type = other DNA
ctagatccacgggataaattac

SEQ ID NO: 12521 - DNA, 22 bp, synthetic construct
  misc_feature 1..22: note = chemically synthesized
  source 1..22: mol_type = other DNA
gatccacgggataaattacccc

SEQ ID NO: 12522 - DNA, 22 bp, synthetic construct
  misc_feature 1..22: note = chemically synthesized
  source 1..22: mol_type = other DNA
ccccccaagtccctcacctctc

SEQ ID NO: 12523 - DNA, 22 bp, synthetic construct
  misc_feature 1..22: note = chemically synthesized
  source 1..22: mol_type = other DNA
acctctccaaagctgcccatct

SEQ ID NO: 12524 - DNA, 22 bp, synthetic construct
  misc_feature 1..22: note = chemically synthesized
  source 1..22: mol_type = other DNA
tccaaagctgcccatctggagg

SEQ ID NO: 12525 - DNA, 22 bp, synthetic construct
  misc_feature 1..22: note = chemically synthesized
  source 1..22: mol_type = other DNA
caaagctgcccatctggaggag

SEQ ID NO: 12526 - DNA, 22 bp, synthetic construct
  misc_feature 1..22: note = chemically synthesized
  source 1..22: mol_type = other DNA
cccatctggaggaggcgggagg

SEQ ID NO: 12527 - DNA, 22 bp, synthetic construct
  misc_feature 1..22: note = chemically synthesized
  source 1..22: mol_type = other DNA
gaggaggcgggagggagctacg

SEQ ID NO: 12528 - DNA, 22 bp, synthetic construct
  misc_feature 1..22: note = chemically synthesized
  source 1..22: mol_type = other DNA
cgagggccaagagcatgaggtc

SEQ ID NO: 12529 - DNA, 22 bp, synthetic construct
  misc_feature 1..22: note = chemically synthesized
  source 1..22: mol_type = other DNA
gggctgtgaaggggccgcacgt

SEQ ID NO: 12530 - DNA, 22 bp, synthetic construct
  misc_feature 1..22: note = chemically synthesized
  source 1..22: mol_type = other DNA
tgaaggggccgcacgtgccctg

SEQ ID NO: 12531 - DNA, 22 bp, synthetic construct
  misc_feature 1..22: note = chemically synthesized
  source 1..22: mol_type = other DNA
ggaacgggatgaactcggctcg

SEQ ID NO: 12532 - DNA, 22 bp, synthetic construct
  misc_feature 1..22: note = chemically synthesized
  source 1..22: mol_type = other DNA
ggctcgtttatttccacccagt

SEQ ID NO: 12533 - DNA, 22 bp, synthetic construct
  misc_feature 1..22: note = chemically synthesized
  source 1..22: mol_type = other DNA
gtttatttccacccagttgtca

SEQ ID NO: 12534 - DNA, 22 bp, synthetic construct
  misc_feature 1..22: note = chemically synthesized
  source 1..22: mol_type = other DNA
atttccacccagttgtcatggc

SEQ ID NO: 12535 - DNA, 22 bp, synthetic construct
  misc_feature 1..22: note = chemically synthesized
  source 1..22: mol_type = other DNA
tttccacccagttgtcatggcg

SEQ ID NO: 12536 - DNA, 22 bp, synthetic construct
  misc_feature 1..22: note = chemically synthesized
  source 1..22: mol_type = other DNA
ccacccagttgtcatggcgata

SEQ ID NO: 12537 - DNA, 22 bp, synthetic construct
  misc_feature 1..22: note = chemically synthesized
  source 1..22: mol_type = other DNA
cacccagttgtcatggcgatag

SEQ ID NO: 12538 - DNA, 22 bp, synthetic construct
  misc_feature 1..22: note = chemically synthesized
  source 1..22: mol_type = other DNA
tcatggcgataggggagggggg

SEQ ID NO: 12539 - DNA, 22 bp, synthetic construct
  misc_feature 1..22: note = chemically synthesized
  source 1..22: mol_type = other DNA
tccctttcaaggacctgcccag

SEQ ID NO: 12540 - DNA, 22 bp, synthetic construct
  misc_feature 1..22: note = chemically synthesized
  source 1..22: mol_type = other DNA
ccctttcaaggacctgcccagt

SEQ ID NO: 12541 - DNA, 22 bp, synthetic construct
  misc_feature 1..22: note = chemically synthesized
  source 1..22: mol_type = other DNA
cctttcaaggacctgcccagta

SEQ ID NO: 12542 - DNA, 22 bp, synthetic construct
  misc_feature 1..22: note = chemically synthesized
  source 1..22: mol_type = other DNA
tcaaggacctgcccagtacagg

SEQ ID NO: 12543 - DNA, 22 bp, synthetic construct
  misc_feature 1..22: note = chemically synthesized
  source 1..22: mol_type = other DNA
caaggacctgcccagtacaggc

SEQ ID NO: 12544 - DNA, 22 bp, synthetic construct
  misc_feature 1..22: note = chemically synthesized
  source 1..22: mol_type = other DNA
aaggacctgcccagtacaggca

SEQ ID NO: 12545 - DNA, 22 bp, synthetic construct
  misc_feature 1..22: note = chemically synthesized
  source 1..22: mol_type = other DNA
cccagtacaggcatccctgtga

SEQ ID NO: 12546 - DNA, 22 bp, synthetic construct
  misc_feature 1..22: note = chemically synthesized
  source 1..22: mol_type = other DNA
tgaaagatgcctgaggcctggg

SEQ ID NO: 12547 - DNA, 22 bp, synthetic construct
  misc_feature 1..22: note = chemically synthesized
  source 1..22: mol_type = other DNA
aggcctgggcaccagggactcc

SEQ ID NO: 12548 - DNA, 22 bp, synthetic construct
  misc_feature 1..22: note = chemically synthesized
  source 1..22: mol_type = other DNA
ggcaccagggactccagagtcc

SEQ ID NO: 12549 - DNA, 22 bp, synthetic construct
  misc_feature 1..22: note = chemically synthesized
  source 1..22: mol_type = other DNA
cagagtccaggcccaacccctc

SEQ ID NO: 12550 - DNA, 22 bp, synthetic construct
  misc_feature 1..22: note = chemically synthesized
  source 1..22: mol_type = other DNA
cccattcaacccaggaggccag

SEQ ID NO: 12551 - DNA, 22 bp, synthetic construct
  misc_feature 1..22: note = chemically synthesized
  source 1..22: mol_type = other DNA
aacccaggaggccaggccccag

SEQ ID NO: 12552 - DNA, 22 bp, synthetic construct
  misc_feature 1..22: note = chemically synthesized
  source 1..22: mol_type = other DNA
ccgccctcagatgaaggagtcc

SEQ ID NO: 12553 - DNA, 22 bp, synthetic construct
  misc_feature 1..22: note = chemically synthesized
  source 1..22: mol_type = other DNA
cgccctcagatgaaggagtcca

SEQ ID NO: 12554 - DNA, 22 bp, synthetic construct
  misc_feature 1..22: note = chemically synthesized
  source 1..22: mol_type = other DNA
agatgaaggagtccaggccccc

SEQ ID NO: 12555 - DNA, 22 bp, synthetic construct
  misc_feature 1..22: note = chemically synthesized
  source 1..22: mol_type = other DNA
tccccattcagacccaggggtc

SEQ ID NO: 12556 - DNA, 22 bp, synthetic construct
  misc_feature 1..22: note = chemically synthesized
  source 1..22: mol_type = other DNA
cccattcagacccaggggtcca

SEQ ID NO: 12557 - DNA, 22 bp, synthetic construct
  misc_feature 1..22: note = chemically synthesized
  source 1..22: mol_type = other DNA
agacccaggggtccaggcccag

SEQ ID NO: 12558 - DNA, 22 bp, synthetic construct
  misc_feature 1..22: note = chemically synthesized
  source 1..22: mol_type = other DNA
cctaagacccagaagtccaggc

SEQ ID NO: 12559 - DNA, 22 bp, synthetic construct
  misc_feature 1..22: note = chemically synthesized
  source 1..22: mol_type = other DNA
agacccagaagtccaggccccc

SEQ ID NO: 12560 - DNA, 22 bp, synthetic construct
  misc_feature 1..22: note = chemically synthesized
  source 1..22: mol_type = other DNA
ctccctcagacccacgagtcca

SEQ ID NO: 12561 - DNA, 22 bp, synthetic construct
  misc_feature 1..22: note = chemically synthesized
  source 1..22: mol_type = other DNA
cctcagacccacgagtccaggc

SEQ ID NO: 12562 - DNA, 22 bp, synthetic construct
  misc_feature 1..22: note = chemically synthesized
  source 1..22: mol_type = other DNA
agacccacgagtccaggcccca

SEQ ID NO: 12563 - DNA, 22 bp, synthetic construct
  misc_feature 1..22: note = chemically synthesized
  source 1..22: mol_type = other DNA
ctccctcggacccaggagtcca

SEQ ID NO: 12564 - DNA, 22 bp, synthetic construct
  misc_feature 1..22: note = chemically synthesized
  source 1..22: mol_type = other DNA
cctcggacccaggagtccaggc

SEQ ID NO: 12565 - DNA, 22 bp, synthetic construct
  misc_feature 1..22: note = chemically synthesized
  source 1..22: mol_type = other DNA
ggacccaggagtccaggccccc

SEQ ID NO: 12566 - DNA, 22 bp, synthetic construct
  misc_feature 1..22: note = chemically synthesized
  source 1..22: mol_type = other DNA
caccctcagacccaggagtcca

SEQ ID NO: 12567 - DNA, 22 bp, synthetic construct
  misc_feature 1..22: note = chemically synthesized
  source 1..22: mol_type = other DNA
agacccaggagtccaggcccca

SEQ ID NO: 12568 - DNA, 22 bp, synthetic construct
  misc_feature 1..22: note = chemically synthesized
  source 1..22: mol_type = other DNA
ctccctcggacccaggagtcca

SEQ ID NO: 12569 - DNA, 22 bp, synthetic construct
  misc_feature 1..22: note = chemically synthesized
  source 1..22: mol_type = other DNA
cctcggacccaggagtccaggc

SEQ ID NO: 12570 - DNA, 22 bp, synthetic construct
  misc_feature 1..22: note = chemically synthesized
  source 1..22: mol_type = other DNA
ggacccaggagtccaggcccca

SEQ ID NO: 12571 - DNA, 22 bp, synthetic construct
  misc_feature 1..22: note = chemically synthesized
  source 1..22: mol_type = other DNA
ctctctcaaacccaggagccca

SEQ ID NO: 12572 - DNA, 22 bp, synthetic construct
  misc_feature 1..22: note = chemically synthesized
  source 1..22: mol_type = other DNA
tctcaaacccaggagcccaggc

SEQ ID NO: 12573 - DNA, 22 bp, synthetic construct
  misc_feature 1..22: note = chemically synthesized
  source 1..22: mol_type = other DNA
tcaaacccaggagcccaggccc

SEQ ID NO: 12574 - DNA, 22 bp, synthetic construct
  misc_feature 1..22: note = chemically synthesized
  source 1..22: mol_type = other DNA
aaacccaggagcccaggccccc

SEQ ID NO: 12575 - DNA, 22 bp, synthetic construct
  misc_feature 1..22: note = chemically synthesized
  source 1..22: mol_type = other DNA
ttctctgttcagccctaagaat

SEQ ID NO: 12576 - DNA, 22 bp, synthetic construct
  misc_feature 1..22: note = chemically synthesized
  source 1..22: mol_type = other DNA
ctctgttcagccctaagaatcc

SEQ ID NO: 12577 - DNA, 22 bp, synthetic construct
  misc_feature 1..22: note = chemically synthesized
  source 1..22: mol_type = other DNA
tctgttcagccctaagaatcct

SEQ ID NO: 12578 - DNA, 22 bp, synthetic construct
  misc_feature 1..22: note = chemically synthesized
  source 1..22: mol_type = other DNA
tgttcagccctaagaatcctgg

SEQ ID NO: 12579 - DNA, 22 bp, synthetic construct
  misc_feature 1..22: note = chemically synthesized
  source 1..22: mol_type = other DNA
ttcagccctaagaatcctggct

SEQ ID NO: 12580 - DNA, 22 bp, synthetic construct
  misc_feature 1..22: note = chemically synthesized
  source 1..22: mol_type = other DNA
agccctaagaatcctggctcca

SEQ ID NO: 12581 - DNA, 22 bp, synthetic construct
  misc_feature 1..22: note = chemically synthesized
  source 1..22: mol_type = other DNA
agaatcctggctccagcccctc

SEQ ID NO: 12582 - DNA, 22 bp, synthetic construct
  misc_feature 1..22: note = chemically synthesized
  source 1..22: mol_type = other DNA
gctccagcccctcctactctag

SEQ ID NO: 12583 - DNA, 22 bp, synthetic construct
  misc_feature 1..22: note = chemically synthesized
  source 1..22: mol_type = other DNA
cagcccctcctactctagcccc

SEQ ID NO: 12584 - DNA, 22 bp, synthetic construct
  misc_feature 1..22: note = chemically synthesized
  source 1..22: mol_type = other DNA
ctactctagcccccaaccccct

SEQ ID NO: 12585 - DNA, 22 bp, synthetic construct
  misc_feature 1..22: note = chemically synthesized
  source 1..22: mol_type = other DNA
ctctagcccccaaccccctagc

SEQ ID NO: 12586 - DNA, 22 bp, synthetic construct
  misc_feature 1..22: note = chemically synthesized
  source 1..22: mol_type = other DNA
tagcccccaaccccctagccac

SEQ ID NO: 12587 - DNA, 22 bp, synthetic construct
  misc_feature 1..22: note = chemically synthesized
  source 1..22: mol_type = other DNA
gcccccaaccccctagccacta

SEQ ID NO: 12588 - DNA, 22 bp, synthetic construct
  misc_feature 1..22: note = chemically synthesized
  source 1..22: mol_type = other DNA
gccactaaggcaattggggtgc

SEQ ID NO: 12589 - DNA, 22 bp, synthetic construct
  misc_feature 1..22: note = chemically synthesized
  source 1..22: mol_type = other DNA
aggcaattggggtgcaggaatg

SEQ ID NO: 12590 - DNA, 22 bp, synthetic construct
  misc_feature 1..22: note = chemically synthesized
  source 1..22: mol_type = other DNA
gggtgcaggaatgggggcaggg

SEQ ID NO: 12591 - DNA, 22 bp, synthetic construct
  misc_feature 1..22: note = chemically synthesized
  source 1..22: mol_type = other DNA
accaagtggttgataaacccac

SEQ ID NO: 12592 - DNA, 22 bp, synthetic construct
  misc_feature 1..22: note = chemically synthesized
  source 1..22: mol_type = other DNA
ataaacccacgtggggtaccct

SEQ ID NO: 12593 - DNA, 22 bp, synthetic construct
  misc_feature 1..22: note = chemically synthesized
  source 1..22: mol_type = other DNA
agaacttgggaacagccacagc

SEQ ID NO: 12594 - DNA, 22 bp, synthetic construct
  misc_feature 1..22: note = chemically synthesized
  source 1..22: mol_type = other DNA
gggaacagccacagcagggggg

SEQ ID NO: 12595 - DNA, 22 bp, synthetic construct
  misc_feature 1..22: note = chemically synthesized
  source 1..22: mol_type = other DNA
ggaacagccacagcaggggggc

SEQ ID NO: 12596 - DNA, 22 bp, synthetic construct
  misc_feature 1..22: note = chemically synthesized
  source 1..22: mol_type = other DNA
ggggacctgcctggagaaggat

SEQ ID NO: 12597 - DNA, 22 bp, synthetic construct
  misc_feature 1..22: note = chemically synthesized
  source 1..22: mol_type = other DNA
gggacctgcctggagaaggatg

SEQ ID NO: 12598 - DNA, 22 bp, synthetic construct
  misc_feature 1..22: note = chemically synthesized
  source 1..22: mol_type = other DNA
cctggagaaggatgcaggacga

SEQ ID NO: 12599 - DNA, 22 bp, synthetic construct
  misc_feature 1..22: note = chemically synthesized
  source 1..22: mol_type = other DNA
gagaaggatgcaggacgagaaa

SEQ ID NO: 12600 - DNA, 22 bp, synthetic construct
  misc_feature 1..22: note = chemically synthesized
  source 1..22: mol_type = other DNA
gccgggaatcaagagtcaccca

SEQ ID NO: 12601 - DNA, 22 bp, synthetic construct
  misc_feature 1..22: note = chemically synthesized
  source 1..22: mol_type = other DNA
ttttcctaggactgagggtttc

SEQ ID NO: 12602 - DNA, 22 bp, synthetic construct
  misc_feature 1..22: note = chemically synthesized
  source 1..22: mol_type = other DNA
tcctaggactgagggtttcagt

SEQ ID NO: 12603 - DNA, 22 bp, synthetic construct
  misc_feature 1..22: note = chemically synthesized
  source 1..22: mol_type = other DNA
cctaggactgagggtttcagtg

SEQ ID NO: 12604 - DNA, 22 bp, synthetic construct
  misc_feature 1..22: note = chemically synthesized
  source 1..22: mol_type = other DNA
ctaggactgagggtttcagtgc

SEQ ID NO: 12605 - DNA, 22 bp, synthetic construct
  misc_feature 1..22: note = chemically synthesized
  source 1..22: mol_type = other DNA
ggactgagggtttcagtgctaa

SEQ ID NO: 12606 - DNA, 22 bp, synthetic construct
  misc_feature 1..22: note = chemically synthesized
  source 1..22: mol_type = other DNA
agggtttcagtgctaaaactag

SEQ ID NO: 12607 - DNA, 22 bp, synthetic construct
  misc_feature 1..22: note = chemically synthesized
  source 1..22: mol_type = other DNA
cagtgctaaaactaggctgtcc

SEQ ID NO: 12608 - DNA, 22 bp, synthetic construct
  misc_feature 1..22: note = chemically synthesized
  source 1..22: mol_type = other DNA
agtgctaaaactaggctgtcct

SEQ ID NO: 12609 - DNA, 22 bp, synthetic construct
  misc_feature 1..22: note = chemically synthesized
  source 1..22: mol_type = other DNA
aaactaggctgtcctgggcaaa

SEQ ID NO: 12610 - DNA, 22 bp, synthetic construct
  misc_feature 1..22: note = chemically synthesized
  source 1..22: mol_type = other DNA
ggctgtcctgggcaaacagcat

SEQ ID NO: 12611 - DNA, 22 bp, synthetic construct
  misc_feature 1..22: note = chemically synthesized
  source 1..22: mol_type = other DNA
tcctgggcaaacagcataagct

SEQ ID NO: 12612 - DNA, 22 bp, synthetic construct
  misc_feature 1..22: note = chemically synthesized
  source 1..22: mol_type = other DNA
ggcaaacagcataagctggtca

SEQ ID NO: 12613 - DNA, 22 bp, synthetic construct
  misc_feature 1..22: note = chemically synthesized
  source 1..22: mol_type = other DNA
gtcaccccacacccagacctga

SEQ ID NO: 12614 - DNA, 22 bp, synthetic construct
  misc_feature 1..22: note = chemically synthesized
  source 1..22: mol_type = other DNA
acccaaacccagctcccctgct

SEQ ID NO: 12615 - DNA, 22 bp, synthetic construct
  misc_feature 1..22: note = chemically synthesized
  source 1..22: mol_type = other DNA
ccctgcttcttggccacgtaac

SEQ ID NO: 12616 - DNA, 22 bp, synthetic construct
  misc_feature 1..22: note = chemically synthesized
  source 1..22: mol_type = other DNA
cttcttggccacgtaacctgag

SEQ ID NO: 12617 - DNA, 22 bp, synthetic construct
  misc_feature 1..22: note = chemically synthesized
  source 1..22: mol_type = other DNA
cttggccacgtaacctgagaag

SEQ ID NO: 12618 - DNA, 22 bp, synthetic construct
  misc_feature 1..22: note = chemically synthesized
  source 1..22: mol_type = other DNA
ttggccacgtaacctgagaagg

SEQ ID NO: 12619 - DNA, 22 bp, synthetic construct
  misc_feature 1..22: note = chemically synthesized
  source 1..22: mol_type = other DNA
ggccacgtaacctgagaaggga

SEQ ID NO: 12620 - DNA, 22 bp, synthetic construct
  misc_feature 1..22: note = chemically synthesized
  source 1..22: mol_type = other DNA
gccacgtaacctgagaagggaa

SEQ ID NO: 12621 - DNA, 22 bp, synthetic construct
  misc_feature 1..22: note = chemically synthesized
  source 1..22: mol_type = other DNA
agaagggaatccctcctctctg

SEQ ID NO: 12622 - DNA, 22 bp, synthetic construct
  misc_feature 1..22: note = chemically synthesized
  source 1..22: mol_type = other DNA
ctctctgaaccccagcccaccc

SEQ ID NO: 12623 - DNA, 22 bp, synthetic construct
  misc_feature 1..22: note = chemically synthesized
  source 1..22: mol_type = other DNA
tctgaaccccagcccaccccaa

SEQ ID NO: 12624 - DNA, 22 bp, synthetic construct
  misc_feature 1..22: note = chemically synthesized
  source 1..22: mol_type = other DNA
tgaaccccagcccaccccaatg

SEQ ID NO: 12625 - DNA, 22 bp, synthetic construct
  misc_feature 1..22: note = chemically synthesized
  source 1..22: mol_type = other DNA
aaccccagcccaccccaatgct

SEQ ID NO: 12626 - DNA, 22 bp, synthetic construct
  misc_feature 1..22: note = chemically synthesized
  source 1..22: mol_type = other DNA
caggcctcctgggataccccga

SEQ ID NO: 12627 - DNA, 22 bp, synthetic construct
  misc_feature 1..22: note = chemically synthesized
  source 1..22: mol_type = other DNA
ctgggataccccgaagagtgag

SEQ ID NO: 12628 - DNA, 22 bp, synthetic construct
  misc_feature 1..22: note = chemically synthesized
  source 1..22: mol_type = other DNA
ggataccccgaagagtgagttt

SEQ ID NO: 12629 - DNA, 22 bp, synthetic construct
  misc_feature 1..22: note = chemically synthesized
  source 1..22: mol_type = other DNA
gccaagcagtcaccccacagtt

SEQ ID NO: 12630 - DNA, 22 bp, synthetic construct
  misc_feature 1..22: note = chemically synthesized
  source 1..22: mol_type = other DNA
ccaagcagtcaccccacagttg

SEQ ID NO: 12631 - DNA, 22 bp, synthetic construct
  misc_feature 1..22: note = chemically synthesized
  source 1..22: mol_type = other DNA
gaggagaatccacccaaaaggc

SEQ ID NO: 12632 - DNA, 22 bp, synthetic construct
  misc_feature 1..22: note = chemically synthesized
  source 1..22: mol_type = other DNA
gtagacagggctggggtggcct

SEQ ID NO: 12633 - DNA, 22 bp, synthetic construct
  misc_feature 1..22: note = chemically synthesized
  source 1..22: mol_type = other DNA
gggtggcctctcgtggggtcca

SEQ ID NO: 12634 - DNA, 22 bp, synthetic construct
  misc_feature 1..22: note = chemically synthesized
  source 1..22: mol_type = other DNA
tcgtggggtccaggccaagtag

SEQ ID NO: 12635 - DNA, 22 bp, synthetic construct
  misc_feature 1..22: note = chemically synthesized
  source 1..22: mol_type = other DNA
gtggggtccaggccaagtaggt

SEQ ID NO: 12636 - DNA, 22 bp, synthetic construct
  misc_feature 1..22: note = chemically synthesized
  source 1..22: mol_type = other DNA
gggcctctgggggatgcagggg

SEQ ID NO: 12637 - DNA, 22 bp, synthetic construct
  misc_feature 1..22: note = chemically synthesized
  source 1..22: mol_type = other DNA
tgggggatgcaggggaaggggg

SEQ ID NO: 12638 - DNA, 22 bp, synthetic construct
  misc_feature 1..22: note = chemically synthesized
  source 1..22: mol_type = other DNA
ggggatgcaggggaagggggat

SEQ ID NO: 12639 - DNA, 22 bp, synthetic construct
  misc_feature 1..22: note = chemically synthesized
  source 1..22: mol_type = other DNA
agtctgaagagcagagccagga

SEQ ID NO: 12640 - DNA, 22 bp, synthetic construct
  misc_feature 1..22: note = chemically synthesized
  source 1..22: mol_type = other DNA
aagagcagagccaggaacccct

SEQ ID NO: 12641 - DNA, 22 bp, synthetic construct
  misc_feature 1..22: note = chemically synthesized
  source 1..22: mol_type = other DNA
tagggaaggggcaggagagcca

SEQ ID NO: 12642 - DNA, 22 bp, synthetic construct
  misc_feature 1..22: note = chemically synthesized
  source 1..22: mol_type = other DNA
agcgcctctcctgggcttgcca

SEQ ID NO: 12643 - DNA, 22 bp, synthetic construct
  misc_feature 1..22: note = chemically synthesized
  source 1..22: mol_type = other DNA
tcctgggcttgccaaggactca

SEQ ID NO: 12644 - DNA, 22 bp, synthetic construct
  misc_feature 1..22: note = chemically synthesized
  source 1..22: mol_type = other DNA
ctgggcttgccaaggactcaaa

SEQ ID NO: 12645 - DNA, 22 bp, synthetic construct
  misc_feature 1..22: note = chemically synthesized
  source 1..22: mol_type = other DNA
ggcttgccaaggactcaaaccc

SEQ ID NO: 12646 - DNA, 22 bp, synthetic construct
  misc_feature 1..22: note = chemically synthesized
  source 1..22: mol_type = other DNA
gccaaggactcaaacccagaag

SEQ ID NO: 12647 - DNA, 22 bp, synthetic construct
  misc_feature 1..22: note = chemically synthesized
  source 1..22: mol_type = other DNA
ccaaggactcaaacccagaagc

SEQ ID NO: 12648 - DNA, 22 bp, synthetic construct
  misc_feature 1..22: note = chemically synthesized
  source 1..22: mol_type = other DNA
aaacccagaagcccagagcagg

SEQ ID NO: 12649 - DNA, 22 bp, synthetic construct
  misc_feature 1..22: note = chemically synthesized
  source 1..22: mol_type = other DNA
agggaagcgggaccctgctctg

SEQ ID NO: 12650 - DNA, 22 bp, synthetic construct
  misc_feature 1..22: note = chemically synthesized
  source 1..22: mol_type = other DNA
gggaagcgggaccctgctctgg

SEQ ID NO: 12651 - DNA, 22 bp, synthetic construct
  misc_feature 1..22: note = chemically synthesized
  source 1..22: mol_type = other DNA
ctctgggcggaggaatatgtcc

SEQ ID NO: 12652 - DNA, 22 bp, synthetic construct
  misc_feature 1..22: note = chemically synthesized
  source 1..22: mol_type = other DNA
tgggcggaggaatatgtcccag

SEQ ID NO: 12653 - DNA, 22 bp, synthetic construct
  misc_feature 1..22: note = chemically synthesized
  source 1..22: mol_type = other DNA
ggcggaggaatatgtcccagat

SEQ ID NO: 12654 - DNA, 22 bp, synthetic construct
  misc_feature 1..22: note = chemically synthesized
  source 1..22: mol_type = other DNA
gggactctttaaggaaagaagg

SEQ ID NO: 12655 - DNA, 22 bp, synthetic construct
  misc_feature 1..22: note = chemically synthesized
  source 1..22: mol_type = other DNA
tttaaggaaagaaggatggaga

SEQ ID NO: 12656 - DNA, 22 bp, synthetic construct
  misc_feature 1..22: note = chemically synthesized
  source 1..22: mol_type = other DNA
taaggaaagaaggatggagaaa

SEQ ID NO: 12657 - DNA, 22 bp, synthetic construct
  misc_feature 1..22: note = chemically synthesized
  source 1..22: mol_type = other DNA
aaggaaagaaggatggagaaag

SEQ ID NO: 12658 - DNA, 22 bp, synthetic construct
  misc_feature 1..22: note = chemically synthesized
  source 1..22: mol_type = other DNA
aggaaagaaggatggagaaaga

SEQ ID NO: 12659 - DNA, 22 bp, synthetic construct
  misc_feature 1..22: note = chemically synthesized
  source 1..22: mol_type = other DNA
gtgaacacctaggacgcaccat

SEQ ID NO: 12660 - DNA, 22 bp, synthetic construct
  misc_feature 1..22: note = chemically synthesized
  source 1..22: mol_type = other DNA
ggacgcaccattctcacaaagg

SEQ ID NO: 12661 - DNA, 22 bp, synthetic construct
  misc_feature 1..22: note = chemically synthesized
  source 1..22: mol_type = other DNA
tcacaaagggagttttccacac

SEQ ID NO: 12662 - DNA, 22 bp, synthetic construct
  misc_feature 1..22: note = chemically synthesized
  source 1..22: mol_type = other DNA
acaaagggagttttccacacgg

SEQ ID NO: 12663 - DNA, 22 bp, synthetic construct
  misc_feature 1..22: note = chemically synthesized
  source 1..22: mol_type = other DNA
tccacacggacacccccctcct

SEQ ID NO: 12664 - DNA, 22 bp, synthetic construct
  misc_feature 1..22: note = chemically synthesized
  source 1..22: mol_type = other DNA
ccacacggacacccccctcctc

SEQ ID NO: 12665 - DNA, 22 bp, synthetic construct
  misc_feature 1..22: note = chemically synthesized
  source 1..22: mol_type = other DNA
cacacggacacccccctcctca

SEQ ID NO: 12666 - DNA, 22 bp, synthetic construct
  misc_feature 1..22: note = chemically synthesized
  source 1..22: mol_type = other DNA
ctcaccacagccctgccaggac

SEQ ID NO: 12667 - DNA, 22 bp, synthetic construct
  misc_feature 1..22: note = chemically synthesized
  source 1..22: mol_type = other DNA
accacagccctgccaggacggg

SEQ ID NO: 12668 - DNA, 22 bp, synthetic construct
  misc_feature 1..22: note = chemically synthesized
  source 1..22: mol_type = other DNA
ccaggacggggctggctactgg

SEQ ID NO: 12669 - DNA, 22 bp, synthetic construct
  misc_feature 1..22: note = chemically synthesized
  source 1..22: mol_type = other DNA
gctactggccttatctcacagg

SEQ ID NO: 12670 - DNA, 22 bp, synthetic construct
  misc_feature 1..22: note = chemically synthesized
  source 1..22: mol_type = other DNA
ctggccttatctcacaggtaaa

SEQ ID NO: 12671 - DNA, 22 bp, synthetic construct
  misc_feature 1..22: note = chemically synthesized
  source 1..22: mol_type = other DNA
gccttatctcacaggtaaaact

SEQ ID NO: 12672 - DNA, 22 bp, synthetic construct
  misc_feature 1..22: note = chemically synthesized
  source 1..22: mol_type = other DNA
atctcacaggtaaaactgacgc

SEQ ID NO: 12673 - DNA, 22 bp, synthetic construct
  misc_feature 1..22: note = chemically synthesized
  source 1..22: mol_type = other DNA
tctcacaggtaaaactgacgca

SEQ ID NO: 12674 - DNA, 22 bp, synthetic construct
  misc_feature 1..22: note = chemically synthesized
  source 1..22: mol_type = other DNA
acaggtaaaactgacgcacgga

SEQ ID NO: 12675 - DNA, 22 bp, synthetic construct
  misc_feature 1..22: note = chemically synthesized
  source 1..22: mol_type = other DNA
acgcacggaggaacaatataaa

SEQ ID NO: 12676 - DNA, 22 bp, synthetic construct
  misc_feature 1..22: note = chemically synthesized
  source 1..22: mol_type = other DNA
gggactagaaaggtgaagagcc

SEQ ID NO: 12677 - DNA, 22 bp, synthetic construct
  misc_feature 1..22: note = chemically synthesized
  source 1..22: mol_type = other DNA
gaaaggtgaagagccaaagtta

SEQ ID NO: 12678 - DNA, 22 bp, synthetic construct
  misc_feature 1..22: note = chemically synthesized
  source 1..22: mol_type = other DNA
gaactcaggaccaacttattct

SEQ ID NO: 12679 - DNA, 22 bp, synthetic construct
  misc_feature 1..22: note = chemically synthesized
  source 1..22: mol_type = other DNA
aggaccaacttattctgatttt

SEQ ID NO: 12680 - DNA, 22 bp, synthetic construct
  misc_feature 1..22: note = chemically synthesized
  source 1..22: mol_type = other DNA
attctgattttgtttttccaaa

SEQ ID NO: 12681 - DNA, 22 bp, synthetic construct
  misc_feature 1..22: note = chemically synthesized
  source 1..22: mol_type = other DNA
ttctgattttgtttttccaaac

SEQ ID NO: 12682 - DNA, 22 bp, synthetic construct
  misc_feature 1..22: note = chemically synthesized
  source 1..22: mol_type = other DNA
tgattttgtttttccaaactgc

SEQ ID NO: 12683 - DNA, 22 bp, synthetic construct
  misc_feature 1..22: note = chemically synthesized
  source 1..22: mol_type = other DNA
attttgtttttccaaactgctt

SEQ ID NO: 12684 - DNA, 22 bp, synthetic construct
  misc_feature 1..22: note = chemically synthesized
  source 1..22: mol_type = other DNA
tgtttttccaaactgcttctcc

SEQ ID NO: 12685 - DNA, 22 bp, synthetic construct
  misc_feature 1..22: note = chemically synthesized
  source 1..22: mol_type = other DNA
gtttttccaaactgcttctcct

SEQ ID NO: 12686 - DNA, 22 bp, synthetic construct
  misc_feature 1..22: note = chemically synthesized
  source 1..22: mol_type = other DNA
tttttccaaactgcttctcctc

SEQ ID NO: 12687 - DNA, 22 bp, synthetic construct
  misc_feature 1..22: note = chemically synthesized
  source 1..22: mol_type = other DNA
ttccaaactgcttctcctcttg

SEQ ID NO: 12688 - DNA, 22 bp, synthetic construct
  misc_feature 1..22: note = chemically synthesized
  source 1..22: mol_type = other DNA
tccaaactgcttctcctcttgg

SEQ ID NO: 12689 - DNA, 22 bp, synthetic construct
  misc_feature 1..22: note = chemically synthesized
  source 1..22: mol_type = other DNA
ccaaactgcttctcctcttggg

SEQ ID NO: 12690 - DNA, 22 bp, synthetic construct
  misc_feature 1..22: note = chemically synthesized
  source 1..22: mol_type = other DNA
caaactgcttctcctcttggga

SEQ ID NO: 12691 - DNA, 22 bp, synthetic construct
  misc_feature 1..22: note = chemically synthesized
  source 1..22: mol_type = other DNA
cttctcctcttgggaagtgtaa

SEQ ID NO: 12692 - DNA, 22 bp, synthetic construct
  misc_feature 1..22: note = chemically synthesized
  source 1..22: mol_type = other DNA
ctcctcttgggaagtgtaagga

SEQ ID NO: 12693 - DNA, 22 bp, synthetic construct
  misc_feature 1..22: note = chemically synthesized
  source 1..22: mol_type = other DNA
tcctcttgggaagtgtaaggaa

SEQ ID NO: 12694 - DNA, 22 bp, synthetic construct
  misc_feature 1..22: note = chemically synthesized
  source 1..22: mol_type = other DNA
ctcttgggaagtgtaaggaagc

SEQ ID NO: 12695 - DNA, 22 bp, synthetic construct
  misc_feature 1..22: note = chemically synthesized
  source 1..22: mol_type = other DNA
ttgggaagtgtaaggaagctgc

SEQ ID NO: 12696 - DNA, 22 bp, synthetic construct
  misc_feature 1..22: note = chemically synthesized
  source 1..22: mol_type = other DNA
gggaagtgtaaggaagctgcag

SEQ ID NO: 12697 - DNA, 22 bp, synthetic construct
  misc_feature 1..22: note = chemically synthesized
  source 1..22: mol_type = other DNA
ggaagtgtaaggaagctgcagc

SEQ ID NO: 12698 - DNA, 22 bp, synthetic construct
  misc_feature 1..22: note = chemically synthesized
  source 1..22: mol_type = other DNA
cagcaccaggatcagtgaaacg

SEQ ID NO: 12699 - DNA, 22 bp, synthetic construct
  misc_feature 1..22: note = chemically synthesized
  source 1..22: mol_type = other DNA
aggttctgggagagggtagcgc

SEQ ID NO: 12700 - DNA, 22 bp, synthetic construct
  misc_feature 1..22: note = chemically synthesized
  source 1..22: mol_type = other DNA
tgggagagggtagcgcagggtg

SEQ ID NO: 12701 - DNA, 22 bp, synthetic construct
  misc_feature 1..22: note = chemically synthesized
  source 1..22: mol_type = other DNA
ggagagggtagcgcagggtggc

SEQ ID NO: 12702 - DNA, 22 bp, synthetic construct
  misc_feature 1..22: note = chemically synthesized
  source 1..22: mol_type = other DNA
agaaccgggcaggtcacgcatc

SEQ ID NO: 12703 - DNA, 22 bp, synthetic construct
  misc_feature 1..22: note = chemically synthesized
  source 1..22: mol_type = other DNA
ccctcccaccccctgccaagct

SEQ ID NO: 12704 - DNA, 22 bp, synthetic construct
  misc_feature 1..22: note = chemically synthesized
  source 1..22: mol_type = other DNA
cctcccaccccctgccaagctc

SEQ ID NO: 12705 - DNA, 22 bp, synthetic construct
  misc_feature 1..22: note = chemically synthesized
  source 1..22: mol_type = other DNA
ccaccccctgccaagctctccc

SEQ ID NO: 12706 - DNA, 22 bp, synthetic construct
  misc_feature 1..22: note = chemically synthesized
  source 1..22: mol_type = other DNA
ccaagctctccctcccaggatc

SEQ ID NO: 12707 - DNA, 22 bp, synthetic construct
  misc_feature 1..22: note = chemically synthesized
  source 1..22: mol_type = other DNA
tccctcccaggatcctctctgg

SEQ ID NO: 12708 - DNA, 22 bp, synthetic construct
  misc_feature 1..22: note = chemically synthesized
  source 1..22: mol_type = other DNA
cctcccaggatcctctctggct

SEQ ID NO: 12709 - DNA, 22 bp, synthetic construct
  misc_feature 1..22: note = chemically synthesized
  source 1..22: mol_type = other DNA
ccaggatcctctctggctccat

SEQ ID NO: 12710 - DNA, 22 bp, synthetic construct
  misc_feature 1..22: note = chemically synthesized
  source 1..22: mol_type = other DNA
tctggctccatcgtaagcaaac

SEQ ID NO: 12711 - DNA, 22 bp, synthetic construct
  misc_feature 1..22: note = chemically synthesized
  source 1..22: mol_type = other DNA
tggctccatcgtaagcaaacct

SEQ ID NO: 12712 - DNA, 22 bp, synthetic construct
  misc_feature 1..22: note = chemically synthesized
  source 1..22: mol_type = other DNA
gctccatcgtaagcaaacctta

SEQ ID NO: 12713 - DNA, 22 bp, synthetic construct
  misc_feature 1..22: note = chemically synthesized
  source 1..22: mol_type = other DNA
catcgtaagcaaaccttagagg

SEQ ID NO: 12714 - DNA, 22 bp, synthetic construct
  misc_feature 1..22: note = chemically synthesized
  source 1..22: mol_type = other DNA
agaggttctggcaaggagagag

SEQ ID NO: 12715 - DNA, 22 bp, synthetic construct
  misc_feature 1..22: note = chemically synthesized
  source 1..22: mol_type = other DNA
gaggttctggcaaggagagaga

SEQ ID NO: 12716 - DNA, 22 bp, synthetic construct
  misc_feature 1..22: note = chemically synthesized
  source 1..22: mol_type = other DNA
tggcaaggagagagatggctcc

SEQ ID NO: 12717 - DNA, 22 bp, synthetic construct
  misc_feature 1..22: note = chemically synthesized
  source 1..22: mol_type = other DNA
gcaaggagagagatggctccag

SEQ ID NO: 12718 - DNA, 22 bp, synthetic construct
  misc_feature 1..22: note = chemically synthesized
  source 1..22: mol_type = other DNA
caggaaatgggggtgtgtcacc

SEQ ID NO: 12719 - DNA, 22 bp, synthetic construct
  misc_feature 1..22: note = chemically synthesized
  source 1..22: mol_type = other DNA
cctaacaggaggtgggggttag

SEQ ID NO: 12720 - DNA, 22 bp, synthetic construct
  misc_feature 1..22: note = chemically synthesized
  source 1..22: mol_type = other DNA
acaggaggtgggggttagaccc

SEQ ID NO: 12721 - DNA, 22 bp, synthetic construct
  misc_feature 1..22: note = chemically synthesized
  source 1..22: mol_type = other DNA
gacccaatatcaggagactagg

SEQ ID NO: 12722 - DNA, 22 bp, synthetic construct
  misc_feature 1..22: note = chemically synthesized
  source 1..22: mol_type = other DNA
ggaaggaggaggcctaaggatg

SEQ ID NO: 12723 - DNA, 22 bp, synthetic construct
  misc_feature 1..22: note = chemically synthesized
  source 1..22: mol_type = other DNA
aggatggggcttttctgtcacc

SEQ ID NO: 12724 - DNA, 22 bp, synthetic construct
  misc_feature 1..22: note = chemically synthesized
  source 1..22: mol_type = other DNA
ttctgtcaccaatcctgtccct

SEQ ID NO: 12725 - DNA, 22 bp, synthetic construct
  misc_feature 1..22: note = chemically synthesized
  source 1..22: mol_type = other DNA
tctgtcaccaatcctgtcccta

SEQ ID NO: 12726 - DNA, 22 bp, synthetic construct
  misc_feature 1..22: note = chemically synthesized
  source 1..22: mol_type = other DNA
ctgtcaccaatcctgtccctag

SEQ ID NO: 12727 - DNA, 22 bp, synthetic construct
  misc_feature 1..22: note = chemically synthesized
  source 1..22: mol_type = other DNA
tgtcaccaatcctgtccctagt

SEQ ID NO: 12728 - DNA, 22 bp, synthetic construct
  misc_feature 1..22: note = chemically synthesized
  source 1..22: mol_type = other DNA
tcaccaatcctgtccctagtgg

SEQ ID NO: 12729 - DNA, 22 bp, synthetic construct
  misc_feature 1..22: note = chemically synthesized
  source 1..22: mol_type = other DNA
tccctagtggccccactgtggg

SEQ ID NO: 12730 - DNA, 22 bp, synthetic construct
  misc_feature 1..22: note = chemically synthesized
  source 1..22: mol_type = other DNA
gtggccccactgtggggtggag

SEQ ID NO: 12731 - DNA, 22 bp, synthetic construct
  misc_feature 1..22: note = chemically synthesized
  source 1..22: mol_type = other DNA
tggggtggaggggacagataaa

SEQ ID NO: 12732 - DNA, 22 bp, synthetic construct
  misc_feature 1..22: note = chemically synthesized
  source 1..22: mol_type = other DNA
accggccctgggaatataaggt

SEQ ID NO: 12733 - DNA, 22 bp, synthetic construct
  misc_feature 1..22: note = chemically synthesized
  source 1..22: mol_type = other DNA
ggaatataaggtggtcccagct

SEQ ID NO: 12734 - DNA, 22 bp, synthetic construct
  misc_feature 1..22: note = chemically synthesized
  source 1..22: mol_type = other DNA
ggggacacaggatccctggagg

SEQ ID NO: 12735 - DNA, 22 bp, synthetic construct
  misc_feature 1..22: note = chemically synthesized
  source 1..22: mol_type = other DNA
gaggcagcaaacatgctgtcct

SEQ ID NO: 12736 - DNA, 22 bp, synthetic construct
  misc_feature 1..22: note = chemically synthesized
  source 1..22: mol_type = other DNA
tcctgaagtggacataggggcc

SEQ ID NO: 12737 - DNA, 22 bp, synthetic construct
  misc_feature 1..22: note = chemically synthesized
  source 1..22: mol_type = other DNA
aagtggacataggggcccgggt

SEQ ID NO: 12738 - DNA, 22 bp, synthetic construct
  misc_feature 1..22: note = chemically synthesized
  source 1..22: mol_type = other DNA
gaggaagaagactagctgagct

SEQ ID NO: 12739 - DNA, 22 bp, synthetic construct
  misc_feature 1..22: note = chemically synthesized
  source 1..22: mol_type = other DNA
gctgagctctcggacccctgga

SEQ ID NO: 12740 - DNA, 22 bp, synthetic construct
  misc_feature 1..22: note = chemically synthesized
  source 1..22: mol_type = other DNA
agctctcggacccctggaagat

SEQ ID NO: 12741 - DNA, 22 bp, synthetic construct
  misc_feature 1..22: note = chemically synthesized
  source 1..22: mol_type = other DNA
tcggacccctggaagatgccat

SEQ ID NO: 12742 - DNA, 22 bp, synthetic construct
  misc_feature 1..22: note = chemically synthesized
  source 1..22: mol_type = other DNA
ggacccctggaagatgccatga

SEQ ID NO: 12743 - DNA, 22 bp, synthetic construct
  misc_feature 1..22: note = chemically synthesized
  source 1..22: mol_type = other DNA
gaagatgccatgacagggggct

SEQ ID NO: 12744 - DNA, 22 bp, synthetic construct
  misc_feature 1..22: note = chemically synthesized
  source 1..22: mol_type = other DNA
gaagagctagcacagactagag

SEQ ID NO: 12745 - DNA, 22 bp, synthetic construct
  misc_feature 1..22: note = chemically synthesized
  source 1..22: mol_type = other DNA
gcacagactagagaggtaaggg

SEQ ID NO: 12746 - DNA, 22 bp, synthetic construct
  misc_feature 1..22: note = chemically synthesized
  source 1..22: mol_type = other DNA
gagaggtaaggggggtagggga

SEQ ID NO: 12747 - DNA, 22 bp, synthetic construct
  misc_feature 1..22: note = chemically synthesized
  source 1..22: mol_type = other DNA
cccaaatgaaaggagtgagagg

SEQ ID NO: 12748 - DNA, 22 bp, synthetic construct
  misc_feature 1..22: note = chemically synthesized
  source 1..22: mol_type = other DNA
aagccagggagacggggtactt

SEQ ID NO: 12749 - DNA, 22 bp, synthetic construct
  misc_feature 1..22: note = chemically synthesized
  source 1..22: mol_type = other DNA
tggggttgtccagaaaaacggt

SEQ ID NO: 12750 - DNA, 22 bp, synthetic construct
  misc_feature 1..22: note = chemically synthesized
  source 1..22: mol_type = other DNA
ggggttgtccagaaaaacggtg

SEQ ID NO: 12751 - DNA, 22 bp, synthetic construct
  misc_feature 1..22: note = chemically synthesized
  source 1..22: mol_type = other DNA
gggttgtccagaaaaacggtga

SEQ ID NO: 12752 - DNA, 22 bp, synthetic construct
  misc_feature 1..22: note = chemically synthesized
  source 1..22: mol_type = other DNA
tccagaaaaacggtgatgatgc

SEQ ID NO: 12753 - DNA, 22 bp, synthetic construct
  misc_feature 1..22: note = chemically synthesized
  source 1..22: mol_type = other DNA
caagaaggggaggcgggacgca

SEQ ID NO: 12754 - DNA, 22 bp, synthetic construct
  misc_feature 1..22: note = chemically synthesized
  source 1..22: mol_type = other DNA
agaaacgagagatggcacaggc

SEQ ID NO: 12755 - DNA, 22 bp, synthetic construct
  misc_feature 1..22: note = chemically synthesized
  source 1..22: mol_type = other DNA
ggtgagggaggagagatgcccg

SEQ ID NO: 12756 - DNA, 22 bp, synthetic construct
  misc_feature 1..22: note = chemically synthesized
  source 1..22: mol_type = other DNA
agaggacatcacgtggtgcagc

SEQ ID NO: 12757 - DNA, 22 bp, synthetic construct
  misc_feature 1..22: note = chemically synthesized
  source 1..22: mol_type = other DNA
cggaaagagcatccttgggcag

SEQ ID NO: 12758 - DNA, 22 bp, synthetic construct
  misc_feature 1..22: note = chemically synthesized
  source 1..22: mol_type = other DNA
gggcagcaacacagcagagagc

SEQ ID NO: 12759 - DNA, 22 bp, synthetic construct
  misc_feature 1..22: note = chemically synthesized
  source 1..22: mol_type = other DNA
ggcagcaacacagcagagagca

SEQ ID NO: 12760 - DNA, 22 bp, synthetic construct
  misc_feature 1..22: note = chemically synthesized
  source 1..22: mol_type = other DNA
aaggaggcggcagggaaggatc

SEQ ID NO: 12761 - DNA, 22 bp, synthetic construct
  misc_feature 1..22: note = chemically synthesized
  source 1..22: mol_type = other DNA
ggccagccgtagaggtgaccca

SEQ ID NO: 12762 - DNA, 22 bp, synthetic construct
  misc_feature 1..22: note = chemically synthesized
  source 1..22: mol_type = other DNA
cagacagaaagcggcacaggcc

SEQ ID NO: 12763 - DNA, 22 bp, synthetic construct
  misc_feature 1..22: note = chemically synthesized
  source 1..22: mol_type = other DNA
cctgggaaggggaaacagtggg

SEQ ID NO: 12764 - DNA, 22 bp, synthetic construct
  misc_feature 1..22: note = chemically synthesized
  source 1..22: mol_type = other DNA
ggaaggggaaacagtgggccag

SEQ ID NO: 12765 - DNA, 22 bp, synthetic construct
  misc_feature 1..22: note = chemically synthesized
  source 1..22: mol_type = other DNA
aaagtggtccggactcaggaga

SEQ ID NO: 12766 - DNA, 22 bp, synthetic construct
  misc_feature 1..22: note = chemically synthesized
  source 1..22: mol_type = other DNA
aggagagagacggcagcgttag

SEQ ID NO: 12767 - DNA, 22 bp, synthetic construct
  misc_feature 1..22: note = chemically synthesized
  source 1..22: mol_type = other DNA
gagggcagagttccggcggcac

SEQ ID NO: 12768 - DNA, 22 bp, synthetic construct
  misc_feature 1..22: note = chemically synthesized
  source 1..22: mol_type = other DNA
cggcggcacagcaagggcactc

SEQ ID NO: 12769 - DNA, 22 bp, synthetic construct
  misc_feature 1..22: note = chemically synthesized
  source 1..22: mol_type = other DNA
gggggcgagaggagggcagcgc

SEQ ID NO: 12770 - DNA, 22 bp, synthetic construct
  misc_feature 1..22: note = chemically synthesized
  source 1..22: mol_type = other DNA
agctatgggagctggctcaggt

SEQ ID NO: 12771 - DNA, 22 bp, synthetic construct
  misc_feature 1..22: note = chemically synthesized
  source 1..22: mol_type = other DNA
tgggagctggctcaggttcagg

SEQ ID NO: 12772 - DNA, 22 bp, synthetic construct
  misc_feature 1..22: note = chemically synthesized
  source 1..22: mol_type = other DNA
gctcaggttcaggagagggcag

SEQ ID NO: 12773 - DNA, 22 bp, synthetic construct
  misc_feature 1..22: note = chemically synthesized
  source 1..22: mol_type = other DNA
aggttcaggagagggcagggca

SEQ ID NO: 12774 - DNA, 22 bp, synthetic construct
  misc_feature 1..22: note = chemically synthesized
  source 1..22: mol_type = other DNA
aggagagggcagggcagggaag

SEQ ID NO: 12775 - DNA, 22 bp, synthetic construct
  misc_feature 1..22: note = chemically synthesized
  source 1..22: mol_type = other DNA
gaggggctcaacatcggaagag

SEQ ID NO: 12776 - DNA, 22 bp, synthetic construct
  misc_feature 1..22: note = chemically synthesized
  source 1..22: mol_type = other DNA
aacatcggaagaggggaagtcg

SEQ ID NO: 12777 - DNA, 22 bp, synthetic construct
  misc_feature 1..22: note = chemically synthesized
  source 1..22: mol_type = other DNA
catgggtcagcacaggctgcca

SEQ ID NO: 12778 - DNA, 22 bp, synthetic construct
  misc_feature 1..22: note = chemically synthesized
  source 1..22: mol_type = other DNA
ccaaagccagggccagttaaag

SEQ ID NO: 12779 - DNA, 22 bp, synthetic construct
  misc_feature 1..22: note = chemically synthesized
  source 1..22: mol_type = other DNA
aagcgactccaatgcggaagag

SEQ ID NO: 12780 - DNA, 22 bp, synthetic construct
  misc_feature 1..22: note = chemically synthesized
  source 1..22: mol_type = other DNA
caatgcggaagagagtaggtcg

SEQ ID NO: 12781 - DNA, 22 bp, synthetic construct
  misc_feature 1..22: note = chemically synthesized
  source 1..22: mol_type = other DNA
gggcagagtggtcagcacagag

SEQ ID NO: 12782 - DNA, 22 bp, synthetic construct
  misc_feature 1..22: note = chemically synthesized
  source 1..22: mol_type = other DNA
agcccagggccagttgaagcgg

SEQ ID NO: 12783 - DNA, 22 bp, synthetic construct
  misc_feature 1..22: note = chemically synthesized
  source 1..22: mol_type = other DNA
aagcggctccaattcggaagtg

SEQ ID NO: 12784 - DNA, 22 bp, synthetic construct
  misc_feature 1..22: note = chemically synthesized
  source 1..22: mol_type = other DNA
caattcggaagtggggtggtcg

SEQ ID NO: 12785 - DNA, 22 bp, synthetic construct
  misc_feature 1..22: note = chemically synthesized
  source 1..22: mol_type = other DNA
ggaagtggggtggtcgaagggg

SEQ ID NO: 12786 - DNA, 22 bp, synthetic construct
  misc_feature 1..22: note = chemically synthesized
  source 1..22: mol_type = other DNA
ggacggggtgtcagcatagggt

SEQ ID NO: 12787 - DNA, 22 bp, synthetic construct
  misc_feature 1..22: note = chemically synthesized
  source 1..22: mol_type = other DNA
gcaacggggaaggaggatgccc

SEQ ID NO: 12788 - DNA, 22 bp, synthetic construct
  misc_feature 1..22: note = chemically synthesized
  source 1..22: mol_type = other DNA
gccccgggagacgccgggcggg

SEQ ID NO: 12789 - DNA, 22 bp, synthetic construct
  misc_feature 1..22: note = chemically synthesized
  source 1..22: mol_type = other DNA
acctggtgcagggcgctgatac

SEQ ID NO: 12790 - DNA, 22 bp, synthetic construct
  misc_feature 1..22: note = chemically synthesized
  source 1..22: mol_type = other DNA
gtgcagggcgctgataccgtcg

SEQ ID NO: 12791 - DNA, 22 bp, synthetic construct
  misc_feature 1..22: note = chemically synthesized
  source 1..22: mol_type = other DNA
ataccgtcggcgttggtggagt

SEQ ID NO: 12792 - DNA, 22 bp, synthetic construct
  misc_feature 1..22: note = chemically synthesized
  source 1..22: mol_type = other DNA
gtggagtccagcacggcgcggg

SEQ ID NO: 12793 - DNA, 22 bp, synthetic construct
  misc_feature 1..22: note = chemically synthesized
  source 1..22: mol_type = other DNA
ggcgccggggccagggtcggcg

SEQ ID NO: 12794 - DNA, 22 bp, synthetic construct
  misc_feature 1..22: note = chemically synthesized
  source 1..22: mol_type = other DNA
gtccaggtcgccgcccgcacag

SEQ ID NO: 12795 - DNA, 22 bp, synthetic construct
  misc_feature 1..22: note = chemically synthesized
  source 1..22: mol_type = other DNA
ggcggcgcgctcgaagcggacg

SEQ ID NO: 12796 - DNA, 22 bp, synthetic construct
  misc_feature 1..22: note = chemically synthesized
  source 1..22: mol_type = other DNA
gaagcggacggtgcgggcgcgg

SEQ ID NO: 12797 - DNA, 22 bp, synthetic construct
  misc_feature 1..22: note = chemically synthesized
  source 1..22: mol_type = other DNA
tccggggccaggctcggcgccc

SEQ ID NO: 12798 - DNA, 22 bp, synthetic construct
  misc_feature 1..22: note = chemically synthesized
  source 1..22: mol_type = other DNA
cggggccaggctcggcgcccgc

SEQ ID NO: 12799 - DNA, 22 bp, synthetic construct
  misc_feature 1..22: note = chemically synthesized
  source 1..22: mol_type = other DNA
ggcgcccgcccgcgccccccac

SEQ ID NO: 12800 - DNA, 22 bp, synthetic construct
  misc_feature 1..22: note = chemically synthesized
  source 1..22: mol_type = other DNA
ccgcagctgctcccgtcgccgc

SEQ ID NO: 12801 - DNA, 22 bp, synthetic construct
  misc_feature 1..22: note = chemically synthesized
  source 1..22: mol_type = other DNA
ctcccgtcgccgctcccgggca

SEQ ID NO: 12802 - DNA, 22 bp, synthetic construct
  misc_feature 1..22: note = chemically synthesized
  source 1..22: mol_type = other DNA
ccgtcgccgctcccgggcagcc

SEQ ID NO: 12803 - DNA, 22 bp, synthetic construct
  misc_feature 1..22: note = chemically synthesized
  source 1..22: mol_type = other DNA
ccgggcagccgccgccgccgcc

SEQ ID NO: 12804 - DNA, 22 bp, synthetic construct
  misc_feature 1..22: note = chemically synthesized
  source 1..22: mol_type = other DNA
tccggacatcgcaccgcccgcc

SEQ ID NO: 12805 - DNA, 22 bp, synthetic construct
  misc_feature 1..22: note = chemically synthesized
  source 1..22: mol_type = other DNA
cggacatcgcaccgcccgcccg

SEQ ID NO: 12806 - DNA, 22 bp, synthetic construct
  misc_feature 1..22: note = chemically synthesized
  source 1..22: mol_type = other DNA
gggctcggcgctcgctcgctcg

SEQ ID NO: 12807 - DNA, 22 bp, synthetic construct
  misc_feature 1..22: note = chemically synthesized
  source 1..22: mol_type = other DNA
ggcgctcgctcgctcgctgggc

SEQ ID NO: 12808 - DNA, 22 bp, synthetic construct
  misc_feature 1..22: note = chemically synthesized
  source 1..22: mol_type = other DNA
gctcgctcgctgggcgggcggg

SEQ ID NO: 12809 - DNA, 22 bp, synthetic construct
  misc_feature 1..22: note = chemically synthesized
  source 1..22: mol_type = other DNA
gctcgctgggcgggcgggcggt

SEQ ID NO: 12810 - DNA, 22 bp, synthetic construct
  misc_feature 1..22: note = chemically synthesized
  source 1..22: mol_type = other DNA
gctgggcgggcgggcggtgcga

SEQ ID NO: 12811 - DNA, 22 bp, synthetic construct
  misc_feature 1..22: note = chemically synthesized
  source 1..22: mol_type = other DNA
ggcgggcgggcggtgcgatgtc

SEQ ID NO: 12812 - DNA, 22 bp, synthetic construct
  misc_feature 1..22: note = chemically synthesized
  source 1..22: mol_type = other DNA
gcccgggggcggcggcggcggc

SEQ ID NO: 12813 - DNA, 22 bp, synthetic construct
  misc_feature 1..22: note = chemically synthesized
  source 1..22: mol_type = other DNA
cccgggagcggcgacgggagca

SEQ ID NO: 12814 - DNA, 22 bp, synthetic construct
  misc_feature 1..22: note = chemically synthesized
  source 1..22: mol_type = other DNA
cggcagtggggggcgcgggcgg

SEQ ID NO: 12815 - DNA, 22 bp, synthetic construct
  misc_feature 1..22: note = chemically synthesized
  source 1..22: mol_type = other DNA
gccccggagagcgccgcgcccg

SEQ ID NO: 12816 - DNA, 22 bp, synthetic construct
  misc_feature 1..22: note = chemically synthesized
  source 1..22: mol_type = other DNA
cgagcgcgccgccgagttcctg

SEQ ID NO: 12817 - DNA, 22 bp, synthetic construct
  misc_feature 1..22: note = chemically synthesized
  source 1..22: mol_type = other DNA
gagcgcgccgccgagttcctgg

SEQ ID NO: 12818 - DNA, 22 bp, synthetic construct
  misc_feature 1..22: note = chemically synthesized
  source 1..22: mol_type = other DNA
ctggcggcctgtgcgggcggcg

SEQ ID NO: 12819 - DNA, 22 bp, synthetic construct
  misc_feature 1..22: note = chemically synthesized
  source 1..22: mol_type = other DNA
gcggcctgtgcgggcggcgacc

SEQ ID NO: 12820 - DNA, 22 bp, synthetic construct
  misc_feature 1..22: note = chemically synthesized
  source 1..22: mol_type = other DNA
tgcgggcggcgacctggacgag

SEQ ID NO: 12821 - DNA, 22 bp, synthetic construct
  misc_feature 1..22: note = chemically synthesized
  source 1..22: mol_type = other DNA
gacgaggcgcgtctgatgctgc

SEQ ID NO: 12822 - DNA, 22 bp, synthetic construct
  misc_feature 1..22: note = chemically synthesized
  source 1..22: mol_type = other DNA
atgctgcgcgccgccgaccctg

SEQ ID NO: 12823 - DNA, 22 bp, synthetic construct
  misc_feature 1..22: note = chemically synthesized
  source 1..22: mol_type = other DNA
cgcgccgccgaccctggccccg

SEQ ID NO: 12824 - DNA, 22 bp, synthetic construct
  misc_feature 1..22: note = chemically synthesized
  source 1..22: mol_type = other DNA
gccccggcgccgagctcgaccc

SEQ ID NO: 12825 - DNA, 22 bp, synthetic construct
  misc_feature 1..22: note = chemically synthesized
  source 1..22: mol_type = other DNA
gaccccgccgcgccgccgcccg

SEQ ID NO: 12826 - DNA, 22 bp, synthetic construct
  misc_feature 1..22: note = chemically synthesized
  source 1..22: mol_type = other DNA
gactccaccaacgccgacggta

SEQ ID NO: 12827 - DNA, 22 bp, synthetic construct
  misc_feature 1..22: note = chemically synthesized
  source 1..22: mol_type = other DNA
caccaacgccgacggtatcagc

SEQ ID NO: 12828 - DNA, 22 bp, synthetic construct
  misc_feature 1..22: note = chemically synthesized
  source 1..22: mol_type = other DNA
caccaggtcagcgccccccgcc

SEQ ID NO: 12829 - DNA, 22 bp, synthetic construct
  misc_feature 1..22: note = chemically synthesized
  source 1..22: mol_type = other DNA
ccggggccaggtccaccctctg

SEQ ID NO: 12830 - DNA, 22 bp, synthetic construct
  misc_feature 1..22: note = chemically synthesized
  source 1..22: mol_type = other DNA
tgctgcgccacctggggcatcc

SEQ ID NO: 12831 - DNA, 22 bp, synthetic construct
  misc_feature 1..22: note = chemically synthesized
  source 1..22: mol_type = other DNA
ctgcgccacctggggcatcctc

SEQ ID NO: 12832 - DNA, 22 bp, synthetic construct
  misc_feature 1..22: note = chemically synthesized
  source 1..22: mol_type = other DNA
cgccacctggggcatcctcctt

SEQ ID NO: 12833 - DNA, 22 bp, synthetic construct
  misc_feature 1..22: note = chemically synthesized
  source 1..22: mol_type = other DNA
gggcatcctccttccccgttgc

SEQ ID NO: 12834 - DNA, 22 bp, synthetic construct
  misc_feature 1..22: note = chemically synthesized
  source 1..22: mol_type = other DNA
cttccccgttgccagtctcgat

SEQ ID NO: 12835 - DNA, 22 bp, synthetic construct
  misc_feature 1..22: note = chemically synthesized
  source 1..22: mol_type = other DNA
ccccgttgccagtctcgatccg

SEQ ID NO: 12836 - DNA, 22 bp, synthetic construct
  misc_feature 1..22: note = chemically synthesized
  source 1..22: mol_type = other DNA
cccgttgccagtctcgatccgc

SEQ ID NO: 12837 - DNA, 22 bp, synthetic construct
  misc_feature 1..22: note = chemically synthesized
  source 1..22: mol_type = other DNA
ccagtctcgatccgccccgtcg

SEQ ID NO: 12838 - DNA, 22 bp, synthetic construct
  misc_feature 1..22: note = chemically synthesized
  source 1..22: mol_type = other DNA
gatccgccccgtcgttcctggc

SEQ ID NO: 12839 - DNA, 22 bp, synthetic construct
  misc_feature 1..22: note = chemically synthesized
  source 1..22: mol_type = other DNA
ctggccctgggctttgccaccc

SEQ ID NO: 12840 - DNA, 22 bp, synthetic construct
  misc_feature 1..22: note = chemically synthesized
  source 1..22: mol_type = other DNA
gccctgggctttgccaccctat

SEQ ID NO: 12841 - DNA, 22 bp, synthetic construct
  misc_feature 1..22: note = chemically synthesized
  source 1..22: mol_type = other DNA
ggctttgccaccctatgctgac

SEQ ID NO: 12842 - DNA, 22 bp, synthetic construct
  misc_feature 1..22: note = chemically synthesized
  source 1..22: mol_type = other DNA
tgccaccctatgctgacacccc

SEQ ID NO: 12843 - DNA, 22 bp, synthetic construct
  misc_feature 1..22: note = chemically synthesized
  source 1..22: mol_type = other DNA
gccaccctatgctgacaccccg

SEQ ID NO: 12844 - DNA, 22 bp, synthetic construct
  misc_feature 1..22: note = chemically synthesized
  source 1..22: mol_type = other DNA
ccaccctatgctgacaccccgt

SEQ ID NO: 12845 - DNA, 22 bp, synthetic construct
  misc_feature 1..22: note = chemically synthesized
  source 1..22: mol_type = other DNA
tgctgacaccccgtcccagtcc

SEQ ID NO: 12846 - DNA, 22 bp, synthetic construct
  misc_feature 1..22: note = chemically synthesized
  source 1..22: mol_type = other DNA
acaccccgtcccagtccccctt

SEQ ID NO: 12847 - DNA, 22 bp, synthetic construct
  misc_feature 1..22: note = chemically synthesized
  source 1..22: mol_type = other DNA
accattccccttcgaccacccc

SEQ ID NO: 12848 - DNA, 22 bp, synthetic construct
  misc_feature 1..22: note = chemically synthesized
  source 1..22: mol_type = other DNA
ccattccccttcgaccacccca

SEQ ID NO: 12849 - DNA, 22 bp, synthetic construct
  misc_feature 1..22: note = chemically synthesized
  source 1..22: mol_type = other DNA
cccttcgaccaccccacttccg

SEQ ID NO: 12850 - DNA, 22 bp, synthetic construct
  misc_feature 1..22: note = chemically synthesized
  source 1..22: mol_type = other DNA
cgaccaccccacttccgaattg

SEQ ID NO: 12851 - DNA, 22 bp, synthetic construct
  misc_feature 1..22: note = chemically synthesized
  source 1..22: mol_type = other DNA
gaccaccccacttccgaattgg

SEQ ID NO: 12852 - DNA, 22 bp, synthetic construct
  misc_feature 1..22: note = chemically synthesized
  source 1..22: mol_type = other DNA
ccgaattggagccgcttcaact

SEQ ID NO: 12853 - DNA, 22 bp, synthetic construct
  misc_feature 1..22: note = chemically synthesized
  source 1..22: mol_type = other DNA
cgaattggagccgcttcaactg

SEQ ID NO: 12854 - DNA, 22 bp, synthetic construct
  misc_feature 1..22: note = chemically synthesized
  source 1..22: mol_type = other DNA
gagccgcttcaactggccctgg

SEQ ID NO: 12855 - DNA, 22 bp, synthetic construct
  misc_feature 1..22: note = chemically synthesized
  source 1..22: mol_type = other DNA
caactggccctgggcttagcca

SEQ ID NO: 12856 - DNA, 22 bp, synthetic construct
  misc_feature 1..22: note = chemically synthesized
  source 1..22: mol_type = other DNA
aactggccctgggcttagccac

SEQ ID NO: 12857 - DNA, 22 bp, synthetic construct
  misc_feature 1..22: note = chemically synthesized
  source 1..22: mol_type = other DNA
gccctgggcttagccactctgt

SEQ ID NO: 12858 - DNA, 22 bp, synthetic construct
  misc_feature 1..22: note = chemically synthesized
  source 1..22: mol_type = other DNA
ggcttagccactctgtgctgac

SEQ ID NO: 12859 - DNA, 22 bp, synthetic construct
  misc_feature 1..22: note = chemically synthesized
  source 1..22: mol_type = other DNA
agccactctgtgctgaccactc

SEQ ID NO: 12860 - DNA, 22 bp, synthetic construct
  misc_feature 1..22: note = chemically synthesized
  source 1..22: mol_type = other DNA
gccactctgtgctgaccactct

SEQ ID NO: 12861 - DNA, 22 bp, synthetic construct
  misc_feature 1..22: note = chemically synthesized
  source 1..22: mol_type = other DNA
tgtgctgaccactctgccccag

SEQ ID NO: 12862 - DNA, 22 bp, synthetic construct
  misc_feature 1..22: note = chemically synthesized
  source 1..22: mol_type = other DNA
tgctgaccactctgccccaggc

SEQ ID NO: 12863 - DNA, 22 bp, synthetic construct
  misc_feature 1..22: note = chemically synthesized
  source 1..22: mol_type = other DNA
accactctgccccaggcctcct

SEQ ID NO: 12864 - DNA, 22 bp, synthetic construct
  misc_feature 1..22: note = chemically synthesized
  source 1..22: mol_type = other DNA
tgccccaggcctccttaccatt

SEQ ID NO: 12865 - DNA, 22 bp, synthetic construct
  misc_feature 1..22: note = chemically synthesized
  source 1..22: mol_type = other DNA
ccccaggcctccttaccattcc

SEQ ID NO: 12866 - DNA, 22 bp, synthetic construct
  misc_feature 1..22: note = chemically synthesized
  source 1..22: mol_type = other DNA
cttaccattccccttcgaccta

SEQ ID NO: 12867 - DNA, 22 bp, synthetic construct
  misc_feature 1..22: note = chemically synthesized
  source 1..22: mol_type = other DNA
accattccccttcgacctactc

SEQ ID NO: 12868 - DNA, 22 bp, synthetic construct
  misc_feature 1..22: note = chemically synthesized
  source 1..22: mol_type = other DNA
ccattccccttcgacctactct

SEQ ID NO: 12869 - DNA, 22 bp, synthetic construct
  misc_feature 1..22: note = chemically synthesized
  source 1..22: mol_type = other DNA
cccttcgacctactctcttccg

SEQ ID NO: 12870 - DNA, 22 bp, synthetic construct
  misc_feature 1..22: note = chemically synthesized
  source 1..22: mol_type = other DNA
cgacctactctcttccgcattg

SEQ ID NO: 12871 - DNA, 22 bp, synthetic construct
  misc_feature 1..22: note = chemically synthesized
  source 1..22: mol_type = other DNA
gacctactctcttccgcattgg

SEQ ID NO: 12872 - DNA, 22 bp, synthetic construct
  misc_feature 1..22: note = chemically synthesized
  source 1..22: mol_type = other DNA
ctctcttccgcattggagtcgc

SEQ ID NO: 12873 - DNA, 22 bp, synthetic construct
  misc_feature 1..22: note = chemically synthesized
  source 1..22: mol_type = other DNA
tcttccgcattggagtcgcttt

SEQ ID NO: 12874 - DNA, 22 bp, synthetic construct
  misc_feature 1..22: note = chemically synthesized
  source 1..22: mol_type = other DNA
ttccgcattggagtcgctttaa

SEQ ID NO: 12875 - DNA, 22 bp, synthetic construct
  misc_feature 1..22: note = chemically synthesized
  source 1..22: mol_type = other DNA
ccgcattggagtcgctttaact

SEQ ID NO: 12876 - DNA, 22 bp, synthetic construct
  misc_feature 1..22: note = chemically synthesized
  source 1..22: mol_type = other DNA
cgcattggagtcgctttaactg

SEQ ID NO: 12877 - DNA, 22 bp, synthetic construct
  misc_feature 1..22: note = chemically synthesized
  source 1..22: mol_type = other DNA
gagtcgctttaactggccctgg

SEQ ID NO: 12878 - DNA, 22 bp, synthetic construct
  misc_feature 1..22: note = chemically synthesized
  source 1..22: mol_type = other DNA
taactggccctggctttggcag

SEQ ID NO: 12879 - DNA, 22 bp, synthetic construct
  misc_feature 1..22: note = chemically synthesized
  source 1..22: mol_type = other DNA
aactggccctggctttggcagc

SEQ ID NO: 12880 - DNA, 22 bp, synthetic construct
  misc_feature 1..22: note = chemically synthesized
  source 1..22: mol_type = other DNA
actggccctggctttggcagcc

SEQ ID NO: 12881 - DNA, 22 bp, synthetic construct
  misc_feature 1..22: note = chemically synthesized
  source 1..22: mol_type = other DNA
gccctggctttggcagcctgtg

SEQ ID NO: 12882 - DNA, 22 bp, synthetic construct
  misc_feature 1..22: note = chemically synthesized
  source 1..22: mol_type = other DNA
gctttggcagcctgtgctgacc

SEQ ID NO: 12883 - DNA, 22 bp, synthetic construct
  misc_feature 1..22: note = chemically synthesized
  source 1..22: mol_type = other DNA
tggcagcctgtgctgacccatg

SEQ ID NO: 12884 - DNA, 22 bp, synthetic construct
  misc_feature 1..22: note = chemically synthesized
  source 1..22: mol_type = other DNA
ggcagcctgtgctgacccatgc

SEQ ID NO: 12885 - DNA, 22 bp, synthetic construct
  misc_feature 1..22: note = chemically synthesized
  source 1..22: mol_type = other DNA
gcagcctgtgctgacccatgca

SEQ ID NO: 12886 - DNA, 22 bp, synthetic construct
  misc_feature 1..22: note = chemically synthesized
  source 1..22: mol_type = other DNA
tgctgacccatgcagtcctcct

SEQ ID NO: 12887 - DNA, 22 bp, synthetic construct
  misc_feature 1..22: note = chemically synthesized
  source 1..22: mol_type = other DNA
acccatgcagtcctccttacca

SEQ ID NO: 12888 - DNA, 22 bp, synthetic construct
  misc_feature 1..22: note = chemically synthesized
  source 1..22: mol_type = other DNA
cttaccatccctccctcgactt

SEQ ID NO: 12889 - DNA, 22 bp, synthetic construct
  misc_feature 1..22: note = chemically synthesized
  source 1..22: mol_type = other DNA
accatccctccctcgacttccc

SEQ ID NO: 12890 - DNA, 22 bp, synthetic construct
  misc_feature 1..22: note = chemically synthesized
  source 1..22: mol_type = other DNA
ccatccctccctcgacttcccc

SEQ ID NO: 12891 - DNA, 22 bp, synthetic construct
  misc_feature 1..22: note = chemically synthesized
  source 1..22: mol_type = other DNA
cctcgacttcccctcttccgat

SEQ ID NO: 12892 - DNA, 22 bp, synthetic construct
  misc_feature 1..22: note = chemically synthesized
  source 1..22: mol_type = other DNA
gacttcccctcttccgatgttg

SEQ ID NO: 12893 - DNA, 22 bp, synthetic construct
  misc_feature 1..22: note = chemically synthesized
  source 1..22: mol_type = other DNA
cccctcttccgatgttgagccc

SEQ ID NO: 12894 - DNA, 22 bp, synthetic construct
  misc_feature 1..22: note = chemically synthesized
  source 1..22: mol_type = other DNA
ccctcttccgatgttgagcccc

SEQ ID NO: 12895 - DNA, 22 bp, synthetic construct
  misc_feature 1..22: note = chemically synthesized
  source 1..22: mol_type = other DNA
ttccgatgttgagcccctccag

SEQ ID NO: 12896 - DNA, 22 bp, synthetic construct
  misc_feature 1..22: note = chemically synthesized
  source 1..22: mol_type = other DNA
ccgatgttgagcccctccagcc

SEQ ID NO: 12897 - DNA, 22 bp, synthetic construct
  misc_feature 1..22: note = chemically synthesized
  source 1..22: mol_type = other DNA
cgatgttgagcccctccagccg

SEQ ID NO: 12898 - DNA, 22 bp, synthetic construct
  misc_feature 1..22: note = chemically synthesized
  source 1..22: mol_type = other DNA
agcccctccagccggtcctgga

SEQ ID NO: 12899 - DNA, 22 bp, synthetic construct
  misc_feature 1..22: note = chemically synthesized
  source 1..22: mol_type = other DNA
cagccggtcctggactttgtct

SEQ ID NO: 12900 - DNA, 22 bp, synthetic construct
  misc_feature 1..22: note = chemically synthesized
  source 1..22: mol_type = other DNA
gactttgtctccttccctgccc

SEQ ID NO: 12901 - DNA, 22 bp, synthetic construct
  misc_feature 1..22: note = chemically synthesized
  source 1..22: mol_type = other DNA
tgtctccttccctgccctgccc

SEQ ID NO: 12902 - DNA, 22 bp, synthetic construct
  misc_feature 1..22: note = chemically synthesized
  source 1..22: mol_type = other DNA
gtctccttccctgccctgccct

SEQ ID NO: 12903 - DNA, 22 bp, synthetic construct
  misc_feature 1..22: note = chemically synthesized
  source 1..22: mol_type = other DNA
tctccttccctgccctgccctc

SEQ ID NO: 12904 - DNA, 22 bp, synthetic construct
  misc_feature 1..22: note = chemically synthesized
  source 1..22: mol_type = other DNA
cttccctgccctgccctctcct

SEQ ID NO: 12905 - DNA, 22 bp, synthetic construct
  misc_feature 1..22: note = chemically synthesized
  source 1..22: mol_type = other DNA
ccctgccctgccctctcctgaa

SEQ ID NO: 12906 - DNA, 22 bp, synthetic construct
  misc_feature 1..22: note = chemically synthesized
  source 1..22: mol_type = other DNA
cctgccctgccctctcctgaac

SEQ ID NO: 12907 - DNA, 22 bp, synthetic construct
  misc_feature 1..22: note = chemically synthesized
  source 1..22: mol_type = other DNA
ccctgccctctcctgaacctga

SEQ ID NO: 12908 - DNA, 22 bp, synthetic construct
  misc_feature 1..22: note = chemically synthesized
  source 1..22: mol_type = other DNA
ccctctcctgaacctgagccag

SEQ ID NO: 12909 - DNA, 22 bp, synthetic construct
  misc_feature 1..22: note = chemically synthesized
  source 1..22: mol_type = other DNA
tcctgaacctgagccagctccc

SEQ ID NO: 12910 - DNA, 22 bp, synthetic construct
  misc_feature 1..22: note = chemically synthesized
  source 1..22: mol_type = other DNA
ctgaacctgagccagctcccat

SEQ ID NO: 12911 - DNA, 22 bp, synthetic construct
  misc_feature 1..22: note = chemically synthesized
  source 1..22: mol_type = other DNA
aacctgagccagctcccatagc

SEQ ID NO: 12912 - DNA, 22 bp, synthetic construct
  misc_feature 1..22: note = chemically synthesized
  source 1..22: mol_type = other DNA
agccagctcccatagctcagtc

SEQ ID NO: 12913 - DNA, 22 bp, synthetic construct
  misc_feature 1..22: note = chemically synthesized
  source 1..22: mol_type = other DNA
ccatagctcagtctggtctatc

SEQ ID NO: 12914 - DNA, 22 bp, synthetic construct
  misc_feature 1..22: note = chemically synthesized
  source 1..22: mol_type = other DNA
agtctggtctatctgcctggcc

SEQ ID NO: 12915 - DNA, 22 bp, synthetic construct
  misc_feature 1..22: note = chemically synthesized
  source 1..22: mol_type = other DNA
gtctatctgcctggccctggcc

SEQ ID NO: 12916 - DNA, 22 bp, synthetic construct
  misc_feature 1..22: note = chemically synthesized
  source 1..22: mol_type = other DNA
tctgcctggccctggccattgt

SEQ ID NO: 12917 - DNA, 22 bp, synthetic construct
  misc_feature 1..22: note = chemically synthesized
  source 1..22: mol_type = other DNA
cctggccctggccattgtcact

SEQ ID NO: 12918 - DNA, 22 bp, synthetic construct
  misc_feature 1..22: note = chemically synthesized
  source 1..22: mol_type = other DNA
gccctggccattgtcactttgc

SEQ ID NO: 12919 - DNA, 22 bp, synthetic construct
  misc_feature 1..22: note = chemically synthesized
  source 1..22: mol_type = other DNA
gccattgtcactttgcgctgcc

SEQ ID NO: 12920 - DNA, 22 bp, synthetic construct
  misc_feature 1..22: note = chemically synthesized
  source 1..22: mol_type = other DNA
tcactttgcgctgccctcctct

SEQ ID NO: 12921 - DNA, 22 bp, synthetic construct
  misc_feature 1..22: note = chemically synthesized
  source 1..22: mol_type = other DNA
tgcgctgccctcctctcgcccc

SEQ ID NO: 12922 - DNA, 22 bp, synthetic construct
  misc_feature 1..22: note = chemically synthesized
  source 1..22: mol_type = other DNA
gcgctgccctcctctcgccccc

SEQ ID NO: 12923 - DNA, 22 bp, synthetic construct
  misc_feature 1..22: note = chemically synthesized
  source 1..22: mol_type = other DNA
cgctgccctcctctcgcccccg

SEQ ID NO: 12924 - DNA, 22 bp, synthetic construct
  misc_feature 1..22: note = chemically synthesized
  source 1..22: mol_type = other DNA
ccctcctctcgcccccgagtgc

SEQ ID NO: 12925 - DNA, 22 bp, synthetic construct
  misc_feature 1..22: note = chemically synthesized
  source 1..22: mol_type = other DNA
ctctcgcccccgagtgcccttg

SEQ ID NO: 12926 - DNA, 22 bp, synthetic construct
  misc_feature 1..22: note = chemically synthesized
  source 1..22: mol_type = other DNA
tcgcccccgagtgcccttgctg

SEQ ID NO: 12927 - DNA, 22 bp, synthetic construct
  misc_feature 1..22: note = chemically synthesized
  source 1..22: mol_type = other DNA
gcccccgagtgcccttgctgtg

SEQ ID NO: 12928 - DNA, 22 bp, synthetic construct
  misc_feature 1..22: note = chemically synthesized
  source 1..22: mol_type = other DNA
gctgtgccgccggaactctgcc

SEQ ID NO: 12929 - DNA, 22 bp, synthetic construct
  misc_feature 1..22: note = chemically synthesized
  source 1..22: mol_type = other DNA
ctgtgccgccggaactctgccc

SEQ ID NO: 12930 - DNA, 22 bp, synthetic construct
  misc_feature 1..22: note = chemically synthesized
  source 1..22: mol_type = other DNA
tgccgccggaactctgccctct

SEQ ID NO: 12931 - DNA, 22 bp, synthetic construct
  misc_feature 1..22: note = chemically synthesized
  source 1..22: mol_type = other DNA
tgccctctaacgctgccgtctc

SEQ ID NO: 12932 - DNA, 22 bp, synthetic construct
  misc_feature 1..22: note = chemically synthesized
  source 1..22: mol_type = other DNA
ccctctaacgctgccgtctctc

SEQ ID NO: 12933 - DNA, 22 bp, synthetic construct
  misc_feature 1..22: note = chemically synthesized
  source 1..22: mol_type = other DNA
taacgctgccgtctctctcctg

SEQ ID NO: 12934 - DNA, 22 bp, synthetic construct
  misc_feature 1..22: note = chemically synthesized
  source 1..22: mol_type = other DNA
acgctgccgtctctctcctgag

SEQ ID NO: 12935 - DNA, 22 bp, synthetic construct
  misc_feature 1..22: note = chemically synthesized
  source 1..22: mol_type = other DNA
ccgtctctctcctgagtccgga

SEQ ID NO: 12936 - DNA, 22 bp, synthetic construct
  misc_feature 1..22: note = chemically synthesized
  source 1..22: mol_type = other DNA
tctcctgagtccggaccacttt

SEQ ID NO: 12937 - DNA, 22 bp, synthetic construct
  misc_feature 1..22: note = chemically synthesized
  source 1..22: mol_type = other DNA
tcctgagtccggaccactttga

SEQ ID NO: 12938 - DNA, 22 bp, synthetic construct
  misc_feature 1..22: note = chemically synthesized
  source 1..22: mol_type = other DNA
ctgagtccggaccactttgagc

SEQ ID NO: 12939 - DNA, 22 bp, synthetic construct
  misc_feature 1..22: note = chemically synthesized
  source 1..22: mol_type = other DNA
agtccggaccactttgagctct

SEQ ID NO: 12940 - DNA, 22 bp, synthetic construct
  misc_feature 1..22: note = chemically synthesized
  source 1..22: mol_type = other DNA
tgagctctactggcttctgcgc

SEQ ID NO: 12941 - DNA, 22 bp, synthetic construct
  misc_feature 1..22: note = chemically synthesized
  source 1..22: mol_type = other DNA
gagctctactggcttctgcgcc

SEQ ID NO: 12942 - DNA, 22 bp, synthetic construct
  misc_feature 1..22: note = chemically synthesized
  source 1..22: mol_type = other DNA
agctctactggcttctgcgccg

SEQ ID NO: 12943 - DNA, 22 bp, synthetic construct
  misc_feature 1..22: note = chemically synthesized
  source 1..22: mol_type = other DNA
tactggcttctgcgccgcctct

SEQ ID NO: 12944 - DNA, 22 bp, synthetic construct
  misc_feature 1..22: note = chemically synthesized
  source 1..22: mol_type = other DNA
ctggcttctgcgccgcctctgg

SEQ ID NO: 12945 - DNA, 22 bp, synthetic construct
  misc_feature 1..22: note = chemically synthesized
  source 1..22: mol_type = other DNA
gcttctgcgccgcctctggccc

SEQ ID NO: 12946 - DNA, 22 bp, synthetic construct
  misc_feature 1..22: note = chemically synthesized
  source 1..22: mol_type = other DNA
ctgcgccgcctctggcccactg

SEQ ID NO: 12947 - DNA, 22 bp, synthetic construct
  misc_feature 1..22: note = chemically synthesized
  source 1..22: mol_type = other DNA
tgcgccgcctctggcccactgt

SEQ ID NO: 12948 - DNA, 22 bp, synthetic construct
  misc_feature 1..22: note = chemically synthesized
  source 1..22: mol_type = other DNA
cgccgcctctggcccactgttt

SEQ ID NO: 12949 - DNA, 22 bp, synthetic construct
  misc_feature 1..22: note = chemically synthesized
  source 1..22: mol_type = other DNA
tggcccactgtttccccttccc

SEQ ID NO: 12950 - DNA, 22 bp, synthetic construct
  misc_feature 1..22: note = chemically synthesized
  source 1..22: mol_type = other DNA
gcccactgtttccccttcccag

SEQ ID NO: 12951 - DNA, 22 bp, synthetic construct
  misc_feature 1..22: note = chemically synthesized
  source 1..22: mol_type = other DNA
tttccccttcccaggcaggtcc

SEQ ID NO: 12952 - DNA, 22 bp, synthetic construct
  misc_feature 1..22: note = chemically synthesized
  source 1..22: mol_type = other DNA
ccccttcccaggcaggtcctgc

SEQ ID NO: 12953 - DNA, 22 bp, synthetic construct
  misc_feature 1..22: note = chemically synthesized
  source 1..22: mol_type = other DNA
cccttcccaggcaggtcctgct

SEQ ID NO: 12954 - DNA, 22 bp, synthetic construct
  misc_feature 1..22: note = chemically synthesized
  source 1..22: mol_type = other DNA
cccaggcaggtcctgctttctc

SEQ ID NO: 12955 - DNA, 22 bp, synthetic construct
  misc_feature 1..22: note = chemically synthesized
  source 1..22: mol_type = other DNA
ccaggcaggtcctgctttctct

SEQ ID NO: 12956 - DNA, 22 bp, synthetic construct
  misc_feature 1..22: note = chemically synthesized
  source 1..22: mol_type = other DNA
ctttctctgacctgcattctct

SEQ ID NO: 12957 - DNA, 22 bp, synthetic construct
  misc_feature 1..22: note = chemically synthesized
  source 1..22: mol_type = other DNA
tctctgacctgcattctctccc

SEQ ID NO: 12958 - DNA, 22 bp, synthetic construct
  misc_feature 1..22: note = chemically synthesized
  source 1..22: mol_type = other DNA
ctctgacctgcattctctcccc

SEQ ID NO: 12959 - DNA, 22 bp, synthetic construct
  misc_feature 1..22: note = chemically synthesized
  source 1..22: mol_type = other DNA
tctgacctgcattctctcccct

SEQ ID NO: 12960 - DNA, 22 bp, synthetic construct
  misc_feature 1..22: note = chemically synthesized
  source 1..22: mol_type = other DNA
tgacctgcattctctcccctgg

SEQ ID NO: 12961 - DNA, 22 bp, synthetic construct
  misc_feature 1..22: note = chemically synthesized
  source 1..22: mol_type = other DNA
acctgcattctctcccctgggc

SEQ ID NO: 12962 - DNA, 22 bp, synthetic construct
  misc_feature 1..22: note = chemically synthesized
  source 1..22: mol_type = other DNA
cattctctcccctgggcctgtg

SEQ ID NO: 12963 - DNA, 22 bp, synthetic construct
  misc_feature 1..22: note = chemically synthesized
  source 1..22: mol_type = other DNA
tctcccctgggcctgtgccgct

SEQ ID NO: 12964 - DNA, 22 bp, synthetic construct
  misc_feature 1..22: note = chemically synthesized
  source 1..22: mol_type = other DNA
tcccctgggcctgtgccgcttt

SEQ ID NO: 12965 - DNA, 22 bp, synthetic construct
  misc_feature 1..22: note = chemically synthesized
  source 1..22: mol_type = other DNA
ccctgggcctgtgccgctttct

SEQ ID NO: 12966 - DNA, 22 bp, synthetic construct
  misc_feature 1..22: note = chemically synthesized
  source 1..22: mol_type = other DNA
ggcctgtgccgctttctgtctg

SEQ ID NO: 12967 - DNA, 22 bp, synthetic construct
  misc_feature 1..22: note = chemically synthesized
  source 1..22: mol_type = other DNA
tgccgctttctgtctgcagctt

SEQ ID NO: 12968 - DNA, 22 bp, synthetic construct
  misc_feature 1..22: note = chemically synthesized
  source 1..22: mol_type = other DNA
tctgtctgcagcttgtggcctg

SEQ ID NO: 12969 - DNA, 22 bp, synthetic construct
  misc_feature 1..22: note = chemically synthesized
  source 1..22: mol_type = other DNA
ctgtctgcagcttgtggcctgg

SEQ ID NO: 12970 - DNA, 22 bp, synthetic construct
  misc_feature 1..22: note = chemically synthesized
  source 1..22: mol_type = other DNA
tgtctgcagcttgtggcctggg

SEQ ID NO: 12971 - DNA, 22 bp, synthetic construct
  misc_feature 1..22: note = chemically synthesized
  source 1..22: mol_type = other DNA
tctgcagcttgtggcctgggtc

SEQ ID NO: 12972 - DNA, 22 bp, synthetic construct
  misc_feature 1..22: note = chemically synthesized
  source 1..22: mol_type = other DNA
cagcttgtggcctgggtcacct

SEQ ID NO: 12973 - DNA, 22 bp, synthetic construct
  misc_feature 1..22: note = chemically synthesized
  source 1..22: mol_type = other DNA
gtggcctgggtcacctctacgg

SEQ ID NO: 12974 - DNA, 22 bp, synthetic construct
  misc_feature 1..22: note = chemically synthesized
  source 1..22: mol_type = other DNA
tggcctgggtcacctctacggc

SEQ ID NO: 12975 - DNA, 22 bp, synthetic construct
  misc_feature 1..22: note = chemically synthesized
  source 1..22: mol_type = other DNA
ggtcacctctacggctggccca

SEQ ID NO: 12976 - DNA, 22 bp, synthetic construct
  misc_feature 1..22: note = chemically synthesized
  source 1..22: mol_type = other DNA
tacggctggcccagatccttcc

SEQ ID NO: 12977 - DNA, 22 bp, synthetic construct
  misc_feature 1..22: note = chemically synthesized
  source 1..22: mol_type = other DNA
cggctggcccagatccttccct

SEQ ID NO: 12978 - DNA, 22 bp, synthetic construct
  misc_feature 1..22: note = chemically synthesized
  source 1..22: mol_type = other DNA
gcccagatccttccctgccgcc

SEQ ID NO: 12979 - DNA, 22 bp, synthetic construct
  misc_feature 1..22: note = chemically synthesized
  source 1..22: mol_type = other DNA
ccctgccgcctccttcaggttc

SEQ ID NO: 12980 - DNA, 22 bp, synthetic construct
  misc_feature 1..22: note = chemically synthesized
  source 1..22: mol_type = other DNA
cctgccgcctccttcaggttcc

SEQ ID NO: 12981 - DNA, 22 bp, synthetic construct
  misc_feature 1..22: note = chemically synthesized
  source 1..22: mol_type = other DNA
ccgcctccttcaggttccgtct

SEQ ID NO: 12982 - DNA, 22 bp, synthetic construct
  misc_feature 1..22: note = chemically synthesized
  source 1..22: mol_type = other DNA
cttcaggttccgtcttcctcca

SEQ ID NO: 12983 - DNA, 22 bp, synthetic construct
  misc_feature 1..22: note = chemically synthesized
  source 1..22: mol_type = other DNA
caggttccgtcttcctccactc

SEQ ID NO: 12984 - DNA, 22 bp, synthetic construct
  misc_feature 1..22: note = chemically synthesized
  source 1..22: mol_type = other DNA
aggttccgtcttcctccactcc

SEQ ID NO: 12985 - DNA, 22 bp, synthetic construct
  misc_feature 1..22: note = chemically synthesized
  source 1..22: mol_type = other DNA
cgtcttcctccactccctcttc

SEQ ID NO: 12986 - DNA, 22 bp, synthetic construct
  misc_feature 1..22: note = chemically synthesized
  source 1..22: mol_type = other DNA
cctccactccctcttccccttg

SEQ ID NO: 12987 - DNA, 22 bp, synthetic construct
  misc_feature 1..22: note = chemically synthesized
  source 1..22: mol_type = other DNA
ctccactccctcttccccttgc

SEQ ID NO: 12988 - DNA, 22 bp, synthetic construct
  misc_feature 1..22: note = chemically synthesized
  source 1..22: mol_type = other DNA
cactccctcttccccttgctct

SEQ ID NO: 12989 - DNA, 22 bp, synthetic construct
  misc_feature 1..22: note = chemically synthesized
  source 1..22: mol_type = other DNA
cctcttccccttgctctctgct

SEQ ID NO: 12990 - DNA, 22 bp, synthetic construct
  misc_feature 1..22: note = chemically synthesized
  source 1..22: mol_type = other DNA
ttccccttgctctctgctgtgt

SEQ ID NO: 12991 - DNA, 22 bp, synthetic construct
  misc_feature 1..22: note = chemically synthesized
  source 1..22: mol_type = other DNA
ccccttgctctctgctgtgttg

SEQ ID NO: 12992 - DNA, 22 bp, synthetic construct
  misc_feature 1..22: note = chemically synthesized
  source 1..22: mol_type = other DNA
cccttgctctctgctgtgttgc

SEQ ID NO: 12993 - DNA, 22 bp, synthetic construct
  misc_feature 1..22: note = chemically synthesized
  source 1..22: mol_type = other DNA
gctctctgctgtgttgctgccc

SEQ ID NO: 12994 - DNA, 22 bp, synthetic construct
  misc_feature 1..22: note = chemically synthesized
  source 1..22: mol_type = other DNA
ctctctgctgtgttgctgccca

SEQ ID NO: 12995 - DNA, 22 bp, synthetic construct
  misc_feature 1..22: note = chemically synthesized
  source 1..22: mol_type = other DNA
tctgctgtgttgctgcccaagg

SEQ ID NO: 12996 - DNA, 22 bp, synthetic construct
  misc_feature 1..22: note = chemically synthesized
  source 1..22: mol_type = other DNA
tgctgtgttgctgcccaaggat

SEQ ID NO: 12997 - DNA, 22 bp, synthetic construct
  misc_feature 1..22: note = chemically synthesized
  source 1..22: mol_type = other DNA
ctgtgttgctgcccaaggatgc

SEQ ID NO: 12998 - DNA, 22 bp, synthetic construct
  misc_feature 1..22: note = chemically synthesized
  source 1..22: mol_type = other DNA
tgttgctgcccaaggatgctct

SEQ ID NO: 12999 - DNA, 22 bp, synthetic construct
  misc_feature 1..22: note = chemically synthesized
  source 1..22: mol_type = other DNA
ctgcccaaggatgctctttccg

SEQ ID NO: 13000 - DNA, 22 bp, synthetic construct
  misc_feature 1..22: note = chemically synthesized
  source 1..22: mol_type = other DNA
cccaaggatgctctttccggag

SEQ ID NO: 13001 - DNA, 22 bp, synthetic construct
  misc_feature 1..22: note = chemically synthesized
  source 1..22: mol_type = other DNA
tttccggagcacttccttctcg

SEQ ID NO: 13002 - DNA, 22 bp, synthetic construct
  misc_feature 1..22: note = chemically synthesized
  source 1..22: mol_type = other DNA
tccggagcacttccttctcggc

SEQ ID NO: 13003 - DNA, 22 bp, synthetic construct
  misc_feature 1..22: note = chemically synthesized
  source 1..22: mol_type = other DNA
ccggagcacttccttctcggcg

SEQ ID NO: 13004 - DNA, 22 bp, synthetic construct
  misc_feature 1..22: note = chemically synthesized
  source 1..22: mol_type = other DNA
cggagcacttccttctcggcgc

SEQ ID NO: 13005 - DNA, 22 bp, synthetic construct
  misc_feature 1..22: note = chemically synthesized
  source 1..22: mol_type = other DNA
ccttctcggcgctgcaccacgt

SEQ ID NO: 13006 - DNA, 22 bp, synthetic construct
  misc_feature 1..22: note = chemically synthesized
  source 1..22: mol_type = other DNA
cttctcggcgctgcaccacgtg

SEQ ID NO: 13007 - DNA, 22 bp, synthetic construct
  misc_feature 1..22: note = chemically synthesized
  source 1..22: mol_type = other DNA
ctcggcgctgcaccacgtgatg

SEQ ID NO: 13008 - DNA, 22 bp, synthetic construct
  misc_feature 1..22: note = chemically synthesized
  source 1..22: mol_type = other DNA
tcggcgctgcaccacgtgatgt

SEQ ID NO: 13009 - DNA, 22 bp, synthetic construct
  misc_feature 1..22: note = chemically synthesized
  source 1..22: mol_type = other DNA
ggcgctgcaccacgtgatgtcc

SEQ ID NO: 13010 - DNA, 22 bp, synthetic construct
  misc_feature 1..22: note = chemically synthesized
  source 1..22: mol_type = other DNA
caccacgtgatgtcctctgagc

SEQ ID NO: 13011 - DNA, 22 bp, synthetic construct
  misc_feature 1..22: note = chemically synthesized
  source 1..22: mol_type = other DNA
tgagcggatcctccccgtgtct

SEQ ID NO: 13012 - DNA, 22 bp, synthetic construct
  misc_feature 1..22: note = chemically synthesized
  source 1..22: mol_type = other DNA
agcggatcctccccgtgtctgg

SEQ ID NO: 13013 - DNA, 22 bp, synthetic construct
  misc_feature 1..22: note = chemically synthesized
  source 1..22: mol_type = other DNA
cccgtgtctgggtcctctccgg

SEQ ID NO: 13014 - DNA, 22 bp, synthetic construct
  misc_feature 1..22: note = chemically synthesized
  source 1..22: mol_type = other DNA
ggtcctctccgggcatctctcc

SEQ ID NO: 13015 - DNA, 22 bp, synthetic construct
  misc_feature 1..22: note = chemically synthesized
  source 1..22: mol_type = other DNA
tccgggcatctctcctccctca

SEQ ID NO: 13016 - DNA, 22 bp, synthetic construct
  misc_feature 1..22: note = chemically synthesized
  source 1..22: mol_type = other DNA
cgggcatctctcctccctcacc

SEQ ID NO: 13017 - DNA, 22 bp, synthetic construct
  misc_feature 1..22: note = chemically synthesized
  source 1..22: mol_type = other DNA
tcctccctcacccaaccccatg

SEQ ID NO: 13018 - DNA, 22 bp, synthetic construct
  misc_feature 1..22: note = chemically synthesized
  source 1..22: mol_type = other DNA
ctccctcacccaaccccatgcc

SEQ ID NO: 13019 - DNA, 22 bp, synthetic construct
  misc_feature 1..22: note = chemically synthesized
  source 1..22: mol_type = other DNA
cctcacccaaccccatgccgtc

SEQ ID NO: 13020 - DNA, 22 bp, synthetic construct
  misc_feature 1..22: note = chemically synthesized
  source 1..22: mol_type = other DNA
acccaaccccatgccgtcttca

SEQ ID NO: 13021 - DNA, 22 bp, synthetic construct
  misc_feature 1..22: note = chemically synthesized
  source 1..22: mol_type = other DNA
cactcgctgggttcccttttcc

SEQ ID NO: 13022 - DNA, 22 bp, synthetic construct
  misc_feature 1..22: note = chemically synthesized
  source 1..22: mol_type = other DNA
actcgctgggttcccttttcct

SEQ ID NO: 13023 - DNA, 22 bp, synthetic construct
  misc_feature 1..22: note = chemically synthesized
  source 1..22: mol_type = other DNA
gctgggttcccttttccttctc

SEQ ID NO: 13024 - DNA, 22 bp, synthetic construct
  misc_feature 1..22: note = chemically synthesized
  source 1..22: mol_type = other DNA
ggttcccttttccttctccttc

SEQ ID NO: 13025 - DNA, 22 bp, synthetic construct
  misc_feature 1..22: note = chemically synthesized
  source 1..22: mol_type = other DNA
ccttttccttctccttctgggg

SEQ ID NO: 13026 - DNA, 22 bp, synthetic construct
  misc_feature 1..22: note = chemically synthesized
  source 1..22: mol_type = other DNA
ttccttctccttctggggcctg

SEQ ID NO: 13027 - DNA, 22 bp, synthetic construct
  misc_feature 1..22: note = chemically synthesized
  source 1..22: mol_type = other DNA
tccttctccttctggggcctgt

SEQ ID NO: 13028 - DNA, 22 bp, synthetic construct
  misc_feature 1..22: note = chemically synthesized
  source 1..22: mol_type = other DNA
ccttctccttctggggcctgtg

SEQ ID NO: 13029 - DNA, 22 bp, synthetic construct
  misc_feature 1..22: note = chemically synthesized
  source 1..22: mol_type = other DNA
cttctccttctggggcctgtgc

SEQ ID NO: 13030 - DNA, 22 bp, synthetic construct
  misc_feature 1..22: note = chemically synthesized
  source 1..22: mol_type = other DNA
ctccttctggggcctgtgccat

SEQ ID NO: 13031 - DNA, 22 bp, synthetic construct
  misc_feature 1..22: note = chemically synthesized
  source 1..22: mol_type = other DNA
tccttctggggcctgtgccatc

SEQ ID NO: 13032 - DNA, 22 bp, synthetic construct
  misc_feature 1..22: note = chemically synthesized
  source 1..22: mol_type = other DNA
cttctggggcctgtgccatctc

SEQ ID NO: 13033 - DNA, 22 bp, synthetic construct
  misc_feature 1..22: note = chemically synthesized
  source 1..22: mol_type = other DNA
ctggggcctgtgccatctctcg

SEQ ID NO: 13034 - DNA, 22 bp, synthetic construct
  misc_feature 1..22: note = chemically synthesized
  source 1..22: mol_type = other DNA
tggggcctgtgccatctctcgt

SEQ ID NO: 13035 - DNA, 22 bp, synthetic construct
  misc_feature 1..22: note = chemically synthesized
  source 1..22: mol_type = other DNA
gggcctgtgccatctctcgttt

SEQ ID NO: 13036 - DNA, 22 bp, synthetic construct
  misc_feature 1..22: note = chemically synthesized
  source 1..22: mol_type = other DNA
tgccatctctcgtttcttagga

SEQ ID NO: 13037 - DNA, 22 bp, synthetic construct
  misc_feature 1..22: note = chemically synthesized
  source 1..22: mol_type = other DNA
tcgtttcttaggatggccttct

SEQ ID NO: 13038 - DNA, 22 bp, synthetic construct
  misc_feature 1..22: note = chemically synthesized
  source 1..22: mol_type = other DNA
gtttcttaggatggccttctcc

SEQ ID NO: 13039 - DNA, 22 bp, synthetic construct
  misc_feature 1..22: note = chemically synthesized
  source 1..22: mol_type = other DNA
cttaggatggccttctccgacg

SEQ ID NO: 13040 - DNA, 22 bp, synthetic construct
  misc_feature 1..22: note = chemically synthesized
  source 1..22: mol_type = other DNA
ttaggatggccttctccgacgg

SEQ ID NO: 13041 - DNA, 22 bp, synthetic construct
  misc_feature 1..22: note = chemically synthesized
  source 1..22: mol_type = other DNA
aggatggccttctccgacggat

SEQ ID NO: 13042 - DNA, 22 bp, synthetic construct
  misc_feature 1..22: note = chemically synthesized
  source 1..22: mol_type = other DNA
ggatggccttctccgacggatg

SEQ ID NO: 13043 - DNA, 22 bp, synthetic construct
  misc_feature 1..22: note = chemically synthesized
  source 1..22: mol_type = other DNA
ctccgacggatgtctcccttgc

SEQ ID NO: 13044 - DNA, 22 bp, synthetic construct
  misc_feature 1..22: note = chemically synthesized
  source 1..22: mol_type = other DNA
tccgacggatgtctcccttgcg

SEQ ID NO: 13045 - DNA, 22 bp, synthetic construct
  misc_feature 1..22: note = chemically synthesized
  source 1..22: mol_type = other DNA
cgacggatgtctcccttgcgtc

SEQ ID NO: 13046 - DNA, 22 bp, synthetic construct
  misc_feature 1..22: note = chemically synthesized
  source 1..22: mol_type = other DNA
ccttgcgtcccgcctccccttc

SEQ ID NO: 13047 - DNA, 22 bp, synthetic construct
  misc_feature 1..22: note = chemically synthesized
  source 1..22: mol_type = other DNA
gcgtcccgcctccccttcttgt

SEQ ID NO: 13048 - DNA, 22 bp, synthetic construct
  misc_feature 1..22: note = chemically synthesized
  source 1..22: mol_type = other DNA
cgtcccgcctccccttcttgta

SEQ ID NO: 13049 - DNA, 22 bp, synthetic construct
  misc_feature 1..22: note = chemically synthesized
  source 1..22: mol_type = other DNA
cccttcttgtaggcctgcatca

SEQ ID NO: 13050 - DNA, 22 bp, synthetic construct
  misc_feature 1..22: note = chemically synthesized
  source 1..22: mol_type = other DNA
cttgtaggcctgcatcatcacc

SEQ ID NO: 13051 - DNA, 22 bp, synthetic construct
  misc_feature 1..22: note = chemically synthesized
  source 1..22: mol_type = other DNA
ttgtaggcctgcatcatcaccg

SEQ ID NO: 13052 - DNA, 22 bp, synthetic construct
  misc_feature 1..22: note = chemically synthesized
  source 1..22: mol_type = other DNA
gtaggcctgcatcatcaccgtt

SEQ ID NO: 13053 - DNA, 22 bp, synthetic construct
  misc_feature 1..22: note = chemically synthesized
  source 1..22: mol_type = other DNA
taggcctgcatcatcaccgttt

SEQ ID NO: 13054 - DNA, 22 bp, synthetic construct
  misc_feature 1..22: note = chemically synthesized
  source 1..22: mol_type = other DNA
catcatcaccgtttttctggac

SEQ ID NO: 13055 - DNA, 22 bp, synthetic construct
  misc_feature 1..22: note = chemically synthesized
  source 1..22: mol_type = other DNA
ttctggacaaccccaaagtacc

SEQ ID NO: 13056 - DNA, 22 bp, synthetic construct
  misc_feature 1..22: note = chemically synthesized
  source 1..22: mol_type = other DNA
tctggacaaccccaaagtaccc

SEQ ID NO: 13057 - DNA, 22 bp, synthetic construct
  misc_feature 1..22: note = chemically synthesized
  source 1..22: mol_type = other DNA
ctggacaaccccaaagtacccc

SEQ ID NO: 13058 - DNA, 22 bp, synthetic construct
  misc_feature 1..22: note = chemically synthesized
  source 1..22: mol_type = other DNA
tggacaaccccaaagtaccccg

SEQ ID NO: 13059 - DNA, 22 bp, synthetic construct
  misc_feature 1..22: note = chemically synthesized
  source 1..22: mol_type = other DNA
gacaaccccaaagtaccccgtc

SEQ ID NO: 13060 - DNA, 22 bp, synthetic construct
  misc_feature 1..22: note = chemically synthesized
  source 1..22: mol_type = other DNA
cctggctttagccacctctcca

SEQ ID NO: 13061 - DNA, 22 bp, synthetic construct
  misc_feature 1..22: note = chemically synthesized
  source 1..22: mol_type = other DNA
gctttagccacctctccatcct

SEQ ID NO: 13062 - DNA, 22 bp, synthetic construct
  misc_feature 1..22: note = chemically synthesized
  source 1..22: mol_type = other DNA
tagccacctctccatcctcttg

SEQ ID NO: 13063 - DNA, 22 bp, synthetic construct
  misc_feature 1..22: note = chemically synthesized
  source 1..22: mol_type = other DNA
agccacctctccatcctcttgc

SEQ ID NO: 13064 - DNA, 22 bp, synthetic construct
  misc_feature 1..22: note = chemically synthesized
  source 1..22: mol_type = other DNA
gccacctctccatcctcttgct

SEQ ID NO: 13065 - DNA, 22 bp, synthetic construct
  misc_feature 1..22: note = chemically synthesized
  source 1..22: mol_type = other DNA
tccatcctcttgctttctttgc

SEQ ID NO: 13066 - DNA, 22 bp, synthetic construct
  misc_feature 1..22: note = chemically synthesized
  source 1..22: mol_type = other DNA
catcctcttgctttctttgcct

SEQ ID NO: 13067 - DNA, 22 bp, synthetic construct
  misc_feature 1..22: note = chemically synthesized
  source 1..22: mol_type = other DNA
ttgctttctttgcctggacacc

SEQ ID NO: 13068 - DNA, 22 bp, synthetic construct
  misc_feature 1..22: note = chemically synthesized
  source 1..22: mol_type = other DNA
gctttctttgcctggacacccc

SEQ ID NO: 13069 - DNA, 22 bp, synthetic construct
  misc_feature 1..22: note = chemically synthesized
  source 1..22: mol_type = other DNA
ctttctttgcctggacaccccg

SEQ ID NO: 13070 - DNA, 22 bp, synthetic construct
  misc_feature 1..22: note = chemically synthesized
  source 1..22: mol_type = other DNA
tctttgcctggacaccccgttc

SEQ ID NO: 13071 - DNA, 22 bp, synthetic construct
  misc_feature 1..22: note = chemically synthesized
  source 1..22: mol_type = other DNA
ctttgcctggacaccccgttct

SEQ ID NO: 13072 - DNA, 22 bp, synthetic construct
  misc_feature 1..22: note = chemically synthesized
  source 1..22: mol_type = other DNA
tttgcctggacaccccgttctc

SEQ ID NO: 13073 - DNA, 22 bp, synthetic construct
  misc_feature 1..22: note = chemically synthesized
  source 1..22: mol_type = other DNA
tgcctggacaccccgttctcct

SEQ ID NO: 13074 - DNA, 22 bp, synthetic construct
  misc_feature 1..22: note = chemically synthesized
  source 1..22: mol_type = other DNA
gcctggacaccccgttctcctg

SEQ ID NO: 13075 - DNA, 22 bp, synthetic construct
  misc_feature 1..22: note = chemically synthesized
  source 1..22: mol_type = other DNA
cctggacaccccgttctcctgt

SEQ ID NO: 13076 - DNA, 22 bp, synthetic construct
  misc_feature 1..22: note = chemically synthesized
  source 1..22: mol_type = other DNA
gacaccccgttctcctgtggat

SEQ ID NO: 13077 - DNA, 22 bp, synthetic construct
  misc_feature 1..22: note = chemically synthesized
  source 1..22: mol_type = other DNA
tcctgtggattcgggtcacctc

SEQ ID NO: 13078 - DNA, 22 bp, synthetic construct
  misc_feature 1..22: note = chemically synthesized
  source 1..22: mol_type = other DNA
ctgtggattcgggtcacctctc

SEQ ID NO: 13079 - DNA, 22 bp, synthetic construct
  misc_feature 1..22: note = chemically synthesized
  source 1..22: mol_type = other DNA
tggattcgggtcacctctcact

SEQ ID NO: 13080 - DNA, 22 bp, synthetic construct
  misc_feature 1..22: note = chemically synthesized
  source 1..22: mol_type = other DNA
gggtcacctctcactcctttca

SEQ ID NO: 13081 - DNA, 22 bp, synthetic construct
  misc_feature 1..22: note = chemically synthesized
  source 1..22: mol_type = other DNA
tcactcctttcatttgggcagc

SEQ ID NO: 13082 - DNA, 22 bp, synthetic construct
  misc_feature 1..22: note = chemically synthesized
  source 1..22: mol_type = other DNA
actcctttcatttgggcagctc

SEQ ID NO: 13083 - DNA, 22 bp, synthetic construct
  misc_feature 1..22: note = chemically synthesized
  source 1..22: mol_type = other DNA
ctttcatttgggcagctcccct

SEQ ID NO: 13084 - DNA, 22 bp, synthetic construct
  misc_feature 1..22: note = chemically synthesized
  source 1..22: mol_type = other DNA
tcatttgggcagctcccctacc

SEQ ID NO: 13085 - DNA, 22 bp, synthetic construct
  misc_feature 1..22: note = chemically synthesized
  source 1..22: mol_type = other DNA
catttgggcagctcccctaccc

SEQ ID NO: 13086 - DNA, 22 bp, synthetic construct
  misc_feature 1..22: note = chemically synthesized
  source 1..22: mol_type = other DNA
atttgggcagctcccctacccc

SEQ ID NO: 13087 - DNA, 22 bp, synthetic construct
  misc_feature 1..22: note = chemically synthesized
  source 1..22: mol_type = other DNA
gggcagctcccctacccccctt

SEQ ID NO: 13088 - DNA, 22 bp, synthetic construct
  misc_feature 1..22: note = chemically synthesized
  source 1..22: mol_type = other DNA
ggcagctcccctacccccctta

SEQ ID NO: 13089 - DNA, 22 bp, synthetic construct
  misc_feature 1..22: note = chemically synthesized
  source 1..22: mol_type = other DNA
ccctaccccccttacctctcta

SEQ ID NO: 13090 - DNA, 22 bp, synthetic construct
  misc_feature 1..22: note = chemically synthesized
  source 1..22: mol_type = other DNA
ccccccttacctctctagtctg

SEQ ID NO: 13091 - DNA, 22 bp, synthetic construct
  misc_feature 1..22: note = chemically synthesized
  source 1..22: mol_type = other DNA
acctctctagtctgtgctagct

SEQ ID NO: 13092 - DNA, 22 bp, synthetic construct
  misc_feature 1..22: note = chemically synthesized
  source 1..22: mol_type = other DNA
cctctctagtctgtgctagctc

SEQ ID NO: 13093 - DNA, 22 bp, synthetic construct
  misc_feature 1..22: note = chemically synthesized
  source 1..22: mol_type = other DNA
tctagtctgtgctagctcttcc

SEQ ID NO: 13094 - DNA, 22 bp, synthetic construct
  misc_feature 1..22: note = chemically synthesized
  source 1..22: mol_type = other DNA
tagtctgtgctagctcttccag

SEQ ID NO: 13095 - DNA, 22 bp, synthetic construct
  misc_feature 1..22: note = chemically synthesized
  source 1..22: mol_type = other DNA
gtctgtgctagctcttccagcc

SEQ ID NO: 13096 - DNA, 22 bp, synthetic construct
  misc_feature 1..22: note = chemically synthesized
  source 1..22: mol_type = other DNA
tgctagctcttccagccccctg

SEQ ID NO: 13097 - DNA, 22 bp, synthetic construct
  misc_feature 1..22: note = chemically synthesized
  source 1..22: mol_type = other DNA
gctcttccagccccctgtcatg

SEQ ID NO: 13098 - DNA, 22 bp, synthetic construct
  misc_feature 1..22: note = chemically synthesized
  source 1..22: mol_type = other DNA
ttccagccccctgtcatggcat

SEQ ID NO: 13099 - DNA, 22 bp, synthetic construct
  misc_feature 1..22: note = chemically synthesized
  source 1..22: mol_type = other DNA
ccagccccctgtcatggcatct

SEQ ID NO: 13100 - DNA, 22 bp, synthetic construct
  misc_feature 1..22: note = chemically synthesized
  source 1..22: mol_type = other DNA
cagccccctgtcatggcatctt

SEQ ID NO: 13101 - DNA, 22 bp, synthetic construct
  misc_feature 1..22: note = chemically synthesized
  source 1..22: mol_type = other DNA
tcatggcatcttccaggggtcc

SEQ ID NO: 13102 - DNA, 22 bp, synthetic construct
  misc_feature 1..22: note = chemically synthesized
  source 1..22: mol_type = other DNA
ccaggggtccgagagctcagct

SEQ ID NO: 13103 - DNA, 22 bp, synthetic construct
  misc_feature 1..22: note = chemically synthesized
  source 1..22: mol_type = other DNA
caggggtccgagagctcagcta

SEQ ID NO: 13104 - DNA, 22 bp, synthetic construct
  misc_feature 1..22: note = chemically synthesized
  source 1..22: mol_type = other DNA
agctagtcttcttcctccaacc

SEQ ID NO: 13105 - DNA, 22 bp, synthetic construct
  misc_feature 1..22: note = chemically synthesized
  source 1..22: mol_type = other DNA
gtcttcttcctccaacccgggc

SEQ ID NO: 13106 - DNA, 22 bp, synthetic construct
  misc_feature 1..22: note = chemically synthesized
  source 1..22: mol_type = other DNA
cttcctccaacccgggccccta

SEQ ID NO: 13107 - DNA, 22 bp, synthetic construct
  misc_feature 1..22: note = chemically synthesized
  source 1..22: mol_type = other DNA
ttcctccaacccgggcccctat

SEQ ID NO: 13108 - DNA, 22 bp, synthetic construct
  misc_feature 1..22: note = chemically synthesized
  source 1..22: mol_type = other DNA
cctccaacccgggcccctatgt

SEQ ID NO: 13109 - DNA, 22 bp, synthetic construct
  misc_feature 1..22: note = chemically synthesized
  source 1..22: mol_type = other DNA
ctccaacccgggcccctatgtc

SEQ ID NO: 13110 - DNA, 22 bp, synthetic construct
  misc_feature 1..22: note = chemically synthesized
  source 1..22: mol_type = other DNA
caacccgggcccctatgtccac

SEQ ID NO: 13111 - DNA, 22 bp, synthetic construct
  misc_feature 1..22: note = chemically synthesized
  source 1..22: mol_type = other DNA
tgtccacttcaggacagcatgt

SEQ ID NO: 13112 - DNA, 22 bp, synthetic construct
  misc_feature 1..22: note = chemically synthesized
  source 1..22: mol_type = other DNA
caggacagcatgtttgctgcct

SEQ ID NO: 13113 - DNA, 22 bp, synthetic construct
  misc_feature 1..22: note = chemically synthesized
  source 1..22: mol_type = other DNA
aggacagcatgtttgctgcctc

SEQ ID NO: 13114 - DNA, 22 bp, synthetic construct
  misc_feature 1..22: note = chemically synthesized
  source 1..22: mol_type = other DNA
gctgcctccagggatcctgtgt

SEQ ID NO: 13115 - DNA, 22 bp, synthetic construct
  misc_feature 1..22: note = chemically synthesized
  source 1..22: mol_type = other DNA
ctgcctccagggatcctgtgtc

SEQ ID NO: 13116 - DNA, 22 bp, synthetic construct
  misc_feature 1..22: note = chemically synthesized
  source 1..22: mol_type = other DNA
cctccagggatcctgtgtcccc

SEQ ID NO: 13117 - DNA, 22 bp, synthetic construct
  misc_feature 1..22: note = chemically synthesized
  source 1..22: mol_type = other DNA
cagggatcctgtgtccccgagc

SEQ ID NO: 13118 - DNA, 22 bp, synthetic construct
  misc_feature 1..22: note = chemically synthesized
  source 1..22: mol_type = other DNA
tgtccccgagctgggaccacct

SEQ ID NO: 13119 - DNA, 22 bp, synthetic construct
  misc_feature 1..22: note = chemically synthesized
  source 1..22: mol_type = other DNA
ggaccaccttatattcccaggg

SEQ ID NO: 13120 - DNA, 22 bp, synthetic construct
  misc_feature 1..22: note = chemically synthesized
  source 1..22: mol_type = other DNA
atattcccagggccggttaatg

SEQ ID NO: 13121 - DNA, 22 bp, synthetic construct
  misc_feature 1..22: note = chemically synthesized
  source 1..22: mol_type = other DNA
tattcccagggccggttaatgt

SEQ ID NO: 13122 - DNA, 22 bp, synthetic construct
  misc_feature 1..22: note = chemically synthesized
  source 1..22: mol_type = other DNA
ccagggccggttaatgtggctc

SEQ ID NO: 13123 - DNA, 22 bp, synthetic construct
  misc_feature 1..22: note = chemically synthesized
  source 1..22: mol_type = other DNA
atgtggctctggttctgggtac

SEQ ID NO: 13124 - DNA, 22 bp, synthetic construct
  misc_feature 1..22: note = chemically synthesized
  source 1..22: mol_type = other DNA
tggttctgggtacttttatctg

SEQ ID NO: 13125 - DNA, 22 bp, synthetic construct
  misc_feature 1..22: note = chemically synthesized
  source 1..22: mol_type = other DNA
gttctgggtacttttatctgtc

SEQ ID NO: 13126 - DNA, 22 bp, synthetic construct
  misc_feature 1..22: note = chemically synthesized
  source 1..22: mol_type = other DNA
tgggtacttttatctgtcccct

SEQ ID NO: 13127 - DNA, 22 bp, synthetic construct
  misc_feature 1..22: note = chemically synthesized
  source 1..22: mol_type = other DNA
ggtacttttatctgtcccctcc

SEQ ID NO: 13128 - DNA, 22 bp, synthetic construct
  misc_feature 1..22: note = chemically synthesized
  source 1..22: mol_type = other DNA
ttatctgtcccctccaccccac

SEQ ID NO: 13129 - DNA, 22 bp, synthetic construct
  misc_feature 1..22: note = chemically synthesized
  source 1..22: mol_type = other DNA
tatctgtcccctccaccccaca

SEQ ID NO: 13130 - DNA, 22 bp, synthetic construct
  misc_feature 1..22: note = chemically synthesized
  source 1..22: mol_type = other DNA
atctgtcccctccaccccacag

SEQ ID NO: 13131 - DNA, 22 bp, synthetic construct
  misc_feature 1..22: note = chemically synthesized
  source 1..22: mol_type = other DNA
tctgtcccctccaccccacagt

SEQ ID NO: 13132 - DNA, 22 bp, synthetic construct
  misc_feature 1..22: note = chemically synthesized
  source 1..22: mol_type = other DNA
tcccctccaccccacagtgggg

SEQ ID NO: 13133 - DNA, 22 bp, synthetic construct
  misc_feature 1..22: note = chemically synthesized
  source 1..22: mol_type = other DNA
caccccacagtggggccactag

SEQ ID NO: 13134 - DNA, 22 bp, synthetic construct
  misc_feature 1..22: note = chemically synthesized
  source 1..22: mol_type = other DNA
gggacaggattggtgacagaaa

SEQ ID NO: 13135 - DNA, 22 bp, synthetic construct
  misc_feature 1..22: note = chemically synthesized
  source 1..22: mol_type = other DNA
gtgacagaaaagccccatcctt

SEQ ID NO: 13136 - DNA, 22 bp, synthetic construct
  misc_feature 1..22: note = chemically synthesized
  source 1..22: mol_type = other DNA
aggcctcctccttcctagtctc

SEQ ID NO: 13137 - DNA, 22 bp, synthetic construct
  misc_feature 1..22: note = chemically synthesized
  source 1..22: mol_type = other DNA
ggcctcctccttcctagtctcc

SEQ ID NO: 13138 - DNA, 22 bp, synthetic construct
  misc_feature 1..22: note = chemically synthesized
  source 1..22: mol_type = other DNA
ctccttcctagtctcctgatat

SEQ ID NO: 13139 - DNA, 22 bp, synthetic construct
  misc_feature 1..22: note = chemically synthesized
  source 1..22: mol_type = other DNA
cttcctagtctcctgatattgg

SEQ ID NO: 13140 - DNA, 22 bp, synthetic construct
  misc_feature 1..22: note = chemically synthesized
  source 1..22: mol_type = other DNA
cctagtctcctgatattgggtc

SEQ ID NO: 13141 - DNA, 22 bp, synthetic construct
  misc_feature 1..22: note = chemically synthesized
  source 1..22: mol_type = other DNA
ctagtctcctgatattgggtct

SEQ ID NO: 13142 - DNA, 22 bp, synthetic construct
  misc_feature 1..22: note = chemically synthesized
  source 1..22: mol_type = other DNA
gtctcctgatattgggtctaac

SEQ ID NO: 13143 - DNA, 22 bp, synthetic construct
  misc_feature 1..22: note = chemically synthesized
  source 1..22: mol_type = other DNA
ctgatattgggtctaaccccca

SEQ ID NO: 13144 - DNA, 22 bp, synthetic construct
  misc_feature 1..22: note = chemically synthesized
  source 1..22: mol_type = other DNA
atattgggtctaacccccacct

SEQ ID NO: 13145 - DNA, 22 bp, synthetic construct
  misc_feature 1..22: note = chemically synthesized
  source 1..22: mol_type = other DNA
ggtctaacccccacctcctgtt

SEQ ID NO: 13146 - DNA, 22 bp, synthetic construct
  misc_feature 1..22: note = chemically synthesized
  source 1..22: mol_type = other DNA
acccccacctcctgttaggcag

SEQ ID NO: 13147 - DNA, 22 bp, synthetic construct
  misc_feature 1..22: note = chemically synthesized
  source 1..22: mol_type = other DNA
ctgttaggcagattccttatct

SEQ ID NO: 13148 - DNA, 22 bp, synthetic construct
  misc_feature 1..22: note = chemically synthesized
  source 1..22: mol_type = other DNA
ttaggcagattccttatctggt

SEQ ID NO: 13149 - DNA, 22 bp, synthetic construct
  misc_feature 1..22: note = chemically synthesized
  source 1..22: mol_type = other DNA
ggcagattccttatctggtgac

SEQ ID NO: 13150 - DNA, 22 bp, synthetic construct
  misc_feature 1..22: note = chemically synthesized
  source 1..22: mol_type = other DNA
cttatctggtgacacaccccca

SEQ ID NO: 13151 - DNA, 22 bp, synthetic construct
  misc_feature 1..22: note = chemically synthesized
  source 1..22: mol_type = other DNA
atctggtgacacacccccattt

SEQ ID NO: 13152 - DNA, 22 bp, synthetic construct
  misc_feature 1..22: note = chemically synthesized
  source 1..22: mol_type = other DNA
tctggtgacacacccccatttc

SEQ ID NO: 13153 - DNA, 22 bp, synthetic construct
  misc_feature 1..22: note = chemically synthesized
  source 1..22: mol_type = other DNA
gtgacacacccccatttcctgg

SEQ ID NO: 13154 - DNA, 22 bp, synthetic construct
  misc_feature 1..22: note = chemically synthesized
  source 1..22: mol_type = other DNA
cctggagccatctctctccttg

SEQ ID NO: 13155 - DNA, 22 bp, synthetic construct
  misc_feature 1..22: note = chemically synthesized
  source 1..22: mol_type = other DNA
ctggagccatctctctccttgc

SEQ ID NO: 13156 - DNA, 22 bp, synthetic construct
  misc_feature 1..22: note = chemically synthesized
  source 1..22: mol_type = other DNA
gagccatctctctccttgccag

SEQ ID NO: 13157 - DNA, 22 bp, synthetic construct
  misc_feature 1..22: note = chemically synthesized
  source 1..22: mol_type = other DNA
tctccttgccagaacctctaag

SEQ ID NO: 13158 - DNA, 22 bp, synthetic construct
  misc_feature 1..22: note = chemically synthesized
  source 1..22: mol_type = other DNA
tccttgccagaacctctaaggt

SEQ ID NO: 13159 - DNA, 22 bp, synthetic construct
  misc_feature 1..22: note = chemically synthesized
  source 1..22: mol_type = other DNA
cttgccagaacctctaaggttt

SEQ ID NO: 13160 - DNA, 22 bp, synthetic construct
  misc_feature 1..22: note = chemically synthesized
  source 1..22: mol_type = other DNA
gccagaacctctaaggtttgct

SEQ ID NO: 13161 - DNA, 22 bp, synthetic construct
  misc_feature 1..22: note = chemically synthesized
  source 1..22: mol_type = other DNA
ccagaacctctaaggtttgctt

SEQ ID NO: 13162 - DNA, 22 bp, synthetic construct
  misc_feature 1..22: note = chemically synthesized
  source 1..22: mol_type = other DNA
taaggtttgcttacgatggagc

SEQ ID NO: 13163 - DNA, 22 bp, synthetic construct
  misc_feature 1..22: note = chemically synthesized
  source 1..22: mol_type = other DNA
aggtttgcttacgatggagcca

SEQ ID NO: 13164 - DNA, 22 bp, synthetic construct
  misc_feature 1..22: note = chemically synthesized
  source 1..22: mol_type = other DNA
gcttacgatggagccagagagg

SEQ ID NO: 13165 - DNA, 22 bp, synthetic construct
  misc_feature 1..22: note = chemically synthesized
  source 1..22: mol_type = other DNA
cttacgatggagccagagagga

SEQ ID NO: 13166 - DNA, 22 bp, synthetic construct
  misc_feature 1..22: note = chemically synthesized
  source 1..22: mol_type = other DNA
acgatggagccagagaggatcc

SEQ ID NO: 13167 - DNA, 22 bp, synthetic construct
  misc_feature 1..22: note = chemically synthesized
  source 1..22: mol_type = other DNA
cgatggagccagagaggatcct

SEQ ID NO: 13168 - DNA, 22 bp, synthetic construct
  misc_feature 1..22: note = chemically synthesized
  source 1..22: mol_type = other DNA
ggagggagagcttggcaggggg

SEQ ID NO: 13169 - DNA, 22 bp, synthetic construct
  misc_feature 1..22: note = chemically synthesized
  source 1..22: mol_type = other DNA
ggcagggggtgggagggaaggg

SEQ ID NO: 13170 - DNA, 22 bp, synthetic construct
  misc_feature 1..22: note = chemically synthesized
  source 1..22: mol_type = other DNA
gcagggggtgggagggaagggg

SEQ ID NO: 13171 - DNA, 22 bp, synthetic construct
  misc_feature 1..22: note = chemically synthesized
  source 1..22: mol_type = other DNA
cccggttctcagtggccaccct

SEQ ID NO: 13172 - DNA, 22 bp, synthetic construct
  misc_feature 1..22: note = chemically synthesized
  source 1..22: mol_type = other DNA
tcagtggccaccctgcgctacc

SEQ ID NO: 13173 - DNA, 22 bp, synthetic construct
  misc_feature 1..22: note = chemically synthesized
  source 1..22: mol_type = other DNA
agtggccaccctgcgctaccct

SEQ ID NO: 13174 - DNA, 22 bp, synthetic construct
  misc_feature 1..22: note = chemically synthesized
  source 1..22: mol_type = other DNA
cgctaccctctcccagaacctg

SEQ ID NO: 13175 - DNA, 22 bp, synthetic construct
  misc_feature 1..22: note = chemically synthesized
  source 1..22: mol_type = other DNA
ccctctcccagaacctgagctg

SEQ ID NO: 13176 - DNA, 22 bp, synthetic construct
  misc_feature 1..22: note = chemically synthesized
  source 1..22: mol_type = other DNA
tcccagaacctgagctgctctg

SEQ ID NO: 13177 - DNA, 22 bp, synthetic construct
  misc_feature 1..22: note = chemically synthesized
  source 1..22: mol_type = other DNA
ccagaacctgagctgctctgac

SEQ ID NO: 13178 - DNA, 22 bp, synthetic construct
  misc_feature 1..22: note = chemically synthesized
  source 1..22: mol_type = other DNA
agctgctctgacgcggccgtct

SEQ ID NO: 13179 - DNA, 22 bp, synthetic construct
  misc_feature 1..22: note = chemically synthesized
  source 1..22: mol_type = other DNA
ctctgacgcggccgtctggtgc

SEQ ID NO: 13180 - DNA, 22 bp, synthetic construct
  misc_feature 1..22: note = chemically synthesized
  source 1..22: mol_type = other DNA
tgacgcggccgtctggtgcgtt

SEQ ID NO: 13181 - DNA, 22 bp, synthetic construct
  misc_feature 1..22: note = chemically synthesized
  source 1..22: mol_type = other DNA
acgcggccgtctggtgcgtttc

SEQ ID NO: 13182 - DNA, 22 bp, synthetic construct
  misc_feature 1..22: note = chemically synthesized
  source 1..22: mol_type = other DNA
gtgcgtttcactgatcctggtg

SEQ ID NO: 13183 - DNA, 22 bp, synthetic construct
  misc_feature 1..22: note = chemically synthesized
  source 1..22: mol_type = other DNA
cactgatcctggtgctgcagct

SEQ ID NO: 13184 - DNA, 22 bp, synthetic construct
  misc_feature 1..22: note = chemically synthesized
  source 1..22: mol_type = other DNA
actgatcctggtgctgcagctt

SEQ ID NO: 13185 - DNA, 22 bp, synthetic construct
  misc_feature 1..22: note = chemically synthesized
  source 1..22: mol_type = other DNA
atcctggtgctgcagcttcctt

SEQ ID NO: 13186 - DNA, 22 bp, synthetic construct
  misc_feature 1..22: note = chemically synthesized
  source 1..22: mol_type = other DNA
gtgctgcagcttccttacactt

SEQ ID NO: 13187 - DNA, 22 bp, synthetic construct
  misc_feature 1..22: note = chemically synthesized
  source 1..22: mol_type = other DNA
cagcttccttacacttcccaag

SEQ ID NO: 13188 - DNA, 22 bp, synthetic construct
  misc_feature 1..22: note = chemically synthesized
  source 1..22: mol_type = other DNA
ccttacacttcccaagaggaga

SEQ ID NO: 13189 - DNA, 22 bp, synthetic construct
  misc_feature 1..22: note = chemically synthesized
  source 1..22: mol_type = other DNA
cttacacttcccaagaggagaa

SEQ ID NO: 13190 - DNA, 22 bp, synthetic construct
  misc_feature 1..22: note = chemically synthesized
  source 1..22: mol_type = other DNA
acacttcccaagaggagaagca

SEQ ID NO: 13191 - DNA, 22 bp, synthetic construct
  misc_feature 1..22: note = chemically synthesized
  source 1..22: mol_type = other DNA
cacttcccaagaggagaagcag

SEQ ID NO: 13192 - DNA, 22 bp, synthetic construct
  misc_feature 1..22: note = chemically synthesized
  source 1..22: mol_type = other DNA
cccaagaggagaagcagtttgg

SEQ ID NO: 13193 - DNA, 22 bp, synthetic construct
  misc_feature 1..22: note = chemically synthesized
  source 1..22: mol_type = other DNA
ccaagaggagaagcagtttgga

SEQ ID NO: 13194 - DNA, 22 bp, synthetic construct
  misc_feature 1..22: note = chemically synthesized
  source 1..22: mol_type = other DNA
ggaaaaacaaaatcagaataag

SEQ ID NO: 13195 - DNA, 22 bp, synthetic construct
  misc_feature 1..22: note = chemically synthesized
  source 1..22: mol_type = other DNA
gaaaaacaaaatcagaataagt

SEQ ID NO: 13196 - DNA, 22 bp, synthetic construct
  misc_feature 1..22: note = chemically synthesized
  source 1..22: mol_type = other DNA
gtcctgagttctaactttggct

SEQ ID NO: 13197 - DNA, 22 bp, synthetic construct
  misc_feature 1..22: note = chemically synthesized
  source 1..22: mol_type = other DNA
agttctaactttggctcttcac

SEQ ID NO: 13198 - DNA, 22 bp, synthetic construct
  misc_feature 1..22: note = chemically synthesized
  source 1..22: mol_type = other DNA
taactttggctcttcacctttc

SEQ ID NO: 13199 - DNA, 22 bp, synthetic construct
  misc_feature 1..22: note = chemically synthesized
  source 1..22: mol_type = other DNA
actttggctcttcacctttcta

SEQ ID NO: 13200 - DNA, 22 bp, synthetic construct
  misc_feature 1..22: note = chemically synthesized
  source 1..22: mol_type = other DNA
tggctcttcacctttctagtcc

SEQ ID NO: 13201 - DNA, 22 bp, synthetic construct
  misc_feature 1..22: note = chemically synthesized
  source 1..22: mol_type = other DNA
ggctcttcacctttctagtccc

SEQ ID NO: 13202 - DNA, 22 bp, synthetic construct
  misc_feature 1..22: note = chemically synthesized
  source 1..22: mol_type = other DNA
gctcttcacctttctagtcccc

SEQ ID NO: 13203 - DNA, 22 bp, synthetic construct
  misc_feature 1..22: note = chemically synthesized
  source 1..22: mol_type = other DNA
ttcacctttctagtccccaatt

SEQ ID NO: 13204 - DNA, 22 bp, synthetic construct
  misc_feature 1..22: note = chemically synthesized
  source 1..22: mol_type = other DNA
cacctttctagtccccaattta

SEQ ID NO: 13205 - DNA, 22 bp, synthetic construct
  misc_feature 1..22: note = chemically synthesized
  source 1..22: mol_type = other DNA
acctttctagtccccaatttat

SEQ ID NO: 13206 - DNA, 22 bp, synthetic construct
  misc_feature 1..22: note = chemically synthesized
  source 1..22: mol_type = other DNA
tctagtccccaatttatattgt

SEQ ID NO: 13207 - DNA, 22 bp, synthetic construct
  misc_feature 1..22: note = chemically synthesized
  source 1..22: mol_type = other DNA
ctagtccccaatttatattgtt

SEQ ID NO: 13208 - DNA, 22 bp, synthetic construct
  misc_feature 1..22: note = chemically synthesized
  source 1..22: mol_type = other DNA
tagtccccaatttatattgttc

SEQ ID NO: 13209 - DNA, 22 bp, synthetic construct
  misc_feature 1..22: note = chemically synthesized
  source 1..22: mol_type = other DNA
gtccccaatttatattgttcct

SEQ ID NO: 13210 - DNA, 22 bp, synthetic construct
  misc_feature 1..22: note = chemically synthesized
  source 1..22: mol_type = other DNA
atattgttcctccgtgcgtcag

SEQ ID NO: 13211 - DNA, 22 bp, synthetic construct
  misc_feature 1..22: note = chemically synthesized
  source 1..22: mol_type = other DNA
tattgttcctccgtgcgtcagt

SEQ ID NO: 13212 - DNA, 22 bp, synthetic construct
  misc_feature 1..22: note = chemically synthesized
  source 1..22: mol_type = other DNA
ttcctccgtgcgtcagttttac

SEQ ID NO: 13213 - DNA, 22 bp, synthetic construct
  misc_feature 1..22: note = chemically synthesized
  source 1..22: mol_type = other DNA
ctccgtgcgtcagttttacctg

SEQ ID NO: 13214 - DNA, 22 bp, synthetic construct
  misc_feature 1..22: note = chemically synthesized
  source 1..22: mol_type = other DNA
cgtgcgtcagttttacctgtga

SEQ ID NO: 13215 - DNA, 22 bp, synthetic construct
  misc_feature 1..22: note = chemically synthesized
  source 1..22: mol_type = other DNA
tacctgtgagataaggccagta

SEQ ID NO: 13216 - DNA, 22 bp, synthetic construct
  misc_feature 1..22: note = chemically synthesized
  source 1..22: mol_type = other DNA
acctgtgagataaggccagtag

SEQ ID NO: 13217 - DNA, 22 bp, synthetic construct
  misc_feature 1..22: note = chemically synthesized
  source 1..22: mol_type = other DNA
cctgtgagataaggccagtagc

SEQ ID NO: 13218 - DNA, 22 bp, synthetic construct
  misc_feature 1..22: note = chemically synthesized
  source 1..22: mol_type = other DNA
tgagataaggccagtagccagc

SEQ ID NO: 13219 - DNA, 22 bp, synthetic construct
  misc_feature 1..22: note = chemically synthesized
  source 1..22: mol_type = other DNA
gcagggctgtggtgaggagggg

SEQ ID NO: 13220 - DNA, 22 bp, synthetic construct
  misc_feature 1..22: note = chemically synthesized
  source 1..22: mol_type = other DNA
tggtgaggaggggggtgtccgt

SEQ ID NO: 13221 - DNA, 22 bp, synthetic construct
  misc_feature 1..22: note = chemically synthesized
  source 1..22: mol_type = other DNA
cctttgtgagaatggtgcgtcc

SEQ ID NO: 13222 - DNA, 22 bp, synthetic construct
  misc_feature 1..22: note = chemically synthesized
  source 1..22: mol_type = other DNA
tgtgagaatggtgcgtcctagg

SEQ ID NO: 13223 - DNA, 22 bp, synthetic construct
  misc_feature 1..22: note = chemically synthesized
  source 1..22: mol_type = other DNA
gtgagaatggtgcgtcctaggt

SEQ ID NO: 13224 - DNA, 22 bp, synthetic construct
  misc_feature 1..22: note = chemically synthesized
  source 1..22: mol_type = other DNA
tgagaatggtgcgtcctaggtg

SEQ ID NO: 13225 - DNA, 22 bp, synthetic construct
  misc_feature 1..22: note = chemically synthesized
  source 1..22: mol_type = other DNA
ggtgttcaccaggtcgtggccg

SEQ ID NO: 13226 - DNA, 22 bp, synthetic construct
  misc_feature 1..22: note = chemically synthesized
  source 1..22: mol_type = other DNA
accaggtcgtggccgcctctac

SEQ ID NO: 13227 - DNA, 22 bp, synthetic construct
  misc_feature 1..22: note = chemically synthesized
  source 1..22: mol_type = other DNA
tactccctttctctttctccat

SEQ ID NO: 13228 - DNA, 22 bp, synthetic construct
  misc_feature 1..22: note = chemically synthesized
  source 1..22: mol_type = other DNA
ctccctttctctttctccatcc

SEQ ID NO: 13229 - DNA, 22 bp, synthetic construct
  misc_feature 1..22: note = chemically synthesized
  source 1..22: mol_type = other DNA
cctttctctttctccatccttc

SEQ ID NO: 13230 - DNA, 22 bp, synthetic construct
  misc_feature 1..22: note = chemically synthesized
  source 1..22: mol_type = other DNA
tctctttctccatccttctttc

SEQ ID NO: 13231 - DNA, 22 bp, synthetic construct
  misc_feature 1..22: note = chemically synthesized
  source 1..22: mol_type = other DNA
ctctttctccatccttctttcc

SEQ ID NO: 13232 - DNA, 22 bp, synthetic construct
  misc_feature 1..22: note = chemically synthesized
  source 1..22: mol_type = other DNA
tctttctccatccttctttcct

SEQ ID NO: 13233 - DNA, 22 bp, synthetic construct
  misc_feature 1..22: note = chemically synthesized
  source 1..22: mol_type = other DNA
tttctccatccttctttcctta

SEQ ID NO: 13234 - DNA, 22 bp, synthetic construct
  misc_feature 1..22: note = chemically synthesized
  source 1..22: mol_type = other DNA
tctccatccttctttccttaaa

SEQ ID NO: 13235 - DNA, 22 bp, synthetic construct
  misc_feature 1..22: note = chemically synthesized
  source 1..22: mol_type = other DNA
ctccatccttctttccttaaag

SEQ ID NO: 13236 - DNA, 22 bp, synthetic construct
  misc_feature 1..22: note = chemically synthesized
  source 1..22: mol_type = other DNA
tccatccttctttccttaaaga

SEQ ID NO: 13237 - DNA, 22 bp, synthetic construct
  misc_feature 1..22: note = chemically synthesized
  source 1..22: mol_type = other DNA
catccttctttccttaaagagt

SEQ ID NO: 13238 - DNA, 22 bp, synthetic construct
  misc_feature 1..22: note = chemically synthesized
  source 1..22: mol_type = other DNA
ctttccttaaagagtccccagt

SEQ ID NO: 13239 - DNA, 22 bp, synthetic construct
  misc_feature 1..22: note = chemically synthesized
  source 1..22: mol_type = other DNA
tttccttaaagagtccccagtg

SEQ ID NO: 13240 - DNA, 22 bp, synthetic construct
  misc_feature 1..22: note = chemically synthesized
  source 1..22: mol_type = other DNA
tccttaaagagtccccagtgct

SEQ ID NO: 13241 - DNA, 22 bp, synthetic construct
  misc_feature 1..22: note = chemically synthesized
  source 1..22: mol_type = other DNA
ccttaaagagtccccagtgcta

SEQ ID NO: 13242 - DNA, 22 bp, synthetic construct
  misc_feature 1..22: note = chemically synthesized
  source 1..22: mol_type = other DNA
cttaaagagtccccagtgctat

SEQ ID NO: 13243 - DNA, 22 bp, synthetic construct
  misc_feature 1..22: note = chemically synthesized
  source 1..22: mol_type = other DNA
aaagagtccccagtgctatctg

SEQ ID NO: 13244 - DNA, 22 bp, synthetic construct
  misc_feature 1..22: note = chemically synthesized
  source 1..22: mol_type = other DNA
aagagtccccagtgctatctgg

SEQ ID NO: 13245 - DNA, 22 bp, synthetic construct
  misc_feature 1..22: note = chemically synthesized
  source 1..22: mol_type = other DNA
tctgggacatattcctccgccc

SEQ ID NO: 13246 - DNA, 22 bp, synthetic construct
  misc_feature 1..22: note = chemically synthesized
  source 1..22: mol_type = other DNA
ggacatattcctccgcccagag

SEQ ID NO: 13247 - DNA, 22 bp, synthetic construct
  misc_feature 1..22: note = chemically synthesized
  source 1..22: mol_type = other DNA
ctccgcccagagcagggtcccg

SEQ ID NO: 13248 - DNA, 22 bp, synthetic construct
  misc_feature 1..22: note = chemically synthesized
  source 1..22: mol_type = other DNA
cgcccagagcagggtcccgctt

SEQ ID NO: 13249 - DNA, 22 bp, synthetic construct
  misc_feature 1..22: note = chemically synthesized
  source 1..22: mol_type = other DNA
ccctaaggccctgctctgggct

SEQ ID NO: 13250 - DNA, 22 bp, synthetic construct
  misc_feature 1..22: note = chemically synthesized
  source 1..22: mol_type = other DNA
cctaaggccctgctctgggctt

SEQ ID NO: 13251 - DNA, 22 bp, synthetic construct
  misc_feature 1..22: note = chemically synthesized
  source 1..22: mol_type = other DNA
aggccctgctctgggcttctgg

SEQ ID NO: 13252 - DNA, 22 bp, synthetic construct
  misc_feature 1..22: note = chemically synthesized
  source 1..22: mol_type = other DNA
ctctgggcttctgggtttgagt

SEQ ID NO: 13253 - DNA, 22 bp, synthetic construct
  misc_feature 1..22: note = chemically synthesized
  source 1..22: mol_type = other DNA
tgggcttctgggtttgagtcct

SEQ ID NO: 13254 - DNA, 22 bp, synthetic construct
  misc_feature 1..22: note = chemically synthesized
  source 1..22: mol_type = other DNA
ggcttctgggtttgagtccttg

SEQ ID NO: 13255 - DNA, 22 bp, synthetic construct
  misc_feature 1..22: note = chemically synthesized
  source 1..22: mol_type = other DNA
ctgggtttgagtccttggcaag

SEQ ID NO: 13256 - DNA, 22 bp, synthetic construct
  misc_feature 1..22: note = chemically synthesized
  source 1..22: mol_type = other DNA
tgggtttgagtccttggcaagc

SEQ ID NO: 13257 - DNA, 22 bp, synthetic construct
  misc_feature 1..22: note = chemically synthesized
  source 1..22: mol_type = other DNA
ggtttgagtccttggcaagccc

SEQ ID NO: 13258 - DNA, 22 bp, synthetic construct
  misc_feature 1..22: note = chemically synthesized
  source 1..22: mol_type = other DNA
gagtccttggcaagcccaggag

SEQ ID NO: 13259 - DNA, 22 bp, synthetic construct
  misc_feature 1..22: note = chemically synthesized
  source 1..22: mol_type = other DNA
agtccttggcaagcccaggaga

SEQ ID NO: 13260 - DNA, 22 bp, synthetic construct
  misc_feature 1..22: note = chemically synthesized
  source 1..22: mol_type = other DNA
ggcaagcccaggagaggcgctc

SEQ ID NO: 13261 - DNA, 22 bp, synthetic construct
  misc_feature 1..22: note = chemically synthesized
  source 1..22: mol_type = other DNA
gcaagcccaggagaggcgctca

SEQ ID NO: 13262 - DNA, 22 bp, synthetic construct
  misc_feature 1..22: note = chemically synthesized
  source 1..22: mol_type = other DNA
aggcttccctgtcccccttcct

SEQ ID NO: 13263 - DNA, 22 bp, synthetic construct
  misc_feature 1..22: note = chemically synthesized
  source 1..22: mol_type = other DNA
ccctgtcccccttcctcgtcca

SEQ ID NO: 13264 - DNA, 22 bp, synthetic construct
  misc_feature 1..22: note = chemically synthesized
  source 1..22: mol_type = other DNA
cctgtcccccttcctcgtccac

SEQ ID NO: 13265 - DNA, 22 bp, synthetic construct
  misc_feature 1..22: note = chemically synthesized
  source 1..22: mol_type = other DNA
tcccccttcctcgtccaccatc

SEQ ID NO: 13266 - DNA, 22 bp, synthetic construct
  misc_feature 1..22: note = chemically synthesized
  source 1..22: mol_type = other DNA
cctcgtccaccatctcatgccc

SEQ ID NO: 13267 - DNA, 22 bp, synthetic construct
  misc_feature 1..22: note = chemically synthesized
  source 1..22: mol_type = other DNA
ctcgtccaccatctcatgcccc

SEQ ID NO: 13268 - DNA, 22 bp, synthetic construct
  misc_feature 1..22: note = chemically synthesized
  source 1..22: mol_type = other DNA
gtccaccatctcatgcccctgg

SEQ ID NO: 13269 - DNA, 22 bp, synthetic construct
  misc_feature 1..22: note = chemically synthesized
  source 1..22: mol_type = other DNA
atgcccctggctctcctgcccc

SEQ ID NO: 13270 - DNA, 22 bp, synthetic construct
  misc_feature 1..22: note = chemically synthesized
  source 1..22: mol_type = other DNA
gctctcctgccccttccctaca

SEQ ID NO: 13271 - DNA, 22 bp, synthetic construct
  misc_feature 1..22: note = chemically synthesized
  source 1..22: mol_type = other DNA
tcctgccccttccctacagggg

SEQ ID NO: 13272 - DNA, 22 bp, synthetic construct
  misc_feature 1..22: note = chemically synthesized
  source 1..22: mol_type = other DNA
ctgccccttccctacaggggtt

SEQ ID NO: 13273 - DNA, 22 bp, synthetic construct
  misc_feature 1..22: note = chemically synthesized
  source 1..22: mol_type = other DNA
ccccttccctacaggggttcct

SEQ ID NO: 13274 - DNA, 22 bp, synthetic construct
  misc_feature 1..22: note = chemically synthesized
  source 1..22: mol_type = other DNA
ccctacaggggttcctggctct

SEQ ID NO: 13275 - DNA, 22 bp, synthetic construct
  misc_feature 1..22: note = chemically synthesized
  source 1..22: mol_type = other DNA
cctacaggggttcctggctctg

SEQ ID NO: 13276 - DNA, 22 bp, synthetic construct
  misc_feature 1..22: note = chemically synthesized
  source 1..22: mol_type = other DNA
caggggttcctggctctgctct

SEQ ID NO: 13277 - DNA, 22 bp, synthetic construct
  misc_feature 1..22: note = chemically synthesized
  source 1..22: mol_type = other DNA
ctggctctgctcttcagactga

SEQ ID NO: 13278 - DNA, 22 bp, synthetic construct
  misc_feature 1..22: note = chemically synthesized
  source 1..22: mol_type = other DNA
gctctgctcttcagactgagcc

SEQ ID NO: 13279 - DNA, 22 bp, synthetic construct
  misc_feature 1..22: note = chemically synthesized
  source 1..22: mol_type = other DNA
tgctcttcagactgagccccgt

SEQ ID NO: 13280 - DNA, 22 bp, synthetic construct
  misc_feature 1..22: note = chemically synthesized
  source 1..22: mol_type = other DNA
ctcttcagactgagccccgttc

SEQ ID NO: 13281 - DNA, 22 bp, synthetic construct
  misc_feature 1..22: note = chemically synthesized
  source 1..22: mol_type = other DNA
ttcagactgagccccgttcccc

SEQ ID NO: 13282 - DNA, 22 bp, synthetic construct
  misc_feature 1..22: note = chemically synthesized
  source 1..22: mol_type = other DNA
cagactgagccccgttcccctg

SEQ ID NO: 13283 - DNA, 22 bp, synthetic construct
  misc_feature 1..22: note = chemically synthesized
  source 1..22: mol_type = other DNA
agactgagccccgttcccctgc

SEQ ID NO: 13284 - DNA, 22 bp, synthetic construct
  misc_feature 1..22: note = chemically synthesized
  source 1..22: mol_type = other DNA
agccccgttcccctgcatcccc

SEQ ID NO: 13285 - DNA, 22 bp, synthetic construct
  misc_feature 1..22: note = chemically synthesized
  source 1..22: mol_type = other DNA
ccctgcatccccgttcccctgc

SEQ ID NO: 13286 - DNA, 22 bp, synthetic construct
  misc_feature 1..22: note = chemically synthesized
  source 1..22: mol_type = other DNA
catccccgttcccctgcatccc

SEQ ID NO: 13287 - DNA, 22 bp, synthetic construct
  misc_feature 1..22: note = chemically synthesized
  source 1..22: mol_type = other DNA
ccctgcatcccccttcccctgc

SEQ ID NO: 13288 - DNA, 22 bp, synthetic construct
  misc_feature 1..22: note = chemically synthesized
  source 1..22: mol_type = other DNA
catcccccttcccctgcatccc

SEQ ID NO: 13289 - DNA, 22 bp, synthetic construct
  misc_feature 1..22: note = chemically synthesized
  source 1..22: mol_type = other DNA
cccctgcatcccccagaggccc

SEQ ID NO: 13290 - DNA, 22 bp, synthetic construct
  misc_feature 1..22: note = chemically synthesized
  source 1..22: mol_type = other DNA
ccctgcatcccccagaggcccc

SEQ ID NO: 13291 - DNA, 22 bp, synthetic construct
  misc_feature 1..22: note = chemically synthesized
  source 1..22: mol_type = other DNA
catcccccagaggccccaggcc

SEQ ID NO: 13292 - DNA, 22 bp, synthetic construct
  misc_feature 1..22: note = chemically synthesized
  source 1..22: mol_type = other DNA
cttggcctggaccccacgagag

SEQ ID NO: 13293 - DNA, 22 bp, synthetic construct
  misc_feature 1..22: note = chemically synthesized
  source 1..22: mol_type = other DNA
ggcctggaccccacgagaggcc

SEQ ID NO: 13294 - DNA, 22 bp, synthetic construct
  misc_feature 1..22: note = chemically synthesized
  source 1..22: mol_type = other DNA
gcctggaccccacgagaggcca

SEQ ID NO: 13295 - DNA, 22 bp, synthetic construct
  misc_feature 1..22: note = chemically synthesized
  source 1..22: mol_type = other DNA
gaccccacgagaggccacccca

SEQ ID NO: 13296 - DNA, 22 bp, synthetic construct
  misc_feature 1..22: note = chemically synthesized
  source 1..22: mol_type = other DNA
tctaccaggctgccttttgggt

SEQ ID NO: 13297 - DNA, 22 bp, synthetic construct
  misc_feature 1..22: note = chemically synthesized
  source 1..22: mol_type = other DNA
ccaggctgccttttgggtggat

SEQ ID NO: 13298 - DNA, 22 bp, synthetic construct
  misc_feature 1..22: note = chemically synthesized
  source 1..22: mol_type = other DNA
ccttttgggtggattctcctcc

SEQ ID NO: 13299 - DNA, 22 bp, synthetic construct
  misc_feature 1..22: note = chemically synthesized
  source 1..22: mol_type = other DNA
ttgggtggattctcctccaact

SEQ ID NO: 13300 - DNA, 22 bp, synthetic construct
  misc_feature 1..22: note = chemically synthesized
  source 1..22: mol_type = other DNA
tgggtggattctcctccaactg

SEQ ID NO: 13301 - DNA, 22 bp, synthetic construct
  misc_feature 1..22: note = chemically synthesized
  source 1..22: mol_type = other DNA
gggtggattctcctccaactgt

SEQ ID NO: 13302 - DNA, 22 bp, synthetic construct
  misc_feature 1..22: note = chemically synthesized
  source 1..22: mol_type = other DNA
ggtggattctcctccaactgtg

SEQ ID NO: 13303 - DNA, 22 bp, synthetic construct
  misc_feature 1..22: note = chemically synthesized
  source 1..22: mol_type = other DNA
tcctccaactgtggggtgactg

SEQ ID NO: 13304 - DNA, 22 bp, synthetic construct
  misc_feature 1..22: note = chemically synthesized
  source 1..22: mol_type = other DNA
ctccaactgtggggtgactgct

SEQ ID NO: 13305 - DNA, 22 bp, synthetic construct
  misc_feature 1..22: note = chemically synthesized
  source 1..22: mol_type = other DNA
caactgtggggtgactgcttgg

SEQ ID NO: 13306 - DNA, 22 bp, synthetic construct
  misc_feature 1..22: note = chemically synthesized
  source 1..22: mol_type = other DNA
tggggtgactgcttggcaaact

SEQ ID NO: 13307 - DNA, 22 bp, synthetic construct
  misc_feature 1..22: note = chemically synthesized
  source 1..22: mol_type = other DNA
cttggcaaactcactcttcggg

SEQ ID NO: 13308 - DNA, 22 bp, synthetic construct
  misc_feature 1..22: note = chemically synthesized
  source 1..22: mol_type = other DNA
ggcaaactcactcttcggggta

SEQ ID NO: 13309 - DNA, 22 bp, synthetic construct
  misc_feature 1..22: note = chemically synthesized
  source 1..22: mol_type = other DNA
gcaaactcactcttcggggtat

SEQ ID NO: 13310 - DNA, 22 bp, synthetic construct
  misc_feature 1..22: note = chemically synthesized
  source 1..22: mol_type = other DNA
actcttcggggtatcccaggag

SEQ ID NO: 13311 - DNA, 22 bp, synthetic construct
  misc_feature 1..22: note = chemically synthesized
  source 1..22: mol_type = other DNA
ttcggggtatcccaggaggcct

SEQ ID NO: 13312 - DNA, 22 bp, synthetic construct
  misc_feature 1..22: note = chemically synthesized
  source 1..22: mol_type = other DNA
cggggtatcccaggaggcctgg

SEQ ID NO: 13313 - DNA, 22 bp, synthetic construct
  misc_feature 1..22: note = chemically synthesized
  source 1..22: mol_type = other DNA
ggggtatcccaggaggcctgga

SEQ ID NO: 13314 - DNA, 22 bp, synthetic construct
  misc_feature 1..22: note = chemically synthesized
  source 1..22: mol_type = other DNA
gagcattggggtgggctggggt

SEQ ID NO: 13315 - DNA, 22 bp, synthetic construct
  misc_feature 1..22: note = chemically synthesized
  source 1..22: mol_type = other DNA
gggtgggctggggttcagagag

SEQ ID NO: 13316 - DNA, 22 bp, synthetic construct
  misc_feature 1..22: note = chemically synthesized
  source 1..22: mol_type = other DNA
gggttcagagaggagggattcc

SEQ ID NO: 13317 - DNA, 22 bp, synthetic construct
  misc_feature 1..22: note = chemically synthesized
  source 1..22: mol_type = other DNA
agagaggagggattcccttctc

SEQ ID NO: 13318 - DNA, 22 bp, synthetic construct
  misc_feature 1..22: note = chemically synthesized
  source 1..22: mol_type = other DNA
ccttctcaggttacgtggccaa

SEQ ID NO: 13319 - DNA, 22 bp, synthetic construct
  misc_feature 1..22: note = chemically synthesized
  source 1..22: mol_type = other DNA
ctcaggttacgtggccaagaag

SEQ ID NO: 13320 - DNA, 22 bp, synthetic construct
  misc_feature 1..22: note = chemically synthesized
  source 1..22: mol_type = other DNA
tcaggttacgtggccaagaagc

SEQ ID NO: 13321 - DNA, 22 bp, synthetic construct
  misc_feature 1..22: note = chemically synthesized
  source 1..22: mol_type = other DNA
aggttacgtggccaagaagcag

SEQ ID NO: 13322 - DNA, 22 bp, synthetic construct
  misc_feature 1..22: note = chemically synthesized
  source 1..22: mol_type = other DNA
cgtggccaagaagcaggggagc

SEQ ID NO: 13323 - DNA, 22 bp, synthetic construct
  misc_feature 1..22: note = chemically synthesized
  source 1..22: mol_type = other DNA
ggtttgggtcaggtctgggtgt

SEQ ID NO: 13324 - DNA, 22 bp, synthetic construct
  misc_feature 1..22: note = chemically synthesized
  source 1..22: mol_type = other DNA
gggtcaggtctgggtgtggggt

SEQ ID NO: 13325 - DNA, 22 bp, synthetic construct
  misc_feature 1..22: note = chemically synthesized
  source 1..22: mol_type = other DNA
ggtcaggtctgggtgtggggtg

SEQ ID NO: 13326 - DNA, 22 bp, synthetic construct
  misc_feature 1..22: note = chemically synthesized
  source 1..22: mol_type = other DNA
ggtgtggggtgaccagcttatg

SEQ ID NO: 13327 - DNA, 22 bp, synthetic construct
  misc_feature 1..22: note = chemically synthesized
  source 1..22: mol_type = other DNA
atgctgtttgcccaggacagcc

SEQ ID NO: 13328 - DNA, 22 bp, synthetic construct
  misc_feature 1..22: note = chemically synthesized
  source 1..22: mol_type = other DNA
tgctgtttgcccaggacagcct

SEQ ID NO: 13329 - DNA, 22 bp, synthetic construct
  misc_feature 1..22: note = chemically synthesized
  source 1..22: mol_type = other DNA
tttgcccaggacagcctagttt

SEQ ID NO: 13330 - DNA, 22 bp, synthetic construct
  misc_feature 1..22: note = chemically synthesized
  source 1..22: mol_type = other DNA
gcccaggacagcctagttttag

SEQ ID NO: 13331 - DNA, 22 bp, synthetic construct
  misc_feature 1..22: note = chemically synthesized
  source 1..22: mol_type = other DNA
cccaggacagcctagttttagc

SEQ ID NO: 13332 - DNA, 22 bp, synthetic construct
  misc_feature 1..22: note = chemically synthesized
  source 1..22: mol_type = other DNA
gttttagcactgaaaccctcag

SEQ ID NO: 13333 - DNA, 22 bp, synthetic construct
  misc_feature 1..22: note = chemically synthesized
  source 1..22: mol_type = other DNA
tagcactgaaaccctcagtcct

SEQ ID NO: 13334 - DNA, 22 bp, synthetic construct
  misc_feature 1..22: note = chemically synthesized
  source 1..22: mol_type = other DNA
agcactgaaaccctcagtccta

SEQ ID NO: 13335 - DNA, 22 bp, synthetic construct
  misc_feature 1..22: note = chemically synthesized
  source 1..22: mol_type = other DNA
gcactgaaaccctcagtcctag

SEQ ID NO: 13336 - DNA, 22 bp, synthetic construct
  misc_feature 1..22: note = chemically synthesized
  source 1..22: mol_type = other DNA
aaaccctcagtcctaggaaaac

SEQ ID NO: 13337 - DNA, 22 bp, synthetic construct
  misc_feature 1..22: note = chemically synthesized
  source 1..22: mol_type = other DNA
agtcctaggaaaacagggatgg

SEQ ID NO: 13338 - DNA, 22 bp, synthetic construct
  misc_feature 1..22: note = chemically synthesized
  source 1..22: mol_type = other DNA
ggaaaacagggatggttggtca

SEQ ID NO: 13339 - DNA, 22 bp, synthetic construct
  misc_feature 1..22: note = chemically synthesized
  source 1..22: mol_type = other DNA
gtcactgtctctgggtgactct

SEQ ID NO: 13340 - DNA, 22 bp, synthetic construct
  misc_feature 1..22: note = chemically synthesized
  source 1..22: mol_type = other DNA
tctctgggtgactcttgattcc

SEQ ID NO: 13341 - DNA, 22 bp, synthetic construct
  misc_feature 1..22: note = chemically synthesized
  source 1..22: mol_type = other DNA
tgggtgactcttgattcccggc

SEQ ID NO: 13342 - DNA, 22 bp, synthetic construct
  misc_feature 1..22: note = chemically synthesized
  source 1..22: mol_type = other DNA
ggtgactcttgattcccggcca

SEQ ID NO: 13343 - DNA, 22 bp, synthetic construct
  misc_feature 1..22: note = chemically synthesized
  source 1..22: mol_type = other DNA
ttgattcccggccagtttctcc

SEQ ID NO: 13344 - DNA, 22 bp, synthetic construct
  misc_feature 1..22: note = chemically synthesized
  source 1..22: mol_type = other DNA
gattcccggccagtttctccac

SEQ ID NO: 13345 - DNA, 22 bp, synthetic construct
  misc_feature 1..22: note = chemically synthesized
  source 1..22: mol_type = other DNA
attcccggccagtttctccacc

SEQ ID NO: 13346 - DNA, 22 bp, synthetic construct
  misc_feature 1..22: note = chemically synthesized
  source 1..22: mol_type = other DNA
ccggccagtttctccacctggg

SEQ ID NO: 13347 - DNA, 22 bp, synthetic construct
  misc_feature 1..22: note = chemically synthesized
  source 1..22: mol_type = other DNA
ctccacctggggctgtgtttct

SEQ ID NO: 13348 - DNA, 22 bp, synthetic construct
  misc_feature 1..22: note = chemically synthesized
  source 1..22: mol_type = other DNA
tccacctggggctgtgtttctc

SEQ ID NO: 13349 - DNA, 22 bp, synthetic construct
  misc_feature 1..22: note = chemically synthesized
  source 1..22: mol_type = other DNA
cacctggggctgtgtttctcgt

SEQ ID NO: 13350 - DNA, 22 bp, synthetic construct
  misc_feature 1..22: note = chemically synthesized
  source 1..22: mol_type = other DNA
gggctgtgtttctcgtcctgca

SEQ ID NO: 13351 - DNA, 22 bp, synthetic construct
  misc_feature 1..22: note = chemically synthesized
  source 1..22: mol_type = other DNA
tgtttctcgtcctgcatccttc

SEQ ID NO: 13352 - DNA, 22 bp, synthetic construct
  misc_feature 1..22: note = chemically synthesized
  source 1..22: mol_type = other DNA
ctcgtcctgcatccttctccag

SEQ ID NO: 13353 - DNA, 22 bp, synthetic construct
  misc_feature 1..22: note = chemically synthesized
  source 1..22: mol_type = other DNA
tcgtcctgcatccttctccagg

SEQ ID NO: 13354 - DNA, 22 bp, synthetic construct
  misc_feature 1..22: note = chemically synthesized
  source 1..22: mol_type = other DNA
gtcctgcatccttctccaggca

SEQ ID NO: 13355 - DNA, 22 bp, synthetic construct
  misc_feature 1..22: note = chemically synthesized
  source 1..22: mol_type = other DNA
catccttctccaggcaggtccc

SEQ ID NO: 13356 - DNA, 22 bp, synthetic construct
  misc_feature 1..22: note = chemically synthesized
  source 1..22: mol_type = other DNA
ctccaggcaggtccccaagcat

SEQ ID NO: 13357 - DNA, 22 bp, synthetic construct
  misc_feature 1..22: note = chemically synthesized
  source 1..22: mol_type = other DNA
tccaggcaggtccccaagcatc

SEQ ID NO: 13358 - DNA, 22 bp, synthetic construct
  misc_feature 1..22: note = chemically synthesized
  source 1..22: mol_type = other DNA
caggcaggtccccaagcatcgc

SEQ ID NO: 13359 - DNA, 22 bp, synthetic construct
  misc_feature 1..22: note = chemically synthesized
  source 1..22: mol_type = other DNA
ctgtggctgttcccaagttctt

SEQ ID NO: 13360 - DNA, 22 bp, synthetic construct
  misc_feature 1..22: note = chemically synthesized
  source 1..22: mol_type = other DNA
tggctgttcccaagttcttagg

SEQ ID NO: 13361 - DNA, 22 bp, synthetic construct
  misc_feature 1..22: note = chemically synthesized
  source 1..22: mol_type = other DNA
ttcccaagttcttagggtaccc

SEQ ID NO: 13362 - DNA, 22 bp, synthetic construct
  misc_feature 1..22: note = chemically synthesized
  source 1..22: mol_type = other DNA
ccaagttcttagggtaccccac

SEQ ID NO: 13363 - DNA, 22 bp, synthetic construct
  misc_feature 1..22: note = chemically synthesized
  source 1..22: mol_type = other DNA
ttagggtaccccacgtgggttt

SEQ ID NO: 13364 - DNA, 22 bp, synthetic construct
  misc_feature 1..22: note = chemically synthesized
  source 1..22: mol_type = other DNA
agggtaccccacgtgggtttat

SEQ ID NO: 13365 - DNA, 22 bp, synthetic construct
  misc_feature 1..22: note = chemically synthesized
  source 1..22: mol_type = other DNA
gggtaccccacgtgggtttatc

SEQ ID NO: 13366 - DNA, 22 bp, synthetic construct
  misc_feature 1..22: note = chemically synthesized
  source 1..22: mol_type = other DNA
atcaaccacttggtgaggctgg

SEQ ID NO: 13367 - DNA, 22 bp, synthetic construct
  misc_feature 1..22: note = chemically synthesized
  source 1..22: mol_type = other DNA
tcaaccacttggtgaggctggt

SEQ ID NO: 13368 - DNA, 22 bp, synthetic construct
  misc_feature 1..22: note = chemically synthesized
  source 1..22: mol_type = other DNA
ggtgaggctggtaccctgcccc

SEQ ID NO: 13369 - DNA, 22 bp, synthetic construct
  misc_feature 1..22: note = chemically synthesized
  source 1..22: mol_type = other DNA
gtgaggctggtaccctgccccc

SEQ ID NO: 13370 - DNA, 22 bp, synthetic construct
  misc_feature 1..22: note = chemically synthesized
  source 1..22: mol_type = other DNA
gtaccctgcccccattcctgca

SEQ ID NO: 13371 - DNA, 22 bp, synthetic construct
  misc_feature 1..22: note = chemically synthesized
  source 1..22: mol_type = other DNA
cccccattcctgcaccccaatt

SEQ ID NO: 13372 - DNA, 22 bp, synthetic construct
  misc_feature 1..22: note = chemically synthesized
  source 1..22: mol_type = other DNA
ctgcaccccaattgccttagtg

SEQ ID NO: 13373 - DNA, 22 bp, synthetic construct
  misc_feature 1..22: note = chemically synthesized
  source 1..22: mol_type = other DNA
caccccaattgccttagtggct

SEQ ID NO: 13374 - DNA, 22 bp, synthetic construct
  misc_feature 1..22: note = chemically synthesized
  source 1..22: mol_type = other DNA
ccttagtggctagggggttggg

SEQ ID NO: 13375 - DNA, 22 bp, synthetic construct
  misc_feature 1..22: note = chemically synthesized
  source 1..22: mol_type = other DNA
agtggctagggggttgggggct

SEQ ID NO: 13376 - DNA, 22 bp, synthetic construct
  misc_feature 1..22: note = chemically synthesized
  source 1..22: mol_type = other DNA
gtggctagggggttgggggcta

SEQ ID NO: 13377 - DNA, 22 bp, synthetic construct
  misc_feature 1..22: note = chemically synthesized
  source 1..22: mol_type = other DNA
gggggttgggggctagagtagg

SEQ ID NO: 13378 - DNA, 22 bp, synthetic construct
  misc_feature 1..22: note = chemically synthesized
  source 1..22: mol_type = other DNA
ggggctagagtaggaggggctg

SEQ ID NO: 13379 - DNA, 22 bp, synthetic construct
  misc_feature 1..22: note = chemically synthesized
  source 1..22: mol_type = other DNA
gagtaggaggggctggagccag

SEQ ID NO: 13380 - DNA, 22 bp, synthetic construct
  misc_feature 1..22: note = chemically synthesized
  source 1..22: mol_type = other DNA
gagccaggattcttagggctga

SEQ ID NO: 13381 - DNA, 22 bp, synthetic construct
  misc_feature 1..22: note = chemically synthesized
  source 1..22: mol_type = other DNA
ttagggctgaacagagaagagc

SEQ ID NO: 13382 - DNA, 22 bp, synthetic construct
  misc_feature 1..22: note = chemically synthesized
  source 1..22: mol_type = other DNA
agggctgaacagagaagagctg

SEQ ID NO: 13383 - DNA, 22 bp, synthetic construct
  misc_feature 1..22: note = chemically synthesized
  source 1..22: mol_type = other DNA
gggctgaacagagaagagctgg

SEQ ID NO: 13384 - DNA, 22 bp, synthetic construct
  misc_feature 1..22: note = chemically synthesized
  source 1..22: mol_type = other DNA
aacagagaagagctgggggcct

SEQ ID NO: 13385 - DNA, 22 bp, synthetic construct
  misc_feature 1..22: note = chemically synthesized
  source 1..22: mol_type = other DNA
ggggcctgggctcctgggtttg

SEQ ID NO: 13386 - DNA, 22 bp, synthetic construct
  misc_feature 1..22: note = chemically synthesized
  source 1..22: mol_type = other DNA
ggctcctgggtttgagagagga

SEQ ID NO: 13387 - DNA, 22 bp, synthetic construct
  misc_feature 1..22: note = chemically synthesized
  source 1..22: mol_type = other DNA
ctgggtttgagagaggaggggc

SEQ ID NO: 13388 - DNA, 22 bp, synthetic construct
  misc_feature 1..22: note = chemically synthesized
  source 1..22: mol_type = other DNA
ggtttgagagaggaggggctgg

SEQ ID NO: 13389 - DNA, 22 bp, synthetic construct
  misc_feature 1..22: note = chemically synthesized
  source 1..22: mol_type = other DNA
gagagaggaggggctggggcct

SEQ ID NO: 13390 - DNA, 22 bp, synthetic construct
  misc_feature 1..22: note = chemically synthesized
  source 1..22: mol_type = other DNA
agagaggaggggctggggcctg

SEQ ID NO: 13391 - DNA, 22 bp, synthetic construct
  misc_feature 1..22: note = chemically synthesized
  source 1..22: mol_type = other DNA
gggcctggactcctgggtccga

SEQ ID NO: 13392 - DNA, 22 bp, synthetic construct
  misc_feature 1..22: note = chemically synthesized
  source 1..22: mol_type = other DNA
gactcctgggtccgagggagga

SEQ ID NO: 13393 - DNA, 22 bp, synthetic construct
  misc_feature 1..22: note = chemically synthesized
  source 1..22: mol_type = other DNA
ctgggtccgagggaggaggggc

SEQ ID NO: 13394 - DNA, 22 bp, synthetic construct
  misc_feature 1..22: note = chemically synthesized
  source 1..22: mol_type = other DNA
ggtccgagggaggaggggctgg

SEQ ID NO: 13395 - DNA, 22 bp, synthetic construct
  misc_feature 1..22: note = chemically synthesized
  source 1..22: mol_type = other DNA
gggcctggactcctgggtctga

SEQ ID NO: 13396 - DNA, 22 bp, synthetic construct
  misc_feature 1..22: note = chemically synthesized
  source 1..22: mol_type = other DNA
gactcctgggtctgagggtgga

SEQ ID NO: 13397 - DNA, 22 bp, synthetic construct
  misc_feature 1..22: note = chemically synthesized
  source 1..22: mol_type = other DNA
ctgggtctgagggtggagggac

SEQ ID NO: 13398 - DNA, 22 bp, synthetic construct
  misc_feature 1..22: note = chemically synthesized
  source 1..22: mol_type = other DNA
ggtctgagggtggagggactgg

SEQ ID NO: 13399 - DNA, 22 bp, synthetic construct
  misc_feature 1..22: note = chemically synthesized
  source 1..22: mol_type = other DNA
agggtggagggactgggggcct

SEQ ID NO: 13400 - DNA, 22 bp, synthetic construct
  misc_feature 1..22: note = chemically synthesized
  source 1..22: mol_type = other DNA
ggggcctggactcctgggtccg

SEQ ID NO: 13401 - DNA, 22 bp, synthetic construct
  misc_feature 1..22: note = chemically synthesized
  source 1..22: mol_type = other DNA
gactcctgggtccgagggagga

SEQ ID NO: 13402 - DNA, 22 bp, synthetic construct
  misc_feature 1..22: note = chemically synthesized
  source 1..22: mol_type = other DNA
ctgggtccgagggaggaggggc

SEQ ID NO: 13403 - DNA, 22 bp, synthetic construct
  misc_feature 1..22: note = chemically synthesized
  source 1..22: mol_type = other DNA
ggtccgagggaggaggggctgg

SEQ ID NO: 13404 - DNA, 22 bp, synthetic construct
  misc_feature 1..22: note = chemically synthesized
  source 1..22: mol_type = other DNA
gggcctggactcgtgggtctga

SEQ ID NO: 13405 - DNA, 22 bp, synthetic construct
  misc_feature 1..22: note = chemically synthesized
  source 1..22: mol_type = other DNA
gactcgtgggtctgagggagga

SEQ ID NO: 13406 - DNA, 22 bp, synthetic construct
  misc_feature 1..22: note = chemically synthesized
  source 1..22: mol_type = other DNA
gtgggtctgagggaggaggggc

SEQ ID NO: 13407 - DNA, 22 bp, synthetic construct
  misc_feature 1..22: note = chemically synthesized
  source 1..22: mol_type = other DNA
agggaggaggggctgggggcct

SEQ ID NO: 13408 - DNA, 22 bp, synthetic construct
  misc_feature 1..22: note = chemically synthesized
  source 1..22: mol_type = other DNA
ggggcctggacttctgggtctt

SEQ ID NO: 13409 - DNA, 22 bp, synthetic construct
  misc_feature 1..22: note = chemically synthesized
  source 1..22: mol_type = other DNA
gacttctgggtcttagggaggc

SEQ ID NO: 13410 - DNA, 22 bp, synthetic construct
  misc_feature 1..22: note = chemically synthesized
  source 1..22: mol_type = other DNA
ctgggtcttagggaggcggggc

SEQ ID NO: 13411 - DNA, 22 bp, synthetic construct
  misc_feature 1..22: note = chemically synthesized
  source 1..22: mol_type = other DNA
tgggtcttagggaggcggggct

SEQ ID NO: 13412 - DNA, 22 bp, synthetic construct
  misc_feature 1..22: note = chemically synthesized
  source 1..22: mol_type = other DNA
ggtcttagggaggcggggctgg

SEQ ID NO: 13413 - DNA, 22 bp, synthetic construct
  misc_feature 1..22: note = chemically synthesized
  source 1..22: mol_type = other DNA
agggaggcggggctgggcctgg

SEQ ID NO: 13414 - DNA, 22 bp, synthetic construct
  misc_feature 1..22: note = chemically synthesized
  source 1..22: mol_type = other DNA
gggaggcggggctgggcctgga

SEQ ID NO: 13415 - DNA, 22 bp, synthetic construct
  misc_feature 1..22: note = chemically synthesized
  source 1..22: mol_type = other DNA
ggcctggacccctgggtctgaa

SEQ ID NO: 13416 - DNA, 22 bp, synthetic construct
  misc_feature 1..22: note = chemically synthesized
  source 1..22: mol_type = other DNA
gacccctgggtctgaatgggga

SEQ ID NO: 13417 - DNA, 22 bp, synthetic construct
  misc_feature 1..22: note = chemically synthesized
  source 1..22: mol_type = other DNA
ggtctgaatggggagaggctgg

SEQ ID NO: 13418 - DNA, 22 bp, synthetic construct
  misc_feature 1..22: note = chemically synthesized
  source 1..22: mol_type = other DNA
aatggggagaggctgggggcct

SEQ ID NO: 13419 - DNA, 22 bp, synthetic construct
  misc_feature 1..22: note = chemically synthesized
  source 1..22: mol_type = other DNA
ggggcctggactccttcatctg

SEQ ID NO: 13420 - DNA, 22 bp, synthetic construct
  misc_feature 1..22: note = chemically synthesized
  source 1..22: mol_type = other DNA
gactccttcatctgagggcgga

SEQ ID NO: 13421 - DNA, 22 bp, synthetic construct
  misc_feature 1..22: note = chemically synthesized
  source 1..22: mol_type = other DNA
cttcatctgagggcggaagggc

SEQ ID NO: 13422 - DNA, 22 bp, synthetic construct
  misc_feature 1..22: note = chemically synthesized
  source 1..22: mol_type = other DNA
catctgagggcggaagggctgg

SEQ ID NO: 13423 - DNA, 22 bp, synthetic construct
  misc_feature 1..22: note = chemically synthesized
  source 1..22: mol_type = other DNA
atctgagggcggaagggctggg

SEQ ID NO: 13424 - DNA, 22 bp, synthetic construct
  misc_feature 1..22: note = chemically synthesized
  source 1..22: mol_type = other DNA
agggcggaagggctggggcctg

SEQ ID NO: 13425 - DNA, 22 bp, synthetic construct
  misc_feature 1..22: note = chemically synthesized
  source 1..22: mol_type = other DNA
gggcctggcctcctgggttgaa

SEQ ID NO: 13426 - DNA, 22 bp, synthetic construct
  misc_feature 1..22: note = chemically synthesized
  source 1..22: mol_type = other DNA
gcctcctgggttgaatggggag

SEQ ID NO: 13427 - DNA, 22 bp, synthetic construct
  misc_feature 1..22: note = chemically synthesized
  source 1..22: mol_type = other DNA
ctgggttgaatggggaggggtt

SEQ ID NO: 13428 - DNA, 22 bp, synthetic construct
  misc_feature 1..22: note = chemically synthesized
  source 1..22: mol_type = other DNA
ggttgaatggggaggggttggg

SEQ ID NO: 13429 - DNA, 22 bp, synthetic construct
  misc_feature 1..22: note = chemically synthesized
  source 1..22: mol_type = other DNA
aatggggaggggttgggcctgg

SEQ ID NO: 13430 - DNA, 22 bp, synthetic construct
  misc_feature 1..22: note = chemically synthesized
  source 1..22: mol_type = other DNA
ggcctggactctggagtccctg

SEQ ID NO: 13431 - DNA, 22 bp, synthetic construct
  misc_feature 1..22: note = chemically synthesized
  source 1..22: mol_type = other DNA
gactctggagtccctggtgccc

SEQ ID NO: 13432 - DNA, 22 bp, synthetic construct
  misc_feature 1..22: note = chemically synthesized
  source 1..22: mol_type = other DNA
tggagtccctggtgcccaggcc

SEQ ID NO: 13433 - DNA, 22 bp, synthetic construct
  misc_feature 1..22: note = chemically synthesized
  source 1..22: mol_type = other DNA
gagtccctggtgcccaggcctc

SEQ ID NO: 13434 - DNA, 22 bp, synthetic construct
  misc_feature 1..22: note = chemically synthesized
  source 1..22: mol_type = other DNA
gtgcccaggcctcaggcatctt

SEQ ID NO: 13435 - DNA, 22 bp, synthetic construct
  misc_feature 1..22: note = chemically synthesized
  source 1..22: mol_type = other DNA
aggcatctttcacagggatgcc

SEQ ID NO: 13436 - DNA, 22 bp, synthetic construct
  misc_feature 1..22: note = chemically synthesized
  source 1..22: mol_type = other DNA
tcacagggatgcctgtactggg

SEQ ID NO: 13437 - DNA, 22 bp, synthetic construct
  misc_feature 1..22: note = chemically synthesized
  source 1..22: mol_type = other DNA
cacagggatgcctgtactgggc

SEQ ID NO: 13438 - DNA, 22 bp, synthetic construct
  misc_feature 1..22: note = chemically synthesized
  source 1..22: mol_type = other DNA
acagggatgcctgtactgggca

SEQ ID NO: 13439 - DNA, 22 bp, synthetic construct
  misc_feature 1..22: note = chemically synthesized
  source 1..22: mol_type = other DNA
tactgggcaggtccttgaaagg

SEQ ID NO: 13440 - DNA, 22 bp, synthetic construct
  misc_feature 1..22: note = chemically synthesized
  source 1..22: mol_type = other DNA
ggcaggtccttgaaagggaaag

SEQ ID NO: 13441 - DNA, 22 bp, synthetic construct
  misc_feature 1..22: note = chemically synthesized
  source 1..22: mol_type = other DNA
gaaagggaaaggcccattgctc

SEQ ID NO: 13442 - DNA, 22 bp, synthetic construct
  misc_feature 1..22: note = chemically synthesized
  source 1..22: mol_type = other DNA
aaagggaaaggcccattgctct

SEQ ID NO: 13443 - DNA, 22 bp, synthetic construct
  misc_feature 1..22: note = chemically synthesized
  source 1..22: mol_type = other DNA
ctctccttgcccccctccccta

SEQ ID NO: 13444 - DNA, 22 bp, synthetic construct
  misc_feature 1..22: note = chemically synthesized
  source 1..22: mol_type = other DNA
tccttgcccccctcccctatcg

SEQ ID NO: 13445 - DNA, 22 bp, synthetic construct
  misc_feature 1..22: note = chemically synthesized
  source 1..22: mol_type = other DNA
cttgcccccctcccctatcgcc

SEQ ID NO: 13446 - DNA, 22 bp, synthetic construct
  misc_feature 1..22: note = chemically synthesized
  source 1..22: mol_type = other DNA
gcccccctcccctatcgccatg

SEQ ID NO: 13447 - DNA, 22 bp, synthetic construct
  misc_feature 1..22: note = chemically synthesized
  source 1..22: mol_type = other DNA
cccccctcccctatcgccatga

SEQ ID NO: 13448 - DNA, 22 bp, synthetic construct
  misc_feature 1..22: note = chemically synthesized
  source 1..22: mol_type = other DNA
ccctatcgccatgacaactggg

SEQ ID NO: 13449 - DNA, 22 bp, synthetic construct
  misc_feature 1..22: note = chemically synthesized
  source 1..22: mol_type = other DNA
tcgccatgacaactgggtggaa

SEQ ID NO: 13450 - DNA, 22 bp, synthetic construct
  misc_feature 1..22: note = chemically synthesized
  source 1..22: mol_type = other DNA
ggtggaaataaacgagccgagt

SEQ ID NO: 13451 - DNA, 22 bp, synthetic construct
  misc_feature 1..22: note = chemically synthesized
  source 1..22: mol_type = other DNA
atcccgttcccagggcacgtgc

SEQ ID NO: 13452 - DNA, 22 bp, synthetic construct
  misc_feature 1..22: note = chemically synthesized
  source 1..22: mol_type = other DNA
ccagggcacgtgcggccccttc

SEQ ID NO: 13453 - DNA, 22 bp, synthetic construct
  misc_feature 1..22: note = chemically synthesized
  source 1..22: mol_type = other DNA
cacagcccgagtttccatgacc

SEQ ID NO: 13454 - DNA, 22 bp, synthetic construct
  misc_feature 1..22: note = chemically synthesized
  source 1..22: mol_type = other DNA
acagcccgagtttccatgacct

SEQ ID NO: 13455 - DNA, 22 bp, synthetic construct
  misc_feature 1..22: note = chemically synthesized
  source 1..22: mol_type = other DNA
ccatgacctcatgctcttggcc

SEQ ID NO: 13456 - DNA, 22 bp, synthetic construct
  misc_feature 1..22: note = chemically synthesized
  source 1..22: mol_type = other DNA
catgacctcatgctcttggccc

SEQ ID NO: 13457 - DNA, 22 bp, synthetic construct
  misc_feature 1..22: note = chemically synthesized
  source 1..22: mol_type = other DNA
atgctcttggccctcgtagctc

SEQ ID NO: 13458 - DNA, 22 bp, synthetic construct
  misc_feature 1..22: note = chemically synthesized
  source 1..22: mol_type = other DNA
ttggccctcgtagctccctccc

SEQ ID NO: 13459 - DNA, 22 bp, synthetic construct
  misc_feature 1..22: note = chemically synthesized
  source 1..22: mol_type = other DNA
ggccctcgtagctccctcccgc

SEQ ID NO: 13460 - DNA, 22 bp, synthetic construct
  misc_feature 1..22: note = chemically synthesized
  source 1..22: mol_type = other DNA
gccctcgtagctccctcccgcc

SEQ ID NO: 13461 - DNA, 22 bp, synthetic construct
  misc_feature 1..22: note = chemically synthesized
  source 1..22: mol_type = other DNA
gtagctccctcccgcctcctcc

SEQ ID NO: 13462 - DNA, 22 bp, synthetic construct
  misc_feature 1..22: note = chemically synthesized
  source 1..22: mol_type = other DNA
cctcccgcctcctccagatggg

SEQ ID NO: 13463 - DNA, 22 bp, synthetic construct
  misc_feature 1..22: note = chemically synthesized
  source 1..22: mol_type = other DNA
ccgcctcctccagatgggcagc

SEQ ID NO: 13464 - DNA, 22 bp, synthetic construct
  misc_feature 1..22: note = chemically synthesized
  source 1..22: mol_type = other DNA
ctccagatgggcagctttggag

SEQ ID NO: 13465 - DNA, 22 bp, synthetic construct
  misc_feature 1..22: note = chemically synthesized
  source 1..22: mol_type = other DNA
cagatgggcagctttggagagg

SEQ ID NO: 13466 - DNA, 22 bp, synthetic construct
  misc_feature 1..22: note = chemically synthesized
  source 1..22: mol_type = other DNA
tggagaggtgagggacttgggg

SEQ ID NO: 13467 - DNA, 22 bp, synthetic construct
  misc_feature 1..22: note = chemically synthesized
  source 1..22: mol_type = other DNA
ggagaggtgagggacttggggg

SEQ ID NO: 13468 - DNA, 22 bp, synthetic construct
  misc_feature 1..22: note = chemically synthesized
  source 1..22: mol_type = other DNA
gagaggtgagggacttgggggg

SEQ ID NO: 13469 - DNA, 22 bp, synthetic construct
  misc_feature 1..22: note = chemically synthesized
  source 1..22: mol_type = other DNA
ggggggtaatttatcccgtgga

SEQ ID NO: 13470 - DNA, 22 bp, synthetic construct
  misc_feature 1..22: note = chemically synthesized
  source 1..22: mol_type = other DNA
gggggtaatttatcccgtggat

SEQ ID NO: 13471 - DNA, 22 bp, synthetic construct
  misc_feature 1..22: note = chemically synthesized
  source 1..22: mol_type = other DNA
atcccgtggatctaggagttta

SEQ ID NO: 13472 - DNA, 22 bp, synthetic construct
  misc_feature 1..22: note = chemically synthesized
  source 1..22: mol_type = other DNA
tcccgtggatctaggagtttag

SEQ ID NO: 13473 - DNA, 22 bp, synthetic construct
  misc_feature 1..22: note = chemically synthesized
  source 1..22: mol_type = other DNA
ggagtttagcttcactccttcc

SEQ ID NO: 13474 - DNA, 22 bp, synthetic construct
  misc_feature 1..22: note = chemically synthesized
  source 1..22: mol_type = other DNA
agcttcactccttcctcagctc

SEQ ID NO: 13475 - DNA, 22 bp, synthetic construct
  misc_feature 1..22: note = chemically synthesized
  source 1..22: mol_type = other DNA
gcttcactccttcctcagctcc

SEQ ID NO: 13476 - DNA, 22 bp, synthetic construct
  misc_feature 1..22: note = chemically synthesized
  source 1..22: mol_type = other DNA
cactccttcctcagctccagtt

SEQ ID NO: 13477 - DNA, 22 bp, synthetic construct
  misc_feature 1..22: note = chemically synthesized
  source 1..22: mol_type = other DNA
actccttcctcagctccagttc

SEQ ID NO: 13478 - DNA, 22 bp, synthetic construct
  misc_feature 1..22: note = chemically synthesized
  source 1..22: mol_type = other DNA
cttcctcagctccagttcaggt

SEQ ID NO: 13479 - DNA, 22 bp, synthetic construct
  misc_feature 1..22: note = chemically synthesized
  source 1..22: mol_type = other DNA
cctcagctccagttcaggtccc

SEQ ID NO: 13480 - DNA, 22 bp, synthetic construct
  misc_feature 1..22: note = chemically synthesized
  source 1..22: mol_type = other DNA
ctcagctccagttcaggtcccg

SEQ ID NO: 13481 - DNA, 22 bp, synthetic construct
  misc_feature 1..22: note = chemically synthesized
  source 1..22: mol_type = other DNA
agctccagttcaggtcccggag

SEQ ID NO: 13482 - DNA, 22 bp, synthetic construct
  misc_feature 1..22: note = chemically synthesized
  source 1..22: mol_type = other DNA
cagttcaggtcccggagcccac

SEQ ID NO: 13483 - DNA, 22 bp, synthetic construct
  misc_feature 1..22: note = chemically synthesized
  source 1..22: mol_type = other DNA
aggtcccggagcccacccagtg

SEQ ID NO: 13484 - DNA, 22 bp, synthetic construct
  misc_feature 1..22: note = chemically synthesized
  source 1..22: mol_type = other DNA
gggcaagtccctcctccgaccc

SEQ ID NO: 13485 - DNA, 22 bp, synthetic construct
  misc_feature 1..22: note = chemically synthesized
  source 1..22: mol_type = other DNA
ctccgaccccctggacttcggc

SEQ ID NO: 13486 - DNA, 22 bp, synthetic construct
  misc_feature 1..22: note = chemically synthesized
  source 1..22: mol_type = other DNA
cgaccccctggacttcggcttt

SEQ ID NO: 13487 - DNA, 22 bp, synthetic construct
  misc_feature 1..22: note = chemically synthesized
  source 1..22: mol_type = other DNA
gacttcggcttttgtcccccca

SEQ ID NO: 13488 - DNA, 22 bp, synthetic construct
  misc_feature 1..22: note = chemically synthesized
  source 1..22: mol_type = other DNA
cggcttttgtccccccaagttt

SEQ ID NO: 13489 - DNA, 22 bp, synthetic construct
  misc_feature 1..22: note = chemically synthesized
  source 1..22: mol_type = other DNA
ggcttttgtccccccaagtttt

SEQ ID NO: 13490 - DNA, 22 bp, synthetic construct
  misc_feature 1..22: note = chemically synthesized
  source 1..22: mol_type = other DNA
ttgtccccccaagttttggacc

SEQ ID NO: 13491 - DNA, 22 bp, synthetic construct
  misc_feature 1..22: note = chemically synthesized
  source 1..22: mol_type = other DNA
tgtccccccaagttttggaccc

SEQ ID NO: 13492 - DNA, 22 bp, synthetic construct
  misc_feature 1..22: note = chemically synthesized
  source 1..22: mol_type = other DNA
gtccccccaagttttggacccc

SEQ ID NO: 13493 - DNA, 22 bp, synthetic construct
  misc_feature 1..22: note = chemically synthesized
  source 1..22: mol_type = other DNA
tccccccaagttttggacccct

SEQ ID NO: 13494 - DNA, 22 bp, synthetic construct
  misc_feature 1..22: note = chemically synthesized
  source 1..22: mol_type = other DNA
tggacccctaagggaagaatga

SEQ ID NO: 13495 - DNA, 22 bp, synthetic construct
  misc_feature 1..22: note = chemically synthesized
  source 1..22: mol_type = other DNA
ggacccctaagggaagaatgag

SEQ ID NO: 13496 - DNA, 22 bp, synthetic construct
  misc_feature 1..22: note = chemically synthesized
  source 1..22: mol_type = other DNA
gacccctaagggaagaatgaga

SEQ ID NO: 13497 - DNA, 22 bp, synthetic construct
  misc_feature 1..22: note = chemically synthesized
  source 1..22: mol_type = other DNA
agggaagaatgagaaacggtgg

SEQ ID NO: 13498 - DNA, 22 bp, synthetic construct
  misc_feature 1..22: note = chemically synthesized
  source 1..22: mol_type = other DNA
gctgcagggccccgtgcagagg

SEQ ID NO: 13499 - DNA, 22 bp, synthetic construct
  misc_feature 1..22: note = chemically synthesized
  source 1..22: mol_type = other DNA
cagggccccgtgcagagggggc

SEQ ID NO: 13500 - DNA, 22 bp, synthetic construct
  misc_feature 1..22: note = chemically synthesized
  source 1..22: mol_type = other DNA
agtgaactggagtgtgacagcc

SEQ ID NO: 13501 - DNA, 22 bp, synthetic construct
  misc_feature 1..22: note = chemically synthesized
  source 1..22: mol_type = other DNA
gagtgtgacagcctggggccca

SEQ ID NO: 13502 - DNA, 22 bp, synthetic construct
  misc_feature 1..22: note = chemically synthesized
  source 1..22: mol_type = other DNA
gggcccaggcacacaggtgtgc

SEQ ID NO: 13503 - DNA, 22 bp, synthetic construct
  misc_feature 1..22: note = chemically synthesized
  source 1..22: mol_type = other DNA
tctcacccctctgggagtcccg

SEQ ID NO: 13504 - DNA, 22 bp, synthetic construct
  misc_feature 1..22: note = chemically synthesized
  source 1..22: mol_type = other DNA
acccctctgggagtcccgccca

SEQ ID NO: 13505 - DNA, 22 bp, synthetic construct
  misc_feature 1..22: note = chemically synthesized
  source 1..22: mol_type = other DNA
tgggagtcccgcccaggcccct

SEQ ID NO: 13506 - DNA, 22 bp, synthetic construct
  misc_feature 1..22: note = chemically synthesized
  source 1..22: mol_type = other DNA
ggagtcccgcccaggcccctga

SEQ ID NO: 13507 - DNA, 22 bp, synthetic construct
  misc_feature 1..22: note = chemically synthesized
  source 1..22: mol_type = other DNA
agtctgtcccagcacagggtgg

SEQ ID NO: 13508 - DNA, 22 bp, synthetic construct
  misc_feature 1..22: note = chemically synthesized
  source 1..22: mol_type = other DNA
tcccagcacagggtggccttcc

SEQ ID NO: 13509 - DNA, 22 bp, synthetic construct
  misc_feature 1..22: note = chemically synthesized
  source 1..22: mol_type = other DNA
cctccaccctgcatagccctgg

SEQ ID NO: 13510 - DNA, 22 bp, synthetic construct
  misc_feature 1..22: note = chemically synthesized
  source 1..22: mol_type = other DNA
ctccaccctgcatagccctggg

SEQ ID NO: 13511 - DNA, 22 bp, synthetic construct
  misc_feature 1..22: note = chemically synthesized
  source 1..22: mol_type = other DNA
caccctgcatagccctgggccc

SEQ ID NO: 13512 - DNA, 22 bp, synthetic construct
  misc_feature 1..22: note = chemically synthesized
  source 1..22: mol_type = other DNA
catagccctgggcccacggctt

SEQ ID NO: 13513 - DNA, 22 bp, synthetic construct
  misc_feature 1..22: note = chemically synthesized
  source 1..22: mol_type = other DNA
ggcccacggcttcgttcctgca

SEQ ID NO: 13514 - DNA, 22 bp, synthetic construct
  misc_feature 1..22: note = chemically synthesized
  source 1..22: mol_type = other DNA
cgttcctgcagagtatctgctg

SEQ ID NO: 13515 - DNA, 22 bp, synthetic construct
  misc_feature 1..22: note = chemically synthesized
  source 1..22: mol_type = other DNA
gttcctgcagagtatctgctgg

SEQ ID NO: 13516 - DNA, 22 bp, synthetic construct
  misc_feature 1..22: note = chemically synthesized
  source 1..22: mol_type = other DNA
ctgcagagtatctgctggggtg

SEQ ID NO: 13517 - DNA, 22 bp, synthetic construct
  misc_feature 1..22: note = chemically synthesized
  source 1..22: mol_type = other DNA
cagagtatctgctggggtggtt

SEQ ID NO: 13518 - DNA, 22 bp, synthetic construct
  misc_feature 1..22: note = chemically synthesized
  source 1..22: mol_type = other DNA
ctggggtggtttccgagcttga

SEQ ID NO: 13519 - DNA, 22 bp, synthetic construct
  misc_feature 1..22: note = chemically synthesized
  source 1..22: mol_type = other DNA
gggtggtttccgagcttgaccc

SEQ ID NO: 13520 - DNA, 22 bp, synthetic construct
  misc_feature 1..22: note = chemically synthesized
  source 1..22: mol_type = other DNA
ccgagcttgacccttggaagga

SEQ ID NO: 13521 - DNA, 22 bp, synthetic construct
  misc_feature 1..22: note = chemically synthesized
  source 1..22: mol_type = other DNA
cgagcttgacccttggaaggac

SEQ ID NO: 13522 - DNA, 22 bp, synthetic construct
  misc_feature 1..22: note = chemically synthesized
  source 1..22: mol_type = other DNA
gacccttggaaggacctggctg

SEQ ID NO: 13523 - DNA, 22 bp, synthetic construct
  misc_feature 1..22: note = chemically synthesized
  source 1..22: mol_type = other DNA
acccttggaaggacctggctgg

SEQ ID NO: 13524 - DNA, 22 bp, synthetic construct
  misc_feature 1..22: note = chemically synthesized
  source 1..22: mol_type = other DNA
ggaaggacctggctgggtttaa

SEQ ID NO: 13525 - DNA, 22 bp, synthetic construct
  misc_feature 1..22: note = chemically synthesized
  source 1..22: mol_type = other DNA
gaaggacctggctgggtttaag

SEQ ID NO: 13526 - DNA, 22 bp, synthetic construct
  misc_feature 1..22: note = chemically synthesized
  source 1..22: mol_type = other DNA
gctgggtttaaggcaggagggg

SEQ ID NO: 13527 - DNA, 22 bp, synthetic construct
  misc_feature 1..22: note = chemically synthesized
  source 1..22: mol_type = other DNA
ggtttaaggcaggaggggctgg

SEQ ID NO: 13528 - DNA, 22 bp, synthetic construct
  misc_feature 1..22: note = chemically synthesized
  source 1..22: mol_type = other DNA
aaggcaggaggggctgggggcc

SEQ ID NO: 13529 - DNA, 22 bp, synthetic construct
  misc_feature 1..22: note = chemically synthesized
  source 1..22: mol_type = other DNA
aggcaggaggggctgggggcca

SEQ ID NO: 13530 - DNA, 22 bp, synthetic construct
  misc_feature 1..22: note = chemically synthesized
  source 1..22: mol_type = other DNA
ggggccaggactcctggctctg

SEQ ID NO: 13531 - DNA, 22 bp, synthetic construct
  misc_feature 1..22: note = chemically synthesized
  source 1..22: mol_type = other DNA
ctggctctgaaggaggaggggc

SEQ ID NO: 13532 - DNA, 22 bp, synthetic construct
  misc_feature 1..22: note = chemically synthesized
  source 1..22: mol_type = other DNA
gctctgaaggaggaggggctgg

SEQ ID NO: 13533 - DNA, 22 bp, synthetic construct
  misc_feature 1..22: note = chemically synthesized
  source 1..22: mol_type = other DNA
tgaaggaggaggggctggaacc

SEQ ID NO: 13534 - DNA, 22 bp, synthetic construct
  misc_feature 1..22: note = chemically synthesized
  source 1..22: mol_type = other DNA
aaggaggaggggctggaacctc

SEQ ID NO: 13535 - DNA, 22 bp, synthetic construct
  misc_feature 1..22: note = chemically synthesized
  source 1..22: mol_type = other DNA
gaacctcttccctagtctgagc

SEQ ID NO: 13536 - DNA, 22 bp, synthetic construct
  misc_feature 1..22: note = chemically synthesized
  source 1..22: mol_type = other DNA
ttccctagtctgagcactggaa

SEQ ID NO: 13537 - DNA, 22 bp, synthetic construct
  misc_feature 1..22: note = chemically synthesized
  source 1..22: mol_type = other DNA
ccctagtctgagcactggaagc

SEQ ID NO: 13538 - DNA, 22 bp, synthetic construct
  misc_feature 1..22: note = chemically synthesized
  source 1..22: mol_type = other DNA
cctagtctgagcactggaagcg

SEQ ID NO: 13539 - DNA, 22 bp, synthetic construct
  misc_feature 1..22: note = chemically synthesized
  source 1..22: mol_type = other DNA
gtctgagcactggaagcgccac

SEQ ID NO: 13540 - DNA, 22 bp, synthetic construct
  misc_feature 1..22: note = chemically synthesized
  source 1..22: mol_type = other DNA
agcactggaagcgccacctgtg

SEQ ID NO: 13541 - DNA, 22 bp, synthetic construct
  misc_feature 1..22: note = chemically synthesized
  source 1..22: mol_type = other DNA
gaagcgccacctgtgggtggtg

SEQ ID NO: 13542 - DNA, 22 bp, synthetic construct
  misc_feature 1..22: note = chemically synthesized
  source 1..22: mol_type = other DNA
tgggtggtgacgggggttttgc

SEQ ID NO: 13543 - DNA, 22 bp, synthetic construct
  misc_feature 1..22: note = chemically synthesized
  source 1..22: mol_type = other DNA
tgccgtgtctaacaggtaccat

SEQ ID NO: 13544 - DNA, 22 bp, synthetic construct
  misc_feature 1..22: note = chemically synthesized
  source 1..22: mol_type = other DNA
gccgtgtctaacaggtaccatg

SEQ ID NO: 13545 - DNA, 22 bp, synthetic construct
  misc_feature 1..22: note = chemically synthesized
  source 1..22: mol_type = other DNA
ccgtgtctaacaggtaccatgt

SEQ ID NO: 13546 - DNA, 22 bp, synthetic construct
  misc_feature 1..22: note = chemically synthesized
  source 1..22: mol_type = other DNA
acaggtaccatgtggggttccc

SEQ ID NO: 13547 - DNA, 22 bp, synthetic construct
  misc_feature 1..22: note = chemically synthesized
  source 1..22: mol_type = other DNA
ccgcacccagatgagaagcccc

SEQ ID NO: 13548 - DNA, 22 bp, synthetic construct
  misc_feature 1..22: note = chemically synthesized
  source 1..22: mol_type = other DNA
ccttccccgttcacttcctgtt

SEQ ID NO: 13549 - DNA, 22 bp, synthetic construct
  misc_feature 1..22: note = chemically synthesized
  source 1..22: mol_type = other DNA
ccccgttcacttcctgtttgca

SEQ ID NO: 13550 - DNA, 22 bp, synthetic construct
  misc_feature 1..22: note = chemically synthesized
  source 1..22: mol_type = other DNA
cccgttcacttcctgtttgcag

SEQ ID NO: 13551 - DNA, 22 bp, synthetic construct
  misc_feature 1..22: note = chemically synthesized
  source 1..22: mol_type = other DNA
acttcctgtttgcagatagcca

SEQ ID NO: 13552 - DNA, 22 bp, synthetic construct
  misc_feature 1..22: note = chemically synthesized
  source 1..22: mol_type = other DNA
cctgtttgcagatagccaggag

SEQ ID NO: 13553 - DNA, 22 bp, synthetic construct
  misc_feature 1..22: note = chemically synthesized
  source 1..22: mol_type = other DNA
ctgtttgcagatagccaggagt

SEQ ID NO: 13554 - DNA, 22 bp, synthetic construct
  misc_feature 1..22: note = chemically synthesized
  source 1..22: mol_type = other DNA
tttgcagatagccaggagtcct

SEQ ID NO: 13555 - DNA, 22 bp, synthetic construct
  misc_feature 1..22: note = chemically synthesized
  source 1..22: mol_type = other DNA
gcagatagccaggagtcctttc

SEQ ID NO: 13556 - DNA, 22 bp, synthetic construct
  misc_feature 1..22: note = chemically synthesized
  source 1..22: mol_type = other DNA
cagatagccaggagtcctttcg

SEQ ID NO: 13557 - DNA, 22 bp, synthetic construct
  misc_feature 1..22: note = chemically synthesized
  source 1..22: mol_type = other DNA
tcgtggtttccactgagcactg

SEQ ID NO: 13558 - DNA, 22 bp, synthetic construct
  misc_feature 1..22: note = chemically synthesized
  source 1..22: mol_type = other DNA
cgtggtttccactgagcactga

SEQ ID NO: 13559 - DNA, 22 bp, synthetic construct
  misc_feature 1..22: note = chemically synthesized
  source 1..22: mol_type = other DNA
gtggtttccactgagcactgaa

SEQ ID NO: 13560 - DNA, 22 bp, synthetic construct
  misc_feature 1..22: note = chemically synthesized
  source 1..22: mol_type = other DNA
ccactgagcactgaaggcctgg

SEQ ID NO: 13561 - DNA, 22 bp, synthetic construct
  misc_feature 1..22: note = chemically synthesized
  source 1..22: mol_type = other DNA
cactgagcactgaaggcctggc

SEQ ID NO: 13562 - DNA, 22 bp, synthetic construct
  misc_feature 1..22: note = chemically synthesized
  source 1..22: mol_type = other DNA
agcactgaaggcctggccggcc

SEQ ID NO: 13563 - DNA, 22 bp, synthetic construct
  misc_feature 1..22: note = chemically synthesized
  source 1..22: mol_type = other DNA
aaggcctggccggcctgaccac

SEQ ID NO: 13564 - DNA, 22 bp, synthetic construct
  misc_feature 1..22: note = chemically synthesized
  source 1..22: mol_type = other DNA
gccggcctgaccactgggcaac

SEQ ID NO: 13565 - DNA, 22 bp, synthetic construct
  misc_feature 1..22: note = chemically synthesized
  source 1..22: mol_type = other DNA
accactgggcaaccaggcgtat

SEQ ID NO: 13566 - DNA, 22 bp, synthetic construct
  misc_feature 1..22: note = chemically synthesized
  source 1..22: mol_type = other DNA
ggcaaccaggcgtatcttaaac

SEQ ID NO: 13567 - DNA, 22 bp, synthetic construct
  misc_feature 1..22: note = chemically synthesized
  source 1..22: mol_type = other DNA
aaacagccagtggccagaggct

SEQ ID NO: 13568 - DNA, 22 bp, synthetic construct
  misc_feature 1..22: note = chemically synthesized
  source 1..22: mol_type = other DNA
aacagccagtggccagaggctg

SEQ ID NO: 13569 - DNA, 22 bp, synthetic construct
  misc_feature 1..22: note = chemically synthesized
  source 1..22: mol_type = other DNA
ttgggtcattttccccactgtc

SEQ ID NO: 13570 - DNA, 22 bp, synthetic construct
  misc_feature 1..22: note = chemically synthesized
  source 1..22: mol_type = other DNA
ggtcattttccccactgtccta

SEQ ID NO: 13571 - DNA, 22 bp, synthetic construct
  misc_feature 1..22: note = chemically synthesized
  source 1..22: mol_type = other DNA
tccccactgtcctagcaccgtg

SEQ ID NO: 13572 - DNA, 22 bp, synthetic construct
  misc_feature 1..22: note = chemically synthesized
  source 1..22: mol_type = other DNA
ccccactgtcctagcaccgtgt

SEQ ID NO: 13573 - DNA, 22 bp, synthetic construct
  misc_feature 1..22: note = chemically synthesized
  source 1..22: mol_type = other DNA
cccactgtcctagcaccgtgtc

SEQ ID NO: 13574 - DNA, 22 bp, synthetic construct
  misc_feature 1..22: note = chemically synthesized
  source 1..22: mol_type = other DNA
tcctagcaccgtgtccctggat

SEQ ID NO: 13575 - DNA, 22 bp, synthetic construct
  misc_feature 1..22: note = chemically synthesized
  source 1..22: mol_type = other DNA
gcaccgtgtccctggatctgtt

SEQ ID NO: 13576 - DNA, 22 bp, synthetic construct
  misc_feature 1..22: note = chemically synthesized
  source 1..22: mol_type = other DNA
gatctgttttcgtggctccctc

SEQ ID NO: 13577 - DNA, 22 bp, synthetic construct
  misc_feature 1..22: note = chemically synthesized
  source 1..22: mol_type = other DNA
ttttcgtggctccctctggagt

SEQ ID NO: 13578 - DNA, 22 bp, synthetic construct
  misc_feature 1..22: note = chemically synthesized
  source 1..22: mol_type = other DNA
tcgtggctccctctggagtccc

SEQ ID NO: 13579 - DNA, 22 bp, synthetic construct
  misc_feature 1..22: note = chemically synthesized
  source 1..22: mol_type = other DNA
cgtggctccctctggagtcccg

SEQ ID NO: 13580 - DNA, 22 bp, synthetic construct
  misc_feature 1..22: note = chemically synthesized
  source 1..22: mol_type = other DNA
gtggctccctctggagtcccga

SEQ ID NO: 13581 - DNA, 22 bp, synthetic construct
  misc_feature 1..22: note = chemically synthesized
  source 1..22: mol_type = other DNA
cctctggagtcccgacttgctg

SEQ ID NO: 13582 - DNA, 22 bp, synthetic construct
  misc_feature 1..22: note = chemically synthesized
  source 1..22: mol_type = other DNA
tggagtcccgacttgctgggac

SEQ ID NO: 13583 - DNA, 22 bp, synthetic construct
  misc_feature 1..22: note = chemically synthesized
  source 1..22: mol_type = other DNA
gagtcccgacttgctgggacac

SEQ ID NO: 13584 - DNA, 22 bp, synthetic construct
  misc_feature 1..22: note = chemically synthesized
  source 1..22: mol_type = other DNA
gctgggacaccgtggctggggt

SEQ ID NO: 13585 - DNA, 22 bp, synthetic construct
  misc_feature 1..22: note = chemically synthesized
  source 1..22: mol_type = other DNA
ctgggacaccgtggctggggta

SEQ ID NO: 13586 - DNA, 22 bp, synthetic construct
  misc_feature 1..22: note = chemically synthesized
  source 1..22: mol_type = other DNA
ggacaccgtggctggggtaggt

SEQ ID NO: 13587 - DNA, 22 bp, synthetic construct
  misc_feature 1..22: note = chemically synthesized
  source 1..22: mol_type = other DNA
gggtaggtgcggctgacggctg

SEQ ID NO: 13588 - DNA, 22 bp, synthetic construct
  misc_feature 1..22: note = chemically synthesized
  source 1..22: mol_type = other DNA
acggctgtttcccacccccagg

SEQ ID NO: 13589 - DNA, 22 bp, synthetic construct
  misc_feature 1..22: note = chemically synthesized
  source 1..22: mol_type = other DNA
tttcccacccccaggcctgcat

SEQ ID NO: 13590 - DNA, 22 bp, synthetic construct
  misc_feature 1..22: note = chemically synthesized
  source 1..22: mol_type = other DNA
cccacccccaggcctgcattga

SEQ ID NO: 13591 - DNA, 22 bp, synthetic construct
  misc_feature 1..22: note = chemically synthesized
  source 1..22: mol_type = other DNA
ccacccccaggcctgcattgat

SEQ ID NO: 13592 - DNA, 22 bp, synthetic construct
  misc_feature 1..22: note = chemically synthesized
  source 1..22: mol_type = other DNA
cattgatgagaacctggaggtg

SEQ ID NO: 13593 - DNA, 22 bp, synthetic construct
  misc_feature 1..22: note = chemically synthesized
  source 1..22: mol_type = other DNA
atgagaacctggaggtggtgcg

SEQ ID NO: 13594 - DNA, 22 bp, synthetic construct
  misc_feature 1..22: note = chemically synthesized
  source 1..22: mol_type = other DNA
gaggtggtgcgcttcttggtgg

SEQ ID NO: 13595 - DNA, 22 bp, synthetic construct
  misc_feature 1..22: note = chemically synthesized
  source 1..22: mol_type = other DNA
cttggtggagcagggcgccact

SEQ ID NO: 13596 - DNA, 22 bp, synthetic construct
  misc_feature 1..22: note = chemically synthesized
  source 1..22: mol_type = other DNA
ttggtggagcagggcgccactg

SEQ ID NO: 13597 - DNA, 22 bp, synthetic construct
  misc_feature 1..22: note = chemically synthesized
  source 1..22: mol_type = other DNA
ggtggagcagggcgccactgtg

SEQ ID NO: 13598 - DNA, 22 bp, synthetic construct
  misc_feature 1..22: note = chemically synthesized
  source 1..22: mol_type = other DNA
gtggagcagggcgccactgtga

SEQ ID NO: 13599 - DNA, 22 bp, synthetic construct
  misc_feature 1..22: note = chemically synthesized
  source 1..22: mol_type = other DNA
tgaaccaggcagacaacgaggg

SEQ ID NO: 13600 - DNA, 22 bp, synthetic construct
  misc_feature 1..22: note = chemically synthesized
  source 1..22: mol_type = other DNA
gacgccactgcacgtggccgcc

SEQ ID NO: 13601 - DNA, 22 bp, synthetic construct
  misc_feature 1..22: note = chemically synthesized
  source 1..22: mol_type = other DNA
cacgtggccgcctcctgtggct

SEQ ID NO: 13602 - DNA, 22 bp, synthetic construct
  misc_feature 1..22: note = chemically synthesized
  source 1..22: mol_type = other DNA
ctgtggctacctagatatcgcc

SEQ ID NO: 13603 - DNA, 20 bp, synthetic construct
  misc_feature 1..20: note = chemically synthesized
  source 1..20: mol_type = other DNA
taatttccctccgtttgtcc

SEQ ID NO: 13604 - DNA, 20 bp, synthetic construct
  misc_feature 1..20: note = chemically synthesized
  source 1..20: mol_type = other DNA
ctgtcaaccccacacgcctt

SEQ ID NO: 13605 - DNA, 20 bp, synthetic construct
  misc_feature 1..20: note = chemically synthesized
  source 1..20: mol_type = other DNA
cacacgcctttggcacaatg

SEQ ID NO: 13606 - DNA, 20 bp, synthetic construct
  misc_feature 1..20: note = chemically synthesized
  source 1..20: mol_type = other DNA
acgcctttggcacaatgaag

SEQ ID NO: 13607 - DNA, 20 bp, synthetic construct
  misc_feature 1..20: note = chemically synthesized
  source 1..20: mol_type = other DNA
cgcctttggcacaatgaagt

SEQ ID NO: 13608 - DNA, 20 bp, synthetic construct
  misc_feature 1..20: note = chemically synthesized
  source 1..20: mol_type = other DNA
atttcccttctttttctctt

SEQ ID NO: 13609 - DNA, 20 bp, synthetic construct
  misc_feature 1..20: note = chemically synthesized
  source 1..20: mol_type = other DNA
ccttctttttctctttagct

SEQ ID NO: 13610 - DNA, 20 bp, synthetic construct
  misc_feature 1..20: note = chemically synthesized
  source 1..20: mol_type = other DNA
ctctttagctcggcttattc

SEQ ID NO: 13611 - DNA, 20 bp, synthetic construct
  misc_feature 1..20: note = chemically synthesized
  source 1..20: mol_type = other DNA
tctttagctcggcttattcc

SEQ ID NO: 13612 - DNA, 20 bp, synthetic construct
  misc_feature 1..20: note = chemically synthesized
  source 1..20: mol_type = other DNA
ctttagctcggcttattcca

SEQ ID NO: 13613 - DNA, 20 bp, synthetic construct
  misc_feature 1..20: note = chemically synthesized
  source 1..20: mol_type = other DNA
tttagctcggcttattccag

SEQ ID NO: 13614 - DNA, 20 bp, synthetic construct
  misc_feature 1..20: note = chemically synthesized
  source 1..20: mol_type = other DNA
ttccaggggtgtgtttcgtc

SEQ ID NO: 13615 - DNA, 20 bp, synthetic construct
  misc_feature 1..20: note = chemically synthesized
  source 1..20: mol_type = other DNA
tgtttcgtcgagatgcacgt

SEQ ID NO: 13616 - DNA, 20 bp, synthetic construct
  misc_feature 1..20: note = chemically synthesized
  source 1..20: mol_type = other DNA
caacttttattctattttcc

SEQ ID NO: 13617 - DNA, 20 bp, synthetic construct
  misc_feature 1..20: note = chemically synthesized
  source 1..20: mol_type = other DNA
tctattttcccagtaaaata

SEQ ID NO: 13618 - DNA, 20 bp, synthetic construct
  misc_feature 1..20: note = chemically synthesized
  source 1..20: mol_type = other DNA
ttcccagtaaaataaagttt

SEQ ID NO: 13619 - DNA, 20 bp, synthetic construct
  misc_feature 1..20: note = chemically synthesized
  source 1..20: mol_type = other DNA
tagtaaactctgcatcttta

SEQ ID NO: 13620 - DNA, 20 bp, synthetic construct
  misc_feature 1..20: note = chemically synthesized
  source 1..20: mol_type = other DNA
gcatctttaaagaattattt

SEQ ID NO: 13621 - DNA, 20 bp, synthetic construct
  misc_feature 1..20: note = chemically synthesized
  source 1..20: mol_type = other DNA
tttggcatttatttctaaaa

SEQ ID NO: 13622 - DNA, 20 bp, synthetic construct
  misc_feature 1..20: note = chemically synthesized
  source 1..20: mol_type = other DNA
catttatttctaaaatggca

SEQ ID NO: 13623 - DNA, 20 bp, synthetic construct
  misc_feature 1..20: note = chemically synthesized
  source 1..20: mol_type = other DNA
catagtattttgtatttgtg

SEQ ID NO: 13624 - DNA, 20 bp, synthetic construct
  misc_feature 1..20: note = chemically synthesized
  source 1..20: mol_type = other DNA
ttgtatttgtgaagtcttac

SEQ ID NO: 13625 - DNA, 20 bp, synthetic construct
  misc_feature 1..20: note = chemically synthesized
  source 1..20: mol_type = other DNA
tgtatttgtgaagtcttaca

SEQ ID NO: 13626 - DNA, 20 bp, synthetic construct
  misc_feature 1..20: note = chemically synthesized
  source 1..20: mol_type = other DNA
ttaataaaattcaaacatcc

SEQ ID NO: 13627 - DNA, 20 bp, synthetic construct
  misc_feature 1..20: note = chemically synthesized
  source 1..20: mol_type = other DNA
taataaaattcaaacatcct

SEQ ID NO: 13628 - DNA, 20 bp, synthetic construct
  misc_feature 1..20: note = chemically synthesized
  source 1..20: mol_type = other DNA
atcctaggtaaaaaaaaaaa

SEQ ID NO: 13629 - DNA, 20 bp, synthetic construct
  misc_feature 1..20: note = chemically synthesized
  source 1..20: mol_type = other DNA
tcctaggtaaaaaaaaaaaa

SEQ ID NO: 13630 - DNA, 20 bp, synthetic construct
  misc_feature 1..20: note = chemically synthesized
  source 1..20: mol_type = other DNA
aggtaaaaaaaaaaaaaggt

SEQ ID NO: 13631 - DNA, 20 bp, synthetic construct
  misc_feature 1..20: note = chemically synthesized
  source 1..20: mol_type = other DNA
aaaaaaaggtcagaattgtt

SEQ ID NO: 13632 - DNA, 20 bp, synthetic construct
  misc_feature 1..20: note = chemically synthesized
  source 1..20: mol_type = other DNA
gtaattttcttttgcgcact

SEQ ID NO: 13633 - DNA, 20 bp, synthetic construct
  misc_feature 1..20: note = chemically synthesized
  source 1..20: mol_type = other DNA
taattttcttttgcgcacta

SEQ ID NO: 13634 - DNA, 20 bp, synthetic construct
  misc_feature 1..20: note = chemically synthesized
  source 1..20: mol_type = other DNA
tttcttttgcgcactaagga

SEQ ID NO: 13635 - DNA, 20 bp, synthetic construct
  misc_feature 1..20: note = chemically synthesized
  source 1..20: mol_type = other DNA
tgcgcactaaggaaagtgca

SEQ ID NO: 13636 - DNA, 20 bp, synthetic construct
  misc_feature 1..20: note = chemically synthesized
  source 1..20: mol_type = other DNA
aaggaaagtgcaaagtaact

SEQ ID NO: 13637 - DNA, 20 bp, synthetic construct
  misc_feature 1..20: note = chemically synthesized
  source 1..20: mol_type = other DNA
ggaaagtgcaaagtaactta

SEQ ID NO: 13638 - DNA, 20 bp, synthetic construct
  misc_feature 1..20: note = chemically synthesized
  source 1..20: mol_type = other DNA
ttagagtgactgaaacttca

SEQ ID NO: 13639 - DNA, 20 bp, synthetic construct
  misc_feature 1..20: note = chemically synthesized
  source 1..20: mol_type = other DNA
gtgactgaaacttcacagaa

SEQ ID NO: 13640 - DNA, 20 bp, synthetic construct
  misc_feature 1..20: note = chemically synthesized
  source 1..20: mol_type = other DNA
tgactgaaacttcacagaat

SEQ ID NO: 13641 - DNA, 20 bp, synthetic construct
  misc_feature 1..20: note = chemically synthesized
  source 1..20: mol_type = other DNA
gactgaaacttcacagaata

SEQ ID NO: 13642 - DNA, 20 bp, synthetic construct
  misc_feature 1..20: note = chemically synthesized
  source 1..20: mol_type = other DNA
aacttcacagaatagggttg

SEQ ID NO: 13643 - DNA, 20 bp, synthetic construct
  misc_feature 1..20: note = chemically synthesized
  source 1..20: mol_type = other DNA
ttgaattcataactatccca

SEQ ID NO: 13644 - DNA, 20 bp, synthetic construct
  misc_feature 1..20: note = chemically synthesized
  source 1..20: mol_type = other DNA
tgtgctgttgatctcataaa

SEQ ID NO: 13645 - DNA, 20 bp, synthetic construct
  misc_feature 1..20: note = chemically synthesized
  source 1..20: mol_type = other DNA
atttatatttattttcattt

SEQ ID NO: 13646 - DNA, 20 bp, synthetic construct
  misc_feature 1..20: note = chemically synthesized
  source 1..20: mol_type = other DNA
ttcattttagtctgtcttct

SEQ ID NO: 13647 - DNA, 20 bp, synthetic construct
  misc_feature 1..20: note = chemically synthesized
  source 1..20: mol_type = other DNA
gtcttcttggttgctgttga

SEQ ID NO: 13648 - DNA, 20 bp, synthetic construct
  misc_feature 1..20: note = chemically synthesized
  source 1..20: mol_type = other DNA
ttgctgttgatagacactaa

SEQ ID NO: 13649 - DNA, 20 bp, synthetic construct
  misc_feature 1..20: note = chemically synthesized
  source 1..20: mol_type = other DNA
gctgttgatagacactaaaa

SEQ ID NO: 13650 - DNA, 20 bp, synthetic construct
  misc_feature 1..20: note = chemically synthesized
  source 1..20: mol_type = other DNA
gatagacactaaaagagtat

SEQ ID NO: 13651 - DNA, 20 bp, synthetic construct
  misc_feature 1..20: note = chemically synthesized
  source 1..20: mol_type = other DNA
aagagtattagatattatct

SEQ ID NO: 13652 - DNA, 20 bp, synthetic construct
  misc_feature 1..20: note = chemically synthesized
  source 1..20: mol_type = other DNA
tattatctaagtttgaatat

SEQ ID NO: 13653 - DNA, 20 bp, synthetic construct
  misc_feature 1..20: note = chemically synthesized
  source 1..20: mol_type = other DNA
attatctaagtttgaatata

SEQ ID NO: 13654 - DNA, 20 bp, synthetic construct
  misc_feature 1..20: note = chemically synthesized
  source 1..20: mol_type = other DNA
atatttaataatttttaaaa

SEQ ID NO: 13655 - DNA, 20 bp, synthetic construct
  misc_feature 1..20: note = chemically synthesized
  source 1..20: mol_type = other DNA
aatttttaaaatagtattct

SEQ ID NO: 13656 - DNA, 20 bp, synthetic construct
  misc_feature 1..20: note = chemically synthesized
  source 1..20: mol_type = other DNA
ttgaattattcttctgttta

SEQ ID NO: 13657 - DNA, 20 bp, synthetic construct
  misc_feature 1..20: note = chemically synthesized
  source 1..20: mol_type = other DNA
tgaattattcttctgtttaa

SEQ ID NO: 13658 - DNA, 20 bp, synthetic construct
  misc_feature 1..20: note = chemically synthesized
  source 1..20: mol_type = other DNA
attattcttctgtttaaagg

SEQ ID NO: 13659 - DNA, 20 bp, synthetic construct
  misc_feature 1..20: note = chemically synthesized
  source 1..20: mol_type = other DNA
attcttctgtttaaaggcag

SEQ ID NO: 13660 - DNA, 20 bp, synthetic construct
  misc_feature 1..20: note = chemically synthesized
  source 1..20: mol_type = other DNA
aaataattgaacatcatcct

SEQ ID NO: 13661 - DNA, 20 bp, synthetic construct
  misc_feature 1..20: note = chemically synthesized
  source 1..20: mol_type = other DNA
catcatcctgagtttttctg

SEQ ID NO: 13662 - DNA, 20 bp, synthetic construct
  misc_feature 1..20: note = chemically synthesized
  source 1..20: mol_type = other DNA
atcatcctgagtttttctgt

SEQ ID NO: 13663 - DNA, 20 bp, synthetic construct
  misc_feature 1..20: note = chemically synthesized
  source 1..20: mol_type = other DNA
ctgagtttttctgtaggaat

SEQ ID NO: 13664 - DNA, 20 bp, synthetic construct
  misc_feature 1..20: note = chemically synthesized
  source 1..20: mol_type = other DNA
gagtttttctgtaggaatca

SEQ ID NO: 13665 - DNA, 20 bp, synthetic construct
  misc_feature 1..20: note = chemically synthesized
  source 1..20: mol_type = other DNA
ttgaaacaaatgcataatct

SEQ ID NO: 13666 - DNA, 20 bp, synthetic construct
  misc_feature 1..20: note = chemically synthesized
  source 1..20: mol_type = other DNA
aatgcataatctaagtcaaa

SEQ ID NO: 13667 - DNA, 20 bp, synthetic construct
  misc_feature 1..20: note = chemically synthesized
  source 1..20: mol_type = other DNA
cataatctaagtcaaatgga

SEQ ID NO: 13668 - DNA, 20 bp, synthetic construct
  misc_feature 1..20: note = chemically synthesized
  source 1..20: mol_type = other DNA
caaatggaaagaaatataaa

SEQ ID NO: 13669 - DNA, 20 bp, synthetic construct
  misc_feature 1..20: note = chemically synthesized
  source 1..20: mol_type = other DNA
ttattacttcttgttttctt

SEQ ID NO: 13670 - DNA, 20 bp, synthetic construct
  misc_feature 1..20: note = chemically synthesized
  source 1..20: mol_type = other DNA
cttttttttcttcccttgcc

SEQ ID NO: 13671 - DNA, 20 bp, synthetic construct
  misc_feature 1..20: note = chemically synthesized
  source 1..20: mol_type = other DNA
ttttcttcccttgcccagac

SEQ ID NO: 13672 - DNA, 20 bp, synthetic construct
  misc_feature 1..20: note = chemically synthesized
  source 1..20: mol_type = other DNA
ttcttcccttgcccagacaa

SEQ ID NO: 13673 - DNA, 20 bp, synthetic construct
  misc_feature 1..20: note = chemically synthesized
  source 1..20: mol_type = other DNA
tcccttgcccagacaagagt

SEQ ID NO: 13674 - DNA, 20 bp, synthetic construct
  misc_feature 1..20: note = chemically synthesized
  source 1..20: mol_type = other DNA
cccttgcccagacaagagtg

SEQ ID NO: 13675 - DNA, 20 bp, synthetic construct
  misc_feature 1..20: note = chemically synthesized
  source 1..20: mol_type = other DNA
acaagagtgaggttgctcat

SEQ ID NO: 13676 - DNA, 20 bp, synthetic construct
  misc_feature 1..20: note = chemically synthesized
  source 1..20: mol_type = other DNA
tgaggttgctcatcggttta

SEQ ID NO: 13677 - DNA, 20 bp, synthetic construct
  misc_feature 1..20: note = chemically synthesized
  source 1..20: mol_type = other DNA
tgctcatcggtttaaagatt

SEQ ID NO: 13678 - DNA, 20 bp, synthetic construct
  misc_feature 1..20: note = chemically synthesized
  source 1..20: mol_type = other DNA
gctcatcggtttaaagattt

SEQ ID NO: 13679 - DNA, 20 bp, synthetic construct
  misc_feature 1..20: note = chemically synthesized
  source 1..20: mol_type = other DNA
tcatcggtttaaagatttgg

SEQ ID NO: 13680 - DNA, 20 bp, synthetic construct
  misc_feature 1..20: note = chemically synthesized
  source 1..20: mol_type = other DNA
tcggtttaaagatttgggag

SEQ ID NO: 13681 - DNA, 20 bp, synthetic construct
  misc_feature 1..20: note = chemically synthesized
  source 1..20: mol_type = other DNA
tttgggagaagaaaatttca

SEQ ID NO: 13682 - DNA, 20 bp, synthetic construct
  misc_feature 1..20: note = chemically synthesized
  source 1..20: mol_type = other DNA
tcccaaatctttaaaccgat

SEQ ID NO: 13683 - DNA, 20 bp, synthetic construct
  misc_feature 1..20: note = chemically synthesized
  source 1..20: mol_type = other DNA
tgagcaacctcactcttgtc

SEQ ID NO: 13684 - DNA, 20 bp, synthetic construct
  misc_feature 1..20: note = chemically synthesized
  source 1..20: mol_type = other DNA
gagcaacctcactcttgtct

SEQ ID NO: 13685 - DNA, 20 bp, synthetic construct
  misc_feature 1..20: note = chemically synthesized
  source 1..20: mol_type = other DNA
aacctcactcttgtctgggc

SEQ ID NO: 13686 - DNA, 20 bp, synthetic construct
  misc_feature 1..20: note = chemically synthesized
  source 1..20: mol_type = other DNA
acctcactcttgtctgggca

SEQ ID NO: 13687 - DNA, 20 bp, synthetic construct
  misc_feature 1..20: note = chemically synthesized
  source 1..20: mol_type = other DNA
cctcactcttgtctgggcaa

SEQ ID NO: 13688 - DNA, 20 bp, synthetic construct
  misc_feature 1..20: note = chemically synthesized
  source 1..20: mol_type = other DNA
cactcttgtctgggcaaggg

SEQ ID NO: 13689 - DNA, 20 bp, synthetic construct
  misc_feature 1..20: note = chemically synthesized
  source 1..20: mol_type = other DNA
ctgggcaagggaagaaaaaa

SEQ ID NO: 13690 - DNA, 20 bp, synthetic construct
  misc_feature 1..20: note = chemically synthesized
  source 1..20: mol_type = other DNA
tgggcaagggaagaaaaaaa

SEQ ID NO: 13691 - DNA, 20 bp, synthetic construct
  misc_feature 1..20: note = chemically synthesized
  source 1..20: mol_type = other DNA
aaaaggattgttaaatactg

SEQ ID NO: 13692 - DNA, 20 bp, synthetic construct
  misc_feature 1..20: note = chemically synthesized
  source 1..20: mol_type = other DNA
tgttaaatactgaagaaaac

SEQ ID NO: 13693 - DNA, 20 bp, synthetic construct
  misc_feature 1..20: note = chemically synthesized
  source 1..20: mol_type = other DNA
taaatactgaagaaaacaag

SEQ ID NO: 13694 - DNA, 20 bp, synthetic construct
  misc_feature 1..20: note = chemically synthesized
  source 1..20: mol_type = other DNA
atatttctttccatttgact

SEQ ID NO: 13695 - DNA, 20 bp, synthetic construct
  misc_feature 1..20: note = chemically synthesized
  source 1..20: mol_type = other DNA
atgcatttgtttcaaaatat

SEQ ID NO: 13696 - DNA, 20 bp, synthetic construct
  misc_feature 1..20: note = chemically synthesized
  source 1..20: mol_type = other DNA
tgcatttgtttcaaaatatt

SEQ ID NO: 13697 - DNA, 20 bp, synthetic construct
  misc_feature 1..20: note = chemically synthesized
  source 1..20: mol_type = other DNA
atattgggctctgattccta

SEQ ID NO: 13698 - DNA, 20 bp, synthetic construct
  misc_feature 1..20: note = chemically synthesized
  source 1..20: mol_type = other DNA
ctgattcctacagaaaaact

SEQ ID NO: 13699 - DNA, 20 bp, synthetic construct
  misc_feature 1..20: note = chemically synthesized
  source 1..20: mol_type = other DNA
tgattcctacagaaaaactc

SEQ ID NO: 13700 - DNA, 20 bp, synthetic construct
  misc_feature 1..20: note = chemically synthesized
  source 1..20: mol_type = other DNA
ttatttcttctgcctttaaa

SEQ ID NO: 13701 - DNA, 20 bp, synthetic construct
  misc_feature 1..20: note = chemically synthesized
  source 1..20: mol_type = other DNA
tttcttctgcctttaaacag

SEQ ID NO: 13702 - DNA, 20 bp, synthetic construct
  misc_feature 1..20: note = chemically synthesized
  source 1..20: mol_type = other DNA
agaagaataattcaattacc

SEQ ID NO: 13703 - DNA, 20 bp, synthetic construct
  misc_feature 1..20: note = chemically synthesized
  source 1..20: mol_type = other DNA
taaaaattattaaatattta

SEQ ID NO: 13704 - DNA, 20 bp, synthetic construct
  misc_feature 1..20: note = chemically synthesized
  source 1..20: mol_type = other DNA
tatagccttatattcaaact

SEQ ID NO: 13705 - DNA, 20 bp, synthetic construct
  misc_feature 1..20: note = chemically synthesized
  source 1..20: mol_type = other DNA
gataatatctaatactcttt

SEQ ID NO: 13706 - DNA, 20 bp, synthetic construct
  misc_feature 1..20: note = chemically synthesized
  source 1..20: mol_type = other DNA
actcttttagtgtctatcaa

SEQ ID NO: 13707 - DNA, 20 bp, synthetic construct
  misc_feature 1..20: note = chemically synthesized
  source 1..20: mol_type = other DNA
agtgtctatcaacagcaacc

SEQ ID NO: 13708 - DNA, 20 bp, synthetic construct
  misc_feature 1..20: note = chemically synthesized
  source 1..20: mol_type = other DNA
gtctatcaacagcaaccaag

SEQ ID NO: 13709 - DNA, 20 bp, synthetic construct
  misc_feature 1..20: note = chemically synthesized
  source 1..20: mol_type = other DNA
atcaacagcaaccaagaaga

SEQ ID NO: 13710 - DNA, 20 bp, synthetic construct
  misc_feature 1..20: note = chemically synthesized
  source 1..20: mol_type = other DNA
atgaaaataaatataaatac

SEQ ID NO: 13711 - DNA, 20 bp, synthetic construct
  misc_feature 1..20: note = chemically synthesized
  source 1..20: mol_type = other DNA
taaatacaagttctatttat

SEQ ID NO: 13712 - DNA, 20 bp, synthetic construct
  misc_feature 1..20: note = chemically synthesized
  source 1..20: mol_type = other DNA
agttctatttatgagatcaa

SEQ ID NO: 13713 - DNA, 20 bp, synthetic construct
  misc_feature 1..20: note = chemically synthesized
  source 1..20: mol_type = other DNA
tatttatgagatcaacagca

SEQ ID NO: 13714 - DNA, 20 bp, synthetic construct
  misc_feature 1..20: note = chemically synthesized
  source 1..20: mol_type = other DNA
atttatgagatcaacagcac

SEQ ID NO: 13715 - DNA, 20 bp, synthetic construct
  misc_feature 1..20: note = chemically synthesized
  source 1..20: mol_type = other DNA
gatcaacagcacaggttttg

SEQ ID NO: 13716 - DNA, 20 bp, synthetic construct
  misc_feature 1..20: note = chemically synthesized
  source 1..20: mol_type = other DNA
ggttttgtggtttttaaata

SEQ ID NO: 13717 - DNA, 20 bp, synthetic construct
  misc_feature 1..20: note = chemically synthesized
  source 1..20: mol_type = other DNA
tgtggtttttaaataaagca

SEQ ID NO: 13718 - DNA, 20 bp, synthetic construct
  misc_feature 1..20: note = chemically synthesized
  source 1..20: mol_type = other DNA
ttaaataaagcatagtgcaa

SEQ ID NO: 13719 - DNA, 20 bp, synthetic construct
  misc_feature 1..20: note = chemically synthesized
  source 1..20: mol_type = other DNA
ataaagcatagtgcaatgga

SEQ ID NO: 13720 - DNA, 20 bp, synthetic construct
  misc_feature 1..20: note = chemically synthesized
  source 1..20: mol_type = other DNA
taaagcatagtgcaatggat

SEQ ID NO: 13721 - DNA, 20 bp, synthetic construct
  misc_feature 1..20: note = chemically synthesized
  source 1..20: mol_type = other DNA
tagtgcaatggataggtctt

SEQ ID NO: 13722 - DNA, 20 bp, synthetic construct
  misc_feature 1..20: note = chemically synthesized
  source 1..20: mol_type = other DNA
agtgcaatggataggtcttt

SEQ ID NO: 13723 - DNA, 20 bp, synthetic construct
  misc_feature 1..20: note = chemically synthesized
  source 1..20: mol_type = other DNA
caatggataggtctttggga

SEQ ID NO: 13724 - DNA, 20 bp, synthetic construct
  misc_feature 1..20: note = chemically synthesized
  source 1..20: mol_type = other DNA
atcttcaaccctattctgtg

SEQ ID NO: 13725 - DNA, 20 bp, synthetic construct
  misc_feature 1..20: note = chemically synthesized
  source 1..20: mol_type = other DNA
aaccctattctgtgaagttt

SEQ ID NO: 13726 - DNA, 20 bp, synthetic construct
  misc_feature 1..20: note = chemically synthesized
  source 1..20: mol_type = other DNA
tgtgaagtttcagtcactct

SEQ ID NO: 13727 - DNA, 20 bp, synthetic construct
  misc_feature 1..20: note = chemically synthesized
  source 1..20: mol_type = other DNA
aagttactttgcactttcct

SEQ ID NO: 13728 - DNA, 20 bp, synthetic construct
  misc_feature 1..20: note = chemically synthesized
  source 1..20: mol_type = other DNA
gcactttccttagtgcgcaa

SEQ ID NO: 13729 - DNA, 20 bp, synthetic construct
  misc_feature 1..20: note = chemically synthesized
  source 1..20: mol_type = other DNA
tagtgcgcaaaagaaaatta

SEQ ID NO: 13730 - DNA, 20 bp, synthetic construct
  misc_feature 1..20: note = chemically synthesized
  source 1..20: mol_type = other DNA
gacctttttttttttttacc

SEQ ID NO: 13731 - DNA, 20 bp, synthetic construct
  misc_feature 1..20: note = chemically synthesized
  source 1..20: mol_type = other DNA
acctttttttttttttacct

SEQ ID NO: 13732 - DNA, 20 bp, synthetic construct
  misc_feature 1..20: note = chemically synthesized
  source 1..20: mol_type = other DNA
gatgtttgaattttattaat

SEQ ID NO: 13733 - DNA, 20 bp, synthetic construct
  misc_feature 1..20: note = chemically synthesized
  source 1..20: mol_type = other DNA
tattaataagataaccttgt

SEQ ID NO: 13734 - DNA, 20 bp, synthetic construct
  misc_feature 1..20: note = chemically synthesized
  source 1..20: mol_type = other DNA
tacaaaatactatgccattt

SEQ ID NO: 13735 - DNA, 20 bp, synthetic construct
  misc_feature 1..20: note = chemically synthesized
  source 1..20: mol_type = other DNA
aatgccaaaataattcttta

SEQ ID NO: 13736 - DNA, 20 bp, synthetic construct
  misc_feature 1..20: note = chemically synthesized
  source 1..20: mol_type = other DNA
aaaataattctttaaagatg

SEQ ID NO: 13737 - DNA, 20 bp, synthetic construct
  misc_feature 1..20: note = chemically synthesized
  source 1..20: mol_type = other DNA
aataattctttaaagatgca

SEQ ID NO: 13738 - DNA, 20 bp, synthetic construct
  misc_feature 1..20: note = chemically synthesized
  source 1..20: mol_type = other DNA
ttactaaaactttattttac

SEQ ID NO: 13739 - DNA, 20 bp, synthetic construct
  misc_feature 1..20: note = chemically synthesized
  source 1..20: mol_type = other DNA
tactaaaactttattttact

SEQ ID NO: 13740 - DNA, 20 bp, synthetic construct
  misc_feature 1..20: note = chemically synthesized
  source 1..20: mol_type = other DNA
actttattttactgggaaaa

SEQ ID NO: 13741 - DNA, 20 bp, synthetic construct
  misc_feature 1..20: note = chemically synthesized
  source 1..20: mol_type = other DNA
ttactgggaaaatagaataa

SEQ ID NO: 13742 - DNA, 20 bp, synthetic construct
  misc_feature 1..20: note = chemically synthesized
  source 1..20: mol_type = other DNA
atagaataaaagttgaacaa

SEQ ID NO: 13743 - DNA, 20 bp, synthetic construct
  misc_feature 1..20: note = chemically synthesized
  source 1..20: mol_type = other DNA
aaagttgaacaatagaaaaa

SEQ ID NO: 13744 - DNA, 20 bp, synthetic construct
  misc_feature 1..20: note = chemically synthesized
  source 1..20: mol_type = other DNA
atctcgacgaaacacacccc

SEQ ID NO: 13745 - DNA, 20 bp, synthetic construct
  misc_feature 1..20: note = chemically synthesized
  source 1..20: mol_type = other DNA
acgaaacacacccctggaat

SEQ ID NO: 13746 - DNA, 20 bp, synthetic construct
  misc_feature 1..20: note = chemically synthesized
  source 1..20: mol_type = other DNA
acacacccctggaataagcc

SEQ ID NO: 13747 - DNA, 20 bp, synthetic construct
  misc_feature 1..20: note = chemically synthesized
  source 1..20: mol_type = other DNA
ccctggaataagccgagcta

SEQ ID NO: 13748 - DNA, 20 bp, synthetic construct
  misc_feature 1..20: note = chemically synthesized
  source 1..20: mol_type = other DNA
ctggaataagccgagctaaa

SEQ ID NO: 13749 - DNA, 20 bp, synthetic construct
  misc_feature 1..20: note = chemically synthesized
  source 1..20: mol_type = other DNA
taagccgagctaaagagaaa

SEQ ID NO: 13750 - DNA, 20 bp, synthetic construct
  misc_feature 1..20: note = chemically synthesized
  source 1..20: mol_type = other DNA
gccgagctaaagagaaaaag

SEQ ID NO: 13751 - DNA, 20 bp, synthetic construct
  misc_feature 1..20: note = chemically synthesized
  source 1..20: mol_type = other DNA
ccgagctaaagagaaaaaga

SEQ ID NO: 13752 - DNA, 20 bp, synthetic construct
  misc_feature 1..20: note = chemically synthesized
  source 1..20: mol_type = other DNA
cgagctaaagagaaaaagaa

SEQ ID NO: 13753 - DNA, 20 bp, synthetic construct
  misc_feature 1..20: note = chemically synthesized
  source 1..20: mol_type = other DNA
agagaaaaagaagggaaata

SEQ ID NO: 13754 - DNA, 20 bp, synthetic construct
  misc_feature 1..20: note = chemically synthesized
  source 1..20: mol_type = other DNA
gagaaaaagaagggaaataa

SEQ ID NO: 13755 - DNA, 20 bp, synthetic construct
  misc_feature 1..20: note = chemically synthesized
  source 1..20: mol_type = other DNA
ttacccacttcattgtgcca

SEQ ID NO: 13756 - DNA, 20 bp, synthetic construct
  misc_feature 1..20: note = chemically synthesized
  source 1..20: mol_type = other DNA
tacccacttcattgtgccaa

SEQ ID NO: 13757 - DNA, 20 bp, synthetic construct
  misc_feature 1..20: note = chemically synthesized
  source 1..20: mol_type = other DNA
ttcattgtgccaaaggcgtg

SEQ ID NO: 13758 - DNA, 20 bp, synthetic construct
  misc_feature 1..20: note = chemically synthesized
  source 1..20: mol_type = other DNA
tcattgtgccaaaggcgtgt

SEQ ID NO: 13759 - DNA, 20 bp, synthetic construct
  misc_feature 1..20: note = chemically synthesized
  source 1..20: mol_type = other DNA
cattgtgccaaaggcgtgtg

SEQ ID NO: 13760 - DNA, 20 bp, synthetic construct
  misc_feature 1..20: note = chemically synthesized
  source 1..20: mol_type = other DNA
ccaaaggcgtgtggggttga

SEQ ID NO: 13761 - DNA, 20 bp, synthetic construct
  misc_feature 1..20: note = chemically synthesized
  source 1..20: mol_type = other DNA
aaggcgtgtggggttgacag

SEQ ID NO: 13762 - DNA, 20 bp, synthetic construct
  misc_feature 1..20: note = chemically synthesized
  source 1..20: mol_type = other DNA
ggcgtgtggggttgacagaa

SEQ ID NO: 13763 - DNA, 20 bp, synthetic construct
  misc_feature 1..20: note = chemically synthesized
  source 1..20: mol_type = other DNA
gtggggttgacagaagagaa

SEQ ID NO: 13764 - DNA, 20 bp, synthetic construct
  misc_feature 1..20: note = chemically synthesized
  source 1..20: mol_type = other DNA
ggttgacagaagagaaaagc

SEQ ID NO: 13765 - DNA, 20 bp, synthetic construct
  misc_feature 1..20: note = chemically synthesized
  source 1..20: mol_type = other DNA
gttgacagaagagaaaagct

SEQ ID NO: 13766 - DNA, 20 bp, synthetic construct
  misc_feature 1..20: note = chemically synthesized
  source 1..20: mol_type = other DNA
aagagaaaagctaggacaaa

SEQ ID NO: 13767 - DNA, 20 bp, synthetic construct
  misc_feature 1..20: note = chemically synthesized
  source 1..20: mol_type = other DNA
gagaaaagctaggacaaacg

SEQ ID NO: 13768 - DNA, 20 bp, synthetic construct
  misc_feature 1..20: note = chemically synthesized
  source 1..20: mol_type = other DNA
agaaaagctaggacaaacgg

SEQ ID NO: 13769 - DNA, 20 bp, synthetic construct
  misc_feature 1..20: note = chemically synthesized
  source 1..20: mol_type = other DNA
gaaaagctaggacaaacgga

SEQ ID NO: 13770 - DNA, 20 bp, synthetic construct
  misc_feature 1..20: note = chemically synthesized
  source 1..20: mol_type = other DNA
taggacaaacggagggaaat

SEQ ID NO: 13771 - DNA, 20 bp, synthetic construct
  misc_feature 1..20: note = chemically synthesized
  source 1..20: mol_type = other DNA
cacgcctttggcacaatgaa

SEQ ID NO: 13772 - DNA, 20 bp, synthetic construct
  misc_feature 1..20: note = chemically synthesized
  source 1..20: mol_type = other DNA
tctttagctcggcttattcc

SEQ ID NO: 13773 - DNA, 20 bp, synthetic construct
  misc_feature 1..20: note = chemically synthesized
  source 1..20: mol_type = other DNA
tagtaaactctgcatcttta

SEQ ID NO: 13774 - DNA, 20 bp, synthetic construct
  misc_feature 1..20: note = chemically synthesized
  source 1..20: mol_type = other DNA
aggtaaaaaaaaaaaaaggt

SEQ ID NO: 13775 - DNA, 20 bp, synthetic construct
  misc_feature 1..20: note = chemically synthesized
  source 1..20: mol_type = other DNA
aaggaaagtgcaaagtaact

SEQ ID NO: 13776 - DNA, 20 bp, synthetic construct
  misc_feature 1..20: note = chemically synthesized
  source 1..20: mol_type = other DNA
ttagagtgactgaaacttca

SEQ ID NO: 13777 - DNA, 20 bp, synthetic construct
  misc_feature 1..20: note = chemically synthesized
  source 1..20: mol_type = other DNA
gtgactgaaacttcacagaa

SEQ ID NO: 13778 - DNA, 20 bp, synthetic construct
  misc_feature 1..20: note = chemically synthesized
  source 1..20: mol_type = other DNA
tcacagaatagggttgaaga

SEQ ID NO: 13779 - DNA, 20 bp, synthetic construct
  misc_feature 1..20: note = chemically synthesized
  source 1..20: mol_type = other DNA
ttgctgttgatagacactaa

SEQ ID NO: 13780 - DNA, 20 bp, synthetic construct
  misc_feature 1..20: note = chemically synthesized
  source 1..20: mol_type = other DNA
gtattagatattatctaagt

SEQ ID NO: 13781 - DNA, 20 bp, synthetic construct
  misc_feature 1..20: note = chemically synthesized
  source 1..20: mol_type = other DNA
taaaatagtattcttggtaa

SEQ ID NO: 13782 - DNA, 20 bp, synthetic construct
  misc_feature 1..20: note = chemically synthesized
  source 1..20: mol_type = other DNA
agaaataattgaacatcatc

SEQ ID NO: 13783 - DNA, 20 bp, synthetic construct
  misc_feature 1..20: note = chemically synthesized
  source 1..20: mol_type = other DNA
atcatcctgagtttttctgt

SEQ ID NO: 13784 - DNA, 20 bp, synthetic construct
  misc_feature 1..20: note = chemically synthesized
  source 1..20: mol_type = other DNA
ttttcttcccttgcccagac

SEQ ID NO: 13785 - DNA, 20 bp, synthetic construct
  misc_feature 1..20: note = chemically synthesized
  source 1..20: mol_type = other DNA
ctgggcaagggaagaaaaaa

SEQ ID NO: 13786 - DNA, 20 bp, synthetic construct
  misc_feature 1..20: note = chemically synthesized
  source 1..20: mol_type = other DNA
ctgattcctacagaaaaact

SEQ ID NO: 13787 - DNA, 20 bp, synthetic construct
  misc_feature 1..20: note = chemically synthesized
  source 1..20: mol_type = other DNA
tttcttctgcctttaaacag

SEQ ID NO: 13788 - DNA, 20 bp, synthetic construct
  misc_feature 1..20: note = chemically synthesized
  source 1..20: mol_type = other DNA
agaagaataattcaattacc

SEQ ID NO: 13789 - DNA, 20 bp, synthetic construct
  misc_feature 1..20: note = chemically synthesized
  source 1..20: mol_type = other DNA
tttaaataaagcatagtgca

SEQ ID NO: 13790 - DNA, 20 bp, synthetic construct
  misc_feature 1..20: note = chemically synthesized
  source 1..20: mol_type = other DNA
tagtgcaatggataggtctt

SEQ ID NO: 13791 - DNA, 20 bp, synthetic construct
  misc_feature 1..20: note = chemically synthesized
  source 1..20: mol_type = other DNA
gataggtctttgggatagtt

SEQ ID NO: 13792 - DNA, 20 bp, synthetic construct
  misc_feature 1..20: note = chemically synthesized
  source 1..20: mol_type = other DNA
gacctttttttttttttacc

SEQ ID NO: 13793 - DNA, 20 bp, synthetic construct
  misc_feature 1..20: note = chemically synthesized
  source 1..20: mol_type = other DNA
tttttttttacctaggatgt

SEQ ID NO: 13794 - DNA, 20 bp, synthetic construct
  misc_feature 1..20: note = chemically synthesized
  source 1..20: mol_type = other DNA
aaaataattctttaaagatg

SEQ ID NO: 13795 - DNA, 20 bp, synthetic construct
  misc_feature 1..20: note = chemically synthesized
  source 1..20: mol_type = other DNA
actttattttactgggaaaa

SEQ ID NO: 13796 - DNA, 20 bp, synthetic construct
  misc_feature 1..20: note = chemically synthesized
  source 1..20: mol_type = other DNA
aaaagttgaacaatagaaaa

SEQ ID NO: 13797 - DNA, 20 bp, synthetic construct
  misc_feature 1..20: note = chemically synthesized
  source 1..20: mol_type = other DNA
atctcgacgaaacacacccc

SEQ ID NO: 13798 - DNA, 20 bp, synthetic construct
  misc_feature 1..20: note = chemically synthesized
  source 1..20: mol_type = other DNA
ttcattgtgccaaaggcgtg

SEQ ID NO: 13799 - DNA, 20 bp, synthetic construct
  misc_feature 1..20: note = chemically synthesized
  source 1..20: mol_type = other DNA
gtgtttcgtcgagatgcacg

SEQ ID NO: 13800 - DNA, 20 bp, synthetic construct
  misc_feature 1..20: note = chemically synthesized
  source 1..20: mol_type = other DNA
ttagtaaactctgcatcttt

SEQ ID NO: 13801 - DNA, 20 bp, synthetic construct
  misc_feature 1..20: note = chemically synthesized
  source 1..20: mol_type = other DNA
taggtaaaaaaaaaaaaagg

SEQ ID NO: 13802 - DNA, 20 bp, synthetic construct
  misc_feature 1..20: note = chemically synthesized
  source 1..20: mol_type = other DNA
cttagagtgactgaaacttc

SEQ ID NO: 13803 - DNA, 20 bp, synthetic construct
  misc_feature 1..20: note = chemically synthesized
  source 1..20: mol_type = other DNA
tattcttctgtttaaaggca

SEQ ID NO: 13804 - DNA, 20 bp, synthetic construct
  misc_feature 1..20: note = chemically synthesized
  source 1..20: mol_type = other DNA
gcataatctaagtcaaatgg

SEQ ID NO: 13805 - DNA, 20 bp, synthetic construct
  misc_feature 1..20: note = chemically synthesized
  source 1..20: mol_type = other DNA
atcggtttaaagatttggga

SEQ ID NO: 13806 - DNA, 20 bp, synthetic construct
  misc_feature 1..20: note = chemically synthesized
  source 1..20: mol_type = other DNA
tcactcttgtctgggcaagg

SEQ ID NO: 13807 - DNA, 20 bp, synthetic construct
  misc_feature 1..20: note = chemically synthesized
  source 1..20: mol_type = other DNA
aaaaaggattgttaaatact

SEQ ID NO: 13808 - DNA, 20 bp, synthetic construct
  misc_feature 1..20: note = chemically synthesized
  source 1..20: mol_type = other DNA
aatattgggctctgattcct

SEQ ID NO: 13809 - DNA, 20 bp, synthetic construct
  misc_feature 1..20: note = chemically synthesized
  source 1..20: mol_type = other DNA
atttcttctgcctttaaaca

SEQ ID NO: 13810 - DNA, 20 bp, synthetic construct
  misc_feature 1..20: note = chemically synthesized
  source 1..20: mol_type = other DNA
cagaagaataattcaattac

SEQ ID NO: 13811 - DNA, 20 bp, synthetic construct
  misc_feature 1..20: note = chemically synthesized
  source 1..20: mol_type = other DNA
tgcactttccttagtgcgca

SEQ ID NO: 13812 - DNA, 20 bp, synthetic construct
  misc_feature 1..20: note = chemically synthesized
  source 1..20: mol_type = other DNA
atacaaaatactatgccatt

SEQ ID NO: 13813 - DNA, 20 bp, synthetic construct
  misc_feature 1..20: note = chemically synthesized
  source 1..20: mol_type = other DNA
aactttattttactgggaaa

SEQ ID NO: 13814 - DNA, 20 bp, synthetic construct
  misc_feature 1..20: note = chemically synthesized
  source 1..20: mol_type = other DNA
aatagaataaaagttgaaca

SEQ ID NO: 13815 - DNA, 20 bp, synthetic construct
  misc_feature 1..20: note = chemically synthesized
  source 1..20: mol_type = other DNA
cctggaataagccgagctaa

SEQ ID NO: 13816 - DNA, 20 bp, synthetic construct
  misc_feature 1..20: note = chemically synthesized
  source 1..20: mol_type = other DNA
aggcgtgtggggttgacaga

SEQ ID NO: 13817 - DNA, 20 bp, synthetic construct
  misc_feature 1..20: note = chemically synthesized
  source 1..20: mol_type = other DNA
cattgcactatgctttattt

SEQ ID NO: 13818 - DNA, 20 bp, synthetic construct
  misc_feature 1..20: note = chemically synthesized
  source 1..20: mol_type = other DNA
tatgctttatttaaaaacca

SEQ ID NO: 13819 - DNA, 20 bp, synthetic construct
  misc_feature 1..20: note = chemically synthesized
  source 1..20: mol_type = other DNA
aaggattgttaaatactgaa

SEQ ID NO: 13820 - DNA, 20 bp, synthetic construct
  misc_feature 1..20: note = chemically synthesized
  source 1..20: mol_type = other DNA
ttgggctctgattcctacag

SEQ ID NO: 13821 - DNA, 20 bp, synthetic construct
  misc_feature 1..20: note = chemically synthesized
  source 1..20: mol_type = other DNA
tttaaagatgcagagtttac

SEQ ID NO: 13822 - DNA, 20 bp, synthetic construct
  misc_feature 1..20: note = chemically synthesized
  source 1..20: mol_type = other DNA
gtatattagtgctaatttcc

SEQ ID NO: 13823 - DNA, 20 bp, synthetic construct
  misc_feature 1..20: note = chemically synthesized
  source 1..20: mol_type = other DNA
gctaatttccctccgtttgt

SEQ ID NO: 13824 - DNA, 20 bp, synthetic construct
  misc_feature 1..20: note = chemically synthesized
  source 1..20: mol_type = other DNA
tcccttctttttctctttag

SEQ ID NO: 13825 - DNA, 20 bp, synthetic construct
  misc_feature 1..20: note = chemically synthesized
  source 1..20: mol_type = other DNA
tagctcggcttattccaggg

SEQ ID NO: 13826 - DNA, 20 bp, synthetic construct
  misc_feature 1..20: note = chemically synthesized
  source 1..20: mol_type = other DNA
attctattttcccagtaaaa

SEQ ID NO: 13827 - DNA, 20 bp, synthetic construct
  misc_feature 1..20: note = chemically synthesized
  source 1..20: mol_type = other DNA
taaaaaaaaaaaaaggtcag

SEQ ID NO: 13828 - DNA, 20 bp, synthetic construct
  misc_feature 1..20: note = chemically synthesized
  source 1..20: mol_type = other DNA
gaaacttcacagaatagggt

SEQ ID NO: 13829 - DNA, 20 bp, synthetic construct
  misc_feature 1..20: note = chemically synthesized
  source 1..20: mol_type = other DNA
ccaaagacctatccattgca

SEQ ID NO: 13830 - DNA, 20 bp, synthetic construct
  misc_feature 1..20: note = chemically synthesized
  source 1..20: mol_type = other DNA
aaaagagtattagatattat

SEQ ID NO: 13831 - DNA, 20 bp, synthetic construct
  misc_feature 1..20: note = chemically synthesized
  source 1..20: mol_type = other DNA
tcttggtaattgaattattc

SEQ ID NO: 13832 - DNA, 20 bp, synthetic construct
  misc_feature 1..20: note = chemically synthesized
  source 1..20: mol_type = other DNA
agaaataattgaacatcatc

SEQ ID NO: 13833 - DNA, 20 bp, synthetic construct
  misc_feature 1..20: note = chemically synthesized
  source 1..20: mol_type = other DNA
taaaaagtaacattattact

SEQ ID NO: 13834 - DNA, 20 bp, synthetic construct
  misc_feature 1..20: note = chemically synthesized
  source 1..20: mol_type = other DNA
agacaagagtgaggttgctc

SEQ ID NO: 13835 - DNA, 20 bp, synthetic construct
  misc_feature 1..20: note = chemically synthesized
  source 1..20: mol_type = other DNA
agtgaggttgctcatcggtt

SEQ ID NO: 13836 - DNA, 20 bp, synthetic construct
  misc_feature 1..20: note = chemically synthesized
  source 1..20: mol_type = other DNA
tctgggcaagggaagaaaaa

SEQ ID NO: 13837 - DNA, 20 bp, synthetic construct
  misc_feature 1..20: note = chemically synthesized
  source 1..20: mol_type = other DNA
ttatatttctttccatttga

SEQ ID NO: 13838 - DNA, 20 bp, synthetic construct
  misc_feature 1..20: note = chemically synthesized
  source 1..20: mol_type = other DNA
ccatttgacttagattatgc

SEQ ID NO: 13839 - DNA, 20 bp, synthetic construct
  misc_feature 1..20: note = chemically synthesized
  source 1..20: mol_type = other DNA
atttgtttcaaaatattggg

SEQ ID NO: 13840 - DNA, 20 bp, synthetic construct
  misc_feature 1..20: note = chemically synthesized
  source 1..20: mol_type = other DNA
ctatttatgagatcaacagc

SEQ ID NO: 13841 - DNA, 20 bp, synthetic construct
  misc_feature 1..20: note = chemically synthesized
  source 1..20: mol_type = other DNA
gagatcaacagcacaggttt

SEQ ID NO: 13842 - DNA, 20 bp, synthetic construct
  misc_feature 1..20: note = chemically synthesized
  source 1..20: mol_type = other DNA
caatcttcaaccctattctg

SEQ ID NO: 13843 - DNA, 20 bp, synthetic construct
  misc_feature 1..20: note = chemically synthesized
  source 1..20: mol_type = other DNA
cctttttttttttttaccta

SEQ ID NO: 13844 - DNA, 20 bp, synthetic construct
  misc_feature 1..20: note = chemically synthesized
  source 1..20: mol_type = other DNA
aaaataattctttaaagatg

SEQ ID NO: 13845 - DNA, 20 bp, synthetic construct
  misc_feature 1..20: note = chemically synthesized
  source 1..20: mol_type = other DNA
taaaagttgaacaatagaaa

SEQ ID NO: 13846 - DNA, 22 bp, synthetic construct
  misc_feature 1..22: note = chemically synthesized
  source 1..22: mol_type = other DNA
gtgctaatttccctccgtttgt

SEQ ID NO: 13847 - DNA, 22 bp, synthetic construct
  misc_feature 1..22: note = chemically synthesized
  source 1..22: mol_type = other DNA
atttccctccgtttgtcctagc

SEQ ID NO: 13848 - DNA, 22 bp, synthetic construct
  misc_feature 1..22: note = chemically synthesized
  source 1..22: mol_type = other DNA
ccctccgtttgtcctagctttt

SEQ ID NO: 13849 - DNA, 22 bp, synthetic construct
  misc_feature 1..22: note = chemically synthesized
  source 1..22: mol_type = other DNA
cctccgtttgtcctagcttttc

SEQ ID NO: 13850 - DNA, 22 bp, synthetic construct
  misc_feature 1..22: note = chemically synthesized
  source 1..22: mol_type = other DNA
cgtttgtcctagcttttctctt

SEQ ID NO: 13851 - DNA, 22 bp, synthetic construct
  misc_feature 1..22: note = chemically synthesized
  source 1..22: mol_type = other DNA
gtcctagcttttctcttctgtc

SEQ ID NO: 13852 - DNA, 22 bp, synthetic construct
  misc_feature 1..22: note = chemically synthesized
  source 1..22: mol_type = other DNA
tcctagcttttctcttctgtca

SEQ ID NO: 13853 - DNA, 22 bp, synthetic construct
  misc_feature 1..22: note = chemically synthesized
  source 1..22: mol_type = other DNA
gcttttctcttctgtcaacccc

SEQ ID NO: 13854 - DNA, 22 bp, synthetic construct
  misc_feature 1..22: note = chemically synthesized
  source 1..22: mol_type = other DNA
ttctcttctgtcaaccccacac

SEQ ID NO: 13855 - DNA, 22 bp, synthetic construct
  misc_feature 1..22: note = chemically synthesized
  source 1..22: mol_type = other DNA
tctcttctgtcaaccccacacg

SEQ ID NO: 13856 - DNA, 22 bp, synthetic construct
  misc_feature 1..22: note = chemically synthesized
  source 1..22: mol_type = other DNA
ctcttctgtcaaccccacacgc

SEQ ID NO: 13857 - DNA, 22 bp, synthetic construct
  misc_feature 1..22: note = chemically synthesized
  source 1..22: mol_type = other DNA
tcttctgtcaaccccacacgcc

SEQ ID NO: 13858 - DNA, 22 bp, synthetic construct
  misc_feature 1..22: note = chemically synthesized
  source 1..22: mol_type = other DNA
ttctgtcaaccccacacgcctt

SEQ ID NO: 13859 - DNA, 22 bp, synthetic construct
  misc_feature 1..22: note = chemically synthesized
  source 1..22: mol_type = other DNA
ctgtcaaccccacacgcctttg

SEQ ID NO: 13860 - DNA, 22 bp, synthetic construct
  misc_feature 1..22: note = chemically synthesized
  source 1..22: mol_type = other DNA
tgtcaaccccacacgcctttgg

SEQ ID NO: 13861 - DNA, 22 bp, synthetic construct
  misc_feature 1..22: note = chemically synthesized
  source 1..22: mol_type = other DNA
tcaaccccacacgcctttggca

SEQ ID NO: 13862 - DNA, 22 bp, synthetic construct
  misc_feature 1..22: note = chemically synthesized
  source 1..22: mol_type = other DNA
tggcacaatgaagtgggtaacc

SEQ ID NO: 13863 - DNA, 22 bp, synthetic construct
  misc_feature 1..22: note = chemically synthesized
  source 1..22: mol_type = other DNA
ggcacaatgaagtgggtaacct

SEQ ID NO: 13864 - DNA, 22 bp, synthetic construct
  misc_feature 1..22: note = chemically synthesized
  source 1..22: mol_type = other DNA
gcacaatgaagtgggtaacctt

SEQ ID NO: 13865 - DNA, 22 bp, synthetic construct
  misc_feature 1..22: note = chemically synthesized
  source 1..22: mol_type = other DNA
tatttcccttctttttctcttt

SEQ ID NO: 13866 - DNA, 22 bp, synthetic construct
  misc_feature 1..22: note = chemically synthesized
  source 1..22: mol_type = other DNA
atttcccttctttttctcttta

SEQ ID NO: 13867 - DNA, 22 bp, synthetic construct
  misc_feature 1..22: note = chemically synthesized
  source 1..22: mol_type = other DNA
tttcccttctttttctctttag

SEQ ID NO: 13868 - DNA, 22 bp, synthetic construct
  misc_feature 1..22: note = chemically synthesized
  source 1..22: mol_type = other DNA
cccttctttttctctttagctc

SEQ ID NO: 13869 - DNA, 22 bp, synthetic construct
  misc_feature 1..22: note = chemically synthesized
  source 1..22: mol_type = other DNA
ccttctttttctctttagctcg

SEQ ID NO: 13870 - DNA, 22 bp, synthetic construct
  misc_feature 1..22: note = chemically synthesized
  source 1..22: mol_type = other DNA
ctttttctctttagctcggctt

SEQ ID NO: 13871 - DNA, 22 bp, synthetic construct
  misc_feature 1..22: note = chemically synthesized
  source 1..22: mol_type = other DNA
tttttctctttagctcggctta

SEQ ID NO: 13872 - DNA, 22 bp, synthetic construct
  misc_feature 1..22: note = chemically synthesized
  source 1..22: mol_type = other DNA
tttctctttagctcggcttatt

SEQ ID NO: 13873 - DNA, 22 bp, synthetic construct
  misc_feature 1..22: note = chemically synthesized
  source 1..22: mol_type = other DNA
ttctctttagctcggcttattc

SEQ ID NO: 13874 - DNA, 22 bp, synthetic construct
  misc_feature 1..22: note = chemically synthesized
  source 1..22: mol_type = other DNA
tctctttagctcggcttattcc

SEQ ID NO: 13875 - DNA, 22 bp, synthetic construct
  misc_feature 1..22: note = chemically synthesized
  source 1..22: mol_type = other DNA
ctctttagctcggcttattcca

SEQ ID NO: 13876 - DNA, 22 bp, synthetic construct
  misc_feature 1..22: note = chemically synthesized
  source 1..22: mol_type = other DNA
tctttagctcggcttattccag

SEQ ID NO: 13877 - DNA, 22 bp, synthetic construct
  misc_feature 1..22: note = chemically synthesized
  source 1..22: mol_type = other DNA
tttagctcggcttattccaggg

SEQ ID NO: 13878 - DNA, 22 bp, synthetic construct
  misc_feature 1..22: note = chemically synthesized
  source 1..22: mol_type = other DNA
tagctcggcttattccaggggt

SEQ ID NO: 13879 - DNA, 22 bp, synthetic construct
  misc_feature 1..22: note = chemically synthesized
  source 1..22: mol_type = other DNA
agctcggcttattccaggggtg

SEQ ID NO: 13880 - DNA, 22 bp, synthetic construct
  misc_feature 1..22: note = chemically synthesized
  source 1..22: mol_type = other DNA
gctcggcttattccaggggtgt

SEQ ID NO: 13881 - DNA, 22 bp, synthetic construct
  misc_feature 1..22: note = chemically synthesized
  source 1..22: mol_type = other DNA
ggcttattccaggggtgtgttt

SEQ ID NO: 13882 - DNA, 22 bp, synthetic construct
  misc_feature 1..22: note = chemically synthesized
  source 1..22: mol_type = other DNA
attccaggggtgtgtttcgtcg

SEQ ID NO: 13883 - DNA, 22 bp, synthetic construct
  misc_feature 1..22: note = chemically synthesized
  source 1..22: mol_type = other DNA
ttccaggggtgtgtttcgtcga

SEQ ID NO: 13884 - DNA, 22 bp, synthetic construct
  misc_feature 1..22: note = chemically synthesized
  source 1..22: mol_type = other DNA
caggggtgtgtttcgtcgagat

SEQ ID NO: 13885 - DNA, 22 bp, synthetic construct
  misc_feature 1..22: note = chemically synthesized
  source 1..22: mol_type = other DNA
cgtcgagatgcacgtaagaaat

SEQ ID NO: 13886 - DNA, 22 bp, synthetic construct
  misc_feature 1..22: note = chemically synthesized
  source 1..22: mol_type = other DNA
gtcgagatgcacgtaagaaatc

SEQ ID NO: 13887 - DNA, 22 bp, synthetic construct
  misc_feature 1..22: note = chemically synthesized
  source 1..22: mol_type = other DNA
ttctattgttcaacttttattc

SEQ ID NO: 13888 - DNA, 22 bp, synthetic construct
  misc_feature 1..22: note = chemically synthesized
  source 1..22: mol_type = other DNA
tctattgttcaacttttattct

SEQ ID NO: 13889 - DNA, 22 bp, synthetic construct
  misc_feature 1..22: note = chemically synthesized
  source 1..22: mol_type = other DNA
ctattgttcaacttttattcta

SEQ ID NO: 13890 - DNA, 22 bp, synthetic construct
  misc_feature 1..22: note = chemically synthesized
  source 1..22: mol_type = other DNA
tattgttcaacttttattctat

SEQ ID NO: 13891 - DNA, 22 bp, synthetic construct
  misc_feature 1..22: note = chemically synthesized
  source 1..22: mol_type = other DNA
ttgttcaacttttattctattt

SEQ ID NO: 13892 - DNA, 22 bp, synthetic construct
  misc_feature 1..22: note = chemically synthesized
  source 1..22: mol_type = other DNA
ttcaacttttattctattttcc

SEQ ID NO: 13893 - DNA, 22 bp, synthetic construct
  misc_feature 1..22: note = chemically synthesized
  source 1..22: mol_type = other DNA
aacttttattctattttcccag

SEQ ID NO: 13894 - DNA, 22 bp, synthetic construct
  misc_feature 1..22: note = chemically synthesized
  source 1..22: mol_type = other DNA
ttattctattttcccagtaaaa

SEQ ID NO: 13895 - DNA, 22 bp, synthetic construct
  misc_feature 1..22: note = chemically synthesized
  source 1..22: mol_type = other DNA
tattctattttcccagtaaaat

SEQ ID NO: 13896 - DNA, 22 bp, synthetic construct
  misc_feature 1..22: note = chemically synthesized
  source 1..22: mol_type = other DNA
attctattttcccagtaaaata

SEQ ID NO: 13897 - DNA, 22 bp, synthetic construct
  misc_feature 1..22: note = chemically synthesized
  source 1..22: mol_type = other DNA
ttctattttcccagtaaaataa

SEQ ID NO: 13898 - DNA, 22 bp, synthetic construct
  misc_feature 1..22: note = chemically synthesized
  source 1..22: mol_type = other DNA
tattttcccagtaaaataaagt

SEQ ID NO: 13899 - DNA, 22 bp, synthetic construct
  misc_feature 1..22: note = chemically synthesized
  source 1..22: mol_type = other DNA
ttttcccagtaaaataaagttt

SEQ ID NO: 13900 - DNA, 22 bp, synthetic construct
  misc_feature 1..22: note = chemically synthesized
  source 1..22: mol_type = other DNA
tcccagtaaaataaagttttag

SEQ ID NO: 13901 - DNA, 22 bp, synthetic construct
  misc_feature 1..22: note = chemically synthesized
  source 1..22: mol_type = other DNA
cccagtaaaataaagttttagt

SEQ ID NO: 13902 - DNA, 22 bp, synthetic construct
  misc_feature 1..22: note = chemically synthesized
  source 1..22: mol_type = other DNA
ccagtaaaataaagttttagta

SEQ ID NO: 13903 - DNA, 22 bp, synthetic construct
  misc_feature 1..22: note = chemically synthesized
  source 1..22: mol_type = other DNA
tagtaaactctgcatctttaaa

SEQ ID NO: 13904 - DNA, 22 bp, synthetic construct
  misc_feature 1..22: note = chemically synthesized
  source 1..22: mol_type = other DNA
agtaaactctgcatctttaaag

SEQ ID NO: 13905 - DNA, 22 bp, synthetic construct
  misc_feature 1..22: note = chemically synthesized
  source 1..22: mol_type = other DNA
gtaaactctgcatctttaaaga

SEQ ID NO: 13906 - DNA, 22 bp, synthetic construct
  misc_feature 1..22: note = chemically synthesized
  source 1..22: mol_type = other DNA
tgcatctttaaagaattatttt

SEQ ID NO: 13907 - DNA, 22 bp, synthetic construct
  misc_feature 1..22: note = chemically synthesized
  source 1..22: mol_type = other DNA
catctttaaagaattattttgg

SEQ ID NO: 13908 - DNA, 22 bp, synthetic construct
  misc_feature 1..22: note = chemically synthesized
  source 1..22: mol_type = other DNA
taaagaattattttggcattta

SEQ ID NO: 13909 - DNA, 22 bp, synthetic construct
  misc_feature 1..22: note = chemically synthesized
  source 1..22: mol_type = other DNA
aaagaattattttggcatttat

SEQ ID NO: 13910 - DNA, 22 bp, synthetic construct
  misc_feature 1..22: note = chemically synthesized
  source 1..22: mol_type = other DNA
aagaattattttggcatttatt

SEQ ID NO: 13911 - DNA, 22 bp, synthetic construct
  misc_feature 1..22: note = chemically synthesized
  source 1..22: mol_type = other DNA
ttttggcatttatttctaaaat

SEQ ID NO: 13912 - DNA, 22 bp, synthetic construct
  misc_feature 1..22: note = chemically synthesized
  source 1..22: mol_type = other DNA
tggcatttatttctaaaatggc

SEQ ID NO: 13913 - DNA, 22 bp, synthetic construct
  misc_feature 1..22: note = chemically synthesized
  source 1..22: mol_type = other DNA
ggcatttatttctaaaatggca

SEQ ID NO: 13914 - DNA, 22 bp, synthetic construct
  misc_feature 1..22: note = chemically synthesized
  source 1..22: mol_type = other DNA
gcatttatttctaaaatggcat

SEQ ID NO: 13915 - DNA, 22 bp, synthetic construct
  misc_feature 1..22: note = chemically synthesized
  source 1..22: mol_type = other DNA
atttctaaaatggcatagtatt

SEQ ID NO: 13916 - DNA, 22 bp, synthetic construct
  misc_feature 1..22: note = chemically synthesized
  source 1..22: mol_type = other DNA
tttctaaaatggcatagtattt

SEQ ID NO: 13917 - DNA, 22 bp, synthetic construct
  misc_feature 1..22: note = chemically synthesized
  source 1..22: mol_type = other DNA
ctaaaatggcatagtattttgt

SEQ ID NO: 13918 - DNA, 22 bp, synthetic construct
  misc_feature 1..22: note = chemically synthesized
  source 1..22: mol_type = other DNA
taaaatggcatagtattttgta

SEQ ID NO: 13919 - DNA, 22 bp, synthetic construct
  misc_feature 1..22: note = chemically synthesized
  source 1..22: mol_type = other DNA
aaatggcatagtattttgtatt

SEQ ID NO: 13920 - DNA, 22 bp, synthetic construct
  misc_feature 1..22: note = chemically synthesized
  source 1..22: mol_type = other DNA
tgtatttgtgaagtcttacaag

SEQ ID NO: 13921 - DNA, 22 bp, synthetic construct
  misc_feature 1..22: note = chemically synthesized
  source 1..22: mol_type = other DNA
gtatttgtgaagtcttacaagg

SEQ ID NO: 13922 - DNA, 22 bp, synthetic construct
  misc_feature 1..22: note = chemically synthesized
  source 1..22: mol_type = other DNA
tatttgtgaagtcttacaaggt

SEQ ID NO: 13923 - DNA, 22 bp, synthetic construct
  misc_feature 1..22: note = chemically synthesized
  source 1..22: mol_type = other DNA
gtgaagtcttacaaggttatct

SEQ ID NO: 13924 - DNA, 22 bp, synthetic construct
  misc_feature 1..22: note = chemically synthesized
  source 1..22: mol_type = other DNA
tgaagtcttacaaggttatctt

SEQ ID NO: 13925 - DNA, 22 bp, synthetic construct
  misc_feature 1..22: note = chemically synthesized
  source 1..22: mol_type = other DNA
acaaggttatcttattaataaa

SEQ ID NO: 13926 - DNA, 22 bp, synthetic construct
  misc_feature 1..22: note = chemically synthesized
  source 1..22: mol_type = other DNA
caaggttatcttattaataaaa

SEQ ID NO: 13927 - DNA, 22 bp, synthetic construct
  misc_feature 1..22: note = chemically synthesized
  source 1..22: mol_type = other DNA
tcttattaataaaattcaaaca

SEQ ID NO: 13928 - DNA, 22 bp, synthetic construct
  misc_feature 1..22: note = chemically synthesized
  source 1..22: mol_type = other DNA
attaataaaattcaaacatcct

SEQ ID NO: 13929 - DNA, 22 bp, synthetic construct
  misc_feature 1..22: note = chemically synthesized
  source 1..22: mol_type = other DNA
ttaataaaattcaaacatccta

SEQ ID NO: 13930 - DNA, 22 bp, synthetic construct
  misc_feature 1..22: note = chemically synthesized
  source 1..22: mol_type = other DNA
ataaaattcaaacatcctaggt

SEQ ID NO: 13931 - DNA, 22 bp, synthetic construct
  misc_feature 1..22: note = chemically synthesized
  source 1..22: mol_type = other DNA
aaacatcctaggtaaaaaaaaa

SEQ ID NO: 13932 - DNA, 22 bp, synthetic construct
  misc_feature 1..22: note = chemically synthesized
  source 1..22: mol_type = other DNA
ggtaaaaaaaaaaaaaggtcag

SEQ ID NO: 13933 - DNA, 22 bp, synthetic construct
  misc_feature 1..22: note = chemically synthesized
  source 1..22: mol_type = other DNA
tttagtgactgtaattttcttt

SEQ ID NO: 13934 - DNA, 22 bp, synthetic construct
  misc_feature 1..22: note = chemically synthesized
  source 1..22: mol_type = other DNA
agtgactgtaattttcttttgc

SEQ ID NO: 13935 - DNA, 22 bp, synthetic construct
  misc_feature 1..22: note = chemically synthesized
  source 1..22: mol_type = other DNA
gtgactgtaattttcttttgcg

SEQ ID NO: 13936 - DNA, 22 bp, synthetic construct
  misc_feature 1..22: note = chemically synthesized
  source 1..22: mol_type = other DNA
taattttcttttgcgcactaag

SEQ ID NO: 13937 - DNA, 22 bp, synthetic construct
  misc_feature 1..22: note = chemically synthesized
  source 1..22: mol_type = other DNA
tcttttgcgcactaaggaaagt

SEQ ID NO: 13938 - DNA, 22 bp, synthetic construct
  misc_feature 1..22: note = chemically synthesized
  source 1..22: mol_type = other DNA
cttttgcgcactaaggaaagtg

SEQ ID NO: 13939 - DNA, 22 bp, synthetic construct
  misc_feature 1..22: note = chemically synthesized
  source 1..22: mol_type = other DNA
ttttgcgcactaaggaaagtgc

SEQ ID NO: 13940 - DNA, 22 bp, synthetic construct
  misc_feature 1..22: note = chemically synthesized
  source 1..22: mol_type = other DNA
ttgcgcactaaggaaagtgcaa

SEQ ID NO: 13941 - DNA, 22 bp, synthetic construct
  misc_feature 1..22: note = chemically synthesized
  source 1..22: mol_type = other DNA
tgcgcactaaggaaagtgcaaa

SEQ ID NO: 13942 - DNA, 22 bp, synthetic construct
  misc_feature 1..22: note = chemically synthesized
  source 1..22: mol_type = other DNA
gcgcactaaggaaagtgcaaag

SEQ ID NO: 13943 - DNA, 22 bp, synthetic construct
  misc_feature 1..22: note = chemically synthesized
  source 1..22: mol_type = other DNA
cgcactaaggaaagtgcaaagt

SEQ ID NO: 13944 - DNA, 22 bp, synthetic construct
  misc_feature 1..22: note = chemically synthesized
  source 1..22: mol_type = other DNA
aggaaagtgcaaagtaacttag

SEQ ID NO: 13945 - DNA, 22 bp, synthetic construct
  misc_feature 1..22: note = chemically synthesized
  source 1..22: mol_type = other DNA
agagtgactgaaacttcacaga

SEQ ID NO: 13946 - DNA, 22 bp, synthetic construct
  misc_feature 1..22: note = chemically synthesized
  source 1..22: mol_type = other DNA
gagtgactgaaacttcacagaa

SEQ ID NO: 13947 - DNA, 22 bp, synthetic construct
  misc_feature 1..22: note = chemically synthesized
  source 1..22: mol_type = other DNA
aaacttcacagaatagggttga

SEQ ID NO: 13948 - DNA, 22 bp, synthetic construct
  misc_feature 1..22: note = chemically synthesized
  source 1..22: mol_type = other DNA
cacagaatagggttgaagattg

SEQ ID NO: 13949 - DNA, 22 bp, synthetic construct
  misc_feature 1..22: note = chemically synthesized
  source 1..22: mol_type = other DNA
acagaatagggttgaagattga

SEQ ID NO: 13950 - DNA, 22 bp, synthetic construct
  misc_feature 1..22: note = chemically synthesized
  source 1..22: mol_type = other DNA
aagattgaattcataactatcc

SEQ ID NO: 13951 - DNA, 22 bp, synthetic construct
  misc_feature 1..22: note = chemically synthesized
  source 1..22: mol_type = other DNA
aattcataactatcccaaagac

SEQ ID NO: 13952 - DNA, 22 bp, synthetic construct
  misc_feature 1..22: note = chemically synthesized
  source 1..22: mol_type = other DNA
ataactatcccaaagacctatc

SEQ ID NO: 13953 - DNA, 22 bp, synthetic construct
  misc_feature 1..22: note = chemically synthesized
  source 1..22: mol_type = other DNA
tcccaaagacctatccattgca

SEQ ID NO: 13954 - DNA, 22 bp, synthetic construct
  misc_feature 1..22: note = chemically synthesized
  source 1..22: mol_type = other DNA
tccattgcactatgctttattt

SEQ ID NO: 13955 - DNA, 22 bp, synthetic construct
  misc_feature 1..22: note = chemically synthesized
  source 1..22: mol_type = other DNA
cactatgctttatttaaaaacc

SEQ ID NO: 13956 - DNA, 22 bp, synthetic construct
  misc_feature 1..22: note = chemically synthesized
  source 1..22: mol_type = other DNA
tgctttatttaaaaaccacaaa

SEQ ID NO: 13957 - DNA, 22 bp, synthetic construct
  misc_feature 1..22: note = chemically synthesized
  source 1..22: mol_type = other DNA
tatttaaaaaccacaaaacctg

SEQ ID NO: 13958 - DNA, 22 bp, synthetic construct
  misc_feature 1..22: note = chemically synthesized
  source 1..22: mol_type = other DNA
atttaaaaaccacaaaacctgt

SEQ ID NO: 13959 - DNA, 22 bp, synthetic construct
  misc_feature 1..22: note = chemically synthesized
  source 1..22: mol_type = other DNA
tttaaaaaccacaaaacctgtg

SEQ ID NO: 13960 - DNA, 22 bp, synthetic construct
  misc_feature 1..22: note = chemically synthesized
  source 1..22: mol_type = other DNA
aaaaaccacaaaacctgtgctg

SEQ ID NO: 13961 - DNA, 22 bp, synthetic construct
  misc_feature 1..22: note = chemically synthesized
  source 1..22: mol_type = other DNA
aaaaccacaaaacctgtgctgt

SEQ ID NO: 13962 - DNA, 22 bp, synthetic construct
  misc_feature 1..22: note = chemically synthesized
  source 1..22: mol_type = other DNA
tgctgttgatctcataaataga

SEQ ID NO: 13963 - DNA, 22 bp, synthetic construct
  misc_feature 1..22: note = chemically synthesized
  source 1..22: mol_type = other DNA
ttgatctcataaatagaacttg

SEQ ID NO: 13964 - DNA, 22 bp, synthetic construct
  misc_feature 1..22: note = chemically synthesized
  source 1..22: mol_type = other DNA
atctcataaatagaacttgtat

SEQ ID NO: 13965 - DNA, 22 bp, synthetic construct
  misc_feature 1..22: note = chemically synthesized
  source 1..22: mol_type = other DNA
ataaatagaacttgtatttata

SEQ ID NO: 13966 - DNA, 22 bp, synthetic construct
  misc_feature 1..22: note = chemically synthesized
  source 1..22: mol_type = other DNA
gtatttatatttattttcattt

SEQ ID NO: 13967 - DNA, 22 bp, synthetic construct
  misc_feature 1..22: note = chemically synthesized
  source 1..22: mol_type = other DNA
tatttatatttattttcatttt

SEQ ID NO: 13968 - DNA, 22 bp, synthetic construct
  misc_feature 1..22: note = chemically synthesized
  source 1..22: mol_type = other DNA
atatttattttcattttagtct

SEQ ID NO: 13969 - DNA, 22 bp, synthetic construct
  misc_feature 1..22: note = chemically synthesized
  source 1..22: mol_type = other DNA
tatttattttcattttagtctg

SEQ ID NO: 13970 - DNA, 22 bp, synthetic construct
  misc_feature 1..22: note = chemically synthesized
  source 1..22: mol_type = other DNA
attttcattttagtctgtcttc

SEQ ID NO: 13971 - DNA, 22 bp, synthetic construct
  misc_feature 1..22: note = chemically synthesized
  source 1..22: mol_type = other DNA
ttttcattttagtctgtcttct

SEQ ID NO: 13972 - DNA, 22 bp, synthetic construct
  misc_feature 1..22: note = chemically synthesized
  source 1..22: mol_type = other DNA
tcattttagtctgtcttcttgg

SEQ ID NO: 13973 - DNA, 22 bp, synthetic construct
  misc_feature 1..22: note = chemically synthesized
  source 1..22: mol_type = other DNA
cattttagtctgtcttcttggt

SEQ ID NO: 13974 - DNA, 22 bp, synthetic construct
  misc_feature 1..22: note = chemically synthesized
  source 1..22: mol_type = other DNA
attttagtctgtcttcttggtt

SEQ ID NO: 13975 - DNA, 22 bp, synthetic construct
  misc_feature 1..22: note = chemically synthesized
  source 1..22: mol_type = other DNA
tagtctgtcttcttggttgctg

SEQ ID NO: 13976 - DNA, 22 bp, synthetic construct
  misc_feature 1..22: note = chemically synthesized
  source 1..22: mol_type = other DNA
agtctgtcttcttggttgctgt

SEQ ID NO: 13977 - DNA, 22 bp, synthetic construct
  misc_feature 1..22: note = chemically synthesized
  source 1..22: mol_type = other DNA
gtctgtcttcttggttgctgtt

SEQ ID NO: 13978 - DNA, 22 bp, synthetic construct
  misc_feature 1..22: note = chemically synthesized
  source 1..22: mol_type = other DNA
tcttcttggttgctgttgatag

SEQ ID NO: 13979 - DNA, 22 bp, synthetic construct
  misc_feature 1..22: note = chemically synthesized
  source 1..22: mol_type = other DNA
cttggttgctgttgatagacac

SEQ ID NO: 13980 - DNA, 22 bp, synthetic construct
  misc_feature 1..22: note = chemically synthesized
  source 1..22: mol_type = other DNA
ttggttgctgttgatagacact

SEQ ID NO: 13981 - DNA, 22 bp, synthetic construct
  misc_feature 1..22: note = chemically synthesized
  source 1..22: mol_type = other DNA
ggttgctgttgatagacactaa

SEQ ID NO: 13982 - DNA, 22 bp, synthetic construct
  misc_feature 1..22: note = chemically synthesized
  source 1..22: mol_type = other DNA
gttgctgttgatagacactaaa

SEQ ID NO: 13983 - DNA, 22 bp, synthetic construct
  misc_feature 1..22: note = chemically synthesized
  source 1..22: mol_type = other DNA
ctgttgatagacactaaaagag

SEQ ID NO: 13984 - DNA, 22 bp, synthetic construct
  misc_feature 1..22: note = chemically synthesized
  source 1..22: mol_type = other DNA
ttgatagacactaaaagagtat

SEQ ID NO: 13985 - DNA, 22 bp, synthetic construct
  misc_feature 1..22: note = chemically synthesized
  source 1..22: mol_type = other DNA
atagacactaaaagagtattag

SEQ ID NO: 13986 - DNA, 22 bp, synthetic construct
  misc_feature 1..22: note = chemically synthesized
  source 1..22: mol_type = other DNA
aaagagtattagatattatcta

SEQ ID NO: 13987 - DNA, 22 bp, synthetic construct
  misc_feature 1..22: note = chemically synthesized
  source 1..22: mol_type = other DNA
gatattatctaagtttgaatat

SEQ ID NO: 13988 - DNA, 22 bp, synthetic construct
  misc_feature 1..22: note = chemically synthesized
  source 1..22: mol_type = other DNA
tctaagtttgaatataaggcta

SEQ ID NO: 13989 - DNA, 22 bp, synthetic construct
  misc_feature 1..22: note = chemically synthesized
  source 1..22: mol_type = other DNA
agtttgaatataaggctataaa

SEQ ID NO: 13990 - DNA, 22 bp, synthetic construct
  misc_feature 1..22: note = chemically synthesized
  source 1..22: mol_type = other DNA
gaatataaggctataaatattt

SEQ ID NO: 13991 - DNA, 22 bp, synthetic construct
  misc_feature 1..22: note = chemically synthesized
  source 1..22: mol_type = other DNA
aatataaggctataaatattta

SEQ ID NO: 13992 - DNA, 22 bp, synthetic construct
  misc_feature 1..22: note = chemically synthesized
  source 1..22: mol_type = other DNA
taaatatttaataatttttaaa

SEQ ID NO: 13993 - DNA, 22 bp, synthetic construct
  misc_feature 1..22: note = chemically synthesized
  source 1..22: mol_type = other DNA
aataatttttaaaatagtattc

SEQ ID NO: 13994 - DNA, 22 bp, synthetic construct
  misc_feature 1..22: note = chemically synthesized
  source 1..22: mol_type = other DNA
ataatttttaaaatagtattct

SEQ ID NO: 13995 - DNA, 22 bp, synthetic construct
  misc_feature 1..22: note = chemically synthesized
  source 1..22: mol_type = other DNA
ttaaaatagtattcttggtaat

SEQ ID NO: 13996 - DNA, 22 bp, synthetic construct
  misc_feature 1..22: note = chemically synthesized
  source 1..22: mol_type = other DNA
taaaatagtattcttggtaatt

SEQ ID NO: 13997 - DNA, 22 bp, synthetic construct
  misc_feature 1..22: note = chemically synthesized
  source 1..22: mol_type = other DNA
aaaatagtattcttggtaattg

SEQ ID NO: 13998 - DNA, 22 bp, synthetic construct
  misc_feature 1..22: note = chemically synthesized
  source 1..22: mol_type = other DNA
aaatagtattcttggtaattga

SEQ ID NO: 13999 - DNA, 22 bp, synthetic construct
  misc_feature 1..22: note = chemically synthesized
  source 1..22: mol_type = other DNA
ttggtaattgaattattcttct

SEQ ID NO: 14000 - DNA, 22 bp, synthetic construct
  misc_feature 1..22: note = chemically synthesized
  source 1..22: mol_type = other DNA
ggtaattgaattattcttctgt

SEQ ID NO: 14001 - DNA, 22 bp, synthetic construct
  misc_feature 1..22: note = chemically synthesized
  source 1..22: mol_type = other DNA
gtaattgaattattcttctgtt

SEQ ID NO: 14002 - DNA, 22 bp, synthetic construct
  misc_feature 1..22: note = chemically synthesized
  source 1..22: mol_type = other DNA
aattattcttctgtttaaaggc

SEQ ID NO: 14003 - DNA, 22 bp, synthetic construct
  misc_feature 1..22: note = chemically synthesized
  source 1..22: mol_type = other DNA
ttcttctgtttaaaggcagaag

SEQ ID NO: 14004 - DNA, 22 bp, synthetic construct
  misc_feature 1..22: note = chemically synthesized
  source 1..22: mol_type = other DNA
ttctgtttaaaggcagaagaaa

SEQ ID NO: 14005 - DNA, 22 bp, synthetic construct
  misc_feature 1..22: note = chemically synthesized
  source 1..22: mol_type = other DNA
ctgtttaaaggcagaagaaata

SEQ ID NO: 14006 - DNA, 22 bp, synthetic construct
  misc_feature 1..22: note = chemically synthesized
  source 1..22: mol_type = other DNA
tgtttaaaggcagaagaaataa

SEQ ID NO: 14007 - DNA, 22 bp, synthetic construct
  misc_feature 1..22: note = chemically synthesized
  source 1..22: mol_type = other DNA
tttaaaggcagaagaaataatt

SEQ ID NO: 14008 - DNA, 22 bp, synthetic construct
  misc_feature 1..22: note = chemically synthesized
  source 1..22: mol_type = other DNA
aaaggcagaagaaataattgaa

SEQ ID NO: 14009 - DNA, 22 bp, synthetic construct
  misc_feature 1..22: note = chemically synthesized
  source 1..22: mol_type = other DNA
aaggcagaagaaataattgaac

SEQ ID NO: 14010 - DNA, 22 bp, synthetic construct
  misc_feature 1..22: note = chemically synthesized
  source 1..22: mol_type = other DNA
aacatcatcctgagtttttctg

SEQ ID NO: 14011 - DNA, 22 bp, synthetic construct
  misc_feature 1..22: note = chemically synthesized
  source 1..22: mol_type = other DNA
agtttttctgtaggaatcagag

SEQ ID NO: 14012 - DNA, 22 bp, synthetic construct
  misc_feature 1..22: note = chemically synthesized
  source 1..22: mol_type = other DNA
ttctgtaggaatcagagcccaa

SEQ ID NO: 14013 - DNA, 22 bp, synthetic construct
  misc_feature 1..22: note = chemically synthesized
  source 1..22: mol_type = other DNA
tctgtaggaatcagagcccaat

SEQ ID NO: 14014 - DNA, 22 bp, synthetic construct
  misc_feature 1..22: note = chemically synthesized
  source 1..22: mol_type = other DNA
ctgtaggaatcagagcccaata

SEQ ID NO: 14015 - DNA, 22 bp, synthetic construct
  misc_feature 1..22: note = chemically synthesized
  source 1..22: mol_type = other DNA
tgtaggaatcagagcccaatat

SEQ ID NO: 14016 - DNA, 22 bp, synthetic construct
  misc_feature 1..22: note = chemically synthesized
  source 1..22: mol_type = other DNA
taggaatcagagcccaatattt

SEQ ID NO: 14017 - DNA, 22 bp, synthetic construct
  misc_feature 1..22: note = chemically synthesized
  source 1..22: mol_type = other DNA
tgaaacaaatgcataatctaag

SEQ ID NO: 14018 - DNA, 22 bp, synthetic construct
  misc_feature 1..22: note = chemically synthesized
  source 1..22: mol_type = other DNA
gaaacaaatgcataatctaagt

SEQ ID NO: 14019 - DNA, 22 bp, synthetic construct
  misc_feature 1..22: note = chemically synthesized
  source 1..22: mol_type = other DNA
aaacaaatgcataatctaagtc

SEQ ID NO: 14020 - DNA, 22 bp, synthetic construct
  misc_feature 1..22: note = chemically synthesized
  source 1..22: mol_type = other DNA
agtcaaatggaaagaaatataa

SEQ ID NO: 14021 - DNA, 22 bp, synthetic construct
  misc_feature 1..22: note = chemically synthesized
  source 1..22: mol_type = other DNA
ttacttcttgttttcttcagta

SEQ ID NO: 14022 - DNA, 22 bp, synthetic construct
  misc_feature 1..22: note = chemically synthesized
  source 1..22: mol_type = other DNA
cttcttgttttcttcagtattt

SEQ ID NO: 14023 - DNA, 22 bp, synthetic construct
  misc_feature 1..22: note = chemically synthesized
  source 1..22: mol_type = other DNA
cttgttttcttcagtatttaac

SEQ ID NO: 14024 - DNA, 22 bp, synthetic construct
  misc_feature 1..22: note = chemically synthesized
  source 1..22: mol_type = other DNA
ttgttttcttcagtatttaaca

SEQ ID NO: 14025 - DNA, 22 bp, synthetic construct
  misc_feature 1..22: note = chemically synthesized
  source 1..22: mol_type = other DNA
gttttcttcagtatttaacaat

SEQ ID NO: 14026 - DNA, 22 bp, synthetic construct
  misc_feature 1..22: note = chemically synthesized
  source 1..22: mol_type = other DNA
ttttcttcagtatttaacaatc

SEQ ID NO: 14027 - DNA, 22 bp, synthetic construct
  misc_feature 1..22: note = chemically synthesized
  source 1..22: mol_type = other DNA
tcttcagtatttaacaatcctt

SEQ ID NO: 14028 - DNA, 22 bp, synthetic construct
  misc_feature 1..22: note = chemically synthesized
  source 1..22: mol_type = other DNA
cttcagtatttaacaatccttt

SEQ ID NO: 14029 - DNA, 22 bp, synthetic construct
  misc_feature 1..22: note = chemically synthesized
  source 1..22: mol_type = other DNA
ttcagtatttaacaatcctttt

SEQ ID NO: 14030 - DNA, 22 bp, synthetic construct
  misc_feature 1..22: note = chemically synthesized
  source 1..22: mol_type = other DNA
cagtatttaacaatcctttttt

SEQ ID NO: 14031 - DNA, 22 bp, synthetic construct
  misc_feature 1..22: note = chemically synthesized
  source 1..22: mol_type = other DNA
agtatttaacaatccttttttt

SEQ ID NO: 14032 - DNA, 22 bp, synthetic construct
  misc_feature 1..22: note = chemically synthesized
  source 1..22: mol_type = other DNA
aacaatccttttttttcttccc

SEQ ID NO: 14033 - DNA, 22 bp, synthetic construct
  misc_feature 1..22: note = chemically synthesized
  source 1..22: mol_type = other DNA
acaatccttttttttcttccct

SEQ ID NO: 14034 - DNA, 22 bp, synthetic construct
  misc_feature 1..22: note = chemically synthesized
  source 1..22: mol_type = other DNA
ttttttcttcccttgcccagac

SEQ ID NO: 14035 - DNA, 22 bp, synthetic construct
  misc_feature 1..22: note = chemically synthesized
  source 1..22: mol_type = other DNA
tttttcttcccttgcccagaca

SEQ ID NO: 14036 - DNA, 22 bp, synthetic construct
  misc_feature 1..22: note = chemically synthesized
  source 1..22: mol_type = other DNA
ttttcttcccttgcccagacaa

SEQ ID NO: 14037 - DNA, 22 bp, synthetic construct
  misc_feature 1..22: note = chemically synthesized
  source 1..22: mol_type = other DNA
tttcttcccttgcccagacaag

SEQ ID NO: 14038 - DNA, 22 bp, synthetic construct
  misc_feature 1..22: note = chemically synthesized
  source 1..22: mol_type = other DNA
ttcttcccttgcccagacaaga

SEQ ID NO: 14039 - DNA, 22 bp, synthetic construct
  misc_feature 1..22: note = chemically synthesized
  source 1..22: mol_type = other DNA
tcttcccttgcccagacaagag

SEQ ID NO: 14040 - DNA, 22 bp, synthetic construct
  misc_feature 1..22: note = chemically synthesized
  source 1..22: mol_type = other DNA
cttcccttgcccagacaagagt

SEQ ID NO: 14041 - DNA, 22 bp, synthetic construct
  misc_feature 1..22: note = chemically synthesized
  source 1..22: mol_type = other DNA
ttcccttgcccagacaagagtg

SEQ ID NO: 14042 - DNA, 22 bp, synthetic construct
  misc_feature 1..22: note = chemically synthesized
  source 1..22: mol_type = other DNA
cccttgcccagacaagagtgag

SEQ ID NO: 14043 - DNA, 22 bp, synthetic construct
  misc_feature 1..22: note = chemically synthesized
  source 1..22: mol_type = other DNA
ccttgcccagacaagagtgagg

SEQ ID NO: 14044 - DNA, 22 bp, synthetic construct
  misc_feature 1..22: note = chemically synthesized
  source 1..22: mol_type = other DNA
gcccagacaagagtgaggttgc

SEQ ID NO: 14045 - DNA, 22 bp, synthetic construct
  misc_feature 1..22: note = chemically synthesized
  source 1..22: mol_type = other DNA
cccagacaagagtgaggttgct

SEQ ID NO: 14046 - DNA, 22 bp, synthetic construct
  misc_feature 1..22: note = chemically synthesized
  source 1..22: mol_type = other DNA
ctcatcggtttaaagatttggg

SEQ ID NO: 14047 - DNA, 22 bp, synthetic construct
  misc_feature 1..22: note = chemically synthesized
  source 1..22: mol_type = other DNA
atcggtttaaagatttgggaga

SEQ ID NO: 14048 - DNA, 22 bp, synthetic construct
  misc_feature 1..22: note = chemically synthesized
  source 1..22: mol_type = other DNA
aaagatttgggagaagaaaatt

SEQ ID NO: 14049 - DNA, 22 bp, synthetic construct
  misc_feature 1..22: note = chemically synthesized
  source 1..22: mol_type = other DNA
aagatttgggagaagaaaattt

SEQ ID NO: 14050 - DNA, 22 bp, synthetic construct
  misc_feature 1..22: note = chemically synthesized
  source 1..22: mol_type = other DNA
gggagaagaaaatttcaaagcc

SEQ ID NO: 14051 - DNA, 22 bp, synthetic construct
  misc_feature 1..22: note = chemically synthesized
  source 1..22: mol_type = other DNA
ggagaagaaaatttcaaagcct

SEQ ID NO: 14052 - DNA, 22 bp, synthetic construct
  misc_feature 1..22: note = chemically synthesized
  source 1..22: mol_type = other DNA
tgaaattttcttctcccaaatc

SEQ ID NO: 14053 - DNA, 22 bp, synthetic construct
  misc_feature 1..22: note = chemically synthesized
  source 1..22: mol_type = other DNA
gaaattttcttctcccaaatct

SEQ ID NO: 14054 - DNA, 22 bp, synthetic construct
  misc_feature 1..22: note = chemically synthesized
  source 1..22: mol_type = other DNA
aaattttcttctcccaaatctt

SEQ ID NO: 14055 - DNA, 22 bp, synthetic construct
  misc_feature 1..22: note = chemically synthesized
  source 1..22: mol_type = other DNA
tcttctcccaaatctttaaacc

SEQ ID NO: 14056 - DNA, 22 bp, synthetic construct
  misc_feature 1..22: note = chemically synthesized
  source 1..22: mol_type = other DNA
cttctcccaaatctttaaaccg

SEQ ID NO: 14057 - DNA, 22 bp, synthetic construct
  misc_feature 1..22: note = chemically synthesized
  source 1..22: mol_type = other DNA
ttctcccaaatctttaaaccga

SEQ ID NO: 14058 - DNA, 22 bp, synthetic construct
  misc_feature 1..22: note = chemically synthesized
  source 1..22: mol_type = other DNA
ctcccaaatctttaaaccgatg

SEQ ID NO: 14059 - DNA, 22 bp, synthetic construct
  misc_feature 1..22: note = chemically synthesized
  source 1..22: mol_type = other DNA
tcccaaatctttaaaccgatga

SEQ ID NO: 14060 - DNA, 22 bp, synthetic construct
  misc_feature 1..22: note = chemically synthesized
  source 1..22: mol_type = other DNA
ccaaatctttaaaccgatgagc

SEQ ID NO: 14061 - DNA, 22 bp, synthetic construct
  misc_feature 1..22: note = chemically synthesized
  source 1..22: mol_type = other DNA
taaaccgatgagcaacctcact

SEQ ID NO: 14062 - DNA, 22 bp, synthetic construct
  misc_feature 1..22: note = chemically synthesized
  source 1..22: mol_type = other DNA
aaaccgatgagcaacctcactc

SEQ ID NO: 14063 - DNA, 22 bp, synthetic construct
  misc_feature 1..22: note = chemically synthesized
  source 1..22: mol_type = other DNA
aaccgatgagcaacctcactct

SEQ ID NO: 14064 - DNA, 22 bp, synthetic construct
  misc_feature 1..22: note = chemically synthesized
  source 1..22: mol_type = other DNA
actcttgtctgggcaagggaag

SEQ ID NO: 14065 - DNA, 22 bp, synthetic construct
  misc_feature 1..22: note = chemically synthesized
  source 1..22: mol_type = other DNA
ttgtctgggcaagggaagaaaa

SEQ ID NO: 14066 - DNA, 22 bp, synthetic construct
  misc_feature 1..22: note = chemically synthesized
  source 1..22: mol_type = other DNA
gtctgggcaagggaagaaaaaa

SEQ ID NO: 14067 - DNA, 22 bp, synthetic construct
  misc_feature 1..22: note = chemically synthesized
  source 1..22: mol_type = other DNA
tctgggcaagggaagaaaaaaa

SEQ ID NO: 14068 - DNA, 22 bp, synthetic construct
  misc_feature 1..22: note = chemically synthesized
  source 1..22: mol_type = other DNA
ggcaagggaagaaaaaaaagga

SEQ ID NO: 14069 - DNA, 22 bp, synthetic construct
  misc_feature 1..22: note = chemically synthesized
  source 1..22: mol_type = other DNA
ttaaatactgaagaaaacaaga

SEQ ID NO: 14070 - DNA, 22 bp, synthetic construct
  misc_feature 1..22: note = chemically synthesized
  source 1..22: mol_type = other DNA
aatactgaagaaaacaagaagt

SEQ ID NO: 14071 - DNA, 22 bp, synthetic construct
  misc_feature 1..22: note = chemically synthesized
  source 1..22: mol_type = other DNA
aagaaaacaagaagtaataatg

SEQ ID NO: 14072 - DNA, 22 bp, synthetic construct
  misc_feature 1..22: note = chemically synthesized
  source 1..22: mol_type = other DNA
ctttttatatttctttccattt

SEQ ID NO: 14073 - DNA, 22 bp, synthetic construct
  misc_feature 1..22: note = chemically synthesized
  source 1..22: mol_type = other DNA
tttatatttctttccatttgac

SEQ ID NO: 14074 - DNA, 22 bp, synthetic construct
  misc_feature 1..22: note = chemically synthesized
  source 1..22: mol_type = other DNA
ttatatttctttccatttgact

SEQ ID NO: 14075 - DNA, 22 bp, synthetic construct
  misc_feature 1..22: note = chemically synthesized
  source 1..22: mol_type = other DNA
tatatttctttccatttgactt

SEQ ID NO: 14076 - DNA, 22 bp, synthetic construct
  misc_feature 1..22: note = chemically synthesized
  source 1..22: mol_type = other DNA
atatttctttccatttgactta

SEQ ID NO: 14077 - DNA, 22 bp, synthetic construct
  misc_feature 1..22: note = chemically synthesized
  source 1..22: mol_type = other DNA
tatttctttccatttgacttag

SEQ ID NO: 14078 - DNA, 22 bp, synthetic construct
  misc_feature 1..22: note = chemically synthesized
  source 1..22: mol_type = other DNA
ctttccatttgacttagattat

SEQ ID NO: 14079 - DNA, 22 bp, synthetic construct
  misc_feature 1..22: note = chemically synthesized
  source 1..22: mol_type = other DNA
tttccatttgacttagattatg

SEQ ID NO: 14080 - DNA, 22 bp, synthetic construct
  misc_feature 1..22: note = chemically synthesized
  source 1..22: mol_type = other DNA
tccatttgacttagattatgca

SEQ ID NO: 14081 - DNA, 22 bp, synthetic construct
  misc_feature 1..22: note = chemically synthesized
  source 1..22: mol_type = other DNA
ccatttgacttagattatgcat

SEQ ID NO: 14082 - DNA, 22 bp, synthetic construct
  misc_feature 1..22: note = chemically synthesized
  source 1..22: mol_type = other DNA
catttgacttagattatgcatt

SEQ ID NO: 14083 - DNA, 22 bp, synthetic construct
  misc_feature 1..22: note = chemically synthesized
  source 1..22: mol_type = other DNA
gacttagattatgcatttgttt

SEQ ID NO: 14084 - DNA, 22 bp, synthetic construct
  misc_feature 1..22: note = chemically synthesized
  source 1..22: mol_type = other DNA
acttagattatgcatttgtttc

SEQ ID NO: 14085 - DNA, 22 bp, synthetic construct
  misc_feature 1..22: note = chemically synthesized
  source 1..22: mol_type = other DNA
agattatgcatttgtttcaaaa

SEQ ID NO: 14086 - DNA, 22 bp, synthetic construct
  misc_feature 1..22: note = chemically synthesized
  source 1..22: mol_type = other DNA
gattatgcatttgtttcaaaat

SEQ ID NO: 14087 - DNA, 22 bp, synthetic construct
  misc_feature 1..22: note = chemically synthesized
  source 1..22: mol_type = other DNA
tgcatttgtttcaaaatattgg

SEQ ID NO: 14088 - DNA, 22 bp, synthetic construct
  misc_feature 1..22: note = chemically synthesized
  source 1..22: mol_type = other DNA
gtttcaaaatattgggctctga

SEQ ID NO: 14089 - DNA, 22 bp, synthetic construct
  misc_feature 1..22: note = chemically synthesized
  source 1..22: mol_type = other DNA
tttcaaaatattgggctctgat

SEQ ID NO: 14090 - DNA, 22 bp, synthetic construct
  misc_feature 1..22: note = chemically synthesized
  source 1..22: mol_type = other DNA
caaaatattgggctctgattcc

SEQ ID NO: 14091 - DNA, 22 bp, synthetic construct
  misc_feature 1..22: note = chemically synthesized
  source 1..22: mol_type = other DNA
aaaatattgggctctgattcct

SEQ ID NO: 14092 - DNA, 22 bp, synthetic construct
  misc_feature 1..22: note = chemically synthesized
  source 1..22: mol_type = other DNA
ggctctgattcctacagaaaaa

SEQ ID NO: 14093 - DNA, 22 bp, synthetic construct
  misc_feature 1..22: note = chemically synthesized
  source 1..22: mol_type = other DNA
tgattcctacagaaaaactcag

SEQ ID NO: 14094 - DNA, 22 bp, synthetic construct
  misc_feature 1..22: note = chemically synthesized
  source 1..22: mol_type = other DNA
attcctacagaaaaactcagga

SEQ ID NO: 14095 - DNA, 22 bp, synthetic construct
  misc_feature 1..22: note = chemically synthesized
  source 1..22: mol_type = other DNA
ctacagaaaaactcaggatgat

SEQ ID NO: 14096 - DNA, 22 bp, synthetic construct
  misc_feature 1..22: note = chemically synthesized
  source 1..22: mol_type = other DNA
cagaaaaactcaggatgatgtt

SEQ ID NO: 14097 - DNA, 22 bp, synthetic construct
  misc_feature 1..22: note = chemically synthesized
  source 1..22: mol_type = other DNA
aggatgatgttcaattatttct

SEQ ID NO: 14098 - DNA, 22 bp, synthetic construct
  misc_feature 1..22: note = chemically synthesized
  source 1..22: mol_type = other DNA
aattatttcttctgcctttaaa

SEQ ID NO: 14099 - DNA, 22 bp, synthetic construct
  misc_feature 1..22: note = chemically synthesized
  source 1..22: mol_type = other DNA
tttcttctgcctttaaacagaa

SEQ ID NO: 14100 - DNA, 22 bp, synthetic construct
  misc_feature 1..22: note = chemically synthesized
  source 1..22: mol_type = other DNA
cttctgcctttaaacagaagaa

SEQ ID NO: 14101 - DNA, 22 bp, synthetic construct
  misc_feature 1..22: note = chemically synthesized
  source 1..22: mol_type = other DNA
ttctgcctttaaacagaagaat

SEQ ID NO: 14102 - DNA, 22 bp, synthetic construct
  misc_feature 1..22: note = chemically synthesized
  source 1..22: mol_type = other DNA
ctgcctttaaacagaagaataa

SEQ ID NO: 14103 - DNA, 22 bp, synthetic construct
  misc_feature 1..22: note = chemically synthesized
  source 1..22: mol_type = other DNA
tgcctttaaacagaagaataat

SEQ ID NO: 14104 - DNA, 22 bp, synthetic construct
  misc_feature 1..22: note = chemically synthesized
  source 1..22: mol_type = other DNA
cctttaaacagaagaataattc

SEQ ID NO: 14105 - DNA, 22 bp, synthetic construct
  misc_feature 1..22: note = chemically synthesized
  source 1..22: mol_type = other DNA
taaacagaagaataattcaatt

SEQ ID NO: 14106 - DNA, 22 bp, synthetic construct
  misc_feature 1..22: note = chemically synthesized
  source 1..22: mol_type = other DNA
aaacagaagaataattcaatta

SEQ ID NO: 14107 - DNA, 22 bp, synthetic construct
  misc_feature 1..22: note = chemically synthesized
  source 1..22: mol_type = other DNA
aacagaagaataattcaattac

SEQ ID NO: 14108 - DNA, 22 bp, synthetic construct
  misc_feature 1..22: note = chemically synthesized
  source 1..22: mol_type = other DNA
aattaccaagaatactatttta

SEQ ID NO: 14109 - DNA, 22 bp, synthetic construct
  misc_feature 1..22: note = chemically synthesized
  source 1..22: mol_type = other DNA
ccaagaatactattttaaaaat

SEQ ID NO: 14110 - DNA, 22 bp, synthetic construct
  misc_feature 1..22: note = chemically synthesized
  source 1..22: mol_type = other DNA
ttttaaaaattattaaatattt

SEQ ID NO: 14111 - DNA, 22 bp, synthetic construct
  misc_feature 1..22: note = chemically synthesized
  source 1..22: mol_type = other DNA
taaaaattattaaatatttata

SEQ ID NO: 14112 - DNA, 22 bp, synthetic construct
  misc_feature 1..22: note = chemically synthesized
  source 1..22: mol_type = other DNA
aaaaattattaaatatttatag

SEQ ID NO: 14113 - DNA, 22 bp, synthetic construct
  misc_feature 1..22: note = chemically synthesized
  source 1..22: mol_type = other DNA
aaaattattaaatatttatagc

SEQ ID NO: 14114 - DNA, 22 bp, synthetic construct
  misc_feature 1..22: note = chemically synthesized
  source 1..22: mol_type = other DNA
ttaaatatttatagccttatat

SEQ ID NO: 14115 - DNA, 22 bp, synthetic construct
  misc_feature 1..22: note = chemically synthesized
  source 1..22: mol_type = other DNA
aatatttatagccttatattca

SEQ ID NO: 14116 - DNA, 22 bp, synthetic construct
  misc_feature 1..22: note = chemically synthesized
  source 1..22: mol_type = other DNA
atagccttatattcaaacttag

SEQ ID NO: 14117 - DNA, 22 bp, synthetic construct
  misc_feature 1..22: note = chemically synthesized
  source 1..22: mol_type = other DNA
tagccttatattcaaacttaga

SEQ ID NO: 14118 - DNA, 22 bp, synthetic construct
  misc_feature 1..22: note = chemically synthesized
  source 1..22: mol_type = other DNA
atattcaaacttagataatatc

SEQ ID NO: 14119 - DNA, 22 bp, synthetic construct
  misc_feature 1..22: note = chemically synthesized
  source 1..22: mol_type = other DNA
tattcaaacttagataatatct

SEQ ID NO: 14120 - DNA, 22 bp, synthetic construct
  misc_feature 1..22: note = chemically synthesized
  source 1..22: mol_type = other DNA
aaacttagataatatctaatac

SEQ ID NO: 14121 - DNA, 22 bp, synthetic construct
  misc_feature 1..22: note = chemically synthesized
  source 1..22: mol_type = other DNA
agataatatctaatactctttt

SEQ ID NO: 14122 - DNA, 22 bp, synthetic construct
  misc_feature 1..22: note = chemically synthesized
  source 1..22: mol_type = other DNA
gataatatctaatactctttta

SEQ ID NO: 14123 - DNA, 22 bp, synthetic construct
  misc_feature 1..22: note = chemically synthesized
  source 1..22: mol_type = other DNA
atactcttttagtgtctatcaa

SEQ ID NO: 14124 - DNA, 22 bp, synthetic construct
  misc_feature 1..22: note = chemically synthesized
  source 1..22: mol_type = other DNA
ttttagtgtctatcaacagcaa

SEQ ID NO: 14125 - DNA, 22 bp, synthetic construct
  misc_feature 1..22: note = chemically synthesized
  source 1..22: mol_type = other DNA
ttagtgtctatcaacagcaacc

SEQ ID NO: 14126 - DNA, 22 bp, synthetic construct
  misc_feature 1..22: note = chemically synthesized
  source 1..22: mol_type = other DNA
tagtgtctatcaacagcaacca

SEQ ID NO: 14127 - DNA, 22 bp, synthetic construct
  misc_feature 1..22: note = chemically synthesized
  source 1..22: mol_type = other DNA
agtgtctatcaacagcaaccaa

SEQ ID NO: 14128 - DNA, 22 bp, synthetic construct
  misc_feature 1..22: note = chemically synthesized
  source 1..22: mol_type = other DNA
gtgtctatcaacagcaaccaag

SEQ ID NO: 14129 - DNA, 22 bp, synthetic construct
  misc_feature 1..22: note = chemically synthesized
  source 1..22: mol_type = other DNA
tcaacagcaaccaagaagacag

SEQ ID NO: 14130 - DNA, 22 bp, synthetic construct
  misc_feature 1..22: note = chemically synthesized
  source 1..22: mol_type = other DNA
aaatgaaaataaatataaatac

SEQ ID NO: 14131 - DNA, 22 bp, synthetic construct
  misc_feature 1..22: note = chemically synthesized
  source 1..22: mol_type = other DNA
tatttatgagatcaacagcaca

SEQ ID NO: 14132 - DNA, 22 bp, synthetic construct
  misc_feature 1..22: note = chemically synthesized
  source 1..22: mol_type = other DNA
tttatgagatcaacagcacagg

SEQ ID NO: 14133 - DNA, 22 bp, synthetic construct
  misc_feature 1..22: note = chemically synthesized
  source 1..22: mol_type = other DNA
atgagatcaacagcacaggttt

SEQ ID NO: 14134 - DNA, 22 bp, synthetic construct
  misc_feature 1..22: note = chemically synthesized
  source 1..22: mol_type = other DNA
tgagatcaacagcacaggtttt

SEQ ID NO: 14135 - DNA, 22 bp, synthetic construct
  misc_feature 1..22: note = chemically synthesized
  source 1..22: mol_type = other DNA
tgtggtttttaaataaagcata

SEQ ID NO: 14136 - DNA, 22 bp, synthetic construct
  misc_feature 1..22: note = chemically synthesized
  source 1..22: mol_type = other DNA
gtggtttttaaataaagcatag

SEQ ID NO: 14137 - DNA, 22 bp, synthetic construct
  misc_feature 1..22: note = chemically synthesized
  source 1..22: mol_type = other DNA
tggtttttaaataaagcatagt

SEQ ID NO: 14138 - DNA, 22 bp, synthetic construct
  misc_feature 1..22: note = chemically synthesized
  source 1..22: mol_type = other DNA
ttaaataaagcatagtgcaatg

SEQ ID NO: 14139 - DNA, 22 bp, synthetic construct
  misc_feature 1..22: note = chemically synthesized
  source 1..22: mol_type = other DNA
taaataaagcatagtgcaatgg

SEQ ID NO: 14140 - DNA, 22 bp, synthetic construct
  misc_feature 1..22: note = chemically synthesized
  source 1..22: mol_type = other DNA
aaataaagcatagtgcaatgga

SEQ ID NO: 14141 - DNA, 22 bp, synthetic construct
  misc_feature 1..22: note = chemically synthesized
  source 1..22: mol_type = other DNA
aataaagcatagtgcaatggat

SEQ ID NO: 14142 - DNA, 22 bp, synthetic construct
  misc_feature 1..22: note = chemically synthesized
  source 1..22: mol_type = other DNA
tgggatagttatgaattcaatc

SEQ ID NO: 14143 - DNA, 22 bp, synthetic construct
  misc_feature 1..22: note = chemically synthesized
  source 1..22: mol_type = other DNA
gggatagttatgaattcaatct

SEQ ID NO: 14144 - DNA, 22 bp, synthetic construct
  misc_feature 1..22: note = chemically synthesized
  source 1..22: mol_type = other DNA
ggatagttatgaattcaatctt

SEQ ID NO: 14145 - DNA, 22 bp, synthetic construct
  misc_feature 1..22: note = chemically synthesized
  source 1..22: mol_type = other DNA
tgaattcaatcttcaaccctat

SEQ ID NO: 14146 - DNA, 22 bp, synthetic construct
  misc_feature 1..22: note = chemically synthesized
  source 1..22: mol_type = other DNA
aatcttcaaccctattctgtga

SEQ ID NO: 14147 - DNA, 22 bp, synthetic construct
  misc_feature 1..22: note = chemically synthesized
  source 1..22: mol_type = other DNA
caaccctattctgtgaagtttc

SEQ ID NO: 14148 - DNA, 22 bp, synthetic construct
  misc_feature 1..22: note = chemically synthesized
  source 1..22: mol_type = other DNA
aaccctattctgtgaagtttca

SEQ ID NO: 14149 - DNA, 22 bp, synthetic construct
  misc_feature 1..22: note = chemically synthesized
  source 1..22: mol_type = other DNA
ttctgtgaagtttcagtcactc

SEQ ID NO: 14150 - DNA, 22 bp, synthetic construct
  misc_feature 1..22: note = chemically synthesized
  source 1..22: mol_type = other DNA
tgtgaagtttcagtcactctaa

SEQ ID NO: 14151 - DNA, 22 bp, synthetic construct
  misc_feature 1..22: note = chemically synthesized
  source 1..22: mol_type = other DNA
tgaagtttcagtcactctaagt

SEQ ID NO: 14152 - DNA, 22 bp, synthetic construct
  misc_feature 1..22: note = chemically synthesized
  source 1..22: mol_type = other DNA
cagtcactctaagttactttgc

SEQ ID NO: 14153 - DNA, 22 bp, synthetic construct
  misc_feature 1..22: note = chemically synthesized
  source 1..22: mol_type = other DNA
agtcactctaagttactttgca

SEQ ID NO: 14154 - DNA, 22 bp, synthetic construct
  misc_feature 1..22: note = chemically synthesized
  source 1..22: mol_type = other DNA
taagttactttgcactttcctt

SEQ ID NO: 14155 - DNA, 22 bp, synthetic construct
  misc_feature 1..22: note = chemically synthesized
  source 1..22: mol_type = other DNA
agttactttgcactttccttag

SEQ ID NO: 14156 - DNA, 22 bp, synthetic construct
  misc_feature 1..22: note = chemically synthesized
  source 1..22: mol_type = other DNA
ctttgcactttccttagtgcgc

SEQ ID NO: 14157 - DNA, 22 bp, synthetic construct
  misc_feature 1..22: note = chemically synthesized
  source 1..22: mol_type = other DNA
tgcactttccttagtgcgcaaa

SEQ ID NO: 14158 - DNA, 22 bp, synthetic construct
  misc_feature 1..22: note = chemically synthesized
  source 1..22: mol_type = other DNA
gcactttccttagtgcgcaaaa

SEQ ID NO: 14159 - DNA, 22 bp, synthetic construct
  misc_feature 1..22: note = chemically synthesized
  source 1..22: mol_type = other DNA
cactttccttagtgcgcaaaag

SEQ ID NO: 14160 - DNA, 22 bp, synthetic construct
  misc_feature 1..22: note = chemically synthesized
  source 1..22: mol_type = other DNA
tccttagtgcgcaaaagaaaat

SEQ ID NO: 14161 - DNA, 22 bp, synthetic construct
  misc_feature 1..22: note = chemically synthesized
  source 1..22: mol_type = other DNA
ccttagtgcgcaaaagaaaatt

SEQ ID NO: 14162 - DNA, 22 bp, synthetic construct
  misc_feature 1..22: note = chemically synthesized
  source 1..22: mol_type = other DNA
cttagtgcgcaaaagaaaatta

SEQ ID NO: 14163 - DNA, 22 bp, synthetic construct
  misc_feature 1..22: note = chemically synthesized
  source 1..22: mol_type = other DNA
agtgcgcaaaagaaaattacag

SEQ ID NO: 14164 - DNA, 22 bp, synthetic construct
  misc_feature 1..22: note = chemically synthesized
  source 1..22: mol_type = other DNA
gtgcgcaaaagaaaattacagt

SEQ ID NO: 14165 - DNA, 22 bp, synthetic construct
  misc_feature 1..22: note = chemically synthesized
  source 1..22: mol_type = other DNA
cagtcactaaacaattctgacc

SEQ ID NO: 14166 - DNA, 22 bp, synthetic construct
  misc_feature 1..22: note = chemically synthesized
  source 1..22: mol_type = other DNA
aacaattctgaccttttttttt

SEQ ID NO: 14167 - DNA, 22 bp, synthetic construct
  misc_feature 1..22: note = chemically synthesized
  source 1..22: mol_type = other DNA
tgacctttttttttttttacct

SEQ ID NO: 14168 - DNA, 22 bp, synthetic construct
  misc_feature 1..22: note = chemically synthesized
  source 1..22: mol_type = other DNA
acctttttttttttttacctag

SEQ ID NO: 14169 - DNA, 22 bp, synthetic construct
  misc_feature 1..22: note = chemically synthesized
  source 1..22: mol_type = other DNA
tttttttttttacctaggatgt

SEQ ID NO: 14170 - DNA, 22 bp, synthetic construct
  misc_feature 1..22: note = chemically synthesized
  source 1..22: mol_type = other DNA
ttttttttttacctaggatgtt

SEQ ID NO: 14171 - DNA, 22 bp, synthetic construct
  misc_feature 1..22: note = chemically synthesized
  source 1..22: mol_type = other DNA
tttttttttacctaggatgttt

SEQ ID NO: 14172 - DNA, 22 bp, synthetic construct
  misc_feature 1..22: note = chemically synthesized
  source 1..22: mol_type = other DNA
ttttttttacctaggatgtttg

SEQ ID NO: 14173 - DNA, 22 bp, synthetic construct
  misc_feature 1..22: note = chemically synthesized
  source 1..22: mol_type = other DNA
tttttttacctaggatgtttga

SEQ ID NO: 14174 - DNA, 22 bp, synthetic construct
  misc_feature 1..22: note = chemically synthesized
  source 1..22: mol_type = other DNA
ttttttacctaggatgtttgaa

SEQ ID NO: 14175 - DNA, 22 bp, synthetic construct
  misc_feature 1..22: note = chemically synthesized
  source 1..22: mol_type = other DNA
tttttacctaggatgtttgaat

SEQ ID NO: 14176 - DNA, 22 bp, synthetic construct
  misc_feature 1..22: note = chemically synthesized
  source 1..22: mol_type = other DNA
ttttacctaggatgtttgaatt

SEQ ID NO: 14177 - DNA, 22 bp, synthetic construct
  misc_feature 1..22: note = chemically synthesized
  source 1..22: mol_type = other DNA
tttacctaggatgtttgaattt

SEQ ID NO: 14178 - DNA, 22 bp, synthetic construct
  misc_feature 1..22: note = chemically synthesized
  source 1..22: mol_type = other DNA
ttacctaggatgtttgaatttt

SEQ ID NO: 14179 - DNA, 22 bp, synthetic construct
  misc_feature 1..22: note = chemically synthesized
  source 1..22: mol_type = other DNA
tacctaggatgtttgaatttta

SEQ ID NO: 14180 - DNA, 22 bp, synthetic construct
  misc_feature 1..22: note = chemically synthesized
  source 1..22: mol_type = other DNA
acctaggatgtttgaattttat

SEQ ID NO: 14181 - DNA, 22 bp, synthetic construct
  misc_feature 1..22: note = chemically synthesized
  source 1..22: mol_type = other DNA
cctaggatgtttgaattttatt

SEQ ID NO: 14182 - DNA, 22 bp, synthetic construct
  misc_feature 1..22: note = chemically synthesized
  source 1..22: mol_type = other DNA
ggatgtttgaattttattaata

SEQ ID NO: 14183 - DNA, 22 bp, synthetic construct
  misc_feature 1..22: note = chemically synthesized
  source 1..22: mol_type = other DNA
gaattttattaataagataacc

SEQ ID NO: 14184 - DNA, 22 bp, synthetic construct
  misc_feature 1..22: note = chemically synthesized
  source 1..22: mol_type = other DNA
aattttattaataagataacct

SEQ ID NO: 14185 - DNA, 22 bp, synthetic construct
  misc_feature 1..22: note = chemically synthesized
  source 1..22: mol_type = other DNA
tattaataagataaccttgtaa

SEQ ID NO: 14186 - DNA, 22 bp, synthetic construct
  misc_feature 1..22: note = chemically synthesized
  source 1..22: mol_type = other DNA
attaataagataaccttgtaag

SEQ ID NO: 14187 - DNA, 22 bp, synthetic construct
  misc_feature 1..22: note = chemically synthesized
  source 1..22: mol_type = other DNA
ttaataagataaccttgtaaga

SEQ ID NO: 14188 - DNA, 22 bp, synthetic construct
  misc_feature 1..22: note = chemically synthesized
  source 1..22: mol_type = other DNA
ataagataaccttgtaagactt

SEQ ID NO: 14189 - DNA, 22 bp, synthetic construct
  misc_feature 1..22: note = chemically synthesized
  source 1..22: mol_type = other DNA
gtaagacttcacaaatacaaaa

SEQ ID NO: 14190 - DNA, 22 bp, synthetic construct
  misc_feature 1..22: note = chemically synthesized
  source 1..22: mol_type = other DNA
taagacttcacaaatacaaaat

SEQ ID NO: 14191 - DNA, 22 bp, synthetic construct
  misc_feature 1..22: note = chemically synthesized
  source 1..22: mol_type = other DNA
cacaaatacaaaatactatgcc

SEQ ID NO: 14192 - DNA, 22 bp, synthetic construct
  misc_feature 1..22: note = chemically synthesized
  source 1..22: mol_type = other DNA
acaaatacaaaatactatgcca

SEQ ID NO: 14193 - DNA, 22 bp, synthetic construct
  misc_feature 1..22: note = chemically synthesized
  source 1..22: mol_type = other DNA
tgccattttagaaataaatgcc

SEQ ID NO: 14194 - DNA, 22 bp, synthetic construct
  misc_feature 1..22: note = chemically synthesized
  source 1..22: mol_type = other DNA
tagaaataaatgccaaaataat

SEQ ID NO: 14195 - DNA, 22 bp, synthetic construct
  misc_feature 1..22: note = chemically synthesized
  source 1..22: mol_type = other DNA
agaaataaatgccaaaataatt

SEQ ID NO: 14196 - DNA, 22 bp, synthetic construct
  misc_feature 1..22: note = chemically synthesized
  source 1..22: mol_type = other DNA
gaaataaatgccaaaataattc

SEQ ID NO: 14197 - DNA, 22 bp, synthetic construct
  misc_feature 1..22: note = chemically synthesized
  source 1..22: mol_type = other DNA
tttaaagatgcagagtttacta

SEQ ID NO: 14198 - DNA, 22 bp, synthetic construct
  misc_feature 1..22: note = chemically synthesized
  source 1..22: mol_type = other DNA
taaagatgcagagtttactaaa

SEQ ID NO: 14199 - DNA, 22 bp, synthetic construct
  misc_feature 1..22: note = chemically synthesized
  source 1..22: mol_type = other DNA
aaagatgcagagtttactaaaa

SEQ ID NO: 14200 - DNA, 22 bp, synthetic construct
  misc_feature 1..22: note = chemically synthesized
  source 1..22: mol_type = other DNA
aagatgcagagtttactaaaac

SEQ ID NO: 14201 - DNA, 22 bp, synthetic construct
  misc_feature 1..22: note = chemically synthesized
  source 1..22: mol_type = other DNA
actaaaactttattttactggg

SEQ ID NO: 14202 - DNA, 22 bp, synthetic construct
  misc_feature 1..22: note = chemically synthesized
  source 1..22: mol_type = other DNA
ctaaaactttattttactggga

SEQ ID NO: 14203 - DNA, 22 bp, synthetic construct
  misc_feature 1..22: note = chemically synthesized
  source 1..22: mol_type = other DNA
aaactttattttactgggaaaa

SEQ ID NO: 14204 - DNA, 22 bp, synthetic construct
  misc_feature 1..22: note = chemically synthesized
  source 1..22: mol_type = other DNA
tattttactgggaaaatagaat

SEQ ID NO: 14205 - DNA, 22 bp, synthetic construct
  misc_feature 1..22: note = chemically synthesized
  source 1..22: mol_type = other DNA
attttactgggaaaatagaata

SEQ ID NO: 14206 - DNA, 22 bp, synthetic construct
  misc_feature 1..22: note = chemically synthesized
  source 1..22: mol_type = other DNA
ttttactgggaaaatagaataa

SEQ ID NO: 14207 - DNA, 22 bp, synthetic construct
  misc_feature 1..22: note = chemically synthesized
  source 1..22: mol_type = other DNA
tactgggaaaatagaataaaag

SEQ ID NO: 14208 - DNA, 22 bp, synthetic construct
  misc_feature 1..22: note = chemically synthesized
  source 1..22: mol_type = other DNA
actgggaaaatagaataaaagt

SEQ ID NO: 14209 - DNA, 22 bp, synthetic construct
  misc_feature 1..22: note = chemically synthesized
  source 1..22: mol_type = other DNA
ctgggaaaatagaataaaagtt

SEQ ID NO: 14210 - DNA, 22 bp, synthetic construct
  misc_feature 1..22: note = chemically synthesized
  source 1..22: mol_type = other DNA
ggaaaatagaataaaagttgaa

SEQ ID NO: 14211 - DNA, 22 bp, synthetic construct
  misc_feature 1..22: note = chemically synthesized
  source 1..22: mol_type = other DNA
aacaatagaaaaatggatttct

SEQ ID NO: 14212 - DNA, 22 bp, synthetic construct
  misc_feature 1..22: note = chemically synthesized
  source 1..22: mol_type = other DNA
cttacgtgcatctcgacgaaac

SEQ ID NO: 14213 - DNA, 22 bp, synthetic construct
  misc_feature 1..22: note = chemically synthesized
  source 1..22: mol_type = other DNA
ttacgtgcatctcgacgaaaca

SEQ ID NO: 14214 - DNA, 22 bp, synthetic construct
  misc_feature 1..22: note = chemically synthesized
  source 1..22: mol_type = other DNA
acgtgcatctcgacgaaacaca

SEQ ID NO: 14215 - DNA, 22 bp, synthetic construct
  misc_feature 1..22: note = chemically synthesized
  source 1..22: mol_type = other DNA
cgtgcatctcgacgaaacacac

SEQ ID NO: 14216 - DNA, 22 bp, synthetic construct
  misc_feature 1..22: note = chemically synthesized
  source 1..22: mol_type = other DNA
gacgaaacacacccctggaata

SEQ ID NO: 14217 - DNA, 22 bp, synthetic construct
  misc_feature 1..22: note = chemically synthesized
  source 1..22: mol_type = other DNA
gaataagccgagctaaagagaa

SEQ ID NO: 14218 - DNA, 22 bp, synthetic construct
  misc_feature 1..22: note = chemically synthesized
  source 1..22: mol_type = other DNA
aagagaaaaagaagggaaataa

SEQ ID NO: 14219 - DNA, 22 bp, synthetic construct
  misc_feature 1..22: note = chemically synthesized
  source 1..22: mol_type = other DNA
cccacttcattgtgccaaaggc

SEQ ID NO: 14220 - DNA, 22 bp, synthetic construct
  misc_feature 1..22: note = chemically synthesized
  source 1..22: mol_type = other DNA
cattgtgccaaaggcgtgtggg

SEQ ID NO: 14221 - DNA, 22 bp, synthetic construct
  misc_feature 1..22: note = chemically synthesized
  source 1..22: mol_type = other DNA
attgtgccaaaggcgtgtgggg

SEQ ID NO: 14222 - DNA, 22 bp, synthetic construct
  misc_feature 1..22: note = chemically synthesized
  source 1..22: mol_type = other DNA
tgccaaaggcgtgtggggttga

SEQ ID NO: 14223 - DNA, 22 bp, synthetic construct
  misc_feature 1..22: note = chemically synthesized
  source 1..22: mol_type = other DNA
acagaagagaaaagctaggaca

SEQ ID NO: 14224 - DNA, 22 bp, synthetic construct
  misc_feature 1..22: note = chemically synthesized
  source 1..22: mol_type = other DNA
ggacaaacggagggaaattagc

SEQ ID NO: 14225 - DNA, 20 bp, synthetic construct
  misc_feature 1..20: note = chemically synthesized
  source 1..20: mol_type = other DNA
aataaatttacccaacaaaa

SEQ ID NO: 14226 - DNA, 20 bp, synthetic construct
  misc_feature 1..20: note = chemically synthesized
  source 1..20: mol_type = other DNA
aatctcttaaaatcataaaa

SEQ ID NO: 14227 - DNA, 20 bp, synthetic construct
  misc_feature 1..20: note = chemically synthesized
  source 1..20: mol_type = other DNA
aaatcataaaaaagtaaaat

SEQ ID NO: 14228 - DNA, 20 bp, synthetic construct
  misc_feature 1..20: note = chemically synthesized
  source 1..20: mol_type = other DNA
gtaaaattagcttttaaaaa

SEQ ID NO: 14229 - DNA, 20 bp, synthetic construct
  misc_feature 1..20: note = chemically synthesized
  source 1..20: mol_type = other DNA
taaaattagcttttaaaaac

SEQ ID NO: 14230 - DNA, 20 bp, synthetic construct
  misc_feature 1..20: note = chemically synthesized
  source 1..20: mol_type = other DNA
aattagcttttaaaaacagg

SEQ ID NO: 14231 - DNA, 20 bp, synthetic construct
  misc_feature 1..20: note = chemically synthesized
  source 1..20: mol_type = other DNA
ttaaaaacaggtagtcacca

SEQ ID NO: 14232 - DNA, 20 bp, synthetic construct
  misc_feature 1..20: note = chemically synthesized
  source 1..20: mol_type = other DNA
tcaccatagcattgaatgtg

SEQ ID NO: 14233 - DNA, 20 bp, synthetic construct
  misc_feature 1..20: note = chemically synthesized
  source 1..20: mol_type = other DNA
tgaatgtgtagtttataata

SEQ ID NO: 14234 - DNA, 20 bp, synthetic construct
  misc_feature 1..20: note = chemically synthesized
  source 1..20: mol_type = other DNA
gtgtagtttataatacagca

SEQ ID NO: 14235 - DNA, 20 bp, synthetic construct
  misc_feature 1..20: note = chemically synthesized
  source 1..20: mol_type = other DNA
acaatttcaaattacctatt

SEQ ID NO: 14236 - DNA, 20 bp, synthetic construct
  misc_feature 1..20: note = chemically synthesized
  source 1..20: mol_type = other DNA
tttcaaattacctattaagt

SEQ ID NO: 14237 - DNA, 20 bp, synthetic construct
  misc_feature 1..20: note = chemically synthesized
  source 1..20: mol_type = other DNA
ctcatttctttgatttcatt

SEQ ID NO: 14238 - DNA, 20 bp, synthetic construct
  misc_feature 1..20: note = chemically synthesized
  source 1..20: mol_type = other DNA
agcattgatctaactcaatg

SEQ ID NO: 14239 - DNA, 20 bp, synthetic construct
  misc_feature 1..20: note = chemically synthesized
  source 1..20: mol_type = other DNA
attgatctaactcaatgtgg

SEQ ID NO: 14240 - DNA, 20 bp, synthetic construct
  misc_feature 1..20: note = chemically synthesized
  source 1..20: mol_type = other DNA
gatctaactcaatgtggaag

SEQ ID NO: 14241 - DNA, 20 bp, synthetic construct
  misc_feature 1..20: note = chemically synthesized
  source 1..20: mol_type = other DNA
atctaactcaatgtggaaga

SEQ ID NO: 14242 - DNA, 20 bp, synthetic construct
  misc_feature 1..20: note = chemically synthesized
  source 1..20: mol_type = other DNA
gaagaaggttacattcgtgc

SEQ ID NO: 14243 - DNA, 20 bp, synthetic construct
  misc_feature 1..20: note = chemically synthesized
  source 1..20: mol_type = other DNA
tacattcgtgcaagttaaca

SEQ ID NO: 14244 - DNA, 20 bp, synthetic construct
  misc_feature 1..20: note = chemically synthesized
  source 1..20: mol_type = other DNA
cctaccaaccttaccttttc

SEQ ID NO: 14245 - DNA, 20 bp, synthetic construct
  misc_feature 1..20: note = chemically synthesized
  source 1..20: mol_type = other DNA
ctaccaaccttaccttttct

SEQ ID NO: 14246 - DNA, 20 bp, synthetic construct
  misc_feature 1..20: note = chemically synthesized
  source 1..20: mol_type = other DNA
taccttttctgggcaaatat

SEQ ID NO: 14247 - DNA, 20 bp, synthetic construct
  misc_feature 1..20: note = chemically synthesized
  source 1..20: mol_type = other DNA
tgggcaaatattggtatata

SEQ ID NO: 14248 - DNA, 20 bp, synthetic construct
  misc_feature 1..20: note = chemically synthesized
  source 1..20: mol_type = other DNA
ggcaaatattggtatatata

SEQ ID NO: 14249 - DNA, 20 bp, synthetic construct
  misc_feature 1..20: note = chemically synthesized
  source 1..20: mol_type = other DNA
atattggtatatatagagtt

SEQ ID NO: 14250 - DNA, 20 bp, synthetic construct
  misc_feature 1..20: note = chemically synthesized
  source 1..20: mol_type = other DNA
ttggtatatatagagttaag

SEQ ID NO: 14251 - DNA, 20 bp, synthetic construct
  misc_feature 1..20: note = chemically synthesized
  source 1..20: mol_type = other DNA
atatatagagttaagaagtc

SEQ ID NO: 14252 - DNA, 20 bp, synthetic construct
  misc_feature 1..20: note = chemically synthesized
  source 1..20: mol_type = other DNA
tatatagagttaagaagtct

SEQ ID NO: 14253 - DNA, 20 bp, synthetic construct
  misc_feature 1..20: note = chemically synthesized
  source 1..20: mol_type = other DNA
aagaagtctaggtctgcttc

SEQ ID NO: 14254 - DNA, 20 bp, synthetic construct
  misc_feature 1..20: note = chemically synthesized
  source 1..20: mol_type = other DNA
aagtctaggtctgcttccag

SEQ ID NO: 14255 - DNA, 20 bp, synthetic construct
  misc_feature 1..20: note = chemically synthesized
  source 1..20: mol_type = other DNA
ggtctgcttccagaagaaaa

SEQ ID NO: 14256 - DNA, 20 bp, synthetic construct
  misc_feature 1..20: note = chemically synthesized
  source 1..20: mol_type = other DNA
gttgcttgaaattgaaaatc

SEQ ID NO: 14257 - DNA, 20 bp, synthetic construct
  misc_feature 1..20: note = chemically synthesized
  source 1..20: mol_type = other DNA
agataaaaatgttcacaatt

SEQ ID NO: 14258 - DNA, 20 bp, synthetic construct
  misc_feature 1..20: note = chemically synthesized
  source 1..20: mol_type = other DNA
ccttctttttattgttcctc

SEQ ID NO: 14259 - DNA, 20 bp, synthetic construct
  misc_feature 1..20: note = chemically synthesized
  source 1..20: mol_type = other DNA
gttcctctagttatttcctc

SEQ ID NO: 14260 - DNA, 20 bp, synthetic construct
  misc_feature 1..20: note = chemically synthesized
  source 1..20: mol_type = other DNA
tatttcctccagaattgatc

SEQ ID NO: 14261 - DNA, 20 bp, synthetic construct
  misc_feature 1..20: note = chemically synthesized
  source 1..20: mol_type = other DNA
atcatttgattctctatctc

SEQ ID NO: 14262 - DNA, 20 bp, synthetic construct
  misc_feature 1..20: note = chemically synthesized
  source 1..20: mol_type = other DNA
catttgattctctatctcca

SEQ ID NO: 14263 - DNA, 20 bp, synthetic construct
  misc_feature 1..20: note = chemically synthesized
  source 1..20: mol_type = other DNA
ctatctccagagccaaaatc

SEQ ID NO: 14264 - DNA, 20 bp, synthetic construct
  misc_feature 1..20: note = chemically synthesized
  source 1..20: mol_type = other DNA
aaaatcaagatttgctatgt

SEQ ID NO: 14265 - DNA, 20 bp, synthetic construct
  misc_feature 1..20: note = chemically synthesized
  source 1..20: mol_type = other DNA
gttagacgatgtaaaaattt

SEQ ID NO: 14266 - DNA, 20 bp, synthetic construct
  misc_feature 1..20: note = chemically synthesized
  source 1..20: mol_type = other DNA
gatgtaaaaattttagccaa

SEQ ID NO: 14267 - DNA, 20 bp, synthetic construct
  misc_feature 1..20: note = chemically synthesized
  source 1..20: mol_type = other DNA
ttttagccaatggcctcctt

SEQ ID NO: 14268 - DNA, 20 bp, synthetic construct
  misc_feature 1..20: note = chemically synthesized
  source 1..20: mol_type = other DNA
agccaatggcctccttcagt

SEQ ID NO: 14269 - DNA, 20 bp, synthetic construct
  misc_feature 1..20: note = chemically synthesized
  source 1..20: mol_type = other DNA
gccaatggcctccttcagtt

SEQ ID NO: 14270 - DNA, 20 bp, synthetic construct
  misc_feature 1..20: note = chemically synthesized
  source 1..20: mol_type = other DNA
ggcctccttcagttgggaca

SEQ ID NO: 14271 - DNA, 20 bp, synthetic construct
  misc_feature 1..20: note = chemically synthesized
  source 1..20: mol_type = other DNA
tcagttgggacatggtctta

SEQ ID NO: 14272 - DNA, 20 bp, synthetic construct
  misc_feature 1..20: note = chemically synthesized
  source 1..20: mol_type = other DNA
gtcttaaagactttgtccat

SEQ ID NO: 14273 - DNA, 20 bp, synthetic construct
  misc_feature 1..20: note = chemically synthesized
  source 1..20: mol_type = other DNA
aagactttgtccataagacg

SEQ ID NO: 14274 - DNA, 20 bp, synthetic construct
  misc_feature 1..20: note = chemically synthesized
  source 1..20: mol_type = other DNA
agactttgtccataagacga

SEQ ID NO: 14275 - DNA, 20 bp, synthetic construct
  misc_feature 1..20: note = chemically synthesized
  source 1..20: mol_type = other DNA
gactttgtccataagacgaa

SEQ ID NO: 14276 - DNA, 20 bp, synthetic construct
  misc_feature 1..20: note = chemically synthesized
  source 1..20: mol_type = other DNA
aaaaactcaacatatttgat

SEQ ID NO: 14277 - DNA, 20 bp, synthetic construct
  misc_feature 1..20: note = chemically synthesized
  source 1..20: mol_type = other DNA
tatgatctatcgctgcaaac

SEQ ID NO: 14278 - DNA, 20 bp, synthetic construct
  misc_feature 1..20: note = chemically synthesized
  source 1..20: mol_type = other DNA
gctgcaaaccagtgaaatca

SEQ ID NO: 14279 - DNA, 20 bp, synthetic construct
  misc_feature 1..20: note = chemically synthesized
  source 1..20: mol_type = other DNA
gcaaaccagtgaaatcaaag

SEQ ID NO: 14280 - DNA, 20 bp, synthetic construct
  misc_feature 1..20: note = chemically synthesized
  source 1..20: mol_type = other DNA
aaccagtgaaatcaaagaag

SEQ ID NO: 14281 - DNA, 20 bp, synthetic construct
  misc_feature 1..20: note = chemically synthesized
  source 1..20: mol_type = other DNA
gtgaaatcaaagaagaagaa

SEQ ID NO: 14282 - DNA, 20 bp, synthetic construct
  misc_feature 1..20: note = chemically synthesized
  source 1..20: mol_type = other DNA
tgaaatcaaagaagaagaaa

SEQ ID NO: 14283 - DNA, 20 bp, synthetic construct
  misc_feature 1..20: note = chemically synthesized
  source 1..20: mol_type = other DNA
aaagaagaagaaaaggaact

SEQ ID NO: 14284 - DNA, 20 bp, synthetic construct
  misc_feature 1..20: note = chemically synthesized
  source 1..20: mol_type = other DNA
gaagaagaaaaggaactgag

SEQ ID NO: 14285 - DNA, 20 bp, synthetic construct
  misc_feature 1..20: note = chemically synthesized
  source 1..20: mol_type = other DNA
aagaactacatataaactac

SEQ ID NO: 14286 - DNA, 20 bp, synthetic construct
  misc_feature 1..20: note = chemically synthesized
  source 1..20: mol_type = other DNA
taaactacaagtcaaaaatg

SEQ ID NO: 14287 - DNA, 20 bp, synthetic construct
  misc_feature 1..20: note = chemically synthesized
  source 1..20: mol_type = other DNA
aactacaagtcaaaaatgaa

SEQ ID NO: 14288 - DNA, 20 bp, synthetic construct
  misc_feature 1..20: note = chemically synthesized
  source 1..20: mol_type = other DNA
actacaagtcaaaaatgaag

SEQ ID NO: 14289 - DNA, 20 bp, synthetic construct
  misc_feature 1..20: note = chemically synthesized
  source 1..20: mol_type = other DNA
aagtcaaaaatgaagaggta

SEQ ID NO: 14290 - DNA, 20 bp, synthetic construct
  misc_feature 1..20: note = chemically synthesized
  source 1..20: mol_type = other DNA
gaactcaactcaaaacttga

SEQ ID NO: 14291 - DNA, 20 bp, synthetic construct
  misc_feature 1..20: note = chemically synthesized
  source 1..20: mol_type = other DNA
ctcaaaacttgaaagcctcc

SEQ ID NO: 14292 - DNA, 20 bp, synthetic construct
  misc_feature 1..20: note = chemically synthesized
  source 1..20: mol_type = other DNA
aaaacttgaaagcctcctag

SEQ ID NO: 14293 - DNA, 20 bp, synthetic construct
  misc_feature 1..20: note = chemically synthesized
  source 1..20: mol_type = other DNA
aaaaattctacttcaacaaa

SEQ ID NO: 14294 - DNA, 20 bp, synthetic construct
  misc_feature 1..20: note = chemically synthesized
  source 1..20: mol_type = other DNA
tcaacaaaaagtgaaatatt

SEQ ID NO: 14295 - DNA, 20 bp, synthetic construct
  misc_feature 1..20: note = chemically synthesized
  source 1..20: mol_type = other DNA
acaaaaagtgaaatatttag

SEQ ID NO: 14296 - DNA, 20 bp, synthetic construct
  misc_feature 1..20: note = chemically synthesized
  source 1..20: mol_type = other DNA
aaaaagtgaaatatttagaa

SEQ ID NO: 14297 - DNA, 20 bp, synthetic construct
  misc_feature 1..20: note = chemically synthesized
  source 1..20: mol_type = other DNA
tcaaaatcaacctgaaactc

SEQ ID NO: 14298 - DNA, 20 bp, synthetic construct
  misc_feature 1..20: note = chemically synthesized
  source 1..20: mol_type = other DNA
acctgaaactccagaacacc

SEQ ID NO: 14299 - DNA, 20 bp, synthetic construct
  misc_feature 1..20: note = chemically synthesized
  source 1..20: mol_type = other DNA
tgaaactccagaacacccag

SEQ ID NO: 14300 - DNA, 20 bp, synthetic construct
  misc_feature 1..20: note = chemically synthesized
  source 1..20: mol_type = other DNA
cccagaagtaacttcactta

SEQ ID NO: 14301 - DNA, 20 bp, synthetic construct
  misc_feature 1..20: note = chemically synthesized
  source 1..20: mol_type = other DNA
gaagtaacttcacttaaagt

SEQ ID NO: 14302 - DNA, 20 bp, synthetic construct
  misc_feature 1..20: note = chemically synthesized
  source 1..20: mol_type = other DNA
gtaacttcacttaaagtaag

SEQ ID NO: 14303 - DNA, 20 bp, synthetic construct
  misc_feature 1..20: note = chemically synthesized
  source 1..20: mol_type = other DNA
cttaaagtaagtagaaaata

SEQ ID NO: 14304 - DNA, 20 bp, synthetic construct
  misc_feature 1..20: note = chemically synthesized
  source 1..20: mol_type = other DNA
taaagtaagtagaaaataaa

SEQ ID NO: 14305 - DNA, 20 bp, synthetic construct
  misc_feature 1..20: note = chemically synthesized
  source 1..20: mol_type = other DNA
aaagtaagtagaaaataaag

SEQ ID NO: 14306 - DNA, 20 bp, synthetic construct
  misc_feature 1..20: note = chemically synthesized
  source 1..20: mol_type = other DNA
aagtaagtagaaaataaaga

SEQ ID NO: 14307 - DNA, 20 bp, synthetic construct
  misc_feature 1..20: note = chemically synthesized
  source 1..20: mol_type = other DNA
tcatgtttatgttttcaatg

SEQ ID NO: 14308 - DNA, 20 bp, synthetic construct
  misc_feature 1..20: note = chemically synthesized
  source 1..20: mol_type = other DNA
cttttaaaaaaaatatttct

SEQ ID NO: 14309 - DNA, 20 bp, synthetic construct
  misc_feature 1..20: note = chemically synthesized
  source 1..20: mol_type = other DNA
ttttaaaaaaaatatttcta

SEQ ID NO: 14310 - DNA, 20 bp, synthetic construct
  misc_feature 1..20: note = chemically synthesized
  source 1..20: mol_type = other DNA
gttgaaatacttttttttcc

SEQ ID NO: 14311 - DNA, 20 bp, synthetic construct
  misc_feature 1..20: note = chemically synthesized
  source 1..20: mol_type = other DNA
tttccaagaaaaataatctc

SEQ ID NO: 14312 - DNA, 20 bp, synthetic construct
  misc_feature 1..20: note = chemically synthesized
  source 1..20: mol_type = other DNA
aaatttcctattataatttc

SEQ ID NO: 14313 - DNA, 20 bp, synthetic construct
  misc_feature 1..20: note = chemically synthesized
  source 1..20: mol_type = other DNA
ttcctattataatttcaagt

SEQ ID NO: 14314 - DNA, 20 bp, synthetic construct
  misc_feature 1..20: note = chemically synthesized
  source 1..20: mol_type = other DNA
tttatatgaaaattacaaat

SEQ ID NO: 14315 - DNA, 20 bp, synthetic construct
  misc_feature 1..20: note = chemically synthesized
  source 1..20: mol_type = other DNA
atcggttaaattatacaatc

SEQ ID NO: 14316 - DNA, 20 bp, synthetic construct
  misc_feature 1..20: note = chemically synthesized
  source 1..20: mol_type = other DNA
tacactattgtaaattactg

SEQ ID NO: 14317 - DNA, 20 bp, synthetic construct
  misc_feature 1..20: note = chemically synthesized
  source 1..20: mol_type = other DNA
acactattgtaaattactga

SEQ ID NO: 14318 - DNA, 20 bp, synthetic construct
  misc_feature 1..20: note = chemically synthesized
  source 1..20: mol_type = other DNA
tattgtaaattactgaaggt

SEQ ID NO: 14319 - DNA, 20 bp, synthetic construct
  misc_feature 1..20: note = chemically synthesized
  source 1..20: mol_type = other DNA
aattactgaaggtaagtaaa

SEQ ID NO: 14320 - DNA, 20 bp, synthetic construct
  misc_feature 1..20: note = chemically synthesized
  source 1..20: mol_type = other DNA
aaaaatttaaaactattctc

SEQ ID NO: 14321 - DNA, 20 bp, synthetic construct
  misc_feature 1..20: note = chemically synthesized
  source 1..20: mol_type = other DNA
ctattctccagtgtttaaaa

SEQ ID NO: 14322 - DNA, 20 bp, synthetic construct
  misc_feature 1..20: note = chemically synthesized
  source 1..20: mol_type = other DNA
ttaaaacagattaaataata

SEQ ID NO: 14323 - DNA, 20 bp, synthetic construct
  misc_feature 1..20: note = chemically synthesized
  source 1..20: mol_type = other DNA
agattaaataatacagtaaa

SEQ ID NO: 14324 - DNA, 20 bp, synthetic construct
  misc_feature 1..20: note = chemically synthesized
  source 1..20: mol_type = other DNA
aaataatacagtaaatggaa

SEQ ID NO: 14325 - DNA, 20 bp, synthetic construct
  misc_feature 1..20: note = chemically synthesized
  source 1..20: mol_type = other DNA
ttattcatatgaaaatatgc

SEQ ID NO: 14326 - DNA, 20 bp, synthetic construct
  misc_feature 1..20: note = chemically synthesized
  source 1..20: mol_type = other DNA
tattcatatgaaaatatgct

SEQ ID NO: 14327 - DNA, 20 bp, synthetic construct
  misc_feature 1..20: note = chemically synthesized
  source 1..20: mol_type = other DNA
tgggctttttcttttaattg

SEQ ID NO: 14328 - DNA, 20 bp, synthetic construct
  misc_feature 1..20: note = chemically synthesized
  source 1..20: mol_type = other DNA
tttttcttttaattgaagtt

SEQ ID NO: 14329 - DNA, 20 bp, synthetic construct
  misc_feature 1..20: note = chemically synthesized
  source 1..20: mol_type = other DNA
aagttcagaaaatcaaattt

SEQ ID NO: 14330 - DNA, 20 bp, synthetic construct
  misc_feature 1..20: note = chemically synthesized
  source 1..20: mol_type = other DNA
gttcagaaaatcaaatttta

SEQ ID NO: 14331 - DNA, 20 bp, synthetic construct
  misc_feature 1..20: note = chemically synthesized
  source 1..20: mol_type = other DNA
agaaaatcaaattttagaga

SEQ ID NO: 14332 - DNA, 20 bp, synthetic construct
  misc_feature 1..20: note = chemically synthesized
  source 1..20: mol_type = other DNA
tacaatttaaataaaatgtt

SEQ ID NO: 14333 - DNA, 20 bp, synthetic construct
  misc_feature 1..20: note = chemically synthesized
  source 1..20: mol_type = other DNA
acaatttaaataaaatgtta

SEQ ID NO: 14334 - DNA, 20 bp, synthetic construct
  misc_feature 1..20: note = chemically synthesized
  source 1..20: mol_type = other DNA
caaaaatatgtgctatttga

SEQ ID NO: 14335 - DNA, 20 bp, synthetic construct
  misc_feature 1..20: note = chemically synthesized
  source 1..20: mol_type = other DNA
aaatatgtgctatttgaaag

SEQ ID NO: 14336 - DNA, 20 bp, synthetic construct
  misc_feature 1..20: note = chemically synthesized
  source 1..20: mol_type = other DNA
gctatttgaaagaagcatac

SEQ ID NO: 14337 - DNA, 20 bp, synthetic construct
  misc_feature 1..20: note = chemically synthesized
  source 1..20: mol_type = other DNA
ctatttgaaagaagcataca

SEQ ID NO: 14338 - DNA, 20 bp, synthetic construct
  misc_feature 1..20: note = chemically synthesized
  source 1..20: mol_type = other DNA
tatttgaaagaagcatacaa

SEQ ID NO: 14339 - DNA, 20 bp, synthetic construct
  misc_feature 1..20: note = chemically synthesized
  source 1..20: mol_type = other DNA
atttgaaagaagcatacaag

SEQ ID NO: 14340 - DNA, 20 bp, synthetic construct
  misc_feature 1..20: note = chemically synthesized
  source 1..20: mol_type = other DNA
tgaaagaagcatacaagggg

SEQ ID NO: 14341 - DNA, 20 bp, synthetic construct
  misc_feature 1..20: note = chemically synthesized
  source 1..20: mol_type = other DNA
gaaagaagcatacaagggga

SEQ ID NO: 14342 - DNA, 20 bp, synthetic construct
  misc_feature 1..20: note = chemically synthesized
  source 1..20: mol_type = other DNA
tcatttttcaaatccattat

SEQ ID NO: 14343 - DNA, 20 bp, synthetic construct
  misc_feature 1..20: note = chemically synthesized
  source 1..20: mol_type = other DNA
ccattattagtttaaaaatt

SEQ ID NO: 14344 - DNA, 20 bp, synthetic construct
  misc_feature 1..20: note = chemically synthesized
  source 1..20: mol_type = other DNA
tttaaaaatttagattatga

SEQ ID NO: 14345 - DNA, 20 bp, synthetic construct
  misc_feature 1..20: note = chemically synthesized
  source 1..20: mol_type = other DNA
tttagattatgatagtgtta

SEQ ID NO: 14346 - DNA, 20 bp, synthetic construct
  misc_feature 1..20: note = chemically synthesized
  source 1..20: mol_type = other DNA
ttagattatgatagtgttac

SEQ ID NO: 14347 - DNA, 20 bp, synthetic construct
  misc_feature 1..20: note = chemically synthesized
  source 1..20: mol_type = other DNA
atagtgttacaggaaattaa

SEQ ID NO: 14348 - DNA, 20 bp, synthetic construct
  misc_feature 1..20: note = chemically synthesized
  source 1..20: mol_type = other DNA
gttacaggaaattaatagaa

SEQ ID NO: 14349 - DNA, 20 bp, synthetic construct
  misc_feature 1..20: note = chemically synthesized
  source 1..20: mol_type = other DNA
caggaaattaatagaaaaga

SEQ ID NO: 14350 - DNA, 20 bp, synthetic construct
  misc_feature 1..20: note = chemically synthesized
  source 1..20: mol_type = other DNA
ggaaattaatagaaaagaaa

SEQ ID NO: 14351 - DNA, 20 bp, synthetic construct
  misc_feature 1..20: note = chemically synthesized
  source 1..20: mol_type = other DNA
gaaattaatagaaaagaaag

SEQ ID NO: 14352 - DNA, 20 bp, synthetic construct
  misc_feature 1..20: note = chemically synthesized
  source 1..20: mol_type = other DNA
ttaatagaaaagaaagagga

SEQ ID NO: 14353 - DNA, 20 bp, synthetic construct
  misc_feature 1..20: note = chemically synthesized
  source 1..20: mol_type = other DNA
accaacctactctctatatc

SEQ ID NO: 14354 - DNA, 20 bp, synthetic construct
  misc_feature 1..20: note = chemically synthesized
  source 1..20: mol_type = other DNA
tctctatatccagacttttg

SEQ ID NO: 14355 - DNA, 20 bp, synthetic construct
  misc_feature 1..20: note = chemically synthesized
  source 1..20: mol_type = other DNA
ccagacttttgtagaaaaac

SEQ ID NO: 14356 - DNA, 20 bp, synthetic construct
  misc_feature 1..20: note = chemically synthesized
  source 1..20: mol_type = other DNA
tttgtagaaaaacaagataa

SEQ ID NO: 14357 - DNA, 20 bp, synthetic construct
  misc_feature 1..20: note = chemically synthesized
  source 1..20: mol_type = other DNA
aaaacaagataatagcatca

SEQ ID NO: 14358 - DNA, 20 bp, synthetic construct
  misc_feature 1..20: note = chemically synthesized
  source 1..20: mol_type = other DNA
atagcatcaaagaccttctc

SEQ ID NO: 14359 - DNA, 20 bp, synthetic construct
  misc_feature 1..20: note = chemically synthesized
  source 1..20: mol_type = other DNA
caaagaccttctccagaccg

SEQ ID NO: 14360 - DNA, 20 bp, synthetic construct
  misc_feature 1..20: note = chemically synthesized
  source 1..20: mol_type = other DNA
agaccttctccagaccgtgg

SEQ ID NO: 14361 - DNA, 20 bp, synthetic construct
  misc_feature 1..20: note = chemically synthesized
  source 1..20: mol_type = other DNA
aatataaacaattaaaccaa

SEQ ID NO: 14362 - DNA, 20 bp, synthetic construct
  misc_feature 1..20: note = chemically synthesized
  source 1..20: mol_type = other DNA
aaacaattaaaccaacagca

SEQ ID NO: 14363 - DNA, 20 bp, synthetic construct
  misc_feature 1..20: note = chemically synthesized
  source 1..20: mol_type = other DNA
ccaacagcatagtcaaataa

SEQ ID NO: 14364 - DNA, 20 bp, synthetic construct
  misc_feature 1..20: note = chemically synthesized
  source 1..20: mol_type = other DNA
gcatagtcaaataaaagaaa

SEQ ID NO: 14365 - DNA, 20 bp, synthetic construct
  misc_feature 1..20: note = chemically synthesized
  source 1..20: mol_type = other DNA
aaataaaagaaatagaaaat

SEQ ID NO: 14366 - DNA, 20 bp, synthetic construct
  misc_feature 1..20: note = chemically synthesized
  source 1..20: mol_type = other DNA
aataaaagaaatagaaaatc

SEQ ID NO: 14367 - DNA, 20 bp, synthetic construct
  misc_feature 1..20: note = chemically synthesized
  source 1..20: mol_type = other DNA
aaagaaatagaaaatcaggt

SEQ ID NO: 14368 - DNA, 20 bp, synthetic construct
  misc_feature 1..20: note = chemically synthesized
  source 1..20: mol_type = other DNA
aaatagaaaatcaggtaagt

SEQ ID NO: 14369 - DNA, 20 bp, synthetic construct
  misc_feature 1..20: note = chemically synthesized
  source 1..20: mol_type = other DNA
caggtaagtcagtattttaa

SEQ ID NO: 14370 - DNA, 20 bp, synthetic construct
  misc_feature 1..20: note = chemically synthesized
  source 1..20: mol_type = other DNA
ggtatgtcccatctttcaca

SEQ ID NO: 14371 - DNA, 20 bp, synthetic construct
  misc_feature 1..20: note = chemically synthesized
  source 1..20: mol_type = other DNA
gtatgtcccatctttcacac

SEQ ID NO: 14372 - DNA, 20 bp, synthetic construct
  misc_feature 1..20: note = chemically synthesized
  source 1..20: mol_type = other DNA
tgaatcctaaaattatttac

SEQ ID NO: 14373 - DNA, 20 bp, synthetic construct
  misc_feature 1..20: note = chemically synthesized
  source 1..20: mol_type = other DNA
aattatttacaagctttaac

SEQ ID NO: 14374 - DNA, 20 bp, synthetic construct
  misc_feature 1..20: note = chemically synthesized
  source 1..20: mol_type = other DNA
acaagctttaactggatcat

SEQ ID NO: 14375 - DNA, 20 bp, synthetic construct
  misc_feature 1..20: note = chemically synthesized
  source 1..20: mol_type = other DNA
catgagtaaaattatcacat

SEQ ID NO: 14376 - DNA, 20 bp, synthetic construct
  misc_feature 1..20: note = chemically synthesized
  source 1..20: mol_type = other DNA
cagcataactgttaaaattg

SEQ ID NO: 14377 - DNA, 20 bp, synthetic construct
  misc_feature 1..20: note = chemically synthesized
  source 1..20: mol_type = other DNA
agcataactgttaaaattgc

SEQ ID NO: 14378 - DNA, 20 bp, synthetic construct
  misc_feature 1..20: note = chemically synthesized
  source 1..20: mol_type = other DNA
tgttaaaattgcaggctctg

SEQ ID NO: 14379 - DNA, 20 bp, synthetic construct
  misc_feature 1..20: note = chemically synthesized
  source 1..20: mol_type = other DNA
aactacctgcatttaaacca

SEQ ID NO: 14380 - DNA, 20 bp, synthetic construct
  misc_feature 1..20: note = chemically synthesized
  source 1..20: mol_type = other DNA
tacttcacccctttatctct

SEQ ID NO: 14381 - DNA, 20 bp, synthetic construct
  misc_feature 1..20: note = chemically synthesized
  source 1..20: mol_type = other DNA
gtttcctcacatatactaca

SEQ ID NO: 14382 - DNA, 20 bp, synthetic construct
  misc_feature 1..20: note = chemically synthesized
  source 1..20: mol_type = other DNA
atatactacaaagataataa

SEQ ID NO: 14383 - DNA, 20 bp, synthetic construct
  misc_feature 1..20: note = chemically synthesized
  source 1..20: mol_type = other DNA
aaagataataacagaactta

SEQ ID NO: 14384 - DNA, 20 bp, synthetic construct
  misc_feature 1..20: note = chemically synthesized
  source 1..20: mol_type = other DNA
aagataataacagaacttat

SEQ ID NO: 14385 - DNA, 20 bp, synthetic construct
  misc_feature 1..20: note = chemically synthesized
  source 1..20: mol_type = other DNA
agaacttataggattattgt

SEQ ID NO: 14386 - DNA, 20 bp, synthetic construct
  misc_feature 1..20: note = chemically synthesized
  source 1..20: mol_type = other DNA
taagaaaaaaaattaattca

SEQ ID NO: 14387 - DNA, 20 bp, synthetic construct
  misc_feature 1..20: note = chemically synthesized
  source 1..20: mol_type = other DNA
gaaaaaaaattaattcatag

SEQ ID NO: 14388 - DNA, 20 bp, synthetic construct
  misc_feature 1..20: note = chemically synthesized
  source 1..20: mol_type = other DNA
catcttactaaaattcaaat

SEQ ID NO: 14389 - DNA, 20 bp, synthetic construct
  misc_feature 1..20: note = chemically synthesized
  source 1..20: mol_type = other DNA
ctttgctcaaaaccacacaa

SEQ ID NO: 14390 - DNA, 20 bp, synthetic construct
  misc_feature 1..20: note = chemically synthesized
  source 1..20: mol_type = other DNA
gctttccatttcactcatat

SEQ ID NO: 14391 - DNA, 20 bp, synthetic construct
  misc_feature 1..20: note = chemically synthesized
  source 1..20: mol_type = other DNA
tttcactcatattggctctt

SEQ ID NO: 14392 - DNA, 20 bp, synthetic construct
  misc_feature 1..20: note = chemically synthesized
  source 1..20: mol_type = other DNA
tcatattggctctttagacc

SEQ ID NO: 14393 - DNA, 20 bp, synthetic construct
  misc_feature 1..20: note = chemically synthesized
  source 1..20: mol_type = other DNA
ttgggtaatcttggtctaaa

SEQ ID NO: 14394 - DNA, 20 bp, synthetic construct
  misc_feature 1..20: note = chemically synthesized
  source 1..20: mol_type = other DNA
ttggtctaaagagccaatat

SEQ ID NO: 14395 - DNA, 20 bp, synthetic construct
  misc_feature 1..20: note = chemically synthesized
  source 1..20: mol_type = other DNA
aagagccaatatgagtgaaa

SEQ ID NO: 14396 - DNA, 20 bp, synthetic construct
  misc_feature 1..20: note = chemically synthesized
  source 1..20: mol_type = other DNA
gccaatatgagtgaaatgga

SEQ ID NO: 14397 - DNA, 20 bp, synthetic construct
  misc_feature 1..20: note = chemically synthesized
  source 1..20: mol_type = other DNA
tgaaatggaaagctattgtg

SEQ ID NO: 14398 - DNA, 20 bp, synthetic construct
  misc_feature 1..20: note = chemically synthesized
  source 1..20: mol_type = other DNA
gaaagctattgtgtggtttt

SEQ ID NO: 14399 - DNA, 20 bp, synthetic construct
  misc_feature 1..20: note = chemically synthesized
  source 1..20: mol_type = other DNA
ctattgtgtggttttgagca

SEQ ID NO: 14400 - DNA, 20 bp, synthetic construct
  misc_feature 1..20: note = chemically synthesized
  source 1..20: mol_type = other DNA
attgtgtggttttgagcaaa

SEQ ID NO: 14401 - DNA, 20 bp, synthetic construct
  misc_feature 1..20: note = chemically synthesized
  source 1..20: mol_type = other DNA
acatgatctaatttgaattt

SEQ ID NO: 14402 - DNA, 20 bp, synthetic construct
  misc_feature 1..20: note = chemically synthesized
  source 1..20: mol_type = other DNA
gatctaatttgaattttagt

SEQ ID NO: 14403 - DNA, 20 bp, synthetic construct
  misc_feature 1..20: note = chemically synthesized
  source 1..20: mol_type = other DNA
gaattttagtaagatgacat

SEQ ID NO: 14404 - DNA, 20 bp, synthetic construct
  misc_feature 1..20: note = chemically synthesized
  source 1..20: mol_type = other DNA
ttttcttacaataatcctat

SEQ ID NO: 14405 - DNA, 20 bp, synthetic construct
  misc_feature 1..20: note = chemically synthesized
  source 1..20: mol_type = other DNA
aagttctgttattatctttg

SEQ ID NO: 14406 - DNA, 20 bp, synthetic construct
  misc_feature 1..20: note = chemically synthesized
  source 1..20: mol_type = other DNA
attatctttgtagtatatgt

SEQ ID NO: 14407 - DNA, 20 bp, synthetic construct
  misc_feature 1..20: note = chemically synthesized
  source 1..20: mol_type = other DNA
ttatctttgtagtatatgtg

SEQ ID NO: 14408 - DNA, 20 bp, synthetic construct
  misc_feature 1..20: note = chemically synthesized
  source 1..20: mol_type = other DNA
gtagtatatgtgaggaaact

SEQ ID NO: 14409 - DNA, 20 bp, synthetic construct
  misc_feature 1..20: note = chemically synthesized
  source 1..20: mol_type = other DNA
agtatatgtgaggaaactga

SEQ ID NO: 14410 - DNA, 20 bp, synthetic construct
  misc_feature 1..20: note = chemically synthesized
  source 1..20: mol_type = other DNA
tgtgaggaaactgagagata

SEQ ID NO: 14411 - DNA, 20 bp, synthetic construct
  misc_feature 1..20: note = chemically synthesized
  source 1..20: mol_type = other DNA
gtgaggaaactgagagataa

SEQ ID NO: 14412 - DNA, 20 bp, synthetic construct
  misc_feature 1..20: note = chemically synthesized
  source 1..20: mol_type = other DNA
tgaggaaactgagagataaa

SEQ ID NO: 14413 - DNA, 20 bp, synthetic construct
  misc_feature 1..20: note = chemically synthesized
  source 1..20: mol_type = other DNA
gaggaaactgagagataaag

SEQ ID NO: 14414 - DNA, 20 bp, synthetic construct
  misc_feature 1..20: note = chemically synthesized
  source 1..20: mol_type = other DNA
aactgagagataaaggggtg

SEQ ID NO: 14415 - DNA, 20 bp, synthetic construct
  misc_feature 1..20: note = chemically synthesized
  source 1..20: mol_type = other DNA
aggggtgaagtaatttattc

SEQ ID NO: 14416 - DNA, 20 bp, synthetic construct
  misc_feature 1..20: note = chemically synthesized
  source 1..20: mol_type = other DNA
ggggtgaagtaatttattca

SEQ ID NO: 14417 - DNA, 20 bp, synthetic construct
  misc_feature 1..20: note = chemically synthesized
  source 1..20: mol_type = other DNA
aatttattcaaggtcacaca

SEQ ID NO: 14418 - DNA, 20 bp, synthetic construct
  misc_feature 1..20: note = chemically synthesized
  source 1..20: mol_type = other DNA
ttcaaggtcacacaaagttt

SEQ ID NO: 14419 - DNA, 20 bp, synthetic construct
  misc_feature 1..20: note = chemically synthesized
  source 1..20: mol_type = other DNA
caaggtcacacaaagtttta

SEQ ID NO: 14420 - DNA, 20 bp, synthetic construct
  misc_feature 1..20: note = chemically synthesized
  source 1..20: mol_type = other DNA
cacacaaagttttagagcca

SEQ ID NO: 14421 - DNA, 20 bp, synthetic construct
  misc_feature 1..20: note = chemically synthesized
  source 1..20: mol_type = other DNA
ttagagccatggtttaaatg

SEQ ID NO: 14422 - DNA, 20 bp, synthetic construct
  misc_feature 1..20: note = chemically synthesized
  source 1..20: mol_type = other DNA
tagagccatggtttaaatgc

SEQ ID NO: 14423 - DNA, 20 bp, synthetic construct
  misc_feature 1..20: note = chemically synthesized
  source 1..20: mol_type = other DNA
agccatggtttaaatgcagg

SEQ ID NO: 14424 - DNA, 20 bp, synthetic construct
  misc_feature 1..20: note = chemically synthesized
  source 1..20: mol_type = other DNA
tttaaatgcaggtagtttat

SEQ ID NO: 14425 - DNA, 20 bp, synthetic construct
  misc_feature 1..20: note = chemically synthesized
  source 1..20: mol_type = other DNA
tgcaggtagtttattagctt

SEQ ID NO: 14426 - DNA, 20 bp, synthetic construct
  misc_feature 1..20: note = chemically synthesized
  source 1..20: mol_type = other DNA
caggtagtttattagcttca

SEQ ID NO: 14427 - DNA, 20 bp, synthetic construct
  misc_feature 1..20: note = chemically synthesized
  source 1..20: mol_type = other DNA
ttcagagcctgcaattttaa

SEQ ID NO: 14428 - DNA, 20 bp, synthetic construct
  misc_feature 1..20: note = chemically synthesized
  source 1..20: mol_type = other DNA
tgataattttactcatgatc

SEQ ID NO: 14429 - DNA, 20 bp, synthetic construct
  misc_feature 1..20: note = chemically synthesized
  source 1..20: mol_type = other DNA
ttttactcatgatccagtta

SEQ ID NO: 14430 - DNA, 20 bp, synthetic construct
  misc_feature 1..20: note = chemically synthesized
  source 1..20: mol_type = other DNA
ttaaagcttgtaaataattt

SEQ ID NO: 14431 - DNA, 20 bp, synthetic construct
  misc_feature 1..20: note = chemically synthesized
  source 1..20: mol_type = other DNA
taaagcttgtaaataatttt

SEQ ID NO: 14432 - DNA, 20 bp, synthetic construct
  misc_feature 1..20: note = chemically synthesized
  source 1..20: mol_type = other DNA
ttgtaaataattttaggatt

SEQ ID NO: 14433 - DNA, 20 bp, synthetic construct
  misc_feature 1..20: note = chemically synthesized
  source 1..20: mol_type = other DNA
tttaggattcagtgttttta

SEQ ID NO: 14434 - DNA, 20 bp, synthetic construct
  misc_feature 1..20: note = chemically synthesized
  source 1..20: mol_type = other DNA
gtttttacagacctgtgtga

SEQ ID NO: 14435 - DNA, 20 bp, synthetic construct
  misc_feature 1..20: note = chemically synthesized
  source 1..20: mol_type = other DNA
ttacagacctgtgtgaaaga

SEQ ID NO: 14436 - DNA, 20 bp, synthetic construct
  misc_feature 1..20: note = chemically synthesized
  source 1..20: mol_type = other DNA
tacagacctgtgtgaaagat

SEQ ID NO: 14437 - DNA, 20 bp, synthetic construct
  misc_feature 1..20: note = chemically synthesized
  source 1..20: mol_type = other DNA
cttttatttgactatgctgt

SEQ ID NO: 14438 - DNA, 20 bp, synthetic construct
  misc_feature 1..20: note = chemically synthesized
  source 1..20: mol_type = other DNA
gttggtttaattgtttatat

SEQ ID NO: 14439 - DNA, 20 bp, synthetic construct
  misc_feature 1..20: note = chemically synthesized
  source 1..20: mol_type = other DNA
ttgtttatattggtcttcca

SEQ ID NO: 14440 - DNA, 20 bp, synthetic construct
  misc_feature 1..20: note = chemically synthesized
  source 1..20: mol_type = other DNA
tatattggtcttccacggtc

SEQ ID NO: 14441 - DNA, 20 bp, synthetic construct
  misc_feature 1..20: note = chemically synthesized
  source 1..20: mol_type = other DNA
tattggtcttccacggtctg

SEQ ID NO: 14442 - DNA, 20 bp, synthetic construct
  misc_feature 1..20: note = chemically synthesized
  source 1..20: mol_type = other DNA
tggtcttccacggtctggag

SEQ ID NO: 14443 - DNA, 20 bp, synthetic construct
  misc_feature 1..20: note = chemically synthesized
  source 1..20: mol_type = other DNA
ggtcttccacggtctggaga

SEQ ID NO: 14444 - DNA, 20 bp, synthetic construct
  misc_feature 1..20: note = chemically synthesized
  source 1..20: mol_type = other DNA
attatcttgtttttctacaa

SEQ ID NO: 14445 - DNA, 20 bp, synthetic construct
  misc_feature 1..20: note = chemically synthesized
  source 1..20: mol_type = other DNA
cttgtttttctacaaaagtc

SEQ ID NO: 14446 - DNA, 20 bp, synthetic construct
  misc_feature 1..20: note = chemically synthesized
  source 1..20: mol_type = other DNA
tttctacaaaagtctggata

SEQ ID NO: 14447 - DNA, 20 bp, synthetic construct
  misc_feature 1..20: note = chemically synthesized
  source 1..20: mol_type = other DNA
tctacaaaagtctggatata

SEQ ID NO: 14448 - DNA, 20 bp, synthetic construct
  misc_feature 1..20: note = chemically synthesized
  source 1..20: mol_type = other DNA
tacaaaagtctggatataga

SEQ ID NO: 14449 - DNA, 20 bp, synthetic construct
  misc_feature 1..20: note = chemically synthesized
  source 1..20: mol_type = other DNA
aaaagtctggatatagagag

SEQ ID NO: 14450 - DNA, 20 bp, synthetic construct
  misc_feature 1..20: note = chemically synthesized
  source 1..20: mol_type = other DNA
aaagtctggatatagagagt

SEQ ID NO: 14451 - DNA, 20 bp, synthetic construct
  misc_feature 1..20: note = chemically synthesized
  source 1..20: mol_type = other DNA
tctggatatagagagtaggt

SEQ ID NO: 14452 - DNA, 20 bp, synthetic construct
  misc_feature 1..20: note = chemically synthesized
  source 1..20: mol_type = other DNA
atagagagtaggttggttat

SEQ ID NO: 14453 - DNA, 20 bp, synthetic construct
  misc_feature 1..20: note = chemically synthesized
  source 1..20: mol_type = other DNA
ctaaatttttaaactaataa

SEQ ID NO: 14454 - DNA, 20 bp, synthetic construct
  misc_feature 1..20: note = chemically synthesized
  source 1..20: mol_type = other DNA
tggatttgaaaaatgaatat

SEQ ID NO: 14455 - DNA, 20 bp, synthetic construct
  misc_feature 1..20: note = chemically synthesized
  source 1..20: mol_type = other DNA
ccttgtatgcttctttcaaa

SEQ ID NO: 14456 - DNA, 20 bp, synthetic construct
  misc_feature 1..20: note = chemically synthesized
  source 1..20: mol_type = other DNA
attttctgaacttcaattaa

SEQ ID NO: 14457 - DNA, 20 bp, synthetic construct
  misc_feature 1..20: note = chemically synthesized
  source 1..20: mol_type = other DNA
tgaacttcaattaaaagaaa

SEQ ID NO: 14458 - DNA, 20 bp, synthetic construct
  misc_feature 1..20: note = chemically synthesized
  source 1..20: mol_type = other DNA
ttcaattaaaagaaaaagcc

SEQ ID NO: 14459 - DNA, 20 bp, synthetic construct
  misc_feature 1..20: note = chemically synthesized
  source 1..20: mol_type = other DNA
atttaatctgttttaaacac

SEQ ID NO: 14460 - DNA, 20 bp, synthetic construct
  misc_feature 1..20: note = chemically synthesized
  source 1..20: mol_type = other DNA
ttaatctgttttaaacactg

SEQ ID NO: 14461 - DNA, 20 bp, synthetic construct
  misc_feature 1..20: note = chemically synthesized
  source 1..20: mol_type = other DNA
ctgttttaaacactggagaa

SEQ ID NO: 14462 - DNA, 20 bp, synthetic construct
  misc_feature 1..20: note = chemically synthesized
  source 1..20: mol_type = other DNA
tttaactttttacttacctt

SEQ ID NO: 14463 - DNA, 20 bp, synthetic construct
  misc_feature 1..20: note = chemically synthesized
  source 1..20: mol_type = other DNA
ttaccttcagtaatttacaa

SEQ ID NO: 14464 - DNA, 20 bp, synthetic construct
  misc_feature 1..20: note = chemically synthesized
  source 1..20: mol_type = other DNA
tttacaatagtgtaatgaca

SEQ ID NO: 14465 - DNA, 20 bp, synthetic construct
  misc_feature 1..20: note = chemically synthesized
  source 1..20: mol_type = other DNA
agtgtaatgacatagtgttc

SEQ ID NO: 14466 - DNA, 20 bp, synthetic construct
  misc_feature 1..20: note = chemically synthesized
  source 1..20: mol_type = other DNA
tcatataaaatgcaaatttt

SEQ ID NO: 14467 - DNA, 20 bp, synthetic construct
  misc_feature 1..20: note = chemically synthesized
  source 1..20: mol_type = other DNA
agtgttttcatatataacat

SEQ ID NO: 14468 - DNA, 20 bp, synthetic construct
  misc_feature 1..20: note = chemically synthesized
  source 1..20: mol_type = other DNA
gtgttttcatatataacatt

SEQ ID NO: 14469 - DNA, 20 bp, synthetic construct
  misc_feature 1..20: note = chemically synthesized
  source 1..20: mol_type = other DNA
tgttttcatatataacatta

SEQ ID NO: 14470 - DNA, 20 bp, synthetic construct
  misc_feature 1..20: note = chemically synthesized
  source 1..20: mol_type = other DNA
aaactaacttgaaattataa

SEQ ID NO: 14471 - DNA, 20 bp, synthetic construct
  misc_feature 1..20: note = chemically synthesized
  source 1..20: mol_type = other DNA
aactaacttgaaattataat

SEQ ID NO: 14472 - DNA, 20 bp, synthetic construct
  misc_feature 1..20: note = chemically synthesized
  source 1..20: mol_type = other DNA
taataggaaattttattttc

SEQ ID NO: 14473 - DNA, 20 bp, synthetic construct
  misc_feature 1..20: note = chemically synthesized
  source 1..20: mol_type = other DNA
ataggaaattttattttctg

SEQ ID NO: 14474 - DNA, 20 bp, synthetic construct
  misc_feature 1..20: note = chemically synthesized
  source 1..20: mol_type = other DNA
tttctggagattatttttct

SEQ ID NO: 14475 - DNA, 20 bp, synthetic construct
  misc_feature 1..20: note = chemically synthesized
  source 1..20: mol_type = other DNA
attatttttcttggaaaaaa

SEQ ID NO: 14476 - DNA, 20 bp, synthetic construct
  misc_feature 1..20: note = chemically synthesized
  source 1..20: mol_type = other DNA
agtatttcaacaatgcaaca

SEQ ID NO: 14477 - DNA, 20 bp, synthetic construct
  misc_feature 1..20: note = chemically synthesized
  source 1..20: mol_type = other DNA
atgcaacaaagtatttcaaa

SEQ ID NO: 14478 - DNA, 20 bp, synthetic construct
  misc_feature 1..20: note = chemically synthesized
  source 1..20: mol_type = other DNA
gtatttcaaatggcatgcct

SEQ ID NO: 14479 - DNA, 20 bp, synthetic construct
  misc_feature 1..20: note = chemically synthesized
  source 1..20: mol_type = other DNA
cttagaaatattttttttaa

SEQ ID NO: 14480 - DNA, 20 bp, synthetic construct
  misc_feature 1..20: note = chemically synthesized
  source 1..20: mol_type = other DNA
ctttattttctacttacttt

SEQ ID NO: 14481 - DNA, 20 bp, synthetic construct
  misc_feature 1..20: note = chemically synthesized
  source 1..20: mol_type = other DNA
ttttctacttactttaagtg

SEQ ID NO: 14482 - DNA, 20 bp, synthetic construct
  misc_feature 1..20: note = chemically synthesized
  source 1..20: mol_type = other DNA
actttaagtgaagttacttc

SEQ ID NO: 14483 - DNA, 20 bp, synthetic construct
  misc_feature 1..20: note = chemically synthesized
  source 1..20: mol_type = other DNA
ctttaagtgaagttacttct

SEQ ID NO: 14484 - DNA, 20 bp, synthetic construct
  misc_feature 1..20: note = chemically synthesized
  source 1..20: mol_type = other DNA
gaagttacttctgggtgttc

SEQ ID NO: 14485 - DNA, 20 bp, synthetic construct
  misc_feature 1..20: note = chemically synthesized
  source 1..20: mol_type = other DNA
agttacttctgggtgttctg

SEQ ID NO: 14486 - DNA, 20 bp, synthetic construct
  misc_feature 1..20: note = chemically synthesized
  source 1..20: mol_type = other DNA
ttctgggtgttctggagttt

SEQ ID NO: 14487 - DNA, 20 bp, synthetic construct
  misc_feature 1..20: note = chemically synthesized
  source 1..20: mol_type = other DNA
tctgggtgttctggagtttc

SEQ ID NO: 14488 - DNA, 20 bp, synthetic construct
  misc_feature 1..20: note = chemically synthesized
  source 1..20: mol_type = other DNA
tttcaggttgattttgaatt

SEQ ID NO: 14489 - DNA, 20 bp, synthetic construct
  misc_feature 1..20: note = chemically synthesized
  source 1..20: mol_type = other DNA
aggttgattttgaattaagt

SEQ ID NO: 14490 - DNA, 20 bp, synthetic construct
  misc_feature 1..20: note = chemically synthesized
  source 1..20: mol_type = other DNA
tgattttgaattaagttagt

SEQ ID NO: 14491 - DNA, 20 bp, synthetic construct
  misc_feature 1..20: note = chemically synthesized
  source 1..20: mol_type = other DNA
aaatatttcactttttgttg

SEQ ID NO: 14492 - DNA, 20 bp, synthetic construct
  misc_feature 1..20: note = chemically synthesized
  source 1..20: mol_type = other DNA
tatttcactttttgttgaag

SEQ ID NO: 14493 - DNA, 20 bp, synthetic construct
  misc_feature 1..20: note = chemically synthesized
  source 1..20: mol_type = other DNA
tgaagtagaattttttcttc

SEQ ID NO: 14494 - DNA, 20 bp, synthetic construct
  misc_feature 1..20: note = chemically synthesized
  source 1..20: mol_type = other DNA
gaagtagaattttttcttct

SEQ ID NO: 14495 - DNA, 20 bp, synthetic construct
  misc_feature 1..20: note = chemically synthesized
  source 1..20: mol_type = other DNA
agtagaattttttcttctag

SEQ ID NO: 14496 - DNA, 20 bp, synthetic construct
  misc_feature 1..20: note = chemically synthesized
  source 1..20: mol_type = other DNA
gtagaattttttcttctagg

SEQ ID NO: 14497 - DNA, 20 bp, synthetic construct
  misc_feature 1..20: note = chemically synthesized
  source 1..20: mol_type = other DNA
ttttcttctaggaggctttc

SEQ ID NO: 14498 - DNA, 20 bp, synthetic construct
  misc_feature 1..20: note = chemically synthesized
  source 1..20: mol_type = other DNA
ctaggaggctttcaagtttt

SEQ ID NO: 14499 - DNA, 20 bp, synthetic construct
  misc_feature 1..20: note = chemically synthesized
  source 1..20: mol_type = other DNA
aggctttcaagttttgagtt

SEQ ID NO: 14500 - DNA, 20 bp, synthetic construct
  misc_feature 1..20: note = chemically synthesized
  source 1..20: mol_type = other DNA
tcaagttttgagttgagttc

SEQ ID NO: 14501 - DNA, 20 bp, synthetic construct
  misc_feature 1..20: note = chemically synthesized
  source 1..20: mol_type = other DNA
acctcttcatttttgacttg

SEQ ID NO: 14502 - DNA, 20 bp, synthetic construct
  misc_feature 1..20: note = chemically synthesized
  source 1..20: mol_type = other DNA
tttgacttgtagtttatatg

SEQ ID NO: 14503 - DNA, 20 bp, synthetic construct
  misc_feature 1..20: note = chemically synthesized
  source 1..20: mol_type = other DNA
agtttatatgtagttcttct

SEQ ID NO: 14504 - DNA, 20 bp, synthetic construct
  misc_feature 1..20: note = chemically synthesized
  source 1..20: mol_type = other DNA
ttcttcttctttgatttcac

SEQ ID NO: 14505 - DNA, 20 bp, synthetic construct
  misc_feature 1..20: note = chemically synthesized
  source 1..20: mol_type = other DNA
tctttgatttcactggtttg

SEQ ID NO: 14506 - DNA, 20 bp, synthetic construct
  misc_feature 1..20: note = chemically synthesized
  source 1..20: mol_type = other DNA
atttcactggtttgcagcga

SEQ ID NO: 14507 - DNA, 20 bp, synthetic construct
  misc_feature 1..20: note = chemically synthesized
  source 1..20: mol_type = other DNA
ttgcagcgatagatcataaa

SEQ ID NO: 14508 - DNA, 20 bp, synthetic construct
  misc_feature 1..20: note = chemically synthesized
  source 1..20: mol_type = other DNA
aaagactgatcaaatatgtt

SEQ ID NO: 14509 - DNA, 20 bp, synthetic construct
  misc_feature 1..20: note = chemically synthesized
  source 1..20: mol_type = other DNA
tttgaaatatgtcattaatt

SEQ ID NO: 14510 - DNA, 20 bp, synthetic construct
  misc_feature 1..20: note = chemically synthesized
  source 1..20: mol_type = other DNA
taatttggcccttcgtctta

SEQ ID NO: 14511 - DNA, 20 bp, synthetic construct
  misc_feature 1..20: note = chemically synthesized
  source 1..20: mol_type = other DNA
ggcccttcgtcttatggaca

SEQ ID NO: 14512 - DNA, 20 bp, synthetic construct
  misc_feature 1..20: note = chemically synthesized
  source 1..20: mol_type = other DNA
gtcttatggacaaagtcttt

SEQ ID NO: 14513 - DNA, 20 bp, synthetic construct
  misc_feature 1..20: note = chemically synthesized
  source 1..20: mol_type = other DNA
ttaagaccatgtcccaactg

SEQ ID NO: 14514 - DNA, 20 bp, synthetic construct
  misc_feature 1..20: note = chemically synthesized
  source 1..20: mol_type = other DNA
taagaccatgtcccaactga

SEQ ID NO: 14515 - DNA, 20 bp, synthetic construct
  misc_feature 1..20: note = chemically synthesized
  source 1..20: mol_type = other DNA
agaccatgtcccaactgaag

SEQ ID NO: 14516 - DNA, 20 bp, synthetic construct
  misc_feature 1..20: note = chemically synthesized
  source 1..20: mol_type = other DNA
gaccatgtcccaactgaagg

SEQ ID NO: 14517 - DNA, 20 bp, synthetic construct
  misc_feature 1..20: note = chemically synthesized
  source 1..20: mol_type = other DNA
tcccaactgaaggaggccat

SEQ ID NO: 14518 - DNA, 20 bp, synthetic construct
  misc_feature 1..20: note = chemically synthesized
  source 1..20: mol_type = other DNA
aatttttacatcgtctaaca

SEQ ID NO: 14519 - DNA, 20 bp, synthetic construct
  misc_feature 1..20: note = chemically synthesized
  source 1..20: mol_type = other DNA
aacatagcaaatcttgattt

SEQ ID NO: 14520 - DNA, 20 bp, synthetic construct
  misc_feature 1..20: note = chemically synthesized
  source 1..20: mol_type = other DNA
gcaaatcttgattttggctc

SEQ ID NO: 14521 - DNA, 20 bp, synthetic construct
  misc_feature 1..20: note = chemically synthesized
  source 1..20: mol_type = other DNA
aaatcttgattttggctctg

SEQ ID NO: 14522 - DNA, 20 bp, synthetic construct
  misc_feature 1..20: note = chemically synthesized
  source 1..20: mol_type = other DNA
cttgattttggctctggaga

SEQ ID NO: 14523 - DNA, 20 bp, synthetic construct
  misc_feature 1..20: note = chemically synthesized
  source 1..20: mol_type = other DNA
tgattttggctctggagata

SEQ ID NO: 14524 - DNA, 20 bp, synthetic construct
  misc_feature 1..20: note = chemically synthesized
  source 1..20: mol_type = other DNA
tgaattgtcttgatcaattc

SEQ ID NO: 14525 - DNA, 20 bp, synthetic construct
  misc_feature 1..20: note = chemically synthesized
  source 1..20: mol_type = other DNA
aattgtcttgatcaattctg

SEQ ID NO: 14526 - DNA, 20 bp, synthetic construct
  misc_feature 1..20: note = chemically synthesized
  source 1..20: mol_type = other DNA
attgtcttgatcaattctgg

SEQ ID NO: 14527 - DNA, 20 bp, synthetic construct
  misc_feature 1..20: note = chemically synthesized
  source 1..20: mol_type = other DNA
tcaattctggaggaaataac

SEQ ID NO: 14528 - DNA, 20 bp, synthetic construct
  misc_feature 1..20: note = chemically synthesized
  source 1..20: mol_type = other DNA
aattctggaggaaataacta

SEQ ID NO: 14529 - DNA, 20 bp, synthetic construct
  misc_feature 1..20: note = chemically synthesized
  source 1..20: mol_type = other DNA
attctggaggaaataactag

SEQ ID NO: 14530 - DNA, 20 bp, synthetic construct
  misc_feature 1..20: note = chemically synthesized
  source 1..20: mol_type = other DNA
ataactagaggaacaataaa

SEQ ID NO: 14531 - DNA, 20 bp, synthetic construct
  misc_feature 1..20: note = chemically synthesized
  source 1..20: mol_type = other DNA
actagaggaacaataaaaag

SEQ ID NO: 14532 - DNA, 20 bp, synthetic construct
  misc_feature 1..20: note = chemically synthesized
  source 1..20: mol_type = other DNA
ctagaggaacaataaaaaga

SEQ ID NO: 14533 - DNA, 20 bp, synthetic construct
  misc_feature 1..20: note = chemically synthesized
  source 1..20: mol_type = other DNA
agaggaacaataaaaagaag

SEQ ID NO: 14534 - DNA, 20 bp, synthetic construct
  misc_feature 1..20: note = chemically synthesized
  source 1..20: mol_type = other DNA
ttatcttgattttcaatttc

SEQ ID NO: 14535 - DNA, 20 bp, synthetic construct
  misc_feature 1..20: note = chemically synthesized
  source 1..20: mol_type = other DNA
attttcaatttcaagcaacg

SEQ ID NO: 14536 - DNA, 20 bp, synthetic construct
  misc_feature 1..20: note = chemically synthesized
  source 1..20: mol_type = other DNA
aacgtggaactgttttcttc

SEQ ID NO: 14537 - DNA, 20 bp, synthetic construct
  misc_feature 1..20: note = chemically synthesized
  source 1..20: mol_type = other DNA
gtggaactgttttcttctgg

SEQ ID NO: 14538 - DNA, 20 bp, synthetic construct
  misc_feature 1..20: note = chemically synthesized
  source 1..20: mol_type = other DNA
gaactgttttcttctggaag

SEQ ID NO: 14539 - DNA, 20 bp, synthetic construct
  misc_feature 1..20: note = chemically synthesized
  source 1..20: mol_type = other DNA
ttttcttctggaagcagacc

SEQ ID NO: 14540 - DNA, 20 bp, synthetic construct
  misc_feature 1..20: note = chemically synthesized
  source 1..20: mol_type = other DNA
tatatataccaatatttgcc

SEQ ID NO: 14541 - DNA, 20 bp, synthetic construct
  misc_feature 1..20: note = chemically synthesized
  source 1..20: mol_type = other DNA
ataccaatatttgcccagaa

SEQ ID NO: 14542 - DNA, 20 bp, synthetic construct
  misc_feature 1..20: note = chemically synthesized
  source 1..20: mol_type = other DNA
taccaatatttgcccagaaa

SEQ ID NO: 14543 - DNA, 20 bp, synthetic construct
  misc_feature 1..20: note = chemically synthesized
  source 1..20: mol_type = other DNA
aatatttgcccagaaaaggt

SEQ ID NO: 14544 - DNA, 20 bp, synthetic construct
  misc_feature 1..20: note = chemically synthesized
  source 1..20: mol_type = other DNA
atatttgcccagaaaaggta

SEQ ID NO: 14545 - DNA, 20 bp, synthetic construct
  misc_feature 1..20: note = chemically synthesized
  source 1..20: mol_type = other DNA
ttgcccagaaaaggtaaggt

SEQ ID NO: 14546 - DNA, 20 bp, synthetic construct
  misc_feature 1..20: note = chemically synthesized
  source 1..20: mol_type = other DNA
cccagaaaaggtaaggttgg

SEQ ID NO: 14547 - DNA, 20 bp, synthetic construct
  misc_feature 1..20: note = chemically synthesized
  source 1..20: mol_type = other DNA
ccagaaaaggtaaggttggt

SEQ ID NO: 14548 - DNA, 20 bp, synthetic construct
  misc_feature 1..20: note = chemically synthesized
  source 1..20: mol_type = other DNA
gtaaggttggtaggtgaaca

SEQ ID NO: 14549 - DNA, 20 bp, synthetic construct
  misc_feature 1..20: note = chemically synthesized
  source 1..20: mol_type = other DNA
ggtgaacatagttaatcatt

SEQ ID NO: 14550 - DNA, 20 bp, synthetic construct
  misc_feature 1..20: note = chemically synthesized
  source 1..20: mol_type = other DNA
atgtaaccttcttccacatt

SEQ ID NO: 14551 - DNA, 20 bp, synthetic construct
  misc_feature 1..20: note = chemically synthesized
  source 1..20: mol_type = other DNA
aaccttcttccacattgagt

SEQ ID NO: 14552 - DNA, 20 bp, synthetic construct
  misc_feature 1..20: note = chemically synthesized
  source 1..20: mol_type = other DNA
atcaatgctaaatgaaatca

SEQ ID NO: 14553 - DNA, 20 bp, synthetic construct
  misc_feature 1..20: note = chemically synthesized
  source 1..20: mol_type = other DNA
ctaaatgaaatcaaagaaat

SEQ ID NO: 14554 - DNA, 20 bp, synthetic construct
  misc_feature 1..20: note = chemically synthesized
  source 1..20: mol_type = other DNA
gaaatgagcaactaacttaa

SEQ ID NO: 14555 - DNA, 20 bp, synthetic construct
  misc_feature 1..20: note = chemically synthesized
  source 1..20: mol_type = other DNA
aaatgagcaactaacttaat

SEQ ID NO: 14556 - DNA, 20 bp, synthetic construct
  misc_feature 1..20: note = chemically synthesized
  source 1..20: mol_type = other DNA
aaactacacattcaatgcta

SEQ ID NO: 14557 - DNA, 20 bp, synthetic construct
  misc_feature 1..20: note = chemically synthesized
  source 1..20: mol_type = other DNA
tggtgactacctgtttttaa

SEQ ID NO: 14558 - DNA, 20 bp, synthetic construct
  misc_feature 1..20: note = chemically synthesized
  source 1..20: mol_type = other DNA
ttttacttttttatgatttt

SEQ ID NO: 14559 - DNA, 20 bp, synthetic construct
  misc_feature 1..20: note = chemically synthesized
  source 1..20: mol_type = other DNA
ttacttttttatgattttaa

SEQ ID NO: 14560 - DNA, 20 bp, synthetic construct
  misc_feature 1..20: note = chemically synthesized
  source 1..20: mol_type = other DNA
tatgattttaagagatttac

SEQ ID NO: 14561 - DNA, 20 bp, synthetic construct
  misc_feature 1..20: note = chemically synthesized
  source 1..20: mol_type = other DNA
tcaaaaataaacttttttgt

SEQ ID NO: 14562 - DNA, 20 bp, synthetic construct
  misc_feature 1..20: note = chemically synthesized
  source 1..20: mol_type = other DNA
caaaaataaacttttttgtt

SEQ ID NO: 14563 - DNA, 20 bp, synthetic construct
  misc_feature 1..20: note = chemically synthesized
  source 1..20: mol_type = other DNA
gttgggtaaatttattatta

SEQ ID NO: 14564 - DNA, 20 bp, synthetic construct
  misc_feature 1..20: note = chemically synthesized
  source 1..20: mol_type = other DNA
gtaaatttattattaaagtt

SEQ ID NO: 14565 - DNA, 20 bp, synthetic construct
  misc_feature 1..20: note = chemically synthesized
  source 1..20: mol_type = other DNA
taaatttattattaaagttg

SEQ ID NO: 14566 - DNA, 20 bp, synthetic construct
  misc_feature 1..20: note = chemically synthesized
  source 1..20: mol_type = other DNA
aaatttattattaaagttga

SEQ ID NO: 14567 - DNA, 20 bp, synthetic construct
  misc_feature 1..20: note = chemically synthesized
  source 1..20: mol_type = other DNA
aatttattattaaagttgag

SEQ ID NO: 14568 - DNA, 20 bp, synthetic construct
  misc_feature 1..20: note = chemically synthesized
  source 1..20: mol_type = other DNA
tattaaagttgaggggaaaa

SEQ ID NO: 14569 - DNA, 20 bp, synthetic construct
  misc_feature 1..20: note = chemically synthesized
  source 1..20: mol_type = other DNA
ggggaaaaaagtaatgaatt

SEQ ID NO: 14570 - DNA, 20 bp, synthetic construct
  misc_feature 1..20: note = chemically synthesized
  source 1..20: mol_type = other DNA
aacaggtagtcaccatagca

SEQ ID NO: 14571 - DNA, 20 bp, synthetic construct
  misc_feature 1..20: note = chemically synthesized
  source 1..20: mol_type = other DNA
tgggcaaatattggtatata

SEQ ID NO: 14572 - DNA, 20 bp, synthetic construct
  misc_feature 1..20: note = chemically synthesized
  source 1..20: mol_type = other DNA
gttcctctagttatttcctc

SEQ ID NO: 14573 - DNA, 20 bp, synthetic construct
  misc_feature 1..20: note = chemically synthesized
  source 1..20: mol_type = other DNA
aagtcaaaaatgaagaggta

SEQ ID NO: 14574 - DNA, 20 bp, synthetic construct
  misc_feature 1..20: note = chemically synthesized
  source 1..20: mol_type = other DNA
taaagtaagtagaaaataaa

SEQ ID NO: 14575 - DNA, 20 bp, synthetic construct
  misc_feature 1..20: note = chemically synthesized
  source 1..20: mol_type = other DNA
ttcatgtttatgttttcaat

SEQ ID NO: 14576 - DNA, 20 bp, synthetic construct
  misc_feature 1..20: note = chemically synthesized
  source 1..20: mol_type = other DNA
gaaagaagcatacaagggga

SEQ ID NO: 14577 - DNA, 20 bp, synthetic construct
  misc_feature 1..20: note = chemically synthesized
  source 1..20: mol_type = other DNA
cacacaggtctgtaaaaaca

SEQ ID NO: 14578 - DNA, 20 bp, synthetic construct
  misc_feature 1..20: note = chemically synthesized
  source 1..20: mol_type = other DNA
aaattatttacaagctttaa

SEQ ID NO: 14579 - DNA, 20 bp, synthetic construct
  misc_feature 1..20: note = chemically synthesized
  source 1..20: mol_type = other DNA
ttacaagctttaactggatc

SEQ ID NO: 14580 - DNA, 20 bp, synthetic construct
  misc_feature 1..20: note = chemically synthesized
  source 1..20: mol_type = other DNA
ctctaaaactttgtgtgacc

SEQ ID NO: 14581 - DNA, 20 bp, synthetic construct
  misc_feature 1..20: note = chemically synthesized
  source 1..20: mol_type = other DNA
aaagataataacagaactta

SEQ ID NO: 14582 - DNA, 20 bp, synthetic construct
  misc_feature 1..20: note = chemically synthesized
  source 1..20: mol_type = other DNA
tcttggtctaaagagccaat

SEQ ID NO: 14583 - DNA, 20 bp, synthetic construct
  misc_feature 1..20: note = chemically synthesized
  source 1..20: mol_type = other DNA
aaagagaaacatgatctaat

SEQ ID NO: 14584 - DNA, 20 bp, synthetic construct
  misc_feature 1..20: note = chemically synthesized
  source 1..20: mol_type = other DNA
gtaagatgacattggctgct

SEQ ID NO: 14585 - DNA, 20 bp, synthetic construct
  misc_feature 1..20: note = chemically synthesized
  source 1..20: mol_type = other DNA
gtgaggaaactgagagataa

SEQ ID NO: 14586 - DNA, 20 bp, synthetic construct
  misc_feature 1..20: note = chemically synthesized
  source 1..20: mol_type = other DNA
ttaaagcttgtaaataattt

SEQ ID NO: 14587 - DNA, 20 bp, synthetic construct
  misc_feature 1..20: note = chemically synthesized
  source 1..20: mol_type = other DNA
tcttgtttttctacaaaagt

SEQ ID NO: 14588 - DNA, 20 bp, synthetic construct
  misc_feature 1..20: note = chemically synthesized
  source 1..20: mol_type = other DNA
tctacaaaagtctggatata

SEQ ID NO: 14589 - DNA, 20 bp, synthetic construct
  misc_feature 1..20: note = chemically synthesized
  source 1..20: mol_type = other DNA
tctaaatttttaaactaata

SEQ ID NO: 14590 - DNA, 20 bp, synthetic construct
  misc_feature 1..20: note = chemically synthesized
  source 1..20: mol_type = other DNA
actaataatggatttgaaaa

SEQ ID NO: 14591 - DNA, 20 bp, synthetic construct
  misc_feature 1..20: note = chemically synthesized
  source 1..20: mol_type = other DNA
aaagcccagcatattttcat

SEQ ID NO: 14592 - DNA, 20 bp, synthetic construct
  misc_feature 1..20: note = chemically synthesized
  source 1..20: mol_type = other DNA
ttaatctgttttaaacactg

SEQ ID NO: 14593 - DNA, 20 bp, synthetic construct
  misc_feature 1..20: note = chemically synthesized
  source 1..20: mol_type = other DNA
tactttaagtgaagttactt

SEQ ID NO: 14594 - DNA, 20 bp, synthetic construct
  misc_feature 1..20: note = chemically synthesized
  source 1..20: mol_type = other DNA
gaagttacttctgggtgttc

SEQ ID NO: 14595 - DNA, 20 bp, synthetic construct
  misc_feature 1..20: note = chemically synthesized
  source 1..20: mol_type = other DNA
tctggagtttcaggttgatt

SEQ ID NO: 14596 - DNA, 20 bp, synthetic construct
  misc_feature 1..20: note = chemically synthesized
  source 1..20: mol_type = other DNA
tatttcactttttgttgaag

SEQ ID NO: 14597 - DNA, 20 bp, synthetic construct
  misc_feature 1..20: note = chemically synthesized
  source 1..20: mol_type = other DNA
ttctaggaggctttcaagtt

SEQ ID NO: 14598 - DNA, 20 bp, synthetic construct
  misc_feature 1..20: note = chemically synthesized
  source 1..20: mol_type = other DNA
ggaggctttcaagttttgag

SEQ ID NO: 14599 - DNA, 20 bp, synthetic construct
  misc_feature 1..20: note = chemically synthesized
  source 1..20: mol_type = other DNA
aaaaagactgatcaaatatg

SEQ ID NO: 14600 - DNA, 20 bp, synthetic construct
  misc_feature 1..20: note = chemically synthesized
  source 1..20: mol_type = other DNA
tgattttggctctggagata

SEQ ID NO: 14601 - DNA, 20 bp, synthetic construct
  misc_feature 1..20: note = chemically synthesized
  source 1..20: mol_type = other DNA
tggagatagagaatcaaatg

SEQ ID NO: 14602 - DNA, 20 bp, synthetic construct
  misc_feature 1..20: note = chemically synthesized
  source 1..20: mol_type = other DNA
attaagccgtgttaacttgc

SEQ ID NO: 14603 - DNA, 20 bp, synthetic construct
  misc_feature 1..20: note = chemically synthesized
  source 1..20: mol_type = other DNA
gaatgtaaccttcttccaca

SEQ ID NO: 14604 - DNA, 20 bp, synthetic construct
  misc_feature 1..20: note = chemically synthesized
  source 1..20: mol_type = other DNA
gtcaaaaataaacttttttg

SEQ ID NO: 14605 - DNA, 20 bp, synthetic construct
  misc_feature 1..20: note = chemically synthesized
  source 1..20: mol_type = other DNA
aagttgaggggaaaaaagta

SEQ ID NO: 14606 - DNA, 20 bp, synthetic construct
  misc_feature 1..20: note = chemically synthesized
  source 1..20: mol_type = other DNA
gaagtctaggtctgcttcca

SEQ ID NO: 14607 - DNA, 20 bp, synthetic construct
  misc_feature 1..20: note = chemically synthesized
  source 1..20: mol_type = other DNA
tgttcctctagttatttcct

SEQ ID NO: 14608 - DNA, 20 bp, synthetic construct
  misc_feature 1..20: note = chemically synthesized
  source 1..20: mol_type = other DNA
aaaccagtgaaatcaaagaa

SEQ ID NO: 14609 - DNA, 20 bp, synthetic construct
  misc_feature 1..20: note = chemically synthesized
  source 1..20: mol_type = other DNA
caagtcaaaaatgaagaggt

SEQ ID NO: 14610 - DNA, 20 bp, synthetic construct
  misc_feature 1..20: note = chemically synthesized
  source 1..20: mol_type = other DNA
caaaacttgaaagcctccta

SEQ ID NO: 14611 - DNA, 20 bp, synthetic construct
  misc_feature 1..20: note = chemically synthesized
  source 1..20: mol_type = other DNA
agtaacttcacttaaagtaa

SEQ ID NO: 14612 - DNA, 20 bp, synthetic construct
  misc_feature 1..20: note = chemically synthesized
  source 1..20: mol_type = other DNA
tgttgaaatacttttttttc

SEQ ID NO: 14613 - DNA, 20 bp, synthetic construct
  misc_feature 1..20: note = chemically synthesized
  source 1..20: mol_type = other DNA
ttttccaagaaaaataatct

SEQ ID NO: 14614 - DNA, 20 bp, synthetic construct
  misc_feature 1..20: note = chemically synthesized
  source 1..20: mol_type = other DNA
ctttttcttttaattgaagt

SEQ ID NO: 14615 - DNA, 20 bp, synthetic construct
  misc_feature 1..20: note = chemically synthesized
  source 1..20: mol_type = other DNA
gatagtgttacaggaaatta

SEQ ID NO: 14616 - DNA, 20 bp, synthetic construct
  misc_feature 1..20: note = chemically synthesized
  source 1..20: mol_type = other DNA
tgttacaggaaattaataga

SEQ ID NO: 14617 - DNA, 20 bp, synthetic construct
  misc_feature 1..20: note = chemically synthesized
  source 1..20: mol_type = other DNA
ctctctatatccagactttt

SEQ ID NO: 14618 - DNA, 20 bp, synthetic construct
  misc_feature 1..20: note = chemically synthesized
  source 1..20: mol_type = other DNA
accaacagcatagtcaaata

SEQ ID NO: 14619 - DNA, 20 bp, synthetic construct
  misc_feature 1..20: note = chemically synthesized
  source 1..20: mol_type = other DNA
agcatagtcaaataaaagaa

SEQ ID NO: 14620 - DNA, 20 bp, synthetic construct
  misc_feature 1..20: note = chemically synthesized
  source 1..20: mol_type = other DNA
cagaacttataggattattg

SEQ ID NO: 14621 - DNA, 20 bp, synthetic construct
  misc_feature 1..20: note = chemically synthesized
  source 1..20: mol_type = other DNA
tattgtgtggttttgagcaa

SEQ ID NO: 14622 - DNA, 20 bp, synthetic construct
  misc_feature 1..20: note = chemically synthesized
  source 1..20: mol_type = other DNA
gattttctgaacttcaatta

SEQ ID NO: 14623 - DNA, 20 bp, synthetic construct
  misc_feature 1..20: note = chemically synthesized
  source 1..20: mol_type = other DNA
tttaatctgttttaaacact

SEQ ID NO: 14624 - DNA, 20 bp, synthetic construct
  misc_feature 1..20: note = chemically synthesized
  source 1..20: mol_type = other DNA
agtatttcaaatggcatgcc

SEQ ID NO: 14625 - DNA, 20 bp, synthetic construct
  misc_feature 1..20: note = chemically synthesized
  source 1..20: mol_type = other DNA
atatttcactttttgttgaa

SEQ ID NO: 14626 - DNA, 20 bp, synthetic construct
  misc_feature 1..20: note = chemically synthesized
  source 1..20: mol_type = other DNA
ttgattttggctctggagat

SEQ ID NO: 14627 - DNA, 20 bp, synthetic construct
  misc_feature 1..20: note = chemically synthesized
  source 1..20: mol_type = other DNA
ctatatataccaatatttgc

SEQ ID NO: 14628 - DNA, 20 bp, synthetic construct
  misc_feature 1..20: note = chemically synthesized
  source 1..20: mol_type = other DNA
gatcaatgctaaatgaaatc

SEQ ID NO: 14629 - DNA, 20 bp, synthetic construct
  misc_feature 1..20: note = chemically synthesized
  source 1..20: mol_type = other DNA
aaaaagtaaaattagctttt

SEQ ID NO: 14630 - DNA, 20 bp, synthetic construct
  misc_feature 1..20: note = chemically synthesized
  source 1..20: mol_type = other DNA
gtctaggtctgcttccagaa

SEQ ID NO: 14631 - DNA, 20 bp, synthetic construct
  misc_feature 1..20: note = chemically synthesized
  source 1..20: mol_type = other DNA
ccaaattaatgacatatttc

SEQ ID NO: 14632 - DNA, 20 bp, synthetic construct
  misc_feature 1..20: note = chemically synthesized
  source 1..20: mol_type = other DNA
tatgtcacttgaactcaact

SEQ ID NO: 14633 - DNA, 20 bp, synthetic construct
  misc_feature 1..20: note = chemically synthesized
  source 1..20: mol_type = other DNA
gtttccctaatgttatatat

SEQ ID NO: 14634 - DNA, 20 bp, synthetic construct
  misc_feature 1..20: note = chemically synthesized
  source 1..20: mol_type = other DNA
gtaaaaagttaaaaaaaatt

SEQ ID NO: 14635 - DNA, 20 bp, synthetic construct
  misc_feature 1..20: note = chemically synthesized
  source 1..20: mol_type = other DNA
taaaactattctccagtgtt

SEQ ID NO: 14636 - DNA, 20 bp, synthetic construct
  misc_feature 1..20: note = chemically synthesized
  source 1..20: mol_type = other DNA
ctatatccagacttttgtag

SEQ ID NO: 14637 - DNA, 20 bp, synthetic construct
  misc_feature 1..20: note = chemically synthesized
  source 1..20: mol_type = other DNA
catctttcacacaggtctgt

SEQ ID NO: 14638 - DNA, 20 bp, synthetic construct
  misc_feature 1..20: note = chemically synthesized
  source 1..20: mol_type = other DNA
ctgcatttaaaccatggctc

SEQ ID NO: 14639 - DNA, 20 bp, synthetic construct
  misc_feature 1..20: note = chemically synthesized
  source 1..20: mol_type = other DNA
agatcatgtttctctttgct

SEQ ID NO: 14640 - DNA, 20 bp, synthetic construct
  misc_feature 1..20: note = chemically synthesized
  source 1..20: mol_type = other DNA
tatataacattagggaaaca

SEQ ID NO: 14641 - DNA, 20 bp, synthetic construct
  misc_feature 1..20: note = chemically synthesized
  source 1..20: mol_type = other DNA
ttttttaaaagatccacatt

SEQ ID NO: 14642 - DNA, 20 bp, synthetic construct
  misc_feature 1..20: note = chemically synthesized
  source 1..20: mol_type = other DNA
ataataaatttacccaacaa

SEQ ID NO: 14643 - DNA, 20 bp, synthetic construct
  misc_feature 1..20: note = chemically synthesized
  source 1..20: mol_type = other DNA
taaaatcataaaaaagtaaa

SEQ ID NO: 14644 - DNA, 20 bp, synthetic construct
  misc_feature 1..20: note = chemically synthesized
  source 1..20: mol_type = other DNA
agtcaccatagcattgaatg

SEQ ID NO: 14645 - DNA, 20 bp, synthetic construct
  misc_feature 1..20: note = chemically synthesized
  source 1..20: mol_type = other DNA
attaagttagttgctcattt

SEQ ID NO: 14646 - DNA, 20 bp, synthetic construct
  misc_feature 1..20: note = chemically synthesized
  source 1..20: mol_type = other DNA
gttacattcgtgcaagttaa

SEQ ID NO: 14647 - DNA, 20 bp, synthetic construct
  misc_feature 1..20: note = chemically synthesized
  source 1..20: mol_type = other DNA
tcgtgcaagttaacacggct

SEQ ID NO: 14648 - DNA, 20 bp, synthetic construct
  misc_feature 1..20: note = chemically synthesized
  source 1..20: mol_type = other DNA
tatagagttaagaagtctag

SEQ ID NO: 14649 - DNA, 20 bp, synthetic construct
  misc_feature 1..20: note = chemically synthesized
  source 1..20: mol_type = other DNA
tccagaagaaaacagttcca

SEQ ID NO: 14650 - DNA, 20 bp, synthetic construct
  misc_feature 1..20: note = chemically synthesized
  source 1..20: mol_type = other DNA
attgatcaagacaattcatc

SEQ ID NO: 14651 - DNA, 20 bp, synthetic construct
  misc_feature 1..20: note = chemically synthesized
  source 1..20: mol_type = other DNA
ctctatctccagagccaaaa

SEQ ID NO: 14652 - DNA, 20 bp, synthetic construct
  misc_feature 1..20: note = chemically synthesized
  source 1..20: mol_type = other DNA
aagtagaaaataaagagggt

SEQ ID NO: 14653 - DNA, 20 bp, synthetic construct
  misc_feature 1..20: note = chemically synthesized
  source 1..20: mol_type = other DNA
aaaataaagagggttcatgt

SEQ ID NO: 14654 - DNA, 20 bp, synthetic construct
  misc_feature 1..20: note = chemically synthesized
  source 1..20: mol_type = other DNA
atttcctattataatttcaa

SEQ ID NO: 14655 - DNA, 20 bp, synthetic construct
  misc_feature 1..20: note = chemically synthesized
  source 1..20: mol_type = other DNA
attataatttcaagttagtt

SEQ ID NO: 14656 - DNA, 20 bp, synthetic construct
  misc_feature 1..20: note = chemically synthesized
  source 1..20: mol_type = other DNA
aaaaatttaaaactattctc

SEQ ID NO: 14657 - DNA, 20 bp, synthetic construct
  misc_feature 1..20: note = chemically synthesized
  source 1..20: mol_type = other DNA
aactattctccagtgtttaa

SEQ ID NO: 14658 - DNA, 20 bp, synthetic construct
  misc_feature 1..20: note = chemically synthesized
  source 1..20: mol_type = other DNA
ttaaataatacagtaaatgg

SEQ ID NO: 14659 - DNA, 20 bp, synthetic construct
  misc_feature 1..20: note = chemically synthesized
  source 1..20: mol_type = other DNA
tttattcatatgaaaatatg

SEQ ID NO: 14660 - DNA, 20 bp, synthetic construct
  misc_feature 1..20: note = chemically synthesized
  source 1..20: mol_type = other DNA
attcatttttcaaatccatt

SEQ ID NO: 14661 - DNA, 20 bp, synthetic construct
  misc_feature 1..20: note = chemically synthesized
  source 1..20: mol_type = other DNA
atccattattagtttaaaaa

SEQ ID NO: 14662 - DNA, 20 bp, synthetic construct
  misc_feature 1..20: note = chemically synthesized
  source 1..20: mol_type = other DNA
actgaatcctaaaattattt

SEQ ID NO: 14663 - DNA, 20 bp, synthetic construct
  misc_feature 1..20: note = chemically synthesized
  source 1..20: mol_type = other DNA
attacttcacccctttatct

SEQ ID NO: 14664 - DNA, 20 bp, synthetic construct
  misc_feature 1..20: note = chemically synthesized
  source 1..20: mol_type = other DNA
caaagataataacagaactt

SEQ ID NO: 14665 - DNA, 20 bp, synthetic construct
  misc_feature 1..20: note = chemically synthesized
  source 1..20: mol_type = other DNA
ttactaaaattcaaattaga

SEQ ID NO: 14666 - DNA, 20 bp, synthetic construct
  misc_feature 1..20: note = chemically synthesized
  source 1..20: mol_type = other DNA
ctctttgctcaaaaccacac

SEQ ID NO: 14667 - DNA, 20 bp, synthetic construct
  misc_feature 1..20: note = chemically synthesized
  source 1..20: mol_type = other DNA
actcatattggctctttaga

SEQ ID NO: 14668 - DNA, 20 bp, synthetic construct
  misc_feature 1..20: note = chemically synthesized
  source 1..20: mol_type = other DNA
agtgaaatggaaagctattg

SEQ ID NO: 14669 - DNA, 20 bp, synthetic construct
  misc_feature 1..20: note = chemically synthesized
  source 1..20: mol_type = other DNA
gtaatttattcaaggtcaca

SEQ ID NO: 14670 - DNA, 20 bp, synthetic construct
  misc_feature 1..20: note = chemically synthesized
  source 1..20: mol_type = other DNA
gtcacacaaagttttagagc

SEQ ID NO: 14671 - DNA, 20 bp, synthetic construct
  misc_feature 1..20: note = chemically synthesized
  source 1..20: mol_type = other DNA
agagccatggtttaaatgca

SEQ ID NO: 14672 - DNA, 20 bp, synthetic construct
  misc_feature 1..20: note = chemically synthesized
  source 1..20: mol_type = other DNA
ggtttaaatgcaggtagttt

SEQ ID NO: 14673 - DNA, 20 bp, synthetic construct
  misc_feature 1..20: note = chemically synthesized
  source 1..20: mol_type = other DNA
aattttactcatgatccagt

SEQ ID NO: 14674 - DNA, 20 bp, synthetic construct
  misc_feature 1..20: note = chemically synthesized
  source 1..20: mol_type = other DNA
gttaaagcttgtaaataatt

SEQ ID NO: 14675 - DNA, 20 bp, synthetic construct
  misc_feature 1..20: note = chemically synthesized
  source 1..20: mol_type = other DNA
ttgtaaataattttaggatt

SEQ ID NO: 14676 - DNA, 20 bp, synthetic construct
  misc_feature 1..20: note = chemically synthesized
  source 1..20: mol_type = other DNA
taccattaaaatactgactt

SEQ ID NO: 14677 - DNA, 20 bp, synthetic construct
  misc_feature 1..20: note = chemically synthesized
  source 1..20: mol_type = other DNA
ttcttttatttgactatgct

SEQ ID NO: 14678 - DNA, 20 bp, synthetic construct
  misc_feature 1..20: note = chemically synthesized
  source 1..20: mol_type = other DNA
tttgactatgctgttggttt

SEQ ID NO: 14679 - DNA, 20 bp, synthetic construct
  misc_feature 1..20: note = chemically synthesized
  source 1..20: mol_type = other DNA
gaaggtctttgatgctatta

SEQ ID NO: 14680 - DNA, 20 bp, synthetic construct
  misc_feature 1..20: note = chemically synthesized
  source 1..20: mol_type = other DNA
tagagagtaggttggttata

SEQ ID NO: 14681 - DNA, 20 bp, synthetic construct
  misc_feature 1..20: note = chemically synthesized
  source 1..20: mol_type = other DNA
atctaaatttttaaactaat

SEQ ID NO: 14682 - DNA, 20 bp, synthetic construct
  misc_feature 1..20: note = chemically synthesized
  source 1..20: mol_type = other DNA
attggcaattccttcccctt

SEQ ID NO: 14683 - DNA, 20 bp, synthetic construct
  misc_feature 1..20: note = chemically synthesized
  source 1..20: mol_type = other DNA
taaattgtactatctctaaa

SEQ ID NO: 14684 - DNA, 20 bp, synthetic construct
  misc_feature 1..20: note = chemically synthesized
  source 1..20: mol_type = other DNA
tccatttactgtattattta

SEQ ID NO: 14685 - DNA, 20 bp, synthetic construct
  misc_feature 1..20: note = chemically synthesized
  source 1..20: mol_type = other DNA
atctgttttaaacactggag

SEQ ID NO: 14686 - DNA, 20 bp, synthetic construct
  misc_feature 1..20: note = chemically synthesized
  source 1..20: mol_type = other DNA
atagtgtaatgacatagtgt

SEQ ID NO: 14687 - DNA, 20 bp, synthetic construct
  misc_feature 1..20: note = chemically synthesized
  source 1..20: mol_type = other DNA
tgttctagattgtataattt

SEQ ID NO: 14688 - DNA, 20 bp, synthetic construct
  misc_feature 1..20: note = chemically synthesized
  source 1..20: mol_type = other DNA
tcatataaaatgcaaatttt

SEQ ID NO: 14689 - DNA, 20 bp, synthetic construct
  misc_feature 1..20: note = chemically synthesized
  source 1..20: mol_type = other DNA
taataggaaattttattttc

SEQ ID NO: 14690 - DNA, 20 bp, synthetic construct
  misc_feature 1..20: note = chemically synthesized
  source 1..20: mol_type = other DNA
gaagttacttctgggtgttc

SEQ ID NO: 14691 - DNA, 20 bp, synthetic construct
  misc_feature 1..20: note = chemically synthesized
  source 1..20: mol_type = other DNA
ctgggtgttctggagtttca

SEQ ID NO: 14692 - DNA, 20 bp, synthetic construct
  misc_feature 1..20: note = chemically synthesized
  source 1..20: mol_type = other DNA
aagtagaattttttcttcta

SEQ ID NO: 14693 - DNA, 20 bp, synthetic construct
  misc_feature 1..20: note = chemically synthesized
  source 1..20: mol_type = other DNA
ttttttcttctaggaggctt

SEQ ID NO: 14694 - DNA, 20 bp, synthetic construct
  misc_feature 1..20: note = chemically synthesized
  source 1..20: mol_type = other DNA
ttacctcttcatttttgact

SEQ ID NO: 14695 - DNA, 20 bp, synthetic construct
  misc_feature 1..20: note = chemically synthesized
  source 1..20: mol_type = other DNA
tctcagttccttttcttctt

SEQ ID NO: 14696 - DNA, 20 bp, synthetic construct
  misc_feature 1..20: note = chemically synthesized
  source 1..20: mol_type = other DNA
ttttcttcttctttgatttc

SEQ ID NO: 14697 - DNA, 20 bp, synthetic construct
  misc_feature 1..20: note = chemically synthesized
  source 1..20: mol_type = other DNA
aaaaagactgatcaaatatg

SEQ ID NO: 14698 - DNA, 20 bp, synthetic construct
  misc_feature 1..20: note = chemically synthesized
  source 1..20: mol_type = other DNA
acatcgtctaacatagcaaa

SEQ ID NO: 14699 - DNA, 20 bp, synthetic construct
  misc_feature 1..20: note = chemically synthesized
  source 1..20: mol_type = other DNA
ctagaggaacaataaaaaga

SEQ ID NO: 14700 - DNA, 20 bp, synthetic construct
  misc_feature 1..20: note = chemically synthesized
  source 1..20: mol_type = other DNA
cttaattgtgaacattttta

SEQ ID NO: 14701 - DNA, 20 bp, synthetic construct
  misc_feature 1..20: note = chemically synthesized
  source 1..20: mol_type = other DNA
ttcaatttcaagcaacgtgg

SEQ ID NO: 14702 - DNA, 20 bp, synthetic construct
  misc_feature 1..20: note = chemically synthesized
  source 1..20: mol_type = other DNA
cattcaatgctatggtgact

SEQ ID NO: 14703 - DNA, 20 bp, synthetic construct
  misc_feature 1..20: note = chemically synthesized
  source 1..20: mol_type = other DNA
taaaagctaattttactttt

SEQ ID NO: 14704 - DNA, 20 bp, synthetic construct
  misc_feature 1..20: note = chemically synthesized
  source 1..20: mol_type = other DNA
ttttacttttttatgatttt

SEQ ID NO: 14705 - DNA, 22 bp, synthetic construct
  misc_feature 1..22: note = chemically synthesized
  source 1..22: mol_type = other DNA
aattcattacttttttcccctc

SEQ ID NO: 14706 - DNA, 22 bp, synthetic construct
  misc_feature 1..22: note = chemically synthesized
  source 1..22: mol_type = other DNA
attcattacttttttcccctca

SEQ ID NO: 14707 - DNA, 22 bp, synthetic construct
  misc_feature 1..22: note = chemically synthesized
  source 1..22: mol_type = other DNA
attacttttttcccctcaactt

SEQ ID NO: 14708 - DNA, 22 bp, synthetic construct
  misc_feature 1..22: note = chemically synthesized
  source 1..22: mol_type = other DNA
cttttttcccctcaactttaat

SEQ ID NO: 14709 - DNA, 22 bp, synthetic construct
  misc_feature 1..22: note = chemically synthesized
  source 1..22: mol_type = other DNA
ttttcccctcaactttaataat

SEQ ID NO: 14710 - DNA, 22 bp, synthetic construct
  misc_feature 1..22: note = chemically synthesized
  source 1..22: mol_type = other DNA
tttcccctcaactttaataata

SEQ ID NO: 14711 - DNA, 22 bp, synthetic construct
  misc_feature 1..22: note = chemically synthesized
  source 1..22: mol_type = other DNA
ttcccctcaactttaataataa

SEQ ID NO: 14712 - DNA, 22 bp, synthetic construct
  misc_feature 1..22: note = chemically synthesized
  source 1..22: mol_type = other DNA
tcccctcaactttaataataaa

SEQ ID NO: 14713 - DNA, 22 bp, synthetic construct
  misc_feature 1..22: note = chemically synthesized
  source 1..22: mol_type = other DNA
cccctcaactttaataataaat

SEQ ID NO: 14714 - DNA, 22 bp, synthetic construct
  misc_feature 1..22: note = chemically synthesized
  source 1..22: mol_type = other DNA
ccctcaactttaataataaatt

SEQ ID NO: 14715 - DNA, 22 bp, synthetic construct
  misc_feature 1..22: note = chemically synthesized
  source 1..22: mol_type = other DNA
aactttaataataaatttaccc

SEQ ID NO: 14716 - DNA, 22 bp, synthetic construct
  misc_feature 1..22: note = chemically synthesized
  source 1..22: mol_type = other DNA
taataataaatttacccaacaa

SEQ ID NO: 14717 - DNA, 22 bp, synthetic construct
  misc_feature 1..22: note = chemically synthesized
  source 1..22: mol_type = other DNA
aataataaatttacccaacaaa

SEQ ID NO: 14718 - DNA, 22 bp, synthetic construct
  misc_feature 1..22: note = chemically synthesized
  source 1..22: mol_type = other DNA
ataataaatttacccaacaaaa

SEQ ID NO: 14719 - DNA, 22 bp, synthetic construct
  misc_feature 1..22: note = chemically synthesized
  source 1..22: mol_type = other DNA
acccaacaaaaaagtttatttt

SEQ ID NO: 14720 - DNA, 22 bp, synthetic construct
  misc_feature 1..22: note = chemically synthesized
  source 1..22: mol_type = other DNA
cccaacaaaaaagtttattttt

SEQ ID NO: 14721 - DNA, 22 bp, synthetic construct
  misc_feature 1..22: note = chemically synthesized
  source 1..22: mol_type = other DNA
atttttgacttgtaaatctctt

SEQ ID NO: 14722 - DNA, 22 bp, synthetic construct
  misc_feature 1..22: note = chemically synthesized
  source 1..22: mol_type = other DNA
tttttgacttgtaaatctctta

SEQ ID NO: 14723 - DNA, 22 bp, synthetic construct
  misc_feature 1..22: note = chemically synthesized
  source 1..22: mol_type = other DNA
ttgacttgtaaatctcttaaaa

SEQ ID NO: 14724 - DNA, 22 bp, synthetic construct
  misc_feature 1..22: note = chemically synthesized
  source 1..22: mol_type = other DNA
tgacttgtaaatctcttaaaat

SEQ ID NO: 14725 - DNA, 22 bp, synthetic construct
  misc_feature 1..22: note = chemically synthesized
  source 1..22: mol_type = other DNA
gacttgtaaatctcttaaaatc

SEQ ID NO: 14726 - DNA, 22 bp, synthetic construct
  misc_feature 1..22: note = chemically synthesized
  source 1..22: mol_type = other DNA
acttgtaaatctcttaaaatca

SEQ ID NO: 14727 - DNA, 22 bp, synthetic construct
  misc_feature 1..22: note = chemically synthesized
  source 1..22: mol_type = other DNA
gtaaatctcttaaaatcataaa

SEQ ID NO: 14728 - DNA, 22 bp, synthetic construct
  misc_feature 1..22: note = chemically synthesized
  source 1..22: mol_type = other DNA
taaatctcttaaaatcataaaa

SEQ ID NO: 14729 - DNA, 22 bp, synthetic construct
  misc_feature 1..22: note = chemically synthesized
  source 1..22: mol_type = other DNA
ttaaaatcataaaaaagtaaaa

SEQ ID NO: 14730 - DNA, 22 bp, synthetic construct
  misc_feature 1..22: note = chemically synthesized
  source 1..22: mol_type = other DNA
aaaatcataaaaaagtaaaatt

SEQ ID NO: 14731 - DNA, 22 bp, synthetic construct
  misc_feature 1..22: note = chemically synthesized
  source 1..22: mol_type = other DNA
aaatcataaaaaagtaaaatta

SEQ ID NO: 14732 - DNA, 22 bp, synthetic construct
  misc_feature 1..22: note = chemically synthesized
  source 1..22: mol_type = other DNA
gcttttaaaaacaggtagtcac

SEQ ID NO: 14733 - DNA, 22 bp, synthetic construct
  misc_feature 1..22: note = chemically synthesized
  source 1..22: mol_type = other DNA
ttaaaaacaggtagtcaccata

SEQ ID NO: 14734 - DNA, 22 bp, synthetic construct
  misc_feature 1..22: note = chemically synthesized
  source 1..22: mol_type = other DNA
taaaaacaggtagtcaccatag

SEQ ID NO: 14735 - DNA, 22 bp, synthetic construct
  misc_feature 1..22: note = chemically synthesized
  source 1..22: mol_type = other DNA
aaaaacaggtagtcaccatagc

SEQ ID NO: 14736 - DNA, 22 bp, synthetic construct
  misc_feature 1..22: note = chemically synthesized
  source 1..22: mol_type = other DNA
aaaacaggtagtcaccatagca

SEQ ID NO: 14737 - DNA, 22 bp, synthetic construct
  misc_feature 1..22: note = chemically synthesized
  source 1..22: mol_type = other DNA
aatgtgtagtttataatacagc

SEQ ID NO: 14738 - DNA, 22 bp, synthetic construct
  misc_feature 1..22: note = chemically synthesized
  source 1..22: mol_type = other DNA
ataatacagcaaagttaaatac

SEQ ID NO: 14739 - DNA, 22 bp, synthetic construct
  misc_feature 1..22: note = chemically synthesized
  source 1..22: mol_type = other DNA
taatacagcaaagttaaataca

SEQ ID NO: 14740 - DNA, 22 bp, synthetic construct
  misc_feature 1..22: note = chemically synthesized
  source 1..22: mol_type = other DNA
aatacaatttcaaattacctat

SEQ ID NO: 14741 - DNA, 22 bp, synthetic construct
  misc_feature 1..22: note = chemically synthesized
  source 1..22: mol_type = other DNA
caaattacctattaagttagtt

SEQ ID NO: 14742 - DNA, 22 bp, synthetic construct
  misc_feature 1..22: note = chemically synthesized
  source 1..22: mol_type = other DNA
aaattacctattaagttagttg

SEQ ID NO: 14743 - DNA, 22 bp, synthetic construct
  misc_feature 1..22: note = chemically synthesized
  source 1..22: mol_type = other DNA
cctattaagttagttgctcatt

SEQ ID NO: 14744 - DNA, 22 bp, synthetic construct
  misc_feature 1..22: note = chemically synthesized
  source 1..22: mol_type = other DNA
ttaagttagttgctcatttctt

SEQ ID NO: 14745 - DNA, 22 bp, synthetic construct
  misc_feature 1..22: note = chemically synthesized
  source 1..22: mol_type = other DNA
agttagttgctcatttctttga

SEQ ID NO: 14746 - DNA, 22 bp, synthetic construct
  misc_feature 1..22: note = chemically synthesized
  source 1..22: mol_type = other DNA
gttgctcatttctttgatttca

SEQ ID NO: 14747 - DNA, 22 bp, synthetic construct
  misc_feature 1..22: note = chemically synthesized
  source 1..22: mol_type = other DNA
ctcatttctttgatttcattta

SEQ ID NO: 14748 - DNA, 22 bp, synthetic construct
  misc_feature 1..22: note = chemically synthesized
  source 1..22: mol_type = other DNA
atttctttgatttcatttagca

SEQ ID NO: 14749 - DNA, 22 bp, synthetic construct
  misc_feature 1..22: note = chemically synthesized
  source 1..22: mol_type = other DNA
ctttgatttcatttagcattga

SEQ ID NO: 14750 - DNA, 22 bp, synthetic construct
  misc_feature 1..22: note = chemically synthesized
  source 1..22: mol_type = other DNA
tttgatttcatttagcattgat

SEQ ID NO: 14751 - DNA, 22 bp, synthetic construct
  misc_feature 1..22: note = chemically synthesized
  source 1..22: mol_type = other DNA
tgatttcatttagcattgatct

SEQ ID NO: 14752 - DNA, 22 bp, synthetic construct
  misc_feature 1..22: note = chemically synthesized
  source 1..22: mol_type = other DNA
gatttcatttagcattgatcta

SEQ ID NO: 14753 - DNA, 22 bp, synthetic construct
  misc_feature 1..22: note = chemically synthesized
  source 1..22: mol_type = other DNA
atttcatttagcattgatctaa

SEQ ID NO: 14754 - DNA, 22 bp, synthetic construct
  misc_feature 1..22: note = chemically synthesized
  source 1..22: mol_type = other DNA
catttagcattgatctaactca

SEQ ID NO: 14755 - DNA, 22 bp, synthetic construct
  misc_feature 1..22: note = chemically synthesized
  source 1..22: mol_type = other DNA
atttagcattgatctaactcaa

SEQ ID NO: 14756 - DNA, 22 bp, synthetic construct
  misc_feature 1..22: note = chemically synthesized
  source 1..22: mol_type = other DNA
agcattgatctaactcaatgtg

SEQ ID NO: 14757 - DNA, 22 bp, synthetic construct
  misc_feature 1..22: note = chemically synthesized
  source 1..22: mol_type = other DNA
gcattgatctaactcaatgtgg

SEQ ID NO: 14758 - DNA, 22 bp, synthetic construct
  misc_feature 1..22: note = chemically synthesized
  source 1..22: mol_type = other DNA
atctaactcaatgtggaagaag

SEQ ID NO: 14759 - DNA, 22 bp, synthetic construct
  misc_feature 1..22: note = chemically synthesized
  source 1..22: mol_type = other DNA
actcaatgtggaagaaggttac

SEQ ID NO: 14760 - DNA, 22 bp, synthetic construct
  misc_feature 1..22: note = chemically synthesized
  source 1..22: mol_type = other DNA
aatgtggaagaaggttacattc

SEQ ID NO: 14761 - DNA, 22 bp, synthetic construct
  misc_feature 1..22: note = chemically synthesized
  source 1..22: mol_type = other DNA
cattcgtgcaagttaacacggc

SEQ ID NO: 14762 - DNA, 22 bp, synthetic construct
  misc_feature 1..22: note = chemically synthesized
  source 1..22: mol_type = other DNA
gtgcaagttaacacggcttaat

SEQ ID NO: 14763 - DNA, 22 bp, synthetic construct
  misc_feature 1..22: note = chemically synthesized
  source 1..22: mol_type = other DNA
acacggcttaatgattaactat

SEQ ID NO: 14764 - DNA, 22 bp, synthetic construct
  misc_feature 1..22: note = chemically synthesized
  source 1..22: mol_type = other DNA
aatgattaactatgttcaccta

SEQ ID NO: 14765 - DNA, 22 bp, synthetic construct
  misc_feature 1..22: note = chemically synthesized
  source 1..22: mol_type = other DNA
atgattaactatgttcacctac

SEQ ID NO: 14766 - DNA, 22 bp, synthetic construct
  misc_feature 1..22: note = chemically synthesized
  source 1..22: mol_type = other DNA
actatgttcacctaccaacctt

SEQ ID NO: 14767 - DNA, 22 bp, synthetic construct
  misc_feature 1..22: note = chemically synthesized
  source 1..22: mol_type = other DNA
tgttcacctaccaaccttacct

SEQ ID NO: 14768 - DNA, 22 bp, synthetic construct
  misc_feature 1..22: note = chemically synthesized
  source 1..22: mol_type = other DNA
acctaccaaccttaccttttct

SEQ ID NO: 14769 - DNA, 22 bp, synthetic construct
  misc_feature 1..22: note = chemically synthesized
  source 1..22: mol_type = other DNA
ccaaccttaccttttctgggca

SEQ ID NO: 14770 - DNA, 22 bp, synthetic construct
  misc_feature 1..22: note = chemically synthesized
  source 1..22: mol_type = other DNA
accttttctgggcaaatattgg

SEQ ID NO: 14771 - DNA, 22 bp, synthetic construct
  misc_feature 1..22: note = chemically synthesized
  source 1..22: mol_type = other DNA
ccttttctgggcaaatattggt

SEQ ID NO: 14772 - DNA, 22 bp, synthetic construct
  misc_feature 1..22: note = chemically synthesized
  source 1..22: mol_type = other DNA
ttctgggcaaatattggtatat

SEQ ID NO: 14773 - DNA, 22 bp, synthetic construct
  misc_feature 1..22: note = chemically synthesized
  source 1..22: mol_type = other DNA
tctgggcaaatattggtatata

SEQ ID NO: 14774 - DNA, 22 bp, synthetic construct
  misc_feature 1..22: note = chemically synthesized
  source 1..22: mol_type = other DNA
ctgggcaaatattggtatatat

SEQ ID NO: 14775 - DNA, 22 bp, synthetic construct
  misc_feature 1..22: note = chemically synthesized
  source 1..22: mol_type = other DNA
tgggcaaatattggtatatata

SEQ ID NO: 14776 - DNA, 22 bp, synthetic construct
  misc_feature 1..22: note = chemically synthesized
  source 1..22: mol_type = other DNA
ggcaaatattggtatatataga

SEQ ID NO: 14777 - DNA, 22 bp, synthetic construct
  misc_feature 1..22: note = chemically synthesized
  source 1..22: mol_type = other DNA
gtatatatagagttaagaagtc

SEQ ID NO: 14778 - DNA, 22 bp, synthetic construct
  misc_feature 1..22: note = chemically synthesized
  source 1..22: mol_type = other DNA
agaagtctaggtctgcttccag

SEQ ID NO: 14779 - DNA, 22 bp, synthetic construct
  misc_feature 1..22: note = chemically synthesized
  source 1..22: mol_type = other DNA
ggtctgcttccagaagaaaaca

SEQ ID NO: 14780 - DNA, 22 bp, synthetic construct
  misc_feature 1..22: note = chemically synthesized
  source 1..22: mol_type = other DNA
cttccagaagaaaacagttcca

SEQ ID NO: 14781 - DNA, 22 bp, synthetic construct
  misc_feature 1..22: note = chemically synthesized
  source 1..22: mol_type = other DNA
ccagaagaaaacagttccacgt

SEQ ID NO: 14782 - DNA, 22 bp, synthetic construct
  misc_feature 1..22: note = chemically synthesized
  source 1..22: mol_type = other DNA
cagaagaaaacagttccacgtt

SEQ ID NO: 14783 - DNA, 22 bp, synthetic construct
  misc_feature 1..22: note = chemically synthesized
  source 1..22: mol_type = other DNA
cacgttgcttgaaattgaaaat

SEQ ID NO: 14784 - DNA, 22 bp, synthetic construct
  misc_feature 1..22: note = chemically synthesized
  source 1..22: mol_type = other DNA
cttgaaattgaaaatcaagata

SEQ ID NO: 14785 - DNA, 22 bp, synthetic construct
  misc_feature 1..22: note = chemically synthesized
  source 1..22: mol_type = other DNA
gaaattgaaaatcaagataaaa

SEQ ID NO: 14786 - DNA, 22 bp, synthetic construct
  misc_feature 1..22: note = chemically synthesized
  source 1..22: mol_type = other DNA
aaattgaaaatcaagataaaaa

SEQ ID NO: 14787 - DNA, 22 bp, synthetic construct
  misc_feature 1..22: note = chemically synthesized
  source 1..22: mol_type = other DNA
aaaatcaagataaaaatgttca

SEQ ID NO: 14788 - DNA, 22 bp, synthetic construct
  misc_feature 1..22: note = chemically synthesized
  source 1..22: mol_type = other DNA
acaattaagctccttcttttta

SEQ ID NO: 14789 - DNA, 22 bp, synthetic construct
  misc_feature 1..22: note = chemically synthesized
  source 1..22: mol_type = other DNA
agctccttctttttattgttcc

SEQ ID NO: 14790 - DNA, 22 bp, synthetic construct
  misc_feature 1..22: note = chemically synthesized
  source 1..22: mol_type = other DNA
cttctttttattgttcctctag

SEQ ID NO: 14791 - DNA, 22 bp, synthetic construct
  misc_feature 1..22: note = chemically synthesized
  source 1..22: mol_type = other DNA
ctttttattgttcctctagtta

SEQ ID NO: 14792 - DNA, 22 bp, synthetic construct
  misc_feature 1..22: note = chemically synthesized
  source 1..22: mol_type = other DNA
tttttattgttcctctagttat

SEQ ID NO: 14793 - DNA, 22 bp, synthetic construct
  misc_feature 1..22: note = chemically synthesized
  source 1..22: mol_type = other DNA
tttattgttcctctagttattt

SEQ ID NO: 14794 - DNA, 22 bp, synthetic construct
  misc_feature 1..22: note = chemically synthesized
  source 1..22: mol_type = other DNA
ttattgttcctctagttatttc

SEQ ID NO: 14795 - DNA, 22 bp, synthetic construct
  misc_feature 1..22: note = chemically synthesized
  source 1..22: mol_type = other DNA
tattgttcctctagttatttcc

SEQ ID NO: 14796 - DNA, 22 bp, synthetic construct
  misc_feature 1..22: note = chemically synthesized
  source 1..22: mol_type = other DNA
attgttcctctagttatttcct

SEQ ID NO: 14797 - DNA, 22 bp, synthetic construct
  misc_feature 1..22: note = chemically synthesized
  source 1..22: mol_type = other DNA
ttgttcctctagttatttcctc

SEQ ID NO: 14798 - DNA, 22 bp, synthetic construct
  misc_feature 1..22: note = chemically synthesized
  source 1..22: mol_type = other DNA
ttcctctagttatttcctccag

SEQ ID NO: 14799 - DNA, 22 bp, synthetic construct
  misc_feature 1..22: note = chemically synthesized
  source 1..22: mol_type = other DNA
ctctagttatttcctccagaat

SEQ ID NO: 14800 - DNA, 22 bp, synthetic construct
  misc_feature 1..22: note = chemically synthesized
  source 1..22: mol_type = other DNA
tagttatttcctccagaattga

SEQ ID NO: 14801 - DNA, 22 bp, synthetic construct
  misc_feature 1..22: note = chemically synthesized
  source 1..22: mol_type = other DNA
gttatttcctccagaattgatc

SEQ ID NO: 14802 - DNA, 22 bp, synthetic construct
  misc_feature 1..22: note = chemically synthesized
  source 1..22: mol_type = other DNA
tttcctccagaattgatcaaga

SEQ ID NO: 14803 - DNA, 22 bp, synthetic construct
  misc_feature 1..22: note = chemically synthesized
  source 1..22: mol_type = other DNA
cctccagaattgatcaagacaa

SEQ ID NO: 14804 - DNA, 22 bp, synthetic construct
  misc_feature 1..22: note = chemically synthesized
  source 1..22: mol_type = other DNA
ctccagaattgatcaagacaat

SEQ ID NO: 14805 - DNA, 22 bp, synthetic construct
  misc_feature 1..22: note = chemically synthesized
  source 1..22: mol_type = other DNA
cagaattgatcaagacaattca

SEQ ID NO: 14806 - DNA, 22 bp, synthetic construct
  misc_feature 1..22: note = chemically synthesized
  source 1..22: mol_type = other DNA
atcaagacaattcatcatttga

SEQ ID NO: 14807 - DNA, 22 bp, synthetic construct
  misc_feature 1..22: note = chemically synthesized
  source 1..22: mol_type = other DNA
atcatttgattctctatctcca

SEQ ID NO: 14808 - DNA, 22 bp, synthetic construct
  misc_feature 1..22: note = chemically synthesized
  source 1..22: mol_type = other DNA
gattctctatctccagagccaa

SEQ ID NO: 14809 - DNA, 22 bp, synthetic construct
  misc_feature 1..22: note = chemically synthesized
  source 1..22: mol_type = other DNA
attctctatctccagagccaaa

SEQ ID NO: 14810 - DNA, 22 bp, synthetic construct
  misc_feature 1..22: note = chemically synthesized
  source 1..22: mol_type = other DNA
tctatctccagagccaaaatca

SEQ ID NO: 14811 - DNA, 22 bp, synthetic construct
  misc_feature 1..22: note = chemically synthesized
  source 1..22: mol_type = other DNA
tatctccagagccaaaatcaag

SEQ ID NO: 14812 - DNA, 22 bp, synthetic construct
  misc_feature 1..22: note = chemically synthesized
  source 1..22: mol_type = other DNA
tctccagagccaaaatcaagat

SEQ ID NO: 14813 - DNA, 22 bp, synthetic construct
  misc_feature 1..22: note = chemically synthesized
  source 1..22: mol_type = other DNA
cagagccaaaatcaagatttgc

SEQ ID NO: 14814 - DNA, 22 bp, synthetic construct
  misc_feature 1..22: note = chemically synthesized
  source 1..22: mol_type = other DNA
gctatgttagacgatgtaaaaa

SEQ ID NO: 14815 - DNA, 22 bp, synthetic construct
  misc_feature 1..22: note = chemically synthesized
  source 1..22: mol_type = other DNA
ctatgttagacgatgtaaaaat

SEQ ID NO: 14816 - DNA, 22 bp, synthetic construct
  misc_feature 1..22: note = chemically synthesized
  source 1..22: mol_type = other DNA
tgttagacgatgtaaaaatttt

SEQ ID NO: 14817 - DNA, 22 bp, synthetic construct
  misc_feature 1..22: note = chemically synthesized
  source 1..22: mol_type = other DNA
gacgatgtaaaaattttagcca

SEQ ID NO: 14818 - DNA, 22 bp, synthetic construct
  misc_feature 1..22: note = chemically synthesized
  source 1..22: mol_type = other DNA
tagccaatggcctccttcagtt

SEQ ID NO: 14819 - DNA, 22 bp, synthetic construct
  misc_feature 1..22: note = chemically synthesized
  source 1..22: mol_type = other DNA
agccaatggcctccttcagttg

SEQ ID NO: 14820 - DNA, 22 bp, synthetic construct
  misc_feature 1..22: note = chemically synthesized
  source 1..22: mol_type = other DNA
gccaatggcctccttcagttgg

SEQ ID NO: 14821 - DNA, 22 bp, synthetic construct
  misc_feature 1..22: note = chemically synthesized
  source 1..22: mol_type = other DNA
cttcagttgggacatggtctta

SEQ ID NO: 14822 - DNA, 22 bp, synthetic construct
  misc_feature 1..22: note = chemically synthesized
  source 1..22: mol_type = other DNA
cagttgggacatggtcttaaag

SEQ ID NO: 14823 - DNA, 22 bp, synthetic construct
  misc_feature 1..22: note = chemically synthesized
  source 1..22: mol_type = other DNA
agttgggacatggtcttaaaga

SEQ ID NO: 14824 - DNA, 22 bp, synthetic construct
  misc_feature 1..22: note = chemically synthesized
  source 1..22: mol_type = other DNA
ggacatggtcttaaagactttg

SEQ ID NO: 14825 - DNA, 22 bp, synthetic construct
  misc_feature 1..22: note = chemically synthesized
  source 1..22: mol_type = other DNA
aaagactttgtccataagacga

SEQ ID NO: 14826 - DNA, 22 bp, synthetic construct
  misc_feature 1..22: note = chemically synthesized
  source 1..22: mol_type = other DNA
aagactttgtccataagacgaa

SEQ ID NO: 14827 - DNA, 22 bp, synthetic construct
  misc_feature 1..22: note = chemically synthesized
  source 1..22: mol_type = other DNA
tgtccataagacgaagggccaa

SEQ ID NO: 14828 - DNA, 22 bp, synthetic construct
  misc_feature 1..22: note = chemically synthesized
  source 1..22: mol_type = other DNA
gtccataagacgaagggccaaa

SEQ ID NO: 14829 - DNA, 22 bp, synthetic construct
  misc_feature 1..22: note = chemically synthesized
  source 1..22: mol_type = other DNA
tccataagacgaagggccaaat

SEQ ID NO: 14830 - DNA, 22 bp, synthetic construct
  misc_feature 1..22: note = chemically synthesized
  source 1..22: mol_type = other DNA
atgacatatttcaaaaactcaa

SEQ ID NO: 14831 - DNA, 22 bp, synthetic construct
  misc_feature 1..22: note = chemically synthesized
  source 1..22: mol_type = other DNA
caaaaactcaacatatttgatc

SEQ ID NO: 14832 - DNA, 22 bp, synthetic construct
  misc_feature 1..22: note = chemically synthesized
  source 1..22: mol_type = other DNA
aaaaactcaacatatttgatca

SEQ ID NO: 14833 - DNA, 22 bp, synthetic construct
  misc_feature 1..22: note = chemically synthesized
  source 1..22: mol_type = other DNA
aacatatttgatcagtcttttt

SEQ ID NO: 14834 - DNA, 22 bp, synthetic construct
  misc_feature 1..22: note = chemically synthesized
  source 1..22: mol_type = other DNA
gatcagtctttttatgatctat

SEQ ID NO: 14835 - DNA, 22 bp, synthetic construct
  misc_feature 1..22: note = chemically synthesized
  source 1..22: mol_type = other DNA
atcagtctttttatgatctatc

SEQ ID NO: 14836 - DNA, 22 bp, synthetic construct
  misc_feature 1..22: note = chemically synthesized
  source 1..22: mol_type = other DNA
tttatgatctatcgctgcaaac

SEQ ID NO: 14837 - DNA, 22 bp, synthetic construct
  misc_feature 1..22: note = chemically synthesized
  source 1..22: mol_type = other DNA
ttatgatctatcgctgcaaacc

SEQ ID NO: 14838 - DNA, 22 bp, synthetic construct
  misc_feature 1..22: note = chemically synthesized
  source 1..22: mol_type = other DNA
tatgatctatcgctgcaaacca

SEQ ID NO: 14839 - DNA, 22 bp, synthetic construct
  misc_feature 1..22: note = chemically synthesized
  source 1..22: mol_type = other DNA
atgatctatcgctgcaaaccag

SEQ ID NO: 14840 - DNA, 22 bp, synthetic construct
  misc_feature 1..22: note = chemically synthesized
  source 1..22: mol_type = other DNA
tgatctatcgctgcaaaccagt

SEQ ID NO: 14841 - DNA, 22 bp, synthetic construct
  misc_feature 1..22: note = chemically synthesized
  source 1..22: mol_type = other DNA
tcgctgcaaaccagtgaaatca

SEQ ID NO: 14842 - DNA, 22 bp, synthetic construct
  misc_feature 1..22: note = chemically synthesized
  source 1..22: mol_type = other DNA
caaaccagtgaaatcaaagaag

SEQ ID NO: 14843 - DNA, 22 bp, synthetic construct
  misc_feature 1..22: note = chemically synthesized
  source 1..22: mol_type = other DNA
agaagaactacatataaactac

SEQ ID NO: 14844 - DNA, 22 bp, synthetic construct
  misc_feature 1..22: note = chemically synthesized
  source 1..22: mol_type = other DNA
catataaactacaagtcaaaaa

SEQ ID NO: 14845 - DNA, 22 bp, synthetic construct
  misc_feature 1..22: note = chemically synthesized
  source 1..22: mol_type = other DNA
caagtcaaaaatgaagaggtaa

SEQ ID NO: 14846 - DNA, 22 bp, synthetic construct
  misc_feature 1..22: note = chemically synthesized
  source 1..22: mol_type = other DNA
gaactcaactcaaaacttgaaa

SEQ ID NO: 14847 - DNA, 22 bp, synthetic construct
  misc_feature 1..22: note = chemically synthesized
  source 1..22: mol_type = other DNA
aactcaactcaaaacttgaaag

SEQ ID NO: 14848 - DNA, 22 bp, synthetic construct
  misc_feature 1..22: note = chemically synthesized
  source 1..22: mol_type = other DNA
aactcaaaacttgaaagcctcc

SEQ ID NO: 14849 - DNA, 22 bp, synthetic construct
  misc_feature 1..22: note = chemically synthesized
  source 1..22: mol_type = other DNA
aaaacttgaaagcctcctagaa

SEQ ID NO: 14850 - DNA, 22 bp, synthetic construct
  misc_feature 1..22: note = chemically synthesized
  source 1..22: mol_type = other DNA
gaaagcctcctagaagaaaaaa

SEQ ID NO: 14851 - DNA, 22 bp, synthetic construct
  misc_feature 1..22: note = chemically synthesized
  source 1..22: mol_type = other DNA
aaagcctcctagaagaaaaaat

SEQ ID NO: 14852 - DNA, 22 bp, synthetic construct
  misc_feature 1..22: note = chemically synthesized
  source 1..22: mol_type = other DNA
ctagaagaaaaaattctacttc

SEQ ID NO: 14853 - DNA, 22 bp, synthetic construct
  misc_feature 1..22: note = chemically synthesized
  source 1..22: mol_type = other DNA
gaagaaaaaattctacttcaac

SEQ ID NO: 14854 - DNA, 22 bp, synthetic construct
  misc_feature 1..22: note = chemically synthesized
  source 1..22: mol_type = other DNA
tacttcaacaaaaagtgaaata

SEQ ID NO: 14855 - DNA, 22 bp, synthetic construct
  misc_feature 1..22: note = chemically synthesized
  source 1..22: mol_type = other DNA
cttcaacaaaaagtgaaatatt

SEQ ID NO: 14856 - DNA, 22 bp, synthetic construct
  misc_feature 1..22: note = chemically synthesized
  source 1..22: mol_type = other DNA
caacaaaaagtgaaatatttag

SEQ ID NO: 14857 - DNA, 22 bp, synthetic construct
  misc_feature 1..22: note = chemically synthesized
  source 1..22: mol_type = other DNA
aacaaaaagtgaaatatttaga

SEQ ID NO: 14858 - DNA, 22 bp, synthetic construct
  misc_feature 1..22: note = chemically synthesized
  source 1..22: mol_type = other DNA
agaagagcaactaactaactta

SEQ ID NO: 14859 - DNA, 22 bp, synthetic construct
  misc_feature 1..22: note = chemically synthesized
  source 1..22: mol_type = other DNA
gaagagcaactaactaacttaa

SEQ ID NO: 14860 - DNA, 22 bp, synthetic construct
  misc_feature 1..22: note = chemically synthesized
  source 1..22: mol_type = other DNA
actaacttaattcaaaatcaac

SEQ ID NO: 14861 - DNA, 22 bp, synthetic construct
  misc_feature 1..22: note = chemically synthesized
  source 1..22: mol_type = other DNA
acttaattcaaaatcaacctga

SEQ ID NO: 14862 - DNA, 22 bp, synthetic construct
  misc_feature 1..22: note = chemically synthesized
  source 1..22: mol_type = other DNA
aattcaaaatcaacctgaaact

SEQ ID NO: 14863 - DNA, 22 bp, synthetic construct
  misc_feature 1..22: note = chemically synthesized
  source 1..22: mol_type = other DNA
attcaaaatcaacctgaaactc

SEQ ID NO: 14864 - DNA, 22 bp, synthetic construct
  misc_feature 1..22: note = chemically synthesized
  source 1..22: mol_type = other DNA
aaaatcaacctgaaactccaga

SEQ ID NO: 14865 - DNA, 22 bp, synthetic construct
  misc_feature 1..22: note = chemically synthesized
  source 1..22: mol_type = other DNA
aaactccagaacacccagaagt

SEQ ID NO: 14866 - DNA, 22 bp, synthetic construct
  misc_feature 1..22: note = chemically synthesized
  source 1..22: mol_type = other DNA
cagaacacccagaagtaacttc

SEQ ID NO: 14867 - DNA, 22 bp, synthetic construct
  misc_feature 1..22: note = chemically synthesized
  source 1..22: mol_type = other DNA
cacttaaagtaagtagaaaata

SEQ ID NO: 14868 - DNA, 22 bp, synthetic construct
  misc_feature 1..22: note = chemically synthesized
  source 1..22: mol_type = other DNA
acttaaagtaagtagaaaataa

SEQ ID NO: 14869 - DNA, 22 bp, synthetic construct
  misc_feature 1..22: note = chemically synthesized
  source 1..22: mol_type = other DNA
aaagtaagtagaaaataaagag

SEQ ID NO: 14870 - DNA, 22 bp, synthetic construct
  misc_feature 1..22: note = chemically synthesized
  source 1..22: mol_type = other DNA
aagtaagtagaaaataaagagg

SEQ ID NO: 14871 - DNA, 22 bp, synthetic construct
  misc_feature 1..22: note = chemically synthesized
  source 1..22: mol_type = other DNA
atgtttatgttttcaatgtgga

SEQ ID NO: 14872 - DNA, 22 bp, synthetic construct
  misc_feature 1..22: note = chemically synthesized
  source 1..22: mol_type = other DNA
atgttttcaatgtggatctttt

SEQ ID NO: 14873 - DNA, 22 bp, synthetic construct
  misc_feature 1..22: note = chemically synthesized
  source 1..22: mol_type = other DNA
tgttttcaatgtggatctttta

SEQ ID NO: 14874 - DNA, 22 bp, synthetic construct
  misc_feature 1..22: note = chemically synthesized
  source 1..22: mol_type = other DNA
tcaatgtggatcttttaaaaaa

SEQ ID NO: 14875 - DNA, 22 bp, synthetic construct
  misc_feature 1..22: note = chemically synthesized
  source 1..22: mol_type = other DNA
caatgtggatcttttaaaaaaa

SEQ ID NO: 14876 - DNA, 22 bp, synthetic construct
  misc_feature 1..22: note = chemically synthesized
  source 1..22: mol_type = other DNA
aatgtggatcttttaaaaaaaa

SEQ ID NO: 14877 - DNA, 22 bp, synthetic construct
  misc_feature 1..22: note = chemically synthesized
  source 1..22: mol_type = other DNA
ttaaaaaaaatatttctaaggc

SEQ ID NO: 14878 - DNA, 22 bp, synthetic construct
  misc_feature 1..22: note = chemically synthesized
  source 1..22: mol_type = other DNA
taaaaaaaatatttctaaggca

SEQ ID NO: 14879 - DNA, 22 bp, synthetic construct
  misc_feature 1..22: note = chemically synthesized
  source 1..22: mol_type = other DNA
aaaaaaaatatttctaaggcat

SEQ ID NO: 14880 - DNA, 22 bp, synthetic construct
  misc_feature 1..22: note = chemically synthesized
  source 1..22: mol_type = other DNA
aaaaaaatatttctaaggcatg

SEQ ID NO: 14881 - DNA, 22 bp, synthetic construct
  misc_feature 1..22: note = chemically synthesized
  source 1..22: mol_type = other DNA
ctaaggcatgccatttgaaata

SEQ ID NO: 14882 - DNA, 22 bp, synthetic construct
  misc_feature 1..22: note = chemically synthesized
  source 1..22: mol_type = other DNA
taaggcatgccatttgaaatac

SEQ ID NO: 14883 - DNA, 22 bp, synthetic construct
  misc_feature 1..22: note = chemically synthesized
  source 1..22: mol_type = other DNA
aggcatgccatttgaaatactt

SEQ ID NO: 14884 - DNA, 22 bp, synthetic construct
  misc_feature 1..22: note = chemically synthesized
  source 1..22: mol_type = other DNA
gaaatactttgttgcattgttg

SEQ ID NO: 14885 - DNA, 22 bp, synthetic construct
  misc_feature 1..22: note = chemically synthesized
  source 1..22: mol_type = other DNA
aaatactttgttgcattgttga

SEQ ID NO: 14886 - DNA, 22 bp, synthetic construct
  misc_feature 1..22: note = chemically synthesized
  source 1..22: mol_type = other DNA
tgttgcattgttgaaatacttt

SEQ ID NO: 14887 - DNA, 22 bp, synthetic construct
  misc_feature 1..22: note = chemically synthesized
  source 1..22: mol_type = other DNA
gttgcattgttgaaatactttt

SEQ ID NO: 14888 - DNA, 22 bp, synthetic construct
  misc_feature 1..22: note = chemically synthesized
  source 1..22: mol_type = other DNA
ttgcattgttgaaatacttttt

SEQ ID NO: 14889 - DNA, 22 bp, synthetic construct
  misc_feature 1..22: note = chemically synthesized
  source 1..22: mol_type = other DNA
cattgttgaaatactttttttt

SEQ ID NO: 14890 - DNA, 22 bp, synthetic construct
  misc_feature 1..22: note = chemically synthesized
  source 1..22: mol_type = other DNA
ttgaaatacttttttttccaag

SEQ ID NO: 14891 - DNA, 22 bp, synthetic construct
  misc_feature 1..22: note = chemically synthesized
  source 1..22: mol_type = other DNA
aaatacttttttttccaagaaa

SEQ ID NO: 14892 - DNA, 22 bp, synthetic construct
  misc_feature 1..22: note = chemically synthesized
  source 1..22: mol_type = other DNA
ttttttccaagaaaaataatct

SEQ ID NO: 14893 - DNA, 22 bp, synthetic construct
  misc_feature 1..22: note = chemically synthesized
  source 1..22: mol_type = other DNA
tttttccaagaaaaataatctc

SEQ ID NO: 14894 - DNA, 22 bp, synthetic construct
  misc_feature 1..22: note = chemically synthesized
  source 1..22: mol_type = other DNA
ttttccaagaaaaataatctcc

SEQ ID NO: 14895 - DNA, 22 bp, synthetic construct
  misc_feature 1..22: note = chemically synthesized
  source 1..22: mol_type = other DNA
tttccaagaaaaataatctcca

SEQ ID NO: 14896 - DNA, 22 bp, synthetic construct
  misc_feature 1..22: note = chemically synthesized
  source 1..22: mol_type = other DNA
ttccaagaaaaataatctccag

SEQ ID NO: 14897 - DNA, 22 bp, synthetic construct
  misc_feature 1..22: note = chemically synthesized
  source 1..22: mol_type = other DNA
tccaagaaaaataatctccaga

SEQ ID NO: 14898 - DNA, 22 bp, synthetic construct
  misc_feature 1..22: note = chemically synthesized
  source 1..22: mol_type = other DNA
ccaagaaaaataatctccagaa

SEQ ID NO: 14899 - DNA, 22 bp, synthetic construct
  misc_feature 1..22: note = chemically synthesized
  source 1..22: mol_type = other DNA
caagaaaaataatctccagaaa

SEQ ID NO: 14900 - DNA, 22 bp, synthetic construct
  misc_feature 1..22: note = chemically synthesized
  source 1..22: mol_type = other DNA
cagaaaataaaatttcctatta

SEQ ID NO: 14901 - DNA, 22 bp, synthetic construct
  misc_feature 1..22: note = chemically synthesized
  source 1..22: mol_type = other DNA
cctattataatttcaagttagt

SEQ ID NO: 14902 - DNA, 22 bp, synthetic construct
  misc_feature 1..22: note = chemically synthesized
  source 1..22: mol_type = other DNA
ctattataatttcaagttagtt

SEQ ID NO: 14903 - DNA, 22 bp, synthetic construct
  misc_feature 1..22: note = chemically synthesized
  source 1..22: mol_type = other DNA
ttataatttcaagttagttttt

SEQ ID NO: 14904 - DNA, 22 bp, synthetic construct
  misc_feature 1..22: note = chemically synthesized
  source 1..22: mol_type = other DNA
taatttcaagttagttttttgt

SEQ ID NO: 14905 - DNA, 22 bp, synthetic construct
  misc_feature 1..22: note = chemically synthesized
  source 1..22: mol_type = other DNA
caagttagttttttgtttccct

SEQ ID NO: 14906 - DNA, 22 bp, synthetic construct
  misc_feature 1..22: note = chemically synthesized
  source 1..22: mol_type = other DNA
aagttagttttttgtttcccta

SEQ ID NO: 14907 - DNA, 22 bp, synthetic construct
  misc_feature 1..22: note = chemically synthesized
  source 1..22: mol_type = other DNA
gttttttgtttccctaatgtta

SEQ ID NO: 14908 - DNA, 22 bp, synthetic construct
  misc_feature 1..22: note = chemically synthesized
  source 1..22: mol_type = other DNA
tttgtttccctaatgttatata

SEQ ID NO: 14909 - DNA, 22 bp, synthetic construct
  misc_feature 1..22: note = chemically synthesized
  source 1..22: mol_type = other DNA
ttgtttccctaatgttatatat

SEQ ID NO: 14910 - DNA, 22 bp, synthetic construct
  misc_feature 1..22: note = chemically synthesized
  source 1..22: mol_type = other DNA
tgtttccctaatgttatatatg

SEQ ID NO: 14911 - DNA, 22 bp, synthetic construct
  misc_feature 1..22: note = chemically synthesized
  source 1..22: mol_type = other DNA
gtttccctaatgttatatatga

SEQ ID NO: 14912 - DNA, 22 bp, synthetic construct
  misc_feature 1..22: note = chemically synthesized
  source 1..22: mol_type = other DNA
tttccctaatgttatatatgaa

SEQ ID NO: 14913 - DNA, 22 bp, synthetic construct
  misc_feature 1..22: note = chemically synthesized
  source 1..22: mol_type = other DNA
ccctaatgttatatatgaaaac

SEQ ID NO: 14914 - DNA, 22 bp, synthetic construct
  misc_feature 1..22: note = chemically synthesized
  source 1..22: mol_type = other DNA
cctaatgttatatatgaaaaca

SEQ ID NO: 14915 - DNA, 22 bp, synthetic construct
  misc_feature 1..22: note = chemically synthesized
  source 1..22: mol_type = other DNA
atgttatatatgaaaacactga

SEQ ID NO: 14916 - DNA, 22 bp, synthetic construct
  misc_feature 1..22: note = chemically synthesized
  source 1..22: mol_type = other DNA
tatatgaaaacactgaaaattt

SEQ ID NO: 14917 - DNA, 22 bp, synthetic construct
  misc_feature 1..22: note = chemically synthesized
  source 1..22: mol_type = other DNA
aaaatttgcattttatatgaaa

SEQ ID NO: 14918 - DNA, 22 bp, synthetic construct
  misc_feature 1..22: note = chemically synthesized
  source 1..22: mol_type = other DNA
gcattttatatgaaaattacaa

SEQ ID NO: 14919 - DNA, 22 bp, synthetic construct
  misc_feature 1..22: note = chemically synthesized
  source 1..22: mol_type = other DNA
cattttatatgaaaattacaaa

SEQ ID NO: 14920 - DNA, 22 bp, synthetic construct
  misc_feature 1..22: note = chemically synthesized
  source 1..22: mol_type = other DNA
tatatgaaaattacaaatcggt

SEQ ID NO: 14921 - DNA, 22 bp, synthetic construct
  misc_feature 1..22: note = chemically synthesized
  source 1..22: mol_type = other DNA
atatgaaaattacaaatcggtt

SEQ ID NO: 14922 - DNA, 22 bp, synthetic construct
  misc_feature 1..22: note = chemically synthesized
  source 1..22: mol_type = other DNA
tatgaaaattacaaatcggtta

SEQ ID NO: 14923 - DNA, 22 bp, synthetic construct
  misc_feature 1..22: note = chemically synthesized
  source 1..22: mol_type = other DNA
caaatcggttaaattatacaat

SEQ ID NO: 14924 - DNA, 22 bp, synthetic construct
  misc_feature 1..22: note = chemically synthesized
  source 1..22: mol_type = other DNA
aattatacaatctagaacacta

SEQ ID NO: 14925 - DNA, 22 bp, synthetic construct
  misc_feature 1..22: note = chemically synthesized
  source 1..22: mol_type = other DNA
tacaatctagaacactatgtca

SEQ ID NO: 14926 - DNA, 22 bp, synthetic construct
  misc_feature 1..22: note = chemically synthesized
  source 1..22: mol_type = other DNA
gaacactatgtcattacactat

SEQ ID NO: 14927 - DNA, 22 bp, synthetic construct
  misc_feature 1..22: note = chemically synthesized
  source 1..22: mol_type = other DNA
tgtcattacactattgtaaatt

SEQ ID NO: 14928 - DNA, 22 bp, synthetic construct
  misc_feature 1..22: note = chemically synthesized
  source 1..22: mol_type = other DNA
cactattgtaaattactgaagg

SEQ ID NO: 14929 - DNA, 22 bp, synthetic construct
  misc_feature 1..22: note = chemically synthesized
  source 1..22: mol_type = other DNA
ttgtaaattactgaaggtaagt

SEQ ID NO: 14930 - DNA, 22 bp, synthetic construct
  misc_feature 1..22: note = chemically synthesized
  source 1..22: mol_type = other DNA
taaattactgaaggtaagtaaa

SEQ ID NO: 14931 - DNA, 22 bp, synthetic construct
  misc_feature 1..22: note = chemically synthesized
  source 1..22: mol_type = other DNA
ctgaaggtaagtaaaaagttaa

SEQ ID NO: 14932 - DNA, 22 bp, synthetic construct
  misc_feature 1..22: note = chemically synthesized
  source 1..22: mol_type = other DNA
aaggtaagtaaaaagttaaaaa

SEQ ID NO: 14933 - DNA, 22 bp, synthetic construct
  misc_feature 1..22: note = chemically synthesized
  source 1..22: mol_type = other DNA
aaaaaaatttaaaactattctc

SEQ ID NO: 14934 - DNA, 22 bp, synthetic construct
  misc_feature 1..22: note = chemically synthesized
  source 1..22: mol_type = other DNA
aaaactattctccagtgtttaa

SEQ ID NO: 14935 - DNA, 22 bp, synthetic construct
  misc_feature 1..22: note = chemically synthesized
  source 1..22: mol_type = other DNA
aaactattctccagtgtttaaa

SEQ ID NO: 14936 - DNA, 22 bp, synthetic construct
  misc_feature 1..22: note = chemically synthesized
  source 1..22: mol_type = other DNA
ttctccagtgtttaaaacagat

SEQ ID NO: 14937 - DNA, 22 bp, synthetic construct
  misc_feature 1..22: note = chemically synthesized
  source 1..22: mol_type = other DNA
tccagtgtttaaaacagattaa

SEQ ID NO: 14938 - DNA, 22 bp, synthetic construct
  misc_feature 1..22: note = chemically synthesized
  source 1..22: mol_type = other DNA
cagtgtttaaaacagattaaat

SEQ ID NO: 14939 - DNA, 22 bp, synthetic construct
  misc_feature 1..22: note = chemically synthesized
  source 1..22: mol_type = other DNA
aaaacagattaaataatacagt

SEQ ID NO: 14940 - DNA, 22 bp, synthetic construct
  misc_feature 1..22: note = chemically synthesized
  source 1..22: mol_type = other DNA
aaacagattaaataatacagta

SEQ ID NO: 14941 - DNA, 22 bp, synthetic construct
  misc_feature 1..22: note = chemically synthesized
  source 1..22: mol_type = other DNA
aataatacagtaaatggaaaag

SEQ ID NO: 14942 - DNA, 22 bp, synthetic construct
  misc_feature 1..22: note = chemically synthesized
  source 1..22: mol_type = other DNA
attcatatgaaaatatgctggg

SEQ ID NO: 14943 - DNA, 22 bp, synthetic construct
  misc_feature 1..22: note = chemically synthesized
  source 1..22: mol_type = other DNA
ttcatatgaaaatatgctgggc

SEQ ID NO: 14944 - DNA, 22 bp, synthetic construct
  misc_feature 1..22: note = chemically synthesized
  source 1..22: mol_type = other DNA
atatgaaaatatgctgggcttt

SEQ ID NO: 14945 - DNA, 22 bp, synthetic construct
  misc_feature 1..22: note = chemically synthesized
  source 1..22: mol_type = other DNA
ggctttttcttttaattgaagt

SEQ ID NO: 14946 - DNA, 22 bp, synthetic construct
  misc_feature 1..22: note = chemically synthesized
  source 1..22: mol_type = other DNA
tttcttttaattgaagttcaga

SEQ ID NO: 14947 - DNA, 22 bp, synthetic construct
  misc_feature 1..22: note = chemically synthesized
  source 1..22: mol_type = other DNA
ttcttttaattgaagttcagaa

SEQ ID NO: 14948 - DNA, 22 bp, synthetic construct
  misc_feature 1..22: note = chemically synthesized
  source 1..22: mol_type = other DNA
tcttttaattgaagttcagaaa

SEQ ID NO: 14949 - DNA, 22 bp, synthetic construct
  misc_feature 1..22: note = chemically synthesized
  source 1..22: mol_type = other DNA
cttttaattgaagttcagaaaa

SEQ ID NO: 14950 - DNA, 22 bp, synthetic construct
  misc_feature 1..22: note = chemically synthesized
  source 1..22: mol_type = other DNA
ttttaattgaagttcagaaaat

SEQ ID NO: 14951 - DNA, 22 bp, synthetic construct
  misc_feature 1..22: note = chemically synthesized
  source 1..22: mol_type = other DNA
ttaattgaagttcagaaaatca

SEQ ID NO: 14952 - DNA, 22 bp, synthetic construct
  misc_feature 1..22: note = chemically synthesized
  source 1..22: mol_type = other DNA
taattgaagttcagaaaatcaa

SEQ ID NO: 14953 - DNA, 22 bp, synthetic construct
  misc_feature 1..22: note = chemically synthesized
  source 1..22: mol_type = other DNA
aattgaagttcagaaaatcaaa

SEQ ID NO: 14954 - DNA, 22 bp, synthetic construct
  misc_feature 1..22: note = chemically synthesized
  source 1..22: mol_type = other DNA
attgaagttcagaaaatcaaat

SEQ ID NO: 14955 - DNA, 22 bp, synthetic construct
  misc_feature 1..22: note = chemically synthesized
  source 1..22: mol_type = other DNA
aagttcagaaaatcaaatttta

SEQ ID NO: 14956 - DNA, 22 bp, synthetic construct
  misc_feature 1..22: note = chemically synthesized
  source 1..22: mol_type = other DNA
agaaaatcaaattttagagata

SEQ ID NO: 14957 - DNA, 22 bp, synthetic construct
  misc_feature 1..22: note = chemically synthesized
  source 1..22: mol_type = other DNA
tagagatagtacaatttaaata

SEQ ID NO: 14958 - DNA, 22 bp, synthetic construct
  misc_feature 1..22: note = chemically synthesized
  source 1..22: mol_type = other DNA
agagatagtacaatttaaataa

SEQ ID NO: 14959 - DNA, 22 bp, synthetic construct
  misc_feature 1..22: note = chemically synthesized
  source 1..22: mol_type = other DNA
gagatagtacaatttaaataaa

SEQ ID NO: 14960 - DNA, 22 bp, synthetic construct
  misc_feature 1..22: note = chemically synthesized
  source 1..22: mol_type = other DNA
aaataaaatgttaaggacaaaa

SEQ ID NO: 14961 - DNA, 22 bp, synthetic construct
  misc_feature 1..22: note = chemically synthesized
  source 1..22: mol_type = other DNA
aataaaatgttaaggacaaaaa

SEQ ID NO: 14962 - DNA, 22 bp, synthetic construct
  misc_feature 1..22: note = chemically synthesized
  source 1..22: mol_type = other DNA
aggacaaaaatatgtgctattt

SEQ ID NO: 14963 - DNA, 22 bp, synthetic construct
  misc_feature 1..22: note = chemically synthesized
  source 1..22: mol_type = other DNA
tttgaaagaagcatacaagggg

SEQ ID NO: 14964 - DNA, 22 bp, synthetic construct
  misc_feature 1..22: note = chemically synthesized
  source 1..22: mol_type = other DNA
gaaagaagcatacaaggggaag

SEQ ID NO: 14965 - DNA, 22 bp, synthetic construct
  misc_feature 1..22: note = chemically synthesized
  source 1..22: mol_type = other DNA
aaagaagcatacaaggggaagg

SEQ ID NO: 14966 - DNA, 22 bp, synthetic construct
  misc_feature 1..22: note = chemically synthesized
  source 1..22: mol_type = other DNA
ccaatattcatttttcaaatcc

SEQ ID NO: 14967 - DNA, 22 bp, synthetic construct
  misc_feature 1..22: note = chemically synthesized
  source 1..22: mol_type = other DNA
atttttcaaatccattattagt

SEQ ID NO: 14968 - DNA, 22 bp, synthetic construct
  misc_feature 1..22: note = chemically synthesized
  source 1..22: mol_type = other DNA
ttcaaatccattattagtttaa

SEQ ID NO: 14969 - DNA, 22 bp, synthetic construct
  misc_feature 1..22: note = chemically synthesized
  source 1..22: mol_type = other DNA
tcaaatccattattagtttaaa

SEQ ID NO: 14970 - DNA, 22 bp, synthetic construct
  misc_feature 1..22: note = chemically synthesized
  source 1..22: mol_type = other DNA
caaatccattattagtttaaaa

SEQ ID NO: 14971 - DNA, 22 bp, synthetic construct
  misc_feature 1..22: note = chemically synthesized
  source 1..22: mol_type = other DNA
aaatccattattagtttaaaaa

SEQ ID NO: 14972 - DNA, 22 bp, synthetic construct
  misc_feature 1..22: note = chemically synthesized
  source 1..22: mol_type = other DNA
ttagtttaaaaatttagattat

SEQ ID NO: 14973 - DNA, 22 bp, synthetic construct
  misc_feature 1..22: note = chemically synthesized
  source 1..22: mol_type = other DNA
gtttaaaaatttagattatgat

SEQ ID NO: 14974 - DNA, 22 bp, synthetic construct
  misc_feature 1..22: note = chemically synthesized
  source 1..22: mol_type = other DNA
aaaaatttagattatgatagtg

SEQ ID NO: 14975 - DNA, 22 bp, synthetic construct
  misc_feature 1..22: note = chemically synthesized
  source 1..22: mol_type = other DNA
aaaatttagattatgatagtgt

SEQ ID NO: 14976 - DNA, 22 bp, synthetic construct
  misc_feature 1..22: note = chemically synthesized
  source 1..22: mol_type = other DNA
agattatgatagtgttacagga

SEQ ID NO: 14977 - DNA, 22 bp, synthetic construct
  misc_feature 1..22: note = chemically synthesized
  source 1..22: mol_type = other DNA
gattatgatagtgttacaggaa

SEQ ID NO: 14978 - DNA, 22 bp, synthetic construct
  misc_feature 1..22: note = chemically synthesized
  source 1..22: mol_type = other DNA
tgatagtgttacaggaaattaa

SEQ ID NO: 14979 - DNA, 22 bp, synthetic construct
  misc_feature 1..22: note = chemically synthesized
  source 1..22: mol_type = other DNA
caggaaattaatagaaaagaaa

SEQ ID NO: 14980 - DNA, 22 bp, synthetic construct
  misc_feature 1..22: note = chemically synthesized
  source 1..22: mol_type = other DNA
atagaaaagaaagaggaaagca

SEQ ID NO: 14981 - DNA, 22 bp, synthetic construct
  misc_feature 1..22: note = chemically synthesized
  source 1..22: mol_type = other DNA
ataaccaacctactctctatat

SEQ ID NO: 14982 - DNA, 22 bp, synthetic construct
  misc_feature 1..22: note = chemically synthesized
  source 1..22: mol_type = other DNA
taaccaacctactctctatatc

SEQ ID NO: 14983 - DNA, 22 bp, synthetic construct
  misc_feature 1..22: note = chemically synthesized
  source 1..22: mol_type = other DNA
ctctctatatccagacttttgt

SEQ ID NO: 14984 - DNA, 22 bp, synthetic construct
  misc_feature 1..22: note = chemically synthesized
  source 1..22: mol_type = other DNA
tctatatccagacttttgtaga

SEQ ID NO: 14985 - DNA, 22 bp, synthetic construct
  misc_feature 1..22: note = chemically synthesized
  source 1..22: mol_type = other DNA
tatatccagacttttgtagaaa

SEQ ID NO: 14986 - DNA, 22 bp, synthetic construct
  misc_feature 1..22: note = chemically synthesized
  source 1..22: mol_type = other DNA
tatccagacttttgtagaaaaa

SEQ ID NO: 14987 - DNA, 22 bp, synthetic construct
  misc_feature 1..22: note = chemically synthesized
  source 1..22: mol_type = other DNA
ttgtagaaaaacaagataatag

SEQ ID NO: 14988 - DNA, 22 bp, synthetic construct
  misc_feature 1..22: note = chemically synthesized
  source 1..22: mol_type = other DNA
tgtagaaaaacaagataatagc

SEQ ID NO: 14989 - DNA, 22 bp, synthetic construct
  misc_feature 1..22: note = chemically synthesized
  source 1..22: mol_type = other DNA
gtagaaaaacaagataatagca

SEQ ID NO: 14990 - DNA, 22 bp, synthetic construct
  misc_feature 1..22: note = chemically synthesized
  source 1..22: mol_type = other DNA
tagaaaaacaagataatagcat

SEQ ID NO: 14991 - DNA, 22 bp, synthetic construct
  misc_feature 1..22: note = chemically synthesized
  source 1..22: mol_type = other DNA
ctccagaccgtggaagaccaat

SEQ ID NO: 14992 - DNA, 22 bp, synthetic construct
  misc_feature 1..22: note = chemically synthesized
  source 1..22: mol_type = other DNA
tccagaccgtggaagaccaata

SEQ ID NO: 14993 - DNA, 22 bp, synthetic construct
  misc_feature 1..22: note = chemically synthesized
  source 1..22: mol_type = other DNA
cagaccgtggaagaccaatata

SEQ ID NO: 14994 - DNA, 22 bp, synthetic construct
  misc_feature 1..22: note = chemically synthesized
  source 1..22: mol_type = other DNA
aaccaacagcatagtcaaataa

SEQ ID NO: 14995 - DNA, 22 bp, synthetic construct
  misc_feature 1..22: note = chemically synthesized
  source 1..22: mol_type = other DNA
taatggtatgtcccatctttca

SEQ ID NO: 14996 - DNA, 22 bp, synthetic construct
  misc_feature 1..22: note = chemically synthesized
  source 1..22: mol_type = other DNA
aatggtatgtcccatctttcac

SEQ ID NO: 14997 - DNA, 22 bp, synthetic construct
  misc_feature 1..22: note = chemically synthesized
  source 1..22: mol_type = other DNA
atggtatgtcccatctttcaca

SEQ ID NO: 14998 - DNA, 22 bp, synthetic construct
  misc_feature 1..22: note = chemically synthesized
  source 1..22: mol_type = other DNA
tcacacaggtctgtaaaaacac

SEQ ID NO: 14999 - DNA, 22 bp, synthetic construct
  misc_feature 1..22: note = chemically synthesized
  source 1..22: mol_type = other DNA
cacacaggtctgtaaaaacact

SEQ ID NO: 15000 - DNA, 22 bp, synthetic construct
  misc_feature 1..22: note = chemically synthesized
  source 1..22: mol_type = other DNA
acacaggtctgtaaaaacactg

SEQ ID NO: 15001 - DNA, 22 bp, synthetic construct
  misc_feature 1..22: note = chemically synthesized
  source 1..22: mol_type = other DNA
taaaaacactgaatcctaaaat

SEQ ID NO: 15002 - DNA, 22 bp, synthetic construct
  misc_feature 1..22: note = chemically synthesized
  source 1..22: mol_type = other DNA
aatcctaaaattatttacaagc

SEQ ID NO: 15003 - DNA, 22 bp, synthetic construct
  misc_feature 1..22: note = chemically synthesized
  source 1..22: mol_type = other DNA
aaattatttacaagctttaact

SEQ ID NO: 15004 - DNA, 22 bp, synthetic construct
  misc_feature 1..22: note = chemically synthesized
  source 1..22: mol_type = other DNA
tttacaagctttaactggatca

SEQ ID NO: 15005 - DNA, 22 bp, synthetic construct
  misc_feature 1..22: note = chemically synthesized
  source 1..22: mol_type = other DNA
acaagctttaactggatcatga

SEQ ID NO: 15006 - DNA, 22 bp, synthetic construct
  misc_feature 1..22: note = chemically synthesized
  source 1..22: mol_type = other DNA
caagctttaactggatcatgag

SEQ ID NO: 15007 - DNA, 22 bp, synthetic construct
  misc_feature 1..22: note = chemically synthesized
  source 1..22: mol_type = other DNA
taactggatcatgagtaaaatt

SEQ ID NO: 15008 - DNA, 22 bp, synthetic construct
  misc_feature 1..22: note = chemically synthesized
  source 1..22: mol_type = other DNA
aactggatcatgagtaaaatta

SEQ ID NO: 15009 - DNA, 22 bp, synthetic construct
  misc_feature 1..22: note = chemically synthesized
  source 1..22: mol_type = other DNA
actggatcatgagtaaaattat

SEQ ID NO: 15010 - DNA, 22 bp, synthetic construct
  misc_feature 1..22: note = chemically synthesized
  source 1..22: mol_type = other DNA
gatcatgagtaaaattatcaca

SEQ ID NO: 15011 - DNA, 22 bp, synthetic construct
  misc_feature 1..22: note = chemically synthesized
  source 1..22: mol_type = other DNA
tcacatcagcataactgttaaa

SEQ ID NO: 15012 - DNA, 22 bp, synthetic construct
  misc_feature 1..22: note = chemically synthesized
  source 1..22: mol_type = other DNA
ttaaaattgcaggctctgaagc

SEQ ID NO: 15013 - DNA, 22 bp, synthetic construct
  misc_feature 1..22: note = chemically synthesized
  source 1..22: mol_type = other DNA
aaattgcaggctctgaagctaa

SEQ ID NO: 15014 - DNA, 22 bp, synthetic construct
  misc_feature 1..22: note = chemically synthesized
  source 1..22: mol_type = other DNA
caggctctgaagctaataaact

SEQ ID NO: 15015 - DNA, 22 bp, synthetic construct
  misc_feature 1..22: note = chemically synthesized
  source 1..22: mol_type = other DNA
tgaagctaataaactacctgca

SEQ ID NO: 15016 - DNA, 22 bp, synthetic construct
  misc_feature 1..22: note = chemically synthesized
  source 1..22: mol_type = other DNA
aagctaataaactacctgcatt

SEQ ID NO: 15017 - DNA, 22 bp, synthetic construct
  misc_feature 1..22: note = chemically synthesized
  source 1..22: mol_type = other DNA
ataaactacctgcatttaaacc

SEQ ID NO: 15018 - DNA, 22 bp, synthetic construct
  misc_feature 1..22: note = chemically synthesized
  source 1..22: mol_type = other DNA
cctgcatttaaaccatggctct

SEQ ID NO: 15019 - DNA, 22 bp, synthetic construct
  misc_feature 1..22: note = chemically synthesized
  source 1..22: mol_type = other DNA
catttaaaccatggctctaaaa

SEQ ID NO: 15020 - DNA, 22 bp, synthetic construct
  misc_feature 1..22: note = chemically synthesized
  source 1..22: mol_type = other DNA
aaaccatggctctaaaactttg

SEQ ID NO: 15021 - DNA, 22 bp, synthetic construct
  misc_feature 1..22: note = chemically synthesized
  source 1..22: mol_type = other DNA
aaccatggctctaaaactttgt

SEQ ID NO: 15022 - DNA, 22 bp, synthetic construct
  misc_feature 1..22: note = chemically synthesized
  source 1..22: mol_type = other DNA
taaaactttgtgtgaccttgaa

SEQ ID NO: 15023 - DNA, 22 bp, synthetic construct
  misc_feature 1..22: note = chemically synthesized
  source 1..22: mol_type = other DNA
aaactttgtgtgaccttgaata

SEQ ID NO: 15024 - DNA, 22 bp, synthetic construct
  misc_feature 1..22: note = chemically synthesized
  source 1..22: mol_type = other DNA
tgtgtgaccttgaataaattac

SEQ ID NO: 15025 - DNA, 22 bp, synthetic construct
  misc_feature 1..22: note = chemically synthesized
  source 1..22: mol_type = other DNA
gtgtgaccttgaataaattact

SEQ ID NO: 15026 - DNA, 22 bp, synthetic construct
  misc_feature 1..22: note = chemically synthesized
  source 1..22: mol_type = other DNA
tgtgaccttgaataaattactt

SEQ ID NO: 15027 - DNA, 22 bp, synthetic construct
  misc_feature 1..22: note = chemically synthesized
  source 1..22: mol_type = other DNA
gaataaattacttcaccccttt

SEQ ID NO: 15028 - DNA, 22 bp, synthetic construct
  misc_feature 1..22: note = chemically synthesized
  source 1..22: mol_type = other DNA
aataaattacttcaccccttta

SEQ ID NO: 15029 - DNA, 22 bp, synthetic construct
  misc_feature 1..22: note = chemically synthesized
  source 1..22: mol_type = other DNA
cttcacccctttatctctcagt

SEQ ID NO: 15030 - DNA, 22 bp, synthetic construct
  misc_feature 1..22: note = chemically synthesized
  source 1..22: mol_type = other DNA
cacccctttatctctcagtttc

SEQ ID NO: 15031 - DNA, 22 bp, synthetic construct
  misc_feature 1..22: note = chemically synthesized
  source 1..22: mol_type = other DNA
acccctttatctctcagtttcc

SEQ ID NO: 15032 - DNA, 22 bp, synthetic construct
  misc_feature 1..22: note = chemically synthesized
  source 1..22: mol_type = other DNA
tatctctcagtttcctcacata

SEQ ID NO: 15033 - DNA, 22 bp, synthetic construct
  misc_feature 1..22: note = chemically synthesized
  source 1..22: mol_type = other DNA
atctctcagtttcctcacatat

SEQ ID NO: 15034 - DNA, 22 bp, synthetic construct
  misc_feature 1..22: note = chemically synthesized
  source 1..22: mol_type = other DNA
tctctcagtttcctcacatata

SEQ ID NO: 15035 - DNA, 22 bp, synthetic construct
  misc_feature 1..22: note = chemically synthesized
  source 1..22: mol_type = other DNA
tcagtttcctcacatatactac

SEQ ID NO: 15036 - DNA, 22 bp, synthetic construct
  misc_feature 1..22: note = chemically synthesized
  source 1..22: mol_type = other DNA
agtttcctcacatatactacaa

SEQ ID NO: 15037 - DNA, 22 bp, synthetic construct
  misc_feature 1..22: note = chemically synthesized
  source 1..22: mol_type = other DNA
cctcacatatactacaaagata

SEQ ID NO: 15038 - DNA, 22 bp, synthetic construct
  misc_feature 1..22: note = chemically synthesized
  source 1..22: mol_type = other DNA
ctcacatatactacaaagataa

SEQ ID NO: 15039 - DNA, 22 bp, synthetic construct
  misc_feature 1..22: note = chemically synthesized
  source 1..22: mol_type = other DNA
acatatactacaaagataataa

SEQ ID NO: 15040 - DNA, 22 bp, synthetic construct
  misc_feature 1..22: note = chemically synthesized
  source 1..22: mol_type = other DNA
caaagataataacagaacttat

SEQ ID NO: 15041 - DNA, 22 bp, synthetic construct
  misc_feature 1..22: note = chemically synthesized
  source 1..22: mol_type = other DNA
ataggattattgtaagaaaaaa

SEQ ID NO: 15042 - DNA, 22 bp, synthetic construct
  misc_feature 1..22: note = chemically synthesized
  source 1..22: mol_type = other DNA
taggattattgtaagaaaaaaa

SEQ ID NO: 15043 - DNA, 22 bp, synthetic construct
  misc_feature 1..22: note = chemically synthesized
  source 1..22: mol_type = other DNA
ttgtaagaaaaaaaattaattc

SEQ ID NO: 15044 - DNA, 22 bp, synthetic construct
  misc_feature 1..22: note = chemically synthesized
  source 1..22: mol_type = other DNA
taagaaaaaaaattaattcata

SEQ ID NO: 15045 - DNA, 22 bp, synthetic construct
  misc_feature 1..22: note = chemically synthesized
  source 1..22: mol_type = other DNA
attcatagcagccaatgtcatc

SEQ ID NO: 15046 - DNA, 22 bp, synthetic construct
  misc_feature 1..22: note = chemically synthesized
  source 1..22: mol_type = other DNA
atagcagccaatgtcatcttac

SEQ ID NO: 15047 - DNA, 22 bp, synthetic construct
  misc_feature 1..22: note = chemically synthesized
  source 1..22: mol_type = other DNA
actaaaattcaaattagatcat

SEQ ID NO: 15048 - DNA, 22 bp, synthetic construct
  misc_feature 1..22: note = chemically synthesized
  source 1..22: mol_type = other DNA
ctaaaattcaaattagatcatg

SEQ ID NO: 15049 - DNA, 22 bp, synthetic construct
  misc_feature 1..22: note = chemically synthesized
  source 1..22: mol_type = other DNA
aaattcaaattagatcatgttt

SEQ ID NO: 15050 - DNA, 22 bp, synthetic construct
  misc_feature 1..22: note = chemically synthesized
  source 1..22: mol_type = other DNA
aaattagatcatgtttctcttt

SEQ ID NO: 15051 - DNA, 22 bp, synthetic construct
  misc_feature 1..22: note = chemically synthesized
  source 1..22: mol_type = other DNA
gatcatgtttctctttgctcaa

SEQ ID NO: 15052 - DNA, 22 bp, synthetic construct
  misc_feature 1..22: note = chemically synthesized
  source 1..22: mol_type = other DNA
ctctttgctcaaaaccacacaa

SEQ ID NO: 15053 - DNA, 22 bp, synthetic construct
  misc_feature 1..22: note = chemically synthesized
  source 1..22: mol_type = other DNA
tctttgctcaaaaccacacaat

SEQ ID NO: 15054 - DNA, 22 bp, synthetic construct
  misc_feature 1..22: note = chemically synthesized
  source 1..22: mol_type = other DNA
tttgctcaaaaccacacaatag

SEQ ID NO: 15055 - DNA, 22 bp, synthetic construct
  misc_feature 1..22: note = chemically synthesized
  source 1..22: mol_type = other DNA
tgctcaaaaccacacaatagct

SEQ ID NO: 15056 - DNA, 22 bp, synthetic construct
  misc_feature 1..22: note = chemically synthesized
  source 1..22: mol_type = other DNA
gctcaaaaccacacaatagctt

SEQ ID NO: 15057 - DNA, 22 bp, synthetic construct
  misc_feature 1..22: note = chemically synthesized
  source 1..22: mol_type = other DNA
ctcaaaaccacacaatagcttt

SEQ ID NO: 15058 - DNA, 22 bp, synthetic construct
  misc_feature 1..22: note = chemically synthesized
  source 1..22: mol_type = other DNA
aaaaccacacaatagctttcca

SEQ ID NO: 15059 - DNA, 22 bp, synthetic construct
  misc_feature 1..22: note = chemically synthesized
  source 1..22: mol_type = other DNA
tccatttcactcatattggctc

SEQ ID NO: 15060 - DNA, 22 bp, synthetic construct
  misc_feature 1..22: note = chemically synthesized
  source 1..22: mol_type = other DNA
ccatttcactcatattggctct

SEQ ID NO: 15061 - DNA, 22 bp, synthetic construct
  misc_feature 1..22: note = chemically synthesized
  source 1..22: mol_type = other DNA
catttcactcatattggctctt

SEQ ID NO: 15062 - DNA, 22 bp, synthetic construct
  misc_feature 1..22: note = chemically synthesized
  source 1..22: mol_type = other DNA
cactcatattggctctttagac

SEQ ID NO: 15063 - DNA, 22 bp, synthetic construct
  misc_feature 1..22: note = chemically synthesized
  source 1..22: mol_type = other DNA
actcatattggctctttagacc

SEQ ID NO: 15064 - DNA, 22 bp, synthetic construct
  misc_feature 1..22: note = chemically synthesized
  source 1..22: mol_type = other DNA
atattggctctttagaccaaga

SEQ ID NO: 15065 - DNA, 22 bp, synthetic construct
  misc_feature 1..22: note = chemically synthesized
  source 1..22: mol_type = other DNA
gctctttagaccaagattaccc

SEQ ID NO: 15066 - DNA, 22 bp, synthetic construct
  misc_feature 1..22: note = chemically synthesized
  source 1..22: mol_type = other DNA
ggtaatcttggtctaaagagcc

SEQ ID NO: 15067 - DNA, 22 bp, synthetic construct
  misc_feature 1..22: note = chemically synthesized
  source 1..22: mol_type = other DNA
ggtctaaagagccaatatgagt

SEQ ID NO: 15068 - DNA, 22 bp, synthetic construct
  misc_feature 1..22: note = chemically synthesized
  source 1..22: mol_type = other DNA
gtctaaagagccaatatgagtg

SEQ ID NO: 15069 - DNA, 22 bp, synthetic construct
  misc_feature 1..22: note = chemically synthesized
  source 1..22: mol_type = other DNA
aagagccaatatgagtgaaatg

SEQ ID NO: 15070 - DNA, 22 bp, synthetic construct
  misc_feature 1..22: note = chemically synthesized
  source 1..22: mol_type = other DNA
ttgtgtggttttgagcaaagag

SEQ ID NO: 15071 - DNA, 22 bp, synthetic construct
  misc_feature 1..22: note = chemically synthesized
  source 1..22: mol_type = other DNA
tgtggttttgagcaaagagaaa

SEQ ID NO: 15072 - DNA, 22 bp, synthetic construct
  misc_feature 1..22: note = chemically synthesized
  source 1..22: mol_type = other DNA
tgagcaaagagaaacatgatct

SEQ ID NO: 15073 - DNA, 22 bp, synthetic construct
  misc_feature 1..22: note = chemically synthesized
  source 1..22: mol_type = other DNA
gagcaaagagaaacatgatcta

SEQ ID NO: 15074 - DNA, 22 bp, synthetic construct
  misc_feature 1..22: note = chemically synthesized
  source 1..22: mol_type = other DNA
agcaaagagaaacatgatctaa

SEQ ID NO: 15075 - DNA, 22 bp, synthetic construct
  misc_feature 1..22: note = chemically synthesized
  source 1..22: mol_type = other DNA
atttgaattttagtaagatgac

SEQ ID NO: 15076 - DNA, 22 bp, synthetic construct
  misc_feature 1..22: note = chemically synthesized
  source 1..22: mol_type = other DNA
gaattttagtaagatgacattg

SEQ ID NO: 15077 - DNA, 22 bp, synthetic construct
  misc_feature 1..22: note = chemically synthesized
  source 1..22: mol_type = other DNA
aattttagtaagatgacattgg

SEQ ID NO: 15078 - DNA, 22 bp, synthetic construct
  misc_feature 1..22: note = chemically synthesized
  source 1..22: mol_type = other DNA
tagtaagatgacattggctgct

SEQ ID NO: 15079 - DNA, 22 bp, synthetic construct
  misc_feature 1..22: note = chemically synthesized
  source 1..22: mol_type = other DNA
agtaagatgacattggctgcta

SEQ ID NO: 15080 - DNA, 22 bp, synthetic construct
  misc_feature 1..22: note = chemically synthesized
  source 1..22: mol_type = other DNA
gtaagatgacattggctgctat

SEQ ID NO: 15081 - DNA, 22 bp, synthetic construct
  misc_feature 1..22: note = chemically synthesized
  source 1..22: mol_type = other DNA
gctgctatgaattaattttttt

SEQ ID NO: 15082 - DNA, 22 bp, synthetic construct
  misc_feature 1..22: note = chemically synthesized
  source 1..22: mol_type = other DNA
ctatgaattaattttttttctt

SEQ ID NO: 15083 - DNA, 22 bp, synthetic construct
  misc_feature 1..22: note = chemically synthesized
  source 1..22: mol_type = other DNA
tgaattaattttttttcttaca

SEQ ID NO: 15084 - DNA, 22 bp, synthetic construct
  misc_feature 1..22: note = chemically synthesized
  source 1..22: mol_type = other DNA
attttttttcttacaataatcc

SEQ ID NO: 15085 - DNA, 22 bp, synthetic construct
  misc_feature 1..22: note = chemically synthesized
  source 1..22: mol_type = other DNA
tttttcttacaataatcctata

SEQ ID NO: 15086 - DNA, 22 bp, synthetic construct
  misc_feature 1..22: note = chemically synthesized
  source 1..22: mol_type = other DNA
ttttcttacaataatcctataa

SEQ ID NO: 15087 - DNA, 22 bp, synthetic construct
  misc_feature 1..22: note = chemically synthesized
  source 1..22: mol_type = other DNA
tttcttacaataatcctataag

SEQ ID NO: 15088 - DNA, 22 bp, synthetic construct
  misc_feature 1..22: note = chemically synthesized
  source 1..22: mol_type = other DNA
ttcttacaataatcctataagt

SEQ ID NO: 15089 - DNA, 22 bp, synthetic construct
  misc_feature 1..22: note = chemically synthesized
  source 1..22: mol_type = other DNA
tcttacaataatcctataagtt

SEQ ID NO: 15090 - DNA, 22 bp, synthetic construct
  misc_feature 1..22: note = chemically synthesized
  source 1..22: mol_type = other DNA
cttacaataatcctataagttc

SEQ ID NO: 15091 - DNA, 22 bp, synthetic construct
  misc_feature 1..22: note = chemically synthesized
  source 1..22: mol_type = other DNA
ttacaataatcctataagttct

SEQ ID NO: 15092 - DNA, 22 bp, synthetic construct
  misc_feature 1..22: note = chemically synthesized
  source 1..22: mol_type = other DNA
acaataatcctataagttctgt

SEQ ID NO: 15093 - DNA, 22 bp, synthetic construct
  misc_feature 1..22: note = chemically synthesized
  source 1..22: mol_type = other DNA
caataatcctataagttctgtt

SEQ ID NO: 15094 - DNA, 22 bp, synthetic construct
  misc_feature 1..22: note = chemically synthesized
  source 1..22: mol_type = other DNA
taagttctgttattatctttgt

SEQ ID NO: 15095 - DNA, 22 bp, synthetic construct
  misc_feature 1..22: note = chemically synthesized
  source 1..22: mol_type = other DNA
tgttattatctttgtagtatat

SEQ ID NO: 15096 - DNA, 22 bp, synthetic construct
  misc_feature 1..22: note = chemically synthesized
  source 1..22: mol_type = other DNA
ttattatctttgtagtatatgt

SEQ ID NO: 15097 - DNA, 22 bp, synthetic construct
  misc_feature 1..22: note = chemically synthesized
  source 1..22: mol_type = other DNA
ttatctttgtagtatatgtgag

SEQ ID NO: 15098 - DNA, 22 bp, synthetic construct
  misc_feature 1..22: note = chemically synthesized
  source 1..22: mol_type = other DNA
tctttgtagtatatgtgaggaa

SEQ ID NO: 15099 - DNA, 22 bp, synthetic construct
  misc_feature 1..22: note = chemically synthesized
  source 1..22: mol_type = other DNA
tgtagtatatgtgaggaaactg

SEQ ID NO: 15100 - DNA, 22 bp, synthetic construct
  misc_feature 1..22: note = chemically synthesized
  source 1..22: mol_type = other DNA
gtagtatatgtgaggaaactga

SEQ ID NO: 15101 - DNA, 22 bp, synthetic construct
  misc_feature 1..22: note = chemically synthesized
  source 1..22: mol_type = other DNA
tagtatatgtgaggaaactgag

SEQ ID NO: 15102 - DNA, 22 bp, synthetic construct
  misc_feature 1..22: note = chemically synthesized
  source 1..22: mol_type = other DNA
agagataaaggggtgaagtaat

SEQ ID NO: 15103 - DNA, 22 bp, synthetic construct
  misc_feature 1..22: note = chemically synthesized
  source 1..22: mol_type = other DNA
attcaaggtcacacaaagtttt

SEQ ID NO: 15104 - DNA, 22 bp, synthetic construct
  misc_feature 1..22: note = chemically synthesized
  source 1..22: mol_type = other DNA
ttcaaggtcacacaaagtttta

SEQ ID NO: 15105 - DNA, 22 bp, synthetic construct
  misc_feature 1..22: note = chemically synthesized
  source 1..22: mol_type = other DNA
aaggtcacacaaagttttagag

SEQ ID NO: 15106 - DNA, 22 bp, synthetic construct
  misc_feature 1..22: note = chemically synthesized
  source 1..22: mol_type = other DNA
tagagccatggtttaaatgcag

SEQ ID NO: 15107 - DNA, 22 bp, synthetic construct
  misc_feature 1..22: note = chemically synthesized
  source 1..22: mol_type = other DNA
agagccatggtttaaatgcagg

SEQ ID NO: 15108 - DNA, 22 bp, synthetic construct
  misc_feature 1..22: note = chemically synthesized
  source 1..22: mol_type = other DNA
gagccatggtttaaatgcaggt

SEQ ID NO: 15109 - DNA, 22 bp, synthetic construct
  misc_feature 1..22: note = chemically synthesized
  source 1..22: mol_type = other DNA
aaatgcaggtagtttattagct

SEQ ID NO: 15110 - DNA, 22 bp, synthetic construct
  misc_feature 1..22: note = chemically synthesized
  source 1..22: mol_type = other DNA
aatgcaggtagtttattagctt

SEQ ID NO: 15111 - DNA, 22 bp, synthetic construct
  misc_feature 1..22: note = chemically synthesized
  source 1..22: mol_type = other DNA
attagcttcagagcctgcaatt

SEQ ID NO: 15112 - DNA, 22 bp, synthetic construct
  misc_feature 1..22: note = chemically synthesized
  source 1..22: mol_type = other DNA
ttagcttcagagcctgcaattt

SEQ ID NO: 15113 - DNA, 22 bp, synthetic construct
  misc_feature 1..22: note = chemically synthesized
  source 1..22: mol_type = other DNA
gcttcagagcctgcaattttaa

SEQ ID NO: 15114 - DNA, 22 bp, synthetic construct
  misc_feature 1..22: note = chemically synthesized
  source 1..22: mol_type = other DNA
cagagcctgcaattttaacagt

SEQ ID NO: 15115 - DNA, 22 bp, synthetic construct
  misc_feature 1..22: note = chemically synthesized
  source 1..22: mol_type = other DNA
agagcctgcaattttaacagtt

SEQ ID NO: 15116 - DNA, 22 bp, synthetic construct
  misc_feature 1..22: note = chemically synthesized
  source 1..22: mol_type = other DNA
caattttaacagttatgctgat

SEQ ID NO: 15117 - DNA, 22 bp, synthetic construct
  misc_feature 1..22: note = chemically synthesized
  source 1..22: mol_type = other DNA
taacagttatgctgatgtgata

SEQ ID NO: 15118 - DNA, 22 bp, synthetic construct
  misc_feature 1..22: note = chemically synthesized
  source 1..22: mol_type = other DNA
aacagttatgctgatgtgataa

SEQ ID NO: 15119 - DNA, 22 bp, synthetic construct
  misc_feature 1..22: note = chemically synthesized
  source 1..22: mol_type = other DNA
acagttatgctgatgtgataat

SEQ ID NO: 15120 - DNA, 22 bp, synthetic construct
  misc_feature 1..22: note = chemically synthesized
  source 1..22: mol_type = other DNA
tgctgatgtgataattttactc

SEQ ID NO: 15121 - DNA, 22 bp, synthetic construct
  misc_feature 1..22: note = chemically synthesized
  source 1..22: mol_type = other DNA
atgtgataattttactcatgat

SEQ ID NO: 15122 - DNA, 22 bp, synthetic construct
  misc_feature 1..22: note = chemically synthesized
  source 1..22: mol_type = other DNA
tactcatgatccagttaaagct

SEQ ID NO: 15123 - DNA, 22 bp, synthetic construct
  misc_feature 1..22: note = chemically synthesized
  source 1..22: mol_type = other DNA
actcatgatccagttaaagctt

SEQ ID NO: 15124 - DNA, 22 bp, synthetic construct
  misc_feature 1..22: note = chemically synthesized
  source 1..22: mol_type = other DNA
ctcatgatccagttaaagcttg

SEQ ID NO: 15125 - DNA, 22 bp, synthetic construct
  misc_feature 1..22: note = chemically synthesized
  source 1..22: mol_type = other DNA
atgatccagttaaagcttgtaa

SEQ ID NO: 15126 - DNA, 22 bp, synthetic construct
  misc_feature 1..22: note = chemically synthesized
  source 1..22: mol_type = other DNA
aagcttgtaaataattttagga

SEQ ID NO: 15127 - DNA, 22 bp, synthetic construct
  misc_feature 1..22: note = chemically synthesized
  source 1..22: mol_type = other DNA
gtaaataattttaggattcagt

SEQ ID NO: 15128 - DNA, 22 bp, synthetic construct
  misc_feature 1..22: note = chemically synthesized
  source 1..22: mol_type = other DNA
taaataattttaggattcagtg

SEQ ID NO: 15129 - DNA, 22 bp, synthetic construct
  misc_feature 1..22: note = chemically synthesized
  source 1..22: mol_type = other DNA
taggattcagtgtttttacaga

SEQ ID NO: 15130 - DNA, 22 bp, synthetic construct
  misc_feature 1..22: note = chemically synthesized
  source 1..22: mol_type = other DNA
aggattcagtgtttttacagac

SEQ ID NO: 15131 - DNA, 22 bp, synthetic construct
  misc_feature 1..22: note = chemically synthesized
  source 1..22: mol_type = other DNA
ggattcagtgtttttacagacc

SEQ ID NO: 15132 - DNA, 22 bp, synthetic construct
  misc_feature 1..22: note = chemically synthesized
  source 1..22: mol_type = other DNA
agtgtttttacagacctgtgtg

SEQ ID NO: 15133 - DNA, 22 bp, synthetic construct
  misc_feature 1..22: note = chemically synthesized
  source 1..22: mol_type = other DNA
ttacagacctgtgtgaaagatg

SEQ ID NO: 15134 - DNA, 22 bp, synthetic construct
  misc_feature 1..22: note = chemically synthesized
  source 1..22: mol_type = other DNA
tacagacctgtgtgaaagatgg

SEQ ID NO: 15135 - DNA, 22 bp, synthetic construct
  misc_feature 1..22: note = chemically synthesized
  source 1..22: mol_type = other DNA
acagacctgtgtgaaagatggg

SEQ ID NO: 15136 - DNA, 22 bp, synthetic construct
  misc_feature 1..22: note = chemically synthesized
  source 1..22: mol_type = other DNA
cagacctgtgtgaaagatggga

SEQ ID NO: 15137 - DNA, 22 bp, synthetic construct
  misc_feature 1..22: note = chemically synthesized
  source 1..22: mol_type = other DNA
tgtgaaagatgggacataccat

SEQ ID NO: 15138 - DNA, 22 bp, synthetic construct
  misc_feature 1..22: note = chemically synthesized
  source 1..22: mol_type = other DNA
aaatactgacttacctgatttt

SEQ ID NO: 15139 - DNA, 22 bp, synthetic construct
  misc_feature 1..22: note = chemically synthesized
  source 1..22: mol_type = other DNA
acttacctgattttctatttct

SEQ ID NO: 15140 - DNA, 22 bp, synthetic construct
  misc_feature 1..22: note = chemically synthesized
  source 1..22: mol_type = other DNA
acctgattttctatttctttta

SEQ ID NO: 15141 - DNA, 22 bp, synthetic construct
  misc_feature 1..22: note = chemically synthesized
  source 1..22: mol_type = other DNA
cctgattttctatttcttttat

SEQ ID NO: 15142 - DNA, 22 bp, synthetic construct
  misc_feature 1..22: note = chemically synthesized
  source 1..22: mol_type = other DNA
attttctatttcttttatttga

SEQ ID NO: 15143 - DNA, 22 bp, synthetic construct
  misc_feature 1..22: note = chemically synthesized
  source 1..22: mol_type = other DNA
tctatttcttttatttgactat

SEQ ID NO: 15144 - DNA, 22 bp, synthetic construct
  misc_feature 1..22: note = chemically synthesized
  source 1..22: mol_type = other DNA
ctatttcttttatttgactatg

SEQ ID NO: 15145 - DNA, 22 bp, synthetic construct
  misc_feature 1..22: note = chemically synthesized
  source 1..22: mol_type = other DNA
tatttcttttatttgactatgc

SEQ ID NO: 15146 - DNA, 22 bp, synthetic construct
  misc_feature 1..22: note = chemically synthesized
  source 1..22: mol_type = other DNA
tttcttttatttgactatgctg

SEQ ID NO: 15147 - DNA, 22 bp, synthetic construct
  misc_feature 1..22: note = chemically synthesized
  source 1..22: mol_type = other DNA
cttttatttgactatgctgttg

SEQ ID NO: 15148 - DNA, 22 bp, synthetic construct
  misc_feature 1..22: note = chemically synthesized
  source 1..22: mol_type = other DNA
ttttatttgactatgctgttgg

SEQ ID NO: 15149 - DNA, 22 bp, synthetic construct
  misc_feature 1..22: note = chemically synthesized
  source 1..22: mol_type = other DNA
ttatttgactatgctgttggtt

SEQ ID NO: 15150 - DNA, 22 bp, synthetic construct
  misc_feature 1..22: note = chemically synthesized
  source 1..22: mol_type = other DNA
tatttgactatgctgttggttt

SEQ ID NO: 15151 - DNA, 22 bp, synthetic construct
  misc_feature 1..22: note = chemically synthesized
  source 1..22: mol_type = other DNA
atttgactatgctgttggttta

SEQ ID NO: 15152 - DNA, 22 bp, synthetic construct
  misc_feature 1..22: note = chemically synthesized
  source 1..22: mol_type = other DNA
tttgactatgctgttggtttaa

SEQ ID NO: 15153 - DNA, 22 bp, synthetic construct
  misc_feature 1..22: note = chemically synthesized
  source 1..22: mol_type = other DNA
gactatgctgttggtttaattg

SEQ ID NO: 15154 - DNA, 22 bp, synthetic construct
  misc_feature 1..22: note = chemically synthesized
  source 1..22: mol_type = other DNA
actatgctgttggtttaattgt

SEQ ID NO: 15155 - DNA, 22 bp, synthetic construct
  misc_feature 1..22: note = chemically synthesized
  source 1..22: mol_type = other DNA
tgctgttggtttaattgtttat

SEQ ID NO: 15156 - DNA, 22 bp, synthetic construct
  misc_feature 1..22: note = chemically synthesized
  source 1..22: mol_type = other DNA
ttggtttaattgtttatattgg

SEQ ID NO: 15157 - DNA, 22 bp, synthetic construct
  misc_feature 1..22: note = chemically synthesized
  source 1..22: mol_type = other DNA
gtttaattgtttatattggtct

SEQ ID NO: 15158 - DNA, 22 bp, synthetic construct
  misc_feature 1..22: note = chemically synthesized
  source 1..22: mol_type = other DNA
aattgtttatattggtcttcca

SEQ ID NO: 15159 - DNA, 22 bp, synthetic construct
  misc_feature 1..22: note = chemically synthesized
  source 1..22: mol_type = other DNA
attgtttatattggtcttccac

SEQ ID NO: 15160 - DNA, 22 bp, synthetic construct
  misc_feature 1..22: note = chemically synthesized
  source 1..22: mol_type = other DNA
tttatattggtcttccacggtc

SEQ ID NO: 15161 - DNA, 22 bp, synthetic construct
  misc_feature 1..22: note = chemically synthesized
  source 1..22: mol_type = other DNA
atattggtcttccacggtctgg

SEQ ID NO: 15162 - DNA, 22 bp, synthetic construct
  misc_feature 1..22: note = chemically synthesized
  source 1..22: mol_type = other DNA
tattggtcttccacggtctgga

SEQ ID NO: 15163 - DNA, 22 bp, synthetic construct
  misc_feature 1..22: note = chemically synthesized
  source 1..22: mol_type = other DNA
gtcttccacggtctggagaagg

SEQ ID NO: 15164 - DNA, 22 bp, synthetic construct
  misc_feature 1..22: note = chemically synthesized
  source 1..22: mol_type = other DNA
ccacggtctggagaaggtcttt

SEQ ID NO: 15165 - DNA, 22 bp, synthetic construct
  misc_feature 1..22: note = chemically synthesized
  source 1..22: mol_type = other DNA
cacggtctggagaaggtctttg

SEQ ID NO: 15166 - DNA, 22 bp, synthetic construct
  misc_feature 1..22: note = chemically synthesized
  source 1..22: mol_type = other DNA
gagaaggtctttgatgctatta

SEQ ID NO: 15167 - DNA, 22 bp, synthetic construct
  misc_feature 1..22: note = chemically synthesized
  source 1..22: mol_type = other DNA
tgatgctattatcttgtttttc

SEQ ID NO: 15168 - DNA, 22 bp, synthetic construct
  misc_feature 1..22: note = chemically synthesized
  source 1..22: mol_type = other DNA
gatgctattatcttgtttttct

SEQ ID NO: 15169 - DNA, 22 bp, synthetic construct
  misc_feature 1..22: note = chemically synthesized
  source 1..22: mol_type = other DNA
atgctattatcttgtttttcta

SEQ ID NO: 15170 - DNA, 22 bp, synthetic construct
  misc_feature 1..22: note = chemically synthesized
  source 1..22: mol_type = other DNA
ttatcttgtttttctacaaaag

SEQ ID NO: 15171 - DNA, 22 bp, synthetic construct
  misc_feature 1..22: note = chemically synthesized
  source 1..22: mol_type = other DNA
tcttgtttttctacaaaagtct

SEQ ID NO: 15172 - DNA, 22 bp, synthetic construct
  misc_feature 1..22: note = chemically synthesized
  source 1..22: mol_type = other DNA
gtttttctacaaaagtctggat

SEQ ID NO: 15173 - DNA, 22 bp, synthetic construct
  misc_feature 1..22: note = chemically synthesized
  source 1..22: mol_type = other DNA
tttttctacaaaagtctggata

SEQ ID NO: 15174 - DNA, 22 bp, synthetic construct
  misc_feature 1..22: note = chemically synthesized
  source 1..22: mol_type = other DNA
ttctacaaaagtctggatatag

SEQ ID NO: 15175 - DNA, 22 bp, synthetic construct
  misc_feature 1..22: note = chemically synthesized
  source 1..22: mol_type = other DNA
tctacaaaagtctggatataga

SEQ ID NO: 15176 - DNA, 22 bp, synthetic construct
  misc_feature 1..22: note = chemically synthesized
  source 1..22: mol_type = other DNA
ctacaaaagtctggatatagag

SEQ ID NO: 15177 - DNA, 22 bp, synthetic construct
  misc_feature 1..22: note = chemically synthesized
  source 1..22: mol_type = other DNA
tacaaaagtctggatatagaga

SEQ ID NO: 15178 - DNA, 22 bp, synthetic construct
  misc_feature 1..22: note = chemically synthesized
  source 1..22: mol_type = other DNA
caaaagtctggatatagagagt

SEQ ID NO: 15179 - DNA, 22 bp, synthetic construct
  misc_feature 1..22: note = chemically synthesized
  source 1..22: mol_type = other DNA
gatatagagagtaggttggtta

SEQ ID NO: 15180 - DNA, 22 bp, synthetic construct
  misc_feature 1..22: note = chemically synthesized
  source 1..22: mol_type = other DNA
gttataagttgctttcctcttt

SEQ ID NO: 15181 - DNA, 22 bp, synthetic construct
  misc_feature 1..22: note = chemically synthesized
  source 1..22: mol_type = other DNA
taagttgctttcctctttcttt

SEQ ID NO: 15182 - DNA, 22 bp, synthetic construct
  misc_feature 1..22: note = chemically synthesized
  source 1..22: mol_type = other DNA
ctttcctctttcttttctatta

SEQ ID NO: 15183 - DNA, 22 bp, synthetic construct
  misc_feature 1..22: note = chemically synthesized
  source 1..22: mol_type = other DNA
tcctctttcttttctattaatt

SEQ ID NO: 15184 - DNA, 22 bp, synthetic construct
  misc_feature 1..22: note = chemically synthesized
  source 1..22: mol_type = other DNA
cctctttcttttctattaattt

SEQ ID NO: 15185 - DNA, 22 bp, synthetic construct
  misc_feature 1..22: note = chemically synthesized
  source 1..22: mol_type = other DNA
ctctttcttttctattaatttc

SEQ ID NO: 15186 - DNA, 22 bp, synthetic construct
  misc_feature 1..22: note = chemically synthesized
  source 1..22: mol_type = other DNA
tttcttttctattaatttcctg

SEQ ID NO: 15187 - DNA, 22 bp, synthetic construct
  misc_feature 1..22: note = chemically synthesized
  source 1..22: mol_type = other DNA
tcttttctattaatttcctgta

SEQ ID NO: 15188 - DNA, 22 bp, synthetic construct
  misc_feature 1..22: note = chemically synthesized
  source 1..22: mol_type = other DNA
cttttctattaatttcctgtaa

SEQ ID NO: 15189 - DNA, 22 bp, synthetic construct
  misc_feature 1..22: note = chemically synthesized
  source 1..22: mol_type = other DNA
ttttctattaatttcctgtaac

SEQ ID NO: 15190 - DNA, 22 bp, synthetic construct
  misc_feature 1..22: note = chemically synthesized
  source 1..22: mol_type = other DNA
ttctattaatttcctgtaacac

SEQ ID NO: 15191 - DNA, 22 bp, synthetic construct
  misc_feature 1..22: note = chemically synthesized
  source 1..22: mol_type = other DNA
tctattaatttcctgtaacact

SEQ ID NO: 15192 - DNA, 22 bp, synthetic construct
  misc_feature 1..22: note = chemically synthesized
  source 1..22: mol_type = other DNA
ctattaatttcctgtaacacta

SEQ ID NO: 15193 - DNA, 22 bp, synthetic construct
  misc_feature 1..22: note = chemically synthesized
  source 1..22: mol_type = other DNA
tattaatttcctgtaacactat

SEQ ID NO: 15194 - DNA, 22 bp, synthetic construct
  misc_feature 1..22: note = chemically synthesized
  source 1..22: mol_type = other DNA
ttaatttcctgtaacactatca

SEQ ID NO: 15195 - DNA, 22 bp, synthetic construct
  misc_feature 1..22: note = chemically synthesized
  source 1..22: mol_type = other DNA
atttcctgtaacactatcataa

SEQ ID NO: 15196 - DNA, 22 bp, synthetic construct
  misc_feature 1..22: note = chemically synthesized
  source 1..22: mol_type = other DNA
cctgtaacactatcataatcta

SEQ ID NO: 15197 - DNA, 22 bp, synthetic construct
  misc_feature 1..22: note = chemically synthesized
  source 1..22: mol_type = other DNA
ctgtaacactatcataatctaa

SEQ ID NO: 15198 - DNA, 22 bp, synthetic construct
  misc_feature 1..22: note = chemically synthesized
  source 1..22: mol_type = other DNA
taacactatcataatctaaatt

SEQ ID NO: 15199 - DNA, 22 bp, synthetic construct
  misc_feature 1..22: note = chemically synthesized
  source 1..22: mol_type = other DNA
tcataatctaaatttttaaact

SEQ ID NO: 15200 - DNA, 22 bp, synthetic construct
  misc_feature 1..22: note = chemically synthesized
  source 1..22: mol_type = other DNA
aatttttaaactaataatggat

SEQ ID NO: 15201 - DNA, 22 bp, synthetic construct
  misc_feature 1..22: note = chemically synthesized
  source 1..22: mol_type = other DNA
ttaaactaataatggatttgaa

SEQ ID NO: 15202 - DNA, 22 bp, synthetic construct
  misc_feature 1..22: note = chemically synthesized
  source 1..22: mol_type = other DNA
taaactaataatggatttgaaa

SEQ ID NO: 15203 - DNA, 22 bp, synthetic construct
  misc_feature 1..22: note = chemically synthesized
  source 1..22: mol_type = other DNA
aaactaataatggatttgaaaa

SEQ ID NO: 15204 - DNA, 22 bp, synthetic construct
  misc_feature 1..22: note = chemically synthesized
  source 1..22: mol_type = other DNA
aactaataatggatttgaaaaa

SEQ ID NO: 15205 - DNA, 22 bp, synthetic construct
  misc_feature 1..22: note = chemically synthesized
  source 1..22: mol_type = other DNA
ataatggatttgaaaaatgaat

SEQ ID NO: 15206 - DNA, 22 bp, synthetic construct
  misc_feature 1..22: note = chemically synthesized
  source 1..22: mol_type = other DNA
gaaaaatgaatattggcaattc

SEQ ID NO: 15207 - DNA, 22 bp, synthetic construct
  misc_feature 1..22: note = chemically synthesized
  source 1..22: mol_type = other DNA
aaaaatgaatattggcaattcc

SEQ ID NO: 15208 - DNA, 22 bp, synthetic construct
  misc_feature 1..22: note = chemically synthesized
  source 1..22: mol_type = other DNA
gcaattccttccccttgtatgc

SEQ ID NO: 15209 - DNA, 22 bp, synthetic construct
  misc_feature 1..22: note = chemically synthesized
  source 1..22: mol_type = other DNA
cttccccttgtatgcttctttc

SEQ ID NO: 15210 - DNA, 22 bp, synthetic construct
  misc_feature 1..22: note = chemically synthesized
  source 1..22: mol_type = other DNA
ccccttgtatgcttctttcaaa

SEQ ID NO: 15211 - DNA, 22 bp, synthetic construct
  misc_feature 1..22: note = chemically synthesized
  source 1..22: mol_type = other DNA
cccttgtatgcttctttcaaat

SEQ ID NO: 15212 - DNA, 22 bp, synthetic construct
  misc_feature 1..22: note = chemically synthesized
  source 1..22: mol_type = other DNA
gtatgcttctttcaaatagcac

SEQ ID NO: 15213 - DNA, 22 bp, synthetic construct
  misc_feature 1..22: note = chemically synthesized
  source 1..22: mol_type = other DNA
tatgcttctttcaaatagcaca

SEQ ID NO: 15214 - DNA, 22 bp, synthetic construct
  misc_feature 1..22: note = chemically synthesized
  source 1..22: mol_type = other DNA
ctttcaaatagcacatattttt

SEQ ID NO: 15215 - DNA, 22 bp, synthetic construct
  misc_feature 1..22: note = chemically synthesized
  source 1..22: mol_type = other DNA
tttcaaatagcacatatttttg

SEQ ID NO: 15216 - DNA, 22 bp, synthetic construct
  misc_feature 1..22: note = chemically synthesized
  source 1..22: mol_type = other DNA
tcaaatagcacatatttttgtc

SEQ ID NO: 15217 - DNA, 22 bp, synthetic construct
  misc_feature 1..22: note = chemically synthesized
  source 1..22: mol_type = other DNA
caaatagcacatatttttgtcc

SEQ ID NO: 15218 - DNA, 22 bp, synthetic construct
  misc_feature 1..22: note = chemically synthesized
  source 1..22: mol_type = other DNA
aaatagcacatatttttgtcct

SEQ ID NO: 15219 - DNA, 22 bp, synthetic construct
  misc_feature 1..22: note = chemically synthesized
  source 1..22: mol_type = other DNA
ttgtccttaacattttatttaa

SEQ ID NO: 15220 - DNA, 22 bp, synthetic construct
  misc_feature 1..22: note = chemically synthesized
  source 1..22: mol_type = other DNA
tgtccttaacattttatttaaa

SEQ ID NO: 15221 - DNA, 22 bp, synthetic construct
  misc_feature 1..22: note = chemically synthesized
  source 1..22: mol_type = other DNA
gtccttaacattttatttaaat

SEQ ID NO: 15222 - DNA, 22 bp, synthetic construct
  misc_feature 1..22: note = chemically synthesized
  source 1..22: mol_type = other DNA
tccttaacattttatttaaatt

SEQ ID NO: 15223 - DNA, 22 bp, synthetic construct
  misc_feature 1..22: note = chemically synthesized
  source 1..22: mol_type = other DNA
aacattttatttaaattgtact

SEQ ID NO: 15224 - DNA, 22 bp, synthetic construct
  misc_feature 1..22: note = chemically synthesized
  source 1..22: mol_type = other DNA
acattttatttaaattgtacta

SEQ ID NO: 15225 - DNA, 22 bp, synthetic construct
  misc_feature 1..22: note = chemically synthesized
  source 1..22: mol_type = other DNA
tatttaaattgtactatctcta

SEQ ID NO: 15226 - DNA, 22 bp, synthetic construct
  misc_feature 1..22: note = chemically synthesized
  source 1..22: mol_type = other DNA
atttaaattgtactatctctaa

SEQ ID NO: 15227 - DNA, 22 bp, synthetic construct
  misc_feature 1..22: note = chemically synthesized
  source 1..22: mol_type = other DNA
tttaaattgtactatctctaaa

SEQ ID NO: 15228 - DNA, 22 bp, synthetic construct
  misc_feature 1..22: note = chemically synthesized
  source 1..22: mol_type = other DNA
aaattgtactatctctaaaatt

SEQ ID NO: 15229 - DNA, 22 bp, synthetic construct
  misc_feature 1..22: note = chemically synthesized
  source 1..22: mol_type = other DNA
aattgtactatctctaaaattt

SEQ ID NO: 15230 - DNA, 22 bp, synthetic construct
  misc_feature 1..22: note = chemically synthesized
  source 1..22: mol_type = other DNA
tactatctctaaaatttgattt

SEQ ID NO: 15231 - DNA, 22 bp, synthetic construct
  misc_feature 1..22: note = chemically synthesized
  source 1..22: mol_type = other DNA
tctctaaaatttgattttctga

SEQ ID NO: 15232 - DNA, 22 bp, synthetic construct
  misc_feature 1..22: note = chemically synthesized
  source 1..22: mol_type = other DNA
taaaatttgattttctgaactt

SEQ ID NO: 15233 - DNA, 22 bp, synthetic construct
  misc_feature 1..22: note = chemically synthesized
  source 1..22: mol_type = other DNA
aaatttgattttctgaacttca

SEQ ID NO: 15234 - DNA, 22 bp, synthetic construct
  misc_feature 1..22: note = chemically synthesized
  source 1..22: mol_type = other DNA
gattttctgaacttcaattaaa

SEQ ID NO: 15235 - DNA, 22 bp, synthetic construct
  misc_feature 1..22: note = chemically synthesized
  source 1..22: mol_type = other DNA
attttctgaacttcaattaaaa

SEQ ID NO: 15236 - DNA, 22 bp, synthetic construct
  misc_feature 1..22: note = chemically synthesized
  source 1..22: mol_type = other DNA
tctgaacttcaattaaaagaaa

SEQ ID NO: 15237 - DNA, 22 bp, synthetic construct
  misc_feature 1..22: note = chemically synthesized
  source 1..22: mol_type = other DNA
ctgaacttcaattaaaagaaaa

SEQ ID NO: 15238 - DNA, 22 bp, synthetic construct
  misc_feature 1..22: note = chemically synthesized
  source 1..22: mol_type = other DNA
tgaacttcaattaaaagaaaaa

SEQ ID NO: 15239 - DNA, 22 bp, synthetic construct
  misc_feature 1..22: note = chemically synthesized
  source 1..22: mol_type = other DNA
aacttcaattaaaagaaaaagc

SEQ ID NO: 15240 - DNA, 22 bp, synthetic construct
  misc_feature 1..22: note = chemically synthesized
  source 1..22: mol_type = other DNA
caattaaaagaaaaagcccagc

SEQ ID NO: 15241 - DNA, 22 bp, synthetic construct
  misc_feature 1..22: note = chemically synthesized
  source 1..22: mol_type = other DNA
aattaaaagaaaaagcccagca

SEQ ID NO: 15242 - DNA, 22 bp, synthetic construct
  misc_feature 1..22: note = chemically synthesized
  source 1..22: mol_type = other DNA
aaagaaaaagcccagcatattt

SEQ ID NO: 15243 - DNA, 22 bp, synthetic construct
  misc_feature 1..22: note = chemically synthesized
  source 1..22: mol_type = other DNA
tcatatgaataaatcttttcca

SEQ ID NO: 15244 - DNA, 22 bp, synthetic construct
  misc_feature 1..22: note = chemically synthesized
  source 1..22: mol_type = other DNA
catatgaataaatcttttccat

SEQ ID NO: 15245 - DNA, 22 bp, synthetic construct
  misc_feature 1..22: note = chemically synthesized
  source 1..22: mol_type = other DNA
atatgaataaatcttttccatt

SEQ ID NO: 15246 - DNA, 22 bp, synthetic construct
  misc_feature 1..22: note = chemically synthesized
  source 1..22: mol_type = other DNA
ttccatttactgtattatttaa

SEQ ID NO: 15247 - DNA, 22 bp, synthetic construct
  misc_feature 1..22: note = chemically synthesized
  source 1..22: mol_type = other DNA
tccatttactgtattatttaat

SEQ ID NO: 15248 - DNA, 22 bp, synthetic construct
  misc_feature 1..22: note = chemically synthesized
  source 1..22: mol_type = other DNA
ccatttactgtattatttaatc

SEQ ID NO: 15249 - DNA, 22 bp, synthetic construct
  misc_feature 1..22: note = chemically synthesized
  source 1..22: mol_type = other DNA
catttactgtattatttaatct

SEQ ID NO: 15250 - DNA, 22 bp, synthetic construct
  misc_feature 1..22: note = chemically synthesized
  source 1..22: mol_type = other DNA
actgtattatttaatctgtttt

SEQ ID NO: 15251 - DNA, 22 bp, synthetic construct
  misc_feature 1..22: note = chemically synthesized
  source 1..22: mol_type = other DNA
ctgtattatttaatctgtttta

SEQ ID NO: 15252 - DNA, 22 bp, synthetic construct
  misc_feature 1..22: note = chemically synthesized
  source 1..22: mol_type = other DNA
tattatttaatctgttttaaac

SEQ ID NO: 15253 - DNA, 22 bp, synthetic construct
  misc_feature 1..22: note = chemically synthesized
  source 1..22: mol_type = other DNA
tttaatctgttttaaacactgg

SEQ ID NO: 15254 - DNA, 22 bp, synthetic construct
  misc_feature 1..22: note = chemically synthesized
  source 1..22: mol_type = other DNA
aatctgttttaaacactggaga

SEQ ID NO: 15255 - DNA, 22 bp, synthetic construct
  misc_feature 1..22: note = chemically synthesized
  source 1..22: mol_type = other DNA
atctgttttaaacactggagaa

SEQ ID NO: 15256 - DNA, 22 bp, synthetic construct
  misc_feature 1..22: note = chemically synthesized
  source 1..22: mol_type = other DNA
ttttaaacactggagaatagtt

SEQ ID NO: 15257 - DNA, 22 bp, synthetic construct
  misc_feature 1..22: note = chemically synthesized
  source 1..22: mol_type = other DNA
taaacactggagaatagtttta

SEQ ID NO: 15258 - DNA, 22 bp, synthetic construct
  misc_feature 1..22: note = chemically synthesized
  source 1..22: mol_type = other DNA
aaacactggagaatagttttaa

SEQ ID NO: 15259 - DNA, 22 bp, synthetic construct
  misc_feature 1..22: note = chemically synthesized
  source 1..22: mol_type = other DNA
aacactggagaatagttttaaa

SEQ ID NO: 15260 - DNA, 22 bp, synthetic construct
  misc_feature 1..22: note = chemically synthesized
  source 1..22: mol_type = other DNA
gagaatagttttaaattttttt

SEQ ID NO: 15261 - DNA, 22 bp, synthetic construct
  misc_feature 1..22: note = chemically synthesized
  source 1..22: mol_type = other DNA
taaattttttttaactttttac

SEQ ID NO: 15262 - DNA, 22 bp, synthetic construct
  misc_feature 1..22: note = chemically synthesized
  source 1..22: mol_type = other DNA
aaattttttttaactttttact

SEQ ID NO: 15263 - DNA, 22 bp, synthetic construct
  misc_feature 1..22: note = chemically synthesized
  source 1..22: mol_type = other DNA
aattttttttaactttttactt

SEQ ID NO: 15264 - DNA, 22 bp, synthetic construct
  misc_feature 1..22: note = chemically synthesized
  source 1..22: mol_type = other DNA
tttttaactttttacttacctt

SEQ ID NO: 15265 - DNA, 22 bp, synthetic construct
  misc_feature 1..22: note = chemically synthesized
  source 1..22: mol_type = other DNA
ttttaactttttacttaccttc

SEQ ID NO: 15266 - DNA, 22 bp, synthetic construct
  misc_feature 1..22: note = chemically synthesized
  source 1..22: mol_type = other DNA
tttaactttttacttaccttca

SEQ ID NO: 15267 - DNA, 22 bp, synthetic construct
  misc_feature 1..22: note = chemically synthesized
  source 1..22: mol_type = other DNA
ttaactttttacttaccttcag

SEQ ID NO: 15268 - DNA, 22 bp, synthetic construct
  misc_feature 1..22: note = chemically synthesized
  source 1..22: mol_type = other DNA
taactttttacttaccttcagt

SEQ ID NO: 15269 - DNA, 22 bp, synthetic construct
  misc_feature 1..22: note = chemically synthesized
  source 1..22: mol_type = other DNA
aactttttacttaccttcagta

SEQ ID NO: 15270 - DNA, 22 bp, synthetic construct
  misc_feature 1..22: note = chemically synthesized
  source 1..22: mol_type = other DNA
actttttacttaccttcagtaa

SEQ ID NO: 15271 - DNA, 22 bp, synthetic construct
  misc_feature 1..22: note = chemically synthesized
  source 1..22: mol_type = other DNA
tttacttaccttcagtaattta

SEQ ID NO: 15272 - DNA, 22 bp, synthetic construct
  misc_feature 1..22: note = chemically synthesized
  source 1..22: mol_type = other DNA
ttacttaccttcagtaatttac

SEQ ID NO: 15273 - DNA, 22 bp, synthetic construct
  misc_feature 1..22: note = chemically synthesized
  source 1..22: mol_type = other DNA
tacttaccttcagtaatttaca

SEQ ID NO: 15274 - DNA, 22 bp, synthetic construct
  misc_feature 1..22: note = chemically synthesized
  source 1..22: mol_type = other DNA
acttaccttcagtaatttacaa

SEQ ID NO: 15275 - DNA, 22 bp, synthetic construct
  misc_feature 1..22: note = chemically synthesized
  source 1..22: mol_type = other DNA
cttaccttcagtaatttacaat

SEQ ID NO: 15276 - DNA, 22 bp, synthetic construct
  misc_feature 1..22: note = chemically synthesized
  source 1..22: mol_type = other DNA
accttcagtaatttacaatagt

SEQ ID NO: 15277 - DNA, 22 bp, synthetic construct
  misc_feature 1..22: note = chemically synthesized
  source 1..22: mol_type = other DNA
ccttcagtaatttacaatagtg

SEQ ID NO: 15278 - DNA, 22 bp, synthetic construct
  misc_feature 1..22: note = chemically synthesized
  source 1..22: mol_type = other DNA
cagtaatttacaatagtgtaat

SEQ ID NO: 15279 - DNA, 22 bp, synthetic construct
  misc_feature 1..22: note = chemically synthesized
  source 1..22: mol_type = other DNA
agtaatttacaatagtgtaatg

SEQ ID NO: 15280 - DNA, 22 bp, synthetic construct
  misc_feature 1..22: note = chemically synthesized
  source 1..22: mol_type = other DNA
acaatagtgtaatgacatagtg

SEQ ID NO: 15281 - DNA, 22 bp, synthetic construct
  misc_feature 1..22: note = chemically synthesized
  source 1..22: mol_type = other DNA
caatagtgtaatgacatagtgt

SEQ ID NO: 15282 - DNA, 22 bp, synthetic construct
  misc_feature 1..22: note = chemically synthesized
  source 1..22: mol_type = other DNA
tagattgtataatttaaccgat

SEQ ID NO: 15283 - DNA, 22 bp, synthetic construct
  misc_feature 1..22: note = chemically synthesized
  source 1..22: mol_type = other DNA
gattgtataatttaaccgattt

SEQ ID NO: 15284 - DNA, 22 bp, synthetic construct
  misc_feature 1..22: note = chemically synthesized
  source 1..22: mol_type = other DNA
tataatttaaccgatttgtaat

SEQ ID NO: 15285 - DNA, 22 bp, synthetic construct
  misc_feature 1..22: note = chemically synthesized
  source 1..22: mol_type = other DNA
aaccgatttgtaattttcatat

SEQ ID NO: 15286 - DNA, 22 bp, synthetic construct
  misc_feature 1..22: note = chemically synthesized
  source 1..22: mol_type = other DNA
accgatttgtaattttcatata

SEQ ID NO: 15287 - DNA, 22 bp, synthetic construct
  misc_feature 1..22: note = chemically synthesized
  source 1..22: mol_type = other DNA
gtaattttcatataaaatgcaa

SEQ ID NO: 15288 - DNA, 22 bp, synthetic construct
  misc_feature 1..22: note = chemically synthesized
  source 1..22: mol_type = other DNA
taattttcatataaaatgcaaa

SEQ ID NO: 15289 - DNA, 22 bp, synthetic construct
  misc_feature 1..22: note = chemically synthesized
  source 1..22: mol_type = other DNA
tcatataaaatgcaaattttca

SEQ ID NO: 15290 - DNA, 22 bp, synthetic construct
  misc_feature 1..22: note = chemically synthesized
  source 1..22: mol_type = other DNA
catataaaatgcaaattttcag

SEQ ID NO: 15291 - DNA, 22 bp, synthetic construct
  misc_feature 1..22: note = chemically synthesized
  source 1..22: mol_type = other DNA
atataaaatgcaaattttcagt

SEQ ID NO: 15292 - DNA, 22 bp, synthetic construct
  misc_feature 1..22: note = chemically synthesized
  source 1..22: mol_type = other DNA
tcagtgttttcatatataacat

SEQ ID NO: 15293 - DNA, 22 bp, synthetic construct
  misc_feature 1..22: note = chemically synthesized
  source 1..22: mol_type = other DNA
cagtgttttcatatataacatt

SEQ ID NO: 15294 - DNA, 22 bp, synthetic construct
  misc_feature 1..22: note = chemically synthesized
  source 1..22: mol_type = other DNA
agtgttttcatatataacatta

SEQ ID NO: 15295 - DNA, 22 bp, synthetic construct
  misc_feature 1..22: note = chemically synthesized
  source 1..22: mol_type = other DNA
tcatatataacattagggaaac

SEQ ID NO: 15296 - DNA, 22 bp, synthetic construct
  misc_feature 1..22: note = chemically synthesized
  source 1..22: mol_type = other DNA
catatataacattagggaaaca

SEQ ID NO: 15297 - DNA, 22 bp, synthetic construct
  misc_feature 1..22: note = chemically synthesized
  source 1..22: mol_type = other DNA
atatataacattagggaaacaa

SEQ ID NO: 15298 - DNA, 22 bp, synthetic construct
  misc_feature 1..22: note = chemically synthesized
  source 1..22: mol_type = other DNA
gggaaacaaaaaactaacttga

SEQ ID NO: 15299 - DNA, 22 bp, synthetic construct
  misc_feature 1..22: note = chemically synthesized
  source 1..22: mol_type = other DNA
acttgaaattataataggaaat

SEQ ID NO: 15300 - DNA, 22 bp, synthetic construct
  misc_feature 1..22: note = chemically synthesized
  source 1..22: mol_type = other DNA
gaaattataataggaaatttta

SEQ ID NO: 15301 - DNA, 22 bp, synthetic construct
  misc_feature 1..22: note = chemically synthesized
  source 1..22: mol_type = other DNA
aaattataataggaaattttat

SEQ ID NO: 15302 - DNA, 22 bp, synthetic construct
  misc_feature 1..22: note = chemically synthesized
  source 1..22: mol_type = other DNA
taataggaaattttattttctg

SEQ ID NO: 15303 - DNA, 22 bp, synthetic construct
  misc_feature 1..22: note = chemically synthesized
  source 1..22: mol_type = other DNA
tattttctggagattatttttc

SEQ ID NO: 15304 - DNA, 22 bp, synthetic construct
  misc_feature 1..22: note = chemically synthesized
  source 1..22: mol_type = other DNA
attttctggagattatttttct

SEQ ID NO: 15305 - DNA, 22 bp, synthetic construct
  misc_feature 1..22: note = chemically synthesized
  source 1..22: mol_type = other DNA
ttttctggagattatttttctt

SEQ ID NO: 15306 - DNA, 22 bp, synthetic construct
  misc_feature 1..22: note = chemically synthesized
  source 1..22: mol_type = other DNA
tctggagattatttttcttgga

SEQ ID NO: 15307 - DNA, 22 bp, synthetic construct
  misc_feature 1..22: note = chemically synthesized
  source 1..22: mol_type = other DNA
ctggagattatttttcttggaa

SEQ ID NO: 15308 - DNA, 22 bp, synthetic construct
  misc_feature 1..22: note = chemically synthesized
  source 1..22: mol_type = other DNA
tggagattatttttcttggaaa

SEQ ID NO: 15309 - DNA, 22 bp, synthetic construct
  misc_feature 1..22: note = chemically synthesized
  source 1..22: mol_type = other DNA
gagattatttttcttggaaaaa

SEQ ID NO: 15310 - DNA, 22 bp, synthetic construct
  misc_feature 1..22: note = chemically synthesized
  source 1..22: mol_type = other DNA
tttttcttggaaaaaaaagtat

SEQ ID NO: 15311 - DNA, 22 bp, synthetic construct
  misc_feature 1..22: note = chemically synthesized
  source 1..22: mol_type = other DNA
ttcttggaaaaaaaagtatttc

SEQ ID NO: 15312 - DNA, 22 bp, synthetic construct
  misc_feature 1..22: note = chemically synthesized
  source 1..22: mol_type = other DNA
tcttggaaaaaaaagtatttca

SEQ ID NO: 15313 - DNA, 22 bp, synthetic construct
  misc_feature 1..22: note = chemically synthesized
  source 1..22: mol_type = other DNA
cttggaaaaaaaagtatttcaa

SEQ ID NO: 15314 - DNA, 22 bp, synthetic construct
  misc_feature 1..22: note = chemically synthesized
  source 1..22: mol_type = other DNA
ttggaaaaaaaagtatttcaac

SEQ ID NO: 15315 - DNA, 22 bp, synthetic construct
  misc_feature 1..22: note = chemically synthesized
  source 1..22: mol_type = other DNA
ggaaaaaaaagtatttcaacaa

SEQ ID NO: 15316 - DNA, 22 bp, synthetic construct
  misc_feature 1..22: note = chemically synthesized
  source 1..22: mol_type = other DNA
gaaaaaaaagtatttcaacaat

SEQ ID NO: 15317 - DNA, 22 bp, synthetic construct
  misc_feature 1..22: note = chemically synthesized
  source 1..22: mol_type = other DNA
caacaatgcaacaaagtatttc

SEQ ID NO: 15318 - DNA, 22 bp, synthetic construct
  misc_feature 1..22: note = chemically synthesized
  source 1..22: mol_type = other DNA
aacaatgcaacaaagtatttca

SEQ ID NO: 15319 - DNA, 22 bp, synthetic construct
  misc_feature 1..22: note = chemically synthesized
  source 1..22: mol_type = other DNA
caaatggcatgccttagaaata

SEQ ID NO: 15320 - DNA, 22 bp, synthetic construct
  misc_feature 1..22: note = chemically synthesized
  source 1..22: mol_type = other DNA
aaatggcatgccttagaaatat

SEQ ID NO: 15321 - DNA, 22 bp, synthetic construct
  misc_feature 1..22: note = chemically synthesized
  source 1..22: mol_type = other DNA
agaaatattttttttaaaagat

SEQ ID NO: 15322 - DNA, 22 bp, synthetic construct
  misc_feature 1..22: note = chemically synthesized
  source 1..22: mol_type = other DNA
gaaatattttttttaaaagatc

SEQ ID NO: 15323 - DNA, 22 bp, synthetic construct
  misc_feature 1..22: note = chemically synthesized
  source 1..22: mol_type = other DNA
tttttaaaagatccacattgaa

SEQ ID NO: 15324 - DNA, 22 bp, synthetic construct
  misc_feature 1..22: note = chemically synthesized
  source 1..22: mol_type = other DNA
ttttaaaagatccacattgaaa

SEQ ID NO: 15325 - DNA, 22 bp, synthetic construct
  misc_feature 1..22: note = chemically synthesized
  source 1..22: mol_type = other DNA
tttaaaagatccacattgaaaa

SEQ ID NO: 15326 - DNA, 22 bp, synthetic construct
  misc_feature 1..22: note = chemically synthesized
  source 1..22: mol_type = other DNA
ttaaaagatccacattgaaaac

SEQ ID NO: 15327 - DNA, 22 bp, synthetic construct
  misc_feature 1..22: note = chemically synthesized
  source 1..22: mol_type = other DNA
taaaagatccacattgaaaaca

SEQ ID NO: 15328 - DNA, 22 bp, synthetic construct
  misc_feature 1..22: note = chemically synthesized
  source 1..22: mol_type = other DNA
aaaagatccacattgaaaacat

SEQ ID NO: 15329 - DNA, 22 bp, synthetic construct
  misc_feature 1..22: note = chemically synthesized
  source 1..22: mol_type = other DNA
aaagatccacattgaaaacata

SEQ ID NO: 15330 - DNA, 22 bp, synthetic construct
  misc_feature 1..22: note = chemically synthesized
  source 1..22: mol_type = other DNA
aaaacataaacatgaaccctct

SEQ ID NO: 15331 - DNA, 22 bp, synthetic construct
  misc_feature 1..22: note = chemically synthesized
  source 1..22: mol_type = other DNA
tttattttctacttactttaag

SEQ ID NO: 15332 - DNA, 22 bp, synthetic construct
  misc_feature 1..22: note = chemically synthesized
  source 1..22: mol_type = other DNA
tattttctacttactttaagtg

SEQ ID NO: 15333 - DNA, 22 bp, synthetic construct
  misc_feature 1..22: note = chemically synthesized
  source 1..22: mol_type = other DNA
attttctacttactttaagtga

SEQ ID NO: 15334 - DNA, 22 bp, synthetic construct
  misc_feature 1..22: note = chemically synthesized
  source 1..22: mol_type = other DNA
ttttctacttactttaagtgaa

SEQ ID NO: 15335 - DNA, 22 bp, synthetic construct
  misc_feature 1..22: note = chemically synthesized
  source 1..22: mol_type = other DNA
tctacttactttaagtgaagtt

SEQ ID NO: 15336 - DNA, 22 bp, synthetic construct
  misc_feature 1..22: note = chemically synthesized
  source 1..22: mol_type = other DNA
ctacttactttaagtgaagtta

SEQ ID NO: 15337 - DNA, 22 bp, synthetic construct
  misc_feature 1..22: note = chemically synthesized
  source 1..22: mol_type = other DNA
tacttactttaagtgaagttac

SEQ ID NO: 15338 - DNA, 22 bp, synthetic construct
  misc_feature 1..22: note = chemically synthesized
  source 1..22: mol_type = other DNA
cttactttaagtgaagttactt

SEQ ID NO: 15339 - DNA, 22 bp, synthetic construct
  misc_feature 1..22: note = chemically synthesized
  source 1..22: mol_type = other DNA
actttaagtgaagttacttctg

SEQ ID NO: 15340 - DNA, 22 bp, synthetic construct
  misc_feature 1..22: note = chemically synthesized
  source 1..22: mol_type = other DNA
ctttaagtgaagttacttctgg

SEQ ID NO: 15341 - DNA, 22 bp, synthetic construct
  misc_feature 1..22: note = chemically synthesized
  source 1..22: mol_type = other DNA
taagtgaagttacttctgggtg

SEQ ID NO: 15342 - DNA, 22 bp, synthetic construct
  misc_feature 1..22: note = chemically synthesized
  source 1..22: mol_type = other DNA
aagtgaagttacttctgggtgt

SEQ ID NO: 15343 - DNA, 22 bp, synthetic construct
  misc_feature 1..22: note = chemically synthesized
  source 1..22: mol_type = other DNA
agtgaagttacttctgggtgtt

SEQ ID NO: 15344 - DNA, 22 bp, synthetic construct
  misc_feature 1..22: note = chemically synthesized
  source 1..22: mol_type = other DNA
cttctgggtgttctggagtttc

SEQ ID NO: 15345 - DNA, 22 bp, synthetic construct
  misc_feature 1..22: note = chemically synthesized
  source 1..22: mol_type = other DNA
ctgggtgttctggagtttcagg

SEQ ID NO: 15346 - DNA, 22 bp, synthetic construct
  misc_feature 1..22: note = chemically synthesized
  source 1..22: mol_type = other DNA
tgggtgttctggagtttcaggt

SEQ ID NO: 15347 - DNA, 22 bp, synthetic construct
  misc_feature 1..22: note = chemically synthesized
  source 1..22: mol_type = other DNA
ggtgttctggagtttcaggttg

SEQ ID NO: 15348 - DNA, 22 bp, synthetic construct
  misc_feature 1..22: note = chemically synthesized
  source 1..22: mol_type = other DNA
tggagtttcaggttgattttga

SEQ ID NO: 15349 - DNA, 22 bp, synthetic construct
  misc_feature 1..22: note = chemically synthesized
  source 1..22: mol_type = other DNA
gagtttcaggttgattttgaat

SEQ ID NO: 15350 - DNA, 22 bp, synthetic construct
  misc_feature 1..22: note = chemically synthesized
  source 1..22: mol_type = other DNA
caggttgattttgaattaagtt

SEQ ID NO: 15351 - DNA, 22 bp, synthetic construct
  misc_feature 1..22: note = chemically synthesized
  source 1..22: mol_type = other DNA
aggttgattttgaattaagtta

SEQ ID NO: 15352 - DNA, 22 bp, synthetic construct
  misc_feature 1..22: note = chemically synthesized
  source 1..22: mol_type = other DNA
attttgaattaagttagttagt

SEQ ID NO: 15353 - DNA, 22 bp, synthetic construct
  misc_feature 1..22: note = chemically synthesized
  source 1..22: mol_type = other DNA
tgaattaagttagttagttgct

SEQ ID NO: 15354 - DNA, 22 bp, synthetic construct
  misc_feature 1..22: note = chemically synthesized
  source 1..22: mol_type = other DNA
gaattaagttagttagttgctc

SEQ ID NO: 15355 - DNA, 22 bp, synthetic construct
  misc_feature 1..22: note = chemically synthesized
  source 1..22: mol_type = other DNA
aattaagttagttagttgctct

SEQ ID NO: 15356 - DNA, 22 bp, synthetic construct
  misc_feature 1..22: note = chemically synthesized
  source 1..22: mol_type = other DNA
agttagttagttgctcttctaa

SEQ ID NO: 15357 - DNA, 22 bp, synthetic construct
  misc_feature 1..22: note = chemically synthesized
  source 1..22: mol_type = other DNA
gttagttgctcttctaaatatt

SEQ ID NO: 15358 - DNA, 22 bp, synthetic construct
  misc_feature 1..22: note = chemically synthesized
  source 1..22: mol_type = other DNA
gttgctcttctaaatatttcac

SEQ ID NO: 15359 - DNA, 22 bp, synthetic construct
  misc_feature 1..22: note = chemically synthesized
  source 1..22: mol_type = other DNA
ctcttctaaatatttcactttt

SEQ ID NO: 15360 - DNA, 22 bp, synthetic construct
  misc_feature 1..22: note = chemically synthesized
  source 1..22: mol_type = other DNA
ttctaaatatttcactttttgt

SEQ ID NO: 15361 - DNA, 22 bp, synthetic construct
  misc_feature 1..22: note = chemically synthesized
  source 1..22: mol_type = other DNA
ctaaatatttcactttttgttg

SEQ ID NO: 15362 - DNA, 22 bp, synthetic construct
  misc_feature 1..22: note = chemically synthesized
  source 1..22: mol_type = other DNA
taaatatttcactttttgttga

SEQ ID NO: 15363 - DNA, 22 bp, synthetic construct
  misc_feature 1..22: note = chemically synthesized
  source 1..22: mol_type = other DNA
aatatttcactttttgttgaag

SEQ ID NO: 15364 - DNA, 22 bp, synthetic construct
  misc_feature 1..22: note = chemically synthesized
  source 1..22: mol_type = other DNA
cactttttgttgaagtagaatt

SEQ ID NO: 15365 - DNA, 22 bp, synthetic construct
  misc_feature 1..22: note = chemically synthesized
  source 1..22: mol_type = other DNA
actttttgttgaagtagaattt

SEQ ID NO: 15366 - DNA, 22 bp, synthetic construct
  misc_feature 1..22: note = chemically synthesized
  source 1..22: mol_type = other DNA
tttgttgaagtagaattttttc

SEQ ID NO: 15367 - DNA, 22 bp, synthetic construct
  misc_feature 1..22: note = chemically synthesized
  source 1..22: mol_type = other DNA
ttgttgaagtagaattttttct

SEQ ID NO: 15368 - DNA, 22 bp, synthetic construct
  misc_feature 1..22: note = chemically synthesized
  source 1..22: mol_type = other DNA
tgttgaagtagaattttttctt

SEQ ID NO: 15369 - DNA, 22 bp, synthetic construct
  misc_feature 1..22: note = chemically synthesized
  source 1..22: mol_type = other DNA
gttgaagtagaattttttcttc

SEQ ID NO: 15370 - DNA, 22 bp, synthetic construct
  misc_feature 1..22: note = chemically synthesized
  source 1..22: mol_type = other DNA
ttgaagtagaattttttcttct

SEQ ID NO: 15371 - DNA, 22 bp, synthetic construct
  misc_feature 1..22: note = chemically synthesized
  source 1..22: mol_type = other DNA
aagtagaattttttcttctagg

SEQ ID NO: 15372 - DNA, 22 bp, synthetic construct
  misc_feature 1..22: note = chemically synthesized
  source 1..22: mol_type = other DNA
tttcttctaggaggctttcaag

SEQ ID NO: 15373 - DNA, 22 bp, synthetic construct
  misc_feature 1..22: note = chemically synthesized
  source 1..22: mol_type = other DNA
ttcttctaggaggctttcaagt

SEQ ID NO: 15374 - DNA, 22 bp, synthetic construct
  misc_feature 1..22: note = chemically synthesized
  source 1..22: mol_type = other DNA
tcttctaggaggctttcaagtt

SEQ ID NO: 15375 - DNA, 22 bp, synthetic construct
  misc_feature 1..22: note = chemically synthesized
  source 1..22: mol_type = other DNA
cttctaggaggctttcaagttt

SEQ ID NO: 15376 - DNA, 22 bp, synthetic construct
  misc_feature 1..22: note = chemically synthesized
  source 1..22: mol_type = other DNA
ttctaggaggctttcaagtttt

SEQ ID NO: 15377 - DNA, 22 bp, synthetic construct
  misc_feature 1..22: note = chemically synthesized
  source 1..22: mol_type = other DNA
ctaggaggctttcaagttttga

SEQ ID NO: 15378 - DNA, 22 bp, synthetic construct
  misc_feature 1..22: note = chemically synthesized
  source 1..22: mol_type = other DNA
taggaggctttcaagttttgag

SEQ ID NO: 15379 - DNA, 22 bp, synthetic construct
  misc_feature 1..22: note = chemically synthesized
  source 1..22: mol_type = other DNA
ggaggctttcaagttttgagtt

SEQ ID NO: 15380 - DNA, 22 bp, synthetic construct
  misc_feature 1..22: note = chemically synthesized
  source 1..22: mol_type = other DNA
tcaagttttgagttgagttcaa

SEQ ID NO: 15381 - DNA, 22 bp, synthetic construct
  misc_feature 1..22: note = chemically synthesized
  source 1..22: mol_type = other DNA
caagttttgagttgagttcaag

SEQ ID NO: 15382 - DNA, 22 bp, synthetic construct
  misc_feature 1..22: note = chemically synthesized
  source 1..22: mol_type = other DNA
aagttttgagttgagttcaagt

SEQ ID NO: 15383 - DNA, 22 bp, synthetic construct
  misc_feature 1..22: note = chemically synthesized
  source 1..22: mol_type = other DNA
tgagttgagttcaagtgacata

SEQ ID NO: 15384 - DNA, 22 bp, synthetic construct
  misc_feature 1..22: note = chemically synthesized
  source 1..22: mol_type = other DNA
gagttgagttcaagtgacatat

SEQ ID NO: 15385 - DNA, 22 bp, synthetic construct
  misc_feature 1..22: note = chemically synthesized
  source 1..22: mol_type = other DNA
agttgagttcaagtgacatatt

SEQ ID NO: 15386 - DNA, 22 bp, synthetic construct
  misc_feature 1..22: note = chemically synthesized
  source 1..22: mol_type = other DNA
agttcaagtgacatattcttta

SEQ ID NO: 15387 - DNA, 22 bp, synthetic construct
  misc_feature 1..22: note = chemically synthesized
  source 1..22: mol_type = other DNA
aagtgacatattctttacctct

SEQ ID NO: 15388 - DNA, 22 bp, synthetic construct
  misc_feature 1..22: note = chemically synthesized
  source 1..22: mol_type = other DNA
tttacctcttcatttttgactt

SEQ ID NO: 15389 - DNA, 22 bp, synthetic construct
  misc_feature 1..22: note = chemically synthesized
  source 1..22: mol_type = other DNA
tacctcttcatttttgacttgt

SEQ ID NO: 15390 - DNA, 22 bp, synthetic construct
  misc_feature 1..22: note = chemically synthesized
  source 1..22: mol_type = other DNA
acctcttcatttttgacttgta

SEQ ID NO: 15391 - DNA, 22 bp, synthetic construct
  misc_feature 1..22: note = chemically synthesized
  source 1..22: mol_type = other DNA
cctcttcatttttgacttgtag

SEQ ID NO: 15392 - DNA, 22 bp, synthetic construct
  misc_feature 1..22: note = chemically synthesized
  source 1..22: mol_type = other DNA
ttcatttttgacttgtagttta

SEQ ID NO: 15393 - DNA, 22 bp, synthetic construct
  misc_feature 1..22: note = chemically synthesized
  source 1..22: mol_type = other DNA
catttttgacttgtagtttata

SEQ ID NO: 15394 - DNA, 22 bp, synthetic construct
  misc_feature 1..22: note = chemically synthesized
  source 1..22: mol_type = other DNA
atttttgacttgtagtttatat

SEQ ID NO: 15395 - DNA, 22 bp, synthetic construct
  misc_feature 1..22: note = chemically synthesized
  source 1..22: mol_type = other DNA
ttgacttgtagtttatatgtag

SEQ ID NO: 15396 - DNA, 22 bp, synthetic construct
  misc_feature 1..22: note = chemically synthesized
  source 1..22: mol_type = other DNA
tgacttgtagtttatatgtagt

SEQ ID NO: 15397 - DNA, 22 bp, synthetic construct
  misc_feature 1..22: note = chemically synthesized
  source 1..22: mol_type = other DNA
gacttgtagtttatatgtagtt

SEQ ID NO: 15398 - DNA, 22 bp, synthetic construct
  misc_feature 1..22: note = chemically synthesized
  source 1..22: mol_type = other DNA
acttgtagtttatatgtagttc

SEQ ID NO: 15399 - DNA, 22 bp, synthetic construct
  misc_feature 1..22: note = chemically synthesized
  source 1..22: mol_type = other DNA
gtagtttatatgtagttcttct

SEQ ID NO: 15400 - DNA, 22 bp, synthetic construct
  misc_feature 1..22: note = chemically synthesized
  source 1..22: mol_type = other DNA
tagtttatatgtagttcttctc

SEQ ID NO: 15401 - DNA, 22 bp, synthetic construct
  misc_feature 1..22: note = chemically synthesized
  source 1..22: mol_type = other DNA
atatgtagttcttctcagttcc

SEQ ID NO: 15402 - DNA, 22 bp, synthetic construct
  misc_feature 1..22: note = chemically synthesized
  source 1..22: mol_type = other DNA
tatgtagttcttctcagttcct

SEQ ID NO: 15403 - DNA, 22 bp, synthetic construct
  misc_feature 1..22: note = chemically synthesized
  source 1..22: mol_type = other DNA
ttctcagttccttttcttcttc

SEQ ID NO: 15404 - DNA, 22 bp, synthetic construct
  misc_feature 1..22: note = chemically synthesized
  source 1..22: mol_type = other DNA
ctcagttccttttcttcttctt

SEQ ID NO: 15405 - DNA, 22 bp, synthetic construct
  misc_feature 1..22: note = chemically synthesized
  source 1..22: mol_type = other DNA
tcagttccttttcttcttcttt

SEQ ID NO: 15406 - DNA, 22 bp, synthetic construct
  misc_feature 1..22: note = chemically synthesized
  source 1..22: mol_type = other DNA
agttccttttcttcttctttga

SEQ ID NO: 15407 - DNA, 22 bp, synthetic construct
  misc_feature 1..22: note = chemically synthesized
  source 1..22: mol_type = other DNA
cttttcttcttctttgatttca

SEQ ID NO: 15408 - DNA, 22 bp, synthetic construct
  misc_feature 1..22: note = chemically synthesized
  source 1..22: mol_type = other DNA
ttcttcttctttgatttcactg

SEQ ID NO: 15409 - DNA, 22 bp, synthetic construct
  misc_feature 1..22: note = chemically synthesized
  source 1..22: mol_type = other DNA
tcttcttctttgatttcactgg

SEQ ID NO: 15410 - DNA, 22 bp, synthetic construct
  misc_feature 1..22: note = chemically synthesized
  source 1..22: mol_type = other DNA
cttcttctttgatttcactggt

SEQ ID NO: 15411 - DNA, 22 bp, synthetic construct
  misc_feature 1..22: note = chemically synthesized
  source 1..22: mol_type = other DNA
ttcttctttgatttcactggtt

SEQ ID NO: 15412 - DNA, 22 bp, synthetic construct
  misc_feature 1..22: note = chemically synthesized
  source 1..22: mol_type = other DNA
cttctttgatttcactggtttg

SEQ ID NO: 15413 - DNA, 22 bp, synthetic construct
  misc_feature 1..22: note = chemically synthesized
  source 1..22: mol_type = other DNA
ttctttgatttcactggtttgc

SEQ ID NO: 15414 - DNA, 22 bp, synthetic construct
  misc_feature 1..22: note = chemically synthesized
  source 1..22: mol_type = other DNA
ctttgatttcactggtttgcag

SEQ ID NO: 15415 - DNA, 22 bp, synthetic construct
  misc_feature 1..22: note = chemically synthesized
  source 1..22: mol_type = other DNA
tttgatttcactggtttgcagc

SEQ ID NO: 15416 - DNA, 22 bp, synthetic construct
  misc_feature 1..22: note = chemically synthesized
  source 1..22: mol_type = other DNA
tgatttcactggtttgcagcga

SEQ ID NO: 15417 - DNA, 22 bp, synthetic construct
  misc_feature 1..22: note = chemically synthesized
  source 1..22: mol_type = other DNA
gatttcactggtttgcagcgat

SEQ ID NO: 15418 - DNA, 22 bp, synthetic construct
  misc_feature 1..22: note = chemically synthesized
  source 1..22: mol_type = other DNA
atttcactggtttgcagcgata

SEQ ID NO: 15419 - DNA, 22 bp, synthetic construct
  misc_feature 1..22: note = chemically synthesized
  source 1..22: mol_type = other DNA
cactggtttgcagcgatagatc

SEQ ID NO: 15420 - DNA, 22 bp, synthetic construct
  misc_feature 1..22: note = chemically synthesized
  source 1..22: mol_type = other DNA
actggtttgcagcgatagatca

SEQ ID NO: 15421 - DNA, 22 bp, synthetic construct
  misc_feature 1..22: note = chemically synthesized
  source 1..22: mol_type = other DNA
gtttgcagcgatagatcataaa

SEQ ID NO: 15422 - DNA, 22 bp, synthetic construct
  misc_feature 1..22: note = chemically synthesized
  source 1..22: mol_type = other DNA
gcagcgatagatcataaaaaga

SEQ ID NO: 15423 - DNA, 22 bp, synthetic construct
  misc_feature 1..22: note = chemically synthesized
  source 1..22: mol_type = other DNA
cagcgatagatcataaaaagac

SEQ ID NO: 15424 - DNA, 22 bp, synthetic construct
  misc_feature 1..22: note = chemically synthesized
  source 1..22: mol_type = other DNA
atcaaatatgttgagtttttga

SEQ ID NO: 15425 - DNA, 22 bp, synthetic construct
  misc_feature 1..22: note = chemically synthesized
  source 1..22: mol_type = other DNA
agtttttgaaatatgtcattaa

SEQ ID NO: 15426 - DNA, 22 bp, synthetic construct
  misc_feature 1..22: note = chemically synthesized
  source 1..22: mol_type = other DNA
ttgaaatatgtcattaatttgg

SEQ ID NO: 15427 - DNA, 22 bp, synthetic construct
  misc_feature 1..22: note = chemically synthesized
  source 1..22: mol_type = other DNA
tgaaatatgtcattaatttggc

SEQ ID NO: 15428 - DNA, 22 bp, synthetic construct
  misc_feature 1..22: note = chemically synthesized
  source 1..22: mol_type = other DNA
gaaatatgtcattaatttggcc

SEQ ID NO: 15429 - DNA, 22 bp, synthetic construct
  misc_feature 1..22: note = chemically synthesized
  source 1..22: mol_type = other DNA
aaatatgtcattaatttggccc

SEQ ID NO: 15430 - DNA, 22 bp, synthetic construct
  misc_feature 1..22: note = chemically synthesized
  source 1..22: mol_type = other DNA
atttggcccttcgtcttatgga

SEQ ID NO: 15431 - DNA, 22 bp, synthetic construct
  misc_feature 1..22: note = chemically synthesized
  source 1..22: mol_type = other DNA
ggcccttcgtcttatggacaaa

SEQ ID NO: 15432 - DNA, 22 bp, synthetic construct
  misc_feature 1..22: note = chemically synthesized
  source 1..22: mol_type = other DNA
gcccttcgtcttatggacaaag

SEQ ID NO: 15433 - DNA, 22 bp, synthetic construct
  misc_feature 1..22: note = chemically synthesized
  source 1..22: mol_type = other DNA
cgtcttatggacaaagtcttta

SEQ ID NO: 15434 - DNA, 22 bp, synthetic construct
  misc_feature 1..22: note = chemically synthesized
  source 1..22: mol_type = other DNA
gtcttatggacaaagtctttaa

SEQ ID NO: 15435 - DNA, 22 bp, synthetic construct
  misc_feature 1..22: note = chemically synthesized
  source 1..22: mol_type = other DNA
atggacaaagtctttaagacca

SEQ ID NO: 15436 - DNA, 22 bp, synthetic construct
  misc_feature 1..22: note = chemically synthesized
  source 1..22: mol_type = other DNA
tggacaaagtctttaagaccat

SEQ ID NO: 15437 - DNA, 22 bp, synthetic construct
  misc_feature 1..22: note = chemically synthesized
  source 1..22: mol_type = other DNA
taagaccatgtcccaactgaag

SEQ ID NO: 15438 - DNA, 22 bp, synthetic construct
  misc_feature 1..22: note = chemically synthesized
  source 1..22: mol_type = other DNA
aagaccatgtcccaactgaagg

SEQ ID NO: 15439 - DNA, 22 bp, synthetic construct
  misc_feature 1..22: note = chemically synthesized
  source 1..22: mol_type = other DNA
agaccatgtcccaactgaagga

SEQ ID NO: 15440 - DNA, 22 bp, synthetic construct
  misc_feature 1..22: note = chemically synthesized
  source 1..22: mol_type = other DNA
aaggaggccattggctaaaatt

SEQ ID NO: 15441 - DNA, 22 bp, synthetic construct
  misc_feature 1..22: note = chemically synthesized
  source 1..22: mol_type = other DNA
gctaaaatttttacatcgtcta

SEQ ID NO: 15442 - DNA, 22 bp, synthetic construct
  misc_feature 1..22: note = chemically synthesized
  source 1..22: mol_type = other DNA
aaatttttacatcgtctaacat

SEQ ID NO: 15443 - DNA, 22 bp, synthetic construct
  misc_feature 1..22: note = chemically synthesized
  source 1..22: mol_type = other DNA
ttacatcgtctaacatagcaaa

SEQ ID NO: 15444 - DNA, 22 bp, synthetic construct
  misc_feature 1..22: note = chemically synthesized
  source 1..22: mol_type = other DNA
tacatcgtctaacatagcaaat

SEQ ID NO: 15445 - DNA, 22 bp, synthetic construct
  misc_feature 1..22: note = chemically synthesized
  source 1..22: mol_type = other DNA
acatcgtctaacatagcaaatc

SEQ ID NO: 15446 - DNA, 22 bp, synthetic construct
  misc_feature 1..22: note = chemically synthesized
  source 1..22: mol_type = other DNA
catcgtctaacatagcaaatct

SEQ ID NO: 15447 - DNA, 22 bp, synthetic construct
  misc_feature 1..22: note = chemically synthesized
  source 1..22: mol_type = other DNA
acatagcaaatcttgattttgg

SEQ ID NO: 15448 - DNA, 22 bp, synthetic construct
  misc_feature 1..22: note = chemically synthesized
  source 1..22: mol_type = other DNA
gattttggctctggagatagag

SEQ ID NO: 15449 - DNA, 22 bp, synthetic construct
  misc_feature 1..22: note = chemically synthesized
  source 1..22: mol_type = other DNA
attttggctctggagatagaga

SEQ ID NO: 15450 - DNA, 22 bp, synthetic construct
  misc_feature 1..22: note = chemically synthesized
  source 1..22: mol_type = other DNA
tggctctggagatagagaatca

SEQ ID NO: 15451 - DNA, 22 bp, synthetic construct
  misc_feature 1..22: note = chemically synthesized
  source 1..22: mol_type = other DNA
ggctctggagatagagaatcaa

SEQ ID NO: 15452 - DNA, 22 bp, synthetic construct
  misc_feature 1..22: note = chemically synthesized
  source 1..22: mol_type = other DNA
gctctggagatagagaatcaaa

SEQ ID NO: 15453 - DNA, 22 bp, synthetic construct
  misc_feature 1..22: note = chemically synthesized
  source 1..22: mol_type = other DNA
tggagatagagaatcaaatgat

SEQ ID NO: 15454 - DNA, 22 bp, synthetic construct
  misc_feature 1..22: note = chemically synthesized
  source 1..22: mol_type = other DNA
gagatagagaatcaaatgatga

SEQ ID NO: 15455 - DNA, 22 bp, synthetic construct
  misc_feature 1..22: note = chemically synthesized
  source 1..22: mol_type = other DNA
tcttgatcaattctggaggaaa

SEQ ID NO: 15456 - DNA, 22 bp, synthetic construct
  misc_feature 1..22: note = chemically synthesized
  source 1..22: mol_type = other DNA
gatcaattctggaggaaataac

SEQ ID NO: 15457 - DNA, 22 bp, synthetic construct
  misc_feature 1..22: note = chemically synthesized
  source 1..22: mol_type = other DNA
atcaattctggaggaaataact

SEQ ID NO: 15458 - DNA, 22 bp, synthetic construct
  misc_feature 1..22: note = chemically synthesized
  source 1..22: mol_type = other DNA
tggaggaaataactagaggaac

SEQ ID NO: 15459 - DNA, 22 bp, synthetic construct
  misc_feature 1..22: note = chemically synthesized
  source 1..22: mol_type = other DNA
gaggaaataactagaggaacaa

SEQ ID NO: 15460 - DNA, 22 bp, synthetic construct
  misc_feature 1..22: note = chemically synthesized
  source 1..22: mol_type = other DNA
gaggaacaataaaaagaaggag

SEQ ID NO: 15461 - DNA, 22 bp, synthetic construct
  misc_feature 1..22: note = chemically synthesized
  source 1..22: mol_type = other DNA
aattgtgaacatttttatcttg

SEQ ID NO: 15462 - DNA, 22 bp, synthetic construct
  misc_feature 1..22: note = chemically synthesized
  source 1..22: mol_type = other DNA
attgtgaacatttttatcttga

SEQ ID NO: 15463 - DNA, 22 bp, synthetic construct
  misc_feature 1..22: note = chemically synthesized
  source 1..22: mol_type = other DNA
tgaacatttttatcttgatttt

SEQ ID NO: 15464 - DNA, 22 bp, synthetic construct
  misc_feature 1..22: note = chemically synthesized
  source 1..22: mol_type = other DNA
ttatcttgattttcaatttcaa

SEQ ID NO: 15465 - DNA, 22 bp, synthetic construct
  misc_feature 1..22: note = chemically synthesized
  source 1..22: mol_type = other DNA
tatcttgattttcaatttcaag

SEQ ID NO: 15466 - DNA, 22 bp, synthetic construct
  misc_feature 1..22: note = chemically synthesized
  source 1..22: mol_type = other DNA
atcttgattttcaatttcaagc

SEQ ID NO: 15467 - DNA, 22 bp, synthetic construct
  misc_feature 1..22: note = chemically synthesized
  source 1..22: mol_type = other DNA
tcttgattttcaatttcaagca

SEQ ID NO: 15468 - DNA, 22 bp, synthetic construct
  misc_feature 1..22: note = chemically synthesized
  source 1..22: mol_type = other DNA
gattttcaatttcaagcaacgt

SEQ ID NO: 15469 - DNA, 22 bp, synthetic construct
  misc_feature 1..22: note = chemically synthesized
  source 1..22: mol_type = other DNA
attttcaatttcaagcaacgtg

SEQ ID NO: 15470 - DNA, 22 bp, synthetic construct
  misc_feature 1..22: note = chemically synthesized
  source 1..22: mol_type = other DNA
tcaatttcaagcaacgtggaac

SEQ ID NO: 15471 - DNA, 22 bp, synthetic construct
  misc_feature 1..22: note = chemically synthesized
  source 1..22: mol_type = other DNA
caatttcaagcaacgtggaact

SEQ ID NO: 15472 - DNA, 22 bp, synthetic construct
  misc_feature 1..22: note = chemically synthesized
  source 1..22: mol_type = other DNA
aatttcaagcaacgtggaactg

SEQ ID NO: 15473 - DNA, 22 bp, synthetic construct
  misc_feature 1..22: note = chemically synthesized
  source 1..22: mol_type = other DNA
caagcaacgtggaactgttttc

SEQ ID NO: 15474 - DNA, 22 bp, synthetic construct
  misc_feature 1..22: note = chemically synthesized
  source 1..22: mol_type = other DNA
aagcaacgtggaactgttttct

SEQ ID NO: 15475 - DNA, 22 bp, synthetic construct
  misc_feature 1..22: note = chemically synthesized
  source 1..22: mol_type = other DNA
ttttcttctggaagcagaccta

SEQ ID NO: 15476 - DNA, 22 bp, synthetic construct
  misc_feature 1..22: note = chemically synthesized
  source 1..22: mol_type = other DNA
tcttctggaagcagacctagac

SEQ ID NO: 15477 - DNA, 22 bp, synthetic construct
  misc_feature 1..22: note = chemically synthesized
  source 1..22: mol_type = other DNA
cttctggaagcagacctagact

SEQ ID NO: 15478 - DNA, 22 bp, synthetic construct
  misc_feature 1..22: note = chemically synthesized
  source 1..22: mol_type = other DNA
ttctggaagcagacctagactt

SEQ ID NO: 15479 - DNA, 22 bp, synthetic construct
  misc_feature 1..22: note = chemically synthesized
  source 1..22: mol_type = other DNA
ctggaagcagacctagacttct

SEQ ID NO: 15480 - DNA, 22 bp, synthetic construct
  misc_feature 1..22: note = chemically synthesized
  source 1..22: mol_type = other DNA
tggaagcagacctagacttctt

SEQ ID NO: 15481 - DNA, 22 bp, synthetic construct
  misc_feature 1..22: note = chemically synthesized
  source 1..22: mol_type = other DNA
gaagcagacctagacttcttaa

SEQ ID NO: 15482 - DNA, 22 bp, synthetic construct
  misc_feature 1..22: note = chemically synthesized
  source 1..22: mol_type = other DNA
gacttcttaactctatatatac

SEQ ID NO: 15483 - DNA, 22 bp, synthetic construct
  misc_feature 1..22: note = chemically synthesized
  source 1..22: mol_type = other DNA
cttaactctatatataccaata

SEQ ID NO: 15484 - DNA, 22 bp, synthetic construct
  misc_feature 1..22: note = chemically synthesized
  source 1..22: mol_type = other DNA
ttaactctatatataccaatat

SEQ ID NO: 15485 - DNA, 22 bp, synthetic construct
  misc_feature 1..22: note = chemically synthesized
  source 1..22: mol_type = other DNA
aactctatatataccaatattt

SEQ ID NO: 15486 - DNA, 22 bp, synthetic construct
  misc_feature 1..22: note = chemically synthesized
  source 1..22: mol_type = other DNA
actctatatataccaatatttg

SEQ ID NO: 15487 - DNA, 22 bp, synthetic construct
  misc_feature 1..22: note = chemically synthesized
  source 1..22: mol_type = other DNA
tatatataccaatatttgccca

SEQ ID NO: 15488 - DNA, 22 bp, synthetic construct
  misc_feature 1..22: note = chemically synthesized
  source 1..22: mol_type = other DNA
tatataccaatatttgcccaga

SEQ ID NO: 15489 - DNA, 22 bp, synthetic construct
  misc_feature 1..22: note = chemically synthesized
  source 1..22: mol_type = other DNA
gcccagaaaaggtaaggttggt

SEQ ID NO: 15490 - DNA, 22 bp, synthetic construct
  misc_feature 1..22: note = chemically synthesized
  source 1..22: mol_type = other DNA
cccagaaaaggtaaggttggta

SEQ ID NO: 15491 - DNA, 22 bp, synthetic construct
  misc_feature 1..22: note = chemically synthesized
  source 1..22: mol_type = other DNA
gtaggtgaacatagttaatcat

SEQ ID NO: 15492 - DNA, 22 bp, synthetic construct
  misc_feature 1..22: note = chemically synthesized
  source 1..22: mol_type = other DNA
atcattaagccgtgttaacttg

SEQ ID NO: 15493 - DNA, 22 bp, synthetic construct
  misc_feature 1..22: note = chemically synthesized
  source 1..22: mol_type = other DNA
agccgtgttaacttgcacgaat

SEQ ID NO: 15494 - DNA, 22 bp, synthetic construct
  misc_feature 1..22: note = chemically synthesized
  source 1..22: mol_type = other DNA
acttgcacgaatgtaaccttct

SEQ ID NO: 15495 - DNA, 22 bp, synthetic construct
  misc_feature 1..22: note = chemically synthesized
  source 1..22: mol_type = other DNA
gcacgaatgtaaccttcttcca

SEQ ID NO: 15496 - DNA, 22 bp, synthetic construct
  misc_feature 1..22: note = chemically synthesized
  source 1..22: mol_type = other DNA
cacgaatgtaaccttcttccac

SEQ ID NO: 15497 - DNA, 22 bp, synthetic construct
  misc_feature 1..22: note = chemically synthesized
  source 1..22: mol_type = other DNA
cttccacattgagttagatcaa

SEQ ID NO: 15498 - DNA, 22 bp, synthetic construct
  misc_feature 1..22: note = chemically synthesized
  source 1..22: mol_type = other DNA
ttccacattgagttagatcaat

SEQ ID NO: 15499 - DNA, 22 bp, synthetic construct
  misc_feature 1..22: note = chemically synthesized
  source 1..22: mol_type = other DNA
ccacattgagttagatcaatgc

SEQ ID NO: 15500 - DNA, 22 bp, synthetic construct
  misc_feature 1..22: note = chemically synthesized
  source 1..22: mol_type = other DNA
cacattgagttagatcaatgct

SEQ ID NO: 15501 - DNA, 22 bp, synthetic construct
  misc_feature 1..22: note = chemically synthesized
  source 1..22: mol_type = other DNA
agttagatcaatgctaaatgaa

SEQ ID NO: 15502 - DNA, 22 bp, synthetic construct
  misc_feature 1..22: note = chemically synthesized
  source 1..22: mol_type = other DNA
gatcaatgctaaatgaaatcaa

SEQ ID NO: 15503 - DNA, 22 bp, synthetic construct
  misc_feature 1..22: note = chemically synthesized
  source 1..22: mol_type = other DNA
aatgaaatcaaagaaatgagca

SEQ ID NO: 15504 - DNA, 22 bp, synthetic construct
  misc_feature 1..22: note = chemically synthesized
  source 1..22: mol_type = other DNA
acttaataggtaatttgaaatt

SEQ ID NO: 15505 - DNA, 22 bp, synthetic construct
  misc_feature 1..22: note = chemically synthesized
  source 1..22: mol_type = other DNA
aataggtaatttgaaattgtat

SEQ ID NO: 15506 - DNA, 22 bp, synthetic construct
  misc_feature 1..22: note = chemically synthesized
  source 1..22: mol_type = other DNA
ataggtaatttgaaattgtatt

SEQ ID NO: 15507 - DNA, 22 bp, synthetic construct
  misc_feature 1..22: note = chemically synthesized
  source 1..22: mol_type = other DNA
gaaattgtatttaactttgctg

SEQ ID NO: 15508 - DNA, 22 bp, synthetic construct
  misc_feature 1..22: note = chemically synthesized
  source 1..22: mol_type = other DNA
aaattgtatttaactttgctgt

SEQ ID NO: 15509 - DNA, 22 bp, synthetic construct
  misc_feature 1..22: note = chemically synthesized
  source 1..22: mol_type = other DNA
tatttaactttgctgtattata

SEQ ID NO: 15510 - DNA, 22 bp, synthetic construct
  misc_feature 1..22: note = chemically synthesized
  source 1..22: mol_type = other DNA
aactttgctgtattataaacta

SEQ ID NO: 15511 - DNA, 22 bp, synthetic construct
  misc_feature 1..22: note = chemically synthesized
  source 1..22: mol_type = other DNA
actttgctgtattataaactac

SEQ ID NO: 15512 - DNA, 22 bp, synthetic construct
  misc_feature 1..22: note = chemically synthesized
  source 1..22: mol_type = other DNA
tgctgtattataaactacacat

SEQ ID NO: 15513 - DNA, 22 bp, synthetic construct
  misc_feature 1..22: note = chemically synthesized
  source 1..22: mol_type = other DNA
gctgtattataaactacacatt

SEQ ID NO: 15514 - DNA, 22 bp, synthetic construct
  misc_feature 1..22: note = chemically synthesized
  source 1..22: mol_type = other DNA
ctgtattataaactacacattc

SEQ ID NO: 15515 - DNA, 22 bp, synthetic construct
  misc_feature 1..22: note = chemically synthesized
  source 1..22: mol_type = other DNA
tattataaactacacattcaat

SEQ ID NO: 15516 - DNA, 22 bp, synthetic construct
  misc_feature 1..22: note = chemically synthesized
  source 1..22: mol_type = other DNA
taaactacacattcaatgctat

SEQ ID NO: 15517 - DNA, 22 bp, synthetic construct
  misc_feature 1..22: note = chemically synthesized
  source 1..22: mol_type = other DNA
cacattcaatgctatggtgact

SEQ ID NO: 15518 - DNA, 22 bp, synthetic construct
  misc_feature 1..22: note = chemically synthesized
  source 1..22: mol_type = other DNA
aatgctatggtgactacctgtt

SEQ ID NO: 15519 - DNA, 22 bp, synthetic construct
  misc_feature 1..22: note = chemically synthesized
  source 1..22: mol_type = other DNA
tggtgactacctgtttttaaaa

SEQ ID NO: 15520 - DNA, 22 bp, synthetic construct
  misc_feature 1..22: note = chemically synthesized
  source 1..22: mol_type = other DNA
cctgtttttaaaagctaatttt

SEQ ID NO: 15521 - DNA, 22 bp, synthetic construct
  misc_feature 1..22: note = chemically synthesized
  source 1..22: mol_type = other DNA
tttttaaaagctaattttactt

SEQ ID NO: 15522 - DNA, 22 bp, synthetic construct
  misc_feature 1..22: note = chemically synthesized
  source 1..22: mol_type = other DNA
ttaaaagctaattttacttttt

SEQ ID NO: 15523 - DNA, 22 bp, synthetic construct
  misc_feature 1..22: note = chemically synthesized
  source 1..22: mol_type = other DNA
taaaagctaattttactttttt

SEQ ID NO: 15524 - DNA, 22 bp, synthetic construct
  misc_feature 1..22: note = chemically synthesized
  source 1..22: mol_type = other DNA
aaaagctaattttactttttta

SEQ ID NO: 15525 - DNA, 22 bp, synthetic construct
  misc_feature 1..22: note = chemically synthesized
  source 1..22: mol_type = other DNA
aaagctaattttacttttttat

SEQ ID NO: 15526 - DNA, 22 bp, synthetic construct
  misc_feature 1..22: note = chemically synthesized
  source 1..22: mol_type = other DNA
attttacttttttatgatttta

SEQ ID NO: 15527 - DNA, 22 bp, synthetic construct
  misc_feature 1..22: note = chemically synthesized
  source 1..22: mol_type = other DNA
tacttttttatgattttaagag

SEQ ID NO: 15528 - DNA, 22 bp, synthetic construct
  misc_feature 1..22: note = chemically synthesized
  source 1..22: mol_type = other DNA
acttttttatgattttaagaga

SEQ ID NO: 15529 - DNA, 22 bp, synthetic construct
  misc_feature 1..22: note = chemically synthesized
  source 1..22: mol_type = other DNA
cttttttatgattttaagagat

SEQ ID NO: 15530 - DNA, 22 bp, synthetic construct
  misc_feature 1..22: note = chemically synthesized
  source 1..22: mol_type = other DNA
ttttatgattttaagagattta

SEQ ID NO: 15531 - DNA, 22 bp, synthetic construct
  misc_feature 1..22: note = chemically synthesized
  source 1..22: mol_type = other DNA
tttatgattttaagagatttac

SEQ ID NO: 15532 - DNA, 22 bp, synthetic construct
  misc_feature 1..22: note = chemically synthesized
  source 1..22: mol_type = other DNA
ttatgattttaagagatttaca

SEQ ID NO: 15533 - DNA, 22 bp, synthetic construct
  misc_feature 1..22: note = chemically synthesized
  source 1..22: mol_type = other DNA
tatgattttaagagatttacaa

SEQ ID NO: 15534 - DNA, 22 bp, synthetic construct
  misc_feature 1..22: note = chemically synthesized
  source 1..22: mol_type = other DNA
atgattttaagagatttacaag

SEQ ID NO: 15535 - DNA, 22 bp, synthetic construct
  misc_feature 1..22: note = chemically synthesized
  source 1..22: mol_type = other DNA
tgattttaagagatttacaagt

SEQ ID NO: 15536 - DNA, 22 bp, synthetic construct
  misc_feature 1..22: note = chemically synthesized
  source 1..22: mol_type = other DNA
taagagatttacaagtcaaaaa

SEQ ID NO: 15537 - DNA, 22 bp, synthetic construct
  misc_feature 1..22: note = chemically synthesized
  source 1..22: mol_type = other DNA
aagagatttacaagtcaaaaat

SEQ ID NO: 15538 - DNA, 22 bp, synthetic construct
  misc_feature 1..22: note = chemically synthesized
  source 1..22: mol_type = other DNA
agagatttacaagtcaaaaata

SEQ ID NO: 15539 - DNA, 22 bp, synthetic construct
  misc_feature 1..22: note = chemically synthesized
  source 1..22: mol_type = other DNA
acaagtcaaaaataaacttttt

SEQ ID NO: 15540 - DNA, 22 bp, synthetic construct
  misc_feature 1..22: note = chemically synthesized
  source 1..22: mol_type = other DNA
caagtcaaaaataaactttttt

SEQ ID NO: 15541 - DNA, 22 bp, synthetic construct
  misc_feature 1..22: note = chemically synthesized
  source 1..22: mol_type = other DNA
ttttgttgggtaaatttattat

SEQ ID NO: 15542 - DNA, 22 bp, synthetic construct
  misc_feature 1..22: note = chemically synthesized
  source 1..22: mol_type = other DNA
tttgttgggtaaatttattatt

SEQ ID NO: 15543 - DNA, 22 bp, synthetic construct
  misc_feature 1..22: note = chemically synthesized
  source 1..22: mol_type = other DNA
ttgttgggtaaatttattatta

SEQ ID NO: 15544 - DNA, 22 bp, synthetic construct
  misc_feature 1..22: note = chemically synthesized
  source 1..22: mol_type = other DNA
tgttgggtaaatttattattaa

SEQ ID NO: 15545 - DNA, 22 bp, synthetic construct
  misc_feature 1..22: note = chemically synthesized
  source 1..22: mol_type = other DNA
gttgggtaaatttattattaaa

SEQ ID NO: 15546 - DNA, 22 bp, synthetic construct
  misc_feature 1..22: note = chemically synthesized
  source 1..22: mol_type = other DNA
ttgggtaaatttattattaaag

SEQ ID NO: 15547 - DNA, 22 bp, synthetic construct
  misc_feature 1..22: note = chemically synthesized
  source 1..22: mol_type = other DNA
ggtaaatttattattaaagttg

SEQ ID NO: 15548 - DNA, 22 bp, synthetic construct
  misc_feature 1..22: note = chemically synthesized
  source 1..22: mol_type = other DNA
attattaaagttgaggggaaaa

SEQ ID NO: 15549 - DNA, 22 bp, synthetic construct
  misc_feature 1..22: note = chemically synthesized
  source 1..22: mol_type = other DNA
ttattaaagttgaggggaaaaa

SEQ ID NO: 15550 - DNA, 22 bp, synthetic construct
  misc_feature 1..22: note = chemically synthesized
  source 1..22: mol_type = other DNA
ttaaagttgaggggaaaaaagt

SEQ ID NO: 15551 - DNA, 22 bp, synthetic construct
  misc_feature 1..22: note = chemically synthesized
  source 1..22: mol_type = other DNA
aagttgaggggaaaaaagtaat

SEQ ID NO: 15552 - DNA, 22 bp, synthetic construct
  misc_feature 1..22: note = chemically synthesized
  source 1..22: mol_type = other DNA
aggggaaaaaagtaatgaatta

SEQ ID NO: 15553 - DNA, 20 bp, synthetic construct
  misc_feature 1..20: note = chemically synthesized
  source 1..20: mol_type = other DNA
tcccgcccgcttgctgcatc

SEQ ID NO: 15554 - DNA, 20 bp, synthetic construct
  misc_feature 1..20: note = chemically synthesized
  source 1..20: mol_type = other DNA
tgcatctggacaccctgcct

SEQ ID NO: 15555 - DNA, 20 bp, synthetic construct
  misc_feature 1..20: note = chemically synthesized
  source 1..20: mol_type = other DNA
gcatctggacaccctgcctc

SEQ ID NO: 15556 - DNA, 20 bp, synthetic construct
  misc_feature 1..20: note = chemically synthesized
  source 1..20: mol_type = other DNA
cctcaggccctcatctccac

SEQ ID NO: 15557 - DNA, 20 bp, synthetic construct
  misc_feature 1..20: note = chemically synthesized
  source 1..20: mol_type = other DNA
aggccctcatctccactggt

SEQ ID NO: 15558 - DNA, 20 bp, synthetic construct
  misc_feature 1..20: note = chemically synthesized
  source 1..20: mol_type = other DNA
ccctcatctccactggtcag

SEQ ID NO: 15559 - DNA, 20 bp, synthetic construct
  misc_feature 1..20: note = chemically synthesized
  source 1..20: mol_type = other DNA
cctcatctccactggtcagc

SEQ ID NO: 15560 - DNA, 20 bp, synthetic construct
  misc_feature 1..20: note = chemically synthesized
  source 1..20: mol_type = other DNA
gtcagcaggtgacctttgcc

SEQ ID NO: 15561 - DNA, 20 bp, synthetic construct
  misc_feature 1..20: note = chemically synthesized
  source 1..20: mol_type = other DNA
gtgacctttgcccagcgccc

SEQ ID NO: 15562 - DNA, 20 bp, synthetic construct
  misc_feature 1..20: note = chemically synthesized
  source 1..20: mol_type = other DNA
tgacctttgcccagcgccct

SEQ ID NO: 15563 - DNA, 20 bp, synthetic construct
  misc_feature 1..20: note = chemically synthesized
  source 1..20: mol_type = other DNA
tgcccagcgccctgggtcct

SEQ ID NO: 15564 - DNA, 20 bp, synthetic construct
  misc_feature 1..20: note = chemically synthesized
  source 1..20: mol_type = other DNA
gtcctcagtgcctgctgccc

SEQ ID NO: 15565 - DNA, 20 bp, synthetic construct
  misc_feature 1..20: note = chemically synthesized
  source 1..20: mol_type = other DNA
cctcagtgcctgctgccctg

SEQ ID NO: 15566 - DNA, 20 bp, synthetic construct
  misc_feature 1..20: note = chemically synthesized
  source 1..20: mol_type = other DNA
gccctggagatgatataaaa

SEQ ID NO: 15567 - DNA, 20 bp, synthetic construct
  misc_feature 1..20: note = chemically synthesized
  source 1..20: mol_type = other DNA
ccctggagatgatataaaac

SEQ ID NO: 15568 - DNA, 20 bp, synthetic construct
  misc_feature 1..20: note = chemically synthesized
  source 1..20: mol_type = other DNA
ggagatgatataaaacaggt

SEQ ID NO: 15569 - DNA, 20 bp, synthetic construct
  misc_feature 1..20: note = chemically synthesized
  source 1..20: mol_type = other DNA
aaccctcctgcctgtctgct

SEQ ID NO: 15570 - DNA, 20 bp, synthetic construct
  misc_feature 1..20: note = chemically synthesized
  source 1..20: mol_type = other DNA
ctgtctgctcagttcatccc

SEQ ID NO: 15571 - DNA, 20 bp, synthetic construct
  misc_feature 1..20: note = chemically synthesized
  source 1..20: mol_type = other DNA
gtctgctcagttcatcccta

SEQ ID NO: 15572 - DNA, 20 bp, synthetic construct
  misc_feature 1..20: note = chemically synthesized
  source 1..20: mol_type = other DNA
tctgctcagttcatccctag

SEQ ID NO: 15573 - DNA, 20 bp, synthetic construct
  misc_feature 1..20: note = chemically synthesized
  source 1..20: mol_type = other DNA
gctcagttcatccctagagg

SEQ ID NO: 15574 - DNA, 20 bp, synthetic construct
  misc_feature 1..20: note = chemically synthesized
  source 1..20: mol_type = other DNA
atccctagaggcagctgctc

SEQ ID NO: 15575 - DNA, 20 bp, synthetic construct
  misc_feature 1..20: note = chemically synthesized
  source 1..20: mol_type = other DNA
tccctagaggcagctgctcc

SEQ ID NO: 15576 - DNA, 20 bp, synthetic construct
  misc_feature 1..20: note = chemically synthesized
  source 1..20: mol_type = other DNA
ctgctccaggtaatgccctc

SEQ ID NO: 15577 - DNA, 20 bp, synthetic construct
  misc_feature 1..20: note = chemically synthesized
  source 1..20: mol_type = other DNA
tgctccaggtaatgccctct

SEQ ID NO: 15578 - DNA, 20 bp, synthetic construct
  misc_feature 1..20: note = chemically synthesized
  source 1..20: mol_type = other DNA
gctccaggtaatgccctctg

SEQ ID NO: 15579 - DNA, 20 bp, synthetic construct
  misc_feature 1..20: note = chemically synthesized
  source 1..20: mol_type = other DNA
tccaggtaatgccctctggg

SEQ ID NO: 15580 - DNA, 20 bp, synthetic construct
  misc_feature 1..20: note = chemically synthesized
  source 1..20: mol_type = other DNA
ccaggtaatgccctctgggg

SEQ ID NO: 15581 - DNA, 20 bp, synthetic construct
  misc_feature 1..20: note = chemically synthesized
  source 1..20: mol_type = other DNA
caggtaatgccctctgggga

SEQ ID NO: 15582 - DNA, 20 bp, synthetic construct
  misc_feature 1..20: note = chemically synthesized
  source 1..20: mol_type = other DNA
aggtaatgccctctggggag

SEQ ID NO: 15583 - DNA, 20 bp, synthetic construct
  misc_feature 1..20: note = chemically synthesized
  source 1..20: mol_type = other DNA
aatgccctctggggagggga

SEQ ID NO: 15584 - DNA, 20 bp, synthetic construct
  misc_feature 1..20: note = chemically synthesized
  source 1..20: mol_type = other DNA
tgccctctggggaggggaaa

SEQ ID NO: 15585 - DNA, 20 bp, synthetic construct
  misc_feature 1..20: note = chemically synthesized
  source 1..20: mol_type = other DNA
gccctctggggaggggaaag

SEQ ID NO: 15586 - DNA, 20 bp, synthetic construct
  misc_feature 1..20: note = chemically synthesized
  source 1..20: mol_type = other DNA
cctctggggaggggaaagag

SEQ ID NO: 15587 - DNA, 20 bp, synthetic construct
  misc_feature 1..20: note = chemically synthesized
  source 1..20: mol_type = other DNA
ctctggggaggggaaagagg

SEQ ID NO: 15588 - DNA, 20 bp, synthetic construct
  misc_feature 1..20: note = chemically synthesized
  source 1..20: mol_type = other DNA
tctggggaggggaaagagga

SEQ ID NO: 15589 - DNA, 20 bp, synthetic construct
  misc_feature 1..20: note = chemically synthesized
  source 1..20: mol_type = other DNA
ctggggaggggaaagaggag

SEQ ID NO: 15590 - DNA, 20 bp, synthetic construct
  misc_feature 1..20: note = chemically synthesized
  source 1..20: mol_type = other DNA
ggggaggggaaagaggaggg

SEQ ID NO: 15591 - DNA, 20 bp, synthetic construct
  misc_feature 1..20: note = chemically synthesized
  source 1..20: mol_type = other DNA
gggaggggaaagaggagggg

SEQ ID NO: 15592 - DNA, 20 bp, synthetic construct
  misc_feature 1..20: note = chemically synthesized
  source 1..20: mol_type = other DNA
gaggggaaagaggaggggag

SEQ ID NO: 15593 - DNA, 20 bp, synthetic construct
  misc_feature 1..20: note = chemically synthesized
  source 1..20: mol_type = other DNA
aggggaaagaggaggggagg

SEQ ID NO: 15594 - DNA, 20 bp, synthetic construct
  misc_feature 1..20: note = chemically synthesized
  source 1..20: mol_type = other DNA
aagaggaggggaggaggatg

SEQ ID NO: 15595 - DNA, 20 bp, synthetic construct
  misc_feature 1..20: note = chemically synthesized
  source 1..20: mol_type = other DNA
gaggaggggaggaggatgaa

SEQ ID NO: 15596 - DNA, 20 bp, synthetic construct
  misc_feature 1..20: note = chemically synthesized
  source 1..20: mol_type = other DNA
aggaggggaggaggatgaag

SEQ ID NO: 15597 - DNA, 20 bp, synthetic construct
  misc_feature 1..20: note = chemically synthesized
  source 1..20: mol_type = other DNA
ggaggggaggaggatgaaga

SEQ ID NO: 15598 - DNA, 20 bp, synthetic construct
  misc_feature 1..20: note = chemically synthesized
  source 1..20: mol_type = other DNA
gaggggaggaggatgaagag

SEQ ID NO: 15599 - DNA, 20 bp, synthetic construct
  misc_feature 1..20: note = chemically synthesized
  source 1..20: mol_type = other DNA
ggaggaggatgaagaggggc

SEQ ID NO: 15600 - DNA, 20 bp, synthetic construct
  misc_feature 1..20: note = chemically synthesized
  source 1..20: mol_type = other DNA
aggaggatgaagaggggcaa

SEQ ID NO: 15601 - DNA, 20 bp, synthetic construct
  misc_feature 1..20: note = chemically synthesized
  source 1..20: mol_type = other DNA
ggaggatgaagaggggcaag

SEQ ID NO: 15602 - DNA, 20 bp, synthetic construct
  misc_feature 1..20: note = chemically synthesized
  source 1..20: mol_type = other DNA
aggatgaagaggggcaagag

SEQ ID NO: 15603 - DNA, 20 bp, synthetic construct
  misc_feature 1..20: note = chemically synthesized
  source 1..20: mol_type = other DNA
ggcaagaggagctccctgcc

SEQ ID NO: 15604 - DNA, 20 bp, synthetic construct
  misc_feature 1..20: note = chemically synthesized
  source 1..20: mol_type = other DNA
gaggagctccctgcccagcc

SEQ ID NO: 15605 - DNA, 20 bp, synthetic construct
  misc_feature 1..20: note = chemically synthesized
  source 1..20: mol_type = other DNA
agctccctgcccagcccagc

SEQ ID NO: 15606 - DNA, 20 bp, synthetic construct
  misc_feature 1..20: note = chemically synthesized
  source 1..20: mol_type = other DNA
ccctgcccagcccagccagc

SEQ ID NO: 15607 - DNA, 20 bp, synthetic construct
  misc_feature 1..20: note = chemically synthesized
  source 1..20: mol_type = other DNA
cccagcccagccagcaagcc

SEQ ID NO: 15608 - DNA, 20 bp, synthetic construct
  misc_feature 1..20: note = chemically synthesized
  source 1..20: mol_type = other DNA
cagcccagccagcaagcctg

SEQ ID NO: 15609 - DNA, 20 bp, synthetic construct
  misc_feature 1..20: note = chemically synthesized
  source 1..20: mol_type = other DNA
cccagccagcaagcctggag

SEQ ID NO: 15610 - DNA, 20 bp, synthetic construct
  misc_feature 1..20: note = chemically synthesized
  source 1..20: mol_type = other DNA
aagcctggagaagcacttgc

SEQ ID NO: 15611 - DNA, 20 bp, synthetic construct
  misc_feature 1..20: note = chemically synthesized
  source 1..20: mol_type = other DNA
gcctggagaagcacttgcta

SEQ ID NO: 15612 - DNA, 20 bp, synthetic construct
  misc_feature 1..20: note = chemically synthesized
  source 1..20: mol_type = other DNA
gagaagcacttgctagagct

SEQ ID NO: 15613 - DNA, 20 bp, synthetic construct
  misc_feature 1..20: note = chemically synthesized
  source 1..20: mol_type = other DNA
agaagcacttgctagagcta

SEQ ID NO: 15614 - DNA, 20 bp, synthetic construct
  misc_feature 1..20: note = chemically synthesized
  source 1..20: mol_type = other DNA
agcacttgctagagctaagg

SEQ ID NO: 15615 - DNA, 20 bp, synthetic construct
  misc_feature 1..20: note = chemically synthesized
  source 1..20: mol_type = other DNA
tgctagagctaaggaagcct

SEQ ID NO: 15616 - DNA, 20 bp, synthetic construct
  misc_feature 1..20: note = chemically synthesized
  source 1..20: mol_type = other DNA
ctagagctaaggaagcctcg

SEQ ID NO: 15617 - DNA, 20 bp, synthetic construct
  misc_feature 1..20: note = chemically synthesized
  source 1..20: mol_type = other DNA
agctaaggaagcctcggagc

SEQ ID NO: 15618 - DNA, 20 bp, synthetic construct
  misc_feature 1..20: note = chemically synthesized
  source 1..20: mol_type = other DNA
aaggaagcctcggagctgga

SEQ ID NO: 15619 - DNA, 20 bp, synthetic construct
  misc_feature 1..20: note = chemically synthesized
  source 1..20: mol_type = other DNA
aggaagcctcggagctggac

SEQ ID NO: 15620 - DNA, 20 bp, synthetic construct
  misc_feature 1..20: note = chemically synthesized
  source 1..20: mol_type = other DNA
ccacccctcatcataacctg

SEQ ID NO: 15621 - DNA, 20 bp, synthetic construct
  misc_feature 1..20: note = chemically synthesized
  source 1..20: mol_type = other DNA
tcatcataacctgaagaaca

SEQ ID NO: 15622 - DNA, 20 bp, synthetic construct
  misc_feature 1..20: note = chemically synthesized
  source 1..20: mol_type = other DNA
atcataacctgaagaacatg

SEQ ID NO: 15623 - DNA, 20 bp, synthetic construct
  misc_feature 1..20: note = chemically synthesized
  source 1..20: mol_type = other DNA
tcataacctgaagaacatgg

SEQ ID NO: 15624 - DNA, 20 bp, synthetic construct
  misc_feature 1..20: note = chemically synthesized
  source 1..20: mol_type = other DNA
acctgaagaacatggaggcc

SEQ ID NO: 15625 - DNA, 20 bp, synthetic construct
  misc_feature 1..20: note = chemically synthesized
  source 1..20: mol_type = other DNA
cctgaagaacatggaggccc

SEQ ID NO: 15626 - DNA, 20 bp, synthetic construct
  misc_feature 1..20: note = chemically synthesized
  source 1..20: mol_type = other DNA
tgaagaacatggaggcccgg

SEQ ID NO: 15627 - DNA, 20 bp, synthetic construct
  misc_feature 1..20: note = chemically synthesized
  source 1..20: mol_type = other DNA
gaagaacatggaggcccggg

SEQ ID NO: 15628 - DNA, 20 bp, synthetic construct
  misc_feature 1..20: note = chemically synthesized
  source 1..20: mol_type = other DNA
aagaacatggaggcccggga

SEQ ID NO: 15629 - DNA, 20 bp, synthetic construct
  misc_feature 1..20: note = chemically synthesized
  source 1..20: mol_type = other DNA
agaacatggaggcccgggag

SEQ ID NO: 15630 - DNA, 20 bp, synthetic construct
  misc_feature 1..20: note = chemically synthesized
  source 1..20: mol_type = other DNA
ggaggggtgtcacttgccca

SEQ ID NO: 15631 - DNA, 20 bp, synthetic construct
  misc_feature 1..20: note = chemically synthesized
  source 1..20: mol_type = other DNA
gtcacttgcccaaagctaca

SEQ ID NO: 15632 - DNA, 20 bp, synthetic construct
  misc_feature 1..20: note = chemically synthesized
  source 1..20: mol_type = other DNA
tcacttgcccaaagctacac

SEQ ID NO: 15633 - DNA, 20 bp, synthetic construct
  misc_feature 1..20: note = chemically synthesized
  source 1..20: mol_type = other DNA
cacttgcccaaagctacaca

SEQ ID NO: 15634 - DNA, 20 bp, synthetic construct
  misc_feature 1..20: note = chemically synthesized
  source 1..20: mol_type = other DNA
acttgcccaaagctacacag

SEQ ID NO: 15635 - DNA, 20 bp, synthetic construct
  misc_feature 1..20: note = chemically synthesized
  source 1..20: mol_type = other DNA
cttgcccaaagctacacagg

SEQ ID NO: 15636 - DNA, 20 bp, synthetic construct
  misc_feature 1..20: note = chemically synthesized
  source 1..20: mol_type = other DNA
gcccaaagctacacaggggg

SEQ ID NO: 15637 - DNA, 20 bp, synthetic construct
  misc_feature 1..20: note = chemically synthesized
  source 1..20: mol_type = other DNA
cccaaagctacacagggggt

SEQ ID NO: 15638 - DNA, 20 bp, synthetic construct
  misc_feature 1..20: note = chemically synthesized
  source 1..20: mol_type = other DNA
ccaaagctacacagggggtg

SEQ ID NO: 15639 - DNA, 20 bp, synthetic construct
  misc_feature 1..20: note = chemically synthesized
  source 1..20: mol_type = other DNA
agctacacagggggtggggc

SEQ ID NO: 15640 - DNA, 20 bp, synthetic construct
  misc_feature 1..20: note = chemically synthesized
  source 1..20: mol_type = other DNA
tacacagggggtggggctgg

SEQ ID NO: 15641 - DNA, 20 bp, synthetic construct
  misc_feature 1..20: note = chemically synthesized
  source 1..20: mol_type = other DNA
acagggggtggggctggaag

SEQ ID NO: 15642 - DNA, 20 bp, synthetic construct
  misc_feature 1..20: note = chemically synthesized
  source 1..20: mol_type = other DNA
gtggggctggaagtggctcc

SEQ ID NO: 15643 - DNA, 20 bp, synthetic construct
  misc_feature 1..20: note = chemically synthesized
  source 1..20: mol_type = other DNA
gctggaagtggctccaagtg

SEQ ID NO: 15644 - DNA, 20 bp, synthetic construct
  misc_feature 1..20: note = chemically synthesized
  source 1..20: mol_type = other DNA
ctggaagtggctccaagtgc

SEQ ID NO: 15645 - DNA, 20 bp, synthetic construct
  misc_feature 1..20: note = chemically synthesized
  source 1..20: mol_type = other DNA
caggttcccccctcattctt

SEQ ID NO: 15646 - DNA, 20 bp, synthetic construct
  misc_feature 1..20: note = chemically synthesized
  source 1..20: mol_type = other DNA
aggttcccccctcattcttc

SEQ ID NO: 15647 - DNA, 20 bp, synthetic construct
  misc_feature 1..20: note = chemically synthesized
  source 1..20: mol_type = other DNA
cccccctcattcttcaggct

SEQ ID NO: 15648 - DNA, 20 bp, synthetic construct
  misc_feature 1..20: note = chemically synthesized
  source 1..20: mol_type = other DNA
ccccctcattcttcaggctt

SEQ ID NO: 15649 - DNA, 20 bp, synthetic construct
  misc_feature 1..20: note = chemically synthesized
  source 1..20: mol_type = other DNA
cccctcattcttcaggctta

SEQ ID NO: 15650 - DNA, 20 bp, synthetic construct
  misc_feature 1..20: note = chemically synthesized
  source 1..20: mol_type = other DNA
tcattcttcaggcttagggc

SEQ ID NO: 15651 - DNA, 20 bp, synthetic construct
  misc_feature 1..20: note = chemically synthesized
  source 1..20: mol_type = other DNA
attcttcaggcttagggctg

SEQ ID NO: 15652 - DNA, 20 bp, synthetic construct
  misc_feature 1..20: note = chemically synthesized
  source 1..20: mol_type = other DNA
ttcttcaggcttagggctgg

SEQ ID NO: 15653 - DNA, 20 bp, synthetic construct
  misc_feature 1..20: note = chemically synthesized
  source 1..20: mol_type = other DNA
ttcaggcttagggctggagg

SEQ ID NO: 15654 - DNA, 20 bp, synthetic construct
  misc_feature 1..20: note = chemically synthesized
  source 1..20: mol_type = other DNA
cttagggctggaggaagcct

SEQ ID NO: 15655 - DNA, 20 bp, synthetic construct
  misc_feature 1..20: note = chemically synthesized
  source 1..20: mol_type = other DNA
gggctggaggaagccttaga

SEQ ID NO: 15656 - DNA, 20 bp, synthetic construct
  misc_feature 1..20: note = chemically synthesized
  source 1..20: mol_type = other DNA
ggaggaagccttagacagcc

SEQ ID NO: 15657 - DNA, 20 bp, synthetic construct
  misc_feature 1..20: note = chemically synthesized
  source 1..20: mol_type = other DNA
tagacagcccagtcctaccc

SEQ ID NO: 15658 - DNA, 20 bp, synthetic construct
  misc_feature 1..20: note = chemically synthesized
  source 1..20: mol_type = other DNA
cagcccagtcctaccccaga

SEQ ID NO: 15659 - DNA, 20 bp, synthetic construct
  misc_feature 1..20: note = chemically synthesized
  source 1..20: mol_type = other DNA
agcccagtcctaccccagac

SEQ ID NO: 15660 - DNA, 20 bp, synthetic construct
  misc_feature 1..20: note = chemically synthesized
  source 1..20: mol_type = other DNA
gcccagtcctaccccagaca

SEQ ID NO: 15661 - DNA, 20 bp, synthetic construct
  misc_feature 1..20: note = chemically synthesized
  source 1..20: mol_type = other DNA
ctaccccagacagggaaact

SEQ ID NO: 15662 - DNA, 20 bp, synthetic construct
  misc_feature 1..20: note = chemically synthesized
  source 1..20: mol_type = other DNA
taccccagacagggaaactg

SEQ ID NO: 15663 - DNA, 20 bp, synthetic construct
  misc_feature 1..20: note = chemically synthesized
  source 1..20: mol_type = other DNA
cagacagggaaactgaggcc

SEQ ID NO: 15664 - DNA, 20 bp, synthetic construct
  misc_feature 1..20: note = chemically synthesized
  source 1..20: mol_type = other DNA
gacagggaaactgaggcctg

SEQ ID NO: 15665 - DNA, 20 bp, synthetic construct
  misc_feature 1..20: note = chemically synthesized
  source 1..20: mol_type = other DNA
cagggaaactgaggcctgga

SEQ ID NO: 15666 - DNA, 20 bp, synthetic construct
  misc_feature 1..20: note = chemically synthesized
  source 1..20: mol_type = other DNA
agggaaactgaggcctggag

SEQ ID NO: 15667 - DNA, 20 bp, synthetic construct
  misc_feature 1..20: note = chemically synthesized
  source 1..20: mol_type = other DNA
gggaaactgaggcctggaga

SEQ ID NO: 15668 - DNA, 20 bp, synthetic construct
  misc_feature 1..20: note = chemically synthesized
  source 1..20: mol_type = other DNA
aactgaggcctggagagggc

SEQ ID NO: 15669 - DNA, 20 bp, synthetic construct
  misc_feature 1..20: note = chemically synthesized
  source 1..20: mol_type = other DNA
agagggccagaaatcaccca

SEQ ID NO: 15670 - DNA, 20 bp, synthetic construct
  misc_feature 1..20: note = chemically synthesized
  source 1..20: mol_type = other DNA
agaaatcacccaaagacaca

SEQ ID NO: 15671 - DNA, 20 bp, synthetic construct
  misc_feature 1..20: note = chemically synthesized
  source 1..20: mol_type = other DNA
cccaaagacacacagcatgt

SEQ ID NO: 15672 - DNA, 20 bp, synthetic construct
  misc_feature 1..20: note = chemically synthesized
  source 1..20: mol_type = other DNA
aagacacacagcatgttggc

SEQ ID NO: 15673 - DNA, 20 bp, synthetic construct
  misc_feature 1..20: note = chemically synthesized
  source 1..20: mol_type = other DNA
acacagcatgttggctggac

SEQ ID NO: 15674 - DNA, 20 bp, synthetic construct
  misc_feature 1..20: note = chemically synthesized
  source 1..20: mol_type = other DNA
agcatgttggctggactgga

SEQ ID NO: 15675 - DNA, 20 bp, synthetic construct
  misc_feature 1..20: note = chemically synthesized
  source 1..20: mol_type = other DNA
catgttggctggactggacg

SEQ ID NO: 15676 - DNA, 20 bp, synthetic construct
  misc_feature 1..20: note = chemically synthesized
  source 1..20: mol_type = other DNA
tggctggactggacggagat

SEQ ID NO: 15677 - DNA, 20 bp, synthetic construct
  misc_feature 1..20: note = chemically synthesized
  source 1..20: mol_type = other DNA
ggactggacggagatcagtc

SEQ ID NO: 15678 - DNA, 20 bp, synthetic construct
  misc_feature 1..20: note = chemically synthesized
  source 1..20: mol_type = other DNA
acggagatcagtccagaccg

SEQ ID NO: 15679 - DNA, 20 bp, synthetic construct
  misc_feature 1..20: note = chemically synthesized
  source 1..20: mol_type = other DNA
cggagatcagtccagaccgc

SEQ ID NO: 15680 - DNA, 20 bp, synthetic construct
  misc_feature 1..20: note = chemically synthesized
  source 1..20: mol_type = other DNA
accgcaggtgccttgatgtt

SEQ ID NO: 15681 - DNA, 20 bp, synthetic construct
  misc_feature 1..20: note = chemically synthesized
  source 1..20: mol_type = other DNA
aggtgccttgatgttcagtc

SEQ ID NO: 15682 - DNA, 20 bp, synthetic construct
  misc_feature 1..20: note = chemically synthesized
  source 1..20: mol_type = other DNA
tgccttgatgttcagtctgg

SEQ ID NO: 15683 - DNA, 20 bp, synthetic construct
  misc_feature 1..20: note = chemically synthesized
  source 1..20: mol_type = other DNA
gccttgatgttcagtctggt

SEQ ID NO: 15684 - DNA, 20 bp, synthetic construct
  misc_feature 1..20: note = chemically synthesized
  source 1..20: mol_type = other DNA
ccatcccacccacctccctt

SEQ ID NO: 15685 - DNA, 20 bp, synthetic construct
  misc_feature 1..20: note = chemically synthesized
  source 1..20: mol_type = other DNA
catcccacccacctcccttt

SEQ ID NO: 15686 - DNA, 20 bp, synthetic construct
  misc_feature 1..20: note = chemically synthesized
  source 1..20: mol_type = other DNA
ctcgatccctcgcccctcac

SEQ ID NO: 15687 - DNA, 20 bp, synthetic construct
  misc_feature 1..20: note = chemically synthesized
  source 1..20: mol_type = other DNA
ccctcaccagtcccccttct

SEQ ID NO: 15688 - DNA, 20 bp, synthetic construct
  misc_feature 1..20: note = chemically synthesized
  source 1..20: mol_type = other DNA
ctcaccagtcccccttctga

SEQ ID NO: 15689 - DNA, 20 bp, synthetic construct
  misc_feature 1..20: note = chemically synthesized
  source 1..20: mol_type = other DNA
ccccttctgagagcccgtat

SEQ ID NO: 15690 - DNA, 20 bp, synthetic construct
  misc_feature 1..20: note = chemically synthesized
  source 1..20: mol_type = other DNA
cttctgagagcccgtattag

SEQ ID NO: 15691 - DNA, 20 bp, synthetic construct
  misc_feature 1..20: note = chemically synthesized
  source 1..20: mol_type = other DNA
ttctgagagcccgtattagc

SEQ ID NO: 15692 - DNA, 20 bp, synthetic construct
  misc_feature 1..20: note = chemically synthesized
  source 1..20: mol_type = other DNA
tctgagagcccgtattagca

SEQ ID NO: 15693 - DNA, 20 bp, synthetic construct
  misc_feature 1..20: note = chemically synthesized
  source 1..20: mol_type = other DNA
tgagagcccgtattagcagg

SEQ ID NO: 15694 - DNA, 20 bp, synthetic construct
  misc_feature 1..20: note = chemically synthesized
  source 1..20: mol_type = other DNA
agcccgtattagcagggagc

SEQ ID NO: 15695 - DNA, 20 bp, synthetic construct
  misc_feature 1..20: note = chemically synthesized
  source 1..20: mol_type = other DNA
gagccggcccctactccttc

SEQ ID NO: 15696 - DNA, 20 bp, synthetic construct
  misc_feature 1..20: note = chemically synthesized
  source 1..20: mol_type = other DNA
ccggcccctactccttctgg

SEQ ID NO: 15697 - DNA, 20 bp, synthetic construct
  misc_feature 1..20: note = chemically synthesized
  source 1..20: mol_type = other DNA
cctactccttctggcagacc

SEQ ID NO: 15698 - DNA, 20 bp, synthetic construct
  misc_feature 1..20: note = chemically synthesized
  source 1..20: mol_type = other DNA
tccttctggcagacccagct

SEQ ID NO: 15699 - DNA, 20 bp, synthetic construct
  misc_feature 1..20: note = chemically synthesized
  source 1..20: mol_type = other DNA
ccttctggcagacccagcta

SEQ ID NO: 15700 - DNA, 20 bp, synthetic construct
  misc_feature 1..20: note = chemically synthesized
  source 1..20: mol_type = other DNA
acccagctaaggttctacct

SEQ ID NO: 15701 - DNA, 20 bp, synthetic construct
  misc_feature 1..20: note = chemically synthesized
  source 1..20: mol_type = other DNA
cccagctaaggttctacctt

SEQ ID NO: 15702 - DNA, 20 bp, synthetic construct
  misc_feature 1..20: note = chemically synthesized
  source 1..20: mol_type = other DNA
ccagctaaggttctacctta

SEQ ID NO: 15703 - DNA, 20 bp, synthetic construct
  misc_feature 1..20: note = chemically synthesized
  source 1..20: mol_type = other DNA
cagctaaggttctaccttag

SEQ ID NO: 15704 - DNA, 20 bp, synthetic construct
  misc_feature 1..20: note = chemically synthesized
  source 1..20: mol_type = other DNA
taggggccacgccacctccc

SEQ ID NO: 15705 - DNA, 20 bp, synthetic construct
  misc_feature 1..20: note = chemically synthesized
  source 1..20: mol_type = other DNA
aggggccacgccacctcccc

SEQ ID NO: 15706 - DNA, 20 bp, synthetic construct
  misc_feature 1..20: note = chemically synthesized
  source 1..20: mol_type = other DNA
ggggccacgccacctcccca

SEQ ID NO: 15707 - DNA, 20 bp, synthetic construct
  misc_feature 1..20: note = chemically synthesized
  source 1..20: mol_type = other DNA
ggccacgccacctccccagg

SEQ ID NO: 15708 - DNA, 20 bp, synthetic construct
  misc_feature 1..20: note = chemically synthesized
  source 1..20: mol_type = other DNA
gccacgccacctccccaggg

SEQ ID NO: 15709 - DNA, 20 bp, synthetic construct
  misc_feature 1..20: note = chemically synthesized
  source 1..20: mol_type = other DNA
ccacgccacctccccaggga

SEQ ID NO: 15710 - DNA, 20 bp, synthetic construct
  misc_feature 1..20: note = chemically synthesized
  source 1..20: mol_type = other DNA
cacgccacctccccagggag

SEQ ID NO: 15711 - DNA, 20 bp, synthetic construct
  misc_feature 1..20: note = chemically synthesized
  source 1..20: mol_type = other DNA
cacctccccagggaggggtc

SEQ ID NO: 15712 - DNA, 20 bp, synthetic construct
  misc_feature 1..20: note = chemically synthesized
  source 1..20: mol_type = other DNA
cctccccagggaggggtcca

SEQ ID NO: 15713 - DNA, 20 bp, synthetic construct
  misc_feature 1..20: note = chemically synthesized
  source 1..20: mol_type = other DNA
ctccccagggaggggtccag

SEQ ID NO: 15714 - DNA, 20 bp, synthetic construct
  misc_feature 1..20: note = chemically synthesized
  source 1..20: mol_type = other DNA
cagggaggggtccagaggca

SEQ ID NO: 15715 - DNA, 20 bp, synthetic construct
  misc_feature 1..20: note = chemically synthesized
  source 1..20: mol_type = other DNA
agggaggggtccagaggcat

SEQ ID NO: 15716 - DNA, 20 bp, synthetic construct
  misc_feature 1..20: note = chemically synthesized
  source 1..20: mol_type = other DNA
gggaggggtccagaggcatg

SEQ ID NO: 15717 - DNA, 20 bp, synthetic construct
  misc_feature 1..20: note = chemically synthesized
  source 1..20: mol_type = other DNA
ggtccagaggcatggggacc

SEQ ID NO: 15718 - DNA, 20 bp, synthetic construct
  misc_feature 1..20: note = chemically synthesized
  source 1..20: mol_type = other DNA
gtccagaggcatggggacct

SEQ ID NO: 15719 - DNA, 20 bp, synthetic construct
  misc_feature 1..20: note = chemically synthesized
  source 1..20: mol_type = other DNA
tccagaggcatggggacctg

SEQ ID NO: 15720 - DNA, 20 bp, synthetic construct
  misc_feature 1..20: note = chemically synthesized
  source 1..20: mol_type = other DNA
gggacctggggtgcccctca

SEQ ID NO: 15721 - DNA, 20 bp, synthetic construct
  misc_feature 1..20: note = chemically synthesized
  source 1..20: mol_type = other DNA
ggacctggggtgcccctcac

SEQ ID NO: 15722 - DNA, 20 bp, synthetic construct
  misc_feature 1..20: note = chemically synthesized
  source 1..20: mol_type = other DNA
cctcacaggacacttccttg

SEQ ID NO: 15723 - DNA, 20 bp, synthetic construct
  misc_feature 1..20: note = chemically synthesized
  source 1..20: mol_type = other DNA
ctcacaggacacttccttgc

SEQ ID NO: 15724 - DNA, 20 bp, synthetic construct
  misc_feature 1..20: note = chemically synthesized
  source 1..20: mol_type = other DNA
aggacacttccttgcaggaa

SEQ ID NO: 15725 - DNA, 20 bp, synthetic construct
  misc_feature 1..20: note = chemically synthesized
  source 1..20: mol_type = other DNA
gacacttccttgcaggaaca

SEQ ID NO: 15726 - DNA, 20 bp, synthetic construct
  misc_feature 1..20: note = chemically synthesized
  source 1..20: mol_type = other DNA
acacttccttgcaggaacag

SEQ ID NO: 15727 - DNA, 20 bp, synthetic construct
  misc_feature 1..20: note = chemically synthesized
  source 1..20: mol_type = other DNA
gcaggaacagaggtgccatg

SEQ ID NO: 15728 - DNA, 20 bp, synthetic construct
  misc_feature 1..20: note = chemically synthesized
  source 1..20: mol_type = other DNA
acagaggtgccatgcagccc

SEQ ID NO: 15729 - DNA, 20 bp, synthetic construct
  misc_feature 1..20: note = chemically synthesized
  source 1..20: mol_type = other DNA
cagaggtgccatgcagcccc

SEQ ID NO: 15730 - DNA, 20 bp, synthetic construct
  misc_feature 1..20: note = chemically synthesized
  source 1..20: mol_type = other DNA
actccttgttgttgccctcc

SEQ ID NO: 15731 - DNA, 20 bp, synthetic construct
  misc_feature 1..20: note = chemically synthesized
  source 1..20: mol_type = other DNA
tgttgccctcctggcgctcc

SEQ ID NO: 15732 - DNA, 20 bp, synthetic construct
  misc_feature 1..20: note = chemically synthesized
  source 1..20: mol_type = other DNA
cgctcctggcctctgcccgt

SEQ ID NO: 15733 - DNA, 20 bp, synthetic construct
  misc_feature 1..20: note = chemically synthesized
  source 1..20: mol_type = other DNA
ggcctctgcccgtaagcact

SEQ ID NO: 15734 - DNA, 20 bp, synthetic construct
  misc_feature 1..20: note = chemically synthesized
  source 1..20: mol_type = other DNA
ctctgcccgtaagcacttgg

SEQ ID NO: 15735 - DNA, 20 bp, synthetic construct
  misc_feature 1..20: note = chemically synthesized
  source 1..20: mol_type = other DNA
tctgcccgtaagcacttggt

SEQ ID NO: 15736 - DNA, 20 bp, synthetic construct
  misc_feature 1..20: note = chemically synthesized
  source 1..20: mol_type = other DNA
ccgtaagcacttggtgggac

SEQ ID NO: 15737 - DNA, 20 bp, synthetic construct
  misc_feature 1..20: note = chemically synthesized
  source 1..20: mol_type = other DNA
cgtaagcacttggtgggact

SEQ ID NO: 15738 - DNA, 20 bp, synthetic construct
  misc_feature 1..20: note = chemically synthesized
  source 1..20: mol_type = other DNA
agcacttggtgggactgggc

SEQ ID NO: 15739 - DNA, 20 bp, synthetic construct
  misc_feature 1..20: note = chemically synthesized
  source 1..20: mol_type = other DNA
gcacttggtgggactgggct

SEQ ID NO: 15740 - DNA, 20 bp, synthetic construct
  misc_feature 1..20: note = chemically synthesized
  source 1..20: mol_type = other DNA
cacttggtgggactgggctg

SEQ ID NO: 15741 - DNA, 20 bp, synthetic construct
  misc_feature 1..20: note = chemically synthesized
  source 1..20: mol_type = other DNA
acttggtgggactgggctgg

SEQ ID NO: 15742 - DNA, 20 bp, synthetic construct
  misc_feature 1..20: note = chemically synthesized
  source 1..20: mol_type = other DNA
tggtgggactgggctggggg

SEQ ID NO: 15743 - DNA, 20 bp, synthetic construct
  misc_feature 1..20: note = chemically synthesized
  source 1..20: mol_type = other DNA
ggtgggactgggctgggggc

SEQ ID NO: 15744 - DNA, 20 bp, synthetic construct
  misc_feature 1..20: note = chemically synthesized
  source 1..20: mol_type = other DNA
gtgggactgggctgggggca

SEQ ID NO: 15745 - DNA, 20 bp, synthetic construct
  misc_feature 1..20: note = chemically synthesized
  source 1..20: mol_type = other DNA
gcccccagcccagtcccacc

SEQ ID NO: 15746 - DNA, 20 bp, synthetic construct
  misc_feature 1..20: note = chemically synthesized
  source 1..20: mol_type = other DNA
ccagtcccaccaagtgctta

SEQ ID NO: 15747 - DNA, 20 bp, synthetic construct
  misc_feature 1..20: note = chemically synthesized
  source 1..20: mol_type = other DNA
cagtcccaccaagtgcttac

SEQ ID NO: 15748 - DNA, 20 bp, synthetic construct
  misc_feature 1..20: note = chemically synthesized
  source 1..20: mol_type = other DNA
tcccaccaagtgcttacggg

SEQ ID NO: 15749 - DNA, 20 bp, synthetic construct
  misc_feature 1..20: note = chemically synthesized
  source 1..20: mol_type = other DNA
ccaccaagtgcttacgggca

SEQ ID NO: 15750 - DNA, 20 bp, synthetic construct
  misc_feature 1..20: note = chemically synthesized
  source 1..20: mol_type = other DNA
caccaagtgcttacgggcag

SEQ ID NO: 15751 - DNA, 20 bp, synthetic construct
  misc_feature 1..20: note = chemically synthesized
  source 1..20: mol_type = other DNA
aagtgcttacgggcagaggc

SEQ ID NO: 15752 - DNA, 20 bp, synthetic construct
  misc_feature 1..20: note = chemically synthesized
  source 1..20: mol_type = other DNA
agtgcttacgggcagaggcc

SEQ ID NO: 15753 - DNA, 20 bp, synthetic construct
  misc_feature 1..20: note = chemically synthesized
  source 1..20: mol_type = other DNA
tgcttacgggcagaggccag

SEQ ID NO: 15754 - DNA, 20 bp, synthetic construct
  misc_feature 1..20: note = chemically synthesized
  source 1..20: mol_type = other DNA
cgggcagaggccaggagcgc

SEQ ID NO: 15755 - DNA, 20 bp, synthetic construct
  misc_feature 1..20: note = chemically synthesized
  source 1..20: mol_type = other DNA
gggcagaggccaggagcgcc

SEQ ID NO: 15756 - DNA, 20 bp, synthetic construct
  misc_feature 1..20: note = chemically synthesized
  source 1..20: mol_type = other DNA
gcagaggccaggagcgccag

SEQ ID NO: 15757 - DNA, 20 bp, synthetic construct
  misc_feature 1..20: note = chemically synthesized
  source 1..20: mol_type = other DNA
cagaggccaggagcgccagg

SEQ ID NO: 15758 - DNA, 20 bp, synthetic construct
  misc_feature 1..20: note = chemically synthesized
  source 1..20: mol_type = other DNA
agaggccaggagcgccagga

SEQ ID NO: 15759 - DNA, 20 bp, synthetic construct
  misc_feature 1..20: note = chemically synthesized
  source 1..20: mol_type = other DNA
agcgccaggagggcaacaac

SEQ ID NO: 15760 - DNA, 20 bp, synthetic construct
  misc_feature 1..20: note = chemically synthesized
  source 1..20: mol_type = other DNA
gcgccaggagggcaacaaca

SEQ ID NO: 15761 - DNA, 20 bp, synthetic construct
  misc_feature 1..20: note = chemically synthesized
  source 1..20: mol_type = other DNA
gccaggagggcaacaacaag

SEQ ID NO: 15762 - DNA, 20 bp, synthetic construct
  misc_feature 1..20: note = chemically synthesized
  source 1..20: mol_type = other DNA
gggcaacaacaaggagtacc

SEQ ID NO: 15763 - DNA, 20 bp, synthetic construct
  misc_feature 1..20: note = chemically synthesized
  source 1..20: mol_type = other DNA
ggcaacaacaaggagtaccc

SEQ ID NO: 15764 - DNA, 20 bp, synthetic construct
  misc_feature 1..20: note = chemically synthesized
  source 1..20: mol_type = other DNA
gcaacaacaaggagtacccg

SEQ ID NO: 15765 - DNA, 20 bp, synthetic construct
  misc_feature 1..20: note = chemically synthesized
  source 1..20: mol_type = other DNA
aaggagtacccggggctgca

SEQ ID NO: 15766 - DNA, 20 bp, synthetic construct
  misc_feature 1..20: note = chemically synthesized
  source 1..20: mol_type = other DNA
catggcacctctgttcctgc

SEQ ID NO: 15767 - DNA, 20 bp, synthetic construct
  misc_feature 1..20: note = chemically synthesized
  source 1..20: mol_type = other DNA
atggcacctctgttcctgca

SEQ ID NO: 15768 - DNA, 20 bp, synthetic construct
  misc_feature 1..20: note = chemically synthesized
  source 1..20: mol_type = other DNA
gcacctctgttcctgcaagg

SEQ ID NO: 15769 - DNA, 20 bp, synthetic construct
  misc_feature 1..20: note = chemically synthesized
  source 1..20: mol_type = other DNA
cctgcaaggaagtgtcctgt

SEQ ID NO: 15770 - DNA, 20 bp, synthetic construct
  misc_feature 1..20: note = chemically synthesized
  source 1..20: mol_type = other DNA
ctgcaaggaagtgtcctgtg

SEQ ID NO: 15771 - DNA, 20 bp, synthetic construct
  misc_feature 1..20: note = chemically synthesized
  source 1..20: mol_type = other DNA
tgcaaggaagtgtcctgtga

SEQ ID NO: 15772 - DNA, 20 bp, synthetic construct
  misc_feature 1..20: note = chemically synthesized
  source 1..20: mol_type = other DNA
gcaaggaagtgtcctgtgag

SEQ ID NO: 15773 - DNA, 20 bp, synthetic construct
  misc_feature 1..20: note = chemically synthesized
  source 1..20: mol_type = other DNA
gtgtcctgtgaggggcaccc

SEQ ID NO: 15774 - DNA, 20 bp, synthetic construct
  misc_feature 1..20: note = chemically synthesized
  source 1..20: mol_type = other DNA
tgtcctgtgaggggcacccc

SEQ ID NO: 15775 - DNA, 20 bp, synthetic construct
  misc_feature 1..20: note = chemically synthesized
  source 1..20: mol_type = other DNA
accccaggtccccatgcctc

SEQ ID NO: 15776 - DNA, 20 bp, synthetic construct
  misc_feature 1..20: note = chemically synthesized
  source 1..20: mol_type = other DNA
catgcctctggacccctccc

SEQ ID NO: 15777 - DNA, 20 bp, synthetic construct
  misc_feature 1..20: note = chemically synthesized
  source 1..20: mol_type = other DNA
atgcctctggacccctccct

SEQ ID NO: 15778 - DNA, 20 bp, synthetic construct
  misc_feature 1..20: note = chemically synthesized
  source 1..20: mol_type = other DNA
tgcctctggacccctccctg

SEQ ID NO: 15779 - DNA, 20 bp, synthetic construct
  misc_feature 1..20: note = chemically synthesized
  source 1..20: mol_type = other DNA
cctctggacccctccctggg

SEQ ID NO: 15780 - DNA, 20 bp, synthetic construct
  misc_feature 1..20: note = chemically synthesized
  source 1..20: mol_type = other DNA
ctctggacccctccctgggg

SEQ ID NO: 15781 - DNA, 20 bp, synthetic construct
  misc_feature 1..20: note = chemically synthesized
  source 1..20: mol_type = other DNA
tggacccctccctggggagg

SEQ ID NO: 15782 - DNA, 20 bp, synthetic construct
  misc_feature 1..20: note = chemically synthesized
  source 1..20: mol_type = other DNA
ccctccctggggaggtggcg

SEQ ID NO: 15783 - DNA, 20 bp, synthetic construct
  misc_feature 1..20: note = chemically synthesized
  source 1..20: mol_type = other DNA
ggggaggtggcgtggcccct

SEQ ID NO: 15784 - DNA, 20 bp, synthetic construct
  misc_feature 1..20: note = chemically synthesized
  source 1..20: mol_type = other DNA
gggaggtggcgtggccccta

SEQ ID NO: 15785 - DNA, 20 bp, synthetic construct
  misc_feature 1..20: note = chemically synthesized
  source 1..20: mol_type = other DNA
aggtggcgtggcccctaagg

SEQ ID NO: 15786 - DNA, 20 bp, synthetic construct
  misc_feature 1..20: note = chemically synthesized
  source 1..20: mol_type = other DNA
tggcccctaaggtagaacct

SEQ ID NO: 15787 - DNA, 20 bp, synthetic construct
  misc_feature 1..20: note = chemically synthesized
  source 1..20: mol_type = other DNA
ccctaaggtagaaccttagc

SEQ ID NO: 15788 - DNA, 20 bp, synthetic construct
  misc_feature 1..20: note = chemically synthesized
  source 1..20: mol_type = other DNA
cctaaggtagaaccttagct

SEQ ID NO: 15789 - DNA, 20 bp, synthetic construct
  misc_feature 1..20: note = chemically synthesized
  source 1..20: mol_type = other DNA
agaaccttagctgggtctgc

SEQ ID NO: 15790 - DNA, 20 bp, synthetic construct
  misc_feature 1..20: note = chemically synthesized
  source 1..20: mol_type = other DNA
accttagctgggtctgccag

SEQ ID NO: 15791 - DNA, 20 bp, synthetic construct
  misc_feature 1..20: note = chemically synthesized
  source 1..20: mol_type = other DNA
ccttagctgggtctgccaga

SEQ ID NO: 15792 - DNA, 20 bp, synthetic construct
  misc_feature 1..20: note = chemically synthesized
  source 1..20: mol_type = other DNA
ttagctgggtctgccagaag

SEQ ID NO: 15793 - DNA, 20 bp, synthetic construct
  misc_feature 1..20: note = chemically synthesized
  source 1..20: mol_type = other DNA
gctgggtctgccagaaggag

SEQ ID NO: 15794 - DNA, 20 bp, synthetic construct
  misc_feature 1..20: note = chemically synthesized
  source 1..20: mol_type = other DNA
ctgggtctgccagaaggagt

SEQ ID NO: 15795 - DNA, 20 bp, synthetic construct
  misc_feature 1..20: note = chemically synthesized
  source 1..20: mol_type = other DNA
tgggtctgccagaaggagta

SEQ ID NO: 15796 - DNA, 20 bp, synthetic construct
  misc_feature 1..20: note = chemically synthesized
  source 1..20: mol_type = other DNA
gggtctgccagaaggagtag

SEQ ID NO: 15797 - DNA, 20 bp, synthetic construct
  misc_feature 1..20: note = chemically synthesized
  source 1..20: mol_type = other DNA
ctgccagaaggagtaggggc

SEQ ID NO: 15798 - DNA, 20 bp, synthetic construct
  misc_feature 1..20: note = chemically synthesized
  source 1..20: mol_type = other DNA
gggccggctccctgctaata

SEQ ID NO: 15799 - DNA, 20 bp, synthetic construct
  misc_feature 1..20: note = chemically synthesized
  source 1..20: mol_type = other DNA
ggccggctccctgctaatac

SEQ ID NO: 15800 - DNA, 20 bp, synthetic construct
  misc_feature 1..20: note = chemically synthesized
  source 1..20: mol_type = other DNA
tccctgctaatacgggctct

SEQ ID NO: 15801 - DNA, 20 bp, synthetic construct
  misc_feature 1..20: note = chemically synthesized
  source 1..20: mol_type = other DNA
ctgctaatacgggctctcag

SEQ ID NO: 15802 - DNA, 20 bp, synthetic construct
  misc_feature 1..20: note = chemically synthesized
  source 1..20: mol_type = other DNA
tgctaatacgggctctcaga

SEQ ID NO: 15803 - DNA, 20 bp, synthetic construct
  misc_feature 1..20: note = chemically synthesized
  source 1..20: mol_type = other DNA
gctaatacgggctctcagaa

SEQ ID NO: 15804 - DNA, 20 bp, synthetic construct
  misc_feature 1..20: note = chemically synthesized
  source 1..20: mol_type = other DNA
ctaatacgggctctcagaag

SEQ ID NO: 15805 - DNA, 20 bp, synthetic construct
  misc_feature 1..20: note = chemically synthesized
  source 1..20: mol_type = other DNA
taatacgggctctcagaagg

SEQ ID NO: 15806 - DNA, 20 bp, synthetic construct
  misc_feature 1..20: note = chemically synthesized
  source 1..20: mol_type = other DNA
cgggctctcagaagggggac

SEQ ID NO: 15807 - DNA, 20 bp, synthetic construct
  misc_feature 1..20: note = chemically synthesized
  source 1..20: mol_type = other DNA
ctctcagaagggggactggt

SEQ ID NO: 15808 - DNA, 20 bp, synthetic construct
  misc_feature 1..20: note = chemically synthesized
  source 1..20: mol_type = other DNA
tctcagaagggggactggtg

SEQ ID NO: 15809 - DNA, 20 bp, synthetic construct
  misc_feature 1..20: note = chemically synthesized
  source 1..20: mol_type = other DNA
ctcagaagggggactggtga

SEQ ID NO: 15810 - DNA, 20 bp, synthetic construct
  misc_feature 1..20: note = chemically synthesized
  source 1..20: mol_type = other DNA
tcagaagggggactggtgag

SEQ ID NO: 15811 - DNA, 20 bp, synthetic construct
  misc_feature 1..20: note = chemically synthesized
  source 1..20: mol_type = other DNA
aagggggactggtgaggggc

SEQ ID NO: 15812 - DNA, 20 bp, synthetic construct
  misc_feature 1..20: note = chemically synthesized
  source 1..20: mol_type = other DNA
agggggactggtgaggggcg

SEQ ID NO: 15813 - DNA, 20 bp, synthetic construct
  misc_feature 1..20: note = chemically synthesized
  source 1..20: mol_type = other DNA
gggggactggtgaggggcga

SEQ ID NO: 15814 - DNA, 20 bp, synthetic construct
  misc_feature 1..20: note = chemically synthesized
  source 1..20: mol_type = other DNA
ctggtgaggggcgagggatc

SEQ ID NO: 15815 - DNA, 20 bp, synthetic construct
  misc_feature 1..20: note = chemically synthesized
  source 1..20: mol_type = other DNA
tggtgaggggcgagggatcg

SEQ ID NO: 15816 - DNA, 20 bp, synthetic construct
  misc_feature 1..20: note = chemically synthesized
  source 1..20: mol_type = other DNA
gggcgagggatcgaggccca

SEQ ID NO: 15817 - DNA, 20 bp, synthetic construct
  misc_feature 1..20: note = chemically synthesized
  source 1..20: mol_type = other DNA
ggcgagggatcgaggcccaa

SEQ ID NO: 15818 - DNA, 20 bp, synthetic construct
  misc_feature 1..20: note = chemically synthesized
  source 1..20: mol_type = other DNA
gcgagggatcgaggcccaaa

SEQ ID NO: 15819 - DNA, 20 bp, synthetic construct
  misc_feature 1..20: note = chemically synthesized
  source 1..20: mol_type = other DNA
gagggatcgaggcccaaagg

SEQ ID NO: 15820 - DNA, 20 bp, synthetic construct
  misc_feature 1..20: note = chemically synthesized
  source 1..20: mol_type = other DNA
agggatcgaggcccaaaggg

SEQ ID NO: 15821 - DNA, 20 bp, synthetic construct
  misc_feature 1..20: note = chemically synthesized
  source 1..20: mol_type = other DNA
gatcgaggcccaaagggagg

SEQ ID NO: 15822 - DNA, 20 bp, synthetic construct
  misc_feature 1..20: note = chemically synthesized
  source 1..20: mol_type = other DNA
atcgaggcccaaagggaggt

SEQ ID NO: 15823 - DNA, 20 bp, synthetic construct
  misc_feature 1..20: note = chemically synthesized
  source 1..20: mol_type = other DNA
gaggcccaaagggaggtggg

SEQ ID NO: 15824 - DNA, 20 bp, synthetic construct
  misc_feature 1..20: note = chemically synthesized
  source 1..20: mol_type = other DNA
aggcccaaagggaggtgggt

SEQ ID NO: 15825 - DNA, 20 bp, synthetic construct
  misc_feature 1..20: note = chemically synthesized
  source 1..20: mol_type = other DNA
ccaaagggaggtgggtggga

SEQ ID NO: 15826 - DNA, 20 bp, synthetic construct
  misc_feature 1..20: note = chemically synthesized
  source 1..20: mol_type = other DNA
aaagggaggtgggtgggatg

SEQ ID NO: 15827 - DNA, 20 bp, synthetic construct
  misc_feature 1..20: note = chemically synthesized
  source 1..20: mol_type = other DNA
gggaggtgggtgggatggag

SEQ ID NO: 15828 - DNA, 20 bp, synthetic construct
  misc_feature 1..20: note = chemically synthesized
  source 1..20: mol_type = other DNA
ggatggagcagaaaacccac

SEQ ID NO: 15829 - DNA, 20 bp, synthetic construct
  misc_feature 1..20: note = chemically synthesized
  source 1..20: mol_type = other DNA
aacccaccagactgaacatc

SEQ ID NO: 15830 - DNA, 20 bp, synthetic construct
  misc_feature 1..20: note = chemically synthesized
  source 1..20: mol_type = other DNA
acccaccagactgaacatca

SEQ ID NO: 15831 - DNA, 20 bp, synthetic construct
  misc_feature 1..20: note = chemically synthesized
  source 1..20: mol_type = other DNA
actgaacatcaaggcacctg

SEQ ID NO: 15832 - DNA, 20 bp, synthetic construct
  misc_feature 1..20: note = chemically synthesized
  source 1..20: mol_type = other DNA
acatcaaggcacctgcggtc

SEQ ID NO: 15833 - DNA, 20 bp, synthetic construct
  misc_feature 1..20: note = chemically synthesized
  source 1..20: mol_type = other DNA
ggtctggactgatctccgtc

SEQ ID NO: 15834 - DNA, 20 bp, synthetic construct
  misc_feature 1..20: note = chemically synthesized
  source 1..20: mol_type = other DNA
ggactgatctccgtccagtc

SEQ ID NO: 15835 - DNA, 20 bp, synthetic construct
  misc_feature 1..20: note = chemically synthesized
  source 1..20: mol_type = other DNA
gccaacatgctgtgtgtctt

SEQ ID NO: 15836 - DNA, 20 bp, synthetic construct
  misc_feature 1..20: note = chemically synthesized
  source 1..20: mol_type = other DNA
ccaacatgctgtgtgtcttt

SEQ ID NO: 15837 - DNA, 20 bp, synthetic construct
  misc_feature 1..20: note = chemically synthesized
  source 1..20: mol_type = other DNA
gtgtgtctttgggtgatttc

SEQ ID NO: 15838 - DNA, 20 bp, synthetic construct
  misc_feature 1..20: note = chemically synthesized
  source 1..20: mol_type = other DNA
gggtgatttctggccctctc

SEQ ID NO: 15839 - DNA, 20 bp, synthetic construct
  misc_feature 1..20: note = chemically synthesized
  source 1..20: mol_type = other DNA
ggtgatttctggccctctcc

SEQ ID NO: 15840 - DNA, 20 bp, synthetic construct
  misc_feature 1..20: note = chemically synthesized
  source 1..20: mol_type = other DNA
ttctggccctctccaggcct

SEQ ID NO: 15841 - DNA, 20 bp, synthetic construct
  misc_feature 1..20: note = chemically synthesized
  source 1..20: mol_type = other DNA
caggcctcagtttccctgtc

SEQ ID NO: 15842 - DNA, 20 bp, synthetic construct
  misc_feature 1..20: note = chemically synthesized
  source 1..20: mol_type = other DNA
aggcctcagtttccctgtct

SEQ ID NO: 15843 - DNA, 20 bp, synthetic construct
  misc_feature 1..20: note = chemically synthesized
  source 1..20: mol_type = other DNA
ggcctcagtttccctgtctg

SEQ ID NO: 15844 - DNA, 20 bp, synthetic construct
  misc_feature 1..20: note = chemically synthesized
  source 1..20: mol_type = other DNA
ctcagtttccctgtctgggg

SEQ ID NO: 15845 - DNA, 20 bp, synthetic construct
  misc_feature 1..20: note = chemically synthesized
  source 1..20: mol_type = other DNA
tcagtttccctgtctggggt

SEQ ID NO: 15846 - DNA, 20 bp, synthetic construct
  misc_feature 1..20: note = chemically synthesized
  source 1..20: mol_type = other DNA
ttccctgtctggggtaggac

SEQ ID NO: 15847 - DNA, 20 bp, synthetic construct
  misc_feature 1..20: note = chemically synthesized
  source 1..20: mol_type = other DNA
tccctgtctggggtaggact

SEQ ID NO: 15848 - DNA, 20 bp, synthetic construct
  misc_feature 1..20: note = chemically synthesized
  source 1..20: mol_type = other DNA
ggggtaggactgggctgtct

SEQ ID NO: 15849 - DNA, 20 bp, synthetic construct
  misc_feature 1..20: note = chemically synthesized
  source 1..20: mol_type = other DNA
gggtaggactgggctgtcta

SEQ ID NO: 15850 - DNA, 20 bp, synthetic construct
  misc_feature 1..20: note = chemically synthesized
  source 1..20: mol_type = other DNA
gggctgtctaaggcttcctc

SEQ ID NO: 15851 - DNA, 20 bp, synthetic construct
  misc_feature 1..20: note = chemically synthesized
  source 1..20: mol_type = other DNA
ctaaggcttcctccagccct

SEQ ID NO: 15852 - DNA, 20 bp, synthetic construct
  misc_feature 1..20: note = chemically synthesized
  source 1..20: mol_type = other DNA
ttcctccagccctaagcctg

SEQ ID NO: 15853 - DNA, 20 bp, synthetic construct
  misc_feature 1..20: note = chemically synthesized
  source 1..20: mol_type = other DNA
cagccctaagcctgaagaat

SEQ ID NO: 15854 - DNA, 20 bp, synthetic construct
  misc_feature 1..20: note = chemically synthesized
  source 1..20: mol_type = other DNA
agccctaagcctgaagaatg

SEQ ID NO: 15855 - DNA, 20 bp, synthetic construct
  misc_feature 1..20: note = chemically synthesized
  source 1..20: mol_type = other DNA
gccctaagcctgaagaatga

SEQ ID NO: 15856 - DNA, 20 bp, synthetic construct
  misc_feature 1..20: note = chemically synthesized
  source 1..20: mol_type = other DNA
ccctaagcctgaagaatgag

SEQ ID NO: 15857 - DNA, 20 bp, synthetic construct
  misc_feature 1..20: note = chemically synthesized
  source 1..20: mol_type = other DNA
cctaagcctgaagaatgagg

SEQ ID NO: 15858 - DNA, 20 bp, synthetic construct
  misc_feature 1..20: note = chemically synthesized
  source 1..20: mol_type = other DNA
ctaagcctgaagaatgaggg

SEQ ID NO: 15859 - DNA, 20 bp, synthetic construct
  misc_feature 1..20: note = chemically synthesized
  source 1..20: mol_type = other DNA
atgaggggggaacctgcact

SEQ ID NO: 15860 - DNA, 20 bp, synthetic construct
  misc_feature 1..20: note = chemically synthesized
  source 1..20: mol_type = other DNA
gaggggggaacctgcacttg

SEQ ID NO: 15861 - DNA, 20 bp, synthetic construct
  misc_feature 1..20: note = chemically synthesized
  source 1..20: mol_type = other DNA
cctgcacttggagccacttc

SEQ ID NO: 15862 - DNA, 20 bp, synthetic construct
  misc_feature 1..20: note = chemically synthesized
  source 1..20: mol_type = other DNA
ttccagccccaccccctgtg

SEQ ID NO: 15863 - DNA, 20 bp, synthetic construct
  misc_feature 1..20: note = chemically synthesized
  source 1..20: mol_type = other DNA
ccccaccccctgtgtagctt

SEQ ID NO: 15864 - DNA, 20 bp, synthetic construct
  misc_feature 1..20: note = chemically synthesized
  source 1..20: mol_type = other DNA
cccaccccctgtgtagcttt

SEQ ID NO: 15865 - DNA, 20 bp, synthetic construct
  misc_feature 1..20: note = chemically synthesized
  source 1..20: mol_type = other DNA
ccccctgtgtagctttgggc

SEQ ID NO: 15866 - DNA, 20 bp, synthetic construct
  misc_feature 1..20: note = chemically synthesized
  source 1..20: mol_type = other DNA
tgggcaagtgacacccctcc

SEQ ID NO: 15867 - DNA, 20 bp, synthetic construct
  misc_feature 1..20: note = chemically synthesized
  source 1..20: mol_type = other DNA
gggcaagtgacacccctccc

SEQ ID NO: 15868 - DNA, 20 bp, synthetic construct
  misc_feature 1..20: note = chemically synthesized
  source 1..20: mol_type = other DNA
tcccgggcctccatgttctt

SEQ ID NO: 15869 - DNA, 20 bp, synthetic construct
  misc_feature 1..20: note = chemically synthesized
  source 1..20: mol_type = other DNA
cccgggcctccatgttcttc

SEQ ID NO: 15870 - DNA, 20 bp, synthetic construct
  misc_feature 1..20: note = chemically synthesized
  source 1..20: mol_type = other DNA
catgttcttcaggttatgat

SEQ ID NO: 15871 - DNA, 20 bp, synthetic construct
  misc_feature 1..20: note = chemically synthesized
  source 1..20: mol_type = other DNA
atgttcttcaggttatgatg

SEQ ID NO: 15872 - DNA, 20 bp, synthetic construct
  misc_feature 1..20: note = chemically synthesized
  source 1..20: mol_type = other DNA
tgttcttcaggttatgatga

SEQ ID NO: 15873 - DNA, 20 bp, synthetic construct
  misc_feature 1..20: note = chemically synthesized
  source 1..20: mol_type = other DNA
gttcttcaggttatgatgag

SEQ ID NO: 15874 - DNA, 20 bp, synthetic construct
  misc_feature 1..20: note = chemically synthesized
  source 1..20: mol_type = other DNA
cttcaggttatgatgagggg

SEQ ID NO: 15875 - DNA, 20 bp, synthetic construct
  misc_feature 1..20: note = chemically synthesized
  source 1..20: mol_type = other DNA
ttcaggttatgatgaggggt

SEQ ID NO: 15876 - DNA, 20 bp, synthetic construct
  misc_feature 1..20: note = chemically synthesized
  source 1..20: mol_type = other DNA
tcaggttatgatgaggggtg

SEQ ID NO: 15877 - DNA, 20 bp, synthetic construct
  misc_feature 1..20: note = chemically synthesized
  source 1..20: mol_type = other DNA
caggttatgatgaggggtgg

SEQ ID NO: 15878 - DNA, 20 bp, synthetic construct
  misc_feature 1..20: note = chemically synthesized
  source 1..20: mol_type = other DNA
aggttatgatgaggggtggg

SEQ ID NO: 15879 - DNA, 20 bp, synthetic construct
  misc_feature 1..20: note = chemically synthesized
  source 1..20: mol_type = other DNA
aggggtggggggcacccgtc

SEQ ID NO: 15880 - DNA, 20 bp, synthetic construct
  misc_feature 1..20: note = chemically synthesized
  source 1..20: mol_type = other DNA
gggggcacccgtccagctcc

SEQ ID NO: 15881 - DNA, 20 bp, synthetic construct
  misc_feature 1..20: note = chemically synthesized
  source 1..20: mol_type = other DNA
ggggcacccgtccagctccg

SEQ ID NO: 15882 - DNA, 20 bp, synthetic construct
  misc_feature 1..20: note = chemically synthesized
  source 1..20: mol_type = other DNA
gtccagctccgaggcttcct

SEQ ID NO: 15883 - DNA, 20 bp, synthetic construct
  misc_feature 1..20: note = chemically synthesized
  source 1..20: mol_type = other DNA
ctccgaggcttccttagctc

SEQ ID NO: 15884 - DNA, 20 bp, synthetic construct
  misc_feature 1..20: note = chemically synthesized
  source 1..20: mol_type = other DNA
gaggcttccttagctctagc

SEQ ID NO: 15885 - DNA, 20 bp, synthetic construct
  misc_feature 1..20: note = chemically synthesized
  source 1..20: mol_type = other DNA
agctctagcaagtgcttctc

SEQ ID NO: 15886 - DNA, 20 bp, synthetic construct
  misc_feature 1..20: note = chemically synthesized
  source 1..20: mol_type = other DNA
gctctagcaagtgcttctcc

SEQ ID NO: 15887 - DNA, 20 bp, synthetic construct
  misc_feature 1..20: note = chemically synthesized
  source 1..20: mol_type = other DNA
aagtgcttctccaggcttgc

SEQ ID NO: 15888 - DNA, 20 bp, synthetic construct
  misc_feature 1..20: note = chemically synthesized
  source 1..20: mol_type = other DNA
gcttctccaggcttgctggc

SEQ ID NO: 15889 - DNA, 20 bp, synthetic construct
  misc_feature 1..20: note = chemically synthesized
  source 1..20: mol_type = other DNA
cttctccaggcttgctggct

SEQ ID NO: 15890 - DNA, 20 bp, synthetic construct
  misc_feature 1..20: note = chemically synthesized
  source 1..20: mol_type = other DNA
tccaggcttgctggctgggc

SEQ ID NO: 15891 - DNA, 20 bp, synthetic construct
  misc_feature 1..20: note = chemically synthesized
  source 1..20: mol_type = other DNA
ccaggcttgctggctgggct

SEQ ID NO: 15892 - DNA, 20 bp, synthetic construct
  misc_feature 1..20: note = chemically synthesized
  source 1..20: mol_type = other DNA
ggcttgctggctgggctggg

SEQ ID NO: 15893 - DNA, 20 bp, synthetic construct
  misc_feature 1..20: note = chemically synthesized
  source 1..20: mol_type = other DNA
gcttgctggctgggctgggc

SEQ ID NO: 15894 - DNA, 20 bp, synthetic construct
  misc_feature 1..20: note = chemically synthesized
  source 1..20: mol_type = other DNA
cttgctggctgggctgggca

SEQ ID NO: 15895 - DNA, 20 bp, synthetic construct
  misc_feature 1..20: note = chemically synthesized
  source 1..20: mol_type = other DNA
tgctggctgggctgggcagg

SEQ ID NO: 15896 - DNA, 20 bp, synthetic construct
  misc_feature 1..20: note = chemically synthesized
  source 1..20: mol_type = other DNA
cccctcctctttcccctccc

SEQ ID NO: 15897 - DNA, 20 bp, synthetic construct
  misc_feature 1..20: note = chemically synthesized
  source 1..20: mol_type = other DNA
cctcctctttcccctcccca

SEQ ID NO: 15898 - DNA, 20 bp, synthetic construct
  misc_feature 1..20: note = chemically synthesized
  source 1..20: mol_type = other DNA
ctcctctttcccctccccag

SEQ ID NO: 15899 - DNA, 20 bp, synthetic construct
  misc_feature 1..20: note = chemically synthesized
  source 1..20: mol_type = other DNA
tcctctttcccctccccaga

SEQ ID NO: 15900 - DNA, 20 bp, synthetic construct
  misc_feature 1..20: note = chemically synthesized
  source 1..20: mol_type = other DNA
cctccccagagggcattacc

SEQ ID NO: 15901 - DNA, 20 bp, synthetic construct
  misc_feature 1..20: note = chemically synthesized
  source 1..20: mol_type = other DNA
tccccagagggcattacctg

SEQ ID NO: 15902 - DNA, 20 bp, synthetic construct
  misc_feature 1..20: note = chemically synthesized
  source 1..20: mol_type = other DNA
ccagagggcattacctggag

SEQ ID NO: 15903 - DNA, 20 bp, synthetic construct
  misc_feature 1..20: note = chemically synthesized
  source 1..20: mol_type = other DNA
ttacctggagcagctgcctc

SEQ ID NO: 15904 - DNA, 20 bp, synthetic construct
  misc_feature 1..20: note = chemically synthesized
  source 1..20: mol_type = other DNA
tacctggagcagctgcctct

SEQ ID NO: 15905 - DNA, 20 bp, synthetic construct
  misc_feature 1..20: note = chemically synthesized
  source 1..20: mol_type = other DNA
acctggagcagctgcctcta

SEQ ID NO: 15906 - DNA, 20 bp, synthetic construct
  misc_feature 1..20: note = chemically synthesized
  source 1..20: mol_type = other DNA
gctgcctctagggatgaact

SEQ ID NO: 15907 - DNA, 20 bp, synthetic construct
  misc_feature 1..20: note = chemically synthesized
  source 1..20: mol_type = other DNA
gcctctagggatgaactgag

SEQ ID NO: 15908 - DNA, 20 bp, synthetic construct
  misc_feature 1..20: note = chemically synthesized
  source 1..20: mol_type = other DNA
ctagggatgaactgagcaga

SEQ ID NO: 15909 - DNA, 20 bp, synthetic construct
  misc_feature 1..20: note = chemically synthesized
  source 1..20: mol_type = other DNA
tagggatgaactgagcagac

SEQ ID NO: 15910 - DNA, 20 bp, synthetic construct
  misc_feature 1..20: note = chemically synthesized
  source 1..20: mol_type = other DNA
ggatgaactgagcagacagg

SEQ ID NO: 15911 - DNA, 20 bp, synthetic construct
  misc_feature 1..20: note = chemically synthesized
  source 1..20: mol_type = other DNA
gatgaactgagcagacaggc

SEQ ID NO: 15912 - DNA, 20 bp, synthetic construct
  misc_feature 1..20: note = chemically synthesized
  source 1..20: mol_type = other DNA
tgaactgagcagacaggcag

SEQ ID NO: 15913 - DNA, 20 bp, synthetic construct
  misc_feature 1..20: note = chemically synthesized
  source 1..20: mol_type = other DNA
gaactgagcagacaggcagg

SEQ ID NO: 15914 - DNA, 20 bp, synthetic construct
  misc_feature 1..20: note = chemically synthesized
  source 1..20: mol_type = other DNA
aactgagcagacaggcagga

SEQ ID NO: 15915 - DNA, 20 bp, synthetic construct
  misc_feature 1..20: note = chemically synthesized
  source 1..20: mol_type = other DNA
gacctgttttatatcatctc

SEQ ID NO: 15916 - DNA, 20 bp, synthetic construct
  misc_feature 1..20: note = chemically synthesized
  source 1..20: mol_type = other DNA
acctgttttatatcatctcc

SEQ ID NO: 15917 - DNA, 20 bp, synthetic construct
  misc_feature 1..20: note = chemically synthesized
  source 1..20: mol_type = other DNA
cctgttttatatcatctcca

SEQ ID NO: 15918 - DNA, 20 bp, synthetic construct
  misc_feature 1..20: note = chemically synthesized
  source 1..20: mol_type = other DNA
gttttatatcatctccaggg

SEQ ID NO: 15919 - DNA, 20 bp, synthetic construct
  misc_feature 1..20: note = chemically synthesized
  source 1..20: mol_type = other DNA
ttatatcatctccagggcag

SEQ ID NO: 15920 - DNA, 20 bp, synthetic construct
  misc_feature 1..20: note = chemically synthesized
  source 1..20: mol_type = other DNA
tatatcatctccagggcagc

SEQ ID NO: 15921 - DNA, 20 bp, synthetic construct
  misc_feature 1..20: note = chemically synthesized
  source 1..20: mol_type = other DNA
tctccagggcagcaggcact

SEQ ID NO: 15922 - DNA, 20 bp, synthetic construct
  misc_feature 1..20: note = chemically synthesized
  source 1..20: mol_type = other DNA
ctccagggcagcaggcactg

SEQ ID NO: 15923 - DNA, 20 bp, synthetic construct
  misc_feature 1..20: note = chemically synthesized
  source 1..20: mol_type = other DNA
ggcagcaggcactgaggacc

SEQ ID NO: 15924 - DNA, 20 bp, synthetic construct
  misc_feature 1..20: note = chemically synthesized
  source 1..20: mol_type = other DNA
gcagcaggcactgaggaccc

SEQ ID NO: 15925 - DNA, 20 bp, synthetic construct
  misc_feature 1..20: note = chemically synthesized
  source 1..20: mol_type = other DNA
cagcaggcactgaggaccca

SEQ ID NO: 15926 - DNA, 20 bp, synthetic construct
  misc_feature 1..20: note = chemically synthesized
  source 1..20: mol_type = other DNA
gcactgaggacccagggcgc

SEQ ID NO: 15927 - DNA, 20 bp, synthetic construct
  misc_feature 1..20: note = chemically synthesized
  source 1..20: mol_type = other DNA
cactgaggacccagggcgct

SEQ ID NO: 15928 - DNA, 20 bp, synthetic construct
  misc_feature 1..20: note = chemically synthesized
  source 1..20: mol_type = other DNA
aggacccagggcgctgggca

SEQ ID NO: 15929 - DNA, 20 bp, synthetic construct
  misc_feature 1..20: note = chemically synthesized
  source 1..20: mol_type = other DNA
ggacccagggcgctgggcaa

SEQ ID NO: 15930 - DNA, 20 bp, synthetic construct
  misc_feature 1..20: note = chemically synthesized
  source 1..20: mol_type = other DNA
ggcaaaggtcacctgctgac

SEQ ID NO: 15931 - DNA, 20 bp, synthetic construct
  misc_feature 1..20: note = chemically synthesized
  source 1..20: mol_type = other DNA
aaaggtcacctgctgaccag

SEQ ID NO: 15932 - DNA, 20 bp, synthetic construct
  misc_feature 1..20: note = chemically synthesized
  source 1..20: mol_type = other DNA
aggtcacctgctgaccagtg

SEQ ID NO: 15933 - DNA, 20 bp, synthetic construct
  misc_feature 1..20: note = chemically synthesized
  source 1..20: mol_type = other DNA
acctgctgaccagtggagat

SEQ ID NO: 15934 - DNA, 20 bp, synthetic construct
  misc_feature 1..20: note = chemically synthesized
  source 1..20: mol_type = other DNA
cctgctgaccagtggagatg

SEQ ID NO: 15935 - DNA, 20 bp, synthetic construct
  misc_feature 1..20: note = chemically synthesized
  source 1..20: mol_type = other DNA
ctgctgaccagtggagatga

SEQ ID NO: 15936 - DNA, 20 bp, synthetic construct
  misc_feature 1..20: note = chemically synthesized
  source 1..20: mol_type = other DNA
accagtggagatgagggcct

SEQ ID NO: 15937 - DNA, 20 bp, synthetic construct
  misc_feature 1..20: note = chemically synthesized
  source 1..20: mol_type = other DNA
ccagtggagatgagggcctg

SEQ ID NO: 15938 - DNA, 20 bp, synthetic construct
  misc_feature 1..20: note = chemically synthesized
  source 1..20: mol_type = other DNA
gtggagatgagggcctgagg

SEQ ID NO: 15939 - DNA, 20 bp, synthetic construct
  misc_feature 1..20: note = chemically synthesized
  source 1..20: mol_type = other DNA
tggagatgagggcctgaggc

SEQ ID NO: 15940 - DNA, 20 bp, synthetic construct
  misc_feature 1..20: note = chemically synthesized
  source 1..20: mol_type = other DNA
ggagatgagggcctgaggca

SEQ ID NO: 15941 - DNA, 20 bp, synthetic construct
  misc_feature 1..20: note = chemically synthesized
  source 1..20: mol_type = other DNA
agggcctgaggcagggtgtc

SEQ ID NO: 15942 - DNA, 20 bp, synthetic construct
  misc_feature 1..20: note = chemically synthesized
  source 1..20: mol_type = other DNA
tgaggcagggtgtccagatg

SEQ ID NO: 15943 - DNA, 20 bp, synthetic construct
  misc_feature 1..20: note = chemically synthesized
  source 1..20: mol_type = other DNA
gcagggtgtccagatgcagc

SEQ ID NO: 15944 - DNA, 20 bp, synthetic construct
  misc_feature 1..20: note = chemically synthesized
  source 1..20: mol_type = other DNA
gggtgtccagatgcagcaag

SEQ ID NO: 15945 - DNA, 20 bp, synthetic construct
  misc_feature 1..20: note = chemically synthesized
  source 1..20: mol_type = other DNA
ggtgtccagatgcagcaagc

SEQ ID NO: 15946 - DNA, 20 bp, synthetic construct
  misc_feature 1..20: note = chemically synthesized
  source 1..20: mol_type = other DNA
gtccagatgcagcaagcggg

SEQ ID NO: 15947 - DNA, 20 bp, synthetic construct
  misc_feature 1..20: note = chemically synthesized
  source 1..20: mol_type = other DNA
tccagatgcagcaagcgggc

SEQ ID NO: 15948 - DNA, 20 bp, synthetic construct
  misc_feature 1..20: note = chemically synthesized
  source 1..20: mol_type = other DNA
cagatgcagcaagcgggcgg

SEQ ID NO: 15949 - DNA, 20 bp, synthetic construct
  misc_feature 1..20: note = chemically synthesized
  source 1..20: mol_type = other DNA
gatgcagcaagcgggcggga

SEQ ID NO: 15950 - DNA, 20 bp, synthetic construct
  misc_feature 1..20: note = chemically synthesized
  source 1..20: mol_type = other DNA
cagcaagcgggcgggagagt

SEQ ID NO: 15951 - DNA, 20 bp, synthetic construct
  misc_feature 1..20: note = chemically synthesized
  source 1..20: mol_type = other DNA
agcaagcgggcgggagagtt

SEQ ID NO: 15952 - DNA, 20 bp, synthetic construct
  misc_feature 1..20: note = chemically synthesized
  source 1..20: mol_type = other DNA
cgggagagttgggaaatccc

SEQ ID NO: 15953 - DNA, 20 bp, synthetic construct
  misc_feature 1..20: note = chemically synthesized
  source 1..20: mol_type = other DNA
gggagagttgggaaatccct

SEQ ID NO: 15954 - DNA, 20 bp, synthetic construct
  misc_feature 1..20: note = chemically synthesized
  source 1..20: mol_type = other DNA
gagagttgggaaatccctag

SEQ ID NO: 15955 - DNA, 20 bp, synthetic construct
  misc_feature 1..20: note = chemically synthesized
  source 1..20: mol_type = other DNA
tgggaaatccctaggagact

SEQ ID NO: 15956 - DNA, 20 bp, synthetic construct
  misc_feature 1..20: note = chemically synthesized
  source 1..20: mol_type = other DNA
ggtgacctttgcccagcgcc

SEQ ID NO: 15957 - DNA, 20 bp, synthetic construct
  misc_feature 1..20: note = chemically synthesized
  source 1..20: mol_type = other DNA
gaggggaaagaggaggggag

SEQ ID NO: 15958 - DNA, 20 bp, synthetic construct
  misc_feature 1..20: note = chemically synthesized
  source 1..20: mol_type = other DNA
taaggaagcctcggagctgg

SEQ ID NO: 15959 - DNA, 20 bp, synthetic construct
  misc_feature 1..20: note = chemically synthesized
  source 1..20: mol_type = other DNA
gaagaacatggaggcccggg

SEQ ID NO: 15960 - DNA, 20 bp, synthetic construct
  misc_feature 1..20: note = chemically synthesized
  source 1..20: mol_type = other DNA
cacttgcccaaagctacaca

SEQ ID NO: 15961 - DNA, 20 bp, synthetic construct
  misc_feature 1..20: note = chemically synthesized
  source 1..20: mol_type = other DNA
gtgccttgatgttcagtctg

SEQ ID NO: 15962 - DNA, 20 bp, synthetic construct
  misc_feature 1..20: note = chemically synthesized
  source 1..20: mol_type = other DNA
gccacgccacctccccaggg

SEQ ID NO: 15963 - DNA, 20 bp, synthetic construct
  misc_feature 1..20: note = chemically synthesized
  source 1..20: mol_type = other DNA
ggtccagaggcatggggacc

SEQ ID NO: 15964 - DNA, 20 bp, synthetic construct
  misc_feature 1..20: note = chemically synthesized
  source 1..20: mol_type = other DNA
aacagaggtgccatgcagcc

SEQ ID NO: 15965 - DNA, 20 bp, synthetic construct
  misc_feature 1..20: note = chemically synthesized
  source 1..20: mol_type = other DNA
tggtgggactgggctggggg

SEQ ID NO: 15966 - DNA, 20 bp, synthetic construct
  misc_feature 1..20: note = chemically synthesized
  source 1..20: mol_type = other DNA
gcgccaggagggcaacaaca

SEQ ID NO: 15967 - DNA, 20 bp, synthetic construct
  misc_feature 1..20: note = chemically synthesized
  source 1..20: mol_type = other DNA
cccctaaggtagaaccttag

SEQ ID NO: 15968 - DNA, 20 bp, synthetic construct
  misc_feature 1..20: note = chemically synthesized
  source 1..20: mol_type = other DNA
ccttagctgggtctgccaga

SEQ ID NO: 15969 - DNA, 20 bp, synthetic construct
  misc_feature 1..20: note = chemically synthesized
  source 1..20: mol_type = other DNA
agggggactggtgaggggcg

SEQ ID NO: 15970 - DNA, 20 bp, synthetic construct
  misc_feature 1..20: note = chemically synthesized
  source 1..20: mol_type = other DNA
ggatcgaggcccaaagggag

SEQ ID NO: 15971 - DNA, 20 bp, synthetic construct
  misc_feature 1..20: note = chemically synthesized
  source 1..20: mol_type = other DNA
gaggcccaaagggaggtggg

SEQ ID NO: 15972 - DNA, 20 bp, synthetic construct
  misc_feature 1..20: note = chemically synthesized
  source 1..20: mol_type = other DNA
agccaacatgctgtgtgtct

SEQ ID NO: 15973 - DNA, 20 bp, synthetic construct
  misc_feature 1..20: note = chemically synthesized
  source 1..20: mol_type = other DNA
caggcctcagtttccctgtc

SEQ ID NO: 15974 - DNA, 20 bp, synthetic construct
  misc_feature 1..20: note = chemically synthesized
  source 1..20: mol_type = other DNA
ttcctccagccctaagcctg

SEQ ID NO: 15975 - DNA, 20 bp, synthetic construct
  misc_feature 1..20: note = chemically synthesized
  source 1..20: mol_type = other DNA
atgttcttcaggttatgatg

SEQ ID NO: 15976 - DNA, 20 bp, synthetic construct
  misc_feature 1..20: note = chemically synthesized
  source 1..20: mol_type = other DNA
tacctggagcagctgcctct

SEQ ID NO: 15977 - DNA, 20 bp, synthetic construct
  misc_feature 1..20: note = chemically synthesized
  source 1..20: mol_type = other DNA
tgaactgagcagacaggcag

SEQ ID NO: 15978 - DNA, 20 bp, synthetic construct
  misc_feature 1..20: note = chemically synthesized
  source 1..20: mol_type = other DNA
gtggagatgagggcctgagg

SEQ ID NO: 15979 - DNA, 20 bp, synthetic construct
  misc_feature 1..20: note = chemically synthesized
  source 1..20: mol_type = other DNA
cagatgcagcaagcgggcgg

SEQ ID NO: 15980 - DNA, 20 bp, synthetic construct
  misc_feature 1..20: note = chemically synthesized
  source 1..20: mol_type = other DNA
gttgggaaatccctaggaga

SEQ ID NO: 15981 - DNA, 20 bp, synthetic construct
  misc_feature 1..20: note = chemically synthesized
  source 1..20: mol_type = other DNA
aaactgaggcctggagaggg

SEQ ID NO: 15982 - DNA, 20 bp, synthetic construct
  misc_feature 1..20: note = chemically synthesized
  source 1..20: mol_type = other DNA
agggaggtgggtgggatgga

SEQ ID NO: 15983 - DNA, 20 bp, synthetic construct
  misc_feature 1..20: note = chemically synthesized
  source 1..20: mol_type = other DNA
cttcctccagccctaagcct

SEQ ID NO: 15984 - DNA, 20 bp, synthetic construct
  misc_feature 1..20: note = chemically synthesized
  source 1..20: mol_type = other DNA
ctgctgccctggagatgata

SEQ ID NO: 15985 - DNA, 20 bp, synthetic construct
  misc_feature 1..20: note = chemically synthesized
  source 1..20: mol_type = other DNA
gaggtgggtgggatggagca

SEQ ID NO: 15986 - DNA, 20 bp, synthetic construct
  misc_feature 1..20: note = chemically synthesized
  source 1..20: mol_type = other DNA
agggatttcccaactctccc

SEQ ID NO: 15987 - DNA, 20 bp, synthetic construct
  misc_feature 1..20: note = chemically synthesized
  source 1..20: mol_type = other DNA
gcaggttcccccctcattct

SEQ ID NO: 15988 - DNA, 20 bp, synthetic construct
  misc_feature 1..20: note = chemically synthesized
  source 1..20: mol_type = other DNA
gtgccttgatgttcagtctg

SEQ ID NO: 15989 - DNA, 20 bp, synthetic construct
  misc_feature 1..20: note = chemically synthesized
  source 1..20: mol_type = other DNA
gcccccagcccagtcccacc

SEQ ID NO: 15990 - DNA, 20 bp, synthetic construct
  misc_feature 1..20: note = chemically synthesized
  source 1..20: mol_type = other DNA
ccaacatgctgtgtgtcttt

SEQ ID NO: 15991 - DNA, 20 bp, synthetic construct
  misc_feature 1..20: note = chemically synthesized
  source 1..20: mol_type = other DNA
atttctggccctctccaggc

SEQ ID NO: 15992 - DNA, 20 bp, synthetic construct
  misc_feature 1..20: note = chemically synthesized
  source 1..20: mol_type = other DNA
tggggtaggactgggctgtc

SEQ ID NO: 15993 - DNA, 20 bp, synthetic construct
  misc_feature 1..20: note = chemically synthesized
  source 1..20: mol_type = other DNA
acttccagccccaccccctg

SEQ ID NO: 15994 - DNA, 20 bp, synthetic construct
  misc_feature 1..20: note = chemically synthesized
  source 1..20: mol_type = other DNA
ggggggcacccgtccagctc

SEQ ID NO: 15995 - DNA, 20 bp, synthetic construct
  misc_feature 1..20: note = chemically synthesized
  source 1..20: mol_type = other DNA
gaggcttccttagctctagc

SEQ ID NO: 15996 - DNA, 20 bp, synthetic construct
  misc_feature 1..20: note = chemically synthesized
  source 1..20: mol_type = other DNA
tagctctagcaagtgcttct

SEQ ID NO: 15997 - DNA, 20 bp, synthetic construct
  misc_feature 1..20: note = chemically synthesized
  source 1..20: mol_type = other DNA
agacaggcaggagggttctg

SEQ ID NO: 15998 - DNA, 22 bp, synthetic construct
  misc_feature 1..22: note = chemically synthesized
  source 1..22: mol_type = other DNA
agtctcctagggatttcccaac

SEQ ID NO: 15999 - DNA, 22 bp, synthetic construct
  misc_feature 1..22: note = chemically synthesized
  source 1..22: mol_type = other DNA
ctagggatttcccaactctccc

SEQ ID NO: 16000 - DNA, 22 bp, synthetic construct
  misc_feature 1..22: note = chemically synthesized
  source 1..22: mol_type = other DNA
gggatttcccaactctcccgcc

SEQ ID NO: 16001 - DNA, 22 bp, synthetic construct
  misc_feature 1..22: note = chemically synthesized
  source 1..22: mol_type = other DNA
cccaactctcccgcccgcttgc

SEQ ID NO: 16002 - DNA, 22 bp, synthetic construct
  misc_feature 1..22: note = chemically synthesized
  source 1..22: mol_type = other DNA
ccaactctcccgcccgcttgct

SEQ ID NO: 16003 - DNA, 22 bp, synthetic construct
  misc_feature 1..22: note = chemically synthesized
  source 1..22: mol_type = other DNA
tcccgcccgcttgctgcatctg

SEQ ID NO: 16004 - DNA, 22 bp, synthetic construct
  misc_feature 1..22: note = chemically synthesized
  source 1..22: mol_type = other DNA
ccgcccgcttgctgcatctgga

SEQ ID NO: 16005 - DNA, 22 bp, synthetic construct
  misc_feature 1..22: note = chemically synthesized
  source 1..22: mol_type = other DNA
gctgcatctggacaccctgcct

SEQ ID NO: 16006 - DNA, 22 bp, synthetic construct
  misc_feature 1..22: note = chemically synthesized
  source 1..22: mol_type = other DNA
ctgcatctggacaccctgcctc

SEQ ID NO: 16007 - DNA, 22 bp, synthetic construct
  misc_feature 1..22: note = chemically synthesized
  source 1..22: mol_type = other DNA
catctggacaccctgcctcagg

SEQ ID NO: 16008 - DNA, 22 bp, synthetic construct
  misc_feature 1..22: note = chemically synthesized
  source 1..22: mol_type = other DNA
gacaccctgcctcaggccctca

SEQ ID NO: 16009 - DNA, 22 bp, synthetic construct
  misc_feature 1..22: note = chemically synthesized
  source 1..22: mol_type = other DNA
cctcaggccctcatctccactg

SEQ ID NO: 16010 - DNA, 22 bp, synthetic construct
  misc_feature 1..22: note = chemically synthesized
  source 1..22: mol_type = other DNA
aggccctcatctccactggtca

SEQ ID NO: 16011 - DNA, 22 bp, synthetic construct
  misc_feature 1..22: note = chemically synthesized
  source 1..22: mol_type = other DNA
atctccactggtcagcaggtga

SEQ ID NO: 16012 - DNA, 22 bp, synthetic construct
  misc_feature 1..22: note = chemically synthesized
  source 1..22: mol_type = other DNA
cactggtcagcaggtgaccttt

SEQ ID NO: 16013 - DNA, 22 bp, synthetic construct
  misc_feature 1..22: note = chemically synthesized
  source 1..22: mol_type = other DNA
gtcagcaggtgacctttgccca

SEQ ID NO: 16014 - DNA, 22 bp, synthetic construct
  misc_feature 1..22: note = chemically synthesized
  source 1..22: mol_type = other DNA
tgcccagcgccctgggtcctca

SEQ ID NO: 16015 - DNA, 22 bp, synthetic construct
  misc_feature 1..22: note = chemically synthesized
  source 1..22: mol_type = other DNA
gcccagcgccctgggtcctcag

SEQ ID NO: 16016 - DNA, 22 bp, synthetic construct
  misc_feature 1..22: note = chemically synthesized
  source 1..22: mol_type = other DNA
cccagcgccctgggtcctcagt

SEQ ID NO: 16017 - DNA, 22 bp, synthetic construct
  misc_feature 1..22: note = chemically synthesized
  source 1..22: mol_type = other DNA
ggtcctcagtgcctgctgccct

SEQ ID NO: 16018 - DNA, 22 bp, synthetic construct
  misc_feature 1..22: note = chemically synthesized
  source 1..22: mol_type = other DNA
agtgcctgctgccctggagatg

SEQ ID NO: 16019 - DNA, 22 bp, synthetic construct
  misc_feature 1..22: note = chemically synthesized
  source 1..22: mol_type = other DNA
ctgccctggagatgatataaaa

SEQ ID NO: 16020 - DNA, 22 bp, synthetic construct
  misc_feature 1..22: note = chemically synthesized
  source 1..22: mol_type = other DNA
ccctggagatgatataaaacag

SEQ ID NO: 16021 - DNA, 22 bp, synthetic construct
  misc_feature 1..22: note = chemically synthesized
  source 1..22: mol_type = other DNA
gagatgatataaaacaggtcag

SEQ ID NO: 16022 - DNA, 22 bp, synthetic construct
  misc_feature 1..22: note = chemically synthesized
  source 1..22: mol_type = other DNA
ctgcctgtctgctcagttcatc

SEQ ID NO: 16023 - DNA, 22 bp, synthetic construct
  misc_feature 1..22: note = chemically synthesized
  source 1..22: mol_type = other DNA
cctgtctgctcagttcatccct

SEQ ID NO: 16024 - DNA, 22 bp, synthetic construct
  misc_feature 1..22: note = chemically synthesized
  source 1..22: mol_type = other DNA
tctgctcagttcatccctagag

SEQ ID NO: 16025 - DNA, 22 bp, synthetic construct
  misc_feature 1..22: note = chemically synthesized
  source 1..22: mol_type = other DNA
ctcagttcatccctagaggcag

SEQ ID NO: 16026 - DNA, 22 bp, synthetic construct
  misc_feature 1..22: note = chemically synthesized
  source 1..22: mol_type = other DNA
agttcatccctagaggcagctg

SEQ ID NO: 16027 - DNA, 22 bp, synthetic construct
  misc_feature 1..22: note = chemically synthesized
  source 1..22: mol_type = other DNA
atccctagaggcagctgctcca

SEQ ID NO: 16028 - DNA, 22 bp, synthetic construct
  misc_feature 1..22: note = chemically synthesized
  source 1..22: mol_type = other DNA
gaggcagctgctccaggtaatg

SEQ ID NO: 16029 - DNA, 22 bp, synthetic construct
  misc_feature 1..22: note = chemically synthesized
  source 1..22: mol_type = other DNA
ctccaggtaatgccctctgggg

SEQ ID NO: 16030 - DNA, 22 bp, synthetic construct
  misc_feature 1..22: note = chemically synthesized
  source 1..22: mol_type = other DNA
caggtaatgccctctggggagg

SEQ ID NO: 16031 - DNA, 22 bp, synthetic construct
  misc_feature 1..22: note = chemically synthesized
  source 1..22: mol_type = other DNA
tggggaggggaaagaggagggg

SEQ ID NO: 16032 - DNA, 22 bp, synthetic construct
  misc_feature 1..22: note = chemically synthesized
  source 1..22: mol_type = other DNA
gggaggggaaagaggaggggag

SEQ ID NO: 16033 - DNA, 22 bp, synthetic construct
  misc_feature 1..22: note = chemically synthesized
  source 1..22: mol_type = other DNA
cctgcccagcccagccagcaag

SEQ ID NO: 16034 - DNA, 22 bp, synthetic construct
  misc_feature 1..22: note = chemically synthesized
  source 1..22: mol_type = other DNA
cccagcccagccagcaagcctg

SEQ ID NO: 16035 - DNA, 22 bp, synthetic construct
  misc_feature 1..22: note = chemically synthesized
  source 1..22: mol_type = other DNA
gagaagcacttgctagagctaa

SEQ ID NO: 16036 - DNA, 22 bp, synthetic construct
  misc_feature 1..22: note = chemically synthesized
  source 1..22: mol_type = other DNA
gctagagctaaggaagcctcgg

SEQ ID NO: 16037 - DNA, 22 bp, synthetic construct
  misc_feature 1..22: note = chemically synthesized
  source 1..22: mol_type = other DNA
ctagagctaaggaagcctcgga

SEQ ID NO: 16038 - DNA, 22 bp, synthetic construct
  misc_feature 1..22: note = chemically synthesized
  source 1..22: mol_type = other DNA
gagctaaggaagcctcggagct

SEQ ID NO: 16039 - DNA, 22 bp, synthetic construct
  misc_feature 1..22: note = chemically synthesized
  source 1..22: mol_type = other DNA
aggaagcctcggagctggacgg

SEQ ID NO: 16040 - DNA, 22 bp, synthetic construct
  misc_feature 1..22: note = chemically synthesized
  source 1..22: mol_type = other DNA
ggagctggacgggtgcccccca

SEQ ID NO: 16041 - DNA, 22 bp, synthetic construct
  misc_feature 1..22: note = chemically synthesized
  source 1..22: mol_type = other DNA
gacgggtgccccccacccctca

SEQ ID NO: 16042 - DNA, 22 bp, synthetic construct
  misc_feature 1..22: note = chemically synthesized
  source 1..22: mol_type = other DNA
atcataacctgaagaacatgga

SEQ ID NO: 16043 - DNA, 22 bp, synthetic construct
  misc_feature 1..22: note = chemically synthesized
  source 1..22: mol_type = other DNA
aagaacatggaggcccgggagg

SEQ ID NO: 16044 - DNA, 22 bp, synthetic construct
  misc_feature 1..22: note = chemically synthesized
  source 1..22: mol_type = other DNA
gcccaaagctacacagggggtg

SEQ ID NO: 16045 - DNA, 22 bp, synthetic construct
  misc_feature 1..22: note = chemically synthesized
  source 1..22: mol_type = other DNA
cccaaagctacacagggggtgg

SEQ ID NO: 16046 - DNA, 22 bp, synthetic construct
  misc_feature 1..22: note = chemically synthesized
  source 1..22: mol_type = other DNA
cacagggggtggggctggaagt

SEQ ID NO: 16047 - DNA, 22 bp, synthetic construct
  misc_feature 1..22: note = chemically synthesized
  source 1..22: mol_type = other DNA
gaagtggctccaagtgcaggtt

SEQ ID NO: 16048 - DNA, 22 bp, synthetic construct
  misc_feature 1..22: note = chemically synthesized
  source 1..22: mol_type = other DNA
caagtgcaggttcccccctcat

SEQ ID NO: 16049 - DNA, 22 bp, synthetic construct
  misc_feature 1..22: note = chemically synthesized
  source 1..22: mol_type = other DNA
ccccctcattcttcaggcttag

SEQ ID NO: 16050 - DNA, 22 bp, synthetic construct
  misc_feature 1..22: note = chemically synthesized
  source 1..22: mol_type = other DNA
attcttcaggcttagggctgga

SEQ ID NO: 16051 - DNA, 22 bp, synthetic construct
  misc_feature 1..22: note = chemically synthesized
  source 1..22: mol_type = other DNA
ttcaggcttagggctggaggaa

SEQ ID NO: 16052 - DNA, 22 bp, synthetic construct
  misc_feature 1..22: note = chemically synthesized
  source 1..22: mol_type = other DNA
caggcttagggctggaggaagc

SEQ ID NO: 16053 - DNA, 22 bp, synthetic construct
  misc_feature 1..22: note = chemically synthesized
  source 1..22: mol_type = other DNA
aggcttagggctggaggaagcc

SEQ ID NO: 16054 - DNA, 22 bp, synthetic construct
  misc_feature 1..22: note = chemically synthesized
  source 1..22: mol_type = other DNA
agggctggaggaagccttagac

SEQ ID NO: 16055 - DNA, 22 bp, synthetic construct
  misc_feature 1..22: note = chemically synthesized
  source 1..22: mol_type = other DNA
gggctggaggaagccttagaca

SEQ ID NO: 16056 - DNA, 22 bp, synthetic construct
  misc_feature 1..22: note = chemically synthesized
  source 1..22: mol_type = other DNA
gaggaagccttagacagcccag

SEQ ID NO: 16057 - DNA, 22 bp, synthetic construct
  misc_feature 1..22: note = chemically synthesized
  source 1..22: mol_type = other DNA
agacagcccagtcctaccccag

SEQ ID NO: 16058 - DNA, 22 bp, synthetic construct
  misc_feature 1..22: note = chemically synthesized
  source 1..22: mol_type = other DNA
gacagcccagtcctaccccaga

SEQ ID NO: 16059 - DNA, 22 bp, synthetic construct
  misc_feature 1..22: note = chemically synthesized
  source 1..22: mol_type = other DNA
ccccagacagggaaactgaggc

SEQ ID NO: 16060 - DNA, 22 bp, synthetic construct
  misc_feature 1..22: note = chemically synthesized
  source 1..22: mol_type = other DNA
aggcctggagagggccagaaat

SEQ ID NO: 16061 - DNA, 22 bp, synthetic construct
  misc_feature 1..22: note = chemically synthesized
  source 1..22: mol_type = other DNA
gagagggccagaaatcacccaa

SEQ ID NO: 16062 - DNA, 22 bp, synthetic construct
  misc_feature 1..22: note = chemically synthesized
  source 1..22: mol_type = other DNA
gctggactggacggagatcagt

SEQ ID NO: 16063 - DNA, 22 bp, synthetic construct
  misc_feature 1..22: note = chemically synthesized
  source 1..22: mol_type = other DNA
gactggacggagatcagtccag

SEQ ID NO: 16064 - DNA, 22 bp, synthetic construct
  misc_feature 1..22: note = chemically synthesized
  source 1..22: mol_type = other DNA
gacggagatcagtccagaccgc

SEQ ID NO: 16065 - DNA, 22 bp, synthetic construct
  misc_feature 1..22: note = chemically synthesized
  source 1..22: mol_type = other DNA
gatgttcagtctggtgggtttt

SEQ ID NO: 16066 - DNA, 22 bp, synthetic construct
  misc_feature 1..22: note = chemically synthesized
  source 1..22: mol_type = other DNA
atgttcagtctggtgggttttc

SEQ ID NO: 16067 - DNA, 22 bp, synthetic construct
  misc_feature 1..22: note = chemically synthesized
  source 1..22: mol_type = other DNA
agtctggtgggttttctgctcc

SEQ ID NO: 16068 - DNA, 22 bp, synthetic construct
  misc_feature 1..22: note = chemically synthesized
  source 1..22: mol_type = other DNA
gtgggttttctgctccatccca

SEQ ID NO: 16069 - DNA, 22 bp, synthetic construct
  misc_feature 1..22: note = chemically synthesized
  source 1..22: mol_type = other DNA
tctgctccatcccacccacctc

SEQ ID NO: 16070 - DNA, 22 bp, synthetic construct
  misc_feature 1..22: note = chemically synthesized
  source 1..22: mol_type = other DNA
ctgctccatcccacccacctcc

SEQ ID NO: 16071 - DNA, 22 bp, synthetic construct
  misc_feature 1..22: note = chemically synthesized
  source 1..22: mol_type = other DNA
tgctccatcccacccacctccc

SEQ ID NO: 16072 - DNA, 22 bp, synthetic construct
  misc_feature 1..22: note = chemically synthesized
  source 1..22: mol_type = other DNA
ctccatcccacccacctccctt

SEQ ID NO: 16073 - DNA, 22 bp, synthetic construct
  misc_feature 1..22: note = chemically synthesized
  source 1..22: mol_type = other DNA
catcccacccacctccctttgg

SEQ ID NO: 16074 - DNA, 22 bp, synthetic construct
  misc_feature 1..22: note = chemically synthesized
  source 1..22: mol_type = other DNA
cctttgggcctcgatccctcgc

SEQ ID NO: 16075 - DNA, 22 bp, synthetic construct
  misc_feature 1..22: note = chemically synthesized
  source 1..22: mol_type = other DNA
tgggcctcgatccctcgcccct

SEQ ID NO: 16076 - DNA, 22 bp, synthetic construct
  misc_feature 1..22: note = chemically synthesized
  source 1..22: mol_type = other DNA
gggcctcgatccctcgcccctc

SEQ ID NO: 16077 - DNA, 22 bp, synthetic construct
  misc_feature 1..22: note = chemically synthesized
  source 1..22: mol_type = other DNA
ggcctcgatccctcgcccctca

SEQ ID NO: 16078 - DNA, 22 bp, synthetic construct
  misc_feature 1..22: note = chemically synthesized
  source 1..22: mol_type = other DNA
gatccctcgcccctcaccagtc

SEQ ID NO: 16079 - DNA, 22 bp, synthetic construct
  misc_feature 1..22: note = chemically synthesized
  source 1..22: mol_type = other DNA
gcccctcaccagtcccccttct

SEQ ID NO: 16080 - DNA, 22 bp, synthetic construct
  misc_feature 1..22: note = chemically synthesized
  source 1..22: mol_type = other DNA
accagtcccccttctgagagcc

SEQ ID NO: 16081 - DNA, 22 bp, synthetic construct
  misc_feature 1..22: note = chemically synthesized
  source 1..22: mol_type = other DNA
ctgagagcccgtattagcaggg

SEQ ID NO: 16082 - DNA, 22 bp, synthetic construct
  misc_feature 1..22: note = chemically synthesized
  source 1..22: mol_type = other DNA
tgagagcccgtattagcaggga

SEQ ID NO: 16083 - DNA, 22 bp, synthetic construct
  misc_feature 1..22: note = chemically synthesized
  source 1..22: mol_type = other DNA
agagcccgtattagcagggagc

SEQ ID NO: 16084 - DNA, 22 bp, synthetic construct
  misc_feature 1..22: note = chemically synthesized
  source 1..22: mol_type = other DNA
gcagggagccggcccctactcc

SEQ ID NO: 16085 - DNA, 22 bp, synthetic construct
  misc_feature 1..22: note = chemically synthesized
  source 1..22: mol_type = other DNA
ctccttctggcagacccagcta

SEQ ID NO: 16086 - DNA, 22 bp, synthetic construct
  misc_feature 1..22: note = chemically synthesized
  source 1..22: mol_type = other DNA
cttctggcagacccagctaagg

SEQ ID NO: 16087 - DNA, 22 bp, synthetic construct
  misc_feature 1..22: note = chemically synthesized
  source 1..22: mol_type = other DNA
ctggcagacccagctaaggttc

SEQ ID NO: 16088 - DNA, 22 bp, synthetic construct
  misc_feature 1..22: note = chemically synthesized
  source 1..22: mol_type = other DNA
tggcagacccagctaaggttct

SEQ ID NO: 16089 - DNA, 22 bp, synthetic construct
  misc_feature 1..22: note = chemically synthesized
  source 1..22: mol_type = other DNA
gcagacccagctaaggttctac

SEQ ID NO: 16090 - DNA, 22 bp, synthetic construct
  misc_feature 1..22: note = chemically synthesized
  source 1..22: mol_type = other DNA
aggttctaccttaggggccacg

SEQ ID NO: 16091 - DNA, 22 bp, synthetic construct
  misc_feature 1..22: note = chemically synthesized
  source 1..22: mol_type = other DNA
taccttaggggccacgccacct

SEQ ID NO: 16092 - DNA, 22 bp, synthetic construct
  misc_feature 1..22: note = chemically synthesized
  source 1..22: mol_type = other DNA
ccttaggggccacgccacctcc

SEQ ID NO: 16093 - DNA, 22 bp, synthetic construct
  misc_feature 1..22: note = chemically synthesized
  source 1..22: mol_type = other DNA
aggggccacgccacctccccag

SEQ ID NO: 16094 - DNA, 22 bp, synthetic construct
  misc_feature 1..22: note = chemically synthesized
  source 1..22: mol_type = other DNA
ggggccacgccacctccccagg

SEQ ID NO: 16095 - DNA, 22 bp, synthetic construct
  misc_feature 1..22: note = chemically synthesized
  source 1..22: mol_type = other DNA
cccagggaggggtccagaggca

SEQ ID NO: 16096 - DNA, 22 bp, synthetic construct
  misc_feature 1..22: note = chemically synthesized
  source 1..22: mol_type = other DNA
gggtgcccctcacaggacactt

SEQ ID NO: 16097 - DNA, 22 bp, synthetic construct
  misc_feature 1..22: note = chemically synthesized
  source 1..22: mol_type = other DNA
acaggacacttccttgcaggaa

SEQ ID NO: 16098 - DNA, 22 bp, synthetic construct
  misc_feature 1..22: note = chemically synthesized
  source 1..22: mol_type = other DNA
ccttgcaggaacagaggtgcca

SEQ ID NO: 16099 - DNA, 22 bp, synthetic construct
  misc_feature 1..22: note = chemically synthesized
  source 1..22: mol_type = other DNA
cttgcaggaacagaggtgccat

SEQ ID NO: 16100 - DNA, 22 bp, synthetic construct
  misc_feature 1..22: note = chemically synthesized
  source 1..22: mol_type = other DNA
gcaggaacagaggtgccatgca

SEQ ID NO: 16101 - DNA, 22 bp, synthetic construct
  misc_feature 1..22: note = chemically synthesized
  source 1..22: mol_type = other DNA
caggaacagaggtgccatgcag

SEQ ID NO: 16102 - DNA, 22 bp, synthetic construct
  misc_feature 1..22: note = chemically synthesized
  source 1..22: mol_type = other DNA
cttgttgttgccctcctggcgc

SEQ ID NO: 16103 - DNA, 22 bp, synthetic construct
  misc_feature 1..22: note = chemically synthesized
  source 1..22: mol_type = other DNA
gttgttgccctcctggcgctcc

SEQ ID NO: 16104 - DNA, 22 bp, synthetic construct
  misc_feature 1..22: note = chemically synthesized
  source 1..22: mol_type = other DNA
ttgttgccctcctggcgctcct

SEQ ID NO: 16105 - DNA, 22 bp, synthetic construct
  misc_feature 1..22: note = chemically synthesized
  source 1..22: mol_type = other DNA
ttgccctcctggcgctcctggc

SEQ ID NO: 16106 - DNA, 22 bp, synthetic construct
  misc_feature 1..22: note = chemically synthesized
  source 1..22: mol_type = other DNA
ccctcctggcgctcctggcctc

SEQ ID NO: 16107 - DNA, 22 bp, synthetic construct
  misc_feature 1..22: note = chemically synthesized
  source 1..22: mol_type = other DNA
ctggcgctcctggcctctgccc

SEQ ID NO: 16108 - DNA, 22 bp, synthetic construct
  misc_feature 1..22: note = chemically synthesized
  source 1..22: mol_type = other DNA
gcgctcctggcctctgcccgta

SEQ ID NO: 16109 - DNA, 22 bp, synthetic construct
  misc_feature 1..22: note = chemically synthesized
  source 1..22: mol_type = other DNA
ctggcctctgcccgtaagcact

SEQ ID NO: 16110 - DNA, 22 bp, synthetic construct
  misc_feature 1..22: note = chemically synthesized
  source 1..22: mol_type = other DNA
gcctctgcccgtaagcacttgg

SEQ ID NO: 16111 - DNA, 22 bp, synthetic construct
  misc_feature 1..22: note = chemically synthesized
  source 1..22: mol_type = other DNA
tgcccgtaagcacttggtggga

SEQ ID NO: 16112 - DNA, 22 bp, synthetic construct
  misc_feature 1..22: note = chemically synthesized
  source 1..22: mol_type = other DNA
cccgtaagcacttggtgggact

SEQ ID NO: 16113 - DNA, 22 bp, synthetic construct
  misc_feature 1..22: note = chemically synthesized
  source 1..22: mol_type = other DNA
ggtgggactgggctgggggcag

SEQ ID NO: 16114 - DNA, 22 bp, synthetic construct
  misc_feature 1..22: note = chemically synthesized
  source 1..22: mol_type = other DNA
gtgggactgggctgggggcagg

SEQ ID NO: 16115 - DNA, 22 bp, synthetic construct
  misc_feature 1..22: note = chemically synthesized
  source 1..22: mol_type = other DNA
cccccagcccagtcccaccaag

SEQ ID NO: 16116 - DNA, 22 bp, synthetic construct
  misc_feature 1..22: note = chemically synthesized
  source 1..22: mol_type = other DNA
acgggcagaggccaggagcgcc

SEQ ID NO: 16117 - DNA, 22 bp, synthetic construct
  misc_feature 1..22: note = chemically synthesized
  source 1..22: mol_type = other DNA
cgggcagaggccaggagcgcca

SEQ ID NO: 16118 - DNA, 22 bp, synthetic construct
  misc_feature 1..22: note = chemically synthesized
  source 1..22: mol_type = other DNA
catggcacctctgttcctgcaa

SEQ ID NO: 16119 - DNA, 22 bp, synthetic construct
  misc_feature 1..22: note = chemically synthesized
  source 1..22: mol_type = other DNA
tgttcctgcaaggaagtgtcct

SEQ ID NO: 16120 - DNA, 22 bp, synthetic construct
  misc_feature 1..22: note = chemically synthesized
  source 1..22: mol_type = other DNA
ttcctgcaaggaagtgtcctgt

SEQ ID NO: 16121 - DNA, 22 bp, synthetic construct
  misc_feature 1..22: note = chemically synthesized
  source 1..22: mol_type = other DNA
ctgcaaggaagtgtcctgtgag

SEQ ID NO: 16122 - DNA, 22 bp, synthetic construct
  misc_feature 1..22: note = chemically synthesized
  source 1..22: mol_type = other DNA
caaggaagtgtcctgtgagggg

SEQ ID NO: 16123 - DNA, 22 bp, synthetic construct
  misc_feature 1..22: note = chemically synthesized
  source 1..22: mol_type = other DNA
tgaggggcaccccaggtcccca

SEQ ID NO: 16124 - DNA, 22 bp, synthetic construct
  misc_feature 1..22: note = chemically synthesized
  source 1..22: mol_type = other DNA
tggacccctccctggggaggtg

SEQ ID NO: 16125 - DNA, 22 bp, synthetic construct
  misc_feature 1..22: note = chemically synthesized
  source 1..22: mol_type = other DNA
gacccctccctggggaggtggc

SEQ ID NO: 16126 - DNA, 22 bp, synthetic construct
  misc_feature 1..22: note = chemically synthesized
  source 1..22: mol_type = other DNA
cctggggaggtggcgtggcccc

SEQ ID NO: 16127 - DNA, 22 bp, synthetic construct
  misc_feature 1..22: note = chemically synthesized
  source 1..22: mol_type = other DNA
gggaggtggcgtggcccctaag

SEQ ID NO: 16128 - DNA, 22 bp, synthetic construct
  misc_feature 1..22: note = chemically synthesized
  source 1..22: mol_type = other DNA
aggtagaaccttagctgggtct

SEQ ID NO: 16129 - DNA, 22 bp, synthetic construct
  misc_feature 1..22: note = chemically synthesized
  source 1..22: mol_type = other DNA
agctgggtctgccagaaggagt

SEQ ID NO: 16130 - DNA, 22 bp, synthetic construct
  misc_feature 1..22: note = chemically synthesized
  source 1..22: mol_type = other DNA
gctgggtctgccagaaggagta

SEQ ID NO: 16131 - DNA, 22 bp, synthetic construct
  misc_feature 1..22: note = chemically synthesized
  source 1..22: mol_type = other DNA
ggtctgccagaaggagtagggg

SEQ ID NO: 16132 - DNA, 22 bp, synthetic construct
  misc_feature 1..22: note = chemically synthesized
  source 1..22: mol_type = other DNA
ccagaaggagtaggggccggct

SEQ ID NO: 16133 - DNA, 22 bp, synthetic construct
  misc_feature 1..22: note = chemically synthesized
  source 1..22: mol_type = other DNA
cctgctaatacgggctctcaga

SEQ ID NO: 16134 - DNA, 22 bp, synthetic construct
  misc_feature 1..22: note = chemically synthesized
  source 1..22: mol_type = other DNA
ctaatacgggctctcagaaggg

SEQ ID NO: 16135 - DNA, 22 bp, synthetic construct
  misc_feature 1..22: note = chemically synthesized
  source 1..22: mol_type = other DNA
atacgggctctcagaaggggga

SEQ ID NO: 16136 - DNA, 22 bp, synthetic construct
  misc_feature 1..22: note = chemically synthesized
  source 1..22: mol_type = other DNA
tcagaagggggactggtgaggg

SEQ ID NO: 16137 - DNA, 22 bp, synthetic construct
  misc_feature 1..22: note = chemically synthesized
  source 1..22: mol_type = other DNA
agaagggggactggtgaggggc

SEQ ID NO: 16138 - DNA, 22 bp, synthetic construct
  misc_feature 1..22: note = chemically synthesized
  source 1..22: mol_type = other DNA
gtgaggggcgagggatcgaggc

SEQ ID NO: 16139 - DNA, 22 bp, synthetic construct
  misc_feature 1..22: note = chemically synthesized
  source 1..22: mol_type = other DNA
aacatcaaggcacctgcggtct

SEQ ID NO: 16140 - DNA, 22 bp, synthetic construct
  misc_feature 1..22: note = chemically synthesized
  source 1..22: mol_type = other DNA
cggtctggactgatctccgtcc

SEQ ID NO: 16141 - DNA, 22 bp, synthetic construct
  misc_feature 1..22: note = chemically synthesized
  source 1..22: mol_type = other DNA
gactgatctccgtccagtccag

SEQ ID NO: 16142 - DNA, 22 bp, synthetic construct
  misc_feature 1..22: note = chemically synthesized
  source 1..22: mol_type = other DNA
atctccgtccagtccagccaac

SEQ ID NO: 16143 - DNA, 22 bp, synthetic construct
  misc_feature 1..22: note = chemically synthesized
  source 1..22: mol_type = other DNA
cgtccagtccagccaacatgct

SEQ ID NO: 16144 - DNA, 22 bp, synthetic construct
  misc_feature 1..22: note = chemically synthesized
  source 1..22: mol_type = other DNA
tgtgtctttgggtgatttctgg

SEQ ID NO: 16145 - DNA, 22 bp, synthetic construct
  misc_feature 1..22: note = chemically synthesized
  source 1..22: mol_type = other DNA
tgggtgatttctggccctctcc

SEQ ID NO: 16146 - DNA, 22 bp, synthetic construct
  misc_feature 1..22: note = chemically synthesized
  source 1..22: mol_type = other DNA
gggtgatttctggccctctcca

SEQ ID NO: 16147 - DNA, 22 bp, synthetic construct
  misc_feature 1..22: note = chemically synthesized
  source 1..22: mol_type = other DNA
ggtgatttctggccctctccag

SEQ ID NO: 16148 - DNA, 22 bp, synthetic construct
  misc_feature 1..22: note = chemically synthesized
  source 1..22: mol_type = other DNA
ctggccctctccaggcctcagt

SEQ ID NO: 16149 - DNA, 22 bp, synthetic construct
  misc_feature 1..22: note = chemically synthesized
  source 1..22: mol_type = other DNA
tggccctctccaggcctcagtt

SEQ ID NO: 16150 - DNA, 22 bp, synthetic construct
  misc_feature 1..22: note = chemically synthesized
  source 1..22: mol_type = other DNA
gccctctccaggcctcagtttc

SEQ ID NO: 16151 - DNA, 22 bp, synthetic construct
  misc_feature 1..22: note = chemically synthesized
  source 1..22: mol_type = other DNA
tccaggcctcagtttccctgtc

SEQ ID NO: 16152 - DNA, 22 bp, synthetic construct
  misc_feature 1..22: note = chemically synthesized
  source 1..22: mol_type = other DNA
caggcctcagtttccctgtctg

SEQ ID NO: 16153 - DNA, 22 bp, synthetic construct
  misc_feature 1..22: note = chemically synthesized
  source 1..22: mol_type = other DNA
agtttccctgtctggggtagga

SEQ ID NO: 16154 - DNA, 22 bp, synthetic construct
  misc_feature 1..22: note = chemically synthesized
  source 1..22: mol_type = other DNA
ccctgtctggggtaggactggg

SEQ ID NO: 16155 - DNA, 22 bp, synthetic construct
  misc_feature 1..22: note = chemically synthesized
  source 1..22: mol_type = other DNA
cctgtctggggtaggactgggc

SEQ ID NO: 16156 - DNA, 22 bp, synthetic construct
  misc_feature 1..22: note = chemically synthesized
  source 1..22: mol_type = other DNA
tctggggtaggactgggctgtc

SEQ ID NO: 16157 - DNA, 22 bp, synthetic construct
  misc_feature 1..22: note = chemically synthesized
  source 1..22: mol_type = other DNA
gggtaggactgggctgtctaag

SEQ ID NO: 16158 - DNA, 22 bp, synthetic construct
  misc_feature 1..22: note = chemically synthesized
  source 1..22: mol_type = other DNA
ggctgtctaaggcttcctccag

SEQ ID NO: 16159 - DNA, 22 bp, synthetic construct
  misc_feature 1..22: note = chemically synthesized
  source 1..22: mol_type = other DNA
tctaaggcttcctccagcccta

SEQ ID NO: 16160 - DNA, 22 bp, synthetic construct
  misc_feature 1..22: note = chemically synthesized
  source 1..22: mol_type = other DNA
aggcttcctccagccctaagcc

SEQ ID NO: 16161 - DNA, 22 bp, synthetic construct
  misc_feature 1..22: note = chemically synthesized
  source 1..22: mol_type = other DNA
cctccagccctaagcctgaaga

SEQ ID NO: 16162 - DNA, 22 bp, synthetic construct
  misc_feature 1..22: note = chemically synthesized
  source 1..22: mol_type = other DNA
ctccagccctaagcctgaagaa

SEQ ID NO: 16163 - DNA, 22 bp, synthetic construct
  misc_feature 1..22: note = chemically synthesized
  source 1..22: mol_type = other DNA
cagccctaagcctgaagaatga

SEQ ID NO: 16164 - DNA, 22 bp, synthetic construct
  misc_feature 1..22: note = chemically synthesized
  source 1..22: mol_type = other DNA
agcctgaagaatgaggggggaa

SEQ ID NO: 16165 - DNA, 22 bp, synthetic construct
  misc_feature 1..22: note = chemically synthesized
  source 1..22: mol_type = other DNA
aagaatgaggggggaacctgca

SEQ ID NO: 16166 - DNA, 22 bp, synthetic construct
  misc_feature 1..22: note = chemically synthesized
  source 1..22: mol_type = other DNA
cacttggagccacttccagccc

SEQ ID NO: 16167 - DNA, 22 bp, synthetic construct
  misc_feature 1..22: note = chemically synthesized
  source 1..22: mol_type = other DNA
ggagccacttccagccccaccc

SEQ ID NO: 16168 - DNA, 22 bp, synthetic construct
  misc_feature 1..22: note = chemically synthesized
  source 1..22: mol_type = other DNA
gagccacttccagccccacccc

SEQ ID NO: 16169 - DNA, 22 bp, synthetic construct
  misc_feature 1..22: note = chemically synthesized
  source 1..22: mol_type = other DNA
ccagccccaccccctgtgtagc

SEQ ID NO: 16170 - DNA, 22 bp, synthetic construct
  misc_feature 1..22: note = chemically synthesized
  source 1..22: mol_type = other DNA
cagccccaccccctgtgtagct

SEQ ID NO: 16171 - DNA, 22 bp, synthetic construct
  misc_feature 1..22: note = chemically synthesized
  source 1..22: mol_type = other DNA
tgtagctttgggcaagtgacac

SEQ ID NO: 16172 - DNA, 22 bp, synthetic construct
  misc_feature 1..22: note = chemically synthesized
  source 1..22: mol_type = other DNA
tgggcaagtgacacccctcccg

SEQ ID NO: 16173 - DNA, 22 bp, synthetic construct
  misc_feature 1..22: note = chemically synthesized
  source 1..22: mol_type = other DNA
gggcaagtgacacccctcccgg

SEQ ID NO: 16174 - DNA, 22 bp, synthetic construct
  misc_feature 1..22: note = chemically synthesized
  source 1..22: mol_type = other DNA
ggcaagtgacacccctcccggg

SEQ ID NO: 16175 - DNA, 22 bp, synthetic construct
  misc_feature 1..22: note = chemically synthesized
  source 1..22: mol_type = other DNA
ccgggcctccatgttcttcagg

SEQ ID NO: 16176 - DNA, 22 bp, synthetic construct
  misc_feature 1..22: note = chemically synthesized
  source 1..22: mol_type = other DNA
catgttcttcaggttatgatga

SEQ ID NO: 16177 - DNA, 22 bp, synthetic construct
  misc_feature 1..22: note = chemically synthesized
  source 1..22: mol_type = other DNA
ttcaggttatgatgaggggtgg

SEQ ID NO: 16178 - DNA, 22 bp, synthetic construct
  misc_feature 1..22: note = chemically synthesized
  source 1..22: mol_type = other DNA
caggttatgatgaggggtgggg

SEQ ID NO: 16179 - DNA, 22 bp, synthetic construct
  misc_feature 1..22: note = chemically synthesized
  source 1..22: mol_type = other DNA
aggttatgatgaggggtggggg

SEQ ID NO: 16180 - DNA, 22 bp, synthetic construct
  misc_feature 1..22: note = chemically synthesized
  source 1..22: mol_type = other DNA
tgatgaggggtggggggcaccc

SEQ ID NO: 16181 - DNA, 22 bp, synthetic construct
  misc_feature 1..22: note = chemically synthesized
  source 1..22: mol_type = other DNA
cgaggcttccttagctctagca

SEQ ID NO: 16182 - DNA, 22 bp, synthetic construct
  misc_feature 1..22: note = chemically synthesized
  source 1..22: mol_type = other DNA
ccttagctctagcaagtgcttc

SEQ ID NO: 16183 - DNA, 22 bp, synthetic construct
  misc_feature 1..22: note = chemically synthesized
  source 1..22: mol_type = other DNA
cttagctctagcaagtgcttct

SEQ ID NO: 16184 - DNA, 22 bp, synthetic construct
  misc_feature 1..22: note = chemically synthesized
  source 1..22: mol_type = other DNA
agctctagcaagtgcttctcca

SEQ ID NO: 16185 - DNA, 22 bp, synthetic construct
  misc_feature 1..22: note = chemically synthesized
  source 1..22: mol_type = other DNA
gctctagcaagtgcttctccag

SEQ ID NO: 16186 - DNA, 22 bp, synthetic construct
  misc_feature 1..22: note = chemically synthesized
  source 1..22: mol_type = other DNA
tagcaagtgcttctccaggctt

SEQ ID NO: 16187 - DNA, 22 bp, synthetic construct
  misc_feature 1..22: note = chemically synthesized
  source 1..22: mol_type = other DNA
gcaagtgcttctccaggcttgc

SEQ ID NO: 16188 - DNA, 22 bp, synthetic construct
  misc_feature 1..22: note = chemically synthesized
  source 1..22: mol_type = other DNA
ctccaggcttgctggctgggct

SEQ ID NO: 16189 - DNA, 22 bp, synthetic construct
  misc_feature 1..22: note = chemically synthesized
  source 1..22: mol_type = other DNA
tccaggcttgctggctgggctg

SEQ ID NO: 16190 - DNA, 22 bp, synthetic construct
  misc_feature 1..22: note = chemically synthesized
  source 1..22: mol_type = other DNA
caggcttgctggctgggctggg

SEQ ID NO: 16191 - DNA, 22 bp, synthetic construct
  misc_feature 1..22: note = chemically synthesized
  source 1..22: mol_type = other DNA
gctggctgggctgggcagggag

SEQ ID NO: 16192 - DNA, 22 bp, synthetic construct
  misc_feature 1..22: note = chemically synthesized
  source 1..22: mol_type = other DNA
ctggctgggctgggcagggagc

SEQ ID NO: 16193 - DNA, 22 bp, synthetic construct
  misc_feature 1..22: note = chemically synthesized
  source 1..22: mol_type = other DNA
gctgggctgggcagggagctcc

SEQ ID NO: 16194 - DNA, 22 bp, synthetic construct
  misc_feature 1..22: note = chemically synthesized
  source 1..22: mol_type = other DNA
ggctgggcagggagctcctctt

SEQ ID NO: 16195 - DNA, 22 bp, synthetic construct
  misc_feature 1..22: note = chemically synthesized
  source 1..22: mol_type = other DNA
ggcagggagctcctcttgcccc

SEQ ID NO: 16196 - DNA, 22 bp, synthetic construct
  misc_feature 1..22: note = chemically synthesized
  source 1..22: mol_type = other DNA
ctcttgcccctcttcatcctcc

SEQ ID NO: 16197 - DNA, 22 bp, synthetic construct
  misc_feature 1..22: note = chemically synthesized
  source 1..22: mol_type = other DNA
ttgcccctcttcatcctcctcc

SEQ ID NO: 16198 - DNA, 22 bp, synthetic construct
  misc_feature 1..22: note = chemically synthesized
  source 1..22: mol_type = other DNA
gcccctcttcatcctcctcccc

SEQ ID NO: 16199 - DNA, 22 bp, synthetic construct
  misc_feature 1..22: note = chemically synthesized
  source 1..22: mol_type = other DNA
cccctcttcatcctcctcccct

SEQ ID NO: 16200 - DNA, 22 bp, synthetic construct
  misc_feature 1..22: note = chemically synthesized
  source 1..22: mol_type = other DNA
ttcatcctcctcccctcctctt

SEQ ID NO: 16201 - DNA, 22 bp, synthetic construct
  misc_feature 1..22: note = chemically synthesized
  source 1..22: mol_type = other DNA
catcctcctcccctcctctttc

SEQ ID NO: 16202 - DNA, 22 bp, synthetic construct
  misc_feature 1..22: note = chemically synthesized
  source 1..22: mol_type = other DNA
atcctcctcccctcctctttcc

SEQ ID NO: 16203 - DNA, 22 bp, synthetic construct
  misc_feature 1..22: note = chemically synthesized
  source 1..22: mol_type = other DNA
ctcccctcctctttcccctccc

SEQ ID NO: 16204 - DNA, 22 bp, synthetic construct
  misc_feature 1..22: note = chemically synthesized
  source 1..22: mol_type = other DNA
ccctcctctttcccctccccag

SEQ ID NO: 16205 - DNA, 22 bp, synthetic construct
  misc_feature 1..22: note = chemically synthesized
  source 1..22: mol_type = other DNA
ctctttcccctccccagagggc

SEQ ID NO: 16206 - DNA, 22 bp, synthetic construct
  misc_feature 1..22: note = chemically synthesized
  source 1..22: mol_type = other DNA
tttcccctccccagagggcatt

SEQ ID NO: 16207 - DNA, 22 bp, synthetic construct
  misc_feature 1..22: note = chemically synthesized
  source 1..22: mol_type = other DNA
tcccctccccagagggcattac

SEQ ID NO: 16208 - DNA, 22 bp, synthetic construct
  misc_feature 1..22: note = chemically synthesized
  source 1..22: mol_type = other DNA
cccctccccagagggcattacc

SEQ ID NO: 16209 - DNA, 22 bp, synthetic construct
  misc_feature 1..22: note = chemically synthesized
  source 1..22: mol_type = other DNA
ccctccccagagggcattacct

SEQ ID NO: 16210 - DNA, 22 bp, synthetic construct
  misc_feature 1..22: note = chemically synthesized
  source 1..22: mol_type = other DNA
cccagagggcattacctggagc

SEQ ID NO: 16211 - DNA, 22 bp, synthetic construct
  misc_feature 1..22: note = chemically synthesized
  source 1..22: mol_type = other DNA
cctggagcagctgcctctaggg

SEQ ID NO: 16212 - DNA, 22 bp, synthetic construct
  misc_feature 1..22: note = chemically synthesized
  source 1..22: mol_type = other DNA
gagcagctgcctctagggatga

SEQ ID NO: 16213 - DNA, 22 bp, synthetic construct
  misc_feature 1..22: note = chemically synthesized
  source 1..22: mol_type = other DNA
cctctagggatgaactgagcag

SEQ ID NO: 16214 - DNA, 22 bp, synthetic construct
  misc_feature 1..22: note = chemically synthesized
  source 1..22: mol_type = other DNA
tagggatgaactgagcagacag

SEQ ID NO: 16215 - DNA, 22 bp, synthetic construct
  misc_feature 1..22: note = chemically synthesized
  source 1..22: mol_type = other DNA
gggatgaactgagcagacaggc

SEQ ID NO: 16216 - DNA, 22 bp, synthetic construct
  misc_feature 1..22: note = chemically synthesized
  source 1..22: mol_type = other DNA
agcagacaggcaggagggttct

SEQ ID NO: 16217 - DNA, 22 bp, synthetic construct
  misc_feature 1..22: note = chemically synthesized
  source 1..22: mol_type = other DNA
tgacctgttttatatcatctcc

SEQ ID NO: 16218 - DNA, 22 bp, synthetic construct
  misc_feature 1..22: note = chemically synthesized
  source 1..22: mol_type = other DNA
acctgttttatatcatctccag

SEQ ID NO: 16219 - DNA, 22 bp, synthetic construct
  misc_feature 1..22: note = chemically synthesized
  source 1..22: mol_type = other DNA
ttttatatcatctccagggcag

SEQ ID NO: 16220 - DNA, 22 bp, synthetic construct
  misc_feature 1..22: note = chemically synthesized
  source 1..22: mol_type = other DNA
tatatcatctccagggcagcag

SEQ ID NO: 16221 - DNA, 22 bp, synthetic construct
  misc_feature 1..22: note = chemically synthesized
  source 1..22: mol_type = other DNA
atatcatctccagggcagcagg

SEQ ID NO: 16222 - DNA, 22 bp, synthetic construct
  misc_feature 1..22: note = chemically synthesized
  source 1..22: mol_type = other DNA
tatcatctccagggcagcaggc

SEQ ID NO: 16223 - DNA, 22 bp, synthetic construct
  misc_feature 1..22: note = chemically synthesized
  source 1..22: mol_type = other DNA
cagggcagcaggcactgaggac

SEQ ID NO: 16224 - DNA, 22 bp, synthetic construct
  misc_feature 1..22: note = chemically synthesized
  source 1..22: mol_type = other DNA
aggacccagggcgctgggcaaa

SEQ ID NO: 16225 - DNA, 22 bp, synthetic construct
  misc_feature 1..22: note = chemically synthesized
  source 1..22: mol_type = other DNA
ggcaaaggtcacctgctgacca

SEQ ID NO: 16226 - DNA, 22 bp, synthetic construct
  misc_feature 1..22: note = chemically synthesized
  source 1..22: mol_type = other DNA
ctgaccagtggagatgagggcc

SEQ ID NO: 16227 - DNA, 22 bp, synthetic construct
  misc_feature 1..22: note = chemically synthesized
  source 1..22: mol_type = other DNA
accagtggagatgagggcctga

SEQ ID NO: 16228 - DNA, 22 bp, synthetic construct
  misc_feature 1..22: note = chemically synthesized
  source 1..22: mol_type = other DNA
aggcagggtgtccagatgcagc

SEQ ID NO: 16229 - DNA, 22 bp, synthetic construct
  misc_feature 1..22: note = chemically synthesized
  source 1..22: mol_type = other DNA
ggaaatccctaggagactgagt

SEQ ID NO: 16230 - DNA, 20 bp, synthetic construct
  misc_feature 1..20: note = chemically synthesized
  source 1..20: mol_type = other DNA
taccccttgcccatccctgc

SEQ ID NO: 16231 - DNA, 20 bp, synthetic construct
  misc_feature 1..20: note = chemically synthesized
  source 1..20: mol_type = other DNA
ggcccccgtgaccctcactt

SEQ ID NO: 16232 - DNA, 20 bp, synthetic construct
  misc_feature 1..20: note = chemically synthesized
  source 1..20: mol_type = other DNA
gcccccgtgaccctcacttt

SEQ ID NO: 16233 - DNA, 20 bp, synthetic construct
  misc_feature 1..20: note = chemically synthesized
  source 1..20: mol_type = other DNA
gtgaccctcactttgggacc

SEQ ID NO: 16234 - DNA, 20 bp, synthetic construct
  misc_feature 1..20: note = chemically synthesized
  source 1..20: mol_type = other DNA
cactttgggacccagtcaca

SEQ ID NO: 16235 - DNA, 20 bp, synthetic construct
  misc_feature 1..20: note = chemically synthesized
  source 1..20: mol_type = other DNA
ccagtcacacagatgaccac

SEQ ID NO: 16236 - DNA, 20 bp, synthetic construct
  misc_feature 1..20: note = chemically synthesized
  source 1..20: mol_type = other DNA
gtcacacagatgaccaccag

SEQ ID NO: 16237 - DNA, 20 bp, synthetic construct
  misc_feature 1..20: note = chemically synthesized
  source 1..20: mol_type = other DNA
acacagatgaccaccagcag

SEQ ID NO: 16238 - DNA, 20 bp, synthetic construct
  misc_feature 1..20: note = chemically synthesized
  source 1..20: mol_type = other DNA
cacagatgaccaccagcagc

SEQ ID NO: 16239 - DNA, 20 bp, synthetic construct
  misc_feature 1..20: note = chemically synthesized
  source 1..20: mol_type = other DNA
ccaccagcagcaggatgttg

SEQ ID NO: 16240 - DNA, 20 bp, synthetic construct
  misc_feature 1..20: note = chemically synthesized
  source 1..20: mol_type = other DNA
agcagcaggatgttgaagct

SEQ ID NO: 16241 - DNA, 20 bp, synthetic construct
  misc_feature 1..20: note = chemically synthesized
  source 1..20: mol_type = other DNA
gcagcaggatgttgaagctc

SEQ ID NO: 16242 - DNA, 20 bp, synthetic construct
  misc_feature 1..20: note = chemically synthesized
  source 1..20: mol_type = other DNA
cagcaggatgttgaagctca

SEQ ID NO: 16243 - DNA, 20 bp, synthetic construct
  misc_feature 1..20: note = chemically synthesized
  source 1..20: mol_type = other DNA
aggatgttgaagctcagggc

SEQ ID NO: 16244 - DNA, 20 bp, synthetic construct
  misc_feature 1..20: note = chemically synthesized
  source 1..20: mol_type = other DNA
atgttgaagctcagggcaag

SEQ ID NO: 16245 - DNA, 20 bp, synthetic construct
  misc_feature 1..20: note = chemically synthesized
  source 1..20: mol_type = other DNA
agctcagggcaagcagactg

SEQ ID NO: 16246 - DNA, 20 bp, synthetic construct
  misc_feature 1..20: note = chemically synthesized
  source 1..20: mol_type = other DNA
tcagggcaagcagactgaag

SEQ ID NO: 16247 - DNA, 20 bp, synthetic construct
  misc_feature 1..20: note = chemically synthesized
  source 1..20: mol_type = other DNA
aagcagactgaagcagacca

SEQ ID NO: 16248 - DNA, 20 bp, synthetic construct
  misc_feature 1..20: note = chemically synthesized
  source 1..20: mol_type = other DNA
gcagactgaagcagaccatg

SEQ ID NO: 16249 - DNA, 20 bp, synthetic construct
  misc_feature 1..20: note = chemically synthesized
  source 1..20: mol_type = other DNA
gactgaagcagaccatggag

SEQ ID NO: 16250 - DNA, 20 bp, synthetic construct
  misc_feature 1..20: note = chemically synthesized
  source 1..20: mol_type = other DNA
ctgaagcagaccatggagca

SEQ ID NO: 16251 - DNA, 20 bp, synthetic construct
  misc_feature 1..20: note = chemically synthesized
  source 1..20: mol_type = other DNA
atggagcagagacgctgtgc

SEQ ID NO: 16252 - DNA, 20 bp, synthetic construct
  misc_feature 1..20: note = chemically synthesized
  source 1..20: mol_type = other DNA
tggagcagagacgctgtgcc

SEQ ID NO: 16253 - DNA, 20 bp, synthetic construct
  misc_feature 1..20: note = chemically synthesized
  source 1..20: mol_type = other DNA
ggagcagagacgctgtgcca

SEQ ID NO: 16254 - DNA, 20 bp, synthetic construct
  misc_feature 1..20: note = chemically synthesized
  source 1..20: mol_type = other DNA
gagcagagacgctgtgccag

SEQ ID NO: 16255 - DNA, 20 bp, synthetic construct
  misc_feature 1..20: note = chemically synthesized
  source 1..20: mol_type = other DNA
agagacgctgtgccaggggc

SEQ ID NO: 16256 - DNA, 20 bp, synthetic construct
  misc_feature 1..20: note = chemically synthesized
  source 1..20: mol_type = other DNA
gagacgctgtgccaggggct

SEQ ID NO: 16257 - DNA, 20 bp, synthetic construct
  misc_feature 1..20: note = chemically synthesized
  source 1..20: mol_type = other DNA
acgctgtgccaggggctggg

SEQ ID NO: 16258 - DNA, 20 bp, synthetic construct
  misc_feature 1..20: note = chemically synthesized
  source 1..20: mol_type = other DNA
cgctgtgccaggggctgggc

SEQ ID NO: 16259 - DNA, 20 bp, synthetic construct
  misc_feature 1..20: note = chemically synthesized
  source 1..20: mol_type = other DNA
ctgtgccaggggctgggcag

SEQ ID NO: 16260 - DNA, 20 bp, synthetic construct
  misc_feature 1..20: note = chemically synthesized
  source 1..20: mol_type = other DNA
tgtgccaggggctgggcagg

SEQ ID NO: 16261 - DNA, 20 bp, synthetic construct
  misc_feature 1..20: note = chemically synthesized
  source 1..20: mol_type = other DNA
gccaggggctgggcaggagg

SEQ ID NO: 16262 - DNA, 20 bp, synthetic construct
  misc_feature 1..20: note = chemically synthesized
  source 1..20: mol_type = other DNA
ctgggcaggaggtggccctg

SEQ ID NO: 16263 - DNA, 20 bp, synthetic construct
  misc_feature 1..20: note = chemically synthesized
  source 1..20: mol_type = other DNA
tgggcaggaggtggccctgt

SEQ ID NO: 16264 - DNA, 20 bp, synthetic construct
  misc_feature 1..20: note = chemically synthesized
  source 1..20: mol_type = other DNA
ggcaggaggtggccctgtgg

SEQ ID NO: 16265 - DNA, 20 bp, synthetic construct
  misc_feature 1..20: note = chemically synthesized
  source 1..20: mol_type = other DNA
caggaggtggccctgtggga

SEQ ID NO: 16266 - DNA, 20 bp, synthetic construct
  misc_feature 1..20: note = chemically synthesized
  source 1..20: mol_type = other DNA
aggaggtggccctgtgggag

SEQ ID NO: 16267 - DNA, 20 bp, synthetic construct
  misc_feature 1..20: note = chemically synthesized
  source 1..20: mol_type = other DNA
ggaggtggccctgtgggaga

SEQ ID NO: 16268 - DNA, 20 bp, synthetic construct
  misc_feature 1..20: note = chemically synthesized
  source 1..20: mol_type = other DNA
gaggtggccctgtgggagag

SEQ ID NO: 16269 - DNA, 20 bp, synthetic construct
  misc_feature 1..20: note = chemically synthesized
  source 1..20: mol_type = other DNA
gccctgtgggagaggggcat

SEQ ID NO: 16270 - DNA, 20 bp, synthetic construct
  misc_feature 1..20: note = chemically synthesized
  source 1..20: mol_type = other DNA
ccctgtgggagaggggcatc

SEQ ID NO: 16271 - DNA, 20 bp, synthetic construct
  misc_feature 1..20: note = chemically synthesized
  source 1..20: mol_type = other DNA
ctgtgggagaggggcatcag

SEQ ID NO: 16272 - DNA, 20 bp, synthetic construct
  misc_feature 1..20: note = chemically synthesized
  source 1..20: mol_type = other DNA
gggagaggggcatcaggagc

SEQ ID NO: 16273 - DNA, 20 bp, synthetic construct
  misc_feature 1..20: note = chemically synthesized
  source 1..20: mol_type = other DNA
agaggggcatcaggagccgg

SEQ ID NO: 16274 - DNA, 20 bp, synthetic construct
  misc_feature 1..20: note = chemically synthesized
  source 1..20: mol_type = other DNA
ggcatcaggagccggcagcc

SEQ ID NO: 16275 - DNA, 20 bp, synthetic construct
  misc_feature 1..20: note = chemically synthesized
  source 1..20: mol_type = other DNA
gcatcaggagccggcagcct

SEQ ID NO: 16276 - DNA, 20 bp, synthetic construct
  misc_feature 1..20: note = chemically synthesized
  source 1..20: mol_type = other DNA
aggagccggcagcctgggtg

SEQ ID NO: 16277 - DNA, 20 bp, synthetic construct
  misc_feature 1..20: note = chemically synthesized
  source 1..20: mol_type = other DNA
ggagccggcagcctgggtgt

SEQ ID NO: 16278 - DNA, 20 bp, synthetic construct
  misc_feature 1..20: note = chemically synthesized
  source 1..20: mol_type = other DNA
gagccggcagcctgggtgtg

SEQ ID NO: 16279 - DNA, 20 bp, synthetic construct
  misc_feature 1..20: note = chemically synthesized
  source 1..20: mol_type = other DNA
gccggcagcctgggtgtggg

SEQ ID NO: 16280 - DNA, 20 bp, synthetic construct
  misc_feature 1..20: note = chemically synthesized
  source 1..20: mol_type = other DNA
gcagcctgggtgtggggagc

SEQ ID NO: 16281 - DNA, 20 bp, synthetic construct
  misc_feature 1..20: note = chemically synthesized
  source 1..20: mol_type = other DNA
agcctgggtgtggggagccg

SEQ ID NO: 16282 - DNA, 20 bp, synthetic construct
  misc_feature 1..20: note = chemically synthesized
  source 1..20: mol_type = other DNA
gcctgggtgtggggagccgg

SEQ ID NO: 16283 - DNA, 20 bp, synthetic construct
  misc_feature 1..20: note = chemically synthesized
  source 1..20: mol_type = other DNA
cctgggtgtggggagccgga

SEQ ID NO: 16284 - DNA, 20 bp, synthetic construct
  misc_feature 1..20: note = chemically synthesized
  source 1..20: mol_type = other DNA
gtgtggggagccggagggta

SEQ ID NO: 16285 - DNA, 20 bp, synthetic construct
  misc_feature 1..20: note = chemically synthesized
  source 1..20: mol_type = other DNA
ggggagccggagggtaaaga

SEQ ID NO: 16286 - DNA, 20 bp, synthetic construct
  misc_feature 1..20: note = chemically synthesized
  source 1..20: mol_type = other DNA
gggagccggagggtaaagac

SEQ ID NO: 16287 - DNA, 20 bp, synthetic construct
  misc_feature 1..20: note = chemically synthesized
  source 1..20: mol_type = other DNA
ggagccggagggtaaagaca

SEQ ID NO: 16288 - DNA, 20 bp, synthetic construct
  misc_feature 1..20: note = chemically synthesized
  source 1..20: mol_type = other DNA
agggtaaagacagggcaccg

SEQ ID NO: 16289 - DNA, 20 bp, synthetic construct
  misc_feature 1..20: note = chemically synthesized
  source 1..20: mol_type = other DNA
aagacagggcaccgaagcct

SEQ ID NO: 16290 - DNA, 20 bp, synthetic construct
  misc_feature 1..20: note = chemically synthesized
  source 1..20: mol_type = other DNA
agacagggcaccgaagcctg

SEQ ID NO: 16291 - DNA, 20 bp, synthetic construct
  misc_feature 1..20: note = chemically synthesized
  source 1..20: mol_type = other DNA
acagggcaccgaagcctgag

SEQ ID NO: 16292 - DNA, 20 bp, synthetic construct
  misc_feature 1..20: note = chemically synthesized
  source 1..20: mol_type = other DNA
cagggcaccgaagcctgagg

SEQ ID NO: 16293 - DNA, 20 bp, synthetic construct
  misc_feature 1..20: note = chemically synthesized
  source 1..20: mol_type = other DNA
aagcctgaggaggcataacc

SEQ ID NO: 16294 - DNA, 20 bp, synthetic construct
  misc_feature 1..20: note = chemically synthesized
  source 1..20: mol_type = other DNA
agcctgaggaggcataacct

SEQ ID NO: 16295 - DNA, 20 bp, synthetic construct
  misc_feature 1..20: note = chemically synthesized
  source 1..20: mol_type = other DNA
ctgaggaggcataacctggg

SEQ ID NO: 16296 - DNA, 20 bp, synthetic construct
  misc_feature 1..20: note = chemically synthesized
  source 1..20: mol_type = other DNA
tgaggaggcataacctgggc

SEQ ID NO: 16297 - DNA, 20 bp, synthetic construct
  misc_feature 1..20: note = chemically synthesized
  source 1..20: mol_type = other DNA
gaggaggcataacctgggcg

SEQ ID NO: 16298 - DNA, 20 bp, synthetic construct
  misc_feature 1..20: note = chemically synthesized
  source 1..20: mol_type = other DNA
aggaggcataacctgggcgg

SEQ ID NO: 16299 - DNA, 20 bp, synthetic construct
  misc_feature 1..20: note = chemically synthesized
  source 1..20: mol_type = other DNA
ggaggcataacctgggcggg

SEQ ID NO: 16300 - DNA, 20 bp, synthetic construct
  misc_feature 1..20: note = chemically synthesized
  source 1..20: mol_type = other DNA
cataacctgggcggggggat

SEQ ID NO: 16301 - DNA, 20 bp, synthetic construct
  misc_feature 1..20: note = chemically synthesized
  source 1..20: mol_type = other DNA
acctgggcggggggattggt

SEQ ID NO: 16302 - DNA, 20 bp, synthetic construct
  misc_feature 1..20: note = chemically synthesized
  source 1..20: mol_type = other DNA
cctgggcggggggattggtt

SEQ ID NO: 16303 - DNA, 20 bp, synthetic construct
  misc_feature 1..20: note = chemically synthesized
  source 1..20: mol_type = other DNA
ctgggcggggggattggttg

SEQ ID NO: 16304 - DNA, 20 bp, synthetic construct
  misc_feature 1..20: note = chemically synthesized
  source 1..20: mol_type = other DNA
ggggggattggttggggcca

SEQ ID NO: 16305 - DNA, 20 bp, synthetic construct
  misc_feature 1..20: note = chemically synthesized
  source 1..20: mol_type = other DNA
gggggattggttggggccat

SEQ ID NO: 16306 - DNA, 20 bp, synthetic construct
  misc_feature 1..20: note = chemically synthesized
  source 1..20: mol_type = other DNA
ggggattggttggggccatg

SEQ ID NO: 16307 - DNA, 20 bp, synthetic construct
  misc_feature 1..20: note = chemically synthesized
  source 1..20: mol_type = other DNA
gggattggttggggccatgg

SEQ ID NO: 16308 - DNA, 20 bp, synthetic construct
  misc_feature 1..20: note = chemically synthesized
  source 1..20: mol_type = other DNA
ggattggttggggccatggg

SEQ ID NO: 16309 - DNA, 20 bp, synthetic construct
  misc_feature 1..20: note = chemically synthesized
  source 1..20: mol_type = other DNA
gattggttggggccatgggg

SEQ ID NO: 16310 - DNA, 20 bp, synthetic construct
  misc_feature 1..20: note = chemically synthesized
  source 1..20: mol_type = other DNA
attggttggggccatggggg

SEQ ID NO: 16311 - DNA, 20 bp, synthetic construct
  misc_feature 1..20: note = chemically synthesized
  source 1..20: mol_type = other DNA
ttggttggggccatgggggg

SEQ ID NO: 16312 - DNA, 20 bp, synthetic construct
  misc_feature 1..20: note = chemically synthesized
  source 1..20: mol_type = other DNA
gccatgggggggggtcatca

SEQ ID NO: 16313 - DNA, 20 bp, synthetic construct
  misc_feature 1..20: note = chemically synthesized
  source 1..20: mol_type = other DNA
ccatgggggggggtcatcat

SEQ ID NO: 16314 - DNA, 20 bp, synthetic construct
  misc_feature 1..20: note = chemically synthesized
  source 1..20: mol_type = other DNA
gtcatcataggctttgaccc

SEQ ID NO: 16315 - DNA, 20 bp, synthetic construct
  misc_feature 1..20: note = chemically synthesized
  source 1..20: mol_type = other DNA
aggctttgaccccagcattt

SEQ ID NO: 16316 - DNA, 20 bp, synthetic construct
  misc_feature 1..20: note = chemically synthesized
  source 1..20: mol_type = other DNA
catgtataaatatacacacg

SEQ ID NO: 16317 - DNA, 20 bp, synthetic construct
  misc_feature 1..20: note = chemically synthesized
  source 1..20: mol_type = other DNA
atatacacacgcagctaatc

SEQ ID NO: 16318 - DNA, 20 bp, synthetic construct
  misc_feature 1..20: note = chemically synthesized
  source 1..20: mol_type = other DNA
acacacccatgcacacgact

SEQ ID NO: 16319 - DNA, 20 bp, synthetic construct
  misc_feature 1..20: note = chemically synthesized
  source 1..20: mol_type = other DNA
cacacccatgcacacgactc

SEQ ID NO: 16320 - DNA, 20 bp, synthetic construct
  misc_feature 1..20: note = chemically synthesized
  source 1..20: mol_type = other DNA
acgactcaggatattcacat

SEQ ID NO: 16321 - DNA, 20 bp, synthetic construct
  misc_feature 1..20: note = chemically synthesized
  source 1..20: mol_type = other DNA
attcacatcagctgtgtgca

SEQ ID NO: 16322 - DNA, 20 bp, synthetic construct
  misc_feature 1..20: note = chemically synthesized
  source 1..20: mol_type = other DNA
catcagctgtgtgcaaagcc

SEQ ID NO: 16323 - DNA, 20 bp, synthetic construct
  misc_feature 1..20: note = chemically synthesized
  source 1..20: mol_type = other DNA
tgtgtgcaaagcccggatcc

SEQ ID NO: 16324 - DNA, 20 bp, synthetic construct
  misc_feature 1..20: note = chemically synthesized
  source 1..20: mol_type = other DNA
tgtgcaaagcccggatcctg

SEQ ID NO: 16325 - DNA, 20 bp, synthetic construct
  misc_feature 1..20: note = chemically synthesized
  source 1..20: mol_type = other DNA
caaagcccggatcctggagc

SEQ ID NO: 16326 - DNA, 20 bp, synthetic construct
  misc_feature 1..20: note = chemically synthesized
  source 1..20: mol_type = other DNA
aaagcccggatcctggagct

SEQ ID NO: 16327 - DNA, 20 bp, synthetic construct
  misc_feature 1..20: note = chemically synthesized
  source 1..20: mol_type = other DNA
aagcccggatcctggagctg

SEQ ID NO: 16328 - DNA, 20 bp, synthetic construct
  misc_feature 1..20: note = chemically synthesized
  source 1..20: mol_type = other DNA
agcccggatcctggagctgg

SEQ ID NO: 16329 - DNA, 20 bp, synthetic construct
  misc_feature 1..20: note = chemically synthesized
  source 1..20: mol_type = other DNA
ggatcctggagctgggggac

SEQ ID NO: 16330 - DNA, 20 bp, synthetic construct
  misc_feature 1..20: note = chemically synthesized
  source 1..20: mol_type = other DNA
gatcctggagctgggggact

SEQ ID NO: 16331 - DNA, 20 bp, synthetic construct
  misc_feature 1..20: note = chemically synthesized
  source 1..20: mol_type = other DNA
tcctggagctgggggactgg

SEQ ID NO: 16332 - DNA, 20 bp, synthetic construct
  misc_feature 1..20: note = chemically synthesized
  source 1..20: mol_type = other DNA
ctgggggactgggagacgca

SEQ ID NO: 16333 - DNA, 20 bp, synthetic construct
  misc_feature 1..20: note = chemically synthesized
  source 1..20: mol_type = other DNA
tgggggactgggagacgcac

SEQ ID NO: 16334 - DNA, 20 bp, synthetic construct
  misc_feature 1..20: note = chemically synthesized
  source 1..20: mol_type = other DNA
gggggactgggagacgcaca

SEQ ID NO: 16335 - DNA, 20 bp, synthetic construct
  misc_feature 1..20: note = chemically synthesized
  source 1..20: mol_type = other DNA
ggggactgggagacgcacag

SEQ ID NO: 16336 - DNA, 20 bp, synthetic construct
  misc_feature 1..20: note = chemically synthesized
  source 1..20: mol_type = other DNA
gggactgggagacgcacagg

SEQ ID NO: 16337 - DNA, 20 bp, synthetic construct
  misc_feature 1..20: note = chemically synthesized
  source 1..20: mol_type = other DNA
actgggagacgcacaggggg

SEQ ID NO: 16338 - DNA, 20 bp, synthetic construct
  misc_feature 1..20: note = chemically synthesized
  source 1..20: mol_type = other DNA
ctgggagacgcacagggggc

SEQ ID NO: 16339 - DNA, 20 bp, synthetic construct
  misc_feature 1..20: note = chemically synthesized
  source 1..20: mol_type = other DNA
tgggagacgcacagggggcg

SEQ ID NO: 16340 - DNA, 20 bp, synthetic construct
  misc_feature 1..20: note = chemically synthesized
  source 1..20: mol_type = other DNA
gggagacgcacagggggcgg

SEQ ID NO: 16341 - DNA, 20 bp, synthetic construct
  misc_feature 1..20: note = chemically synthesized
  source 1..20: mol_type = other DNA
ggagacgcacagggggcggg

SEQ ID NO: 16342 - DNA, 20 bp, synthetic construct
  misc_feature 1..20: note = chemically synthesized
  source 1..20: mol_type = other DNA
gagacgcacagggggcgggg

SEQ ID NO: 16343 - DNA, 20 bp, synthetic construct
  misc_feature 1..20: note = chemically synthesized
  source 1..20: mol_type = other DNA
acgcacagggggcggggggg

SEQ ID NO: 16344 - DNA, 20 bp, synthetic construct
  misc_feature 1..20: note = chemically synthesized
  source 1..20: mol_type = other DNA
agggggcgggggggcagacc

SEQ ID NO: 16345 - DNA, 20 bp, synthetic construct
  misc_feature 1..20: note = chemically synthesized
  source 1..20: mol_type = other DNA
ggggcagacccggccctgcc

SEQ ID NO: 16346 - DNA, 20 bp, synthetic construct
  misc_feature 1..20: note = chemically synthesized
  source 1..20: mol_type = other DNA
gggcagacccggccctgcct

SEQ ID NO: 16347 - DNA, 20 bp, synthetic construct
  misc_feature 1..20: note = chemically synthesized
  source 1..20: mol_type = other DNA
cctgcctaggcacacatcct

SEQ ID NO: 16348 - DNA, 20 bp, synthetic construct
  misc_feature 1..20: note = chemically synthesized
  source 1..20: mol_type = other DNA
gcctaggcacacatcctgag

SEQ ID NO: 16349 - DNA, 20 bp, synthetic construct
  misc_feature 1..20: note = chemically synthesized
  source 1..20: mol_type = other DNA
cctaggcacacatcctgaga

SEQ ID NO: 16350 - DNA, 20 bp, synthetic construct
  misc_feature 1..20: note = chemically synthesized
  source 1..20: mol_type = other DNA
ctaggcacacatcctgagaa

SEQ ID NO: 16351 - DNA, 20 bp, synthetic construct
  misc_feature 1..20: note = chemically synthesized
  source 1..20: mol_type = other DNA
taggcacacatcctgagaag

SEQ ID NO: 16352 - DNA, 20 bp, synthetic construct
  misc_feature 1..20: note = chemically synthesized
  source 1..20: mol_type = other DNA
aggcacacatcctgagaagg

SEQ ID NO: 16353 - DNA, 20 bp, synthetic construct
  misc_feature 1..20: note = chemically synthesized
  source 1..20: mol_type = other DNA
tgagaagggggatctgtgaa

SEQ ID NO: 16354 - DNA, 20 bp, synthetic construct
  misc_feature 1..20: note = chemically synthesized
  source 1..20: mol_type = other DNA
tgaatggttttcctcccatc

SEQ ID NO: 16355 - DNA, 20 bp, synthetic construct
  misc_feature 1..20: note = chemically synthesized
  source 1..20: mol_type = other DNA
tggttttcctcccatccagc

SEQ ID NO: 16356 - DNA, 20 bp, synthetic construct
  misc_feature 1..20: note = chemically synthesized
  source 1..20: mol_type = other DNA
ttttcctcccatccagccag

SEQ ID NO: 16357 - DNA, 20 bp, synthetic construct
  misc_feature 1..20: note = chemically synthesized
  source 1..20: mol_type = other DNA
tcctcccatccagccagtgg

SEQ ID NO: 16358 - DNA, 20 bp, synthetic construct
  misc_feature 1..20: note = chemically synthesized
  source 1..20: mol_type = other DNA
ctcccatccagccagtggca

SEQ ID NO: 16359 - DNA, 20 bp, synthetic construct
  misc_feature 1..20: note = chemically synthesized
  source 1..20: mol_type = other DNA
tcccatccagccagtggcag

SEQ ID NO: 16360 - DNA, 20 bp, synthetic construct
  misc_feature 1..20: note = chemically synthesized
  source 1..20: mol_type = other DNA
cagccagtggcagaggcctc

SEQ ID NO: 16361 - DNA, 20 bp, synthetic construct
  misc_feature 1..20: note = chemically synthesized
  source 1..20: mol_type = other DNA
cagaggcctccagatcacct

SEQ ID NO: 16362 - DNA, 20 bp, synthetic construct
  misc_feature 1..20: note = chemically synthesized
  source 1..20: mol_type = other DNA
agaggcctccagatcacctc

SEQ ID NO: 16363 - DNA, 20 bp, synthetic construct
  misc_feature 1..20: note = chemically synthesized
  source 1..20: mol_type = other DNA
ctccagatcacctcgggcct

SEQ ID NO: 16364 - DNA, 20 bp, synthetic construct
  misc_feature 1..20: note = chemically synthesized
  source 1..20: mol_type = other DNA
atcacctcgggccttagtct

SEQ ID NO: 16365 - DNA, 20 bp, synthetic construct
  misc_feature 1..20: note = chemically synthesized
  source 1..20: mol_type = other DNA
gccttagtctcagctcttct

SEQ ID NO: 16366 - DNA, 20 bp, synthetic construct
  misc_feature 1..20: note = chemically synthesized
  source 1..20: mol_type = other DNA
ccttagtctcagctcttcta

SEQ ID NO: 16367 - DNA, 20 bp, synthetic construct
  misc_feature 1..20: note = chemically synthesized
  source 1..20: mol_type = other DNA
ttctaaggctcctgtcccct

SEQ ID NO: 16368 - DNA, 20 bp, synthetic construct
  misc_feature 1..20: note = chemically synthesized
  source 1..20: mol_type = other DNA
aggctcctgtcccctcagat

SEQ ID NO: 16369 - DNA, 20 bp, synthetic construct
  misc_feature 1..20: note = chemically synthesized
  source 1..20: mol_type = other DNA
gctcctgtcccctcagattg

SEQ ID NO: 16370 - DNA, 20 bp, synthetic construct
  misc_feature 1..20: note = chemically synthesized
  source 1..20: mol_type = other DNA
tcccctcagattggagactc

SEQ ID NO: 16371 - DNA, 20 bp, synthetic construct
  misc_feature 1..20: note = chemically synthesized
  source 1..20: mol_type = other DNA
cctcagattggagactccag

SEQ ID NO: 16372 - DNA, 20 bp, synthetic construct
  misc_feature 1..20: note = chemically synthesized
  source 1..20: mol_type = other DNA
agattggagactccagaagc

SEQ ID NO: 16373 - DNA, 20 bp, synthetic construct
  misc_feature 1..20: note = chemically synthesized
  source 1..20: mol_type = other DNA
gattggagactccagaagct

SEQ ID NO: 16374 - DNA, 20 bp, synthetic construct
  misc_feature 1..20: note = chemically synthesized
  source 1..20: mol_type = other DNA
gttcttcctaaaatccatac

SEQ ID NO: 16375 - DNA, 20 bp, synthetic construct
  misc_feature 1..20: note = chemically synthesized
  source 1..20: mol_type = other DNA
tcctaaaatccatactggaa

SEQ ID NO: 16376 - DNA, 20 bp, synthetic construct
  misc_feature 1..20: note = chemically synthesized
  source 1..20: mol_type = other DNA
tcccctgccaaaattccatt

SEQ ID NO: 16377 - DNA, 20 bp, synthetic construct
  misc_feature 1..20: note = chemically synthesized
  source 1..20: mol_type = other DNA
tccattgagatccttaaatc

SEQ ID NO: 16378 - DNA, 20 bp, synthetic construct
  misc_feature 1..20: note = chemically synthesized
  source 1..20: mol_type = other DNA
ccattgagatccttaaatct

SEQ ID NO: 16379 - DNA, 20 bp, synthetic construct
  misc_feature 1..20: note = chemically synthesized
  source 1..20: mol_type = other DNA
aaatctgggtcattccacca

SEQ ID NO: 16380 - DNA, 20 bp, synthetic construct
  misc_feature 1..20: note = chemically synthesized
  source 1..20: mol_type = other DNA
tccaccatagcccactctcc

SEQ ID NO: 16381 - DNA, 20 bp, synthetic construct
  misc_feature 1..20: note = chemically synthesized
  source 1..20: mol_type = other DNA
actctccaagcacaaccctc

SEQ ID NO: 16382 - DNA, 20 bp, synthetic construct
  misc_feature 1..20: note = chemically synthesized
  source 1..20: mol_type = other DNA
ctctccaagcacaaccctcc

SEQ ID NO: 16383 - DNA, 20 bp, synthetic construct
  misc_feature 1..20: note = chemically synthesized
  source 1..20: mol_type = other DNA
gtcctcatcccccaccacgc

SEQ ID NO: 16384 - DNA, 20 bp, synthetic construct
  misc_feature 1..20: note = chemically synthesized
  source 1..20: mol_type = other DNA
tcctcatcccccaccacgca

SEQ ID NO: 16385 - DNA, 20 bp, synthetic construct
  misc_feature 1..20: note = chemically synthesized
  source 1..20: mol_type = other DNA
accacgcaaggcctcctccc

SEQ ID NO: 16386 - DNA, 20 bp, synthetic construct
  misc_feature 1..20: note = chemically synthesized
  source 1..20: mol_type = other DNA
gccctttgccctcgcttccc

SEQ ID NO: 16387 - DNA, 20 bp, synthetic construct
  misc_feature 1..20: note = chemically synthesized
  source 1..20: mol_type = other DNA
cacactaaatttgctcccct

SEQ ID NO: 16388 - DNA, 20 bp, synthetic construct
  misc_feature 1..20: note = chemically synthesized
  source 1..20: mol_type = other DNA
aaatttgctcccctcagccc

SEQ ID NO: 16389 - DNA, 20 bp, synthetic construct
  misc_feature 1..20: note = chemically synthesized
  source 1..20: mol_type = other DNA
aatttgctcccctcagcccg

SEQ ID NO: 16390 - DNA, 20 bp, synthetic construct
  misc_feature 1..20: note = chemically synthesized
  source 1..20: mol_type = other DNA
ctcagcccgaggtcatctca

SEQ ID NO: 16391 - DNA, 20 bp, synthetic construct
  misc_feature 1..20: note = chemically synthesized
  source 1..20: mol_type = other DNA
tcagcccgaggtcatctcac

SEQ ID NO: 16392 - DNA, 20 bp, synthetic construct
  misc_feature 1..20: note = chemically synthesized
  source 1..20: mol_type = other DNA
ttgatccatctgcaccctga

SEQ ID NO: 16393 - DNA, 20 bp, synthetic construct
  misc_feature 1..20: note = chemically synthesized
  source 1..20: mol_type = other DNA
cacccacgtcttcctgcaca

SEQ ID NO: 16394 - DNA, 20 bp, synthetic construct
  misc_feature 1..20: note = chemically synthesized
  source 1..20: mol_type = other DNA
cccacgtcttcctgcacaca

SEQ ID NO: 16395 - DNA, 20 bp, synthetic construct
  misc_feature 1..20: note = chemically synthesized
  source 1..20: mol_type = other DNA
cgtcttcctgcacacagagc

SEQ ID NO: 16396 - DNA, 20 bp, synthetic construct
  misc_feature 1..20: note = chemically synthesized
  source 1..20: mol_type = other DNA
gtcttcctgcacacagagct

SEQ ID NO: 16397 - DNA, 20 bp, synthetic construct
  misc_feature 1..20: note = chemically synthesized
  source 1..20: mol_type = other DNA
ggctccctctctgctgcctc

SEQ ID NO: 16398 - DNA, 20 bp, synthetic construct
  misc_feature 1..20: note = chemically synthesized
  source 1..20: mol_type = other DNA
ctctctgctgcctccagacc

SEQ ID NO: 16399 - DNA, 20 bp, synthetic construct
  misc_feature 1..20: note = chemically synthesized
  source 1..20: mol_type = other DNA
ctctgctgcctccagaccca

SEQ ID NO: 16400 - DNA, 20 bp, synthetic construct
  misc_feature 1..20: note = chemically synthesized
  source 1..20: mol_type = other DNA
tgctgcctccagacccagag

SEQ ID NO: 16401 - DNA, 20 bp, synthetic construct
  misc_feature 1..20: note = chemically synthesized
  source 1..20: mol_type = other DNA
ctccagacccagagcagctc

SEQ ID NO: 16402 - DNA, 20 bp, synthetic construct
  misc_feature 1..20: note = chemically synthesized
  source 1..20: mol_type = other DNA
cagagcagctccagttgtcc

SEQ ID NO: 16403 - DNA, 20 bp, synthetic construct
  misc_feature 1..20: note = chemically synthesized
  source 1..20: mol_type = other DNA
gctccagttgtcccagccct

SEQ ID NO: 16404 - DNA, 20 bp, synthetic construct
  misc_feature 1..20: note = chemically synthesized
  source 1..20: mol_type = other DNA
gccctgagctcctctctttg

SEQ ID NO: 16405 - DNA, 20 bp, synthetic construct
  misc_feature 1..20: note = chemically synthesized
  source 1..20: mol_type = other DNA
ttgcagcatccacctgcaaa

SEQ ID NO: 16406 - DNA, 20 bp, synthetic construct
  misc_feature 1..20: note = chemically synthesized
  source 1..20: mol_type = other DNA
cctgcaaacagaacaccttc

SEQ ID NO: 16407 - DNA, 20 bp, synthetic construct
  misc_feature 1..20: note = chemically synthesized
  source 1..20: mol_type = other DNA
ctgcaaacagaacaccttct

SEQ ID NO: 16408 - DNA, 20 bp, synthetic construct
  misc_feature 1..20: note = chemically synthesized
  source 1..20: mol_type = other DNA
acagaacaccttctaggcct

SEQ ID NO: 16409 - DNA, 20 bp, synthetic construct
  misc_feature 1..20: note = chemically synthesized
  source 1..20: mol_type = other DNA
ggccttggaccctgactctg

SEQ ID NO: 16410 - DNA, 20 bp, synthetic construct
  misc_feature 1..20: note = chemically synthesized
  source 1..20: mol_type = other DNA
attcctatcaccccccgacc

SEQ ID NO: 16411 - DNA, 20 bp, synthetic construct
  misc_feature 1..20: note = chemically synthesized
  source 1..20: mol_type = other DNA
cctatcaccccccgacccag

SEQ ID NO: 16412 - DNA, 20 bp, synthetic construct
  misc_feature 1..20: note = chemically synthesized
  source 1..20: mol_type = other DNA
ctatcaccccccgacccagc

SEQ ID NO: 16413 - DNA, 20 bp, synthetic construct
  misc_feature 1..20: note = chemically synthesized
  source 1..20: mol_type = other DNA
gacccagcaggaccacatcc

SEQ ID NO: 16414 - DNA, 20 bp, synthetic construct
  misc_feature 1..20: note = chemically synthesized
  source 1..20: mol_type = other DNA
acccagcaggaccacatcct

SEQ ID NO: 16415 - DNA, 20 bp, synthetic construct
  misc_feature 1..20: note = chemically synthesized
  source 1..20: mol_type = other DNA
cccagcaggaccacatcctg

SEQ ID NO: 16416 - DNA, 20 bp, synthetic construct
  misc_feature 1..20: note = chemically synthesized
  source 1..20: mol_type = other DNA
cagcaggaccacatcctggg

SEQ ID NO: 16417 - DNA, 20 bp, synthetic construct
  misc_feature 1..20: note = chemically synthesized
  source 1..20: mol_type = other DNA
agcaggaccacatcctgggg

SEQ ID NO: 16418 - DNA, 20 bp, synthetic construct
  misc_feature 1..20: note = chemically synthesized
  source 1..20: mol_type = other DNA
gaccacatcctggggaggct

SEQ ID NO: 16419 - DNA, 20 bp, synthetic construct
  misc_feature 1..20: note = chemically synthesized
  source 1..20: mol_type = other DNA
acatcctggggaggctcagt

SEQ ID NO: 16420 - DNA, 20 bp, synthetic construct
  misc_feature 1..20: note = chemically synthesized
  source 1..20: mol_type = other DNA
catcctggggaggctcagtc

SEQ ID NO: 16421 - DNA, 20 bp, synthetic construct
  misc_feature 1..20: note = chemically synthesized
  source 1..20: mol_type = other DNA
atcctggggaggctcagtca

SEQ ID NO: 16422 - DNA, 20 bp, synthetic construct
  misc_feature 1..20: note = chemically synthesized
  source 1..20: mol_type = other DNA
tcctggggaggctcagtcag

SEQ ID NO: 16423 - DNA, 20 bp, synthetic construct
  misc_feature 1..20: note = chemically synthesized
  source 1..20: mol_type = other DNA
gggaggctcagtcaggggcc

SEQ ID NO: 16424 - DNA, 20 bp, synthetic construct
  misc_feature 1..20: note = chemically synthesized
  source 1..20: mol_type = other DNA
gggcccagaatcttcctccc

SEQ ID NO: 16425 - DNA, 20 bp, synthetic construct
  misc_feature 1..20: note = chemically synthesized
  source 1..20: mol_type = other DNA
ggcccagaatcttcctcccc

SEQ ID NO: 16426 - DNA, 20 bp, synthetic construct
  misc_feature 1..20: note = chemically synthesized
  source 1..20: mol_type = other DNA
tcacttcctgccactgtcct

SEQ ID NO: 16427 - DNA, 20 bp, synthetic construct
  misc_feature 1..20: note = chemically synthesized
  source 1..20: mol_type = other DNA
ttcctgccactgtcctgagt

SEQ ID NO: 16428 - DNA, 20 bp, synthetic construct
  misc_feature 1..20: note = chemically synthesized
  source 1..20: mol_type = other DNA
gagtcagacactgcccctgt

SEQ ID NO: 16429 - DNA, 20 bp, synthetic construct
  misc_feature 1..20: note = chemically synthesized
  source 1..20: mol_type = other DNA
actcttcatctttttcacac

SEQ ID NO: 16430 - DNA, 20 bp, synthetic construct
  misc_feature 1..20: note = chemically synthesized
  source 1..20: mol_type = other DNA
gacttccaccttccccactg

SEQ ID NO: 16431 - DNA, 20 bp, synthetic construct
  misc_feature 1..20: note = chemically synthesized
  source 1..20: mol_type = other DNA
ttccccactgcagccacact

SEQ ID NO: 16432 - DNA, 20 bp, synthetic construct
  misc_feature 1..20: note = chemically synthesized
  source 1..20: mol_type = other DNA
tccccactgcagccacactc

SEQ ID NO: 16433 - DNA, 20 bp, synthetic construct
  misc_feature 1..20: note = chemically synthesized
  source 1..20: mol_type = other DNA
actcaggaccccatttgacc

SEQ ID NO: 16434 - DNA, 20 bp, synthetic construct
  misc_feature 1..20: note = chemically synthesized
  source 1..20: mol_type = other DNA
ctcaggaccccatttgaccc

SEQ ID NO: 16435 - DNA, 20 bp, synthetic construct
  misc_feature 1..20: note = chemically synthesized
  source 1..20: mol_type = other DNA
tcaggaccccatttgaccca

SEQ ID NO: 16436 - DNA, 20 bp, synthetic construct
  misc_feature 1..20: note = chemically synthesized
  source 1..20: mol_type = other DNA
aggaccccatttgacccagg

SEQ ID NO: 16437 - DNA, 20 bp, synthetic construct
  misc_feature 1..20: note = chemically synthesized
  source 1..20: mol_type = other DNA
ggaccccatttgacccaggg

SEQ ID NO: 16438 - DNA, 20 bp, synthetic construct
  misc_feature 1..20: note = chemically synthesized
  source 1..20: mol_type = other DNA
ccactgcccactcccgctct

SEQ ID NO: 16439 - DNA, 20 bp, synthetic construct
  misc_feature 1..20: note = chemically synthesized
  source 1..20: mol_type = other DNA
gcccactcccgctctgagca

SEQ ID NO: 16440 - DNA, 20 bp, synthetic construct
  misc_feature 1..20: note = chemically synthesized
  source 1..20: mol_type = other DNA
ctgcccccaccccttcctcc

SEQ ID NO: 16441 - DNA, 20 bp, synthetic construct
  misc_feature 1..20: note = chemically synthesized
  source 1..20: mol_type = other DNA
tgcccccaccccttcctcca

SEQ ID NO: 16442 - DNA, 20 bp, synthetic construct
  misc_feature 1..20: note = chemically synthesized
  source 1..20: mol_type = other DNA
cctttgcattcctctccatc

SEQ ID NO: 16443 - DNA, 20 bp, synthetic construct
  misc_feature 1..20: note = chemically synthesized
  source 1..20: mol_type = other DNA
ttgcattcctctccatccag

SEQ ID NO: 16444 - DNA, 20 bp, synthetic construct
  misc_feature 1..20: note = chemically synthesized
  source 1..20: mol_type = other DNA
ccagaagcgctccatgacca

SEQ ID NO: 16445 - DNA, 20 bp, synthetic construct
  misc_feature 1..20: note = chemically synthesized
  source 1..20: mol_type = other DNA
tgaccacggtgttccccacc

SEQ ID NO: 16446 - DNA, 20 bp, synthetic construct
  misc_feature 1..20: note = chemically synthesized
  source 1..20: mol_type = other DNA
cacggtgttccccaccaagc

SEQ ID NO: 16447 - DNA, 20 bp, synthetic construct
  misc_feature 1..20: note = chemically synthesized
  source 1..20: mol_type = other DNA
cccaccaagctggccctcca

SEQ ID NO: 16448 - DNA, 20 bp, synthetic construct
  misc_feature 1..20: note = chemically synthesized
  source 1..20: mol_type = other DNA
caagctggccctccatggct

SEQ ID NO: 16449 - DNA, 20 bp, synthetic construct
  misc_feature 1..20: note = chemically synthesized
  source 1..20: mol_type = other DNA
gagtccctgactgctgtctt

SEQ ID NO: 16450 - DNA, 20 bp, synthetic construct
  misc_feature 1..20: note = chemically synthesized
  source 1..20: mol_type = other DNA
tgtcttcagcaccctccact

SEQ ID NO: 16451 - DNA, 20 bp, synthetic construct
  misc_feature 1..20: note = chemically synthesized
  source 1..20: mol_type = other DNA
tcttcagcaccctccactca

SEQ ID NO: 16452 - DNA, 20 bp, synthetic construct
  misc_feature 1..20: note = chemically synthesized
  source 1..20: mol_type = other DNA
cttcagcaccctccactcag

SEQ ID NO: 16453 - DNA, 20 bp, synthetic construct
  misc_feature 1..20: note = chemically synthesized
  source 1..20: mol_type = other DNA
ttcagcaccctccactcaga

SEQ ID NO: 16454 - DNA, 20 bp, synthetic construct
  misc_feature 1..20: note = chemically synthesized
  source 1..20: mol_type = other DNA
gagggtcctgtcctgcttcc

SEQ ID NO: 16455 - DNA, 20 bp, synthetic construct
  misc_feature 1..20: note = chemically synthesized
  source 1..20: mol_type = other DNA
gacttatcaactcccaatgc

SEQ ID NO: 16456 - DNA, 20 bp, synthetic construct
  misc_feature 1..20: note = chemically synthesized
  source 1..20: mol_type = other DNA
acttatcaactcccaatgct

SEQ ID NO: 16457 - DNA, 20 bp, synthetic construct
  misc_feature 1..20: note = chemically synthesized
  source 1..20: mol_type = other DNA
atcaactcccaatgctgggt

SEQ ID NO: 16458 - DNA, 20 bp, synthetic construct
  misc_feature 1..20: note = chemically synthesized
  source 1..20: mol_type = other DNA
ctcccaatgctgggtcagcc

SEQ ID NO: 16459 - DNA, 20 bp, synthetic construct
  misc_feature 1..20: note = chemically synthesized
  source 1..20: mol_type = other DNA
ctgtatatccaccctgaaac

SEQ ID NO: 16460 - DNA, 20 bp, synthetic construct
  misc_feature 1..20: note = chemically synthesized
  source 1..20: mol_type = other DNA
ccctgaaaccagactgccca

SEQ ID NO: 16461 - DNA, 20 bp, synthetic construct
  misc_feature 1..20: note = chemically synthesized
  source 1..20: mol_type = other DNA
cctgaaaccagactgcccac

SEQ ID NO: 16462 - DNA, 20 bp, synthetic construct
  misc_feature 1..20: note = chemically synthesized
  source 1..20: mol_type = other DNA
ctgaaaccagactgcccaca

SEQ ID NO: 16463 - DNA, 20 bp, synthetic construct
  misc_feature 1..20: note = chemically synthesized
  source 1..20: mol_type = other DNA
aaaccagactgcccacaggg

SEQ ID NO: 16464 - DNA, 20 bp, synthetic construct
  misc_feature 1..20: note = chemically synthesized
  source 1..20: mol_type = other DNA
agactgcccacagggtagcc

SEQ ID NO: 16465 - DNA, 20 bp, synthetic construct
  misc_feature 1..20: note = chemically synthesized
  source 1..20: mol_type = other DNA
gggtagcccagctgtgcctc

SEQ ID NO: 16466 - DNA, 20 bp, synthetic construct
  misc_feature 1..20: note = chemically synthesized
  source 1..20: mol_type = other DNA
ggtagcccagctgtgcctcc

SEQ ID NO: 16467 - DNA, 20 bp, synthetic construct
  misc_feature 1..20: note = chemically synthesized
  source 1..20: mol_type = other DNA
agcccagctgtgcctccagg

SEQ ID NO: 16468 - DNA, 20 bp, synthetic construct
  misc_feature 1..20: note = chemically synthesized
  source 1..20: mol_type = other DNA
ctgtgcctccaggtagctct

SEQ ID NO: 16469 - DNA, 20 bp, synthetic construct
  misc_feature 1..20: note = chemically synthesized
  source 1..20: mol_type = other DNA
gtagctctgagatcatgcac

SEQ ID NO: 16470 - DNA, 20 bp, synthetic construct
  misc_feature 1..20: note = chemically synthesized
  source 1..20: mol_type = other DNA
ccattttctcgtgtgtaaaa

SEQ ID NO: 16471 - DNA, 20 bp, synthetic construct
  misc_feature 1..20: note = chemically synthesized
  source 1..20: mol_type = other DNA
attttctcgtgtgtaaaatg

SEQ ID NO: 16472 - DNA, 20 bp, synthetic construct
  misc_feature 1..20: note = chemically synthesized
  source 1..20: mol_type = other DNA
cgtgtgtaaaatggagatca

SEQ ID NO: 16473 - DNA, 20 bp, synthetic construct
  misc_feature 1..20: note = chemically synthesized
  source 1..20: mol_type = other DNA
taaaatggagatcacagtcg

SEQ ID NO: 16474 - DNA, 20 bp, synthetic construct
  misc_feature 1..20: note = chemically synthesized
  source 1..20: mol_type = other DNA
cacagtcgtagctacccgat

SEQ ID NO: 16475 - DNA, 20 bp, synthetic construct
  misc_feature 1..20: note = chemically synthesized
  source 1..20: mol_type = other DNA
agctacccgattggattgct

SEQ ID NO: 16476 - DNA, 20 bp, synthetic construct
  misc_feature 1..20: note = chemically synthesized
  source 1..20: mol_type = other DNA
gattggattgctcggataat

SEQ ID NO: 16477 - DNA, 20 bp, synthetic construct
  misc_feature 1..20: note = chemically synthesized
  source 1..20: mol_type = other DNA
gattgctcggataattagat

SEQ ID NO: 16478 - DNA, 20 bp, synthetic construct
  misc_feature 1..20: note = chemically synthesized
  source 1..20: mol_type = other DNA
aaaatatgtaatgtgcttct

SEQ ID NO: 16479 - DNA, 20 bp, synthetic construct
  misc_feature 1..20: note = chemically synthesized
  source 1..20: mol_type = other DNA
aaatatgtaatgtgcttctt

SEQ ID NO: 16480 - DNA, 20 bp, synthetic construct
  misc_feature 1..20: note = chemically synthesized
  source 1..20: mol_type = other DNA
gtaatgtgcttcttaggcaa

SEQ ID NO: 16481 - DNA, 20 bp, synthetic construct
  misc_feature 1..20: note = chemically synthesized
  source 1..20: mol_type = other DNA
aggcaaaagtttgaacataa

SEQ ID NO: 16482 - DNA, 20 bp, synthetic construct
  misc_feature 1..20: note = chemically synthesized
  source 1..20: mol_type = other DNA
aaaagtttgaacataaaaga

SEQ ID NO: 16483 - DNA, 20 bp, synthetic construct
  misc_feature 1..20: note = chemically synthesized
  source 1..20: mol_type = other DNA
aaagtttgaacataaaagac

SEQ ID NO: 16484 - DNA, 20 bp, synthetic construct
  misc_feature 1..20: note = chemically synthesized
  source 1..20: mol_type = other DNA
aagtttgaacataaaagaca

SEQ ID NO: 16485 - DNA, 20 bp, synthetic construct
  misc_feature 1..20: note = chemically synthesized
  source 1..20: mol_type = other DNA
ataaaagacagggtctgccc

SEQ ID NO: 16486 - DNA, 20 bp, synthetic construct
  misc_feature 1..20: note = chemically synthesized
  source 1..20: mol_type = other DNA
aagacagggtctgcccaaga

SEQ ID NO: 16487 - DNA, 20 bp, synthetic construct
  misc_feature 1..20: note = chemically synthesized
  source 1..20: mol_type = other DNA
agacagggtctgcccaagat

SEQ ID NO: 16488 - DNA, 20 bp, synthetic construct
  misc_feature 1..20: note = chemically synthesized
  source 1..20: mol_type = other DNA
cagggtctgcccaagatggg

SEQ ID NO: 16489 - DNA, 20 bp, synthetic construct
  misc_feature 1..20: note = chemically synthesized
  source 1..20: mol_type = other DNA
gggtctgcccaagatgggaa

SEQ ID NO: 16490 - DNA, 20 bp, synthetic construct
  misc_feature 1..20: note = chemically synthesized
  source 1..20: mol_type = other DNA
gggaagagttcttctctccc

SEQ ID NO: 16491 - DNA, 20 bp, synthetic construct
  misc_feature 1..20: note = chemically synthesized
  source 1..20: mol_type = other DNA
agaaacaatcaaaacaaaaa

SEQ ID NO: 16492 - DNA, 20 bp, synthetic construct
  misc_feature 1..20: note = chemically synthesized
  source 1..20: mol_type = other DNA
aaaacaaaaacagacaacta

SEQ ID NO: 16493 - DNA, 20 bp, synthetic construct
  misc_feature 1..20: note = chemically synthesized
  source 1..20: mol_type = other DNA
aaacagacaactatagaaca

SEQ ID NO: 16494 - DNA, 20 bp, synthetic construct
  misc_feature 1..20: note = chemically synthesized
  source 1..20: mol_type = other DNA
cagacaactatagaacatgg

SEQ ID NO: 16495 - DNA, 20 bp, synthetic construct
  misc_feature 1..20: note = chemically synthesized
  source 1..20: mol_type = other DNA
tatagaacatggcagctttc

SEQ ID NO: 16496 - DNA, 20 bp, synthetic construct
  misc_feature 1..20: note = chemically synthesized
  source 1..20: mol_type = other DNA
catggcagctttcaagactc

SEQ ID NO: 16497 - DNA, 20 bp, synthetic construct
  misc_feature 1..20: note = chemically synthesized
  source 1..20: mol_type = other DNA
gctttcaagactctggacat

SEQ ID NO: 16498 - DNA, 20 bp, synthetic construct
  misc_feature 1..20: note = chemically synthesized
  source 1..20: mol_type = other DNA
ctttcaagactctggacatc

SEQ ID NO: 16499 - DNA, 20 bp, synthetic construct
  misc_feature 1..20: note = chemically synthesized
  source 1..20: mol_type = other DNA
caagactctggacatcaggc

SEQ ID NO: 16500 - DNA, 20 bp, synthetic construct
  misc_feature 1..20: note = chemically synthesized
  source 1..20: mol_type = other DNA
aagactctggacatcaggca

SEQ ID NO: 16501 - DNA, 20 bp, synthetic construct
  misc_feature 1..20: note = chemically synthesized
  source 1..20: mol_type = other DNA
gactctggacatcaggcaag

SEQ ID NO: 16502 - DNA, 20 bp, synthetic construct
  misc_feature 1..20: note = chemically synthesized
  source 1..20: mol_type = other DNA
actctggacatcaggcaagg

SEQ ID NO: 16503 - DNA, 20 bp, synthetic construct
  misc_feature 1..20: note = chemically synthesized
  source 1..20: mol_type = other DNA
tctggacatcaggcaaggag

SEQ ID NO: 16504 - DNA, 20 bp, synthetic construct
  misc_feature 1..20: note = chemically synthesized
  source 1..20: mol_type = other DNA
acatcaggcaaggaggagta

SEQ ID NO: 16505 - DNA, 20 bp, synthetic construct
  misc_feature 1..20: note = chemically synthesized
  source 1..20: mol_type = other DNA
aaggaggagtaaagatccct

SEQ ID NO: 16506 - DNA, 20 bp, synthetic construct
  misc_feature 1..20: note = chemically synthesized
  source 1..20: mol_type = other DNA
aggaggagtaaagatccctg

SEQ ID NO: 16507 - DNA, 20 bp, synthetic construct
  misc_feature 1..20: note = chemically synthesized
  source 1..20: mol_type = other DNA
ggaggagtaaagatccctga

SEQ ID NO: 16508 - DNA, 20 bp, synthetic construct
  misc_feature 1..20: note = chemically synthesized
  source 1..20: mol_type = other DNA
agtaaagatccctgagggat

SEQ ID NO: 16509 - DNA, 20 bp, synthetic construct
  misc_feature 1..20: note = chemically synthesized
  source 1..20: mol_type = other DNA
aaagatccctgagggataag

SEQ ID NO: 16510 - DNA, 20 bp, synthetic construct
  misc_feature 1..20: note = chemically synthesized
  source 1..20: mol_type = other DNA
gagggataagaagcaaacaa

SEQ ID NO: 16511 - DNA, 20 bp, synthetic construct
  misc_feature 1..20: note = chemically synthesized
  source 1..20: mol_type = other DNA
agggataagaagcaaacaac

SEQ ID NO: 16512 - DNA, 20 bp, synthetic construct
  misc_feature 1..20: note = chemically synthesized
  source 1..20: mol_type = other DNA
caggaaccctccgatcaccc

SEQ ID NO: 16513 - DNA, 20 bp, synthetic construct
  misc_feature 1..20: note = chemically synthesized
  source 1..20: mol_type = other DNA
gatcaccccagcttactgtt

SEQ ID NO: 16514 - DNA, 20 bp, synthetic construct
  misc_feature 1..20: note = chemically synthesized
  source 1..20: mol_type = other DNA
tcaccccagcttactgtttg

SEQ ID NO: 16515 - DNA, 20 bp, synthetic construct
  misc_feature 1..20: note = chemically synthesized
  source 1..20: mol_type = other DNA
accccagcttactgtttgga

SEQ ID NO: 16516 - DNA, 20 bp, synthetic construct
  misc_feature 1..20: note = chemically synthesized
  source 1..20: mol_type = other DNA
cccagcttactgtttggaga

SEQ ID NO: 16517 - DNA, 20 bp, synthetic construct
  misc_feature 1..20: note = chemically synthesized
  source 1..20: mol_type = other DNA
tactgtttggagagagtctg

SEQ ID NO: 16518 - DNA, 20 bp, synthetic construct
  misc_feature 1..20: note = chemically synthesized
  source 1..20: mol_type = other DNA
actgtttggagagagtctgc

SEQ ID NO: 16519 - DNA, 20 bp, synthetic construct
  misc_feature 1..20: note = chemically synthesized
  source 1..20: mol_type = other DNA
tggagagagtctgcaggtta

SEQ ID NO: 16520 - DNA, 20 bp, synthetic construct
  misc_feature 1..20: note = chemically synthesized
  source 1..20: mol_type = other DNA
ggagagagtctgcaggttac

SEQ ID NO: 16521 - DNA, 20 bp, synthetic construct
  misc_feature 1..20: note = chemically synthesized
  source 1..20: mol_type = other DNA
agagtctgcaggttacaggc

SEQ ID NO: 16522 - DNA, 20 bp, synthetic construct
  misc_feature 1..20: note = chemically synthesized
  source 1..20: mol_type = other DNA
gagtctgcaggttacaggcc

SEQ ID NO: 16523 - DNA, 20 bp, synthetic construct
  misc_feature 1..20: note = chemically synthesized
  source 1..20: mol_type = other DNA
ctgcaggttacaggccagga

SEQ ID NO: 16524 - DNA, 20 bp, synthetic construct
  misc_feature 1..20: note = chemically synthesized
  source 1..20: mol_type = other DNA
tgcaggttacaggccaggaa

SEQ ID NO: 16525 - DNA, 20 bp, synthetic construct
  misc_feature 1..20: note = chemically synthesized
  source 1..20: mol_type = other DNA
gcaggttacaggccaggaaa

SEQ ID NO: 16526 - DNA, 20 bp, synthetic construct
  misc_feature 1..20: note = chemically synthesized
  source 1..20: mol_type = other DNA
ggttacaggccaggaaaggg

SEQ ID NO: 16527 - DNA, 20 bp, synthetic construct
  misc_feature 1..20: note = chemically synthesized
  source 1..20: mol_type = other DNA
caggccaggaaagggaagtc

SEQ ID NO: 16528 - DNA, 20 bp, synthetic construct
  misc_feature 1..20: note = chemically synthesized
  source 1..20: mol_type = other DNA
aggccaggaaagggaagtcc

SEQ ID NO: 16529 - DNA, 20 bp, synthetic construct
  misc_feature 1..20: note = chemically synthesized
  source 1..20: mol_type = other DNA
ccaggaaagggaagtccagg

SEQ ID NO: 16530 - DNA, 20 bp, synthetic construct
  misc_feature 1..20: note = chemically synthesized
  source 1..20: mol_type = other DNA
aggaaagggaagtccaggca

SEQ ID NO: 16531 - DNA, 20 bp, synthetic construct
  misc_feature 1..20: note = chemically synthesized
  source 1..20: mol_type = other DNA
gggaagtccaggcagagccc

SEQ ID NO: 16532 - DNA, 20 bp, synthetic construct
  misc_feature 1..20: note = chemically synthesized
  source 1..20: mol_type = other DNA
gaagtccaggcagagcccaa

SEQ ID NO: 16533 - DNA, 20 bp, synthetic construct
  misc_feature 1..20: note = chemically synthesized
  source 1..20: mol_type = other DNA
cccaagagactccccacgtt

SEQ ID NO: 16534 - DNA, 20 bp, synthetic construct
  misc_feature 1..20: note = chemically synthesized
  source 1..20: mol_type = other DNA
ccaagagactccccacgttg

SEQ ID NO: 16535 - DNA, 20 bp, synthetic construct
  misc_feature 1..20: note = chemically synthesized
  source 1..20: mol_type = other DNA
aagagactccccacgttgag

SEQ ID NO: 16536 - DNA, 20 bp, synthetic construct
  misc_feature 1..20: note = chemically synthesized
  source 1..20: mol_type = other DNA
gactccccacgttgaggaga

SEQ ID NO: 16537 - DNA, 20 bp, synthetic construct
  misc_feature 1..20: note = chemically synthesized
  source 1..20: mol_type = other DNA
ctccccacgttgaggagatg

SEQ ID NO: 16538 - DNA, 20 bp, synthetic construct
  misc_feature 1..20: note = chemically synthesized
  source 1..20: mol_type = other DNA
cacgttgaggagatggagct

SEQ ID NO: 16539 - DNA, 20 bp, synthetic construct
  misc_feature 1..20: note = chemically synthesized
  source 1..20: mol_type = other DNA
cgttgaggagatggagctga

SEQ ID NO: 16540 - DNA, 20 bp, synthetic construct
  misc_feature 1..20: note = chemically synthesized
  source 1..20: mol_type = other DNA
ggagatggagctgagagtcc

SEQ ID NO: 16541 - DNA, 20 bp, synthetic construct
  misc_feature 1..20: note = chemically synthesized
  source 1..20: mol_type = other DNA
gagatggagctgagagtccg

SEQ ID NO: 16542 - DNA, 20 bp, synthetic construct
  misc_feature 1..20: note = chemically synthesized
  source 1..20: mol_type = other DNA
gatggagctgagagtccgag

SEQ ID NO: 16543 - DNA, 20 bp, synthetic construct
  misc_feature 1..20: note = chemically synthesized
  source 1..20: mol_type = other DNA
ccgaggagaccaaaacaatt

SEQ ID NO: 16544 - DNA, 20 bp, synthetic construct
  misc_feature 1..20: note = chemically synthesized
  source 1..20: mol_type = other DNA
gaggagaccaaaacaattaa

SEQ ID NO: 16545 - DNA, 20 bp, synthetic construct
  misc_feature 1..20: note = chemically synthesized
  source 1..20: mol_type = other DNA
caaacgatcaaactgactct

SEQ ID NO: 16546 - DNA, 20 bp, synthetic construct
  misc_feature 1..20: note = chemically synthesized
  source 1..20: mol_type = other DNA
taagttgcttaactgcatcc

SEQ ID NO: 16547 - DNA, 20 bp, synthetic construct
  misc_feature 1..20: note = chemically synthesized
  source 1..20: mol_type = other DNA
agttgcttaactgcatcccg

SEQ ID NO: 16548 - DNA, 20 bp, synthetic construct
  misc_feature 1..20: note = chemically synthesized
  source 1..20: mol_type = other DNA
cttaactgcatcccggagca

SEQ ID NO: 16549 - DNA, 20 bp, synthetic construct
  misc_feature 1..20: note = chemically synthesized
  source 1..20: mol_type = other DNA
tgcatcccggagcaaagctc

SEQ ID NO: 16550 - DNA, 20 bp, synthetic construct
  misc_feature 1..20: note = chemically synthesized
  source 1..20: mol_type = other DNA
gagcaaagctcaagaacatt

SEQ ID NO: 16551 - DNA, 20 bp, synthetic construct
  misc_feature 1..20: note = chemically synthesized
  source 1..20: mol_type = other DNA
gcaaagctcaagaacattta

SEQ ID NO: 16552 - DNA, 20 bp, synthetic construct
  misc_feature 1..20: note = chemically synthesized
  source 1..20: mol_type = other DNA
caaagctcaagaacatttag

SEQ ID NO: 16553 - DNA, 20 bp, synthetic construct
  misc_feature 1..20: note = chemically synthesized
  source 1..20: mol_type = other DNA
tagaggaatacaaaaatatc

SEQ ID NO: 16554 - DNA, 20 bp, synthetic construct
  misc_feature 1..20: note = chemically synthesized
  source 1..20: mol_type = other DNA
aaaaatatccagcacccaac

SEQ ID NO: 16555 - DNA, 20 bp, synthetic construct
  misc_feature 1..20: note = chemically synthesized
  source 1..20: mol_type = other DNA
aaaatatccagcacccaaca

SEQ ID NO: 16556 - DNA, 20 bp, synthetic construct
  misc_feature 1..20: note = chemically synthesized
  source 1..20: mol_type = other DNA
aaggtgaaattgacaatgtc

SEQ ID NO: 16557 - DNA, 20 bp, synthetic construct
  misc_feature 1..20: note = chemically synthesized
  source 1..20: mol_type = other DNA
gtgaaattgacaatgtctgg

SEQ ID NO: 16558 - DNA, 20 bp, synthetic construct
  misc_feature 1..20: note = chemically synthesized
  source 1..20: mol_type = other DNA
caatgtctggcagccaatca

SEQ ID NO: 16559 - DNA, 20 bp, synthetic construct
  misc_feature 1..20: note = chemically synthesized
  source 1..20: mol_type = other DNA
ggcagccaatcaaagattac

SEQ ID NO: 16560 - DNA, 20 bp, synthetic construct
  misc_feature 1..20: note = chemically synthesized
  source 1..20: mol_type = other DNA
gcagccaatcaaagattaca

SEQ ID NO: 16561 - DNA, 20 bp, synthetic construct
  misc_feature 1..20: note = chemically synthesized
  source 1..20: mol_type = other DNA
ttacaaggcatgcaatgaaa

SEQ ID NO: 16562 - DNA, 20 bp, synthetic construct
  misc_feature 1..20: note = chemically synthesized
  source 1..20: mol_type = other DNA
tacaaggcatgcaatgaaac

SEQ ID NO: 16563 - DNA, 20 bp, synthetic construct
  misc_feature 1..20: note = chemically synthesized
  source 1..20: mol_type = other DNA
gggaaaacacaatgcataac

SEQ ID NO: 16564 - DNA, 20 bp, synthetic construct
  misc_feature 1..20: note = chemically synthesized
  source 1..20: mol_type = other DNA
ggaaaacacaatgcataacg

SEQ ID NO: 16565 - DNA, 20 bp, synthetic construct
  misc_feature 1..20: note = chemically synthesized
  source 1..20: mol_type = other DNA
aaaacacaatgcataacgag

SEQ ID NO: 16566 - DNA, 20 bp, synthetic construct
  misc_feature 1..20: note = chemically synthesized
  source 1..20: mol_type = other DNA
aaacacaatgcataacgagg

SEQ ID NO: 16567 - DNA, 20 bp, synthetic construct
  misc_feature 1..20: note = chemically synthesized
  source 1..20: mol_type = other DNA
aggaggttcataaatatcaa

SEQ ID NO: 16568 - DNA, 20 bp, synthetic construct
  misc_feature 1..20: note = chemically synthesized
  source 1..20: mol_type = other DNA
gaggttcataaatatcaaaa

SEQ ID NO: 16569 - DNA, 20 bp, synthetic construct
  misc_feature 1..20: note = chemically synthesized
  source 1..20: mol_type = other DNA
cataaatatcaaaagagatc

SEQ ID NO: 16570 - DNA, 20 bp, synthetic construct
  misc_feature 1..20: note = chemically synthesized
  source 1..20: mol_type = other DNA
aaagagatccagaactgaca

SEQ ID NO: 16571 - DNA, 20 bp, synthetic construct
  misc_feature 1..20: note = chemically synthesized
  source 1..20: mol_type = other DNA
tccagaactgacacggatgc

SEQ ID NO: 16572 - DNA, 20 bp, synthetic construct
  misc_feature 1..20: note = chemically synthesized
  source 1..20: mol_type = other DNA
actgacacggatgctagaat

SEQ ID NO: 16573 - DNA, 20 bp, synthetic construct
  misc_feature 1..20: note = chemically synthesized
  source 1..20: mol_type = other DNA
gacacggatgctagaattag

SEQ ID NO: 16574 - DNA, 20 bp, synthetic construct
  misc_feature 1..20: note = chemically synthesized
  source 1..20: mol_type = other DNA
acacggatgctagaattagc

SEQ ID NO: 16575 - DNA, 20 bp, synthetic construct
  misc_feature 1..20: note = chemically synthesized
  source 1..20: mol_type = other DNA
ggatgctagaattagcaggc

SEQ ID NO: 16576 - DNA, 20 bp, synthetic construct
  misc_feature 1..20: note = chemically synthesized
  source 1..20: mol_type = other DNA
gatgctagaattagcaggca

SEQ ID NO: 16577 - DNA, 20 bp, synthetic construct
  misc_feature 1..20: note = chemically synthesized
  source 1..20: mol_type = other DNA
ctagaattagcaggcaagga

SEQ ID NO: 16578 - DNA, 20 bp, synthetic construct
  misc_feature 1..20: note = chemically synthesized
  source 1..20: mol_type = other DNA
agcaggcaaggatggtaaaa

SEQ ID NO: 16579 - DNA, 20 bp, synthetic construct
  misc_feature 1..20: note = chemically synthesized
  source 1..20: mol_type = other DNA
ggatggtaaaacagatatta

SEQ ID NO: 16580 - DNA, 20 bp, synthetic construct
  misc_feature 1..20: note = chemically synthesized
  source 1..20: mol_type = other DNA
cccattatgttcaaaaaatt

SEQ ID NO: 16581 - DNA, 20 bp, synthetic construct
  misc_feature 1..20: note = chemically synthesized
  source 1..20: mol_type = other DNA
attatgttcaaaaaattaag

SEQ ID NO: 16582 - DNA, 20 bp, synthetic construct
  misc_feature 1..20: note = chemically synthesized
  source 1..20: mol_type = other DNA
caaaaaattaagtagaattg

SEQ ID NO: 16583 - DNA, 20 bp, synthetic construct
  misc_feature 1..20: note = chemically synthesized
  source 1..20: mol_type = other DNA
aaaaattaagtagaattgtg

SEQ ID NO: 16584 - DNA, 20 bp, synthetic construct
  misc_feature 1..20: note = chemically synthesized
  source 1..20: mol_type = other DNA
aaaattaagtagaattgtgg

SEQ ID NO: 16585 - DNA, 20 bp, synthetic construct
  misc_feature 1..20: note = chemically synthesized
  source 1..20: mol_type = other DNA
tagaattgtggaggatattt

SEQ ID NO: 16586 - DNA, 20 bp, synthetic construct
  misc_feature 1..20: note = chemically synthesized
  source 1..20: mol_type = other DNA
gaattgtggaggatatttaa

SEQ ID NO: 16587 - DNA, 20 bp, synthetic construct
  misc_feature 1..20: note = chemically synthesized
  source 1..20: mol_type = other DNA
ggaggatatttaagagtccc

SEQ ID NO: 16588 - DNA, 20 bp, synthetic construct
  misc_feature 1..20: note = chemically synthesized
  source 1..20: mol_type = other DNA
gaggatatttaagagtcccc

SEQ ID NO: 16589 - DNA, 20 bp, synthetic construct
  misc_feature 1..20: note = chemically synthesized
  source 1..20: mol_type = other DNA
agagtccccaggtgaacttc

SEQ ID NO: 16590 - DNA, 20 bp, synthetic construct
  misc_feature 1..20: note = chemically synthesized
  source 1..20: mol_type = other DNA
agtccccaggtgaacttcta

SEQ ID NO: 16591 - DNA, 20 bp, synthetic construct
  misc_feature 1..20: note = chemically synthesized
  source 1..20: mol_type = other DNA
tctgaaatgaaaaaacacac

SEQ ID NO: 16592 - DNA, 20 bp, synthetic construct
  misc_feature 1..20: note = chemically synthesized
  source 1..20: mol_type = other DNA
aaatgaaaaaacacactggc

SEQ ID NO: 16593 - DNA, 20 bp, synthetic construct
  misc_feature 1..20: note = chemically synthesized
  source 1..20: mol_type = other DNA
aatgaaaaaacacactggcc

SEQ ID NO: 16594 - DNA, 20 bp, synthetic construct
  misc_feature 1..20: note = chemically synthesized
  source 1..20: mol_type = other DNA
aacacactggccaggcgccg

SEQ ID NO: 16595 - DNA, 20 bp, synthetic construct
  misc_feature 1..20: note = chemically synthesized
  source 1..20: mol_type = other DNA
caggcgccgtggctcacgcc

SEQ ID NO: 16596 - DNA, 20 bp, synthetic construct
  misc_feature 1..20: note = chemically synthesized
  source 1..20: mol_type = other DNA
gtggctcacgcctggaatcc

SEQ ID NO: 16597 - DNA, 20 bp, synthetic construct
  misc_feature 1..20: note = chemically synthesized
  source 1..20: mol_type = other DNA
cgcctggaatcccagcactg

SEQ ID NO: 16598 - DNA, 20 bp, synthetic construct
  misc_feature 1..20: note = chemically synthesized
  source 1..20: mol_type = other DNA
gcctggaatcccagcactgt

SEQ ID NO: 16599 - DNA, 20 bp, synthetic construct
  misc_feature 1..20: note = chemically synthesized
  source 1..20: mol_type = other DNA
ctggaatcccagcactgtgg

SEQ ID NO: 16600 - DNA, 20 bp, synthetic construct
  misc_feature 1..20: note = chemically synthesized
  source 1..20: mol_type = other DNA
tggaatcccagcactgtggg

SEQ ID NO: 16601 - DNA, 20 bp, synthetic construct
  misc_feature 1..20: note = chemically synthesized
  source 1..20: mol_type = other DNA
tcccagcactgtgggaggcc

SEQ ID NO: 16602 - DNA, 20 bp, synthetic construct
  misc_feature 1..20: note = chemically synthesized
  source 1..20: mol_type = other DNA
cccagcactgtgggaggcca

SEQ ID NO: 16603 - DNA, 20 bp, synthetic construct
  misc_feature 1..20: note = chemically synthesized
  source 1..20: mol_type = other DNA
agcactgtgggaggccaagg

SEQ ID NO: 16604 - DNA, 20 bp, synthetic construct
  misc_feature 1..20: note = chemically synthesized
  source 1..20: mol_type = other DNA
gcactgtgggaggccaaggc

SEQ ID NO: 16605 - DNA, 20 bp, synthetic construct
  misc_feature 1..20: note = chemically synthesized
  source 1..20: mol_type = other DNA
ctgtgggaggccaaggcggg

SEQ ID NO: 16606 - DNA, 20 bp, synthetic construct
  misc_feature 1..20: note = chemically synthesized
  source 1..20: mol_type = other DNA
ggccaaggcgggcagatcat

SEQ ID NO: 16607 - DNA, 20 bp, synthetic construct
  misc_feature 1..20: note = chemically synthesized
  source 1..20: mol_type = other DNA
gccaaggcgggcagatcatg

SEQ ID NO: 16608 - DNA, 20 bp, synthetic construct
  misc_feature 1..20: note = chemically synthesized
  source 1..20: mol_type = other DNA
aggcgggcagatcatgaggt

SEQ ID NO: 16609 - DNA, 20 bp, synthetic construct
  misc_feature 1..20: note = chemically synthesized
  source 1..20: mol_type = other DNA
ggcgggcagatcatgaggtc

SEQ ID NO: 16610 - DNA, 20 bp, synthetic construct
  misc_feature 1..20: note = chemically synthesized
  source 1..20: mol_type = other DNA
cgggcagatcatgaggtcag

SEQ ID NO: 16611 - DNA, 20 bp, synthetic construct
  misc_feature 1..20: note = chemically synthesized
  source 1..20: mol_type = other DNA
tcaggagatcgacaccatcc

SEQ ID NO: 16612 - DNA, 20 bp, synthetic construct
  misc_feature 1..20: note = chemically synthesized
  source 1..20: mol_type = other DNA
cgacaccatcctggctaaca

SEQ ID NO: 16613 - DNA, 20 bp, synthetic construct
  misc_feature 1..20: note = chemically synthesized
  source 1..20: mol_type = other DNA
ctactaaaaatacaaaaaat

SEQ ID NO: 16614 - DNA, 20 bp, synthetic construct
  misc_feature 1..20: note = chemically synthesized
  source 1..20: mol_type = other DNA
taaaaatacaaaaaattagc

SEQ ID NO: 16615 - DNA, 20 bp, synthetic construct
  misc_feature 1..20: note = chemically synthesized
  source 1..20: mol_type = other DNA
tacaaaaaattagccagacg

SEQ ID NO: 16616 - DNA, 20 bp, synthetic construct
  misc_feature 1..20: note = chemically synthesized
  source 1..20: mol_type = other DNA
aaaaaattagccagacgtgg

SEQ ID NO: 16617 - DNA, 20 bp, synthetic construct
  misc_feature 1..20: note = chemically synthesized
  source 1..20: mol_type = other DNA
aaattagccagacgtggtgg

SEQ ID NO: 16618 - DNA, 20 bp, synthetic construct
  misc_feature 1..20: note = chemically synthesized
  source 1..20: mol_type = other DNA
aattagccagacgtggtggc

SEQ ID NO: 16619 - DNA, 20 bp, synthetic construct
  misc_feature 1..20: note = chemically synthesized
  source 1..20: mol_type = other DNA
gacgtggtggcaggcgcctg

SEQ ID NO: 16620 - DNA, 20 bp, synthetic construct
  misc_feature 1..20: note = chemically synthesized
  source 1..20: mol_type = other DNA
gtggcaggcgcctgtagtcc

SEQ ID NO: 16621 - DNA, 20 bp, synthetic construct
  misc_feature 1..20: note = chemically synthesized
  source 1..20: mol_type = other DNA
cgcctgtagtcccagctact

SEQ ID NO: 16622 - DNA, 20 bp, synthetic construct
  misc_feature 1..20: note = chemically synthesized
  source 1..20: mol_type = other DNA
gcctgtagtcccagctactc

SEQ ID NO: 16623 - DNA, 20 bp, synthetic construct
  misc_feature 1..20: note = chemically synthesized
  source 1..20: mol_type = other DNA
ctgtagtcccagctactcgg

SEQ ID NO: 16624 - DNA, 20 bp, synthetic construct
  misc_feature 1..20: note = chemically synthesized
  source 1..20: mol_type = other DNA
tgtagtcccagctactcggg

SEQ ID NO: 16625 - DNA, 20 bp, synthetic construct
  misc_feature 1..20: note = chemically synthesized
  source 1..20: mol_type = other DNA
tcccagctactcgggaggct

SEQ ID NO: 16626 - DNA, 20 bp, synthetic construct
  misc_feature 1..20: note = chemically synthesized
  source 1..20: mol_type = other DNA
cccagctactcgggaggctg

SEQ ID NO: 16627 - DNA, 20 bp, synthetic construct
  misc_feature 1..20: note = chemically synthesized
  source 1..20: mol_type = other DNA
agctactcgggaggctgagg

SEQ ID NO: 16628 - DNA, 20 bp, synthetic construct
  misc_feature 1..20: note = chemically synthesized
  source 1..20: mol_type = other DNA
gctactcgggaggctgaggc

SEQ ID NO: 16629 - DNA, 20 bp, synthetic construct
  misc_feature 1..20: note = chemically synthesized
  source 1..20: mol_type = other DNA
tactcgggaggctgaggcag

SEQ ID NO: 16630 - DNA, 20 bp, synthetic construct
  misc_feature 1..20: note = chemically synthesized
  source 1..20: mol_type = other DNA
gggaggctgaggcaggagaa

SEQ ID NO: 16631 - DNA, 20 bp, synthetic construct
  misc_feature 1..20: note = chemically synthesized
  source 1..20: mol_type = other DNA
gcaggagaatggcatgaacc

SEQ ID NO: 16632 - DNA, 20 bp, synthetic construct
  misc_feature 1..20: note = chemically synthesized
  source 1..20: mol_type = other DNA
caggagaatggcatgaaccc

SEQ ID NO: 16633 - DNA, 20 bp, synthetic construct
  misc_feature 1..20: note = chemically synthesized
  source 1..20: mol_type = other DNA
ggagaatggcatgaacccgg

SEQ ID NO: 16634 - DNA, 20 bp, synthetic construct
  misc_feature 1..20: note = chemically synthesized
  source 1..20: mol_type = other DNA
gagaatggcatgaacccggg

SEQ ID NO: 16635 - DNA, 20 bp, synthetic construct
  misc_feature 1..20: note = chemically synthesized
  source 1..20: mol_type = other DNA
aatggcatgaacccgggagg

SEQ ID NO: 16636 - DNA, 20 bp, synthetic construct
  misc_feature 1..20: note = chemically synthesized
  source 1..20: mol_type = other DNA
tggcatgaacccgggaggca

SEQ ID NO: 16637 - DNA, 20 bp, synthetic construct
  misc_feature 1..20: note = chemically synthesized
  source 1..20: mol_type = other DNA
aacccgggaggcagagcttg

SEQ ID NO: 16638 - DNA, 20 bp, synthetic construct
  misc_feature 1..20: note = chemically synthesized
  source 1..20: mol_type = other DNA
cgggaggcagagcttgcagt

SEQ ID NO: 16639 - DNA, 20 bp, synthetic construct
  misc_feature 1..20: note = chemically synthesized
  source 1..20: mol_type = other DNA
ggcagagcttgcagtgagcc

SEQ ID NO: 16640 - DNA, 20 bp, synthetic construct
  misc_feature 1..20: note = chemically synthesized
  source 1..20: mol_type = other DNA
aagatcgcgccactgcactc

SEQ ID NO: 16641 - DNA, 20 bp, synthetic construct
  misc_feature 1..20: note = chemically synthesized
  source 1..20: mol_type = other DNA
cgcgccactgcactccggcc

SEQ ID NO: 16642 - DNA, 20 bp, synthetic construct
  misc_feature 1..20: note = chemically synthesized
  source 1..20: mol_type = other DNA
gcgccactgcactccggcct

SEQ ID NO: 16643 - DNA, 20 bp, synthetic construct
  misc_feature 1..20: note = chemically synthesized
  source 1..20: mol_type = other DNA
ctgcactccggcctgggcaa

SEQ ID NO: 16644 - DNA, 20 bp, synthetic construct
  misc_feature 1..20: note = chemically synthesized
  source 1..20: mol_type = other DNA
gcactccggcctgggcaaca

SEQ ID NO: 16645 - DNA, 20 bp, synthetic construct
  misc_feature 1..20: note = chemically synthesized
  source 1..20: mol_type = other DNA
tccggcctgggcaacagagc

SEQ ID NO: 16646 - DNA, 20 bp, synthetic construct
  misc_feature 1..20: note = chemically synthesized
  source 1..20: mol_type = other DNA
ccgcctccaaaaaaaaaaaa

SEQ ID NO: 16647 - DNA, 20 bp, synthetic construct
  misc_feature 1..20: note = chemically synthesized
  source 1..20: mol_type = other DNA
tccaaaaaaaaaaaaaagaa

SEQ ID NO: 16648 - DNA, 20 bp, synthetic construct
  misc_feature 1..20: note = chemically synthesized
  source 1..20: mol_type = other DNA
aaaaaaaaaaaaagaaaaga

SEQ ID NO: 16649 - DNA, 20 bp, synthetic construct
  misc_feature 1..20: note = chemically synthesized
  source 1..20: mol_type = other DNA
aaaaaaaagaaaagaaagaa

SEQ ID NO: 16650 - DNA, 20 bp, synthetic construct
  misc_feature 1..20: note = chemically synthesized
  source 1..20: mol_type = other DNA
aaagaaaagaaaaaacacac

SEQ ID NO: 16651 - DNA, 20 bp, synthetic construct
  misc_feature 1..20: note = chemically synthesized
  source 1..20: mol_type = other DNA
aaaagaaaaaacacactgga

SEQ ID NO: 16652 - DNA, 20 bp, synthetic construct
  misc_feature 1..20: note = chemically synthesized
  source 1..20: mol_type = other DNA
aacacactggatggaaataa

SEQ ID NO: 16653 - DNA, 20 bp, synthetic construct
  misc_feature 1..20: note = chemically synthesized
  source 1..20: mol_type = other DNA
acactggatggaaataatgg

SEQ ID NO: 16654 - DNA, 20 bp, synthetic construct
  misc_feature 1..20: note = chemically synthesized
  source 1..20: mol_type = other DNA
ggatggaaataatggaagat

SEQ ID NO: 16655 - DNA, 20 bp, synthetic construct
  misc_feature 1..20: note = chemically synthesized
  source 1..20: mol_type = other DNA
atggaagatgagaaatgcgt

SEQ ID NO: 16656 - DNA, 20 bp, synthetic construct
  misc_feature 1..20: note = chemically synthesized
  source 1..20: mol_type = other DNA
agaaatgcgtaagaaaaatt

SEQ ID NO: 16657 - DNA, 20 bp, synthetic construct
  misc_feature 1..20: note = chemically synthesized
  source 1..20: mol_type = other DNA
gaaatgcgtaagaaaaattt

SEQ ID NO: 16658 - DNA, 20 bp, synthetic construct
  misc_feature 1..20: note = chemically synthesized
  source 1..20: mol_type = other DNA
aaatgcgtaagaaaaattta

SEQ ID NO: 16659 - DNA, 20 bp, synthetic construct
  misc_feature 1..20: note = chemically synthesized
  source 1..20: mol_type = other DNA
gcgtaagaaaaatttagggc

SEQ ID NO: 16660 - DNA, 20 bp, synthetic construct
  misc_feature 1..20: note = chemically synthesized
  source 1..20: mol_type = other DNA
cgtaagaaaaatttagggcc

SEQ ID NO: 16661 - DNA, 20 bp, synthetic construct
  misc_feature 1..20: note = chemically synthesized
  source 1..20: mol_type = other DNA
aaatttagggccaggcactg

SEQ ID NO: 16662 - DNA, 20 bp, synthetic construct
  misc_feature 1..20: note = chemically synthesized
  source 1..20: mol_type = other DNA
gtggatcacatctgtaatcc

SEQ ID NO: 16663 - DNA, 20 bp, synthetic construct
  misc_feature 1..20: note = chemically synthesized
  source 1..20: mol_type = other DNA
catctgtaatcccagcactt

SEQ ID NO: 16664 - DNA, 20 bp, synthetic construct
  misc_feature 1..20: note = chemically synthesized
  source 1..20: mol_type = other DNA
atctgtaatcccagcacttt

SEQ ID NO: 16665 - DNA, 20 bp, synthetic construct
  misc_feature 1..20: note = chemically synthesized
  source 1..20: mol_type = other DNA
ctgtaatcccagcactttgg

SEQ ID NO: 16666 - DNA, 20 bp, synthetic construct
  misc_feature 1..20: note = chemically synthesized
  source 1..20: mol_type = other DNA
tgtaatcccagcactttggg

SEQ ID NO: 16667 - DNA, 20 bp, synthetic construct
  misc_feature 1..20: note = chemically synthesized
  source 1..20: mol_type = other DNA
agcactttgggaggtcgaca

SEQ ID NO: 16668 - DNA, 20 bp, synthetic construct
  misc_feature 1..20: note = chemically synthesized
  source 1..20: mol_type = other DNA
gcactttgggaggtcgacac

SEQ ID NO: 16669 - DNA, 20 bp, synthetic construct
  misc_feature 1..20: note = chemically synthesized
  source 1..20: mol_type = other DNA
cactttgggaggtcgacacg

SEQ ID NO: 16670 - DNA, 20 bp, synthetic construct
  misc_feature 1..20: note = chemically synthesized
  source 1..20: mol_type = other DNA
actttgggaggtcgacacgg

SEQ ID NO: 16671 - DNA, 20 bp, synthetic construct
  misc_feature 1..20: note = chemically synthesized
  source 1..20: mol_type = other DNA
ctttgggaggtcgacacggg

SEQ ID NO: 16672 - DNA, 20 bp, synthetic construct
  misc_feature 1..20: note = chemically synthesized
  source 1..20: mol_type = other DNA
cgacacggggggaatcactt

SEQ ID NO: 16673 - DNA, 20 bp, synthetic construct
  misc_feature 1..20: note = chemically synthesized
  source 1..20: mol_type = other DNA
cggggggaatcacttgagcc

SEQ ID NO: 16674 - DNA, 20 bp, synthetic construct
  misc_feature 1..20: note = chemically synthesized
  source 1..20: mol_type = other DNA
ggggggaatcacttgagccc

SEQ ID NO: 16675 - DNA, 20 bp, synthetic construct
  misc_feature 1..20: note = chemically synthesized
  source 1..20: mol_type = other DNA
ggggaatcacttgagcccag

SEQ ID NO: 16676 - DNA, 20 bp, synthetic construct
  misc_feature 1..20: note = chemically synthesized
  source 1..20: mol_type = other DNA
tcacttgagcccaggagctc

SEQ ID NO: 16677 - DNA, 20 bp, synthetic construct
  misc_feature 1..20: note = chemically synthesized
  source 1..20: mol_type = other DNA
tgagcccaggagctcaagac

SEQ ID NO: 16678 - DNA, 20 bp, synthetic construct
  misc_feature 1..20: note = chemically synthesized
  source 1..20: mol_type = other DNA
ccaggagctcaagactagtc

SEQ ID NO: 16679 - DNA, 20 bp, synthetic construct
  misc_feature 1..20: note = chemically synthesized
  source 1..20: mol_type = other DNA
caggagctcaagactagtct

SEQ ID NO: 16680 - DNA, 20 bp, synthetic construct
  misc_feature 1..20: note = chemically synthesized
  source 1..20: mol_type = other DNA
gagctcaagactagtctggg

SEQ ID NO: 16681 - DNA, 20 bp, synthetic construct
  misc_feature 1..20: note = chemically synthesized
  source 1..20: mol_type = other DNA
caagactagtctgggcagca

SEQ ID NO: 16682 - DNA, 20 bp, synthetic construct
  misc_feature 1..20: note = chemically synthesized
  source 1..20: mol_type = other DNA
catggcaaaacccctctaca

SEQ ID NO: 16683 - DNA, 20 bp, synthetic construct
  misc_feature 1..20: note = chemically synthesized
  source 1..20: mol_type = other DNA
tacaaaaaaaaatttttaat

SEQ ID NO: 16684 - DNA, 20 bp, synthetic construct
  misc_feature 1..20: note = chemically synthesized
  source 1..20: mol_type = other DNA
aaaaaaaatttttaattagc

SEQ ID NO: 16685 - DNA, 20 bp, synthetic construct
  misc_feature 1..20: note = chemically synthesized
  source 1..20: mol_type = other DNA
aaaaaaatttttaattagcc

SEQ ID NO: 16686 - DNA, 20 bp, synthetic construct
  misc_feature 1..20: note = chemically synthesized
  source 1..20: mol_type = other DNA
aatttttaattagccaggtg

SEQ ID NO: 16687 - DNA, 20 bp, synthetic construct
  misc_feature 1..20: note = chemically synthesized
  source 1..20: mol_type = other DNA
ggtgtggtgccacatgccta

SEQ ID NO: 16688 - DNA, 20 bp, synthetic construct
  misc_feature 1..20: note = chemically synthesized
  source 1..20: mol_type = other DNA
gtgccacatgcctatagtcc

SEQ ID NO: 16689 - DNA, 20 bp, synthetic construct
  misc_feature 1..20: note = chemically synthesized
  source 1..20: mol_type = other DNA
tgcctatagtcccagctacc

SEQ ID NO: 16690 - DNA, 20 bp, synthetic construct
  misc_feature 1..20: note = chemically synthesized
  source 1..20: mol_type = other DNA
gcctatagtcccagctacct

SEQ ID NO: 16691 - DNA, 20 bp, synthetic construct
  misc_feature 1..20: note = chemically synthesized
  source 1..20: mol_type = other DNA
ctatagtcccagctacctgg

SEQ ID NO: 16692 - DNA, 20 bp, synthetic construct
  misc_feature 1..20: note = chemically synthesized
  source 1..20: mol_type = other DNA
tatagtcccagctacctggg

SEQ ID NO: 16693 - DNA, 20 bp, synthetic construct
  misc_feature 1..20: note = chemically synthesized
  source 1..20: mol_type = other DNA
cccagctacctgggaggctg

SEQ ID NO: 16694 - DNA, 20 bp, synthetic construct
  misc_feature 1..20: note = chemically synthesized
  source 1..20: mol_type = other DNA
agctacctgggaggctgaag

SEQ ID NO: 16695 - DNA, 20 bp, synthetic construct
  misc_feature 1..20: note = chemically synthesized
  source 1..20: mol_type = other DNA
tacctgggaggctgaagtgg

SEQ ID NO: 16696 - DNA, 20 bp, synthetic construct
  misc_feature 1..20: note = chemically synthesized
  source 1..20: mol_type = other DNA
acctgggaggctgaagtgga

SEQ ID NO: 16697 - DNA, 20 bp, synthetic construct
  misc_feature 1..20: note = chemically synthesized
  source 1..20: mol_type = other DNA
ctgaagtggaaggatcgcct

SEQ ID NO: 16698 - DNA, 20 bp, synthetic construct
  misc_feature 1..20: note = chemically synthesized
  source 1..20: mol_type = other DNA
gtggaaggatcgcctgagcc

SEQ ID NO: 16699 - DNA, 20 bp, synthetic construct
  misc_feature 1..20: note = chemically synthesized
  source 1..20: mol_type = other DNA
tggaaggatcgcctgagccc

SEQ ID NO: 16700 - DNA, 20 bp, synthetic construct
  misc_feature 1..20: note = chemically synthesized
  source 1..20: mol_type = other DNA
gaaggatcgcctgagcccag

SEQ ID NO: 16701 - DNA, 20 bp, synthetic construct
  misc_feature 1..20: note = chemically synthesized
  source 1..20: mol_type = other DNA
aaggatcgcctgagcccagg

SEQ ID NO: 16702 - DNA, 20 bp, synthetic construct
  misc_feature 1..20: note = chemically synthesized
  source 1..20: mol_type = other DNA
gatcgcctgagcccaggagg

SEQ ID NO: 16703 - DNA, 20 bp, synthetic construct
  misc_feature 1..20: note = chemically synthesized
  source 1..20: mol_type = other DNA
tcgcctgagcccaggaggtg

SEQ ID NO: 16704 - DNA, 20 bp, synthetic construct
  misc_feature 1..20: note = chemically synthesized
  source 1..20: mol_type = other DNA
cgcctgagcccaggaggtgg

SEQ ID NO: 16705 - DNA, 20 bp, synthetic construct
  misc_feature 1..20: note = chemically synthesized
  source 1..20: mol_type = other DNA
agcccaggaggtggaggcca

SEQ ID NO: 16706 - DNA, 20 bp, synthetic construct
  misc_feature 1..20: note = chemically synthesized
  source 1..20: mol_type = other DNA
caggaggtggaggccacagt

SEQ ID NO: 16707 - DNA, 20 bp, synthetic construct
  misc_feature 1..20: note = chemically synthesized
  source 1..20: mol_type = other DNA
aggccacagtgagttgtgac

SEQ ID NO: 16708 - DNA, 20 bp, synthetic construct
  misc_feature 1..20: note = chemically synthesized
  source 1..20: mol_type = other DNA
tgtgacaagctactgcattc

SEQ ID NO: 16709 - DNA, 20 bp, synthetic construct
  misc_feature 1..20: note = chemically synthesized
  source 1..20: mol_type = other DNA
caagctactgcattccagcc

SEQ ID NO: 16710 - DNA, 20 bp, synthetic construct
  misc_feature 1..20: note = chemically synthesized
  source 1..20: mol_type = other DNA
aagctactgcattccagcct

SEQ ID NO: 16711 - DNA, 20 bp, synthetic construct
  misc_feature 1..20: note = chemically synthesized
  source 1..20: mol_type = other DNA
ctgcattccagcctgggcaa

SEQ ID NO: 16712 - DNA, 20 bp, synthetic construct
  misc_feature 1..20: note = chemically synthesized
  source 1..20: mol_type = other DNA
gcattccagcctgggcaaca

SEQ ID NO: 16713 - DNA, 20 bp, synthetic construct
  misc_feature 1..20: note = chemically synthesized
  source 1..20: mol_type = other DNA
tccagcctgggcaacagagt

SEQ ID NO: 16714 - DNA, 20 bp, synthetic construct
  misc_feature 1..20: note = chemically synthesized
  source 1..20: mol_type = other DNA
cctgggcaacagagtgagat

SEQ ID NO: 16715 - DNA, 20 bp, synthetic construct
  misc_feature 1..20: note = chemically synthesized
  source 1..20: mol_type = other DNA
tgggcaacagagtgagatga

SEQ ID NO: 16716 - DNA, 20 bp, synthetic construct
  misc_feature 1..20: note = chemically synthesized
  source 1..20: mol_type = other DNA
ggcaacagagtgagatgaga

SEQ ID NO: 16717 - DNA, 20 bp, synthetic construct
  misc_feature 1..20: note = chemically synthesized
  source 1..20: mol_type = other DNA
caacagagtgagatgagaga

SEQ ID NO: 16718 - DNA, 20 bp, synthetic construct
  misc_feature 1..20: note = chemically synthesized
  source 1..20: mol_type = other DNA
acagagtgagatgagagaga

SEQ ID NO: 16719 - DNA, 20 bp, synthetic construct
  misc_feature 1..20: note = chemically synthesized
  source 1..20: mol_type = other DNA
agagtgagatgagagagaga

SEQ ID NO: 16720 - DNA, 20 bp, synthetic construct
  misc_feature 1..20: note = chemically synthesized
  source 1..20: mol_type = other DNA
gagtgagatgagagagagag

SEQ ID NO: 16721 - DNA, 20 bp, synthetic construct
  misc_feature 1..20: note = chemically synthesized
  source 1..20: mol_type = other DNA
agtgagatgagagagagaga

SEQ ID NO: 16722 - DNA, 20 bp, synthetic construct
  misc_feature 1..20: note = chemically synthesized
  source 1..20: mol_type = other DNA
gtgagatgagagagagagag

SEQ ID NO: 16723 - DNA, 20 bp, synthetic construct
  misc_feature 1..20: note = chemically synthesized
  source 1..20: mol_type = other DNA
gagatgagagagagagaggg

SEQ ID NO: 16724 - DNA, 20 bp, synthetic construct
  misc_feature 1..20: note = chemically synthesized
  source 1..20: mol_type = other DNA
agatgagagagagagagggg

SEQ ID NO: 16725 - DNA, 20 bp, synthetic construct
  misc_feature 1..20: note = chemically synthesized
  source 1..20: mol_type = other DNA
gatgagagagagagagggga

SEQ ID NO: 16726 - DNA, 20 bp, synthetic construct
  misc_feature 1..20: note = chemically synthesized
  source 1..20: mol_type = other DNA
atgagagagagagaggggag

SEQ ID NO: 16727 - DNA, 20 bp, synthetic construct
  misc_feature 1..20: note = chemically synthesized
  source 1..20: mol_type = other DNA
agagagagagaggggagggg

SEQ ID NO: 16728 - DNA, 20 bp, synthetic construct
  misc_feature 1..20: note = chemically synthesized
  source 1..20: mol_type = other DNA
agagagaggggaggggaagc

SEQ ID NO: 16729 - DNA, 20 bp, synthetic construct
  misc_feature 1..20: note = chemically synthesized
  source 1..20: mol_type = other DNA
gagagaggggaggggaagcg

SEQ ID NO: 16730 - DNA, 20 bp, synthetic construct
  misc_feature 1..20: note = chemically synthesized
  source 1..20: mol_type = other DNA
agagaggggaggggaagcga

SEQ ID NO: 16731 - DNA, 20 bp, synthetic construct
  misc_feature 1..20: note = chemically synthesized
  source 1..20: mol_type = other DNA
gaggggaggggaagcgaggg

SEQ ID NO: 16732 - DNA, 20 bp, synthetic construct
  misc_feature 1..20: note = chemically synthesized
  source 1..20: mol_type = other DNA
aggggaggggaagcgaggga

SEQ ID NO: 16733 - DNA, 20 bp, synthetic construct
  misc_feature 1..20: note = chemically synthesized
  source 1..20: mol_type = other DNA
gaggggaagcgagggaagga

SEQ ID NO: 16734 - DNA, 20 bp, synthetic construct
  misc_feature 1..20: note = chemically synthesized
  source 1..20: mol_type = other DNA
aggggaagcgagggaaggaa

SEQ ID NO: 16735 - DNA, 20 bp, synthetic construct
  misc_feature 1..20: note = chemically synthesized
  source 1..20: mol_type = other DNA
gggaagcgagggaaggaaag

SEQ ID NO: 16736 - DNA, 20 bp, synthetic construct
  misc_feature 1..20: note = chemically synthesized
  source 1..20: mol_type = other DNA
ggaagcgagggaaggaaagg

SEQ ID NO: 16737 - DNA, 20 bp, synthetic construct
  misc_feature 1..20: note = chemically synthesized
  source 1..20: mol_type = other DNA
gaagcgagggaaggaaagga

SEQ ID NO: 16738 - DNA, 20 bp, synthetic construct
  misc_feature 1..20: note = chemically synthesized
  source 1..20: mol_type = other DNA
aagcgagggaaggaaaggag

SEQ ID NO: 16739 - DNA, 20 bp, synthetic construct
  misc_feature 1..20: note = chemically synthesized
  source 1..20: mol_type = other DNA
gcgagggaaggaaaggaggg

SEQ ID NO: 16740 - DNA, 20 bp, synthetic construct
  misc_feature 1..20: note = chemically synthesized
  source 1..20: mol_type = other DNA
cgagggaaggaaaggagggg

SEQ ID NO: 16741 - DNA, 20 bp, synthetic construct
  misc_feature 1..20: note = chemically synthesized
  source 1..20: mol_type = other DNA
gagggaaggaaaggagggga

SEQ ID NO: 16742 - DNA, 20 bp, synthetic construct
  misc_feature 1..20: note = chemically synthesized
  source 1..20: mol_type = other DNA
agggaaggaaaggaggggag

SEQ ID NO: 16743 - DNA, 20 bp, synthetic construct
  misc_feature 1..20: note = chemically synthesized
  source 1..20: mol_type = other DNA
ggaaggaaaggaggggaggg

SEQ ID NO: 16744 - DNA, 20 bp, synthetic construct
  misc_feature 1..20: note = chemically synthesized
  source 1..20: mol_type = other DNA
gaaggaaaggaggggagggg

SEQ ID NO: 16745 - DNA, 20 bp, synthetic construct
  misc_feature 1..20: note = chemically synthesized
  source 1..20: mol_type = other DNA
aaggaaaggaggggagggga

SEQ ID NO: 16746 - DNA, 20 bp, synthetic construct
  misc_feature 1..20: note = chemically synthesized
  source 1..20: mol_type = other DNA
aggaaaggaggggaggggag

SEQ ID NO: 16747 - DNA, 20 bp, synthetic construct
  misc_feature 1..20: note = chemically synthesized
  source 1..20: mol_type = other DNA
ggaaaggaggggaggggagg

SEQ ID NO: 16748 - DNA, 20 bp, synthetic construct
  misc_feature 1..20: note = chemically synthesized
  source 1..20: mol_type = other DNA
aaaggaggggaggggagggg

SEQ ID NO: 16749 - DNA, 20 bp, synthetic construct
  misc_feature 1..20: note = chemically synthesized
  source 1..20: mol_type = other DNA
aaggaggggaggggaggggg

SEQ ID NO: 16750 - DNA, 20 bp, synthetic construct
  misc_feature 1..20: note = chemically synthesized
  source 1..20: mol_type = other DNA
aggaggggaggggaggggga

SEQ ID NO: 16751 - DNA, 20 bp, synthetic construct
  misc_feature 1..20: note = chemically synthesized
  source 1..20: mol_type = other DNA
ggaggggaggggagggggag

SEQ ID NO: 16752 - DNA, 20 bp, synthetic construct
  misc_feature 1..20: note = chemically synthesized
  source 1..20: mol_type = other DNA
ggggaggggagggggagggg

SEQ ID NO: 16753 - DNA, 20 bp, synthetic construct
  misc_feature 1..20: note = chemically synthesized
  source 1..20: mol_type = other DNA
gggaggggagggggagggga

SEQ ID NO: 16754 - DNA, 20 bp, synthetic construct
  misc_feature 1..20: note = chemically synthesized
  source 1..20: mol_type = other DNA
ggaggggagggggaggggaa

SEQ ID NO: 16755 - DNA, 20 bp, synthetic construct
  misc_feature 1..20: note = chemically synthesized
  source 1..20: mol_type = other DNA
gaggggagggggaggggaag

SEQ ID NO: 16756 - DNA, 20 bp, synthetic construct
  misc_feature 1..20: note = chemically synthesized
  source 1..20: mol_type = other DNA
ggaggggaaggggaaaattt

SEQ ID NO: 16757 - DNA, 20 bp, synthetic construct
  misc_feature 1..20: note = chemically synthesized
  source 1..20: mol_type = other DNA
attttagttaacttaatgaa

SEQ ID NO: 16758 - DNA, 20 bp, synthetic construct
  misc_feature 1..20: note = chemically synthesized
  source 1..20: mol_type = other DNA
aactctataaaatgaaacac

SEQ ID NO: 16759 - DNA, 20 bp, synthetic construct
  misc_feature 1..20: note = chemically synthesized
  source 1..20: mol_type = other DNA
actctataaaatgaaacact

SEQ ID NO: 16760 - DNA, 20 bp, synthetic construct
  misc_feature 1..20: note = chemically synthesized
  source 1..20: mol_type = other DNA
tctataaaatgaaacactgg

SEQ ID NO: 16761 - DNA, 20 bp, synthetic construct
  misc_feature 1..20: note = chemically synthesized
  source 1..20: mol_type = other DNA
aatgaaacactgggagaaaa

SEQ ID NO: 16762 - DNA, 20 bp, synthetic construct
  misc_feature 1..20: note = chemically synthesized
  source 1..20: mol_type = other DNA
gagaaaaaagaattaaaaaa

SEQ ID NO: 16763 - DNA, 20 bp, synthetic construct
  misc_feature 1..20: note = chemically synthesized
  source 1..20: mol_type = other DNA
aaaaagaattaaaaaatgga

SEQ ID NO: 16764 - DNA, 20 bp, synthetic construct
  misc_feature 1..20: note = chemically synthesized
  source 1..20: mol_type = other DNA
aaagaattaaaaaatggaaa

SEQ ID NO: 16765 - DNA, 20 bp, synthetic construct
  misc_feature 1..20: note = chemically synthesized
  source 1..20: mol_type = other DNA
ttaaaaaatggaaagagaat

SEQ ID NO: 16766 - DNA, 20 bp, synthetic construct
  misc_feature 1..20: note = chemically synthesized
  source 1..20: mol_type = other DNA
aaaatggaaagagaatgagt

SEQ ID NO: 16767 - DNA, 20 bp, synthetic construct
  misc_feature 1..20: note = chemically synthesized
  source 1..20: mol_type = other DNA
gaaagagaatgagtgagctg

SEQ ID NO: 16768 - DNA, 20 bp, synthetic construct
  misc_feature 1..20: note = chemically synthesized
  source 1..20: mol_type = other DNA
aaagagaatgagtgagctgt

SEQ ID NO: 16769 - DNA, 20 bp, synthetic construct
  misc_feature 1..20: note = chemically synthesized
  source 1..20: mol_type = other DNA
tgcataattgaaatctttaa

SEQ ID NO: 16770 - DNA, 20 bp, synthetic construct
  misc_feature 1..20: note = chemically synthesized
  source 1..20: mol_type = other DNA
attgaaatctttaaaagaaa

SEQ ID NO: 16771 - DNA, 20 bp, synthetic construct
  misc_feature 1..20: note = chemically synthesized
  source 1..20: mol_type = other DNA
ttgaaatctttaaaagaaaa

SEQ ID NO: 16772 - DNA, 20 bp, synthetic construct
  misc_feature 1..20: note = chemically synthesized
  source 1..20: mol_type = other DNA
tgaaatctttaaaagaaaaa

SEQ ID NO: 16773 - DNA, 20 bp, synthetic construct
  misc_feature 1..20: note = chemically synthesized
  source 1..20: mol_type = other DNA
gaaatctttaaaagaaaaag

SEQ ID NO: 16774 - DNA, 20 bp, synthetic construct
  misc_feature 1..20: note = chemically synthesized
  source 1..20: mol_type = other DNA
aaatctttaaaagaaaaagg

SEQ ID NO: 16775 - DNA, 20 bp, synthetic construct
  misc_feature 1..20: note = chemically synthesized
  source 1..20: mol_type = other DNA
tctttaaaagaaaaaggggg

SEQ ID NO: 16776 - DNA, 20 bp, synthetic construct
  misc_feature 1..20: note = chemically synthesized
  source 1..20: mol_type = other DNA
ttaaaagaaaaagggggtag

SEQ ID NO: 16777 - DNA, 20 bp, synthetic construct
  misc_feature 1..20: note = chemically synthesized
  source 1..20: mol_type = other DNA
gggggtagcagaaaaaaatc

SEQ ID NO: 16778 - DNA, 20 bp, synthetic construct
  misc_feature 1..20: note = chemically synthesized
  source 1..20: mol_type = other DNA
gcagaaaaaaatcaagtgct

SEQ ID NO: 16779 - DNA, 20 bp, synthetic construct
  misc_feature 1..20: note = chemically synthesized
  source 1..20: mol_type = other DNA
aaaaaatcaagtgctgagac

SEQ ID NO: 16780 - DNA, 20 bp, synthetic construct
  misc_feature 1..20: note = chemically synthesized
  source 1..20: mol_type = other DNA
aaatcaagtgctgagacaag

SEQ ID NO: 16781 - DNA, 20 bp, synthetic construct
  misc_feature 1..20: note = chemically synthesized
  source 1..20: mol_type = other DNA
tcaagtgctgagacaagtgg

SEQ ID NO: 16782 - DNA, 20 bp, synthetic construct
  misc_feature 1..20: note = chemically synthesized
  source 1..20: mol_type = other DNA
gtgctgagacaagtggaaga

SEQ ID NO: 16783 - DNA, 20 bp, synthetic construct
  misc_feature 1..20: note = chemically synthesized
  source 1..20: mol_type = other DNA
tgctgagacaagtggaagat

SEQ ID NO: 16784 - DNA, 20 bp, synthetic construct
  misc_feature 1..20: note = chemically synthesized
  source 1..20: mol_type = other DNA
gacaagtggaagatgggccc

SEQ ID NO: 16785 - DNA, 20 bp, synthetic construct
  misc_feature 1..20: note = chemically synthesized
  source 1..20: mol_type = other DNA
agtggaagatgggccccggt

SEQ ID NO: 16786 - DNA, 20 bp, synthetic construct
  misc_feature 1..20: note = chemically synthesized
  source 1..20: mol_type = other DNA
ggaagatgggccccggtgag

SEQ ID NO: 16787 - DNA, 20 bp, synthetic construct
  misc_feature 1..20: note = chemically synthesized
  source 1..20: mol_type = other DNA
ggccccggtgagcagctgat

SEQ ID NO: 16788 - DNA, 20 bp, synthetic construct
  misc_feature 1..20: note = chemically synthesized
  source 1..20: mol_type = other DNA
ggtgagcagctgatcagtgt

SEQ ID NO: 16789 - DNA, 20 bp, synthetic construct
  misc_feature 1..20: note = chemically synthesized
  source 1..20: mol_type = other DNA
ctcccatgatgacgttcccc

SEQ ID NO: 16790 - DNA, 20 bp, synthetic construct
  misc_feature 1..20: note = chemically synthesized
  source 1..20: mol_type = other DNA
ttcccccagcccccaccacc

SEQ ID NO: 16791 - DNA, 20 bp, synthetic construct
  misc_feature 1..20: note = chemically synthesized
  source 1..20: mol_type = other DNA
tcccccagcccccaccaccc

SEQ ID NO: 16792 - DNA, 20 bp, synthetic construct
  misc_feature 1..20: note = chemically synthesized
  source 1..20: mol_type = other DNA
gcccccaccacccgggctgc

SEQ ID NO: 16793 - DNA, 20 bp, synthetic construct
  misc_feature 1..20: note = chemically synthesized
  source 1..20: mol_type = other DNA
ccccaccacccgggctgctg

SEQ ID NO: 16794 - DNA, 20 bp, synthetic construct
  misc_feature 1..20: note = chemically synthesized
  source 1..20: mol_type = other DNA
cccaccacccgggctgctgg

SEQ ID NO: 16795 - DNA, 20 bp, synthetic construct
  misc_feature 1..20: note = chemically synthesized
  source 1..20: mol_type = other DNA
ccaccacccgggctgctgga

SEQ ID NO: 16796 - DNA, 20 bp, synthetic construct
  misc_feature 1..20: note = chemically synthesized
  source 1..20: mol_type = other DNA
cgggctgctggagggaaatg

SEQ ID NO: 16797 - DNA, 20 bp, synthetic construct
  misc_feature 1..20: note = chemically synthesized
  source 1..20: mol_type = other DNA
gtgactttgctacatccctt

SEQ ID NO: 16798 - DNA, 20 bp, synthetic construct
  misc_feature 1..20: note = chemically synthesized
  source 1..20: mol_type = other DNA
ctttgctacatcccttcaga

SEQ ID NO: 16799 - DNA, 20 bp, synthetic construct
  misc_feature 1..20: note = chemically synthesized
  source 1..20: mol_type = other DNA
cccttcagacggtccctcac

SEQ ID NO: 16800 - DNA, 20 bp, synthetic construct
  misc_feature 1..20: note = chemically synthesized
  source 1..20: mol_type = other DNA
ggtccctcactggtgtccct

SEQ ID NO: 16801 - DNA, 20 bp, synthetic construct
  misc_feature 1..20: note = chemically synthesized
  source 1..20: mol_type = other DNA
gtccctcagcccattcgcgt

SEQ ID NO: 16802 - DNA, 20 bp, synthetic construct
  misc_feature 1..20: note = chemically synthesized
  source 1..20: mol_type = other DNA
gctcactctcccattaattt

SEQ ID NO: 16803 - DNA, 20 bp, synthetic construct
  misc_feature 1..20: note = chemically synthesized
  source 1..20: mol_type = other DNA
cccattaatttcagaaatcc

SEQ ID NO: 16804 - DNA, 20 bp, synthetic construct
  misc_feature 1..20: note = chemically synthesized
  source 1..20: mol_type = other DNA
agaaatcctggcctctctcc

SEQ ID NO: 16805 - DNA, 20 bp, synthetic construct
  misc_feature 1..20: note = chemically synthesized
  source 1..20: mol_type = other DNA
actctaaattctgtcaccct

SEQ ID NO: 16806 - DNA, 20 bp, synthetic construct
  misc_feature 1..20: note = chemically synthesized
  source 1..20: mol_type = other DNA
ctaaattctgtcaccctcag

SEQ ID NO: 16807 - DNA, 20 bp, synthetic construct
  misc_feature 1..20: note = chemically synthesized
  source 1..20: mol_type = other DNA
tctgtcaccctcagaagatt

SEQ ID NO: 16808 - DNA, 20 bp, synthetic construct
  misc_feature 1..20: note = chemically synthesized
  source 1..20: mol_type = other DNA
gtcaccctcagaagattcag

SEQ ID NO: 16809 - DNA, 20 bp, synthetic construct
  misc_feature 1..20: note = chemically synthesized
  source 1..20: mol_type = other DNA
cagcatcccgtattctctct

SEQ ID NO: 16810 - DNA, 20 bp, synthetic construct
  misc_feature 1..20: note = chemically synthesized
  source 1..20: mol_type = other DNA
tctgagtgttcactatgtac

SEQ ID NO: 16811 - DNA, 20 bp, synthetic construct
  misc_feature 1..20: note = chemically synthesized
  source 1..20: mol_type = other DNA
ctgagtgttcactatgtacc

SEQ ID NO: 16812 - DNA, 20 bp, synthetic construct
  misc_feature 1..20: note = chemically synthesized
  source 1..20: mol_type = other DNA
actatgtaccgggtgccgtg

SEQ ID NO: 16813 - DNA, 20 bp, synthetic construct
  misc_feature 1..20: note = chemically synthesized
  source 1..20: mol_type = other DNA
ctatgtaccgggtgccgtgt

SEQ ID NO: 16814 - DNA, 20 bp, synthetic construct
  misc_feature 1..20: note = chemically synthesized
  source 1..20: mol_type = other DNA
accgggtgccgtgtgggcac

SEQ ID NO: 16815 - DNA, 20 bp, synthetic construct
  misc_feature 1..20: note = chemically synthesized
  source 1..20: mol_type = other DNA
cgggtgccgtgtgggcactg

SEQ ID NO: 16816 - DNA, 20 bp, synthetic construct
  misc_feature 1..20: note = chemically synthesized
  source 1..20: mol_type = other DNA
ccgtgtgggcactggagttg

SEQ ID NO: 16817 - DNA, 20 bp, synthetic construct
  misc_feature 1..20: note = chemically synthesized
  source 1..20: mol_type = other DNA
gtgtgggcactggagttgca

SEQ ID NO: 16818 - DNA, 20 bp, synthetic construct
  misc_feature 1..20: note = chemically synthesized
  source 1..20: mol_type = other DNA
tgtgggcactggagttgcag

SEQ ID NO: 16819 - DNA, 20 bp, synthetic construct
  misc_feature 1..20: note = chemically synthesized
  source 1..20: mol_type = other DNA
tgggcactggagttgcagag

SEQ ID NO: 16820 - DNA, 20 bp, synthetic construct
  misc_feature 1..20: note = chemically synthesized
  source 1..20: mol_type = other DNA
ggcactggagttgcagagga

SEQ ID NO: 16821 - DNA, 20 bp, synthetic construct
  misc_feature 1..20: note = chemically synthesized
  source 1..20: mol_type = other DNA
ctggagttgcagaggagagt

SEQ ID NO: 16822 - DNA, 20 bp, synthetic construct
  misc_feature 1..20: note = chemically synthesized
  source 1..20: mol_type = other DNA
tggagttgcagaggagagtg

SEQ ID NO: 16823 - DNA, 20 bp, synthetic construct
  misc_feature 1..20: note = chemically synthesized
  source 1..20: mol_type = other DNA
agttgcagaggagagtgagg

SEQ ID NO: 16824 - DNA, 20 bp, synthetic construct
  misc_feature 1..20: note = chemically synthesized
  source 1..20: mol_type = other DNA
gcagaggagagtgaggcgga

SEQ ID NO: 16825 - DNA, 20 bp, synthetic construct
  misc_feature 1..20: note = chemically synthesized
  source 1..20: mol_type = other DNA
cagaggagagtgaggcggac

SEQ ID NO: 16826 - DNA, 20 bp, synthetic construct
  misc_feature 1..20: note = chemically synthesized
  source 1..20: mol_type = other DNA
agaggagagtgaggcggaca

SEQ ID NO: 16827 - DNA, 20 bp, synthetic construct
  misc_feature 1..20: note = chemically synthesized
  source 1..20: mol_type = other DNA
gcggacagggcctctgcctg

SEQ ID NO: 16828 - DNA, 20 bp, synthetic construct
  misc_feature 1..20: note = chemically synthesized
  source 1..20: mol_type = other DNA
cggacagggcctctgcctgt

SEQ ID NO: 16829 - DNA, 20 bp, synthetic construct
  misc_feature 1..20: note = chemically synthesized
  source 1..20: mol_type = other DNA
ggacagggcctctgcctgtg

SEQ ID NO: 16830 - DNA, 20 bp, synthetic construct
  misc_feature 1..20: note = chemically synthesized
  source 1..20: mol_type = other DNA
ctgcctgtggggacaccgcc

SEQ ID NO: 16831 - DNA, 20 bp, synthetic construct
  misc_feature 1..20: note = chemically synthesized
  source 1..20: mol_type = other DNA
cctgtggggacaccgcctgg

SEQ ID NO: 16832 - DNA, 20 bp, synthetic construct
  misc_feature 1..20: note = chemically synthesized
  source 1..20: mol_type = other DNA
ctgtggggacaccgcctggt

SEQ ID NO: 16833 - DNA, 20 bp, synthetic construct
  misc_feature 1..20: note = chemically synthesized
  source 1..20: mol_type = other DNA
tggggacaccgcctggtggg

SEQ ID NO: 16834 - DNA, 20 bp, synthetic construct
  misc_feature 1..20: note = chemically synthesized
  source 1..20: mol_type = other DNA
acaccgcctggtgggaagtc

SEQ ID NO: 16835 - DNA, 20 bp, synthetic construct
  misc_feature 1..20: note = chemically synthesized
  source 1..20: mol_type = other DNA
cgcctggtgggaagtccagc

SEQ ID NO: 16836 - DNA, 20 bp, synthetic construct
  misc_feature 1..20: note = chemically synthesized
  source 1..20: mol_type = other DNA
gaagtccagccagcccccta

SEQ ID NO: 16837 - DNA, 20 bp, synthetic construct
  misc_feature 1..20: note = chemically synthesized
  source 1..20: mol_type = other DNA
agtccagccagccccctaca

SEQ ID NO: 16838 - DNA, 20 bp, synthetic construct
  misc_feature 1..20: note = chemically synthesized
  source 1..20: mol_type = other DNA
tccagccagccccctacaga

SEQ ID NO: 16839 - DNA, 20 bp, synthetic construct
  misc_feature 1..20: note = chemically synthesized
  source 1..20: mol_type = other DNA
cagccagccccctacagaga

SEQ ID NO: 16840 - DNA, 20 bp, synthetic construct
  misc_feature 1..20: note = chemically synthesized
  source 1..20: mol_type = other DNA
agccagccccctacagagag

SEQ ID NO: 16841 - DNA, 20 bp, synthetic construct
  misc_feature 1..20: note = chemically synthesized
  source 1..20: mol_type = other DNA
ccagccccctacagagagag

SEQ ID NO: 16842 - DNA, 20 bp, synthetic construct
  misc_feature 1..20: note = chemically synthesized
  source 1..20: mol_type = other DNA
acagagagaggagatgctac

SEQ ID NO: 16843 - DNA, 20 bp, synthetic construct
  misc_feature 1..20: note = chemically synthesized
  source 1..20: mol_type = other DNA
gagatgctactggtgttcct

SEQ ID NO: 16844 - DNA, 20 bp, synthetic construct
  misc_feature 1..20: note = chemically synthesized
  source 1..20: mol_type = other DNA
atgctactggtgttcctgag

SEQ ID NO: 16845 - DNA, 20 bp, synthetic construct
  misc_feature 1..20: note = chemically synthesized
  source 1..20: mol_type = other DNA
tggtgttcctgagtggtcct

SEQ ID NO: 16846 - DNA, 20 bp, synthetic construct
  misc_feature 1..20: note = chemically synthesized
  source 1..20: mol_type = other DNA
ggtgttcctgagtggtcctc

SEQ ID NO: 16847 - DNA, 20 bp, synthetic construct
  misc_feature 1..20: note = chemically synthesized
  source 1..20: mol_type = other DNA
tgttcctgagtggtcctcgg

SEQ ID NO: 16848 - DNA, 20 bp, synthetic construct
  misc_feature 1..20: note = chemically synthesized
  source 1..20: mol_type = other DNA
gttcctgagtggtcctcggg

SEQ ID NO: 16849 - DNA, 20 bp, synthetic construct
  misc_feature 1..20: note = chemically synthesized
  source 1..20: mol_type = other DNA
ttcctgagtggtcctcggga

SEQ ID NO: 16850 - DNA, 20 bp, synthetic construct
  misc_feature 1..20: note = chemically synthesized
  source 1..20: mol_type = other DNA
gtcccctgccctgccctgcc

SEQ ID NO: 16851 - DNA, 20 bp, synthetic construct
  misc_feature 1..20: note = chemically synthesized
  source 1..20: mol_type = other DNA
tgccctgccctgcccagcac

SEQ ID NO: 16852 - DNA, 20 bp, synthetic construct
  misc_feature 1..20: note = chemically synthesized
  source 1..20: mol_type = other DNA
gcccagcaccggccctccct

SEQ ID NO: 16853 - DNA, 20 bp, synthetic construct
  misc_feature 1..20: note = chemically synthesized
  source 1..20: mol_type = other DNA
agcaccggccctccctcggt

SEQ ID NO: 16854 - DNA, 20 bp, synthetic construct
  misc_feature 1..20: note = chemically synthesized
  source 1..20: mol_type = other DNA
ccggccctccctcggttggc

SEQ ID NO: 16855 - DNA, 20 bp, synthetic construct
  misc_feature 1..20: note = chemically synthesized
  source 1..20: mol_type = other DNA
ctccctcggttggccagcct

SEQ ID NO: 16856 - DNA, 20 bp, synthetic construct
  misc_feature 1..20: note = chemically synthesized
  source 1..20: mol_type = other DNA
tccctcggttggccagcctc

SEQ ID NO: 16857 - DNA, 20 bp, synthetic construct
  misc_feature 1..20: note = chemically synthesized
  source 1..20: mol_type = other DNA
ggttggccagcctcaggaat

SEQ ID NO: 16858 - DNA, 20 bp, synthetic construct
  misc_feature 1..20: note = chemically synthesized
  source 1..20: mol_type = other DNA
gttggccagcctcaggaatg

SEQ ID NO: 16859 - DNA, 20 bp, synthetic construct
  misc_feature 1..20: note = chemically synthesized
  source 1..20: mol_type = other DNA
tggccagcctcaggaatgag

SEQ ID NO: 16860 - DNA, 20 bp, synthetic construct
  misc_feature 1..20: note = chemically synthesized
  source 1..20: mol_type = other DNA
gaatgaggagtccctcattc

SEQ ID NO: 16861 - DNA, 20 bp, synthetic construct
  misc_feature 1..20: note = chemically synthesized
  source 1..20: mol_type = other DNA
aggagtccctcattccagcc

SEQ ID NO: 16862 - DNA, 20 bp, synthetic construct
  misc_feature 1..20: note = chemically synthesized
  source 1..20: mol_type = other DNA
agctaaccaatccccttcct

SEQ ID NO: 16863 - DNA, 20 bp, synthetic construct
  misc_feature 1..20: note = chemically synthesized
  source 1..20: mol_type = other DNA
caatccccttcctaagctcc

SEQ ID NO: 16864 - DNA, 20 bp, synthetic construct
  misc_feature 1..20: note = chemically synthesized
  source 1..20: mol_type = other DNA
ccctgctcctcctgcctcca

SEQ ID NO: 16865 - DNA, 20 bp, synthetic construct
  misc_feature 1..20: note = chemically synthesized
  source 1..20: mol_type = other DNA
cctcctgcctccatggaacc

SEQ ID NO: 16866 - DNA, 20 bp, synthetic construct
  misc_feature 1..20: note = chemically synthesized
  source 1..20: mol_type = other DNA
atggaacccggctccaccac

SEQ ID NO: 16867 - DNA, 20 bp, synthetic construct
  misc_feature 1..20: note = chemically synthesized
  source 1..20: mol_type = other DNA
acctgacactcctccattcc

SEQ ID NO: 16868 - DNA, 20 bp, synthetic construct
  misc_feature 1..20: note = chemically synthesized
  source 1..20: mol_type = other DNA
ctggctcttgcccttctgcc

SEQ ID NO: 16869 - DNA, 20 bp, synthetic construct
  misc_feature 1..20: note = chemically synthesized
  source 1..20: mol_type = other DNA
cccttctgcctagcactgct

SEQ ID NO: 16870 - DNA, 20 bp, synthetic construct
  misc_feature 1..20: note = chemically synthesized
  source 1..20: mol_type = other DNA
accttaaaatcttttcccac

SEQ ID NO: 16871 - DNA, 20 bp, synthetic construct
  misc_feature 1..20: note = chemically synthesized
  source 1..20: mol_type = other DNA
aaaatcttttcccaccagcc

SEQ ID NO: 16872 - DNA, 20 bp, synthetic construct
  misc_feature 1..20: note = chemically synthesized
  source 1..20: mol_type = other DNA
aaatcttttcccaccagcct

SEQ ID NO: 16873 - DNA, 20 bp, synthetic construct
  misc_feature 1..20: note = chemically synthesized
  source 1..20: mol_type = other DNA
tcccaccagcctgggcaaca

SEQ ID NO: 16874 - DNA, 20 bp, synthetic construct
  misc_feature 1..20: note = chemically synthesized
  source 1..20: mol_type = other DNA
accagcctgggcaacatagc

SEQ ID NO: 16875 - DNA, 20 bp, synthetic construct
  misc_feature 1..20: note = chemically synthesized
  source 1..20: mol_type = other DNA
aaaaattttttttaatttgc

SEQ ID NO: 16876 - DNA, 20 bp, synthetic construct
  misc_feature 1..20: note = chemically synthesized
  source 1..20: mol_type = other DNA
aaaattttttttaatttgcc

SEQ ID NO: 16877 - DNA, 20 bp, synthetic construct
  misc_feature 1..20: note = chemically synthesized
  source 1..20: mol_type = other DNA
tttttttaatttgccaggca

SEQ ID NO: 16878 - DNA, 20 bp, synthetic construct
  misc_feature 1..20: note = chemically synthesized
  source 1..20: mol_type = other DNA
ttttaatttgccaggcacag

SEQ ID NO: 16879 - DNA, 20 bp, synthetic construct
  misc_feature 1..20: note = chemically synthesized
  source 1..20: mol_type = other DNA
gcacagtggtgcacacctgt

SEQ ID NO: 16880 - DNA, 20 bp, synthetic construct
  misc_feature 1..20: note = chemically synthesized
  source 1..20: mol_type = other DNA
acctgtaagtcctaactact

SEQ ID NO: 16881 - DNA, 20 bp, synthetic construct
  misc_feature 1..20: note = chemically synthesized
  source 1..20: mol_type = other DNA
cctgtaagtcctaactactt

SEQ ID NO: 16882 - DNA, 20 bp, synthetic construct
  misc_feature 1..20: note = chemically synthesized
  source 1..20: mol_type = other DNA
tgtaagtcctaactacttgg

SEQ ID NO: 16883 - DNA, 20 bp, synthetic construct
  misc_feature 1..20: note = chemically synthesized
  source 1..20: mol_type = other DNA
gtaagtcctaactacttggg

SEQ ID NO: 16884 - DNA, 20 bp, synthetic construct
  misc_feature 1..20: note = chemically synthesized
  source 1..20: mol_type = other DNA
tcctaactacttgggaggct

SEQ ID NO: 16885 - DNA, 20 bp, synthetic construct
  misc_feature 1..20: note = chemically synthesized
  source 1..20: mol_type = other DNA
cctaactacttgggaggctg

SEQ ID NO: 16886 - DNA, 20 bp, synthetic construct
  misc_feature 1..20: note = chemically synthesized
  source 1..20: mol_type = other DNA
aactacttgggaggctgagg

SEQ ID NO: 16887 - DNA, 20 bp, synthetic construct
  misc_feature 1..20: note = chemically synthesized
  source 1..20: mol_type = other DNA
actacttgggaggctgaggt

SEQ ID NO: 16888 - DNA, 20 bp, synthetic construct
  misc_feature 1..20: note = chemically synthesized
  source 1..20: mol_type = other DNA
tacttgggaggctgaggtgg

SEQ ID NO: 16889 - DNA, 20 bp, synthetic construct
  misc_feature 1..20: note = chemically synthesized
  source 1..20: mol_type = other DNA
acttgggaggctgaggtggg

SEQ ID NO: 16890 - DNA, 20 bp, synthetic construct
  misc_feature 1..20: note = chemically synthesized
  source 1..20: mol_type = other DNA
gggaggctgaggtgggagga

SEQ ID NO: 16891 - DNA, 20 bp, synthetic construct
  misc_feature 1..20: note = chemically synthesized
  source 1..20: mol_type = other DNA
ctgaggtgggaggatggctt

SEQ ID NO: 16892 - DNA, 20 bp, synthetic construct
  misc_feature 1..20: note = chemically synthesized
  source 1..20: mol_type = other DNA
gtgggaggatggcttgagcc

SEQ ID NO: 16893 - DNA, 20 bp, synthetic construct
  misc_feature 1..20: note = chemically synthesized
  source 1..20: mol_type = other DNA
tgggaggatggcttgagccc

SEQ ID NO: 16894 - DNA, 20 bp, synthetic construct
  misc_feature 1..20: note = chemically synthesized
  source 1..20: mol_type = other DNA
ggaggatggcttgagcccag

SEQ ID NO: 16895 - DNA, 20 bp, synthetic construct
  misc_feature 1..20: note = chemically synthesized
  source 1..20: mol_type = other DNA
tggcttgagcccaggagttc

SEQ ID NO: 16896 - DNA, 20 bp, synthetic construct
  misc_feature 1..20: note = chemically synthesized
  source 1..20: mol_type = other DNA
ggcttgagcccaggagttcg

SEQ ID NO: 16897 - DNA, 20 bp, synthetic construct
  misc_feature 1..20: note = chemically synthesized
  source 1..20: mol_type = other DNA
agcccaggagttcgaggttg

SEQ ID NO: 16898 - DNA, 20 bp, synthetic construct
  misc_feature 1..20: note = chemically synthesized
  source 1..20: mol_type = other DNA
caggagttcgaggttgcagt

SEQ ID NO: 16899 - DNA, 20 bp, synthetic construct
  misc_feature 1..20: note = chemically synthesized
  source 1..20: mol_type = other DNA
tctctaaaaaaaaaatgtcc

SEQ ID NO: 16900 - DNA, 20 bp, synthetic construct
  misc_feature 1..20: note = chemically synthesized
  source 1..20: mol_type = other DNA
aaaaaaatgtccaagatact

SEQ ID NO: 16901 - DNA, 20 bp, synthetic construct
  misc_feature 1..20: note = chemically synthesized
  source 1..20: mol_type = other DNA
aaaaaatgtccaagatactt

SEQ ID NO: 16902 - DNA, 20 bp, synthetic construct
  misc_feature 1..20: note = chemically synthesized
  source 1..20: mol_type = other DNA
tccaagatacttaggtcctt

SEQ ID NO: 16903 - DNA, 20 bp, synthetic construct
  misc_feature 1..20: note = chemically synthesized
  source 1..20: mol_type = other DNA
gatacttaggtccttcagtc

SEQ ID NO: 16904 - DNA, 20 bp, synthetic construct
  misc_feature 1..20: note = chemically synthesized
  source 1..20: mol_type = other DNA
ccttcagtcaagatttatta

SEQ ID NO: 16905 - DNA, 20 bp, synthetic construct
  misc_feature 1..20: note = chemically synthesized
  source 1..20: mol_type = other DNA
tcagtcaagatttattacag

SEQ ID NO: 16906 - DNA, 20 bp, synthetic construct
  misc_feature 1..20: note = chemically synthesized
  source 1..20: mol_type = other DNA
cagtcaagatttattacaga

SEQ ID NO: 16907 - DNA, 20 bp, synthetic construct
  misc_feature 1..20: note = chemically synthesized
  source 1..20: mol_type = other DNA
agatttattacagaaggatc

SEQ ID NO: 16908 - DNA, 20 bp, synthetic construct
  misc_feature 1..20: note = chemically synthesized
  source 1..20: mol_type = other DNA
gatttattacagaaggatcc

SEQ ID NO: 16909 - DNA, 20 bp, synthetic construct
  misc_feature 1..20: note = chemically synthesized
  source 1..20: mol_type = other DNA
atttattacagaaggatcca

SEQ ID NO: 16910 - DNA, 20 bp, synthetic construct
  misc_feature 1..20: note = chemically synthesized
  source 1..20: mol_type = other DNA
tattacagaaggatccaggg

SEQ ID NO: 16911 - DNA, 20 bp, synthetic construct
  misc_feature 1..20: note = chemically synthesized
  source 1..20: mol_type = other DNA
attacagaaggatccaggga

SEQ ID NO: 16912 - DNA, 20 bp, synthetic construct
  misc_feature 1..20: note = chemically synthesized
  source 1..20: mol_type = other DNA
ttacagaaggatccagggaa

SEQ ID NO: 16913 - DNA, 20 bp, synthetic construct
  misc_feature 1..20: note = chemically synthesized
  source 1..20: mol_type = other DNA
aaggatccagggaagggtct

SEQ ID NO: 16914 - DNA, 20 bp, synthetic construct
  misc_feature 1..20: note = chemically synthesized
  source 1..20: mol_type = other DNA
aggatccagggaagggtctt

SEQ ID NO: 16915 - DNA, 20 bp, synthetic construct
  misc_feature 1..20: note = chemically synthesized
  source 1..20: mol_type = other DNA
gatccagggaagggtcttgg

SEQ ID NO: 16916 - DNA, 20 bp, synthetic construct
  misc_feature 1..20: note = chemically synthesized
  source 1..20: mol_type = other DNA
agggaagggtcttgggagat

SEQ ID NO: 16917 - DNA, 20 bp, synthetic construct
  misc_feature 1..20: note = chemically synthesized
  source 1..20: mol_type = other DNA
ggaagggtcttgggagatga

SEQ ID NO: 16918 - DNA, 20 bp, synthetic construct
  misc_feature 1..20: note = chemically synthesized
  source 1..20: mol_type = other DNA
gaagggtcttgggagatgag

SEQ ID NO: 16919 - DNA, 20 bp, synthetic construct
  misc_feature 1..20: note = chemically synthesized
  source 1..20: mol_type = other DNA
agggtcttgggagatgagag

SEQ ID NO: 16920 - DNA, 20 bp, synthetic construct
  misc_feature 1..20: note = chemically synthesized
  source 1..20: mol_type = other DNA
gtcttgggagatgagaggag

SEQ ID NO: 16921 - DNA, 20 bp, synthetic construct
  misc_feature 1..20: note = chemically synthesized
  source 1..20: mol_type = other DNA
tcttgggagatgagaggagc

SEQ ID NO: 16922 - DNA, 20 bp, synthetic construct
  misc_feature 1..20: note = chemically synthesized
  source 1..20: mol_type = other DNA
cttgggagatgagaggagca

SEQ ID NO: 16923 - DNA, 20 bp, synthetic construct
  misc_feature 1..20: note = chemically synthesized
  source 1..20: mol_type = other DNA
tgagaggagcagggatcttc

SEQ ID NO: 16924 - DNA, 20 bp, synthetic construct
  misc_feature 1..20: note = chemically synthesized
  source 1..20: mol_type = other DNA
gagaggagcagggatcttcc

SEQ ID NO: 16925 - DNA, 20 bp, synthetic construct
  misc_feature 1..20: note = chemically synthesized
  source 1..20: mol_type = other DNA
cacaacatacacacatgcac

SEQ ID NO: 16926 - DNA, 20 bp, synthetic construct
  misc_feature 1..20: note = chemically synthesized
  source 1..20: mol_type = other DNA
cacaacatacactcacacac

SEQ ID NO: 16927 - DNA, 20 bp, synthetic construct
  misc_feature 1..20: note = chemically synthesized
  source 1..20: mol_type = other DNA
cattcactcacacacacaca

SEQ ID NO: 16928 - DNA, 20 bp, synthetic construct
  misc_feature 1..20: note = chemically synthesized
  source 1..20: mol_type = other DNA
ttcactcacacacacacaca

SEQ ID NO: 16929 - DNA, 20 bp, synthetic construct
  misc_feature 1..20: note = chemically synthesized
  source 1..20: mol_type = other DNA
cacacacacacacagagtcc

SEQ ID NO: 16930 - DNA, 20 bp, synthetic construct
  misc_feature 1..20: note = chemically synthesized
  source 1..20: mol_type = other DNA
atacgtgcacacgcacatac

SEQ ID NO: 16931 - DNA, 20 bp, synthetic construct
  misc_feature 1..20: note = chemically synthesized
  source 1..20: mol_type = other DNA
tacgtgcacacgcacatacg

SEQ ID NO: 16932 - DNA, 20 bp, synthetic construct
  misc_feature 1..20: note = chemically synthesized
  source 1..20: mol_type = other DNA
atacgaggcacatgtgttct

SEQ ID NO: 16933 - DNA, 20 bp, synthetic construct
  misc_feature 1..20: note = chemically synthesized
  source 1..20: mol_type = other DNA
tacgaggcacatgtgttctt

SEQ ID NO: 16934 - DNA, 20 bp, synthetic construct
  misc_feature 1..20: note = chemically synthesized
  source 1..20: mol_type = other DNA
aggcacatgtgttcttgggt

SEQ ID NO: 16935 - DNA, 20 bp, synthetic construct
  misc_feature 1..20: note = chemically synthesized
  source 1..20: mol_type = other DNA
ggcacatgtgttcttgggtt

SEQ ID NO: 16936 - DNA, 20 bp, synthetic construct
  misc_feature 1..20: note = chemically synthesized
  source 1..20: mol_type = other DNA
cacatgtgttcttgggttgg

SEQ ID NO: 16937 - DNA, 20 bp, synthetic construct
  misc_feature 1..20: note = chemically synthesized
  source 1..20: mol_type = other DNA
acatgtgttcttgggttggg

SEQ ID NO: 16938 - DNA, 20 bp, synthetic construct
  misc_feature 1..20: note = chemically synthesized
  source 1..20: mol_type = other DNA
atgtgttcttgggttgggag

SEQ ID NO: 16939 - DNA, 20 bp, synthetic construct
  misc_feature 1..20: note = chemically synthesized
  source 1..20: mol_type = other DNA
tgttcttgggttgggaggag

SEQ ID NO: 16940 - DNA, 20 bp, synthetic construct
  misc_feature 1..20: note = chemically synthesized
  source 1..20: mol_type = other DNA
gttcttgggttgggaggaga

SEQ ID NO: 16941 - DNA, 20 bp, synthetic construct
  misc_feature 1..20: note = chemically synthesized
  source 1..20: mol_type = other DNA
ttcttgggttgggaggagaa

SEQ ID NO: 16942 - DNA, 20 bp, synthetic construct
  misc_feature 1..20: note = chemically synthesized
  source 1..20: mol_type = other DNA
ttgggttgggaggagaaggg

SEQ ID NO: 16943 - DNA, 20 bp, synthetic construct
  misc_feature 1..20: note = chemically synthesized
  source 1..20: mol_type = other DNA
tgggttgggaggagaagggc

SEQ ID NO: 16944 - DNA, 20 bp, synthetic construct
  misc_feature 1..20: note = chemically synthesized
  source 1..20: mol_type = other DNA
gttgggaggagaagggcagg

SEQ ID NO: 16945 - DNA, 20 bp, synthetic construct
  misc_feature 1..20: note = chemically synthesized
  source 1..20: mol_type = other DNA
aagggcaggcagttatcttc

SEQ ID NO: 16946 - DNA, 20 bp, synthetic construct
  misc_feature 1..20: note = chemically synthesized
  source 1..20: mol_type = other DNA
tccagatctccccacacctc

SEQ ID NO: 16947 - DNA, 20 bp, synthetic construct
  misc_feature 1..20: note = chemically synthesized
  source 1..20: mol_type = other DNA
cctctggcacatgcctttcc

SEQ ID NO: 16948 - DNA, 20 bp, synthetic construct
  misc_feature 1..20: note = chemically synthesized
  source 1..20: mol_type = other DNA
ctctggcacatgcctttcct

SEQ ID NO: 16949 - DNA, 20 bp, synthetic construct
  misc_feature 1..20: note = chemically synthesized
  source 1..20: mol_type = other DNA
tctggcacatgcctttcctg

SEQ ID NO: 16950 - DNA, 20 bp, synthetic construct
  misc_feature 1..20: note = chemically synthesized
  source 1..20: mol_type = other DNA
acatgcctttcctggggtcc

SEQ ID NO: 16951 - DNA, 20 bp, synthetic construct
  misc_feature 1..20: note = chemically synthesized
  source 1..20: mol_type = other DNA
catgcctttcctggggtcct

SEQ ID NO: 16952 - DNA, 20 bp, synthetic construct
  misc_feature 1..20: note = chemically synthesized
  source 1..20: mol_type = other DNA
atgcctttcctggggtcctg

SEQ ID NO: 16953 - DNA, 20 bp, synthetic construct
  misc_feature 1..20: note = chemically synthesized
  source 1..20: mol_type = other DNA
cctttcctggggtcctgggg

SEQ ID NO: 16954 - DNA, 20 bp, synthetic construct
  misc_feature 1..20: note = chemically synthesized
  source 1..20: mol_type = other DNA
tcctggggtcctggggtaga

SEQ ID NO: 16955 - DNA, 20 bp, synthetic construct
  misc_feature 1..20: note = chemically synthesized
  source 1..20: mol_type = other DNA
cctggggtcctggggtagac

SEQ ID NO: 16956 - DNA, 20 bp, synthetic construct
  misc_feature 1..20: note = chemically synthesized
  source 1..20: mol_type = other DNA
ggggtcctggggtagacagg

SEQ ID NO: 16957 - DNA, 20 bp, synthetic construct
  misc_feature 1..20: note = chemically synthesized
  source 1..20: mol_type = other DNA
gggtcctggggtagacagga

SEQ ID NO: 16958 - DNA, 20 bp, synthetic construct
  misc_feature 1..20: note = chemically synthesized
  source 1..20: mol_type = other DNA
cctggggtagacaggaaggt

SEQ ID NO: 16959 - DNA, 20 bp, synthetic construct
  misc_feature 1..20: note = chemically synthesized
  source 1..20: mol_type = other DNA
ctggggtagacaggaaggtg

SEQ ID NO: 16960 - DNA, 20 bp, synthetic construct
  misc_feature 1..20: note = chemically synthesized
  source 1..20: mol_type = other DNA
ggtagacaggaaggtgaggt

SEQ ID NO: 16961 - DNA, 20 bp, synthetic construct
  misc_feature 1..20: note = chemically synthesized
  source 1..20: mol_type = other DNA
gtagacaggaaggtgaggtg

SEQ ID NO: 16962 - DNA, 20 bp, synthetic construct
  misc_feature 1..20: note = chemically synthesized
  source 1..20: mol_type = other DNA
tagacaggaaggtgaggtga

SEQ ID NO: 16963 - DNA, 20 bp, synthetic construct
  misc_feature 1..20: note = chemically synthesized
  source 1..20: mol_type = other DNA
ggaaggtgaggtgagggaac

SEQ ID NO: 16964 - DNA, 20 bp, synthetic construct
  misc_feature 1..20: note = chemically synthesized
  source 1..20: mol_type = other DNA
aggtgaggtgagggaacaag

SEQ ID NO: 16965 - DNA, 20 bp, synthetic construct
  misc_feature 1..20: note = chemically synthesized
  source 1..20: mol_type = other DNA
ggtgaggtgagggaacaagc

SEQ ID NO: 16966 - DNA, 20 bp, synthetic construct
  misc_feature 1..20: note = chemically synthesized
  source 1..20: mol_type = other DNA
gtgaggtgagggaacaagcg

SEQ ID NO: 16967 - DNA, 20 bp, synthetic construct
  misc_feature 1..20: note = chemically synthesized
  source 1..20: mol_type = other DNA
tgaggtgagggaacaagcgg

SEQ ID NO: 16968 - DNA, 20 bp, synthetic construct
  misc_feature 1..20: note = chemically synthesized
  source 1..20: mol_type = other DNA
gagggaacaagcgggggtgt

SEQ ID NO: 16969 - DNA, 20 bp, synthetic construct
  misc_feature 1..20: note = chemically synthesized
  source 1..20: mol_type = other DNA
agggaacaagcgggggtgtc

SEQ ID NO: 16970 - DNA, 20 bp, synthetic construct
  misc_feature 1..20: note = chemically synthesized
  source 1..20: mol_type = other DNA
cgggggtgtcgggccctcct

SEQ ID NO: 16971 - DNA, 20 bp, synthetic construct
  misc_feature 1..20: note = chemically synthesized
  source 1..20: mol_type = other DNA
ccctcctcagtccctgttca

SEQ ID NO: 16972 - DNA, 20 bp, synthetic construct
  misc_feature 1..20: note = chemically synthesized
  source 1..20: mol_type = other DNA
ctcctcagtccctgttcaca

SEQ ID NO: 16973 - DNA, 20 bp, synthetic construct
  misc_feature 1..20: note = chemically synthesized
  source 1..20: mol_type = other DNA
ctcagtccctgttcacagag

SEQ ID NO: 16974 - DNA, 20 bp, synthetic construct
  misc_feature 1..20: note = chemically synthesized
  source 1..20: mol_type = other DNA
tcagtccctgttcacagagt

SEQ ID NO: 16975 - DNA, 20 bp, synthetic construct
  misc_feature 1..20: note = chemically synthesized
  source 1..20: mol_type = other DNA
ccctgttcacagagtgggtg

SEQ ID NO: 16976 - DNA, 20 bp, synthetic construct
  misc_feature 1..20: note = chemically synthesized
  source 1..20: mol_type = other DNA
tgttcacagagtgggtgcgg

SEQ ID NO: 16977 - DNA, 20 bp, synthetic construct
  misc_feature 1..20: note = chemically synthesized
  source 1..20: mol_type = other DNA
ttcacagagtgggtgcggca

SEQ ID NO: 16978 - DNA, 20 bp, synthetic construct
  misc_feature 1..20: note = chemically synthesized
  source 1..20: mol_type = other DNA
tgggtgcggcagagacctca

SEQ ID NO: 16979 - DNA, 20 bp, synthetic construct
  misc_feature 1..20: note = chemically synthesized
  source 1..20: mol_type = other DNA
gggtgcggcagagacctcaa

SEQ ID NO: 16980 - DNA, 20 bp, synthetic construct
  misc_feature 1..20: note = chemically synthesized
  source 1..20: mol_type = other DNA
ggtgcggcagagacctcaaa

SEQ ID NO: 16981 - DNA, 20 bp, synthetic construct
  misc_feature 1..20: note = chemically synthesized
  source 1..20: mol_type = other DNA
cggcagagacctcaaaggga

SEQ ID NO: 16982 - DNA, 20 bp, synthetic construct
  misc_feature 1..20: note = chemically synthesized
  source 1..20: mol_type = other DNA
gcagagacctcaaagggaca

SEQ ID NO: 16983 - DNA, 20 bp, synthetic construct
  misc_feature 1..20: note = chemically synthesized
  source 1..20: mol_type = other DNA
caaagggacagagcaatcat

SEQ ID NO: 16984 - DNA, 20 bp, synthetic construct
  misc_feature 1..20: note = chemically synthesized
  source 1..20: mol_type = other DNA
ggacagagcaatcatgagct

SEQ ID NO: 16985 - DNA, 20 bp, synthetic construct
  misc_feature 1..20: note = chemically synthesized
  source 1..20: mol_type = other DNA
agagcaatcatgagctgaga

SEQ ID NO: 16986 - DNA, 20 bp, synthetic construct
  misc_feature 1..20: note = chemically synthesized
  source 1..20: mol_type = other DNA
agcaatcatgagctgagaca

SEQ ID NO: 16987 - DNA, 20 bp, synthetic construct
  misc_feature 1..20: note = chemically synthesized
  source 1..20: mol_type = other DNA
gcaatcatgagctgagacag

SEQ ID NO: 16988 - DNA, 20 bp, synthetic construct
  misc_feature 1..20: note = chemically synthesized
  source 1..20: mol_type = other DNA
caatcatgagctgagacaga

SEQ ID NO: 16989 - DNA, 20 bp, synthetic construct
  misc_feature 1..20: note = chemically synthesized
  source 1..20: mol_type = other DNA
aatcatgagctgagacagag

SEQ ID NO: 16990 - DNA, 20 bp, synthetic construct
  misc_feature 1..20: note = chemically synthesized
  source 1..20: mol_type = other DNA
atcatgagctgagacagagg

SEQ ID NO: 16991 - DNA, 20 bp, synthetic construct
  misc_feature 1..20: note = chemically synthesized
  source 1..20: mol_type = other DNA
catgagctgagacagagggg

SEQ ID NO: 16992 - DNA, 20 bp, synthetic construct
  misc_feature 1..20: note = chemically synthesized
  source 1..20: mol_type = other DNA
gctgagacagagggggagca

SEQ ID NO: 16993 - DNA, 20 bp, synthetic construct
  misc_feature 1..20: note = chemically synthesized
  source 1..20: mol_type = other DNA
acagagggggagcaaagccg

SEQ ID NO: 16994 - DNA, 20 bp, synthetic construct
  misc_feature 1..20: note = chemically synthesized
  source 1..20: mol_type = other DNA
gcacacttgcctttcaaaaa

SEQ ID NO: 16995 - DNA, 20 bp, synthetic construct
  misc_feature 1..20: note = chemically synthesized
  source 1..20: mol_type = other DNA
caaaaatggatttcctctcc

SEQ ID NO: 16996 - DNA, 20 bp, synthetic construct
  misc_feature 1..20: note = chemically synthesized
  source 1..20: mol_type = other DNA
aaaaatggatttcctctcct

SEQ ID NO: 16997 - DNA, 20 bp, synthetic construct
  misc_feature 1..20: note = chemically synthesized
  source 1..20: mol_type = other DNA
ggatttcctctcctgggatt

SEQ ID NO: 16998 - DNA, 20 bp, synthetic construct
  misc_feature 1..20: note = chemically synthesized
  source 1..20: mol_type = other DNA
tctcctgggattcagcctgc

SEQ ID NO: 16999 - DNA, 20 bp, synthetic construct
  misc_feature 1..20: note = chemically synthesized
  source 1..20: mol_type = other DNA
ggattcagcctgcgagtgcc

SEQ ID NO: 17000 - DNA, 20 bp, synthetic construct
  misc_feature 1..20: note = chemically synthesized
  source 1..20: mol_type = other DNA
tgcctggcccctcaccttga

SEQ ID NO: 17001 - DNA, 20 bp, synthetic construct
  misc_feature 1..20: note = chemically synthesized
  source 1..20: mol_type = other DNA
tggcccctcaccttgatgga

SEQ ID NO: 17002 - DNA, 20 bp, synthetic construct
  misc_feature 1..20: note = chemically synthesized
  source 1..20: mol_type = other DNA
ggcccctcaccttgatggaa

SEQ ID NO: 17003 - DNA, 20 bp, synthetic construct
  misc_feature 1..20: note = chemically synthesized
  source 1..20: mol_type = other DNA
cctcaccttgatggaaagga

SEQ ID NO: 17004 - DNA, 20 bp, synthetic construct
  misc_feature 1..20: note = chemically synthesized
  source 1..20: mol_type = other DNA
aaggatggtcattttcctcc

SEQ ID NO: 17005 - DNA, 20 bp, synthetic construct
  misc_feature 1..20: note = chemically synthesized
  source 1..20: mol_type = other DNA
tggtcattttcctccgagct

SEQ ID NO: 17006 - DNA, 20 bp, synthetic construct
  misc_feature 1..20: note = chemically synthesized
  source 1..20: mol_type = other DNA
tttcctccgagctcagctgc

SEQ ID NO: 17007 - DNA, 20 bp, synthetic construct
  misc_feature 1..20: note = chemically synthesized
  source 1..20: mol_type = other DNA
tcagctgctggatatcttga

SEQ ID NO: 17008 - DNA, 20 bp, synthetic construct
  misc_feature 1..20: note = chemically synthesized
  source 1..20: mol_type = other DNA
ctggatatcttgaaagtcct

SEQ ID NO: 17009 - DNA, 20 bp, synthetic construct
  misc_feature 1..20: note = chemically synthesized
  source 1..20: mol_type = other DNA
ttgaaagtccttggccatga

SEQ ID NO: 17010 - DNA, 20 bp, synthetic construct
  misc_feature 1..20: note = chemically synthesized
  source 1..20: mol_type = other DNA
tgaaagtccttggccatgat

SEQ ID NO: 17011 - DNA, 20 bp, synthetic construct
  misc_feature 1..20: note = chemically synthesized
  source 1..20: mol_type = other DNA
gaaagtccttggccatgatg

SEQ ID NO: 17012 - DNA, 20 bp, synthetic construct
  misc_feature 1..20: note = chemically synthesized
  source 1..20: mol_type = other DNA
tccttggccatgatggggcc

SEQ ID NO: 17013 - DNA, 20 bp, synthetic construct
  misc_feature 1..20: note = chemically synthesized
  source 1..20: mol_type = other DNA
ccttggccatgatggggccc

SEQ ID NO: 17014 - DNA, 20 bp, synthetic construct
  misc_feature 1..20: note = chemically synthesized
  source 1..20: mol_type = other DNA
ggccatgatggggcccgggc

SEQ ID NO: 17015 - DNA, 20 bp, synthetic construct
  misc_feature 1..20: note = chemically synthesized
  source 1..20: mol_type = other DNA
ccatgatggggcccgggctg

SEQ ID NO: 17016 - DNA, 20 bp, synthetic construct
  misc_feature 1..20: note = chemically synthesized
  source 1..20: mol_type = other DNA
gatggggcccgggctggagc

SEQ ID NO: 17017 - DNA, 20 bp, synthetic construct
  misc_feature 1..20: note = chemically synthesized
  source 1..20: mol_type = other DNA
tggggcccgggctggagctg

SEQ ID NO: 17018 - DNA, 20 bp, synthetic construct
  misc_feature 1..20: note = chemically synthesized
  source 1..20: mol_type = other DNA
gcccgggctggagctggagc

SEQ ID NO: 17019 - DNA, 20 bp, synthetic construct
  misc_feature 1..20: note = chemically synthesized
  source 1..20: mol_type = other DNA
ccgggctggagctggagctg

SEQ ID NO: 17020 - DNA, 20 bp, synthetic construct
  misc_feature 1..20: note = chemically synthesized
  source 1..20: mol_type = other DNA
gctggagctggagctggagc

SEQ ID NO: 17021 - DNA, 20 bp, synthetic construct
  misc_feature 1..20: note = chemically synthesized
  source 1..20: mol_type = other DNA
ctggagctggagctggagct

SEQ ID NO: 17022 - DNA, 20 bp, synthetic construct
  misc_feature 1..20: note = chemically synthesized
  source 1..20: mol_type = other DNA
agctggagctggagctgggc

SEQ ID NO: 17023 - DNA, 20 bp, synthetic construct
  misc_feature 1..20: note = chemically synthesized
  source 1..20: mol_type = other DNA
gctggagctggagctgggct

SEQ ID NO: 17024 - DNA, 20 bp, synthetic construct
  misc_feature 1..20: note = chemically synthesized
  source 1..20: mol_type = other DNA
gagctggagctgggctgggc

SEQ ID NO: 17025 - DNA, 20 bp, synthetic construct
  misc_feature 1..20: note = chemically synthesized
  source 1..20: mol_type = other DNA
agctggagctgggctgggct

SEQ ID NO: 17026 - DNA, 20 bp, synthetic construct
  misc_feature 1..20: note = chemically synthesized
  source 1..20: mol_type = other DNA
gagctgggctgggctgggct

SEQ ID NO: 17027 - DNA, 20 bp, synthetic construct
  misc_feature 1..20: note = chemically synthesized
  source 1..20: mol_type = other DNA
agctgggctgggctgggctg

SEQ ID NO: 17028 - DNA, 20 bp, synthetic construct
  misc_feature 1..20: note = chemically synthesized
  source 1..20: mol_type = other DNA
ggctgggctgaggttgctct

SEQ ID NO: 17029 - DNA, 20 bp, synthetic construct
  misc_feature 1..20: note = chemically synthesized
  source 1..20: mol_type = other DNA
gctgggctgaggttgctctg

SEQ ID NO: 17030 - DNA, 20 bp, synthetic construct
  misc_feature 1..20: note = chemically synthesized
  source 1..20: mol_type = other DNA
ctgggctgaggttgctctga

SEQ ID NO: 17031 - DNA, 20 bp, synthetic construct
  misc_feature 1..20: note = chemically synthesized
  source 1..20: mol_type = other DNA
gctgaggttgctctgagggc

SEQ ID NO: 17032 - DNA, 20 bp, synthetic construct
  misc_feature 1..20: note = chemically synthesized
  source 1..20: mol_type = other DNA
ctgaggttgctctgagggct

SEQ ID NO: 17033 - DNA, 20 bp, synthetic construct
  misc_feature 1..20: note = chemically synthesized
  source 1..20: mol_type = other DNA
tgaggttgctctgagggctg

SEQ ID NO: 17034 - DNA, 20 bp, synthetic construct
  misc_feature 1..20: note = chemically synthesized
  source 1..20: mol_type = other DNA
gttgctctgagggctggggc

SEQ ID NO: 17035 - DNA, 20 bp, synthetic construct
  misc_feature 1..20: note = chemically synthesized
  source 1..20: mol_type = other DNA
ttgctctgagggctggggct

SEQ ID NO: 17036 - DNA, 20 bp, synthetic construct
  misc_feature 1..20: note = chemically synthesized
  source 1..20: mol_type = other DNA
tgctctgagggctggggctg

SEQ ID NO: 17037 - DNA, 20 bp, synthetic construct
  misc_feature 1..20: note = chemically synthesized
  source 1..20: mol_type = other DNA
tctgagggctggggctgggg

SEQ ID NO: 17038 - DNA, 20 bp, synthetic construct
  misc_feature 1..20: note = chemically synthesized
  source 1..20: mol_type = other DNA
tgagggctggggctggggca

SEQ ID NO: 17039 - DNA, 20 bp, synthetic construct
  misc_feature 1..20: note = chemically synthesized
  source 1..20: mol_type = other DNA
gagggctggggctggggcag

SEQ ID NO: 17040 - DNA, 20 bp, synthetic construct
  misc_feature 1..20: note = chemically synthesized
  source 1..20: mol_type = other DNA
ctggggctggggcagaggtg

SEQ ID NO: 17041 - DNA, 20 bp, synthetic construct
  misc_feature 1..20: note = chemically synthesized
  source 1..20: mol_type = other DNA
ggcagaggtgcagattcacg

SEQ ID NO: 17042 - DNA, 20 bp, synthetic construct
  misc_feature 1..20: note = chemically synthesized
  source 1..20: mol_type = other DNA
cagaggtgcagattcacgtg

SEQ ID NO: 17043 - DNA, 20 bp, synthetic construct
  misc_feature 1..20: note = chemically synthesized
  source 1..20: mol_type = other DNA
agaggtgcagattcacgtgg

SEQ ID NO: 17044 - DNA, 20 bp, synthetic construct
  misc_feature 1..20: note = chemically synthesized
  source 1..20: mol_type = other DNA
cagattcacgtggaggttga

SEQ ID NO: 17045 - DNA, 20 bp, synthetic construct
  misc_feature 1..20: note = chemically synthesized
  source 1..20: mol_type = other DNA
attcacgtggaggttgatgg

SEQ ID NO: 17046 - DNA, 20 bp, synthetic construct
  misc_feature 1..20: note = chemically synthesized
  source 1..20: mol_type = other DNA
ttcacgtggaggttgatggt

SEQ ID NO: 17047 - DNA, 20 bp, synthetic construct
  misc_feature 1..20: note = chemically synthesized
  source 1..20: mol_type = other DNA
cgtggaggttgatggtggga

SEQ ID NO: 17048 - DNA, 20 bp, synthetic construct
  misc_feature 1..20: note = chemically synthesized
  source 1..20: mol_type = other DNA
gttgatggtgggatggaacg

SEQ ID NO: 17049 - DNA, 20 bp, synthetic construct
  misc_feature 1..20: note = chemically synthesized
  source 1..20: mol_type = other DNA
ttgatggtgggatggaacgc

SEQ ID NO: 17050 - DNA, 20 bp, synthetic construct
  misc_feature 1..20: note = chemically synthesized
  source 1..20: mol_type = other DNA
tgatggtgggatggaacgca

SEQ ID NO: 17051 - DNA, 20 bp, synthetic construct
  misc_feature 1..20: note = chemically synthesized
  source 1..20: mol_type = other DNA
ggtgggatggaacgcagggt

SEQ ID NO: 17052 - DNA, 20 bp, synthetic construct
  misc_feature 1..20: note = chemically synthesized
  source 1..20: mol_type = other DNA
tgggatggaacgcagggtcg

SEQ ID NO: 17053 - DNA, 20 bp, synthetic construct
  misc_feature 1..20: note = chemically synthesized
  source 1..20: mol_type = other DNA
gggatggaacgcagggtcgg

SEQ ID NO: 17054 - DNA, 20 bp, synthetic construct
  misc_feature 1..20: note = chemically synthesized
  source 1..20: mol_type = other DNA
ggatggaacgcagggtcgga

SEQ ID NO: 17055 - DNA, 20 bp, synthetic construct
  misc_feature 1..20: note = chemically synthesized
  source 1..20: mol_type = other DNA
gatggaacgcagggtcggag

SEQ ID NO: 17056 - DNA, 20 bp, synthetic construct
  misc_feature 1..20: note = chemically synthesized
  source 1..20: mol_type = other DNA
aacgcagggtcggaggggtt

SEQ ID NO: 17057 - DNA, 20 bp, synthetic construct
  misc_feature 1..20: note = chemically synthesized
  source 1..20: mol_type = other DNA
acgcagggtcggaggggttc

SEQ ID NO: 17058 - DNA, 20 bp, synthetic construct
  misc_feature 1..20: note = chemically synthesized
  source 1..20: mol_type = other DNA
cgcagggtcggaggggttcg

SEQ ID NO: 17059 - DNA, 20 bp, synthetic construct
  misc_feature 1..20: note = chemically synthesized
  source 1..20: mol_type = other DNA
agggtcggaggggttcgggg

SEQ ID NO: 17060 - DNA, 20 bp, synthetic construct
  misc_feature 1..20: note = chemically synthesized
  source 1..20: mol_type = other DNA
gtcggaggggttcggggtgg

SEQ ID NO: 17061 - DNA, 20 bp, synthetic construct
  misc_feature 1..20: note = chemically synthesized
  source 1..20: mol_type = other DNA
aggggttcggggtggtggcc

SEQ ID NO: 17062 - DNA, 20 bp, synthetic construct
  misc_feature 1..20: note = chemically synthesized
  source 1..20: mol_type = other DNA
ggggttcggggtggtggcct

SEQ ID NO: 17063 - DNA, 20 bp, synthetic construct
  misc_feature 1..20: note = chemically synthesized
  source 1..20: mol_type = other DNA
gttcggggtggtggcctggg

SEQ ID NO: 17064 - DNA, 20 bp, synthetic construct
  misc_feature 1..20: note = chemically synthesized
  source 1..20: mol_type = other DNA
ttcggggtggtggcctgggt

SEQ ID NO: 17065 - DNA, 20 bp, synthetic construct
  misc_feature 1..20: note = chemically synthesized
  source 1..20: mol_type = other DNA
tggtggcctgggtaggatct

SEQ ID NO: 17066 - DNA, 20 bp, synthetic construct
  misc_feature 1..20: note = chemically synthesized
  source 1..20: mol_type = other DNA
ggtggcctgggtaggatctg

SEQ ID NO: 17067 - DNA, 20 bp, synthetic construct
  misc_feature 1..20: note = chemically synthesized
  source 1..20: mol_type = other DNA
gcctgggtaggatctgaggt

SEQ ID NO: 17068 - DNA, 20 bp, synthetic construct
  misc_feature 1..20: note = chemically synthesized
  source 1..20: mol_type = other DNA
tgccaacctcagatcctacc

SEQ ID NO: 17069 - DNA, 20 bp, synthetic construct
  misc_feature 1..20: note = chemically synthesized
  source 1..20: mol_type = other DNA
gccaacctcagatcctaccc

SEQ ID NO: 17070 - DNA, 20 bp, synthetic construct
  misc_feature 1..20: note = chemically synthesized
  source 1..20: mol_type = other DNA
gtgaatctgcacctctgccc

SEQ ID NO: 17071 - DNA, 20 bp, synthetic construct
  misc_feature 1..20: note = chemically synthesized
  source 1..20: mol_type = other DNA
ctgcacctctgccccagccc

SEQ ID NO: 17072 - DNA, 20 bp, synthetic construct
  misc_feature 1..20: note = chemically synthesized
  source 1..20: mol_type = other DNA
tctgccccagccccagccct

SEQ ID NO: 17073 - DNA, 20 bp, synthetic construct
  misc_feature 1..20: note = chemically synthesized
  source 1..20: mol_type = other DNA
tgccccagccccagccctca

SEQ ID NO: 17074 - DNA, 20 bp, synthetic construct
  misc_feature 1..20: note = chemically synthesized
  source 1..20: mol_type = other DNA
cccagccctcagagcaacct

SEQ ID NO: 17075 - DNA, 20 bp, synthetic construct
  misc_feature 1..20: note = chemically synthesized
  source 1..20: mol_type = other DNA
ccctcagagcaacctcagcc

SEQ ID NO: 17076 - DNA, 20 bp, synthetic construct
  misc_feature 1..20: note = chemically synthesized
  source 1..20: mol_type = other DNA
agagcaacctcagcccagcc

SEQ ID NO: 17077 - DNA, 20 bp, synthetic construct
  misc_feature 1..20: note = chemically synthesized
  source 1..20: mol_type = other DNA
aacctcagcccagcccagcc

SEQ ID NO: 17078 - DNA, 20 bp, synthetic construct
  misc_feature 1..20: note = chemically synthesized
  source 1..20: mol_type = other DNA
agcccagcccagcccagctc

SEQ ID NO: 17079 - DNA, 20 bp, synthetic construct
  misc_feature 1..20: note = chemically synthesized
  source 1..20: mol_type = other DNA
gcccagcccagctccagctc

SEQ ID NO: 17080 - DNA, 20 bp, synthetic construct
  misc_feature 1..20: note = chemically synthesized
  source 1..20: mol_type = other DNA
cccagctccagctccagctc

SEQ ID NO: 17081 - DNA, 20 bp, synthetic construct
  misc_feature 1..20: note = chemically synthesized
  source 1..20: mol_type = other DNA
ctccagctccagctccagcc

SEQ ID NO: 17082 - DNA, 20 bp, synthetic construct
  misc_feature 1..20: note = chemically synthesized
  source 1..20: mol_type = other DNA
tccagctccagctccagccc

SEQ ID NO: 17083 - DNA, 20 bp, synthetic construct
  misc_feature 1..20: note = chemically synthesized
  source 1..20: mol_type = other DNA
ctccagcccgggccccatca

SEQ ID NO: 17084 - DNA, 20 bp, synthetic construct
  misc_feature 1..20: note = chemically synthesized
  source 1..20: mol_type = other DNA
gcccgggccccatcatggcc

SEQ ID NO: 17085 - DNA, 20 bp, synthetic construct
  misc_feature 1..20: note = chemically synthesized
  source 1..20: mol_type = other DNA
cccgggccccatcatggcca

SEQ ID NO: 17086 - DNA, 20 bp, synthetic construct
  misc_feature 1..20: note = chemically synthesized
  source 1..20: mol_type = other DNA
catcatggccaaggactttc

SEQ ID NO: 17087 - DNA, 20 bp, synthetic construct
  misc_feature 1..20: note = chemically synthesized
  source 1..20: mol_type = other DNA
ccaaggactttcaagatatc

SEQ ID NO: 17088 - DNA, 20 bp, synthetic construct
  misc_feature 1..20: note = chemically synthesized
  source 1..20: mol_type = other DNA
aggactttcaagatatccag

SEQ ID NO: 17089 - DNA, 20 bp, synthetic construct
  misc_feature 1..20: note = chemically synthesized
  source 1..20: mol_type = other DNA
tttcaagatatccagcagct

SEQ ID NO: 17090 - DNA, 20 bp, synthetic construct
  misc_feature 1..20: note = chemically synthesized
  source 1..20: mol_type = other DNA
agatatccagcagctgagct

SEQ ID NO: 17091 - DNA, 20 bp, synthetic construct
  misc_feature 1..20: note = chemically synthesized
  source 1..20: mol_type = other DNA
atatccagcagctgagctcg

SEQ ID NO: 17092 - DNA, 20 bp, synthetic construct
  misc_feature 1..20: note = chemically synthesized
  source 1..20: mol_type = other DNA
tatccagcagctgagctcgg

SEQ ID NO: 17093 - DNA, 20 bp, synthetic construct
  misc_feature 1..20: note = chemically synthesized
  source 1..20: mol_type = other DNA
aaatgaccatcctttccatc

SEQ ID NO: 17094 - DNA, 20 bp, synthetic construct
  misc_feature 1..20: note = chemically synthesized
  source 1..20: mol_type = other DNA
aatgaccatcctttccatca

SEQ ID NO: 17095 - DNA, 20 bp, synthetic construct
  misc_feature 1..20: note = chemically synthesized
  source 1..20: mol_type = other DNA
accatcctttccatcaaggt

SEQ ID NO: 17096 - DNA, 20 bp, synthetic construct
  misc_feature 1..20: note = chemically synthesized
  source 1..20: mol_type = other DNA
ccatcctttccatcaaggtg

SEQ ID NO: 17097 - DNA, 20 bp, synthetic construct
  misc_feature 1..20: note = chemically synthesized
  source 1..20: mol_type = other DNA
catcctttccatcaaggtga

SEQ ID NO: 17098 - DNA, 20 bp, synthetic construct
  misc_feature 1..20: note = chemically synthesized
  source 1..20: mol_type = other DNA
atcctttccatcaaggtgag

SEQ ID NO: 17099 - DNA, 20 bp, synthetic construct
  misc_feature 1..20: note = chemically synthesized
  source 1..20: mol_type = other DNA
tttccatcaaggtgaggggc

SEQ ID NO: 17100 - DNA, 20 bp, synthetic construct
  misc_feature 1..20: note = chemically synthesized
  source 1..20: mol_type = other DNA
ttccatcaaggtgaggggcc

SEQ ID NO: 17101 - DNA, 20 bp, synthetic construct
  misc_feature 1..20: note = chemically synthesized
  source 1..20: mol_type = other DNA
ggtgaggggccaggcactcg

SEQ ID NO: 17102 - DNA, 20 bp, synthetic construct
  misc_feature 1..20: note = chemically synthesized
  source 1..20: mol_type = other DNA
gtgaggggccaggcactcgc

SEQ ID NO: 17103 - DNA, 20 bp, synthetic construct
  misc_feature 1..20: note = chemically synthesized
  source 1..20: mol_type = other DNA
ggcactcgcaggctgaatcc

SEQ ID NO: 17104 - DNA, 20 bp, synthetic construct
  misc_feature 1..20: note = chemically synthesized
  source 1..20: mol_type = other DNA
gcactcgcaggctgaatccc

SEQ ID NO: 17105 - DNA, 20 bp, synthetic construct
  misc_feature 1..20: note = chemically synthesized
  source 1..20: mol_type = other DNA
actcgcaggctgaatcccag

SEQ ID NO: 17106 - DNA, 20 bp, synthetic construct
  misc_feature 1..20: note = chemically synthesized
  source 1..20: mol_type = other DNA
tcgcaggctgaatcccagga

SEQ ID NO: 17107 - DNA, 20 bp, synthetic construct
  misc_feature 1..20: note = chemically synthesized
  source 1..20: mol_type = other DNA
cgcaggctgaatcccaggag

SEQ ID NO: 17108 - DNA, 20 bp, synthetic construct
  misc_feature 1..20: note = chemically synthesized
  source 1..20: mol_type = other DNA
gagaggaaatccatttttga

SEQ ID NO: 17109 - DNA, 20 bp, synthetic construct
  misc_feature 1..20: note = chemically synthesized
  source 1..20: mol_type = other DNA
agaggaaatccatttttgaa

SEQ ID NO: 17110 - DNA, 20 bp, synthetic construct
  misc_feature 1..20: note = chemically synthesized
  source 1..20: mol_type = other DNA
gaaatccatttttgaaaggc

SEQ ID NO: 17111 - DNA, 20 bp, synthetic construct
  misc_feature 1..20: note = chemically synthesized
  source 1..20: mol_type = other DNA
atttttgaaaggcaagtgtg

SEQ ID NO: 17112 - DNA, 20 bp, synthetic construct
  misc_feature 1..20: note = chemically synthesized
  source 1..20: mol_type = other DNA
aggcaagtgtgcagtttctg

SEQ ID NO: 17113 - DNA, 20 bp, synthetic construct
  misc_feature 1..20: note = chemically synthesized
  source 1..20: mol_type = other DNA
gctttgctccccctctgtct

SEQ ID NO: 17114 - DNA, 20 bp, synthetic construct
  misc_feature 1..20: note = chemically synthesized
  source 1..20: mol_type = other DNA
catgattgctctgtcccttt

SEQ ID NO: 17115 - DNA, 20 bp, synthetic construct
  misc_feature 1..20: note = chemically synthesized
  source 1..20: mol_type = other DNA
atgattgctctgtccctttg

SEQ ID NO: 17116 - DNA, 20 bp, synthetic construct
  misc_feature 1..20: note = chemically synthesized
  source 1..20: mol_type = other DNA
tgccgcacccactctgtgaa

SEQ ID NO: 17117 - DNA, 20 bp, synthetic construct
  misc_feature 1..20: note = chemically synthesized
  source 1..20: mol_type = other DNA
gccgcacccactctgtgaac

SEQ ID NO: 17118 - DNA, 20 bp, synthetic construct
  misc_feature 1..20: note = chemically synthesized
  source 1..20: mol_type = other DNA
ccgcacccactctgtgaaca

SEQ ID NO: 17119 - DNA, 20 bp, synthetic construct
  misc_feature 1..20: note = chemically synthesized
  source 1..20: mol_type = other DNA
ccactctgtgaacagggact

SEQ ID NO: 17120 - DNA, 20 bp, synthetic construct
  misc_feature 1..20: note = chemically synthesized
  source 1..20: mol_type = other DNA
cactctgtgaacagggactg

SEQ ID NO: 17121 - DNA, 20 bp, synthetic construct
  misc_feature 1..20: note = chemically synthesized
  source 1..20: mol_type = other DNA
ctctgtgaacagggactgag

SEQ ID NO: 17122 - DNA, 20 bp, synthetic construct
  misc_feature 1..20: note = chemically synthesized
  source 1..20: mol_type = other DNA
tctgtgaacagggactgagg

SEQ ID NO: 17123 - DNA, 20 bp, synthetic construct
  misc_feature 1..20: note = chemically synthesized
  source 1..20: mol_type = other DNA
ctgtgaacagggactgagga

SEQ ID NO: 17124 - DNA, 20 bp, synthetic construct
  misc_feature 1..20: note = chemically synthesized
  source 1..20: mol_type = other DNA
cctcaccttcctgtctaccc

SEQ ID NO: 17125 - DNA, 20 bp, synthetic construct
  misc_feature 1..20: note = chemically synthesized
  source 1..20: mol_type = other DNA
ctcaccttcctgtctacccc

SEQ ID NO: 17126 - DNA, 20 bp, synthetic construct
  misc_feature 1..20: note = chemically synthesized
  source 1..20: mol_type = other DNA
tcctgtctaccccaggaccc

SEQ ID NO: 17127 - DNA, 20 bp, synthetic construct
  misc_feature 1..20: note = chemically synthesized
  source 1..20: mol_type = other DNA
cctgtctaccccaggacccc

SEQ ID NO: 17128 - DNA, 20 bp, synthetic construct
  misc_feature 1..20: note = chemically synthesized
  source 1..20: mol_type = other DNA
tctaccccaggaccccagga

SEQ ID NO: 17129 - DNA, 20 bp, synthetic construct
  misc_feature 1..20: note = chemically synthesized
  source 1..20: mol_type = other DNA
ctaccccaggaccccaggaa

SEQ ID NO: 17130 - DNA, 20 bp, synthetic construct
  misc_feature 1..20: note = chemically synthesized
  source 1..20: mol_type = other DNA
accccaggaaaggcatgtgc

SEQ ID NO: 17131 - DNA, 20 bp, synthetic construct
  misc_feature 1..20: note = chemically synthesized
  source 1..20: mol_type = other DNA
cccaggaaaggcatgtgcca

SEQ ID NO: 17132 - DNA, 20 bp, synthetic construct
  misc_feature 1..20: note = chemically synthesized
  source 1..20: mol_type = other DNA
ccaggaaaggcatgtgccag

SEQ ID NO: 17133 - DNA, 20 bp, synthetic construct
  misc_feature 1..20: note = chemically synthesized
  source 1..20: mol_type = other DNA
aaaggcatgtgccagaggtg

SEQ ID NO: 17134 - DNA, 20 bp, synthetic construct
  misc_feature 1..20: note = chemically synthesized
  source 1..20: mol_type = other DNA
aaggcatgtgccagaggtgt

SEQ ID NO: 17135 - DNA, 20 bp, synthetic construct
  misc_feature 1..20: note = chemically synthesized
  source 1..20: mol_type = other DNA
aggcatgtgccagaggtgtg

SEQ ID NO: 17136 - DNA, 20 bp, synthetic construct
  misc_feature 1..20: note = chemically synthesized
  source 1..20: mol_type = other DNA
gcatgtgccagaggtgtggg

SEQ ID NO: 17137 - DNA, 20 bp, synthetic construct
  misc_feature 1..20: note = chemically synthesized
  source 1..20: mol_type = other DNA
gccagaggtgtggggagatc

SEQ ID NO: 17138 - DNA, 20 bp, synthetic construct
  misc_feature 1..20: note = chemically synthesized
  source 1..20: mol_type = other DNA
agaggtgtggggagatctgg

SEQ ID NO: 17139 - DNA, 20 bp, synthetic construct
  misc_feature 1..20: note = chemically synthesized
  source 1..20: mol_type = other DNA
tgcccttctcctcccaaccc

SEQ ID NO: 17140 - DNA, 20 bp, synthetic construct
  misc_feature 1..20: note = chemically synthesized
  source 1..20: mol_type = other DNA
gtgtgcacgtatgtgcatat

SEQ ID NO: 17141 - DNA, 20 bp, synthetic construct
  misc_feature 1..20: note = chemically synthesized
  source 1..20: mol_type = other DNA
tgtgcacgtatgtgcatatg

SEQ ID NO: 17142 - DNA, 20 bp, synthetic construct
  misc_feature 1..20: note = chemically synthesized
  source 1..20: mol_type = other DNA
gtatgtgcatatgaggaatg

SEQ ID NO: 17143 - DNA, 20 bp, synthetic construct
  misc_feature 1..20: note = chemically synthesized
  source 1..20: mol_type = other DNA
gcatatgaggaatgcagatt

SEQ ID NO: 17144 - DNA, 20 bp, synthetic construct
  misc_feature 1..20: note = chemically synthesized
  source 1..20: mol_type = other DNA
atgaggaatgcagattcagc

SEQ ID NO: 17145 - DNA, 20 bp, synthetic construct
  misc_feature 1..20: note = chemically synthesized
  source 1..20: mol_type = other DNA
tgaggaatgcagattcagct

SEQ ID NO: 17146 - DNA, 20 bp, synthetic construct
  misc_feature 1..20: note = chemically synthesized
  source 1..20: mol_type = other DNA
gggactctgtgtgtgtgtgt

SEQ ID NO: 17147 - DNA, 20 bp, synthetic construct
  misc_feature 1..20: note = chemically synthesized
  source 1..20: mol_type = other DNA
gtgtgtgtgtatatgtgcgc

SEQ ID NO: 17148 - DNA, 20 bp, synthetic construct
  misc_feature 1..20: note = chemically synthesized
  source 1..20: mol_type = other DNA
gtgtgtgtatatgtgcgcga

SEQ ID NO: 17149 - DNA, 20 bp, synthetic construct
  misc_feature 1..20: note = chemically synthesized
  source 1..20: mol_type = other DNA
tgtgtgtatgtcgtgtatgt

SEQ ID NO: 17150 - DNA, 20 bp, synthetic construct
  misc_feature 1..20: note = chemically synthesized
  source 1..20: mol_type = other DNA
tgtgtatgtcgtgtatgtga

SEQ ID NO: 17151 - DNA, 20 bp, synthetic construct
  misc_feature 1..20: note = chemically synthesized
  source 1..20: mol_type = other DNA
gtgtatgtcgtgtatgtgag

SEQ ID NO: 17152 - DNA, 20 bp, synthetic construct
  misc_feature 1..20: note = chemically synthesized
  source 1..20: mol_type = other DNA
tgtatgtcgtgtatgtgaga

SEQ ID NO: 17153 - DNA, 20 bp, synthetic construct
  misc_feature 1..20: note = chemically synthesized
  source 1..20: mol_type = other DNA
tgagagggtatgttgtgtgt

SEQ ID NO: 17154 - DNA, 20 bp, synthetic construct
  misc_feature 1..20: note = chemically synthesized
  source 1..20: mol_type = other DNA
agagggtatgttgtgtgtga

SEQ ID NO: 17155 - DNA, 20 bp, synthetic construct
  misc_feature 1..20: note = chemically synthesized
  source 1..20: mol_type = other DNA
gttgtgtgtgtatgttgtgt

SEQ ID NO: 17156 - DNA, 20 bp, synthetic construct
  misc_feature 1..20: note = chemically synthesized
  source 1..20: mol_type = other DNA
gttgtgtgtatcttgtgtgt

SEQ ID NO: 17157 - DNA, 20 bp, synthetic construct
  misc_feature 1..20: note = chemically synthesized
  source 1..20: mol_type = other DNA
tgcatgtgtgtatgttgtgc

SEQ ID NO: 17158 - DNA, 20 bp, synthetic construct
  misc_feature 1..20: note = chemically synthesized
  source 1..20: mol_type = other DNA
cgagtgtatgttgtgtatgt

SEQ ID NO: 17159 - DNA, 20 bp, synthetic construct
  misc_feature 1..20: note = chemically synthesized
  source 1..20: mol_type = other DNA
tgtgtatgtatgttgtgtat

SEQ ID NO: 17160 - DNA, 20 bp, synthetic construct
  misc_feature 1..20: note = chemically synthesized
  source 1..20: mol_type = other DNA
gttgtgtgtgtgtattgtgt

SEQ ID NO: 17161 - DNA, 20 bp, synthetic construct
  misc_feature 1..20: note = chemically synthesized
  source 1..20: mol_type = other DNA
tgtatgtttgtgtgttgtgt

SEQ ID NO: 17162 - DNA, 20 bp, synthetic construct
  misc_feature 1..20: note = chemically synthesized
  source 1..20: mol_type = other DNA
tgcgtgtgtgtatgttgtgc

SEQ ID NO: 17163 - DNA, 20 bp, synthetic construct
  misc_feature 1..20: note = chemically synthesized
  source 1..20: mol_type = other DNA
gtgttgtgtgtgtatgttgt

SEQ ID NO: 17164 - DNA, 20 bp, synthetic construct
  misc_feature 1..20: note = chemically synthesized
  source 1..20: mol_type = other DNA
gttatgtatgttgtgtgtgt

SEQ ID NO: 17165 - DNA, 20 bp, synthetic construct
  misc_feature 1..20: note = chemically synthesized
  source 1..20: mol_type = other DNA
tgtgtgtgagtgtgttgcgt

SEQ ID NO: 17166 - DNA, 20 bp, synthetic construct
  misc_feature 1..20: note = chemically synthesized
  source 1..20: mol_type = other DNA
tgttgcgtgagtgtgtgtgt

SEQ ID NO: 17167 - DNA, 20 bp, synthetic construct
  misc_feature 1..20: note = chemically synthesized
  source 1..20: mol_type = other DNA
tgtgtgtgtgtgtgtgtgtg

SEQ ID NO: 17168 - DNA, 20 bp, synthetic construct
  misc_feature 1..20: note = chemically synthesized
  source 1..20: mol_type = other DNA
tgtgtgtgtgtgtgtgtgta

SEQ ID NO: 17169 - DNA, 20 bp, synthetic construct
  misc_feature 1..20: note = chemically synthesized
  source 1..20: mol_type = other DNA
gtgtgtgtgtgtgtgtgtag

SEQ ID NO: 17170 - DNA, 20 bp, synthetic construct
  misc_feature 1..20: note = chemically synthesized
  source 1..20: mol_type = other DNA
tgtgtgtgtgtgtgtagagg

SEQ ID NO: 17171 - DNA, 20 bp, synthetic construct
  misc_feature 1..20: note = chemically synthesized
  source 1..20: mol_type = other DNA
gtgtgtgtgtgtgtagaggt

SEQ ID NO: 17172 - DNA, 20 bp, synthetic construct
  misc_feature 1..20: note = chemically synthesized
  source 1..20: mol_type = other DNA
tgtgtgtgtgtgtagaggtg

SEQ ID NO: 17173 - DNA, 20 bp, synthetic construct
  misc_feature 1..20: note = chemically synthesized
  source 1..20: mol_type = other DNA
tgtgtgtgtagaggtggggt

SEQ ID NO: 17174 - DNA, 20 bp, synthetic construct
  misc_feature 1..20: note = chemically synthesized
  source 1..20: mol_type = other DNA
tgtgtagaggtggggtgagt

SEQ ID NO: 17175 - DNA, 20 bp, synthetic construct
  misc_feature 1..20: note = chemically synthesized
  source 1..20: mol_type = other DNA
gtgtagaggtggggtgagtt

SEQ ID NO: 17176 - DNA, 20 bp, synthetic construct
  misc_feature 1..20: note = chemically synthesized
  source 1..20: mol_type = other DNA
agaggtggggtgagttggga

SEQ ID NO: 17177 - DNA, 20 bp, synthetic construct
  misc_feature 1..20: note = chemically synthesized
  source 1..20: mol_type = other DNA
gaggtggggtgagttgggat

SEQ ID NO: 17178 - DNA, 20 bp, synthetic construct
  misc_feature 1..20: note = chemically synthesized
  source 1..20: mol_type = other DNA
gtggggtgagttgggatggg

SEQ ID NO: 17179 - DNA, 20 bp, synthetic construct
  misc_feature 1..20: note = chemically synthesized
  source 1..20: mol_type = other DNA
tggggtgagttgggatgggt

SEQ ID NO: 17180 - DNA, 20 bp, synthetic construct
  misc_feature 1..20: note = chemically synthesized
  source 1..20: mol_type = other DNA
ggggtgagttgggatgggtg

SEQ ID NO: 17181 - DNA, 20 bp, synthetic construct
  misc_feature 1..20: note = chemically synthesized
  source 1..20: mol_type = other DNA
gggtgagttgggatgggtgg

SEQ ID NO: 17182 - DNA, 20 bp, synthetic construct
  misc_feature 1..20: note = chemically synthesized
  source 1..20: mol_type = other DNA
ttgggatgggtgggggacgt

SEQ ID NO: 17183 - DNA, 20 bp, synthetic construct
  misc_feature 1..20: note = chemically synthesized
  source 1..20: mol_type = other DNA
atgggtgggggacgtgagca

SEQ ID NO: 17184 - DNA, 20 bp, synthetic construct
  misc_feature 1..20: note = chemically synthesized
  source 1..20: mol_type = other DNA
gggtgggggacgtgagcaca

SEQ ID NO: 17185 - DNA, 20 bp, synthetic construct
  misc_feature 1..20: note = chemically synthesized
  source 1..20: mol_type = other DNA
gtgggggacgtgagcacaga

SEQ ID NO: 17186 - DNA, 20 bp, synthetic construct
  misc_feature 1..20: note = chemically synthesized
  source 1..20: mol_type = other DNA
acgtgagcacagagagatcc

SEQ ID NO: 17187 - DNA, 20 bp, synthetic construct
  misc_feature 1..20: note = chemically synthesized
  source 1..20: mol_type = other DNA
tgagcacagagagatcctgg

SEQ ID NO: 17188 - DNA, 20 bp, synthetic construct
  misc_feature 1..20: note = chemically synthesized
  source 1..20: mol_type = other DNA
ccctgctcctctcatctccc

SEQ ID NO: 17189 - DNA, 20 bp, synthetic construct
  misc_feature 1..20: note = chemically synthesized
  source 1..20: mol_type = other DNA
catctcccaagacccttccc

SEQ ID NO: 17190 - DNA, 20 bp, synthetic construct
  misc_feature 1..20: note = chemically synthesized
  source 1..20: mol_type = other DNA
tctgtaataaatcttgactg

SEQ ID NO: 17191 - DNA, 20 bp, synthetic construct
  misc_feature 1..20: note = chemically synthesized
  source 1..20: mol_type = other DNA
ctgtaataaatcttgactga

SEQ ID NO: 17192 - DNA, 20 bp, synthetic construct
  misc_feature 1..20: note = chemically synthesized
  source 1..20: mol_type = other DNA
aaatcttgactgaaggacct

SEQ ID NO: 17193 - DNA, 20 bp, synthetic construct
  misc_feature 1..20: note = chemically synthesized
  source 1..20: mol_type = other DNA
actgaaggacctaagtatct

SEQ ID NO: 17194 - DNA, 20 bp, synthetic construct
  misc_feature 1..20: note = chemically synthesized
  source 1..20: mol_type = other DNA
tatcttggacattttttttt

SEQ ID NO: 17195 - DNA, 20 bp, synthetic construct
  misc_feature 1..20: note = chemically synthesized
  source 1..20: mol_type = other DNA
tcttggacatttttttttta

SEQ ID NO: 17196 - DNA, 20 bp, synthetic construct
  misc_feature 1..20: note = chemically synthesized
  source 1..20: mol_type = other DNA
ggacattttttttttagaga

SEQ ID NO: 17197 - DNA, 20 bp, synthetic construct
  misc_feature 1..20: note = chemically synthesized
  source 1..20: mol_type = other DNA
gacattttttttttagagac

SEQ ID NO: 17198 - DNA, 20 bp, synthetic construct
  misc_feature 1..20: note = chemically synthesized
  source 1..20: mol_type = other DNA
cattttttttttagagacag

SEQ ID NO: 17199 - DNA, 20 bp, synthetic construct
  misc_feature 1..20: note = chemically synthesized
  source 1..20: mol_type = other DNA
tttttttagagacaggagtg

SEQ ID NO: 17200 - DNA, 20 bp, synthetic construct
  misc_feature 1..20: note = chemically synthesized
  source 1..20: mol_type = other DNA
ttttagagacaggagtgtag

SEQ ID NO: 17201 - DNA, 20 bp, synthetic construct
  misc_feature 1..20: note = chemically synthesized
  source 1..20: mol_type = other DNA
tagagacaggagtgtagtgg

SEQ ID NO: 17202 - DNA, 20 bp, synthetic construct
  misc_feature 1..20: note = chemically synthesized
  source 1..20: mol_type = other DNA
agagacaggagtgtagtggc

SEQ ID NO: 17203 - DNA, 20 bp, synthetic construct
  misc_feature 1..20: note = chemically synthesized
  source 1..20: mol_type = other DNA
ggagtgtagtggcaggatca

SEQ ID NO: 17204 - DNA, 20 bp, synthetic construct
  misc_feature 1..20: note = chemically synthesized
  source 1..20: mol_type = other DNA
tcactgcaacctcgaactcc

SEQ ID NO: 17205 - DNA, 20 bp, synthetic construct
  misc_feature 1..20: note = chemically synthesized
  source 1..20: mol_type = other DNA
cactgcaacctcgaactcct

SEQ ID NO: 17206 - DNA, 20 bp, synthetic construct
  misc_feature 1..20: note = chemically synthesized
  source 1..20: mol_type = other DNA
aacctcgaactcctgggctc

SEQ ID NO: 17207 - DNA, 20 bp, synthetic construct
  misc_feature 1..20: note = chemically synthesized
  source 1..20: mol_type = other DNA
ctcaagccatcctcccacct

SEQ ID NO: 17208 - DNA, 20 bp, synthetic construct
  misc_feature 1..20: note = chemically synthesized
  source 1..20: mol_type = other DNA
tcctcccacctcagcctccc

SEQ ID NO: 17209 - DNA, 20 bp, synthetic construct
  misc_feature 1..20: note = chemically synthesized
  source 1..20: mol_type = other DNA
tcccacctcagcctcccaag

SEQ ID NO: 17210 - DNA, 20 bp, synthetic construct
  misc_feature 1..20: note = chemically synthesized
  source 1..20: mol_type = other DNA
acctcagcctcccaagtagt

SEQ ID NO: 17211 - DNA, 20 bp, synthetic construct
  misc_feature 1..20: note = chemically synthesized
  source 1..20: mol_type = other DNA
cctcagcctcccaagtagtt

SEQ ID NO: 17212 - DNA, 20 bp, synthetic construct
  misc_feature 1..20: note = chemically synthesized
  source 1..20: mol_type = other DNA
tcccaagtagttaggactta

SEQ ID NO: 17213 - DNA, 20 bp, synthetic construct
  misc_feature 1..20: note = chemically synthesized
  source 1..20: mol_type = other DNA
cccaagtagttaggacttac

SEQ ID NO: 17214 - DNA, 20 bp, synthetic construct
  misc_feature 1..20: note = chemically synthesized
  source 1..20: mol_type = other DNA
caggtgtgcaccactgtgcc

SEQ ID NO: 17215 - DNA, 20 bp, synthetic construct
  misc_feature 1..20: note = chemically synthesized
  source 1..20: mol_type = other DNA
gcaaattaaaaaaaattttt

SEQ ID NO: 17216 - DNA, 20 bp, synthetic construct
  misc_feature 1..20: note = chemically synthesized
  source 1..20: mol_type = other DNA
aaattaaaaaaaatttttta

SEQ ID NO: 17217 - DNA, 20 bp, synthetic construct
  misc_feature 1..20: note = chemically synthesized
  source 1..20: mol_type = other DNA
aaaaaaattttttagagaaa

SEQ ID NO: 17218 - DNA, 20 bp, synthetic construct
  misc_feature 1..20: note = chemically synthesized
  source 1..20: mol_type = other DNA
aaaaaattttttagagaaat

SEQ ID NO: 17219 - DNA, 20 bp, synthetic construct
  misc_feature 1..20: note = chemically synthesized
  source 1..20: mol_type = other DNA
aaaaattttttagagaaatg

SEQ ID NO: 17220 - DNA, 20 bp, synthetic construct
  misc_feature 1..20: note = chemically synthesized
  source 1..20: mol_type = other DNA
tggggtcttgctatgttgcc

SEQ ID NO: 17221 - DNA, 20 bp, synthetic construct
  misc_feature 1..20: note = chemically synthesized
  source 1..20: mol_type = other DNA
ggggtcttgctatgttgccc

SEQ ID NO: 17222 - DNA, 20 bp, synthetic construct
  misc_feature 1..20: note = chemically synthesized
  source 1..20: mol_type = other DNA
tcttgctatgttgcccaggc

SEQ ID NO: 17223 - DNA, 20 bp, synthetic construct
  misc_feature 1..20: note = chemically synthesized
  source 1..20: mol_type = other DNA
tgctatgttgcccaggctgg

SEQ ID NO: 17224 - DNA, 20 bp, synthetic construct
  misc_feature 1..20: note = chemically synthesized
  source 1..20: mol_type = other DNA
gctatgttgcccaggctggt

SEQ ID NO: 17225 - DNA, 20 bp, synthetic construct
  misc_feature 1..20: note = chemically synthesized
  source 1..20: mol_type = other DNA
gttgcccaggctggtgggaa

SEQ ID NO: 17226 - DNA, 20 bp, synthetic construct
  misc_feature 1..20: note = chemically synthesized
  source 1..20: mol_type = other DNA
ggctggtgggaaaagatttt

SEQ ID NO: 17227 - DNA, 20 bp, synthetic construct
  misc_feature 1..20: note = chemically synthesized
  source 1..20: mol_type = other DNA
gctggtgggaaaagatttta

SEQ ID NO: 17228 - DNA, 20 bp, synthetic construct
  misc_feature 1..20: note = chemically synthesized
  source 1..20: mol_type = other DNA
gtgggaaaagattttaaggt

SEQ ID NO: 17229 - DNA, 20 bp, synthetic construct
  misc_feature 1..20: note = chemically synthesized
  source 1..20: mol_type = other DNA
gggaaaagattttaaggtga

SEQ ID NO: 17230 - DNA, 20 bp, synthetic construct
  misc_feature 1..20: note = chemically synthesized
  source 1..20: mol_type = other DNA
gaaaagattttaaggtgaga

SEQ ID NO: 17231 - DNA, 20 bp, synthetic construct
  misc_feature 1..20: note = chemically synthesized
  source 1..20: mol_type = other DNA
ttttaaggtgagagagatct

SEQ ID NO: 17232 - DNA, 20 bp, synthetic construct
  misc_feature 1..20: note = chemically synthesized
  source 1..20: mol_type = other DNA
taaggtgagagagatctgag

SEQ ID NO: 17233 - DNA, 20 bp, synthetic construct
  misc_feature 1..20: note = chemically synthesized
  source 1..20: mol_type = other DNA
gagagagatctgagcagtgc

SEQ ID NO: 17234 - DNA, 20 bp, synthetic construct
  misc_feature 1..20: note = chemically synthesized
  source 1..20: mol_type = other DNA
agagagatctgagcagtgct

SEQ ID NO: 17235 - DNA, 20 bp, synthetic construct
  misc_feature 1..20: note = chemically synthesized
  source 1..20: mol_type = other DNA
gagatctgagcagtgctagg

SEQ ID NO: 17236 - DNA, 20 bp, synthetic construct
  misc_feature 1..20: note = chemically synthesized
  source 1..20: mol_type = other DNA
atctgagcagtgctaggcag

SEQ ID NO: 17237 - DNA, 20 bp, synthetic construct
  misc_feature 1..20: note = chemically synthesized
  source 1..20: mol_type = other DNA
tctgagcagtgctaggcaga

SEQ ID NO: 17238 - DNA, 20 bp, synthetic construct
  misc_feature 1..20: note = chemically synthesized
  source 1..20: mol_type = other DNA
ctgagcagtgctaggcagaa

SEQ ID NO: 17239 - DNA, 20 bp, synthetic construct
  misc_feature 1..20: note = chemically synthesized
  source 1..20: mol_type = other DNA
gcagtgctaggcagaagggc

SEQ ID NO: 17240 - DNA, 20 bp, synthetic construct
  misc_feature 1..20: note = chemically synthesized
  source 1..20: mol_type = other DNA
agtgctaggcagaagggcaa

SEQ ID NO: 17241 - DNA, 20 bp, synthetic construct
  misc_feature 1..20: note = chemically synthesized
  source 1..20: mol_type = other DNA
ctaggcagaagggcaagagc

SEQ ID NO: 17242 - DNA, 20 bp, synthetic construct
  misc_feature 1..20: note = chemically synthesized
  source 1..20: mol_type = other DNA
taggcagaagggcaagagcc

SEQ ID NO: 17243 - DNA, 20 bp, synthetic construct
  misc_feature 1..20: note = chemically synthesized
  source 1..20: mol_type = other DNA
agaagggcaagagccaggaa

SEQ ID NO: 17244 - DNA, 20 bp, synthetic construct
  misc_feature 1..20: note = chemically synthesized
  source 1..20: mol_type = other DNA
aagggcaagagccaggaatg

SEQ ID NO: 17245 - DNA, 20 bp, synthetic construct
  misc_feature 1..20: note = chemically synthesized
  source 1..20: mol_type = other DNA
agggcaagagccaggaatgg

SEQ ID NO: 17246 - DNA, 20 bp, synthetic construct
  misc_feature 1..20: note = chemically synthesized
  source 1..20: mol_type = other DNA
ggcaagagccaggaatggag

SEQ ID NO: 17247 - DNA, 20 bp, synthetic construct
  misc_feature 1..20: note = chemically synthesized
  source 1..20: mol_type = other DNA
agccaggaatggaggagtgt

SEQ ID NO: 17248 - DNA, 20 bp, synthetic construct
  misc_feature 1..20: note = chemically synthesized
  source 1..20: mol_type = other DNA
gccaggaatggaggagtgtc

SEQ ID NO: 17249 - DNA, 20 bp, synthetic construct
  misc_feature 1..20: note = chemically synthesized
  source 1..20: mol_type = other DNA
atggaggagtgtcaggtgtg

SEQ ID NO: 17250 - DNA, 20 bp, synthetic construct
  misc_feature 1..20: note = chemically synthesized
  source 1..20: mol_type = other DNA
tggaggagtgtcaggtgtgt

SEQ ID NO: 17251 - DNA, 20 bp, synthetic construct
  misc_feature 1..20: note = chemically synthesized
  source 1..20: mol_type = other DNA
agtgtcaggtgtgtgggtgc

SEQ ID NO: 17252 - DNA, 20 bp, synthetic construct
  misc_feature 1..20: note = chemically synthesized
  source 1..20: mol_type = other DNA
gtcaggtgtgtgggtgctgg

SEQ ID NO: 17253 - DNA, 20 bp, synthetic construct
  misc_feature 1..20: note = chemically synthesized
  source 1..20: mol_type = other DNA
aggtgtgtgggtgctggtgg

SEQ ID NO: 17254 - DNA, 20 bp, synthetic construct
  misc_feature 1..20: note = chemically synthesized
  source 1..20: mol_type = other DNA
gtgtgtgggtgctggtggtg

SEQ ID NO: 17255 - DNA, 20 bp, synthetic construct
  misc_feature 1..20: note = chemically synthesized
  source 1..20: mol_type = other DNA
gtgggtgctggtggtggagc

SEQ ID NO: 17256 - DNA, 20 bp, synthetic construct
  misc_feature 1..20: note = chemically synthesized
  source 1..20: mol_type = other DNA
tgggtgctggtggtggagcc

SEQ ID NO: 17257 - DNA, 20 bp, synthetic construct
  misc_feature 1..20: note = chemically synthesized
  source 1..20: mol_type = other DNA
ggtggtggagccgggttcca

SEQ ID NO: 17258 - DNA, 20 bp, synthetic construct
  misc_feature 1..20: note = chemically synthesized
  source 1..20: mol_type = other DNA
tggtggagccgggttccatg

SEQ ID NO: 17259 - DNA, 20 bp, synthetic construct
  misc_feature 1..20: note = chemically synthesized
  source 1..20: mol_type = other DNA
ggtggagccgggttccatgg

SEQ ID NO: 17260 - DNA, 20 bp, synthetic construct
  misc_feature 1..20: note = chemically synthesized
  source 1..20: mol_type = other DNA
ggagccgggttccatggagg

SEQ ID NO: 17261 - DNA, 20 bp, synthetic construct
  misc_feature 1..20: note = chemically synthesized
  source 1..20: mol_type = other DNA
gagccgggttccatggaggc

SEQ ID NO: 17262 - DNA, 20 bp, synthetic construct
  misc_feature 1..20: note = chemically synthesized
  source 1..20: mol_type = other DNA
gccgggttccatggaggcag

SEQ ID NO: 17263 - DNA, 20 bp, synthetic construct
  misc_feature 1..20: note = chemically synthesized
  source 1..20: mol_type = other DNA
ccgggttccatggaggcagg

SEQ ID NO: 17264 - DNA, 20 bp, synthetic construct
  misc_feature 1..20: note = chemically synthesized
  source 1..20: mol_type = other DNA
gggttccatggaggcaggag

SEQ ID NO: 17265 - DNA, 20 bp, synthetic construct
  misc_feature 1..20: note = chemically synthesized
  source 1..20: mol_type = other DNA
ttccatggaggcaggaggag

SEQ ID NO: 17266 - DNA, 20 bp, synthetic construct
  misc_feature 1..20: note = chemically synthesized
  source 1..20: mol_type = other DNA
tccatggaggcaggaggagc

SEQ ID NO: 17267 - DNA, 20 bp, synthetic construct
  misc_feature 1..20: note = chemically synthesized
  source 1..20: mol_type = other DNA
ccatggaggcaggaggagca

SEQ ID NO: 17268 - DNA, 20 bp, synthetic construct
  misc_feature 1..20: note = chemically synthesized
  source 1..20: mol_type = other DNA
catggaggcaggaggagcag

SEQ ID NO: 17269 - DNA, 20 bp, synthetic construct
  misc_feature 1..20: note = chemically synthesized
  source 1..20: mol_type = other DNA
aggcaggaggagcaggggct

SEQ ID NO: 17270 - DNA, 20 bp, synthetic construct
  misc_feature 1..20: note = chemically synthesized
  source 1..20: mol_type = other DNA
gcaggaggagcaggggcttg

SEQ ID NO: 17271 - DNA, 20 bp, synthetic construct
  misc_feature 1..20: note = chemically synthesized
  source 1..20: mol_type = other DNA
aggagcaggggcttggagct

SEQ ID NO: 17272 - DNA, 20 bp, synthetic construct
  misc_feature 1..20: note = chemically synthesized
  source 1..20: mol_type = other DNA
ggagcaggggcttggagctt

SEQ ID NO: 17273 - DNA, 20 bp, synthetic construct
  misc_feature 1..20: note = chemically synthesized
  source 1..20: mol_type = other DNA
gcaggggcttggagcttagg

SEQ ID NO: 17274 - DNA, 20 bp, synthetic construct
  misc_feature 1..20: note = chemically synthesized
  source 1..20: mol_type = other DNA
caggggcttggagcttagga

SEQ ID NO: 17275 - DNA, 20 bp, synthetic construct
  misc_feature 1..20: note = chemically synthesized
  source 1..20: mol_type = other DNA
aggggcttggagcttaggaa

SEQ ID NO: 17276 - DNA, 20 bp, synthetic construct
  misc_feature 1..20: note = chemically synthesized
  source 1..20: mol_type = other DNA
ggggcttggagcttaggaag

SEQ ID NO: 17277 - DNA, 20 bp, synthetic construct
  misc_feature 1..20: note = chemically synthesized
  source 1..20: mol_type = other DNA
ttggagcttaggaaggggat

SEQ ID NO: 17278 - DNA, 20 bp, synthetic construct
  misc_feature 1..20: note = chemically synthesized
  source 1..20: mol_type = other DNA
agcttaggaaggggattggt

SEQ ID NO: 17279 - DNA, 20 bp, synthetic construct
  misc_feature 1..20: note = chemically synthesized
  source 1..20: mol_type = other DNA
taggaaggggattggttagc

SEQ ID NO: 17280 - DNA, 20 bp, synthetic construct
  misc_feature 1..20: note = chemically synthesized
  source 1..20: mol_type = other DNA
aggaaggggattggttagct

SEQ ID NO: 17281 - DNA, 20 bp, synthetic construct
  misc_feature 1..20: note = chemically synthesized
  source 1..20: mol_type = other DNA
aggggattggttagctgggc

SEQ ID NO: 17282 - DNA, 20 bp, synthetic construct
  misc_feature 1..20: note = chemically synthesized
  source 1..20: mol_type = other DNA
ttggttagctgggctggaat

SEQ ID NO: 17283 - DNA, 20 bp, synthetic construct
  misc_feature 1..20: note = chemically synthesized
  source 1..20: mol_type = other DNA
tggttagctgggctggaatg

SEQ ID NO: 17284 - DNA, 20 bp, synthetic construct
  misc_feature 1..20: note = chemically synthesized
  source 1..20: mol_type = other DNA
ggttagctgggctggaatga

SEQ ID NO: 17285 - DNA, 20 bp, synthetic construct
  misc_feature 1..20: note = chemically synthesized
  source 1..20: mol_type = other DNA
atgagggactcctcattcct

SEQ ID NO: 17286 - DNA, 20 bp, synthetic construct
  misc_feature 1..20: note = chemically synthesized
  source 1..20: mol_type = other DNA
tgagggactcctcattcctg

SEQ ID NO: 17287 - DNA, 20 bp, synthetic construct
  misc_feature 1..20: note = chemically synthesized
  source 1..20: mol_type = other DNA
ggactcctcattcctgaggc

SEQ ID NO: 17288 - DNA, 20 bp, synthetic construct
  misc_feature 1..20: note = chemically synthesized
  source 1..20: mol_type = other DNA
attcctgaggctggccaacc

SEQ ID NO: 17289 - DNA, 20 bp, synthetic construct
  misc_feature 1..20: note = chemically synthesized
  source 1..20: mol_type = other DNA
ttcctgaggctggccaaccg

SEQ ID NO: 17290 - DNA, 20 bp, synthetic construct
  misc_feature 1..20: note = chemically synthesized
  source 1..20: mol_type = other DNA
tcctgaggctggccaaccga

SEQ ID NO: 17291 - DNA, 20 bp, synthetic construct
  misc_feature 1..20: note = chemically synthesized
  source 1..20: mol_type = other DNA
ctgaggctggccaaccgagg

SEQ ID NO: 17292 - DNA, 20 bp, synthetic construct
  misc_feature 1..20: note = chemically synthesized
  source 1..20: mol_type = other DNA
tgaggctggccaaccgaggg

SEQ ID NO: 17293 - DNA, 20 bp, synthetic construct
  misc_feature 1..20: note = chemically synthesized
  source 1..20: mol_type = other DNA
gaggctggccaaccgaggga

SEQ ID NO: 17294 - DNA, 20 bp, synthetic construct
  misc_feature 1..20: note = chemically synthesized
  source 1..20: mol_type = other DNA
ctggccaaccgagggagggc

SEQ ID NO: 17295 - DNA, 20 bp, synthetic construct
  misc_feature 1..20: note = chemically synthesized
  source 1..20: mol_type = other DNA
aaccgagggagggccggtgc

SEQ ID NO: 17296 - DNA, 20 bp, synthetic construct
  misc_feature 1..20: note = chemically synthesized
  source 1..20: mol_type = other DNA
accgagggagggccggtgct

SEQ ID NO: 17297 - DNA, 20 bp, synthetic construct
  misc_feature 1..20: note = chemically synthesized
  source 1..20: mol_type = other DNA
gagggagggccggtgctggg

SEQ ID NO: 17298 - DNA, 20 bp, synthetic construct
  misc_feature 1..20: note = chemically synthesized
  source 1..20: mol_type = other DNA
agggagggccggtgctgggc

SEQ ID NO: 17299 - DNA, 20 bp, synthetic construct
  misc_feature 1..20: note = chemically synthesized
  source 1..20: mol_type = other DNA
gggagggccggtgctgggca

SEQ ID NO: 17300 - DNA, 20 bp, synthetic construct
  misc_feature 1..20: note = chemically synthesized
  source 1..20: mol_type = other DNA
agggccggtgctgggcaggg

SEQ ID NO: 17301 - DNA, 20 bp, synthetic construct
  misc_feature 1..20: note = chemically synthesized
  source 1..20: mol_type = other DNA
gggccggtgctgggcagggc

SEQ ID NO: 17302 - DNA, 20 bp, synthetic construct
  misc_feature 1..20: note = chemically synthesized
  source 1..20: mol_type = other DNA
ggccggtgctgggcagggca

SEQ ID NO: 17303 - DNA, 20 bp, synthetic construct
  misc_feature 1..20: note = chemically synthesized
  source 1..20: mol_type = other DNA
cggtgctgggcagggcaggg

SEQ ID NO: 17304 - DNA, 20 bp, synthetic construct
  misc_feature 1..20: note = chemically synthesized
  source 1..20: mol_type = other DNA
ggtgctgggcagggcagggc

SEQ ID NO: 17305 - DNA, 20 bp, synthetic construct
  misc_feature 1..20: note = chemically synthesized
  source 1..20: mol_type = other DNA
gtgctgggcagggcagggca

SEQ ID NO: 17306 - DNA, 20 bp, synthetic construct
  misc_feature 1..20: note = chemically synthesized
  source 1..20: mol_type = other DNA
tgctgggcagggcagggcag

SEQ ID NO: 17307 - DNA, 20 bp, synthetic construct
  misc_feature 1..20: note = chemically synthesized
  source 1..20: mol_type = other DNA
gggcagggcagggcagggga

SEQ ID NO: 17308 - DNA, 20 bp, synthetic construct
  misc_feature 1..20: note = chemically synthesized
  source 1..20: mol_type = other DNA
ggcagggcagggcaggggac

SEQ ID NO: 17309 - DNA, 20 bp, synthetic construct
  misc_feature 1..20: note = chemically synthesized
  source 1..20: mol_type = other DNA
cagggcagggcaggggacag

SEQ ID NO: 17310 - DNA, 20 bp, synthetic construct
  misc_feature 1..20: note = chemically synthesized
  source 1..20: mol_type = other DNA
agggcagggcaggggacagg

SEQ ID NO: 17311 - DNA, 20 bp, synthetic construct
  misc_feature 1..20: note = chemically synthesized
  source 1..20: mol_type = other DNA
gggcagggcaggggacagga

SEQ ID NO: 17312 - DNA, 20 bp, synthetic construct
  misc_feature 1..20: note = chemically synthesized
  source 1..20: mol_type = other DNA
agggcaggggacaggaggga

SEQ ID NO: 17313 - DNA, 20 bp, synthetic construct
  misc_feature 1..20: note = chemically synthesized
  source 1..20: mol_type = other DNA
gggcaggggacaggagggat

SEQ ID NO: 17314 - DNA, 20 bp, synthetic construct
  misc_feature 1..20: note = chemically synthesized
  source 1..20: mol_type = other DNA
gcaggggacaggagggatag

SEQ ID NO: 17315 - DNA, 20 bp, synthetic construct
  misc_feature 1..20: note = chemically synthesized
  source 1..20: mol_type = other DNA
caggggacaggagggatagg

SEQ ID NO: 17316 - DNA, 20 bp, synthetic construct
  misc_feature 1..20: note = chemically synthesized
  source 1..20: mol_type = other DNA
agggataggaggtccctccc

SEQ ID NO: 17317 - DNA, 20 bp, synthetic construct
  misc_feature 1..20: note = chemically synthesized
  source 1..20: mol_type = other DNA
gggataggaggtccctcccg

SEQ ID NO: 17318 - DNA, 20 bp, synthetic construct
  misc_feature 1..20: note = chemically synthesized
  source 1..20: mol_type = other DNA
ggtccctcccgaggaccact

SEQ ID NO: 17319 - DNA, 20 bp, synthetic construct
  misc_feature 1..20: note = chemically synthesized
  source 1..20: mol_type = other DNA
gtccctcccgaggaccactc

SEQ ID NO: 17320 - DNA, 20 bp, synthetic construct
  misc_feature 1..20: note = chemically synthesized
  source 1..20: mol_type = other DNA
cgaggaccactcaggaacac

SEQ ID NO: 17321 - DNA, 20 bp, synthetic construct
  misc_feature 1..20: note = chemically synthesized
  source 1..20: mol_type = other DNA
ggaccactcaggaacaccag

SEQ ID NO: 17322 - DNA, 20 bp, synthetic construct
  misc_feature 1..20: note = chemically synthesized
  source 1..20: mol_type = other DNA
agtagcatctcctctctctg

SEQ ID NO: 17323 - DNA, 20 bp, synthetic construct
  misc_feature 1..20: note = chemically synthesized
  source 1..20: mol_type = other DNA
gtagcatctcctctctctgt

SEQ ID NO: 17324 - DNA, 20 bp, synthetic construct
  misc_feature 1..20: note = chemically synthesized
  source 1..20: mol_type = other DNA
tagcatctcctctctctgta

SEQ ID NO: 17325 - DNA, 20 bp, synthetic construct
  misc_feature 1..20: note = chemically synthesized
  source 1..20: mol_type = other DNA
agcatctcctctctctgtag

SEQ ID NO: 17326 - DNA, 20 bp, synthetic construct
  misc_feature 1..20: note = chemically synthesized
  source 1..20: mol_type = other DNA
gcatctcctctctctgtagg

SEQ ID NO: 17327 - DNA, 20 bp, synthetic construct
  misc_feature 1..20: note = chemically synthesized
  source 1..20: mol_type = other DNA
ctcctctctctgtagggggc

SEQ ID NO: 17328 - DNA, 20 bp, synthetic construct
  misc_feature 1..20: note = chemically synthesized
  source 1..20: mol_type = other DNA
tctctctgtagggggctggc

SEQ ID NO: 17329 - DNA, 20 bp, synthetic construct
  misc_feature 1..20: note = chemically synthesized
  source 1..20: mol_type = other DNA
gggctggctggacttcccac

SEQ ID NO: 17330 - DNA, 20 bp, synthetic construct
  misc_feature 1..20: note = chemically synthesized
  source 1..20: mol_type = other DNA
ggctggctggacttcccacc

SEQ ID NO: 17331 - DNA, 20 bp, synthetic construct
  misc_feature 1..20: note = chemically synthesized
  source 1..20: mol_type = other DNA
tggctggacttcccaccagg

SEQ ID NO: 17332 - DNA, 20 bp, synthetic construct
  misc_feature 1..20: note = chemically synthesized
  source 1..20: mol_type = other DNA
cccaccaggcggtgtcccca

SEQ ID NO: 17333 - DNA, 20 bp, synthetic construct
  misc_feature 1..20: note = chemically synthesized
  source 1..20: mol_type = other DNA
ccaccaggcggtgtccccac

SEQ ID NO: 17334 - DNA, 20 bp, synthetic construct
  misc_feature 1..20: note = chemically synthesized
  source 1..20: mol_type = other DNA
ccaggcggtgtccccacagg

SEQ ID NO: 17335 - DNA, 20 bp, synthetic construct
  misc_feature 1..20: note = chemically synthesized
  source 1..20: mol_type = other DNA
aggcggtgtccccacaggca

SEQ ID NO: 17336 - DNA, 20 bp, synthetic construct
  misc_feature 1..20: note = chemically synthesized
  source 1..20: mol_type = other DNA
ggcggtgtccccacaggcag

SEQ ID NO: 17337 - DNA, 20 bp, synthetic construct
  misc_feature 1..20: note = chemically synthesized
  source 1..20: mol_type = other DNA
ctcactctcctctgcaactc

SEQ ID NO: 17338 - DNA, 20 bp, synthetic construct
  misc_feature 1..20: note = chemically synthesized
  source 1..20: mol_type = other DNA
ctgcaactccagtgcccaca

SEQ ID NO: 17339 - DNA, 20 bp, synthetic construct
  misc_feature 1..20: note = chemically synthesized
  source 1..20: mol_type = other DNA
tccagtgcccacacggcacc

SEQ ID NO: 17340 - DNA, 20 bp, synthetic construct
  misc_feature 1..20: note = chemically synthesized
  source 1..20: mol_type = other DNA
cccacacggcacccggtaca

SEQ ID NO: 17341 - DNA, 20 bp, synthetic construct
  misc_feature 1..20: note = chemically synthesized
  source 1..20: mol_type = other DNA
cccggtacatagtgaacact

SEQ ID NO: 17342 - DNA, 20 bp, synthetic construct
  misc_feature 1..20: note = chemically synthesized
  source 1..20: mol_type = other DNA
cggtacatagtgaacactca

SEQ ID NO: 17343 - DNA, 20 bp, synthetic construct
  misc_feature 1..20: note = chemically synthesized
  source 1..20: mol_type = other DNA
gtacatagtgaacactcaga

SEQ ID NO: 17344 - DNA, 20 bp, synthetic construct
  misc_feature 1..20: note = chemically synthesized
  source 1..20: mol_type = other DNA
gtgaacactcagagagaata

SEQ ID NO: 17345 - DNA, 20 bp, synthetic construct
  misc_feature 1..20: note = chemically synthesized
  source 1..20: mol_type = other DNA
tgaacactcagagagaatac

SEQ ID NO: 17346 - DNA, 20 bp, synthetic construct
  misc_feature 1..20: note = chemically synthesized
  source 1..20: mol_type = other DNA
gggatgctgctgaatcttct

SEQ ID NO: 17347 - DNA, 20 bp, synthetic construct
  misc_feature 1..20: note = chemically synthesized
  source 1..20: mol_type = other DNA
ggatgctgctgaatcttctg

SEQ ID NO: 17348 - DNA, 20 bp, synthetic construct
  misc_feature 1..20: note = chemically synthesized
  source 1..20: mol_type = other DNA
gatgctgctgaatcttctga

SEQ ID NO: 17349 - DNA, 20 bp, synthetic construct
  misc_feature 1..20: note = chemically synthesized
  source 1..20: mol_type = other DNA
gctgaatcttctgagggtga

SEQ ID NO: 17350 - DNA, 20 bp, synthetic construct
  misc_feature 1..20: note = chemically synthesized
  source 1..20: mol_type = other DNA
cttctgagggtgacagaatt

SEQ ID NO: 17351 - DNA, 20 bp, synthetic construct
  misc_feature 1..20: note = chemically synthesized
  source 1..20: mol_type = other DNA
tctgagggtgacagaattta

SEQ ID NO: 17352 - DNA, 20 bp, synthetic construct
  misc_feature 1..20: note = chemically synthesized
  source 1..20: mol_type = other DNA
ggtgacagaatttagagttt

SEQ ID NO: 17353 - DNA, 20 bp, synthetic construct
  misc_feature 1..20: note = chemically synthesized
  source 1..20: mol_type = other DNA
gacagaatttagagtttgag

SEQ ID NO: 17354 - DNA, 20 bp, synthetic construct
  misc_feature 1..20: note = chemically synthesized
  source 1..20: mol_type = other DNA
acagaatttagagtttgagc

SEQ ID NO: 17355 - DNA, 20 bp, synthetic construct
  misc_feature 1..20: note = chemically synthesized
  source 1..20: mol_type = other DNA
agaatttagagtttgagcag

SEQ ID NO: 17356 - DNA, 20 bp, synthetic construct
  misc_feature 1..20: note = chemically synthesized
  source 1..20: mol_type = other DNA
gaatttagagtttgagcagg

SEQ ID NO: 17357 - DNA, 20 bp, synthetic construct
  misc_feature 1..20: note = chemically synthesized
  source 1..20: mol_type = other DNA
tagagtttgagcaggaggct

SEQ ID NO: 17358 - DNA, 20 bp, synthetic construct
  misc_feature 1..20: note = chemically synthesized
  source 1..20: mol_type = other DNA
gagtttgagcaggaggcttg

SEQ ID NO: 17359 - DNA, 20 bp, synthetic construct
  misc_feature 1..20: note = chemically synthesized
  source 1..20: mol_type = other DNA
gtttgagcaggaggcttgga

SEQ ID NO: 17360 - DNA, 20 bp, synthetic construct
  misc_feature 1..20: note = chemically synthesized
  source 1..20: mol_type = other DNA
ttgagcaggaggcttggaga

SEQ ID NO: 17361 - DNA, 20 bp, synthetic construct
  misc_feature 1..20: note = chemically synthesized
  source 1..20: mol_type = other DNA
tgagcaggaggcttggagag

SEQ ID NO: 17362 - DNA, 20 bp, synthetic construct
  misc_feature 1..20: note = chemically synthesized
  source 1..20: mol_type = other DNA
caggaggcttggagagaggc

SEQ ID NO: 17363 - DNA, 20 bp, synthetic construct
  misc_feature 1..20: note = chemically synthesized
  source 1..20: mol_type = other DNA
aggaggcttggagagaggcc

SEQ ID NO: 17364 - DNA, 20 bp, synthetic construct
  misc_feature 1..20: note = chemically synthesized
  source 1..20: mol_type = other DNA
gccaggatttctgaaattaa

SEQ ID NO: 17365 - DNA, 20 bp, synthetic construct
  misc_feature 1..20: note = chemically synthesized
  source 1..20: mol_type = other DNA
ccaggatttctgaaattaat

SEQ ID NO: 17366 - DNA, 20 bp, synthetic construct
  misc_feature 1..20: note = chemically synthesized
  source 1..20: mol_type = other DNA
aggatttctgaaattaatgg

SEQ ID NO: 17367 - DNA, 20 bp, synthetic construct
  misc_feature 1..20: note = chemically synthesized
  source 1..20: mol_type = other DNA
gatttctgaaattaatggga

SEQ ID NO: 17368 - DNA, 20 bp, synthetic construct
  misc_feature 1..20: note = chemically synthesized
  source 1..20: mol_type = other DNA
tctgaaattaatgggagagt

SEQ ID NO: 17369 - DNA, 20 bp, synthetic construct
  misc_feature 1..20: note = chemically synthesized
  source 1..20: mol_type = other DNA
ggagagtgagctcacgcgaa

SEQ ID NO: 17370 - DNA, 20 bp, synthetic construct
  misc_feature 1..20: note = chemically synthesized
  source 1..20: mol_type = other DNA
gagagtgagctcacgcgaat

SEQ ID NO: 17371 - DNA, 20 bp, synthetic construct
  misc_feature 1..20: note = chemically synthesized
  source 1..20: mol_type = other DNA
tgagctcacgcgaatgggct

SEQ ID NO: 17372 - DNA, 20 bp, synthetic construct
  misc_feature 1..20: note = chemically synthesized
  source 1..20: mol_type = other DNA
gagctcacgcgaatgggctg

SEQ ID NO: 17373 - DNA, 20 bp, synthetic construct
  misc_feature 1..20: note = chemically synthesized
  source 1..20: mol_type = other DNA
agctcacgcgaatgggctga

SEQ ID NO: 17374 - DNA, 20 bp, synthetic construct
  misc_feature 1..20: note = chemically synthesized
  source 1..20: mol_type = other DNA
gcgaatgggctgagggacac

SEQ ID NO: 17375 - DNA, 20 bp, synthetic construct
  misc_feature 1..20: note = chemically synthesized
  source 1..20: mol_type = other DNA
atgggctgagggacaccagt

SEQ ID NO: 17376 - DNA, 20 bp, synthetic construct
  misc_feature 1..20: note = chemically synthesized
  source 1..20: mol_type = other DNA
tgggctgagggacaccagtg

SEQ ID NO: 17377 - DNA, 20 bp, synthetic construct
  misc_feature 1..20: note = chemically synthesized
  source 1..20: mol_type = other DNA
gggctgagggacaccagtga

SEQ ID NO: 17378 - DNA, 20 bp, synthetic construct
  misc_feature 1..20: note = chemically synthesized
  source 1..20: mol_type = other DNA
caccagtgagggaccgtctg

SEQ ID NO: 17379 - DNA, 20 bp, synthetic construct
  misc_feature 1..20: note = chemically synthesized
  source 1..20: mol_type = other DNA
accagtgagggaccgtctga

SEQ ID NO: 17380 - DNA, 20 bp, synthetic construct
  misc_feature 1..20: note = chemically synthesized
  source 1..20: mol_type = other DNA
ccagtgagggaccgtctgaa

SEQ ID NO: 17381 - DNA, 20 bp, synthetic construct
  misc_feature 1..20: note = chemically synthesized
  source 1..20: mol_type = other DNA
agggaccgtctgaagggatg

SEQ ID NO: 17382 - DNA, 20 bp, synthetic construct
  misc_feature 1..20: note = chemically synthesized
  source 1..20: mol_type = other DNA
ccgtctgaagggatgtagca

SEQ ID NO: 17383 - DNA, 20 bp, synthetic construct
  misc_feature 1..20: note = chemically synthesized
  source 1..20: mol_type = other DNA
aaagtcaccgcatttccctc

SEQ ID NO: 17384 - DNA, 20 bp, synthetic construct
  misc_feature 1..20: note = chemically synthesized
  source 1..20: mol_type = other DNA
gtcaccgcatttccctccag

SEQ ID NO: 17385 - DNA, 20 bp, synthetic construct
  misc_feature 1..20: note = chemically synthesized
  source 1..20: mol_type = other DNA
cgcatttccctccagcagcc

SEQ ID NO: 17386 - DNA, 20 bp, synthetic construct
  misc_feature 1..20: note = chemically synthesized
  source 1..20: mol_type = other DNA
gcatttccctccagcagccc

SEQ ID NO: 17387 - DNA, 20 bp, synthetic construct
  misc_feature 1..20: note = chemically synthesized
  source 1..20: mol_type = other DNA
tttccctccagcagcccggg

SEQ ID NO: 17388 - DNA, 20 bp, synthetic construct
  misc_feature 1..20: note = chemically synthesized
  source 1..20: mol_type = other DNA
ccctccagcagcccgggtgg

SEQ ID NO: 17389 - DNA, 20 bp, synthetic construct
  misc_feature 1..20: note = chemically synthesized
  source 1..20: mol_type = other DNA
cctccagcagcccgggtggt

SEQ ID NO: 17390 - DNA, 20 bp, synthetic construct
  misc_feature 1..20: note = chemically synthesized
  source 1..20: mol_type = other DNA
ctccagcagcccgggtggtg

SEQ ID NO: 17391 - DNA, 20 bp, synthetic construct
  misc_feature 1..20: note = chemically synthesized
  source 1..20: mol_type = other DNA
tccagcagcccgggtggtgg

SEQ ID NO: 17392 - DNA, 20 bp, synthetic construct
  misc_feature 1..20: note = chemically synthesized
  source 1..20: mol_type = other DNA
gcagcccgggtggtgggggc

SEQ ID NO: 17393 - DNA, 20 bp, synthetic construct
  misc_feature 1..20: note = chemically synthesized
  source 1..20: mol_type = other DNA
cagcccgggtggtgggggct

SEQ ID NO: 17394 - DNA, 20 bp, synthetic construct
  misc_feature 1..20: note = chemically synthesized
  source 1..20: mol_type = other DNA
agcccgggtggtgggggctg

SEQ ID NO: 17395 - DNA, 20 bp, synthetic construct
  misc_feature 1..20: note = chemically synthesized
  source 1..20: mol_type = other DNA
gcccgggtggtgggggctgg

SEQ ID NO: 17396 - DNA, 20 bp, synthetic construct
  misc_feature 1..20: note = chemically synthesized
  source 1..20: mol_type = other DNA
gggctgggggaacgtcatca

SEQ ID NO: 17397 - DNA, 20 bp, synthetic construct
  misc_feature 1..20: note = chemically synthesized
  source 1..20: mol_type = other DNA
ggctgggggaacgtcatcat

SEQ ID NO: 17398 - DNA, 20 bp, synthetic construct
  misc_feature 1..20: note = chemically synthesized
  source 1..20: mol_type = other DNA
ctgggggaacgtcatcatgg

SEQ ID NO: 17399 - DNA, 20 bp, synthetic construct
  misc_feature 1..20: note = chemically synthesized
  source 1..20: mol_type = other DNA
tcatgggagctgacactgat

SEQ ID NO: 17400 - DNA, 20 bp, synthetic construct
  misc_feature 1..20: note = chemically synthesized
  source 1..20: mol_type = other DNA
gacactgatcagctgctcac

SEQ ID NO: 17401 - DNA, 20 bp, synthetic construct
  misc_feature 1..20: note = chemically synthesized
  source 1..20: mol_type = other DNA
acactgatcagctgctcacc

SEQ ID NO: 17402 - DNA, 20 bp, synthetic construct
  misc_feature 1..20: note = chemically synthesized
  source 1..20: mol_type = other DNA
cactgatcagctgctcaccg

SEQ ID NO: 17403 - DNA, 20 bp, synthetic construct
  misc_feature 1..20: note = chemically synthesized
  source 1..20: mol_type = other DNA
ggcccatcttccacttgtct

SEQ ID NO: 17404 - DNA, 20 bp, synthetic construct
  misc_feature 1..20: note = chemically synthesized
  source 1..20: mol_type = other DNA
gctaccccctttttctttta

SEQ ID NO: 17405 - DNA, 20 bp, synthetic construct
  misc_feature 1..20: note = chemically synthesized
  source 1..20: mol_type = other DNA
atttcaattatgcatgtatt

SEQ ID NO: 17406 - DNA, 20 bp, synthetic construct
  misc_feature 1..20: note = chemically synthesized
  source 1..20: mol_type = other DNA
tttcaattatgcatgtatta

SEQ ID NO: 17407 - DNA, 20 bp, synthetic construct
  misc_feature 1..20: note = chemically synthesized
  source 1..20: mol_type = other DNA
ttcaattatgcatgtattaa

SEQ ID NO: 17408 - DNA, 20 bp, synthetic construct
  misc_feature 1..20: note = chemically synthesized
  source 1..20: mol_type = other DNA
tgcatgtattaagggtccca

SEQ ID NO: 17409 - DNA, 20 bp, synthetic construct
  misc_feature 1..20: note = chemically synthesized
  source 1..20: mol_type = other DNA
tttttaattcttttttctcc

SEQ ID NO: 17410 - DNA, 20 bp, synthetic construct
  misc_feature 1..20: note = chemically synthesized
  source 1..20: mol_type = other DNA
tctcccagtgtttcatttta

SEQ ID NO: 17411 - DNA, 20 bp, synthetic construct
  misc_feature 1..20: note = chemically synthesized
  source 1..20: mol_type = other DNA
tcccagtgtttcattttata

SEQ ID NO: 17412 - DNA, 20 bp, synthetic construct
  misc_feature 1..20: note = chemically synthesized
  source 1..20: mol_type = other DNA
tagagttattgctgttcatt

SEQ ID NO: 17413 - DNA, 20 bp, synthetic construct
  misc_feature 1..20: note = chemically synthesized
  source 1..20: mol_type = other DNA
tctcatctcactctgttgcc

SEQ ID NO: 17414 - DNA, 20 bp, synthetic construct
  misc_feature 1..20: note = chemically synthesized
  source 1..20: mol_type = other DNA
ctcatctcactctgttgccc

SEQ ID NO: 17415 - DNA, 20 bp, synthetic construct
  misc_feature 1..20: note = chemically synthesized
  source 1..20: mol_type = other DNA
tctcactctgttgcccaggc

SEQ ID NO: 17416 - DNA, 20 bp, synthetic construct
  misc_feature 1..20: note = chemically synthesized
  source 1..20: mol_type = other DNA
ctgttgcccaggctggaatg

SEQ ID NO: 17417 - DNA, 20 bp, synthetic construct
  misc_feature 1..20: note = chemically synthesized
  source 1..20: mol_type = other DNA
ttgcccaggctggaatgcag

SEQ ID NO: 17418 - DNA, 20 bp, synthetic construct
  misc_feature 1..20: note = chemically synthesized
  source 1..20: mol_type = other DNA
tagcttgtcacaactcactg

SEQ ID NO: 17419 - DNA, 20 bp, synthetic construct
  misc_feature 1..20: note = chemically synthesized
  source 1..20: mol_type = other DNA
tcactgtggcctccacctcc

SEQ ID NO: 17420 - DNA, 20 bp, synthetic construct
  misc_feature 1..20: note = chemically synthesized
  source 1..20: mol_type = other DNA
cactgtggcctccacctcct

SEQ ID NO: 17421 - DNA, 20 bp, synthetic construct
  misc_feature 1..20: note = chemically synthesized
  source 1..20: mol_type = other DNA
tggcctccacctcctgggct

SEQ ID NO: 17422 - DNA, 20 bp, synthetic construct
  misc_feature 1..20: note = chemically synthesized
  source 1..20: mol_type = other DNA
ggcctccacctcctgggctc

SEQ ID NO: 17423 - DNA, 20 bp, synthetic construct
  misc_feature 1..20: note = chemically synthesized
  source 1..20: mol_type = other DNA
ctcaggcgatccttccactt

SEQ ID NO: 17424 - DNA, 20 bp, synthetic construct
  misc_feature 1..20: note = chemically synthesized
  source 1..20: mol_type = other DNA
atccttccacttcagcctcc

SEQ ID NO: 17425 - DNA, 20 bp, synthetic construct
  misc_feature 1..20: note = chemically synthesized
  source 1..20: mol_type = other DNA
tccttccacttcagcctccc

SEQ ID NO: 17426 - DNA, 20 bp, synthetic construct
  misc_feature 1..20: note = chemically synthesized
  source 1..20: mol_type = other DNA
ttccacttcagcctcccagg

SEQ ID NO: 17427 - DNA, 20 bp, synthetic construct
  misc_feature 1..20: note = chemically synthesized
  source 1..20: mol_type = other DNA
acttcagcctcccaggtagc

SEQ ID NO: 17428 - DNA, 20 bp, synthetic construct
  misc_feature 1..20: note = chemically synthesized
  source 1..20: mol_type = other DNA
cttcagcctcccaggtagct

SEQ ID NO: 17429 - DNA, 20 bp, synthetic construct
  misc_feature 1..20: note = chemically synthesized
  source 1..20: mol_type = other DNA
ctcccaggtagctgggacta

SEQ ID NO: 17430 - DNA, 20 bp, synthetic construct
  misc_feature 1..20: note = chemically synthesized
  source 1..20: mol_type = other DNA
tcccaggtagctgggactat

SEQ ID NO: 17431 - DNA, 20 bp, synthetic construct
  misc_feature 1..20: note = chemically synthesized
  source 1..20: mol_type = other DNA
tagctgggactataggcatg

SEQ ID NO: 17432 - DNA, 20 bp, synthetic construct
  misc_feature 1..20: note = chemically synthesized
  source 1..20: mol_type = other DNA
taggcatgtggcaccacacc

SEQ ID NO: 17433 - DNA, 20 bp, synthetic construct
  misc_feature 1..20: note = chemically synthesized
  source 1..20: mol_type = other DNA
taattaaaaatttttttttg

SEQ ID NO: 17434 - DNA, 20 bp, synthetic construct
  misc_feature 1..20: note = chemically synthesized
  source 1..20: mol_type = other DNA
attaaaaatttttttttgta

SEQ ID NO: 17435 - DNA, 20 bp, synthetic construct
  misc_feature 1..20: note = chemically synthesized
  source 1..20: mol_type = other DNA
aaaatttttttttgtagaga

SEQ ID NO: 17436 - DNA, 20 bp, synthetic construct
  misc_feature 1..20: note = chemically synthesized
  source 1..20: mol_type = other DNA
gtagagacggttttgccatg

SEQ ID NO: 17437 - DNA, 20 bp, synthetic construct
  misc_feature 1..20: note = chemically synthesized
  source 1..20: mol_type = other DNA
agagacggttttgccatgta

SEQ ID NO: 17438 - DNA, 20 bp, synthetic construct
  misc_feature 1..20: note = chemically synthesized
  source 1..20: mol_type = other DNA
gagacggttttgccatgtag

SEQ ID NO: 17439 - DNA, 20 bp, synthetic construct
  misc_feature 1..20: note = chemically synthesized
  source 1..20: mol_type = other DNA
agacggttttgccatgtaga

SEQ ID NO: 17440 - DNA, 20 bp, synthetic construct
  misc_feature 1..20: note = chemically synthesized
  source 1..20: mol_type = other DNA
gacggttttgccatgtagag

SEQ ID NO: 17441 - DNA, 20 bp, synthetic construct
  misc_feature 1..20: note = chemically synthesized
  source 1..20: mol_type = other DNA
aggggttttgccatgctgcc

SEQ ID NO: 17442 - DNA, 20 bp, synthetic construct
  misc_feature 1..20: note = chemically synthesized
  source 1..20: mol_type = other DNA
ttttgccatgctgcccagac

SEQ ID NO: 17443 - DNA, 20 bp, synthetic construct
  misc_feature 1..20: note = chemically synthesized
  source 1..20: mol_type = other DNA
atgctgcccagactagtctt

SEQ ID NO: 17444 - DNA, 20 bp, synthetic construct
  misc_feature 1..20: note = chemically synthesized
  source 1..20: mol_type = other DNA
ccagactagtcttgagctcc

SEQ ID NO: 17445 - DNA, 20 bp, synthetic construct
  misc_feature 1..20: note = chemically synthesized
  source 1..20: mol_type = other DNA
cagactagtcttgagctcct

SEQ ID NO: 17446 - DNA, 20 bp, synthetic construct
  misc_feature 1..20: note = chemically synthesized
  source 1..20: mol_type = other DNA
agtcttgagctcctgggctc

SEQ ID NO: 17447 - DNA, 20 bp, synthetic construct
  misc_feature 1..20: note = chemically synthesized
  source 1..20: mol_type = other DNA
ccccccgtgtcgacctccca

SEQ ID NO: 17448 - DNA, 20 bp, synthetic construct
  misc_feature 1..20: note = chemically synthesized
  source 1..20: mol_type = other DNA
gtgtcgacctcccaaagtgc

SEQ ID NO: 17449 - DNA, 20 bp, synthetic construct
  misc_feature 1..20: note = chemically synthesized
  source 1..20: mol_type = other DNA
tgtcgacctcccaaagtgct

SEQ ID NO: 17450 - DNA, 20 bp, synthetic construct
  misc_feature 1..20: note = chemically synthesized
  source 1..20: mol_type = other DNA
ctcccaaagtgctgggatta

SEQ ID NO: 17451 - DNA, 20 bp, synthetic construct
  misc_feature 1..20: note = chemically synthesized
  source 1..20: mol_type = other DNA
gggattacagatgtgatcca

SEQ ID NO: 17452 - DNA, 20 bp, synthetic construct
  misc_feature 1..20: note = chemically synthesized
  source 1..20: mol_type = other DNA
cagatgtgatccacagtgcc

SEQ ID NO: 17453 - DNA, 20 bp, synthetic construct
  misc_feature 1..20: note = chemically synthesized
  source 1..20: mol_type = other DNA
catcttccattatttccatc

SEQ ID NO: 17454 - DNA, 20 bp, synthetic construct
  misc_feature 1..20: note = chemically synthesized
  source 1..20: mol_type = other DNA
tcttttcttttttttttttt

SEQ ID NO: 17455 - DNA, 20 bp, synthetic construct
  misc_feature 1..20: note = chemically synthesized
  source 1..20: mol_type = other DNA
ttttcttttttttttttttg

SEQ ID NO: 17456 - DNA, 20 bp, synthetic construct
  misc_feature 1..20: note = chemically synthesized
  source 1..20: mol_type = other DNA
tttcttttttttttttttgg

SEQ ID NO: 17457 - DNA, 20 bp, synthetic construct
  misc_feature 1..20: note = chemically synthesized
  source 1..20: mol_type = other DNA
cttttttttttttttggagg

SEQ ID NO: 17458 - DNA, 20 bp, synthetic construct
  misc_feature 1..20: note = chemically synthesized
  source 1..20: mol_type = other DNA
tttttttttttttggaggcg

SEQ ID NO: 17459 - DNA, 20 bp, synthetic construct
  misc_feature 1..20: note = chemically synthesized
  source 1..20: mol_type = other DNA
cggagtctcgctctgttgcc

SEQ ID NO: 17460 - DNA, 20 bp, synthetic construct
  misc_feature 1..20: note = chemically synthesized
  source 1..20: mol_type = other DNA
ggagtctcgctctgttgccc

SEQ ID NO: 17461 - DNA, 20 bp, synthetic construct
  misc_feature 1..20: note = chemically synthesized
  source 1..20: mol_type = other DNA
tctcgctctgttgcccaggc

SEQ ID NO: 17462 - DNA, 20 bp, synthetic construct
  misc_feature 1..20: note = chemically synthesized
  source 1..20: mol_type = other DNA
tcgctctgttgcccaggccg

SEQ ID NO: 17463 - DNA, 20 bp, synthetic construct
  misc_feature 1..20: note = chemically synthesized
  source 1..20: mol_type = other DNA
ctgttgcccaggccggagtg

SEQ ID NO: 17464 - DNA, 20 bp, synthetic construct
  misc_feature 1..20: note = chemically synthesized
  source 1..20: mol_type = other DNA
ttgcccaggccggagtgcag

SEQ ID NO: 17465 - DNA, 20 bp, synthetic construct
  misc_feature 1..20: note = chemically synthesized
  source 1..20: mol_type = other DNA
ggagtgcagtggcgcgatct

SEQ ID NO: 17466 - DNA, 20 bp, synthetic construct
  misc_feature 1..20: note = chemically synthesized
  source 1..20: mol_type = other DNA
gcgcgatcttggctcactgc

SEQ ID NO: 17467 - DNA, 20 bp, synthetic construct
  misc_feature 1..20: note = chemically synthesized
  source 1..20: mol_type = other DNA
tcactgcaagctctgcctcc

SEQ ID NO: 17468 - DNA, 20 bp, synthetic construct
  misc_feature 1..20: note = chemically synthesized
  source 1..20: mol_type = other DNA
cactgcaagctctgcctccc

SEQ ID NO: 17469 - DNA, 20 bp, synthetic construct
  misc_feature 1..20: note = chemically synthesized
  source 1..20: mol_type = other DNA
ttcatgccattctcctgcct

SEQ ID NO: 17470 - DNA, 20 bp, synthetic construct
  misc_feature 1..20: note = chemically synthesized
  source 1..20: mol_type = other DNA
ttctcctgcctcagcctccc

SEQ ID NO: 17471 - DNA, 20 bp, synthetic construct
  misc_feature 1..20: note = chemically synthesized
  source 1..20: mol_type = other DNA
tcctgcctcagcctcccgag

SEQ ID NO: 17472 - DNA, 20 bp, synthetic construct
  misc_feature 1..20: note = chemically synthesized
  source 1..20: mol_type = other DNA
gcctcagcctcccgagtagc

SEQ ID NO: 17473 - DNA, 20 bp, synthetic construct
  misc_feature 1..20: note = chemically synthesized
  source 1..20: mol_type = other DNA
cctcagcctcccgagtagct

SEQ ID NO: 17474 - DNA, 20 bp, synthetic construct
  misc_feature 1..20: note = chemically synthesized
  source 1..20: mol_type = other DNA
ctcccgagtagctgggacta

SEQ ID NO: 17475 - DNA, 20 bp, synthetic construct
  misc_feature 1..20: note = chemically synthesized
  source 1..20: mol_type = other DNA
tcccgagtagctgggactac

SEQ ID NO: 17476 - DNA, 20 bp, synthetic construct
  misc_feature 1..20: note = chemically synthesized
  source 1..20: mol_type = other DNA
caggcgcctgccaccacgtc

SEQ ID NO: 17477 - DNA, 20 bp, synthetic construct
  misc_feature 1..20: note = chemically synthesized
  source 1..20: mol_type = other DNA
tggctaattttttgtatttt

SEQ ID NO: 17478 - DNA, 20 bp, synthetic construct
  misc_feature 1..20: note = chemically synthesized
  source 1..20: mol_type = other DNA
ctaattttttgtatttttag

SEQ ID NO: 17479 - DNA, 20 bp, synthetic construct
  misc_feature 1..20: note = chemically synthesized
  source 1..20: mol_type = other DNA
aattttttgtatttttagta

SEQ ID NO: 17480 - DNA, 20 bp, synthetic construct
  misc_feature 1..20: note = chemically synthesized
  source 1..20: mol_type = other DNA
ttttgtatttttagtagaga

SEQ ID NO: 17481 - DNA, 20 bp, synthetic construct
  misc_feature 1..20: note = chemically synthesized
  source 1..20: mol_type = other DNA
tttgtatttttagtagagat

SEQ ID NO: 17482 - DNA, 20 bp, synthetic construct
  misc_feature 1..20: note = chemically synthesized
  source 1..20: mol_type = other DNA
ttgtatttttagtagagatg

SEQ ID NO: 17483 - DNA, 20 bp, synthetic construct
  misc_feature 1..20: note = chemically synthesized
  source 1..20: mol_type = other DNA
gagatggggtttcaccatgt

SEQ ID NO: 17484 - DNA, 20 bp, synthetic construct
  misc_feature 1..20: note = chemically synthesized
  source 1..20: mol_type = other DNA
tggggtttcaccatgttagc

SEQ ID NO: 17485 - DNA, 20 bp, synthetic construct
  misc_feature 1..20: note = chemically synthesized
  source 1..20: mol_type = other DNA
ggggtttcaccatgttagcc

SEQ ID NO: 17486 - DNA, 20 bp, synthetic construct
  misc_feature 1..20: note = chemically synthesized
  source 1..20: mol_type = other DNA
tttcaccatgttagccagga

SEQ ID NO: 17487 - DNA, 20 bp, synthetic construct
  misc_feature 1..20: note = chemically synthesized
  source 1..20: mol_type = other DNA
acctcatgatctgcccgcct

SEQ ID NO: 17488 - DNA, 20 bp, synthetic construct
  misc_feature 1..20: note = chemically synthesized
  source 1..20: mol_type = other DNA
ctgcccgccttggcctccca

SEQ ID NO: 17489 - DNA, 20 bp, synthetic construct
  misc_feature 1..20: note = chemically synthesized
  source 1..20: mol_type = other DNA
gccttggcctcccacagtgc

SEQ ID NO: 17490 - DNA, 20 bp, synthetic construct
  misc_feature 1..20: note = chemically synthesized
  source 1..20: mol_type = other DNA
ccttggcctcccacagtgct

SEQ ID NO: 17491 - DNA, 20 bp, synthetic construct
  misc_feature 1..20: note = chemically synthesized
  source 1..20: mol_type = other DNA
ctcccacagtgctgggattc

SEQ ID NO: 17492 - DNA, 20 bp, synthetic construct
  misc_feature 1..20: note = chemically synthesized
  source 1..20: mol_type = other DNA
tcccacagtgctgggattcc

SEQ ID NO: 17493 - DNA, 20 bp, synthetic construct
  misc_feature 1..20: note = chemically synthesized
  source 1..20: mol_type = other DNA
agtgctgggattccaggcgt

SEQ ID NO: 17494 - DNA, 20 bp, synthetic construct
  misc_feature 1..20: note = chemically synthesized
  source 1..20: mol_type = other DNA
gggattccaggcgtgagcca

SEQ ID NO: 17495 - DNA, 20 bp, synthetic construct
  misc_feature 1..20: note = chemically synthesized
  source 1..20: mol_type = other DNA
caggcgtgagccacggcgcc

SEQ ID NO: 17496 - DNA, 20 bp, synthetic construct
  misc_feature 1..20: note = chemically synthesized
  source 1..20: mol_type = other DNA
cgtgagccacggcgcctggc

SEQ ID NO: 17497 - DNA, 20 bp, synthetic construct
  misc_feature 1..20: note = chemically synthesized
  source 1..20: mol_type = other DNA
gccagtgtgttttttcattt

SEQ ID NO: 17498 - DNA, 20 bp, synthetic construct
  misc_feature 1..20: note = chemically synthesized
  source 1..20: mol_type = other DNA
ttttttcatttcagacattg

SEQ ID NO: 17499 - DNA, 20 bp, synthetic construct
  misc_feature 1..20: note = chemically synthesized
  source 1..20: mol_type = other DNA
gacattgtagtttttatctc

SEQ ID NO: 17500 - DNA, 20 bp, synthetic construct
  misc_feature 1..20: note = chemically synthesized
  source 1..20: mol_type = other DNA
attgtagtttttatctctag

SEQ ID NO: 17501 - DNA, 20 bp, synthetic construct
  misc_feature 1..20: note = chemically synthesized
  source 1..20: mol_type = other DNA
tttatctctagaagttcacc

SEQ ID NO: 17502 - DNA, 20 bp, synthetic construct
  misc_feature 1..20: note = chemically synthesized
  source 1..20: mol_type = other DNA
ttatctctagaagttcacct

SEQ ID NO: 17503 - DNA, 20 bp, synthetic construct
  misc_feature 1..20: note = chemically synthesized
  source 1..20: mol_type = other DNA
tatctctagaagttcacctg

SEQ ID NO: 17504 - DNA, 20 bp, synthetic construct
  misc_feature 1..20: note = chemically synthesized
  source 1..20: mol_type = other DNA
acttaattttttgaacataa

SEQ ID NO: 17505 - DNA, 20 bp, synthetic construct
  misc_feature 1..20: note = chemically synthesized
  source 1..20: mol_type = other DNA
cttaattttttgaacataat

SEQ ID NO: 17506 - DNA, 20 bp, synthetic construct
  misc_feature 1..20: note = chemically synthesized
  source 1..20: mol_type = other DNA
tttttgaacataatgggata

SEQ ID NO: 17507 - DNA, 20 bp, synthetic construct
  misc_feature 1..20: note = chemically synthesized
  source 1..20: mol_type = other DNA
ccatccttgcctgctaattc

SEQ ID NO: 17508 - DNA, 20 bp, synthetic construct
  misc_feature 1..20: note = chemically synthesized
  source 1..20: mol_type = other DNA
gctaattctagcatccgtgt

SEQ ID NO: 17509 - DNA, 20 bp, synthetic construct
  misc_feature 1..20: note = chemically synthesized
  source 1..20: mol_type = other DNA
tctagcatccgtgtcagttc

SEQ ID NO: 17510 - DNA, 20 bp, synthetic construct
  misc_feature 1..20: note = chemically synthesized
  source 1..20: mol_type = other DNA
catgccttgtaatctttgat

SEQ ID NO: 17511 - DNA, 20 bp, synthetic construct
  misc_feature 1..20: note = chemically synthesized
  source 1..20: mol_type = other DNA
tgtaatctttgattggctgc

SEQ ID NO: 17512 - DNA, 20 bp, synthetic construct
  misc_feature 1..20: note = chemically synthesized
  source 1..20: mol_type = other DNA
cattgtcaatttcaccttgt

SEQ ID NO: 17513 - DNA, 20 bp, synthetic construct
  misc_feature 1..20: note = chemically synthesized
  source 1..20: mol_type = other DNA
attgtcaatttcaccttgtt

SEQ ID NO: 17514 - DNA, 20 bp, synthetic construct
  misc_feature 1..20: note = chemically synthesized
  source 1..20: mol_type = other DNA
aatttcaccttgttgggtgc

SEQ ID NO: 17515 - DNA, 20 bp, synthetic construct
  misc_feature 1..20: note = chemically synthesized
  source 1..20: mol_type = other DNA
gtattcctctaaatgttctt

SEQ ID NO: 17516 - DNA, 20 bp, synthetic construct
  misc_feature 1..20: note = chemically synthesized
  source 1..20: mol_type = other DNA
aatgttcttgagctttgctc

SEQ ID NO: 17517 - DNA, 20 bp, synthetic construct
  misc_feature 1..20: note = chemically synthesized
  source 1..20: mol_type = other DNA
atgttcttgagctttgctcc

SEQ ID NO: 17518 - DNA, 20 bp, synthetic construct
  misc_feature 1..20: note = chemically synthesized
  source 1..20: mol_type = other DNA
ttgagctttgctccgggatg

SEQ ID NO: 17519 - DNA, 20 bp, synthetic construct
  misc_feature 1..20: note = chemically synthesized
  source 1..20: mol_type = other DNA
ctttgctccgggatgcagtt

SEQ ID NO: 17520 - DNA, 20 bp, synthetic construct
  misc_feature 1..20: note = chemically synthesized
  source 1..20: mol_type = other DNA
cgggatgcagttaagcaact

SEQ ID NO: 17521 - DNA, 20 bp, synthetic construct
  misc_feature 1..20: note = chemically synthesized
  source 1..20: mol_type = other DNA
ggatgcagttaagcaactta

SEQ ID NO: 17522 - DNA, 20 bp, synthetic construct
  misc_feature 1..20: note = chemically synthesized
  source 1..20: mol_type = other DNA
gcagttaagcaacttagagt

SEQ ID NO: 17523 - DNA, 20 bp, synthetic construct
  misc_feature 1..20: note = chemically synthesized
  source 1..20: mol_type = other DNA
gtttgaactcttaattgttt

SEQ ID NO: 17524 - DNA, 20 bp, synthetic construct
  misc_feature 1..20: note = chemically synthesized
  source 1..20: mol_type = other DNA
cttaattgttttggtctcct

SEQ ID NO: 17525 - DNA, 20 bp, synthetic construct
  misc_feature 1..20: note = chemically synthesized
  source 1..20: mol_type = other DNA
ttttggtctcctcggactct

SEQ ID NO: 17526 - DNA, 20 bp, synthetic construct
  misc_feature 1..20: note = chemically synthesized
  source 1..20: mol_type = other DNA
tcagctccatctcctcaacg

SEQ ID NO: 17527 - DNA, 20 bp, synthetic construct
  misc_feature 1..20: note = chemically synthesized
  source 1..20: mol_type = other DNA
cagctccatctcctcaacgt

SEQ ID NO: 17528 - DNA, 20 bp, synthetic construct
  misc_feature 1..20: note = chemically synthesized
  source 1..20: mol_type = other DNA
agctccatctcctcaacgtg

SEQ ID NO: 17529 - DNA, 20 bp, synthetic construct
  misc_feature 1..20: note = chemically synthesized
  source 1..20: mol_type = other DNA
ctccatctcctcaacgtggg

SEQ ID NO: 17530 - DNA, 20 bp, synthetic construct
  misc_feature 1..20: note = chemically synthesized
  source 1..20: mol_type = other DNA
cctcaacgtggggagtctct

SEQ ID NO: 17531 - DNA, 20 bp, synthetic construct
  misc_feature 1..20: note = chemically synthesized
  source 1..20: mol_type = other DNA
ctcaacgtggggagtctctt

SEQ ID NO: 17532 - DNA, 20 bp, synthetic construct
  misc_feature 1..20: note = chemically synthesized
  source 1..20: mol_type = other DNA
ggagtctcttgggctctgcc

SEQ ID NO: 17533 - DNA, 20 bp, synthetic construct
  misc_feature 1..20: note = chemically synthesized
  source 1..20: mol_type = other DNA
ctgcctggacttccctttcc

SEQ ID NO: 17534 - DNA, 20 bp, synthetic construct
  misc_feature 1..20: note = chemically synthesized
  source 1..20: mol_type = other DNA
ctttcctggcctgtaacctg

SEQ ID NO: 17535 - DNA, 20 bp, synthetic construct
  misc_feature 1..20: note = chemically synthesized
  source 1..20: mol_type = other DNA
acctgcagactctctccaaa

SEQ ID NO: 17536 - DNA, 20 bp, synthetic construct
  misc_feature 1..20: note = chemically synthesized
  source 1..20: mol_type = other DNA
gcagactctctccaaacagt

SEQ ID NO: 17537 - DNA, 20 bp, synthetic construct
  misc_feature 1..20: note = chemically synthesized
  source 1..20: mol_type = other DNA
actctctccaaacagtaagc

SEQ ID NO: 17538 - DNA, 20 bp, synthetic construct
  misc_feature 1..20: note = chemically synthesized
  source 1..20: mol_type = other DNA
ctctctccaaacagtaagct

SEQ ID NO: 17539 - DNA, 20 bp, synthetic construct
  misc_feature 1..20: note = chemically synthesized
  source 1..20: mol_type = other DNA
tctctccaaacagtaagctg

SEQ ID NO: 17540 - DNA, 20 bp, synthetic construct
  misc_feature 1..20: note = chemically synthesized
  source 1..20: mol_type = other DNA
aaacagtaagctggggtgat

SEQ ID NO: 17541 - DNA, 20 bp, synthetic construct
  misc_feature 1..20: note = chemically synthesized
  source 1..20: mol_type = other DNA
acagtaagctggggtgatcg

SEQ ID NO: 17542 - DNA, 20 bp, synthetic construct
  misc_feature 1..20: note = chemically synthesized
  source 1..20: mol_type = other DNA
cagtaagctggggtgatcgg

SEQ ID NO: 17543 - DNA, 20 bp, synthetic construct
  misc_feature 1..20: note = chemically synthesized
  source 1..20: mol_type = other DNA
agtaagctggggtgatcgga

SEQ ID NO: 17544 - DNA, 20 bp, synthetic construct
  misc_feature 1..20: note = chemically synthesized
  source 1..20: mol_type = other DNA
gttgtttgcttcttatccct

SEQ ID NO: 17545 - DNA, 20 bp, synthetic construct
  misc_feature 1..20: note = chemically synthesized
  source 1..20: mol_type = other DNA
ttgtttgcttcttatccctc

SEQ ID NO: 17546 - DNA, 20 bp, synthetic construct
  misc_feature 1..20: note = chemically synthesized
  source 1..20: mol_type = other DNA
tgtttgcttcttatccctca

SEQ ID NO: 17547 - DNA, 20 bp, synthetic construct
  misc_feature 1..20: note = chemically synthesized
  source 1..20: mol_type = other DNA
actcctccttgcctgatgtc

SEQ ID NO: 17548 - DNA, 20 bp, synthetic construct
  misc_feature 1..20: note = chemically synthesized
  source 1..20: mol_type = other DNA
tcctccttgcctgatgtcca

SEQ ID NO: 17549 - DNA, 20 bp, synthetic construct
  misc_feature 1..20: note = chemically synthesized
  source 1..20: mol_type = other DNA
cctgatgtccagagtcttga

SEQ ID NO: 17550 - DNA, 20 bp, synthetic construct
  misc_feature 1..20: note = chemically synthesized
  source 1..20: mol_type = other DNA
ttgaaagctgccatgttcta

SEQ ID NO: 17551 - DNA, 20 bp, synthetic construct
  misc_feature 1..20: note = chemically synthesized
  source 1..20: mol_type = other DNA
gtttttgttttgattgtttc

SEQ ID NO: 17552 - DNA, 20 bp, synthetic construct
  misc_feature 1..20: note = chemically synthesized
  source 1..20: mol_type = other DNA
tttttgttttgattgtttct

SEQ ID NO: 17553 - DNA, 20 bp, synthetic construct
  misc_feature 1..20: note = chemically synthesized
  source 1..20: mol_type = other DNA
ttttgttttgattgtttctg

SEQ ID NO: 17554 - DNA, 20 bp, synthetic construct
  misc_feature 1..20: note = chemically synthesized
  source 1..20: mol_type = other DNA
ttgttttgattgtttctggg

SEQ ID NO: 17555 - DNA, 20 bp, synthetic construct
  misc_feature 1..20: note = chemically synthesized
  source 1..20: mol_type = other DNA
gttttgattgtttctgggga

SEQ ID NO: 17556 - DNA, 20 bp, synthetic construct
  misc_feature 1..20: note = chemically synthesized
  source 1..20: mol_type = other DNA
ttgattgtttctggggagag

SEQ ID NO: 17557 - DNA, 20 bp, synthetic construct
  misc_feature 1..20: note = chemically synthesized
  source 1..20: mol_type = other DNA
gagaagaactcttcccatct

SEQ ID NO: 17558 - DNA, 20 bp, synthetic construct
  misc_feature 1..20: note = chemically synthesized
  source 1..20: mol_type = other DNA
agaagaactcttcccatctt

SEQ ID NO: 17559 - DNA, 20 bp, synthetic construct
  misc_feature 1..20: note = chemically synthesized
  source 1..20: mol_type = other DNA
agaactcttcccatcttggg

SEQ ID NO: 17560 - DNA, 20 bp, synthetic construct
  misc_feature 1..20: note = chemically synthesized
  source 1..20: mol_type = other DNA
ttatgttcaaacttttgcct

SEQ ID NO: 17561 - DNA, 20 bp, synthetic construct
  misc_feature 1..20: note = chemically synthesized
  source 1..20: mol_type = other DNA
tgttcaaacttttgcctaag

SEQ ID NO: 17562 - DNA, 20 bp, synthetic construct
  misc_feature 1..20: note = chemically synthesized
  source 1..20: mol_type = other DNA
tttaactcatctaattatcc

SEQ ID NO: 17563 - DNA, 20 bp, synthetic construct
  misc_feature 1..20: note = chemically synthesized
  source 1..20: mol_type = other DNA
aattatccgagcaatccaat

SEQ ID NO: 17564 - DNA, 20 bp, synthetic construct
  misc_feature 1..20: note = chemically synthesized
  source 1..20: mol_type = other DNA
attatccgagcaatccaatc

SEQ ID NO: 17565 - DNA, 20 bp, synthetic construct
  misc_feature 1..20: note = chemically synthesized
  source 1..20: mol_type = other DNA
atccgagcaatccaatcggg

SEQ ID NO: 17566 - DNA, 20 bp, synthetic construct
  misc_feature 1..20: note = chemically synthesized
  source 1..20: mol_type = other DNA
gtgatctccattttacacac

SEQ ID NO: 17567 - DNA, 20 bp, synthetic construct
  misc_feature 1..20: note = chemically synthesized
  source 1..20: mol_type = other DNA
ccattttacacacgagaaaa

SEQ ID NO: 17568 - DNA, 20 bp, synthetic construct
  misc_feature 1..20: note = chemically synthesized
  source 1..20: mol_type = other DNA
ttttacacacgagaaaatgg

SEQ ID NO: 17569 - DNA, 20 bp, synthetic construct
  misc_feature 1..20: note = chemically synthesized
  source 1..20: mol_type = other DNA
cacacgagaaaatggaagca

SEQ ID NO: 17570 - DNA, 20 bp, synthetic construct
  misc_feature 1..20: note = chemically synthesized
  source 1..20: mol_type = other DNA
cacgagaaaatggaagcatg

SEQ ID NO: 17571 - DNA, 20 bp, synthetic construct
  misc_feature 1..20: note = chemically synthesized
  source 1..20: mol_type = other DNA
agcatggagaaattgaatgc

SEQ ID NO: 17572 - DNA, 20 bp, synthetic construct
  misc_feature 1..20: note = chemically synthesized
  source 1..20: mol_type = other DNA
tgaatgctggtgcatgatct

SEQ ID NO: 17573 - DNA, 20 bp, synthetic construct
  misc_feature 1..20: note = chemically synthesized
  source 1..20: mol_type = other DNA
aatgctggtgcatgatctca

SEQ ID NO: 17574 - DNA, 20 bp, synthetic construct
  misc_feature 1..20: note = chemically synthesized
  source 1..20: mol_type = other DNA
tgcatgatctcagagctacc

SEQ ID NO: 17575 - DNA, 20 bp, synthetic construct
  misc_feature 1..20: note = chemically synthesized
  source 1..20: mol_type = other DNA
catgatctcagagctacctg

SEQ ID NO: 17576 - DNA, 20 bp, synthetic construct
  misc_feature 1..20: note = chemically synthesized
  source 1..20: mol_type = other DNA
atgatctcagagctacctgg

SEQ ID NO: 17577 - DNA, 20 bp, synthetic construct
  misc_feature 1..20: note = chemically synthesized
  source 1..20: mol_type = other DNA
ctcagagctacctggaggca

SEQ ID NO: 17578 - DNA, 20 bp, synthetic construct
  misc_feature 1..20: note = chemically synthesized
  source 1..20: mol_type = other DNA
gagctacctggaggcacagc

SEQ ID NO: 17579 - DNA, 20 bp, synthetic construct
  misc_feature 1..20: note = chemically synthesized
  source 1..20: mol_type = other DNA
agctacctggaggcacagct

SEQ ID NO: 17580 - DNA, 20 bp, synthetic construct
  misc_feature 1..20: note = chemically synthesized
  source 1..20: mol_type = other DNA
ggcacagctgggctaccctg

SEQ ID NO: 17581 - DNA, 20 bp, synthetic construct
  misc_feature 1..20: note = chemically synthesized
  source 1..20: mol_type = other DNA
gcacagctgggctaccctgt

SEQ ID NO: 17582 - DNA, 20 bp, synthetic construct
  misc_feature 1..20: note = chemically synthesized
  source 1..20: mol_type = other DNA
cagctgggctaccctgtggg

SEQ ID NO: 17583 - DNA, 20 bp, synthetic construct
  misc_feature 1..20: note = chemically synthesized
  source 1..20: mol_type = other DNA
gggctaccctgtgggcagtc

SEQ ID NO: 17584 - DNA, 20 bp, synthetic construct
  misc_feature 1..20: note = chemically synthesized
  source 1..20: mol_type = other DNA
ccctgtgggcagtctggttt

SEQ ID NO: 17585 - DNA, 20 bp, synthetic construct
  misc_feature 1..20: note = chemically synthesized
  source 1..20: mol_type = other DNA
cctgtgggcagtctggtttc

SEQ ID NO: 17586 - DNA, 20 bp, synthetic construct
  misc_feature 1..20: note = chemically synthesized
  source 1..20: mol_type = other DNA
ctgtgggcagtctggtttca

SEQ ID NO: 17587 - DNA, 20 bp, synthetic construct
  misc_feature 1..20: note = chemically synthesized
  source 1..20: mol_type = other DNA
tgggcagtctggtttcaggg

SEQ ID NO: 17588 - DNA, 20 bp, synthetic construct
  misc_feature 1..20: note = chemically synthesized
  source 1..20: mol_type = other DNA
ctggtttcagggtggatata

SEQ ID NO: 17589 - DNA, 20 bp, synthetic construct
  misc_feature 1..20: note = chemically synthesized
  source 1..20: mol_type = other DNA
tggatatacagacacgttgc

SEQ ID NO: 17590 - DNA, 20 bp, synthetic construct
  misc_feature 1..20: note = chemically synthesized
  source 1..20: mol_type = other DNA
ggatatacagacacgttgct

SEQ ID NO: 17591 - DNA, 20 bp, synthetic construct
  misc_feature 1..20: note = chemically synthesized
  source 1..20: mol_type = other DNA
gacacgttgctgggctgacc

SEQ ID NO: 17592 - DNA, 20 bp, synthetic construct
  misc_feature 1..20: note = chemically synthesized
  source 1..20: mol_type = other DNA
ttgctgggctgacccagcat

SEQ ID NO: 17593 - DNA, 20 bp, synthetic construct
  misc_feature 1..20: note = chemically synthesized
  source 1..20: mol_type = other DNA
tgctgggctgacccagcatt

SEQ ID NO: 17594 - DNA, 20 bp, synthetic construct
  misc_feature 1..20: note = chemically synthesized
  source 1..20: mol_type = other DNA
ctgggctgacccagcattgg

SEQ ID NO: 17595 - DNA, 20 bp, synthetic construct
  misc_feature 1..20: note = chemically synthesized
  source 1..20: mol_type = other DNA
acccagcattgggagttgat

SEQ ID NO: 17596 - DNA, 20 bp, synthetic construct
  misc_feature 1..20: note = chemically synthesized
  source 1..20: mol_type = other DNA
agcattgggagttgataagt

SEQ ID NO: 17597 - DNA, 20 bp, synthetic construct
  misc_feature 1..20: note = chemically synthesized
  source 1..20: mol_type = other DNA
tgggagttgataagtcggac

SEQ ID NO: 17598 - DNA, 20 bp, synthetic construct
  misc_feature 1..20: note = chemically synthesized
  source 1..20: mol_type = other DNA
gggagttgataagtcggact

SEQ ID NO: 17599 - DNA, 20 bp, synthetic construct
  misc_feature 1..20: note = chemically synthesized
  source 1..20: mol_type = other DNA
agttgataagtcggactggg

SEQ ID NO: 17600 - DNA, 20 bp, synthetic construct
  misc_feature 1..20: note = chemically synthesized
  source 1..20: mol_type = other DNA
tgataagtcggactgggaag

SEQ ID NO: 17601 - DNA, 20 bp, synthetic construct
  misc_feature 1..20: note = chemically synthesized
  source 1..20: mol_type = other DNA
gataagtcggactgggaagc

SEQ ID NO: 17602 - DNA, 20 bp, synthetic construct
  misc_feature 1..20: note = chemically synthesized
  source 1..20: mol_type = other DNA
agtcggactgggaagcagga

SEQ ID NO: 17603 - DNA, 20 bp, synthetic construct
  misc_feature 1..20: note = chemically synthesized
  source 1..20: mol_type = other DNA
gtcggactgggaagcaggac

SEQ ID NO: 17604 - DNA, 20 bp, synthetic construct
  misc_feature 1..20: note = chemically synthesized
  source 1..20: mol_type = other DNA
gaagcaggacaggaccctct

SEQ ID NO: 17605 - DNA, 20 bp, synthetic construct
  misc_feature 1..20: note = chemically synthesized
  source 1..20: mol_type = other DNA
gcaggacaggaccctctgag

SEQ ID NO: 17606 - DNA, 20 bp, synthetic construct
  misc_feature 1..20: note = chemically synthesized
  source 1..20: mol_type = other DNA
aggacaggaccctctgagtg

SEQ ID NO: 17607 - DNA, 20 bp, synthetic construct
  misc_feature 1..20: note = chemically synthesized
  source 1..20: mol_type = other DNA
ggacaggaccctctgagtgg

SEQ ID NO: 17608 - DNA, 20 bp, synthetic construct
  misc_feature 1..20: note = chemically synthesized
  source 1..20: mol_type = other DNA
gacaggaccctctgagtgga

SEQ ID NO: 17609 - DNA, 20 bp, synthetic construct
  misc_feature 1..20: note = chemically synthesized
  source 1..20: mol_type = other DNA
cctctgagtggagggtgctg

SEQ ID NO: 17610 - DNA, 20 bp, synthetic construct
  misc_feature 1..20: note = chemically synthesized
  source 1..20: mol_type = other DNA
tgagtggagggtgctgaaga

SEQ ID NO: 17611 - DNA, 20 bp, synthetic construct
  misc_feature 1..20: note = chemically synthesized
  source 1..20: mol_type = other DNA
gtggagggtgctgaagacag

SEQ ID NO: 17612 - DNA, 20 bp, synthetic construct
  misc_feature 1..20: note = chemically synthesized
  source 1..20: mol_type = other DNA
agggtgctgaagacagcagt

SEQ ID NO: 17613 - DNA, 20 bp, synthetic construct
  misc_feature 1..20: note = chemically synthesized
  source 1..20: mol_type = other DNA
gggtgctgaagacagcagtc

SEQ ID NO: 17614 - DNA, 20 bp, synthetic construct
  misc_feature 1..20: note = chemically synthesized
  source 1..20: mol_type = other DNA
ggtgctgaagacagcagtca

SEQ ID NO: 17615 - DNA, 20 bp, synthetic construct
  misc_feature 1..20: note = chemically synthesized
  source 1..20: mol_type = other DNA
gaagacagcagtcagggact

SEQ ID NO: 17616 - DNA, 20 bp, synthetic construct
  misc_feature 1..20: note = chemically synthesized
  source 1..20: mol_type = other DNA
agcagtcagggactcagcca

SEQ ID NO: 17617 - DNA, 20 bp, synthetic construct
  misc_feature 1..20: note = chemically synthesized
  source 1..20: mol_type = other DNA
cagtcagggactcagccatg

SEQ ID NO: 17618 - DNA, 20 bp, synthetic construct
  misc_feature 1..20: note = chemically synthesized
  source 1..20: mol_type = other DNA
agtcagggactcagccatgg

SEQ ID NO: 17619 - DNA, 20 bp, synthetic construct
  misc_feature 1..20: note = chemically synthesized
  source 1..20: mol_type = other DNA
gtcagggactcagccatgga

SEQ ID NO: 17620 - DNA, 20 bp, synthetic construct
  misc_feature 1..20: note = chemically synthesized
  source 1..20: mol_type = other DNA
gggactcagccatggagggc

SEQ ID NO: 17621 - DNA, 20 bp, synthetic construct
  misc_feature 1..20: note = chemically synthesized
  source 1..20: mol_type = other DNA
tcagccatggagggccagct

SEQ ID NO: 17622 - DNA, 20 bp, synthetic construct
  misc_feature 1..20: note = chemically synthesized
  source 1..20: mol_type = other DNA
gccatggagggccagcttgg

SEQ ID NO: 17623 - DNA, 20 bp, synthetic construct
  misc_feature 1..20: note = chemically synthesized
  source 1..20: mol_type = other DNA
ccatggagggccagcttggt

SEQ ID NO: 17624 - DNA, 20 bp, synthetic construct
  misc_feature 1..20: note = chemically synthesized
  source 1..20: mol_type = other DNA
catggagggccagcttggtg

SEQ ID NO: 17625 - DNA, 20 bp, synthetic construct
  misc_feature 1..20: note = chemically synthesized
  source 1..20: mol_type = other DNA
cagcttggtggggaacaccg

SEQ ID NO: 17626 - DNA, 20 bp, synthetic construct
  misc_feature 1..20: note = chemically synthesized
  source 1..20: mol_type = other DNA
ggtggggaacaccgtggtca

SEQ ID NO: 17627 - DNA, 20 bp, synthetic construct
  misc_feature 1..20: note = chemically synthesized
  source 1..20: mol_type = other DNA
tggggaacaccgtggtcatg

SEQ ID NO: 17628 - DNA, 20 bp, synthetic construct
  misc_feature 1..20: note = chemically synthesized
  source 1..20: mol_type = other DNA
ccgtggtcatggagcgcttc

SEQ ID NO: 17629 - DNA, 20 bp, synthetic construct
  misc_feature 1..20: note = chemically synthesized
  source 1..20: mol_type = other DNA
ggtcatggagcgcttctgga

SEQ ID NO: 17630 - DNA, 20 bp, synthetic construct
  misc_feature 1..20: note = chemically synthesized
  source 1..20: mol_type = other DNA
tcatggagcgcttctggatg

SEQ ID NO: 17631 - DNA, 20 bp, synthetic construct
  misc_feature 1..20: note = chemically synthesized
  source 1..20: mol_type = other DNA
atggagcgcttctggatgga

SEQ ID NO: 17632 - DNA, 20 bp, synthetic construct
  misc_feature 1..20: note = chemically synthesized
  source 1..20: mol_type = other DNA
tggagcgcttctggatggag

SEQ ID NO: 17633 - DNA, 20 bp, synthetic construct
  misc_feature 1..20: note = chemically synthesized
  source 1..20: mol_type = other DNA
tctggatggagaggaatgca

SEQ ID NO: 17634 - DNA, 20 bp, synthetic construct
  misc_feature 1..20: note = chemically synthesized
  source 1..20: mol_type = other DNA
ctggatggagaggaatgcaa

SEQ ID NO: 17635 - DNA, 20 bp, synthetic construct
  misc_feature 1..20: note = chemically synthesized
  source 1..20: mol_type = other DNA
ggagaggaatgcaaaggcct

SEQ ID NO: 17636 - DNA, 20 bp, synthetic construct
  misc_feature 1..20: note = chemically synthesized
  source 1..20: mol_type = other DNA
agaggaatgcaaaggccttg

SEQ ID NO: 17637 - DNA, 20 bp, synthetic construct
  misc_feature 1..20: note = chemically synthesized
  source 1..20: mol_type = other DNA
gaggaatgcaaaggccttgg

SEQ ID NO: 17638 - DNA, 20 bp, synthetic construct
  misc_feature 1..20: note = chemically synthesized
  source 1..20: mol_type = other DNA
gaatgcaaaggccttggagg

SEQ ID NO: 17639 - DNA, 20 bp, synthetic construct
  misc_feature 1..20: note = chemically synthesized
  source 1..20: mol_type = other DNA
aatgcaaaggccttggagga

SEQ ID NO: 17640 - DNA, 20 bp, synthetic construct
  misc_feature 1..20: note = chemically synthesized
  source 1..20: mol_type = other DNA
atgcaaaggccttggaggaa

SEQ ID NO: 17641 - DNA, 20 bp, synthetic construct
  misc_feature 1..20: note = chemically synthesized
  source 1..20: mol_type = other DNA
tgcaaaggccttggaggaag

SEQ ID NO: 17642 - DNA, 20 bp, synthetic construct
  misc_feature 1..20: note = chemically synthesized
  source 1..20: mol_type = other DNA
aaaggccttggaggaagggg

SEQ ID NO: 17643 - DNA, 20 bp, synthetic construct
  misc_feature 1..20: note = chemically synthesized
  source 1..20: mol_type = other DNA
aaggccttggaggaaggggt

SEQ ID NO: 17644 - DNA, 20 bp, synthetic construct
  misc_feature 1..20: note = chemically synthesized
  source 1..20: mol_type = other DNA
aggccttggaggaaggggtg

SEQ ID NO: 17645 - DNA, 20 bp, synthetic construct
  misc_feature 1..20: note = chemically synthesized
  source 1..20: mol_type = other DNA
ggccttggaggaaggggtgg

SEQ ID NO: 17646 - DNA, 20 bp, synthetic construct
  misc_feature 1..20: note = chemically synthesized
  source 1..20: mol_type = other DNA
cttggaggaaggggtggggg

SEQ ID NO: 17647 - DNA, 20 bp, synthetic construct
  misc_feature 1..20: note = chemically synthesized
  source 1..20: mol_type = other DNA
gaggaaggggtgggggcagt

SEQ ID NO: 17648 - DNA, 20 bp, synthetic construct
  misc_feature 1..20: note = chemically synthesized
  source 1..20: mol_type = other DNA
ggaaggggtgggggcagtga

SEQ ID NO: 17649 - DNA, 20 bp, synthetic construct
  misc_feature 1..20: note = chemically synthesized
  source 1..20: mol_type = other DNA
gaaggggtgggggcagtgag

SEQ ID NO: 17650 - DNA, 20 bp, synthetic construct
  misc_feature 1..20: note = chemically synthesized
  source 1..20: mol_type = other DNA
aaggggtgggggcagtgaga

SEQ ID NO: 17651 - DNA, 20 bp, synthetic construct
  misc_feature 1..20: note = chemically synthesized
  source 1..20: mol_type = other DNA
ggggtgggggcagtgagagg

SEQ ID NO: 17652 - DNA, 20 bp, synthetic construct
  misc_feature 1..20: note = chemically synthesized
  source 1..20: mol_type = other DNA
gggtgggggcagtgagaggg

SEQ ID NO: 17653 - DNA, 20 bp, synthetic construct
  misc_feature 1..20: note = chemically synthesized
  source 1..20: mol_type = other DNA
ggtgggggcagtgagaggga

SEQ ID NO: 17654 - DNA, 20 bp, synthetic construct
  misc_feature 1..20: note = chemically synthesized
  source 1..20: mol_type = other DNA
gggggcagtgagagggaggg

SEQ ID NO: 17655 - DNA, 20 bp, synthetic construct
  misc_feature 1..20: note = chemically synthesized
  source 1..20: mol_type = other DNA
ggggcagtgagagggagggt

SEQ ID NO: 17656 - DNA, 20 bp, synthetic construct
  misc_feature 1..20: note = chemically synthesized
  source 1..20: mol_type = other DNA
gggcagtgagagggagggtg

SEQ ID NO: 17657 - DNA, 20 bp, synthetic construct
  misc_feature 1..20: note = chemically synthesized
  source 1..20: mol_type = other DNA
agggagggtggggctgtgct

SEQ ID NO: 17658 - DNA, 20 bp, synthetic construct
  misc_feature 1..20: note = chemically synthesized
  source 1..20: mol_type = other DNA
ggagggtggggctgtgctca

SEQ ID NO: 17659 - DNA, 20 bp, synthetic construct
  misc_feature 1..20: note = chemically synthesized
  source 1..20: mol_type = other DNA
gggtggggctgtgctcagag

SEQ ID NO: 17660 - DNA, 20 bp, synthetic construct
  misc_feature 1..20: note = chemically synthesized
  source 1..20: mol_type = other DNA
ggtggggctgtgctcagagc

SEQ ID NO: 17661 - DNA, 20 bp, synthetic construct
  misc_feature 1..20: note = chemically synthesized
  source 1..20: mol_type = other DNA
tggggctgtgctcagagcgg

SEQ ID NO: 17662 - DNA, 20 bp, synthetic construct
  misc_feature 1..20: note = chemically synthesized
  source 1..20: mol_type = other DNA
ggctgtgctcagagcgggag

SEQ ID NO: 17663 - DNA, 20 bp, synthetic construct
  misc_feature 1..20: note = chemically synthesized
  source 1..20: mol_type = other DNA
gctgtgctcagagcgggagt

SEQ ID NO: 17664 - DNA, 20 bp, synthetic construct
  misc_feature 1..20: note = chemically synthesized
  source 1..20: mol_type = other DNA
gtgctcagagcgggagtggg

SEQ ID NO: 17665 - DNA, 20 bp, synthetic construct
  misc_feature 1..20: note = chemically synthesized
  source 1..20: mol_type = other DNA
ctcagagcgggagtgggcag

SEQ ID NO: 17666 - DNA, 20 bp, synthetic construct
  misc_feature 1..20: note = chemically synthesized
  source 1..20: mol_type = other DNA
cagagcgggagtgggcagtg

SEQ ID NO: 17667 - DNA, 20 bp, synthetic construct
  misc_feature 1..20: note = chemically synthesized
  source 1..20: mol_type = other DNA
agagcgggagtgggcagtgg

SEQ ID NO: 17668 - DNA, 20 bp, synthetic construct
  misc_feature 1..20: note = chemically synthesized
  source 1..20: mol_type = other DNA
ggagtgggcagtggaggtgt

SEQ ID NO: 17669 - DNA, 20 bp, synthetic construct
  misc_feature 1..20: note = chemically synthesized
  source 1..20: mol_type = other DNA
agtgggcagtggaggtgtca

SEQ ID NO: 17670 - DNA, 20 bp, synthetic construct
  misc_feature 1..20: note = chemically synthesized
  source 1..20: mol_type = other DNA
gtgggcagtggaggtgtcag

SEQ ID NO: 17671 - DNA, 20 bp, synthetic construct
  misc_feature 1..20: note = chemically synthesized
  source 1..20: mol_type = other DNA
ggaggtgtcagaggcctccc

SEQ ID NO: 17672 - DNA, 20 bp, synthetic construct
  misc_feature 1..20: note = chemically synthesized
  source 1..20: mol_type = other DNA
gaggtgtcagaggcctccct

SEQ ID NO: 17673 - DNA, 20 bp, synthetic construct
  misc_feature 1..20: note = chemically synthesized
  source 1..20: mol_type = other DNA
agaggcctccctgggtcaaa

SEQ ID NO: 17674 - DNA, 20 bp, synthetic construct
  misc_feature 1..20: note = chemically synthesized
  source 1..20: mol_type = other DNA
gaggcctccctgggtcaaat

SEQ ID NO: 17675 - DNA, 20 bp, synthetic construct
  misc_feature 1..20: note = chemically synthesized
  source 1..20: mol_type = other DNA
aggcctccctgggtcaaatg

SEQ ID NO: 17676 - DNA, 20 bp, synthetic construct
  misc_feature 1..20: note = chemically synthesized
  source 1..20: mol_type = other DNA
cctgggtcaaatggggtcct

SEQ ID NO: 17677 - DNA, 20 bp, synthetic construct
  misc_feature 1..20: note = chemically synthesized
  source 1..20: mol_type = other DNA
gtcaaatggggtcctgagtg

SEQ ID NO: 17678 - DNA, 20 bp, synthetic construct
  misc_feature 1..20: note = chemically synthesized
  source 1..20: mol_type = other DNA
tggggtcctgagtgtggctg

SEQ ID NO: 17679 - DNA, 20 bp, synthetic construct
  misc_feature 1..20: note = chemically synthesized
  source 1..20: mol_type = other DNA
ggtcctgagtgtggctgcag

SEQ ID NO: 17680 - DNA, 20 bp, synthetic construct
  misc_feature 1..20: note = chemically synthesized
  source 1..20: mol_type = other DNA
gtcctgagtgtggctgcagt

SEQ ID NO: 17681 - DNA, 20 bp, synthetic construct
  misc_feature 1..20: note = chemically synthesized
  source 1..20: mol_type = other DNA
tcctgagtgtggctgcagtg

SEQ ID NO: 17682 - DNA, 20 bp, synthetic construct
  misc_feature 1..20: note = chemically synthesized
  source 1..20: mol_type = other DNA
tgagtgtggctgcagtgggg

SEQ ID NO: 17683 - DNA, 20 bp, synthetic construct
  misc_feature 1..20: note = chemically synthesized
  source 1..20: mol_type = other DNA
gagtgtggctgcagtgggga

SEQ ID NO: 17684 - DNA, 20 bp, synthetic construct
  misc_feature 1..20: note = chemically synthesized
  source 1..20: mol_type = other DNA
tgtggctgcagtggggaagg

SEQ ID NO: 17685 - DNA, 20 bp, synthetic construct
  misc_feature 1..20: note = chemically synthesized
  source 1..20: mol_type = other DNA
ggctgcagtggggaaggtgg

SEQ ID NO: 17686 - DNA, 20 bp, synthetic construct
  misc_feature 1..20: note = chemically synthesized
  source 1..20: mol_type = other DNA
gtggggaaggtggaagtcac

SEQ ID NO: 17687 - DNA, 20 bp, synthetic construct
  misc_feature 1..20: note = chemically synthesized
  source 1..20: mol_type = other DNA
tggaagtcactggtgtgaaa

SEQ ID NO: 17688 - DNA, 20 bp, synthetic construct
  misc_feature 1..20: note = chemically synthesized
  source 1..20: mol_type = other DNA
tcactggtgtgaaaaagatg

SEQ ID NO: 17689 - DNA, 20 bp, synthetic construct
  misc_feature 1..20: note = chemically synthesized
  source 1..20: mol_type = other DNA
actggtgtgaaaaagatgaa

SEQ ID NO: 17690 - DNA, 20 bp, synthetic construct
  misc_feature 1..20: note = chemically synthesized
  source 1..20: mol_type = other DNA
gtgaaaaagatgaagagtta

SEQ ID NO: 17691 - DNA, 20 bp, synthetic construct
  misc_feature 1..20: note = chemically synthesized
  source 1..20: mol_type = other DNA
aaaagatgaagagttatgga

SEQ ID NO: 17692 - DNA, 20 bp, synthetic construct
  misc_feature 1..20: note = chemically synthesized
  source 1..20: mol_type = other DNA
gagttatggacagtcactta

SEQ ID NO: 17693 - DNA, 20 bp, synthetic construct
  misc_feature 1..20: note = chemically synthesized
  source 1..20: mol_type = other DNA
agttatggacagtcacttac

SEQ ID NO: 17694 - DNA, 20 bp, synthetic construct
  misc_feature 1..20: note = chemically synthesized
  source 1..20: mol_type = other DNA
gttatggacagtcacttaca

SEQ ID NO: 17695 - DNA, 20 bp, synthetic construct
  misc_feature 1..20: note = chemically synthesized
  source 1..20: mol_type = other DNA
ttatggacagtcacttacag

SEQ ID NO: 17696 - DNA, 20 bp, synthetic construct
  misc_feature 1..20: note = chemically synthesized
  source 1..20: mol_type = other DNA
tggacagtcacttacagggg

SEQ ID NO: 17697 - DNA, 20 bp, synthetic construct
  misc_feature 1..20: note = chemically synthesized
  source 1..20: mol_type = other DNA
tacaggggcagtgtctgact

SEQ ID NO: 17698 - DNA, 20 bp, synthetic construct
  misc_feature 1..20: note = chemically synthesized
  source 1..20: mol_type = other DNA
acaggggcagtgtctgactc

SEQ ID NO: 17699 - DNA, 20 bp, synthetic construct
  misc_feature 1..20: note = chemically synthesized
  source 1..20: mol_type = other DNA
gggcagtgtctgactcagga

SEQ ID NO: 17700 - DNA, 20 bp, synthetic construct
  misc_feature 1..20: note = chemically synthesized
  source 1..20: mol_type = other DNA
cagtgtctgactcaggacag

SEQ ID NO: 17701 - DNA, 20 bp, synthetic construct
  misc_feature 1..20: note = chemically synthesized
  source 1..20: mol_type = other DNA
tgtctgactcaggacagtgg

SEQ ID NO: 17702 - DNA, 20 bp, synthetic construct
  misc_feature 1..20: note = chemically synthesized
  source 1..20: mol_type = other DNA
gtctgactcaggacagtggc

SEQ ID NO: 17703 - DNA, 20 bp, synthetic construct
  misc_feature 1..20: note = chemically synthesized
  source 1..20: mol_type = other DNA
tgactcaggacagtggcagg

SEQ ID NO: 17704 - DNA, 20 bp, synthetic construct
  misc_feature 1..20: note = chemically synthesized
  source 1..20: mol_type = other DNA
gacagtggcaggaagtgacc

SEQ ID NO: 17705 - DNA, 20 bp, synthetic construct
  misc_feature 1..20: note = chemically synthesized
  source 1..20: mol_type = other DNA
acagtggcaggaagtgacct

SEQ ID NO: 17706 - DNA, 20 bp, synthetic construct
  misc_feature 1..20: note = chemically synthesized
  source 1..20: mol_type = other DNA
cagtggcaggaagtgacctg

SEQ ID NO: 17707 - DNA, 20 bp, synthetic construct
  misc_feature 1..20: note = chemically synthesized
  source 1..20: mol_type = other DNA
gtggcaggaagtgacctggg

SEQ ID NO: 17708 - DNA, 20 bp, synthetic construct
  misc_feature 1..20: note = chemically synthesized
  source 1..20: mol_type = other DNA
tggcaggaagtgacctgggg

SEQ ID NO: 17709 - DNA, 20 bp, synthetic construct
  misc_feature 1..20: note = chemically synthesized
  source 1..20: mol_type = other DNA
caggaagtgacctggggagg

SEQ ID NO: 17710 - DNA, 20 bp, synthetic construct
  misc_feature 1..20: note = chemically synthesized
  source 1..20: mol_type = other DNA
tgacctggggaggaagattc

SEQ ID NO: 17711 - DNA, 20 bp, synthetic construct
  misc_feature 1..20: note = chemically synthesized
  source 1..20: mol_type = other DNA
gacctggggaggaagattct

SEQ ID NO: 17712 - DNA, 20 bp, synthetic construct
  misc_feature 1..20: note = chemically synthesized
  source 1..20: mol_type = other DNA
aagattctgggcccctgact

SEQ ID NO: 17713 - DNA, 20 bp, synthetic construct
  misc_feature 1..20: note = chemically synthesized
  source 1..20: mol_type = other DNA
ggcccctgactgagcctccc

SEQ ID NO: 17714 - DNA, 20 bp, synthetic construct
  misc_feature 1..20: note = chemically synthesized
  source 1..20: mol_type = other DNA
gcccctgactgagcctcccc

SEQ ID NO: 17715 - DNA, 20 bp, synthetic construct
  misc_feature 1..20: note = chemically synthesized
  source 1..20: mol_type = other DNA
gactgagcctccccaggatg

SEQ ID NO: 17716 - DNA, 20 bp, synthetic construct
  misc_feature 1..20: note = chemically synthesized
  source 1..20: mol_type = other DNA
tccccaggatgtggtcctgc

SEQ ID NO: 17717 - DNA, 20 bp, synthetic construct
  misc_feature 1..20: note = chemically synthesized
  source 1..20: mol_type = other DNA
ccccaggatgtggtcctgct

SEQ ID NO: 17718 - DNA, 20 bp, synthetic construct
  misc_feature 1..20: note = chemically synthesized
  source 1..20: mol_type = other DNA
aggatgtggtcctgctgggt

SEQ ID NO: 17719 - DNA, 20 bp, synthetic construct
  misc_feature 1..20: note = chemically synthesized
  source 1..20: mol_type = other DNA
ggatgtggtcctgctgggtc

SEQ ID NO: 17720 - DNA, 20 bp, synthetic construct
  misc_feature 1..20: note = chemically synthesized
  source 1..20: mol_type = other DNA
gatgtggtcctgctgggtcg

SEQ ID NO: 17721 - DNA, 20 bp, synthetic construct
  misc_feature 1..20: note = chemically synthesized
  source 1..20: mol_type = other DNA
atgtggtcctgctgggtcgg

SEQ ID NO: 17722 - DNA, 20 bp, synthetic construct
  misc_feature 1..20: note = chemically synthesized
  source 1..20: mol_type = other DNA
tgtggtcctgctgggtcggg

SEQ ID NO: 17723 - DNA, 20 bp, synthetic construct
  misc_feature 1..20: note = chemically synthesized
  source 1..20: mol_type = other DNA
cctgctgggtcggggggtga

SEQ ID NO: 17724 - DNA, 20 bp, synthetic construct
  misc_feature 1..20: note = chemically synthesized
  source 1..20: mol_type = other DNA
ctgctgggtcggggggtgat

SEQ ID NO: 17725 - DNA, 20 bp, synthetic construct
  misc_feature 1..20: note = chemically synthesized
  source 1..20: mol_type = other DNA
ggtcggggggtgataggaat

SEQ ID NO: 17726 - DNA, 20 bp, synthetic construct
  misc_feature 1..20: note = chemically synthesized
  source 1..20: mol_type = other DNA
cggggggtgataggaatgag

SEQ ID NO: 17727 - DNA, 20 bp, synthetic construct
  misc_feature 1..20: note = chemically synthesized
  source 1..20: mol_type = other DNA
ggtgataggaatgagaagac

SEQ ID NO: 17728 - DNA, 20 bp, synthetic construct
  misc_feature 1..20: note = chemically synthesized
  source 1..20: mol_type = other DNA
gtgataggaatgagaagaca

SEQ ID NO: 17729 - DNA, 20 bp, synthetic construct
  misc_feature 1..20: note = chemically synthesized
  source 1..20: mol_type = other DNA
ataggaatgagaagacaagg

SEQ ID NO: 17730 - DNA, 20 bp, synthetic construct
  misc_feature 1..20: note = chemically synthesized
  source 1..20: mol_type = other DNA
tgagaagacaaggaagtcca

SEQ ID NO: 17731 - DNA, 20 bp, synthetic construct
  misc_feature 1..20: note = chemically synthesized
  source 1..20: mol_type = other DNA
agaagacaaggaagtccaca

SEQ ID NO: 17732 - DNA, 20 bp, synthetic construct
  misc_feature 1..20: note = chemically synthesized
  source 1..20: mol_type = other DNA
gacaaggaagtccacagagt

SEQ ID NO: 17733 - DNA, 20 bp, synthetic construct
  misc_feature 1..20: note = chemically synthesized
  source 1..20: mol_type = other DNA
acaaggaagtccacagagtc

SEQ ID NO: 17734 - DNA, 20 bp, synthetic construct
  misc_feature 1..20: note = chemically synthesized
  source 1..20: mol_type = other DNA
caaggaagtccacagagtca

SEQ ID NO: 17735 - DNA, 20 bp, synthetic construct
  misc_feature 1..20: note = chemically synthesized
  source 1..20: mol_type = other DNA
agtccacagagtcagggtcc

SEQ ID NO: 17736 - DNA, 20 bp, synthetic construct
  misc_feature 1..20: note = chemically synthesized
  source 1..20: mol_type = other DNA
gtccacagagtcagggtcca

SEQ ID NO: 17737 - DNA, 20 bp, synthetic construct
  misc_feature 1..20: note = chemically synthesized
  source 1..20: mol_type = other DNA
cagagtcagggtccaaggcc

SEQ ID NO: 17738 - DNA, 20 bp, synthetic construct
  misc_feature 1..20: note = chemically synthesized
  source 1..20: mol_type = other DNA
agtcagggtccaaggcctag

SEQ ID NO: 17739 - DNA, 20 bp, synthetic construct
  misc_feature 1..20: note = chemically synthesized
  source 1..20: mol_type = other DNA
gtcagggtccaaggcctaga

SEQ ID NO: 17740 - DNA, 20 bp, synthetic construct
  misc_feature 1..20: note = chemically synthesized
  source 1..20: mol_type = other DNA
cctagaaggtgttctgtttg

SEQ ID NO: 17741 - DNA, 20 bp, synthetic construct
  misc_feature 1..20: note = chemically synthesized
  source 1..20: mol_type = other DNA
ctagaaggtgttctgtttgc

SEQ ID NO: 17742 - DNA, 20 bp, synthetic construct
  misc_feature 1..20: note = chemically synthesized
  source 1..20: mol_type = other DNA
gaaggtgttctgtttgcagg

SEQ ID NO: 17743 - DNA, 20 bp, synthetic construct
  misc_feature 1..20: note = chemically synthesized
  source 1..20: mol_type = other DNA
gtttgcaggtggatgctgca

SEQ ID NO: 17744 - DNA, 20 bp, synthetic construct
  misc_feature 1..20: note = chemically synthesized
  source 1..20: mol_type = other DNA
ttgcaggtggatgctgcaaa

SEQ ID NO: 17745 - DNA, 20 bp, synthetic construct
  misc_feature 1..20: note = chemically synthesized
  source 1..20: mol_type = other DNA
gcaggtggatgctgcaaaga

SEQ ID NO: 17746 - DNA, 20 bp, synthetic construct
  misc_feature 1..20: note = chemically synthesized
  source 1..20: mol_type = other DNA
caggtggatgctgcaaagag

SEQ ID NO: 17747 - DNA, 20 bp, synthetic construct
  misc_feature 1..20: note = chemically synthesized
  source 1..20: mol_type = other DNA
ggtggatgctgcaaagagag

SEQ ID NO: 17748 - DNA, 20 bp, synthetic construct
  misc_feature 1..20: note = chemically synthesized
  source 1..20: mol_type = other DNA
atgctgcaaagagaggagct

SEQ ID NO: 17749 - DNA, 20 bp, synthetic construct
  misc_feature 1..20: note = chemically synthesized
  source 1..20: mol_type = other DNA
tgctgcaaagagaggagctc

SEQ ID NO: 17750 - DNA, 20 bp, synthetic construct
  misc_feature 1..20: note = chemically synthesized
  source 1..20: mol_type = other DNA
gctgcaaagagaggagctca

SEQ ID NO: 17751 - DNA, 20 bp, synthetic construct
  misc_feature 1..20: note = chemically synthesized
  source 1..20: mol_type = other DNA
caaagagaggagctcagggc

SEQ ID NO: 17752 - DNA, 20 bp, synthetic construct
  misc_feature 1..20: note = chemically synthesized
  source 1..20: mol_type = other DNA
aaagagaggagctcagggct

SEQ ID NO: 17753 - DNA, 20 bp, synthetic construct
  misc_feature 1..20: note = chemically synthesized
  source 1..20: mol_type = other DNA
gagctcagggctgggacaac

SEQ ID NO: 17754 - DNA, 20 bp, synthetic construct
  misc_feature 1..20: note = chemically synthesized
  source 1..20: mol_type = other DNA
gctcagggctgggacaactg

SEQ ID NO: 17755 - DNA, 20 bp, synthetic construct
  misc_feature 1..20: note = chemically synthesized
  source 1..20: mol_type = other DNA
tgggacaactggagctgctc

SEQ ID NO: 17756 - DNA, 20 bp, synthetic construct
  misc_feature 1..20: note = chemically synthesized
  source 1..20: mol_type = other DNA
gggacaactggagctgctct

SEQ ID NO: 17757 - DNA, 20 bp, synthetic construct
  misc_feature 1..20: note = chemically synthesized
  source 1..20: mol_type = other DNA
aactggagctgctctgggtc

SEQ ID NO: 17758 - DNA, 20 bp, synthetic construct
  misc_feature 1..20: note = chemically synthesized
  source 1..20: mol_type = other DNA
ctggagctgctctgggtctg

SEQ ID NO: 17759 - DNA, 20 bp, synthetic construct
  misc_feature 1..20: note = chemically synthesized
  source 1..20: mol_type = other DNA
tggagctgctctgggtctgg

SEQ ID NO: 17760 - DNA, 20 bp, synthetic construct
  misc_feature 1..20: note = chemically synthesized
  source 1..20: mol_type = other DNA
agctgctctgggtctggagg

SEQ ID NO: 17761 - DNA, 20 bp, synthetic construct
  misc_feature 1..20: note = chemically synthesized
  source 1..20: mol_type = other DNA
tgctctgggtctggaggcag

SEQ ID NO: 17762 - DNA, 20 bp, synthetic construct
  misc_feature 1..20: note = chemically synthesized
  source 1..20: mol_type = other DNA
ctctgggtctggaggcagca

SEQ ID NO: 17763 - DNA, 20 bp, synthetic construct
  misc_feature 1..20: note = chemically synthesized
  source 1..20: mol_type = other DNA
ctgggtctggaggcagcaga

SEQ ID NO: 17764 - DNA, 20 bp, synthetic construct
  misc_feature 1..20: note = chemically synthesized
  source 1..20: mol_type = other DNA
tgggtctggaggcagcagag

SEQ ID NO: 17765 - DNA, 20 bp, synthetic construct
  misc_feature 1..20: note = chemically synthesized
  source 1..20: mol_type = other DNA
gggtctggaggcagcagaga

SEQ ID NO: 17766 - DNA, 20 bp, synthetic construct
  misc_feature 1..20: note = chemically synthesized
  source 1..20: mol_type = other DNA
gtctggaggcagcagagagg

SEQ ID NO: 17767 - DNA, 20 bp, synthetic construct
  misc_feature 1..20: note = chemically synthesized
  source 1..20: mol_type = other DNA
gaggcagcagagagggagcc

SEQ ID NO: 17768 - DNA, 20 bp, synthetic construct
  misc_feature 1..20: note = chemically synthesized
  source 1..20: mol_type = other DNA
agggagcccagctctgtgtg

SEQ ID NO: 17769 - DNA, 20 bp, synthetic construct
  misc_feature 1..20: note = chemically synthesized
  source 1..20: mol_type = other DNA
gggagcccagctctgtgtgc

SEQ ID NO: 17770 - DNA, 20 bp, synthetic construct
  misc_feature 1..20: note = chemically synthesized
  source 1..20: mol_type = other DNA
agcccagctctgtgtgcagg

SEQ ID NO: 17771 - DNA, 20 bp, synthetic construct
  misc_feature 1..20: note = chemically synthesized
  source 1..20: mol_type = other DNA
gctctgtgtgcaggaagacg

SEQ ID NO: 17772 - DNA, 20 bp, synthetic construct
  misc_feature 1..20: note = chemically synthesized
  source 1..20: mol_type = other DNA
ctctgtgtgcaggaagacgt

SEQ ID NO: 17773 - DNA, 20 bp, synthetic construct
  misc_feature 1..20: note = chemically synthesized
  source 1..20: mol_type = other DNA
gcaggaagacgtgggtgtgt

SEQ ID NO: 17774 - DNA, 20 bp, synthetic construct
  misc_feature 1..20: note = chemically synthesized
  source 1..20: mol_type = other DNA
ggtgtgtgagtgtacgtgtg

SEQ ID NO: 17775 - DNA, 20 bp, synthetic construct
  misc_feature 1..20: note = chemically synthesized
  source 1..20: mol_type = other DNA
gtgtgtgagtgtacgtgtgt

SEQ ID NO: 17776 - DNA, 20 bp, synthetic construct
  misc_feature 1..20: note = chemically synthesized
  source 1..20: mol_type = other DNA
gtgtacgtgtgtgggtgtgt

SEQ ID NO: 17777 - DNA, 20 bp, synthetic construct
  misc_feature 1..20: note = chemically synthesized
  source 1..20: mol_type = other DNA
tgtacgtgtgtgggtgtgtc

SEQ ID NO: 17778 - DNA, 20 bp, synthetic construct
  misc_feature 1..20: note = chemically synthesized
  source 1..20: mol_type = other DNA
gtgtgtcaggtgtgtgtgtg

SEQ ID NO: 17779 - DNA, 20 bp, synthetic construct
  misc_feature 1..20: note = chemically synthesized
  source 1..20: mol_type = other DNA
tgtgtcaggtgtgtgtgtgt

SEQ ID NO: 17780 - DNA, 20 bp, synthetic construct
  misc_feature 1..20: note = chemically synthesized
  source 1..20: mol_type = other DNA
tgtcaggtgtgtgtgtgtgg

SEQ ID NO: 17781 - DNA, 20 bp, synthetic construct
  misc_feature 1..20: note = chemically synthesized
  source 1..20: mol_type = other DNA
gtcaggtgtgtgtgtgtggg

SEQ ID NO: 17782 - DNA, 20 bp, synthetic construct
  misc_feature 1..20: note = chemically synthesized
  source 1..20: mol_type = other DNA
tcaggtgtgtgtgtgtggga

SEQ ID NO: 17783 - DNA, 20 bp, synthetic construct
  misc_feature 1..20: note = chemically synthesized
  source 1..20: mol_type = other DNA
aggtgtgtgtgtgtgggagg

SEQ ID NO: 17784 - DNA, 20 bp, synthetic construct
  misc_feature 1..20: note = chemically synthesized
  source 1..20: mol_type = other DNA
gggagtatgaatgtgtgcat

SEQ ID NO: 17785 - DNA, 20 bp, synthetic construct
  misc_feature 1..20: note = chemically synthesized
  source 1..20: mol_type = other DNA
tagcatgcatatgcacatgt

SEQ ID NO: 17786 - DNA, 20 bp, synthetic construct
  misc_feature 1..20: note = chemically synthesized
  source 1..20: mol_type = other DNA
gcatgcatatgcacatgtga

SEQ ID NO: 17787 - DNA, 20 bp, synthetic construct
  misc_feature 1..20: note = chemically synthesized
  source 1..20: mol_type = other DNA
tgcatatgcacatgtgagag

SEQ ID NO: 17788 - DNA, 20 bp, synthetic construct
  misc_feature 1..20: note = chemically synthesized
  source 1..20: mol_type = other DNA
gcatatgcacatgtgagagt

SEQ ID NO: 17789 - DNA, 20 bp, synthetic construct
  misc_feature 1..20: note = chemically synthesized
  source 1..20: mol_type = other DNA
tgcacatgtgagagtgggta

SEQ ID NO: 17790 - DNA, 20 bp, synthetic construct
  misc_feature 1..20: note = chemically synthesized
  source 1..20: mol_type = other DNA
acatgtgagagtgggtacag

SEQ ID NO: 17791 - DNA, 20 bp, synthetic construct
  misc_feature 1..20: note = chemically synthesized
  source 1..20: mol_type = other DNA
atgtgagagtgggtacagca

SEQ ID NO: 17792 - DNA, 20 bp, synthetic construct
  misc_feature 1..20: note = chemically synthesized
  source 1..20: mol_type = other DNA
agagtgggtacagcagagcg

SEQ ID NO: 17793 - DNA, 20 bp, synthetic construct
  misc_feature 1..20: note = chemically synthesized
  source 1..20: mol_type = other DNA
gtacagcagagcgtggtcat

SEQ ID NO: 17794 - DNA, 20 bp, synthetic construct
  misc_feature 1..20: note = chemically synthesized
  source 1..20: mol_type = other DNA
gtgtgcaaatgtgtgttttt

SEQ ID NO: 17795 - DNA, 20 bp, synthetic construct
  misc_feature 1..20: note = chemically synthesized
  source 1..20: mol_type = other DNA
caaatgtgtgtttttgagtg

SEQ ID NO: 17796 - DNA, 20 bp, synthetic construct
  misc_feature 1..20: note = chemically synthesized
  source 1..20: mol_type = other DNA
tgtgtgtttttgagtgaagt

SEQ ID NO: 17797 - DNA, 20 bp, synthetic construct
  misc_feature 1..20: note = chemically synthesized
  source 1..20: mol_type = other DNA
gagtgaagtgagcaatgtgt

SEQ ID NO: 17798 - DNA, 20 bp, synthetic construct
  misc_feature 1..20: note = chemically synthesized
  source 1..20: mol_type = other DNA
tgagcaatgtgtgagtgtgt

SEQ ID NO: 17799 - DNA, 20 bp, synthetic construct
  misc_feature 1..20: note = chemically synthesized
  source 1..20: mol_type = other DNA
gtgagtgtgtgagtgtgtgt

SEQ ID NO: 17800 - DNA, 20 bp, synthetic construct
  misc_feature 1..20: note = chemically synthesized
  source 1..20: mol_type = other DNA
gtgagtgtgtgtgagtttgt

SEQ ID NO: 17801 - DNA, 20 bp, synthetic construct
  misc_feature 1..20: note = chemically synthesized
  source 1..20: mol_type = other DNA
tgagtgtgtgtgagtttgtg

SEQ ID NO: 17802 - DNA, 20 bp, synthetic construct
  misc_feature 1..20: note = chemically synthesized
  source 1..20: mol_type = other DNA
gagtgtgtgtgagtttgtga

SEQ ID NO: 17803 - DNA, 20 bp, synthetic construct
  misc_feature 1..20: note = chemically synthesized
  source 1..20: mol_type = other DNA
gggcatgtgaatgtgtgtgt

SEQ ID NO: 17804 - DNA, 20 bp, synthetic construct
  misc_feature 1..20: note = chemically synthesized
  source 1..20: mol_type = other DNA
aatgtgtgtgtcagtgctgt

SEQ ID NO: 17805 - DNA, 20 bp, synthetic construct
  misc_feature 1..20: note = chemically synthesized
  source 1..20: mol_type = other DNA
atgtgtgtgtcagtgctgtc

SEQ ID NO: 17806 - DNA, 20 bp, synthetic construct
  misc_feature 1..20: note = chemically synthesized
  source 1..20: mol_type = other DNA
tgtgtgtgtcagtgctgtca

SEQ ID NO: 17807 - DNA, 20 bp, synthetic construct
  misc_feature 1..20: note = chemically synthesized
  source 1..20: mol_type = other DNA
gtgtcagtgctgtcagggtg

SEQ ID NO: 17808 - DNA, 20 bp, synthetic construct
  misc_feature 1..20: note = chemically synthesized
  source 1..20: mol_type = other DNA
cagtgctgtcagggtgcaga

SEQ ID NO: 17809 - DNA, 20 bp, synthetic construct
  misc_feature 1..20: note = chemically synthesized
  source 1..20: mol_type = other DNA
tgtcagggtgcagatggatc

SEQ ID NO: 17810 - DNA, 20 bp, synthetic construct
  misc_feature 1..20: note = chemically synthesized
  source 1..20: mol_type = other DNA
gtcagggtgcagatggatca

SEQ ID NO: 17811 - DNA, 20 bp, synthetic construct
  misc_feature 1..20: note = chemically synthesized
  source 1..20: mol_type = other DNA
tcagggtgcagatggatcaa

SEQ ID NO: 17812 - DNA, 20 bp, synthetic construct
  misc_feature 1..20: note = chemically synthesized
  source 1..20: mol_type = other DNA
cagggtgcagatggatcaag

SEQ ID NO: 17813 - DNA, 20 bp, synthetic construct
  misc_feature 1..20: note = chemically synthesized
  source 1..20: mol_type = other DNA
ggtgcagatggatcaagggg

SEQ ID NO: 17814 - DNA, 20 bp, synthetic construct
  misc_feature 1..20: note = chemically synthesized
  source 1..20: mol_type = other DNA
gtgcagatggatcaaggggc

SEQ ID NO: 17815 - DNA, 20 bp, synthetic construct
  misc_feature 1..20: note = chemically synthesized
  source 1..20: mol_type = other DNA
gcagatggatcaaggggcag

SEQ ID NO: 17816 - DNA, 20 bp, synthetic construct
  misc_feature 1..20: note = chemically synthesized
  source 1..20: mol_type = other DNA
agatggatcaaggggcagga

SEQ ID NO: 17817 - DNA, 20 bp, synthetic construct
  misc_feature 1..20: note = chemically synthesized
  source 1..20: mol_type = other DNA
gatggatcaaggggcaggag

SEQ ID NO: 17818 - DNA, 20 bp, synthetic construct
  misc_feature 1..20: note = chemically synthesized
  source 1..20: mol_type = other DNA
ggggcaggagaggtacctgt

SEQ ID NO: 17819 - DNA, 20 bp, synthetic construct
  misc_feature 1..20: note = chemically synthesized
  source 1..20: mol_type = other DNA
aggtacctgtgagatgacct

SEQ ID NO: 17820 - DNA, 20 bp, synthetic construct
  misc_feature 1..20: note = chemically synthesized
  source 1..20: mol_type = other DNA
ggtacctgtgagatgacctc

SEQ ID NO: 17821 - DNA, 20 bp, synthetic construct
  misc_feature 1..20: note = chemically synthesized
  source 1..20: mol_type = other DNA
ctgtgagatgacctcgggct

SEQ ID NO: 17822 - DNA, 20 bp, synthetic construct
  misc_feature 1..20: note = chemically synthesized
  source 1..20: mol_type = other DNA
tgtgagatgacctcgggctg

SEQ ID NO: 17823 - DNA, 20 bp, synthetic construct
  misc_feature 1..20: note = chemically synthesized
  source 1..20: mol_type = other DNA
gtgagatgacctcgggctga

SEQ ID NO: 17824 - DNA, 20 bp, synthetic construct
  misc_feature 1..20: note = chemically synthesized
  source 1..20: mol_type = other DNA
tgagatgacctcgggctgag

SEQ ID NO: 17825 - DNA, 20 bp, synthetic construct
  misc_feature 1..20: note = chemically synthesized
  source 1..20: mol_type = other DNA
agatgacctcgggctgaggg

SEQ ID NO: 17826 - DNA, 20 bp, synthetic construct
  misc_feature 1..20: note = chemically synthesized
  source 1..20: mol_type = other DNA
cgggctgaggggagcaaatt

SEQ ID NO: 17827 - DNA, 20 bp, synthetic construct
  misc_feature 1..20: note = chemically synthesized
  source 1..20: mol_type = other DNA
tgaggggagcaaatttagtg

SEQ ID NO: 17828 - DNA, 20 bp, synthetic construct
  misc_feature 1..20: note = chemically synthesized
  source 1..20: mol_type = other DNA
gagcaaatttagtgtggaac

SEQ ID NO: 17829 - DNA, 20 bp, synthetic construct
  misc_feature 1..20: note = chemically synthesized
  source 1..20: mol_type = other DNA
agcaaatttagtgtggaacg

SEQ ID NO: 17830 - DNA, 20 bp, synthetic construct
  misc_feature 1..20: note = chemically synthesized
  source 1..20: mol_type = other DNA
ttagtgtggaacgaggtttc

SEQ ID NO: 17831 - DNA, 20 bp, synthetic construct
  misc_feature 1..20: note = chemically synthesized
  source 1..20: mol_type = other DNA
tagtgtggaacgaggtttct

SEQ ID NO: 17832 - DNA, 20 bp, synthetic construct
  misc_feature 1..20: note = chemically synthesized
  source 1..20: mol_type = other DNA
agtgtggaacgaggtttcta

SEQ ID NO: 17833 - DNA, 20 bp, synthetic construct
  misc_feature 1..20: note = chemically synthesized
  source 1..20: mol_type = other DNA
gtggaacgaggtttctaggg

SEQ ID NO: 17834 - DNA, 20 bp, synthetic construct
  misc_feature 1..20: note = chemically synthesized
  source 1..20: mol_type = other DNA
aacgaggtttctagggaagc

SEQ ID NO: 17835 - DNA, 20 bp, synthetic construct
  misc_feature 1..20: note = chemically synthesized
  source 1..20: mol_type = other DNA
acgaggtttctagggaagcg

SEQ ID NO: 17836 - DNA, 20 bp, synthetic construct
  misc_feature 1..20: note = chemically synthesized
  source 1..20: mol_type = other DNA
cgaggtttctagggaagcga

SEQ ID NO: 17837 - DNA, 20 bp, synthetic construct
  misc_feature 1..20: note = chemically synthesized
  source 1..20: mol_type = other DNA
tttctagggaagcgagggca

SEQ ID NO: 17838 - DNA, 20 bp, synthetic construct
  misc_feature 1..20: note = chemically synthesized
  source 1..20: mol_type = other DNA
ttctagggaagcgagggcaa

SEQ ID NO: 17839 - DNA, 20 bp, synthetic construct
  misc_feature 1..20: note = chemically synthesized
  source 1..20: mol_type = other DNA
tctagggaagcgagggcaaa

SEQ ID NO: 17840 - DNA, 20 bp, synthetic construct
  misc_feature 1..20: note = chemically synthesized
  source 1..20: mol_type = other DNA
gaagcgagggcaaagggcgc

SEQ ID NO: 17841 - DNA, 20 bp, synthetic construct
  misc_feature 1..20: note = chemically synthesized
  source 1..20: mol_type = other DNA
aagcgagggcaaagggcgct

SEQ ID NO: 17842 - DNA, 20 bp, synthetic construct
  misc_feature 1..20: note = chemically synthesized
  source 1..20: mol_type = other DNA
agcgagggcaaagggcgctg

SEQ ID NO: 17843 - DNA, 20 bp, synthetic construct
  misc_feature 1..20: note = chemically synthesized
  source 1..20: mol_type = other DNA
cgagggcaaagggcgctggg

SEQ ID NO: 17844 - DNA, 20 bp, synthetic construct
  misc_feature 1..20: note = chemically synthesized
  source 1..20: mol_type = other DNA
gagggcaaagggcgctgggg

SEQ ID NO: 17845 - DNA, 20 bp, synthetic construct
  misc_feature 1..20: note = chemically synthesized
  source 1..20: mol_type = other DNA
gggcaaagggcgctggggag

SEQ ID NO: 17846 - DNA, 20 bp, synthetic construct
  misc_feature 1..20: note = chemically synthesized
  source 1..20: mol_type = other DNA
ggcaaagggcgctggggagg

SEQ ID NO: 17847 - DNA, 20 bp, synthetic construct
  misc_feature 1..20: note = chemically synthesized
  source 1..20: mol_type = other DNA
gctggggaggaggccttgcg

SEQ ID NO: 17848 - DNA, 20 bp, synthetic construct
  misc_feature 1..20: note = chemically synthesized
  source 1..20: mol_type = other DNA
ggggaggaggccttgcgtgg

SEQ ID NO: 17849 - DNA, 20 bp, synthetic construct
  misc_feature 1..20: note = chemically synthesized
  source 1..20: mol_type = other DNA
gggaggaggccttgcgtggt

SEQ ID NO: 17850 - DNA, 20 bp, synthetic construct
  misc_feature 1..20: note = chemically synthesized
  source 1..20: mol_type = other DNA
ggaggaggccttgcgtggtg

SEQ ID NO: 17851 - DNA, 20 bp, synthetic construct
  misc_feature 1..20: note = chemically synthesized
  source 1..20: mol_type = other DNA
gaggaggccttgcgtggtgg

SEQ ID NO: 17852 - DNA, 20 bp, synthetic construct
  misc_feature 1..20: note = chemically synthesized
  source 1..20: mol_type = other DNA
ggccttgcgtggtgggggat

SEQ ID NO: 17853 - DNA, 20 bp, synthetic construct
  misc_feature 1..20: note = chemically synthesized
  source 1..20: mol_type = other DNA
gccttgcgtggtgggggatg

SEQ ID NO: 17854 - DNA, 20 bp, synthetic construct
  misc_feature 1..20: note = chemically synthesized
  source 1..20: mol_type = other DNA
gtggtgggggatgaggacaa

SEQ ID NO: 17855 - DNA, 20 bp, synthetic construct
  misc_feature 1..20: note = chemically synthesized
  source 1..20: mol_type = other DNA
tggtgggggatgaggacaac

SEQ ID NO: 17856 - DNA, 20 bp, synthetic construct
  misc_feature 1..20: note = chemically synthesized
  source 1..20: mol_type = other DNA
tgggggatgaggacaacagg

SEQ ID NO: 17857 - DNA, 20 bp, synthetic construct
  misc_feature 1..20: note = chemically synthesized
  source 1..20: mol_type = other DNA
gggggatgaggacaacaggt

SEQ ID NO: 17858 - DNA, 20 bp, synthetic construct
  misc_feature 1..20: note = chemically synthesized
  source 1..20: mol_type = other DNA
tgaggacaacaggtgggacc

SEQ ID NO: 17859 - DNA, 20 bp, synthetic construct
  misc_feature 1..20: note = chemically synthesized
  source 1..20: mol_type = other DNA
aggacaacaggtgggacctg

SEQ ID NO: 17860 - DNA, 20 bp, synthetic construct
  misc_feature 1..20: note = chemically synthesized
  source 1..20: mol_type = other DNA
ggacaacaggtgggacctgg

SEQ ID NO: 17861 - DNA, 20 bp, synthetic construct
  misc_feature 1..20: note = chemically synthesized
  source 1..20: mol_type = other DNA
gacaacaggtgggacctgga

SEQ ID NO: 17862 - DNA, 20 bp, synthetic construct
  misc_feature 1..20: note = chemically synthesized
  source 1..20: mol_type = other DNA
gggacctggagggttgtgct

SEQ ID NO: 17863 - DNA, 20 bp, synthetic construct
  misc_feature 1..20: note = chemically synthesized
  source 1..20: mol_type = other DNA
gacctggagggttgtgcttg

SEQ ID NO: 17864 - DNA, 20 bp, synthetic construct
  misc_feature 1..20: note = chemically synthesized
  source 1..20: mol_type = other DNA
cctggagggttgtgcttgga

SEQ ID NO: 17865 - DNA, 20 bp, synthetic construct
  misc_feature 1..20: note = chemically synthesized
  source 1..20: mol_type = other DNA
ggagggttgtgcttggagag

SEQ ID NO: 17866 - DNA, 20 bp, synthetic construct
  misc_feature 1..20: note = chemically synthesized
  source 1..20: mol_type = other DNA
gagggttgtgcttggagagt

SEQ ID NO: 17867 - DNA, 20 bp, synthetic construct
  misc_feature 1..20: note = chemically synthesized
  source 1..20: mol_type = other DNA
tgtgcttggagagtgggcta

SEQ ID NO: 17868 - DNA, 20 bp, synthetic construct
  misc_feature 1..20: note = chemically synthesized
  source 1..20: mol_type = other DNA
gcttggagagtgggctatgg

SEQ ID NO: 17869 - DNA, 20 bp, synthetic construct
  misc_feature 1..20: note = chemically synthesized
  source 1..20: mol_type = other DNA
tgggctatggtggaatgacc

SEQ ID NO: 17870 - DNA, 20 bp, synthetic construct
  misc_feature 1..20: note = chemically synthesized
  source 1..20: mol_type = other DNA
tggtggaatgacccagattt

SEQ ID NO: 17871 - DNA, 20 bp, synthetic construct
  misc_feature 1..20: note = chemically synthesized
  source 1..20: mol_type = other DNA
ggtggaatgacccagattta

SEQ ID NO: 17872 - DNA, 20 bp, synthetic construct
  misc_feature 1..20: note = chemically synthesized
  source 1..20: mol_type = other DNA
cccagatttaaggatctcaa

SEQ ID NO: 17873 - DNA, 20 bp, synthetic construct
  misc_feature 1..20: note = chemically synthesized
  source 1..20: mol_type = other DNA
taaggatctcaatggaattt

SEQ ID NO: 17874 - DNA, 20 bp, synthetic construct
  misc_feature 1..20: note = chemically synthesized
  source 1..20: mol_type = other DNA
ggatctcaatggaattttgg

SEQ ID NO: 17875 - DNA, 20 bp, synthetic construct
  misc_feature 1..20: note = chemically synthesized
  source 1..20: mol_type = other DNA
gatctcaatggaattttggc

SEQ ID NO: 17876 - DNA, 20 bp, synthetic construct
  misc_feature 1..20: note = chemically synthesized
  source 1..20: mol_type = other DNA
atctcaatggaattttggca

SEQ ID NO: 17877 - DNA, 20 bp, synthetic construct
  misc_feature 1..20: note = chemically synthesized
  source 1..20: mol_type = other DNA
tctcaatggaattttggcag

SEQ ID NO: 17878 - DNA, 20 bp, synthetic construct
  misc_feature 1..20: note = chemically synthesized
  source 1..20: mol_type = other DNA
tcaatggaattttggcaggg

SEQ ID NO: 17879 - DNA, 20 bp, synthetic construct
  misc_feature 1..20: note = chemically synthesized
  source 1..20: mol_type = other DNA
caatggaattttggcagggg

SEQ ID NO: 17880 - DNA, 20 bp, synthetic construct
  misc_feature 1..20: note = chemically synthesized
  source 1..20: mol_type = other DNA
aatggaattttggcagggga

SEQ ID NO: 17881 - DNA, 20 bp, synthetic construct
  misc_feature 1..20: note = chemically synthesized
  source 1..20: mol_type = other DNA
tggcaggggagggactgttc

SEQ ID NO: 17882 - DNA, 20 bp, synthetic construct
  misc_feature 1..20: note = chemically synthesized
  source 1..20: mol_type = other DNA
ggggagggactgttccagta

SEQ ID NO: 17883 - DNA, 20 bp, synthetic construct
  misc_feature 1..20: note = chemically synthesized
  source 1..20: mol_type = other DNA
gactgttccagtatggattt

SEQ ID NO: 17884 - DNA, 20 bp, synthetic construct
  misc_feature 1..20: note = chemically synthesized
  source 1..20: mol_type = other DNA
actgttccagtatggatttt

SEQ ID NO: 17885 - DNA, 20 bp, synthetic construct
  misc_feature 1..20: note = chemically synthesized
  source 1..20: mol_type = other DNA
gttccagtatggattttagg

SEQ ID NO: 17886 - DNA, 20 bp, synthetic construct
  misc_feature 1..20: note = chemically synthesized
  source 1..20: mol_type = other DNA
tatggattttaggaagaaca

SEQ ID NO: 17887 - DNA, 20 bp, synthetic construct
  misc_feature 1..20: note = chemically synthesized
  source 1..20: mol_type = other DNA
atggattttaggaagaacac

SEQ ID NO: 17888 - DNA, 20 bp, synthetic construct
  misc_feature 1..20: note = chemically synthesized
  source 1..20: mol_type = other DNA
tggattttaggaagaacaca

SEQ ID NO: 17889 - DNA, 20 bp, synthetic construct
  misc_feature 1..20: note = chemically synthesized
  source 1..20: mol_type = other DNA
tttaggaagaacacagggcc

SEQ ID NO: 17890 - DNA, 20 bp, synthetic construct
  misc_feature 1..20: note = chemically synthesized
  source 1..20: mol_type = other DNA
agaacacagggcccagcttc

SEQ ID NO: 17891 - DNA, 20 bp, synthetic construct
  misc_feature 1..20: note = chemically synthesized
  source 1..20: mol_type = other DNA
aacacagggcccagcttctg

SEQ ID NO: 17892 - DNA, 20 bp, synthetic construct
  misc_feature 1..20: note = chemically synthesized
  source 1..20: mol_type = other DNA
gcttctggagtctccaatct

SEQ ID NO: 17893 - DNA, 20 bp, synthetic construct
  misc_feature 1..20: note = chemically synthesized
  source 1..20: mol_type = other DNA
cttctggagtctccaatctg

SEQ ID NO: 17894 - DNA, 20 bp, synthetic construct
  misc_feature 1..20: note = chemically synthesized
  source 1..20: mol_type = other DNA
ttctggagtctccaatctga

SEQ ID NO: 17895 - DNA, 20 bp, synthetic construct
  misc_feature 1..20: note = chemically synthesized
  source 1..20: mol_type = other DNA
tctggagtctccaatctgag

SEQ ID NO: 17896 - DNA, 20 bp, synthetic construct
  misc_feature 1..20: note = chemically synthesized
  source 1..20: mol_type = other DNA
gagtctccaatctgagggga

SEQ ID NO: 17897 - DNA, 20 bp, synthetic construct
  misc_feature 1..20: note = chemically synthesized
  source 1..20: mol_type = other DNA
agtctccaatctgaggggac

SEQ ID NO: 17898 - DNA, 20 bp, synthetic construct
  misc_feature 1..20: note = chemically synthesized
  source 1..20: mol_type = other DNA
tctccaatctgaggggacag

SEQ ID NO: 17899 - DNA, 20 bp, synthetic construct
  misc_feature 1..20: note = chemically synthesized
  source 1..20: mol_type = other DNA
atctgaggggacaggagcct

SEQ ID NO: 17900 - DNA, 20 bp, synthetic construct
  misc_feature 1..20: note = chemically synthesized
  source 1..20: mol_type = other DNA
tgaggggacaggagccttag

SEQ ID NO: 17901 - DNA, 20 bp, synthetic construct
  misc_feature 1..20: note = chemically synthesized
  source 1..20: mol_type = other DNA
aggggacaggagccttagaa

SEQ ID NO: 17902 - DNA, 20 bp, synthetic construct
  misc_feature 1..20: note = chemically synthesized
  source 1..20: mol_type = other DNA
acaggagccttagaagagct

SEQ ID NO: 17903 - DNA, 20 bp, synthetic construct
  misc_feature 1..20: note = chemically synthesized
  source 1..20: mol_type = other DNA
gccttagaagagctgagact

SEQ ID NO: 17904 - DNA, 20 bp, synthetic construct
  misc_feature 1..20: note = chemically synthesized
  source 1..20: mol_type = other DNA
ccttagaagagctgagacta

SEQ ID NO: 17905 - DNA, 20 bp, synthetic construct
  misc_feature 1..20: note = chemically synthesized
  source 1..20: mol_type = other DNA
aagagctgagactaaggccc

SEQ ID NO: 17906 - DNA, 20 bp, synthetic construct
  misc_feature 1..20: note = chemically synthesized
  source 1..20: mol_type = other DNA
agagctgagactaaggcccg

SEQ ID NO: 17907 - DNA, 20 bp, synthetic construct
  misc_feature 1..20: note = chemically synthesized
  source 1..20: mol_type = other DNA
gactaaggcccgaggtgatc

SEQ ID NO: 17908 - DNA, 20 bp, synthetic construct
  misc_feature 1..20: note = chemically synthesized
  source 1..20: mol_type = other DNA
ctaaggcccgaggtgatctg

SEQ ID NO: 17909 - DNA, 20 bp, synthetic construct
  misc_feature 1..20: note = chemically synthesized
  source 1..20: mol_type = other DNA
taaggcccgaggtgatctgg

SEQ ID NO: 17910 - DNA, 20 bp, synthetic construct
  misc_feature 1..20: note = chemically synthesized
  source 1..20: mol_type = other DNA
gatctggaggcctctgccac

SEQ ID NO: 17911 - DNA, 20 bp, synthetic construct
  misc_feature 1..20: note = chemically synthesized
  source 1..20: mol_type = other DNA
tggaggcctctgccactggc

SEQ ID NO: 17912 - DNA, 20 bp, synthetic construct
  misc_feature 1..20: note = chemically synthesized
  source 1..20: mol_type = other DNA
ggcctctgccactggctgga

SEQ ID NO: 17913 - DNA, 20 bp, synthetic construct
  misc_feature 1..20: note = chemically synthesized
  source 1..20: mol_type = other DNA
gcctctgccactggctggat

SEQ ID NO: 17914 - DNA, 20 bp, synthetic construct
  misc_feature 1..20: note = chemically synthesized
  source 1..20: mol_type = other DNA
ctctgccactggctggatgg

SEQ ID NO: 17915 - DNA, 20 bp, synthetic construct
  misc_feature 1..20: note = chemically synthesized
  source 1..20: mol_type = other DNA
tctgccactggctggatggg

SEQ ID NO: 17916 - DNA, 20 bp, synthetic construct
  misc_feature 1..20: note = chemically synthesized
  source 1..20: mol_type = other DNA
gatgggaggaaaaccattca

SEQ ID NO: 17917 - DNA, 20 bp, synthetic construct
  misc_feature 1..20: note = chemically synthesized
  source 1..20: mol_type = other DNA
cattcacagatcccccttct

SEQ ID NO: 17918 - DNA, 20 bp, synthetic construct
  misc_feature 1..20: note = chemically synthesized
  source 1..20: mol_type = other DNA
attcacagatcccccttctc

SEQ ID NO: 17919 - DNA, 20 bp, synthetic construct
  misc_feature 1..20: note = chemically synthesized
  source 1..20: mol_type = other DNA
cccttctcaggatgtgtgcc

SEQ ID NO: 17920 - DNA, 20 bp, synthetic construct
  misc_feature 1..20: note = chemically synthesized
  source 1..20: mol_type = other DNA
ccttctcaggatgtgtgcct

SEQ ID NO: 17921 - DNA, 20 bp, synthetic construct
  misc_feature 1..20: note = chemically synthesized
  source 1..20: mol_type = other DNA
tctcaggatgtgtgcctagg

SEQ ID NO: 17922 - DNA, 20 bp, synthetic construct
  misc_feature 1..20: note = chemically synthesized
  source 1..20: mol_type = other DNA
ctcaggatgtgtgcctaggc

SEQ ID NO: 17923 - DNA, 20 bp, synthetic construct
  misc_feature 1..20: note = chemically synthesized
  source 1..20: mol_type = other DNA
tcaggatgtgtgcctaggca

SEQ ID NO: 17924 - DNA, 20 bp, synthetic construct
  misc_feature 1..20: note = chemically synthesized
  source 1..20: mol_type = other DNA
gatgtgtgcctaggcagggc

SEQ ID NO: 17925 - DNA, 20 bp, synthetic construct
  misc_feature 1..20: note = chemically synthesized
  source 1..20: mol_type = other DNA
atgtgtgcctaggcagggcc

SEQ ID NO: 17926 - DNA, 20 bp, synthetic construct
  misc_feature 1..20: note = chemically synthesized
  source 1..20: mol_type = other DNA
cccgccccctgtgcgtctcc

SEQ ID NO: 17927 - DNA, 20 bp, synthetic construct
  misc_feature 1..20: note = chemically synthesized
  source 1..20: mol_type = other DNA
ctgtgcgtctcccagtcccc

SEQ ID NO: 17928 - DNA, 20 bp, synthetic construct
  misc_feature 1..20: note = chemically synthesized
  source 1..20: mol_type = other DNA
gtctcccagtcccccagctc

SEQ ID NO: 17929 - DNA, 20 bp, synthetic construct
  misc_feature 1..20: note = chemically synthesized
  source 1..20: mol_type = other DNA
tctcccagtcccccagctcc

SEQ ID NO: 17930 - DNA, 20 bp, synthetic construct
  misc_feature 1..20: note = chemically synthesized
  source 1..20: mol_type = other DNA
agtcccccagctccaggatc

SEQ ID NO: 17931 - DNA, 20 bp, synthetic construct
  misc_feature 1..20: note = chemically synthesized
  source 1..20: mol_type = other DNA
gtcccccagctccaggatcc

SEQ ID NO: 17932 - DNA, 20 bp, synthetic construct
  misc_feature 1..20: note = chemically synthesized
  source 1..20: mol_type = other DNA
caggatccgggctttgcaca

SEQ ID NO: 17933 - DNA, 20 bp, synthetic construct
  misc_feature 1..20: note = chemically synthesized
  source 1..20: mol_type = other DNA
acagctgatgtgaatatcct

SEQ ID NO: 17934 - DNA, 20 bp, synthetic construct
  misc_feature 1..20: note = chemically synthesized
  source 1..20: mol_type = other DNA
aatatcctgagtcgtgtgca

SEQ ID NO: 17935 - DNA, 20 bp, synthetic construct
  misc_feature 1..20: note = chemically synthesized
  source 1..20: mol_type = other DNA
atatcctgagtcgtgtgcat

SEQ ID NO: 17936 - DNA, 20 bp, synthetic construct
  misc_feature 1..20: note = chemically synthesized
  source 1..20: mol_type = other DNA
gtgcatgggtgtgtgtgcac

SEQ ID NO: 17937 - DNA, 20 bp, synthetic construct
  misc_feature 1..20: note = chemically synthesized
  source 1..20: mol_type = other DNA
tgggtgtgtgtgcaccagat

SEQ ID NO: 17938 - DNA, 20 bp, synthetic construct
  misc_feature 1..20: note = chemically synthesized
  source 1..20: mol_type = other DNA
tgcgtgtgtatatttataca

SEQ ID NO: 17939 - DNA, 20 bp, synthetic construct
  misc_feature 1..20: note = chemically synthesized
  source 1..20: mol_type = other DNA
tatatttatacatggtaata

SEQ ID NO: 17940 - DNA, 20 bp, synthetic construct
  misc_feature 1..20: note = chemically synthesized
  source 1..20: mol_type = other DNA
atatttatacatggtaatat

SEQ ID NO: 17941 - DNA, 20 bp, synthetic construct
  misc_feature 1..20: note = chemically synthesized
  source 1..20: mol_type = other DNA
atacatggtaatatgggtgc

SEQ ID NO: 17942 - DNA, 20 bp, synthetic construct
  misc_feature 1..20: note = chemically synthesized
  source 1..20: mol_type = other DNA
taatatgggtgcgagtgtgt

SEQ ID NO: 17943 - DNA, 20 bp, synthetic construct
  misc_feature 1..20: note = chemically synthesized
  source 1..20: mol_type = other DNA
atatgggtgcgagtgtgtaa

SEQ ID NO: 17944 - DNA, 20 bp, synthetic construct
  misc_feature 1..20: note = chemically synthesized
  source 1..20: mol_type = other DNA
tgtgtgtaatgctcaaatgc

SEQ ID NO: 17945 - DNA, 20 bp, synthetic construct
  misc_feature 1..20: note = chemically synthesized
  source 1..20: mol_type = other DNA
gtgtgtaatgctcaaatgct

SEQ ID NO: 17946 - DNA, 20 bp, synthetic construct
  misc_feature 1..20: note = chemically synthesized
  source 1..20: mol_type = other DNA
tgtgtaatgctcaaatgctg

SEQ ID NO: 17947 - DNA, 20 bp, synthetic construct
  misc_feature 1..20: note = chemically synthesized
  source 1..20: mol_type = other DNA
atgctcaaatgctggggtca

SEQ ID NO: 17948 - DNA, 20 bp, synthetic construct
  misc_feature 1..20: note = chemically synthesized
  source 1..20: mol_type = other DNA
cctatgatgaccccccccca

SEQ ID NO: 17949 - DNA, 20 bp, synthetic construct
  misc_feature 1..20: note = chemically synthesized
  source 1..20: mol_type = other DNA
ccccaaccaatccccccgcc

SEQ ID NO: 17950 - DNA, 20 bp, synthetic construct
  misc_feature 1..20: note = chemically synthesized
  source 1..20: mol_type = other DNA
cccaaccaatccccccgccc

SEQ ID NO: 17951 - DNA, 20 bp, synthetic construct
  misc_feature 1..20: note = chemically synthesized
  source 1..20: mol_type = other DNA
ccgcccaggttatgcctcct

SEQ ID NO: 17952 - DNA, 20 bp, synthetic construct
  misc_feature 1..20: note = chemically synthesized
  source 1..20: mol_type = other DNA
cgcccaggttatgcctcctc

SEQ ID NO: 17953 - DNA, 20 bp, synthetic construct
  misc_feature 1..20: note = chemically synthesized
  source 1..20: mol_type = other DNA
ggttatgcctcctcaggctt

SEQ ID NO: 17954 - DNA, 20 bp, synthetic construct
  misc_feature 1..20: note = chemically synthesized
  source 1..20: mol_type = other DNA
ggtgccctgtctttaccctc

SEQ ID NO: 17955 - DNA, 20 bp, synthetic construct
  misc_feature 1..20: note = chemically synthesized
  source 1..20: mol_type = other DNA
accctccggctccccacacc

SEQ ID NO: 17956 - DNA, 20 bp, synthetic construct
  misc_feature 1..20: note = chemically synthesized
  source 1..20: mol_type = other DNA
ccctccggctccccacaccc

SEQ ID NO: 17957 - DNA, 20 bp, synthetic construct
  misc_feature 1..20: note = chemically synthesized
  source 1..20: mol_type = other DNA
gctccccacacccaggctgc

SEQ ID NO: 17958 - DNA, 20 bp, synthetic construct
  misc_feature 1..20: note = chemically synthesized
  source 1..20: mol_type = other DNA
ctcctgatgcccctctccca

SEQ ID NO: 17959 - DNA, 20 bp, synthetic construct
  misc_feature 1..20: note = chemically synthesized
  source 1..20: mol_type = other DNA
tcctgatgcccctctcccac

SEQ ID NO: 17960 - DNA, 20 bp, synthetic construct
  misc_feature 1..20: note = chemically synthesized
  source 1..20: mol_type = other DNA
cctgatgcccctctcccaca

SEQ ID NO: 17961 - DNA, 20 bp, synthetic construct
  misc_feature 1..20: note = chemically synthesized
  source 1..20: mol_type = other DNA
ccacagggccacctcctgcc

SEQ ID NO: 17962 - DNA, 20 bp, synthetic construct
  misc_feature 1..20: note = chemically synthesized
  source 1..20: mol_type = other DNA
gccacctcctgcccagcccc

SEQ ID NO: 17963 - DNA, 20 bp, synthetic construct
  misc_feature 1..20: note = chemically synthesized
  source 1..20: mol_type = other DNA
ctcctgcccagcccctggca

SEQ ID NO: 17964 - DNA, 20 bp, synthetic construct
  misc_feature 1..20: note = chemically synthesized
  source 1..20: mol_type = other DNA
ggcacagcgtctctgctcca

SEQ ID NO: 17965 - DNA, 20 bp, synthetic construct
  misc_feature 1..20: note = chemically synthesized
  source 1..20: mol_type = other DNA
ctctgctccatggtctgctt

SEQ ID NO: 17966 - DNA, 20 bp, synthetic construct
  misc_feature 1..20: note = chemically synthesized
  source 1..20: mol_type = other DNA
tgcttcagtctgcttgccct

SEQ ID NO: 17967 - DNA, 20 bp, synthetic construct
  misc_feature 1..20: note = chemically synthesized
  source 1..20: mol_type = other DNA
gagcttcaacatcctgctgc

SEQ ID NO: 17968 - DNA, 20 bp, synthetic construct
  misc_feature 1..20: note = chemically synthesized
  source 1..20: mol_type = other DNA
cttcaacatcctgctgctgg

SEQ ID NO: 17969 - DNA, 20 bp, synthetic construct
  misc_feature 1..20: note = chemically synthesized
  source 1..20: mol_type = other DNA
ctggtggtcatctgtgtgac

SEQ ID NO: 17970 - DNA, 20 bp, synthetic construct
  misc_feature 1..20: note = chemically synthesized
  source 1..20: mol_type = other DNA
tggtggtcatctgtgtgact

SEQ ID NO: 17971 - DNA, 20 bp, synthetic construct
  misc_feature 1..20: note = chemically synthesized
  source 1..20: mol_type = other DNA
atctgtgtgactgggtccca

SEQ ID NO: 17972 - DNA, 20 bp, synthetic construct
  misc_feature 1..20: note = chemically synthesized
  source 1..20: mol_type = other DNA
gtgtgactgggtcccaaagt

SEQ ID NO: 17973 - DNA, 20 bp, synthetic construct
  misc_feature 1..20: note = chemically synthesized
  source 1..20: mol_type = other DNA
tgtgactgggtcccaaagtg

SEQ ID NO: 17974 - DNA, 20 bp, synthetic construct
  misc_feature 1..20: note = chemically synthesized
  source 1..20: mol_type = other DNA
gtgactgggtcccaaagtga

SEQ ID NO: 17975 - DNA, 20 bp, synthetic construct
  misc_feature 1..20: note = chemically synthesized
  source 1..20: mol_type = other DNA
gggtcccaaagtgagggtca

SEQ ID NO: 17976 - DNA, 20 bp, synthetic construct
  misc_feature 1..20: note = chemically synthesized
  source 1..20: mol_type = other DNA
ggtcccaaagtgagggtcac

SEQ ID NO: 17977 - DNA, 20 bp, synthetic construct
  misc_feature 1..20: note = chemically synthesized
  source 1..20: mol_type = other DNA
gtcccaaagtgagggtcacg

SEQ ID NO: 17978 - DNA, 20 bp, synthetic construct
  misc_feature 1..20: note = chemically synthesized
  source 1..20: mol_type = other DNA
tcccaaagtgagggtcacgg

SEQ ID NO: 17979 - DNA, 20 bp, synthetic construct
  misc_feature 1..20: note = chemically synthesized
  source 1..20: mol_type = other DNA
aaagtgagggtcacgggggc

SEQ ID NO: 17980 - DNA, 20 bp, synthetic construct
  misc_feature 1..20: note = chemically synthesized
  source 1..20: mol_type = other DNA
gtgagggtcacgggggccag

SEQ ID NO: 17981 - DNA, 20 bp, synthetic construct
  misc_feature 1..20: note = chemically synthesized
  source 1..20: mol_type = other DNA
tgagggtcacgggggccagc

SEQ ID NO: 17982 - DNA, 20 bp, synthetic construct
  misc_feature 1..20: note = chemically synthesized
  source 1..20: mol_type = other DNA
gagggtcacgggggccagca

SEQ ID NO: 17983 - DNA, 20 bp, synthetic construct
  misc_feature 1..20: note = chemically synthesized
  source 1..20: mol_type = other DNA
gtcacgggggccagcaggga

SEQ ID NO: 17984 - DNA, 20 bp, synthetic construct
  misc_feature 1..20: note = chemically synthesized
  source 1..20: mol_type = other DNA
tcacgggggccagcagggat

SEQ ID NO: 17985 - DNA, 20 bp, synthetic construct
  misc_feature 1..20: note = chemically synthesized
  source 1..20: mol_type = other DNA
gggggccagcagggatgggc

SEQ ID NO: 17986 - DNA, 20 bp, synthetic construct
  misc_feature 1..20: note = chemically synthesized
  source 1..20: mol_type = other DNA
ggggccagcagggatgggca

SEQ ID NO: 17987 - DNA, 20 bp, synthetic construct
  misc_feature 1..20: note = chemically synthesized
  source 1..20: mol_type = other DNA
gggccagcagggatgggcaa

SEQ ID NO: 17988 - DNA, 20 bp, synthetic construct
  misc_feature 1..20: note = chemically synthesized
  source 1..20: mol_type = other DNA
ggccagcagggatgggcaag

SEQ ID NO: 17989 - DNA, 20 bp, synthetic construct
  misc_feature 1..20: note = chemically synthesized
  source 1..20: mol_type = other DNA
cagcagggatgggcaagggg

SEQ ID NO: 17990 - DNA, 20 bp, synthetic construct
  misc_feature 1..20: note = chemically synthesized
  source 1..20: mol_type = other DNA
agcagggatgggcaaggggt

SEQ ID NO: 17991 - DNA, 20 bp, synthetic construct
  misc_feature 1..20: note = chemically synthesized
  source 1..20: mol_type = other DNA
gcagggatgggcaaggggta

SEQ ID NO: 17992 - DNA, 20 bp, synthetic construct
  misc_feature 1..20: note = chemically synthesized
  source 1..20: mol_type = other DNA
ggatgggcaaggggtaggga

SEQ ID NO: 17993 - DNA, 20 bp, synthetic construct
  misc_feature 1..20: note = chemically synthesized
  source 1..20: mol_type = other DNA
atgggcaaggggtagggaaa

SEQ ID NO: 17994 - DNA, 20 bp, synthetic construct
  misc_feature 1..20: note = chemically synthesized
  source 1..20: mol_type = other DNA
aaggggtagggaaagagaca

SEQ ID NO: 17995 - DNA, 20 bp, synthetic construct
  misc_feature 1..20: note = chemically synthesized
  source 1..20: mol_type = other DNA
aggggtagggaaagagacat

SEQ ID NO: 17996 - DNA, 20 bp, synthetic construct
  misc_feature 1..20: note = chemically synthesized
  source 1..20: mol_type = other DNA
ggtagggaaagagacatggg

SEQ ID NO: 17997 - DNA, 20 bp, synthetic construct
  misc_feature 1..20: note = chemically synthesized
  source 1..20: mol_type = other DNA
agggaaagagacatgggcag

SEQ ID NO: 17998 - DNA, 20 bp, synthetic construct
  misc_feature 1..20: note = chemically synthesized
  source 1..20: mol_type = other DNA
acacagatgaccaccagcag

SEQ ID NO: 17999 - DNA, 20 bp, synthetic construct
  misc_feature 1..20: note = chemically synthesized
  source 1..20: mol_type = other DNA
gggcatcaggagccggcagc

SEQ ID NO: 18000 - DNA, 20 bp, synthetic construct
  misc_feature 1..20: note = chemically synthesized
  source 1..20: mol_type = other DNA
agcctgggtgtggggagccg

SEQ ID NO: 18001 - DNA, 20 bp, synthetic construct
  misc_feature 1..20: note = chemically synthesized
  source 1..20: mol_type = other DNA
aggaggcataacctgggcgg

SEQ ID NO: 18002 - DNA, 20 bp, synthetic construct
  misc_feature 1..20: note = chemically synthesized
  source 1..20: mol_type = other DNA
gattggttggggccatgggg

SEQ ID NO: 18003 - DNA, 20 bp, synthetic construct
  misc_feature 1..20: note = chemically synthesized
  source 1..20: mol_type = other DNA
acacacccatgcacacgact

SEQ ID NO: 18004 - DNA, 20 bp, synthetic construct
  misc_feature 1..20: note = chemically synthesized
  source 1..20: mol_type = other DNA
acatcagctgtgtgcaaagc

SEQ ID NO: 18005 - DNA, 20 bp, synthetic construct
  misc_feature 1..20: note = chemically synthesized
  source 1..20: mol_type = other DNA
taggcacacatcctgagaag

SEQ ID NO: 18006 - DNA, 20 bp, synthetic construct
  misc_feature 1..20: note = chemically synthesized
  source 1..20: mol_type = other DNA
catcctgagaagggggatct

SEQ ID NO: 18007 - DNA, 20 bp, synthetic construct
  misc_feature 1..20: note = chemically synthesized
  source 1..20: mol_type = other DNA
ttccattgagatccttaaat

SEQ ID NO: 18008 - DNA, 20 bp, synthetic construct
  misc_feature 1..20: note = chemically synthesized
  source 1..20: mol_type = other DNA
gggaggctcagtcaggggcc

SEQ ID NO: 18009 - DNA, 20 bp, synthetic construct
  misc_feature 1..20: note = chemically synthesized
  source 1..20: mol_type = other DNA
ggtcacttcctgccactgtc

SEQ ID NO: 18010 - DNA, 20 bp, synthetic construct
  misc_feature 1..20: note = chemically synthesized
  source 1..20: mol_type = other DNA
accaagctggccctccatgg

SEQ ID NO: 18011 - DNA, 20 bp, synthetic construct
  misc_feature 1..20: note = chemically synthesized
  source 1..20: mol_type = other DNA
tcttcagcaccctccactca

SEQ ID NO: 18012 - DNA, 20 bp, synthetic construct
  misc_feature 1..20: note = chemically synthesized
  source 1..20: mol_type = other DNA
cgacttatcaactcccaatg

SEQ ID NO: 18013 - DNA, 20 bp, synthetic construct
  misc_feature 1..20: note = chemically synthesized
  source 1..20: mol_type = other DNA
ccctgaaaccagactgccca

SEQ ID NO: 18014 - DNA, 20 bp, synthetic construct
  misc_feature 1..20: note = chemically synthesized
  source 1..20: mol_type = other DNA
tcacagtcgtagctacccga

SEQ ID NO: 18015 - DNA, 20 bp, synthetic construct
  misc_feature 1..20: note = chemically synthesized
  source 1..20: mol_type = other DNA
tagctacccgattggattgc

SEQ ID NO: 18016 - DNA, 20 bp, synthetic construct
  misc_feature 1..20: note = chemically synthesized
  source 1..20: mol_type = other DNA
tggattgctcggataattag

SEQ ID NO: 18017 - DNA, 20 bp, synthetic construct
  misc_feature 1..20: note = chemically synthesized
  source 1..20: mol_type = other DNA
aaaagtttgaacataaaaga

SEQ ID NO: 18018 - DNA, 20 bp, synthetic construct
  misc_feature 1..20: note = chemically synthesized
  source 1..20: mol_type = other DNA
cagggtctgcccaagatggg

SEQ ID NO: 18019 - DNA, 20 bp, synthetic construct
  misc_feature 1..20: note = chemically synthesized
  source 1..20: mol_type = other DNA
actctggacatcaggcaagg

SEQ ID NO: 18020 - DNA, 20 bp, synthetic construct
  misc_feature 1..20: note = chemically synthesized
  source 1..20: mol_type = other DNA
aggaggagtaaagatccctg

SEQ ID NO: 18021 - DNA, 20 bp, synthetic construct
  misc_feature 1..20: note = chemically synthesized
  source 1..20: mol_type = other DNA
accccagcttactgtttgga

SEQ ID NO: 18022 - DNA, 20 bp, synthetic construct
  misc_feature 1..20: note = chemically synthesized
  source 1..20: mol_type = other DNA
cacgttgaggagatggagct

SEQ ID NO: 18023 - DNA, 20 bp, synthetic construct
  misc_feature 1..20: note = chemically synthesized
  source 1..20: mol_type = other DNA
ccgaggagaccaaaacaatt

SEQ ID NO: 18024 - DNA, 20 bp, synthetic construct
  misc_feature 1..20: note = chemically synthesized
  source 1..20: mol_type = other DNA
caaagctcaagaacatttag

SEQ ID NO: 18025 - DNA, 20 bp, synthetic construct
  misc_feature 1..20: note = chemically synthesized
  source 1..20: mol_type = other DNA
aaaagagatccagaactgac

SEQ ID NO: 18026 - DNA, 20 bp, synthetic construct
  misc_feature 1..20: note = chemically synthesized
  source 1..20: mol_type = other DNA
tccagaactgacacggatgc

SEQ ID NO: 18027 - DNA, 20 bp, synthetic construct
  misc_feature 1..20: note = chemically synthesized
  source 1..20: mol_type = other DNA
ggatgctagaattagcaggc

SEQ ID NO: 18028 - DNA, 20 bp, synthetic construct
  misc_feature 1..20: note = chemically synthesized
  source 1..20: mol_type = other DNA
attatgttcaaaaaattaag

SEQ ID NO: 18029 - DNA, 20 bp, synthetic construct
  misc_feature 1..20: note = chemically synthesized
  source 1..20: mol_type = other DNA
aaaaattaagtagaattgtg

SEQ ID NO: 18030 - DNA, 20 bp, synthetic construct
  misc_feature 1..20: note = chemically synthesized
  source 1..20: mol_type = other DNA
tagaattgtggaggatattt

SEQ ID NO: 18031 - DNA, 20 bp, synthetic construct
  misc_feature 1..20: note = chemically synthesized
  source 1..20: mol_type = other DNA
caggcgccgtggctcacgcc

SEQ ID NO: 18032 - DNA, 20 bp, synthetic construct
  misc_feature 1..20: note = chemically synthesized
  source 1..20: mol_type = other DNA
tactcgggaggctgaggcag

SEQ ID NO: 18033 - DNA, 20 bp, synthetic construct
  misc_feature 1..20: note = chemically synthesized
  source 1..20: mol_type = other DNA
gaaagaaaagaaaaaacaca

SEQ ID NO: 18034 - DNA, 20 bp, synthetic construct
  misc_feature 1..20: note = chemically synthesized
  source 1..20: mol_type = other DNA
aaaatttagggccaggcact

SEQ ID NO: 18035 - DNA, 20 bp, synthetic construct
  misc_feature 1..20: note = chemically synthesized
  source 1..20: mol_type = other DNA
ctttgggaggtcgacacggg

SEQ ID NO: 18036 - DNA, 20 bp, synthetic construct
  misc_feature 1..20: note = chemically synthesized
  source 1..20: mol_type = other DNA
tacctgggaggctgaagtgg

SEQ ID NO: 18037 - DNA, 20 bp, synthetic construct
  misc_feature 1..20: note = chemically synthesized
  source 1..20: mol_type = other DNA
cccaggaggtggaggccaca

SEQ ID NO: 18038 - DNA, 20 bp, synthetic construct
  misc_feature 1..20: note = chemically synthesized
  source 1..20: mol_type = other DNA
ctgcattccagcctgggcaa

SEQ ID NO: 18039 - DNA, 20 bp, synthetic construct
  misc_feature 1..20: note = chemically synthesized
  source 1..20: mol_type = other DNA
aatgaaacactgggagaaaa

SEQ ID NO: 18040 - DNA, 20 bp, synthetic construct
  misc_feature 1..20: note = chemically synthesized
  source 1..20: mol_type = other DNA
aaagaattaaaaaatggaaa

SEQ ID NO: 18041 - DNA, 20 bp, synthetic construct
  misc_feature 1..20: note = chemically synthesized
  source 1..20: mol_type = other DNA
aattaaaaaatggaaagaga

SEQ ID NO: 18042 - DNA, 20 bp, synthetic construct
  misc_feature 1..20: note = chemically synthesized
  source 1..20: mol_type = other DNA
tgaaatctttaaaagaaaaa

SEQ ID NO: 18043 - DNA, 20 bp, synthetic construct
  misc_feature 1..20: note = chemically synthesized
  source 1..20: mol_type = other DNA
agcagcatcccgtattctct

SEQ ID NO: 18044 - DNA, 20 bp, synthetic construct
  misc_feature 1..20: note = chemically synthesized
  source 1..20: mol_type = other DNA
ctctgagtgttcactatgta

SEQ ID NO: 18045 - DNA, 20 bp, synthetic construct
  misc_feature 1..20: note = chemically synthesized
  source 1..20: mol_type = other DNA
accgggtgccgtgtgggcac

SEQ ID NO: 18046 - DNA, 20 bp, synthetic construct
  misc_feature 1..20: note = chemically synthesized
  source 1..20: mol_type = other DNA
tgggcactggagttgcagag

SEQ ID NO: 18047 - DNA, 20 bp, synthetic construct
  misc_feature 1..20: note = chemically synthesized
  source 1..20: mol_type = other DNA
aggagatgctactggtgttc

SEQ ID NO: 18048 - DNA, 20 bp, synthetic construct
  misc_feature 1..20: note = chemically synthesized
  source 1..20: mol_type = other DNA
tccctcggttggccagcctc

SEQ ID NO: 18049 - DNA, 20 bp, synthetic construct
  misc_feature 1..20: note = chemically synthesized
  source 1..20: mol_type = other DNA
gttggccagcctcaggaatg

SEQ ID NO: 18050 - DNA, 20 bp, synthetic construct
  misc_feature 1..20: note = chemically synthesized
  source 1..20: mol_type = other DNA
tacttgggaggctgaggtgg

SEQ ID NO: 18051 - DNA, 20 bp, synthetic construct
  misc_feature 1..20: note = chemically synthesized
  source 1..20: mol_type = other DNA
tgggaggatggcttgagccc

SEQ ID NO: 18052 - DNA, 20 bp, synthetic construct
  misc_feature 1..20: note = chemically synthesized
  source 1..20: mol_type = other DNA
tcagtcaagatttattacag

SEQ ID NO: 18053 - DNA, 20 bp, synthetic construct
  misc_feature 1..20: note = chemically synthesized
  source 1..20: mol_type = other DNA
tattacagaaggatccaggg

SEQ ID NO: 18054 - DNA, 20 bp, synthetic construct
  misc_feature 1..20: note = chemically synthesized
  source 1..20: mol_type = other DNA
tcttgggagatgagaggagc

SEQ ID NO: 18055 - DNA, 20 bp, synthetic construct
  misc_feature 1..20: note = chemically synthesized
  source 1..20: mol_type = other DNA
tgagaggagcagggatcttc

SEQ ID NO: 18056 - DNA, 20 bp, synthetic construct
  misc_feature 1..20: note = chemically synthesized
  source 1..20: mol_type = other DNA
cattcactcacacacacaca

SEQ ID NO: 18057 - DNA, 20 bp, synthetic construct
  misc_feature 1..20: note = chemically synthesized
  source 1..20: mol_type = other DNA
acacacacacagagtcccag

SEQ ID NO: 18058 - DNA, 20 bp, synthetic construct
  misc_feature 1..20: note = chemically synthesized
  source 1..20: mol_type = other DNA
catacgaggcacatgtgttc

SEQ ID NO: 18059 - DNA, 20 bp, synthetic construct
  misc_feature 1..20: note = chemically synthesized
  source 1..20: mol_type = other DNA
cctctggcacatgcctttcc

SEQ ID NO: 18060 - DNA, 20 bp, synthetic construct
  misc_feature 1..20: note = chemically synthesized
  source 1..20: mol_type = other DNA
acatgcctttcctggggtcc

SEQ ID NO: 18061 - DNA, 20 bp, synthetic construct
  misc_feature 1..20: note = chemically synthesized
  source 1..20: mol_type = other DNA
ggtgaggtgagggaacaagc

SEQ ID NO: 18062 - DNA, 20 bp, synthetic construct
  misc_feature 1..20: note = chemically synthesized
  source 1..20: mol_type = other DNA
ccctcctcagtccctgttca

SEQ ID NO: 18063 - DNA, 20 bp, synthetic construct
  misc_feature 1..20: note = chemically synthesized
  source 1..20: mol_type = other DNA
cctcagtccctgttcacaga

SEQ ID NO: 18064 - DNA, 20 bp, synthetic construct
  misc_feature 1..20: note = chemically synthesized
  source 1..20: mol_type = other DNA
tgcacacttgcctttcaaaa

SEQ ID NO: 18065 - DNA, 20 bp, synthetic construct
  misc_feature 1..20: note = chemically synthesized
  source 1..20: mol_type = other DNA
caaaaatggatttcctctcc

SEQ ID NO: 18066 - DNA, 20 bp, synthetic construct
  misc_feature 1..20: note = chemically synthesized
  source 1..20: mol_type = other DNA
cctctcctgggattcagcct

SEQ ID NO: 18067 - DNA, 20 bp, synthetic construct
  misc_feature 1..20: note = chemically synthesized
  source 1..20: mol_type = other DNA
tggcccctcaccttgatgga

SEQ ID NO: 18068 - DNA, 20 bp, synthetic construct
  misc_feature 1..20: note = chemically synthesized
  source 1..20: mol_type = other DNA
ttttcctccgagctcagctg

SEQ ID NO: 18069 - DNA, 20 bp, synthetic construct
  misc_feature 1..20: note = chemically synthesized
  source 1..20: mol_type = other DNA
attcacgtggaggttgatgg

SEQ ID NO: 18070 - DNA, 20 bp, synthetic construct
  misc_feature 1..20: note = chemically synthesized
  source 1..20: mol_type = other DNA
gttgatggtgggatggaacg

SEQ ID NO: 18071 - DNA, 20 bp, synthetic construct
  misc_feature 1..20: note = chemically synthesized
  source 1..20: mol_type = other DNA
gggatggaacgcagggtcgg

SEQ ID NO: 18072 - DNA, 20 bp, synthetic construct
  misc_feature 1..20: note = chemically synthesized
  source 1..20: mol_type = other DNA
aacgcagggtcggaggggtt

SEQ ID NO: 18073 - DNA, 20 bp, synthetic construct
  misc_feature 1..20: note = chemically synthesized
  source 1..20: mol_type = other DNA
gaggggttcggggtggtggc

SEQ ID NO: 18074 - DNA, 20 bp, synthetic construct
  misc_feature 1..20: note = chemically synthesized
  source 1..20: mol_type = other DNA
gttcggggtggtggcctggg

SEQ ID NO: 18075 - DNA, 20 bp, synthetic construct
  misc_feature 1..20: note = chemically synthesized
  source 1..20: mol_type = other DNA
atcccaccatcaacctccac

SEQ ID NO: 18076 - DNA, 20 bp, synthetic construct
  misc_feature 1..20: note = chemically synthesized
  source 1..20: mol_type = other DNA
aggggccaggcactcgcagg

SEQ ID NO: 18077 - DNA, 20 bp, synthetic construct
  misc_feature 1..20: note = chemically synthesized
  source 1..20: mol_type = other DNA
tgtgcacgtatgtgcatatg

SEQ ID NO: 18078 - DNA, 20 bp, synthetic construct
  misc_feature 1..20: note = chemically synthesized
  source 1..20: mol_type = other DNA
ctgggactctgtgtgtgtgt

SEQ ID NO: 18079 - DNA, 20 bp, synthetic construct
  misc_feature 1..20: note = chemically synthesized
  source 1..20: mol_type = other DNA
gactctgtgtgtgtgtgtga

SEQ ID NO: 18080 - DNA, 20 bp, synthetic construct
  misc_feature 1..20: note = chemically synthesized
  source 1..20: mol_type = other DNA
tgtgtatgtcgtgtatgtga

SEQ ID NO: 18081 - DNA, 20 bp, synthetic construct
  misc_feature 1..20: note = chemically synthesized
  source 1..20: mol_type = other DNA
tgagagggtatgttgtgtgt

SEQ ID NO: 18082 - DNA, 20 bp, synthetic construct
  misc_feature 1..20: note = chemically synthesized
  source 1..20: mol_type = other DNA
gtgttgtgtgtgtatgttgt

SEQ ID NO: 18083 - DNA, 20 bp, synthetic construct
  misc_feature 1..20: note = chemically synthesized
  source 1..20: mol_type = other DNA
atgttgtgtgtatcttgtgt

SEQ ID NO: 18084 - DNA, 20 bp, synthetic construct
  misc_feature 1..20: note = chemically synthesized
  source 1..20: mol_type = other DNA
tgtgcatgtgtgtatgttgt

SEQ ID NO: 18085 - DNA, 20 bp, synthetic construct
  misc_feature 1..20: note = chemically synthesized
  source 1..20: mol_type = other DNA
tgcgagtgtatgttgtgtat

SEQ ID NO: 18086 - DNA, 20 bp, synthetic construct
  misc_feature 1..20: note = chemically synthesized
  source 1..20: mol_type = other DNA
tgtgtgtatgtatgttgtgt

SEQ ID NO: 18087 - DNA, 20 bp, synthetic construct
  misc_feature 1..20: note = chemically synthesized
  source 1..20: mol_type = other DNA
gtgttgtgtgtgtgtattgt

SEQ ID NO: 18088 - DNA, 20 bp, synthetic construct
  misc_feature 1..20: note = chemically synthesized
  source 1..20: mol_type = other DNA
tatgtatgtttgtgtgttgt

SEQ ID NO: 18089 - DNA, 20 bp, synthetic construct
  misc_feature 1..20: note = chemically synthesized
  source 1..20: mol_type = other DNA
tgtgcgtgtgtgtatgttgt

SEQ ID NO: 18090 - DNA, 20 bp, synthetic construct
  misc_feature 1..20: note = chemically synthesized
  source 1..20: mol_type = other DNA
gtgtgttgtgtgtgtatgtt

SEQ ID NO: 18091 - DNA, 20 bp, synthetic construct
  misc_feature 1..20: note = chemically synthesized
  source 1..20: mol_type = other DNA
gtgttatgtatgttgtgtgt

SEQ ID NO: 18092 - DNA, 20 bp, synthetic construct
  misc_feature 1..20: note = chemically synthesized
  source 1..20: mol_type = other DNA
tgtgtgtgtgagtgtgttgc

SEQ ID NO: 18093 - DNA, 20 bp, synthetic construct
  misc_feature 1..20: note = chemically synthesized
  source 1..20: mol_type = other DNA
tgtgtgtgtgtgtgtagagg

SEQ ID NO: 18094 - DNA, 20 bp, synthetic construct
  misc_feature 1..20: note = chemically synthesized
  source 1..20: mol_type = other DNA
tgtgtgtgtgtagaggtggg

SEQ ID NO: 18095 - DNA, 20 bp, synthetic construct
  misc_feature 1..20: note = chemically synthesized
  source 1..20: mol_type = other DNA
tgtgtagaggtggggtgagt

SEQ ID NO: 18096 - DNA, 20 bp, synthetic construct
  misc_feature 1..20: note = chemically synthesized
  source 1..20: mol_type = other DNA
tagaggtggggtgagttggg

SEQ ID NO: 18097 - DNA, 20 bp, synthetic construct
  misc_feature 1..20: note = chemically synthesized
  source 1..20: mol_type = other DNA
tcatctcccaagacccttcc

SEQ ID NO: 18098 - DNA, 20 bp, synthetic construct
  misc_feature 1..20: note = chemically synthesized
  source 1..20: mol_type = other DNA
gacattttttttttagagac

SEQ ID NO: 18099 - DNA, 20 bp, synthetic construct
  misc_feature 1..20: note = chemically synthesized
  source 1..20: mol_type = other DNA
tagagacaggagtgtagtgg

SEQ ID NO: 18100 - DNA, 20 bp, synthetic construct
  misc_feature 1..20: note = chemically synthesized
  source 1..20: mol_type = other DNA
aaaaaaattttttagagaaa

SEQ ID NO: 18101 - DNA, 20 bp, synthetic construct
  misc_feature 1..20: note = chemically synthesized
  source 1..20: mol_type = other DNA
taggcagaagggcaagagcc

SEQ ID NO: 18102 - DNA, 20 bp, synthetic construct
  misc_feature 1..20: note = chemically synthesized
  source 1..20: mol_type = other DNA
agggcaagagccaggaatgg

SEQ ID NO: 18103 - DNA, 20 bp, synthetic construct
  misc_feature 1..20: note = chemically synthesized
  source 1..20: mol_type = other DNA
aatggaggagtgtcaggtgt

SEQ ID NO: 18104 - DNA, 20 bp, synthetic construct
  misc_feature 1..20: note = chemically synthesized
  source 1..20: mol_type = other DNA
tgtgggtgctggtggtggag

SEQ ID NO: 18105 - DNA, 20 bp, synthetic construct
  misc_feature 1..20: note = chemically synthesized
  source 1..20: mol_type = other DNA
aggggcttggagcttaggaa

SEQ ID NO: 18106 - DNA, 20 bp, synthetic construct
  misc_feature 1..20: note = chemically synthesized
  source 1..20: mol_type = other DNA
aggggattggttagctgggc

SEQ ID NO: 18107 - DNA, 20 bp, synthetic construct
  misc_feature 1..20: note = chemically synthesized
  source 1..20: mol_type = other DNA
agggcagggcaggggacagg

SEQ ID NO: 18108 - DNA, 20 bp, synthetic construct
  misc_feature 1..20: note = chemically synthesized
  source 1..20: mol_type = other DNA
gtacatagtgaacactcaga

SEQ ID NO: 18109 - DNA, 20 bp, synthetic construct
  misc_feature 1..20: note = chemically synthesized
  source 1..20: mol_type = other DNA
gtgaacactcagagagaata

SEQ ID NO: 18110 - DNA, 20 bp, synthetic construct
  misc_feature 1..20: note = chemically synthesized
  source 1..20: mol_type = other DNA
agagagaatacgggatgctg

SEQ ID NO: 18111 - DNA, 20 bp, synthetic construct
  misc_feature 1..20: note = chemically synthesized
  source 1..20: mol_type = other DNA
gggatgctgctgaatcttct

SEQ ID NO: 18112 - DNA, 20 bp, synthetic construct
  misc_feature 1..20: note = chemically synthesized
  source 1..20: mol_type = other DNA
gctgaatcttctgagggtga

SEQ ID NO: 18113 - DNA, 20 bp, synthetic construct
  misc_feature 1..20: note = chemically synthesized
  source 1..20: mol_type = other DNA
cttctgagggtgacagaatt

SEQ ID NO: 18114 - DNA, 20 bp, synthetic construct
  misc_feature 1..20: note = chemically synthesized
  source 1..20: mol_type = other DNA
caggaggcttggagagaggc

SEQ ID NO: 18115 - DNA, 20 bp, synthetic construct
  misc_feature 1..20: note = chemically synthesized
  source 1..20: mol_type = other DNA
aggatttctgaaattaatgg

SEQ ID NO: 18116 - DNA, 20 bp, synthetic construct
  misc_feature 1..20: note = chemically synthesized
  source 1..20: mol_type = other DNA
taatgggagagtgagctcac

SEQ ID NO: 18117 - DNA, 20 bp, synthetic construct
  misc_feature 1..20: note = chemically synthesized
  source 1..20: mol_type = other DNA
accagtgagggaccgtctga

SEQ ID NO: 18118 - DNA, 20 bp, synthetic construct
  misc_feature 1..20: note = chemically synthesized
  source 1..20: mol_type = other DNA
ccgcatttccctccagcagc

SEQ ID NO: 18119 - DNA, 20 bp, synthetic construct
  misc_feature 1..20: note = chemically synthesized
  source 1..20: mol_type = other DNA
atttcaattatgcatgtatt

SEQ ID NO: 18120 - DNA, 20 bp, synthetic construct
  misc_feature 1..20: note = chemically synthesized
  source 1..20: mol_type = other DNA
tctcccagtgtttcatttta

SEQ ID NO: 18121 - DNA, 20 bp, synthetic construct
  misc_feature 1..20: note = chemically synthesized
  source 1..20: mol_type = other DNA
tctcactctgttgcccaggc

SEQ ID NO: 18122 - DNA, 20 bp, synthetic construct
  misc_feature 1..20: note = chemically synthesized
  source 1..20: mol_type = other DNA
gagacggttttgccatgtag

SEQ ID NO: 18123 - DNA, 20 bp, synthetic construct
  misc_feature 1..20: note = chemically synthesized
  source 1..20: mol_type = other DNA
gtgtcgacctcccaaagtgc

SEQ ID NO: 18124 - DNA, 20 bp, synthetic construct
  misc_feature 1..20: note = chemically synthesized
  source 1..20: mol_type = other DNA
cttttttttttttttggagg

SEQ ID NO: 18125 - DNA, 20 bp, synthetic construct
  misc_feature 1..20: note = chemically synthesized
  source 1..20: mol_type = other DNA
tctcgctctgttgcccaggc

SEQ ID NO: 18126 - DNA, 20 bp, synthetic construct
  misc_feature 1..20: note = chemically synthesized
  source 1..20: mol_type = other DNA
ctcactgcaagctctgcctc

SEQ ID NO: 18127 - DNA, 20 bp, synthetic construct
  misc_feature 1..20: note = chemically synthesized
  source 1..20: mol_type = other DNA
cattctcctgcctcagcctc

SEQ ID NO: 18128 - DNA, 20 bp, synthetic construct
  misc_feature 1..20: note = chemically synthesized
  source 1..20: mol_type = other DNA
ttttgtatttttagtagaga

SEQ ID NO: 18129 - DNA, 20 bp, synthetic construct
  misc_feature 1..20: note = chemically synthesized
  source 1..20: mol_type = other DNA
tggggtttcaccatgttagc

SEQ ID NO: 18130 - DNA, 20 bp, synthetic construct
  misc_feature 1..20: note = chemically synthesized
  source 1..20: mol_type = other DNA
gccttggcctcccacagtgc

SEQ ID NO: 18131 - DNA, 20 bp, synthetic construct
  misc_feature 1..20: note = chemically synthesized
  source 1..20: mol_type = other DNA
acttaattttttgaacataa

SEQ ID NO: 18132 - DNA, 20 bp, synthetic construct
  misc_feature 1..20: note = chemically synthesized
  source 1..20: mol_type = other DNA
ttctagcatccgtgtcagtt

SEQ ID NO: 18133 - DNA, 20 bp, synthetic construct
  misc_feature 1..20: note = chemically synthesized
  source 1..20: mol_type = other DNA
acattgtcaatttcaccttg

SEQ ID NO: 18134 - DNA, 20 bp, synthetic construct
  misc_feature 1..20: note = chemically synthesized
  source 1..20: mol_type = other DNA
caatttcaccttgttgggtg

SEQ ID NO: 18135 - DNA, 20 bp, synthetic construct
  misc_feature 1..20: note = chemically synthesized
  source 1..20: mol_type = other DNA
aatgttcttgagctttgctc

SEQ ID NO: 18136 - DNA, 20 bp, synthetic construct
  misc_feature 1..20: note = chemically synthesized
  source 1..20: mol_type = other DNA
cgggatgcagttaagcaact

SEQ ID NO: 18137 - DNA, 20 bp, synthetic construct
  misc_feature 1..20: note = chemically synthesized
  source 1..20: mol_type = other DNA
agctccatctcctcaacgtg

SEQ ID NO: 18138 - DNA, 20 bp, synthetic construct
  misc_feature 1..20: note = chemically synthesized
  source 1..20: mol_type = other DNA
actctctccaaacagtaagc

SEQ ID NO: 18139 - DNA, 20 bp, synthetic construct
  misc_feature 1..20: note = chemically synthesized
  source 1..20: mol_type = other DNA
acagtaagctggggtgatcg

SEQ ID NO: 18140 - DNA, 20 bp, synthetic construct
  misc_feature 1..20: note = chemically synthesized
  source 1..20: mol_type = other DNA
ttgtttgcttcttatccctc

SEQ ID NO: 18141 - DNA, 20 bp, synthetic construct
  misc_feature 1..20: note = chemically synthesized
  source 1..20: mol_type = other DNA
actcctccttgcctgatgtc

SEQ ID NO: 18142 - DNA, 20 bp, synthetic construct
  misc_feature 1..20: note = chemically synthesized
  source 1..20: mol_type = other DNA
taattatccgagcaatccaa

SEQ ID NO: 18143 - DNA, 20 bp, synthetic construct
  misc_feature 1..20: note = chemically synthesized
  source 1..20: mol_type = other DNA
aaaatggaagcatggagaaa

SEQ ID NO: 18144 - DNA, 20 bp, synthetic construct
  misc_feature 1..20: note = chemically synthesized
  source 1..20: mol_type = other DNA
ccctgtgggcagtctggttt

SEQ ID NO: 18145 - DNA, 20 bp, synthetic construct
  misc_feature 1..20: note = chemically synthesized
  source 1..20: mol_type = other DNA
gtgggcagtctggtttcagg

SEQ ID NO: 18146 - DNA, 20 bp, synthetic construct
  misc_feature 1..20: note = chemically synthesized
  source 1..20: mol_type = other DNA
tgctgggctgacccagcatt

SEQ ID NO: 18147 - DNA, 20 bp, synthetic construct
  misc_feature 1..20: note = chemically synthesized
  source 1..20: mol_type = other DNA
gggaagcaggacaggaccct

SEQ ID NO: 18148 - DNA, 20 bp, synthetic construct
  misc_feature 1..20: note = chemically synthesized
  source 1..20: mol_type = other DNA
aggacaggaccctctgagtg

SEQ ID NO: 18149 - DNA, 20 bp, synthetic construct
  misc_feature 1..20: note = chemically synthesized
  source 1..20: mol_type = other DNA
accgtggtcatggagcgctt

SEQ ID NO: 18150 - DNA, 20 bp, synthetic construct
  misc_feature 1..20: note = chemically synthesized
  source 1..20: mol_type = other DNA
tggagcgcttctggatggag

SEQ ID NO: 18151 - DNA, 20 bp, synthetic construct
  misc_feature 1..20: note = chemically synthesized
  source 1..20: mol_type = other DNA
aatgcaaaggccttggagga

SEQ ID NO: 18152 - DNA, 20 bp, synthetic construct
  misc_feature 1..20: note = chemically synthesized
  source 1..20: mol_type = other DNA
ggggtgggggcagtgagagg

SEQ ID NO: 18153 - DNA, 20 bp, synthetic construct
  misc_feature 1..20: note = chemically synthesized
  source 1..20: mol_type = other DNA
ggtggggctgtgctcagagc

SEQ ID NO: 18154 - DNA, 20 bp, synthetic construct
  misc_feature 1..20: note = chemically synthesized
  source 1..20: mol_type = other DNA
tggaggtgtcagaggcctcc

SEQ ID NO: 18155 - DNA, 20 bp, synthetic construct
  misc_feature 1..20: note = chemically synthesized
  source 1..20: mol_type = other DNA
agaggcctccctgggtcaaa

SEQ ID NO: 18156 - DNA, 20 bp, synthetic construct
  misc_feature 1..20: note = chemically synthesized
  source 1..20: mol_type = other DNA
tccctgggtcaaatggggtc

SEQ ID NO: 18157 - DNA, 20 bp, synthetic construct
  misc_feature 1..20: note = chemically synthesized
  source 1..20: mol_type = other DNA
tcactggtgtgaaaaagatg

SEQ ID NO: 18158 - DNA, 20 bp, synthetic construct
  misc_feature 1..20: note = chemically synthesized
  source 1..20: mol_type = other DNA
ggcccctgactgagcctccc

SEQ ID NO: 18159 - DNA, 20 bp, synthetic construct
  misc_feature 1..20: note = chemically synthesized
  source 1..20: mol_type = other DNA
ctccccaggatgtggtcctg

SEQ ID NO: 18160 - DNA, 20 bp, synthetic construct
  misc_feature 1..20: note = chemically synthesized
  source 1..20: mol_type = other DNA
gatgtggtcctgctgggtcg

SEQ ID NO: 18161 - DNA, 20 bp, synthetic construct
  misc_feature 1..20: note = chemically synthesized
  source 1..20: mol_type = other DNA
ctgctgggtcggggggtgat

SEQ ID NO: 18162 - DNA, 20 bp, synthetic construct
  misc_feature 1..20: note = chemically synthesized
  source 1..20: mol_type = other DNA
tgagaagacaaggaagtcca

SEQ ID NO: 18163 - DNA, 20 bp, synthetic construct
  misc_feature 1..20: note = chemically synthesized
  source 1..20: mol_type = other DNA
gacaaggaagtccacagagt

SEQ ID NO: 18164 - DNA, 20 bp, synthetic construct
  misc_feature 1..20: note = chemically synthesized
  source 1..20: mol_type = other DNA
agaaggtgttctgtttgcag

SEQ ID NO: 18165 - DNA, 20 bp, synthetic construct
  misc_feature 1..20: note = chemically synthesized
  source 1..20: mol_type = other DNA
ctgggacaactggagctgct

SEQ ID NO: 18166 - DNA, 20 bp, synthetic construct
  misc_feature 1..20: note = chemically synthesized
  source 1..20: mol_type = other DNA
agctctgtgtgcaggaagac

SEQ ID NO: 18167 - DNA, 20 bp, synthetic construct
  misc_feature 1..20: note = chemically synthesized
  source 1..20: mol_type = other DNA
gtgcaggaagacgtgggtgt

SEQ ID NO: 18168 - DNA, 20 bp, synthetic construct
  misc_feature 1..20: note = chemically synthesized
  source 1..20: mol_type = other DNA
gggtgtgtgagtgtacgtgt

SEQ ID NO: 18169 - DNA, 20 bp, synthetic construct
  misc_feature 1..20: note = chemically synthesized
  source 1..20: mol_type = other DNA
tcaggtgtgtgtgtgtggga

SEQ ID NO: 18170 - DNA, 20 bp, synthetic construct
  misc_feature 1..20: note = chemically synthesized
  source 1..20: mol_type = other DNA
gtgtgtgtgtgggagggagt

SEQ ID NO: 18171 - DNA, 20 bp, synthetic construct
  misc_feature 1..20: note = chemically synthesized
  source 1..20: mol_type = other DNA
tagcatgcatatgcacatgt

SEQ ID NO: 18172 - DNA, 20 bp, synthetic construct
  misc_feature 1..20: note = chemically synthesized
  source 1..20: mol_type = other DNA
atgcatatgcacatgtgaga

SEQ ID NO: 18173 - DNA, 20 bp, synthetic construct
  misc_feature 1..20: note = chemically synthesized
  source 1..20: mol_type = other DNA
gggtacagcagagcgtggtc

SEQ ID NO: 18174 - DNA, 20 bp, synthetic construct
  misc_feature 1..20: note = chemically synthesized
  source 1..20: mol_type = other DNA
gtgtgtgcaaatgtgtgttt

SEQ ID NO: 18175 - DNA, 20 bp, synthetic construct
  misc_feature 1..20: note = chemically synthesized
  source 1..20: mol_type = other DNA
ttgagtgaagtgagcaatgt

SEQ ID NO: 18176 - DNA, 20 bp, synthetic construct
  misc_feature 1..20: note = chemically synthesized
  source 1..20: mol_type = other DNA
agtgagcaatgtgtgagtgt

SEQ ID NO: 18177 - DNA, 20 bp, synthetic construct
  misc_feature 1..20: note = chemically synthesized
  source 1..20: mol_type = other DNA
gtgtgagtgtgtgagtgtgt

SEQ ID NO: 18178 - DNA, 20 bp, synthetic construct
  misc_feature 1..20: note = chemically synthesized
  source 1..20: mol_type = other DNA
gtgtgagtttgtgagggcat

SEQ ID NO: 18179 - DNA, 20 bp, synthetic construct
  misc_feature 1..20: note = chemically synthesized
  source 1..20: mol_type = other DNA
aatgtgtgtgtcagtgctgt

SEQ ID NO: 18180 - DNA, 20 bp, synthetic construct
  misc_feature 1..20: note = chemically synthesized
  source 1..20: mol_type = other DNA
tcagtgctgtcagggtgcag

SEQ ID NO: 18181 - DNA, 20 bp, synthetic construct
  misc_feature 1..20: note = chemically synthesized
  source 1..20: mol_type = other DNA
ggaggaggccttgcgtggtg

SEQ ID NO: 18182 - DNA, 20 bp, synthetic construct
  misc_feature 1..20: note = chemically synthesized
  source 1..20: mol_type = other DNA
aggacaacaggtgggacctg

SEQ ID NO: 18183 - DNA, 20 bp, synthetic construct
  misc_feature 1..20: note = chemically synthesized
  source 1..20: mol_type = other DNA
gacctggagggttgtgcttg

SEQ ID NO: 18184 - DNA, 20 bp, synthetic construct
  misc_feature 1..20: note = chemically synthesized
  source 1..20: mol_type = other DNA
gcttggagagtgggctatgg

SEQ ID NO: 18185 - DNA, 20 bp, synthetic construct
  misc_feature 1..20: note = chemically synthesized
  source 1..20: mol_type = other DNA
tggtggaatgacccagattt

SEQ ID NO: 18186 - DNA, 20 bp, synthetic construct
  misc_feature 1..20: note = chemically synthesized
  source 1..20: mol_type = other DNA
cccagatttaaggatctcaa

SEQ ID NO: 18187 - DNA, 20 bp, synthetic construct
  misc_feature 1..20: note = chemically synthesized
  source 1..20: mol_type = other DNA
aggggagggactgttccagt

SEQ ID NO: 18188 - DNA, 20 bp, synthetic construct
  misc_feature 1..20: note = chemically synthesized
  source 1..20: mol_type = other DNA
agaacacagggcccagcttc

SEQ ID NO: 18189 - DNA, 20 bp, synthetic construct
  misc_feature 1..20: note = chemically synthesized
  source 1..20: mol_type = other DNA
ctggaggcctctgccactgg

SEQ ID NO: 18190 - DNA, 20 bp, synthetic construct
  misc_feature 1..20: note = chemically synthesized
  source 1..20: mol_type = other DNA
cattcacagatcccccttct

SEQ ID NO: 18191 - DNA, 20 bp, synthetic construct
  misc_feature 1..20: note = chemically synthesized
  source 1..20: mol_type = other DNA
ggatgtgtgcctaggcaggg

SEQ ID NO: 18192 - DNA, 20 bp, synthetic construct
  misc_feature 1..20: note = chemically synthesized
  source 1..20: mol_type = other DNA
gtctcccagtcccccagctc

SEQ ID NO: 18193 - DNA, 20 bp, synthetic construct
  misc_feature 1..20: note = chemically synthesized
  source 1..20: mol_type = other DNA
gggctttgcacacagctgat

SEQ ID NO: 18194 - DNA, 20 bp, synthetic construct
  misc_feature 1..20: note = chemically synthesized
  source 1..20: mol_type = other DNA
acacagctgatgtgaatatc

SEQ ID NO: 18195 - DNA, 20 bp, synthetic construct
  misc_feature 1..20: note = chemically synthesized
  source 1..20: mol_type = other DNA
gaatatcctgagtcgtgtgc

SEQ ID NO: 18196 - DNA, 20 bp, synthetic construct
  misc_feature 1..20: note = chemically synthesized
  source 1..20: mol_type = other DNA
gtatatttatacatggtaat

SEQ ID NO: 18197 - DNA, 20 bp, synthetic construct
  misc_feature 1..20: note = chemically synthesized
  source 1..20: mol_type = other DNA
ttatacatggtaatatgggt

SEQ ID NO: 18198 - DNA, 20 bp, synthetic construct
  misc_feature 1..20: note = chemically synthesized
  source 1..20: mol_type = other DNA
taatatgggtgcgagtgtgt

SEQ ID NO: 18199 - DNA, 20 bp, synthetic construct
  misc_feature 1..20: note = chemically synthesized
  source 1..20: mol_type = other DNA
tgtgtgtaatgctcaaatgc

SEQ ID NO: 18200 - DNA, 20 bp, synthetic construct
  misc_feature 1..20: note = chemically synthesized
  source 1..20: mol_type = other DNA
gctggtggtcatctgtgtga

SEQ ID NO: 18201 - DNA, 20 bp, synthetic construct
  misc_feature 1..20: note = chemically synthesized
  source 1..20: mol_type = other DNA
gtgtgactgggtcccaaagt

SEQ ID NO: 18202 - DNA, 20 bp, synthetic construct
  misc_feature 1..20: note = chemically synthesized
  source 1..20: mol_type = other DNA
tgagggtcacgggggccagc

SEQ ID NO: 18203 - DNA, 20 bp, synthetic construct
  misc_feature 1..20: note = chemically synthesized
  source 1..20: mol_type = other DNA
ggggccagcagggatgggca

SEQ ID NO: 18204 - DNA, 20 bp, synthetic construct
  misc_feature 1..20: note = chemically synthesized
  source 1..20: mol_type = other DNA
cgccctttgccctcgcttcc

SEQ ID NO: 18205 - DNA, 20 bp, synthetic construct
  misc_feature 1..20: note = chemically synthesized
  source 1..20: mol_type = other DNA
ggggaggctcagtcaggggc

SEQ ID NO: 18206 - DNA, 20 bp, synthetic construct
  misc_feature 1..20: note = chemically synthesized
  source 1..20: mol_type = other DNA
tgggaagagttcttctctcc

SEQ ID NO: 18207 - DNA, 20 bp, synthetic construct
  misc_feature 1..20: note = chemically synthesized
  source 1..20: mol_type = other DNA
atccagaactgacacggatg

SEQ ID NO: 18208 - DNA, 20 bp, synthetic construct
  misc_feature 1..20: note = chemically synthesized
  source 1..20: mol_type = other DNA
cattatgttcaaaaaattaa

SEQ ID NO: 18209 - DNA, 20 bp, synthetic construct
  misc_feature 1..20: note = chemically synthesized
  source 1..20: mol_type = other DNA
ctactcgggaggctgaggca

SEQ ID NO: 18210 - DNA, 20 bp, synthetic construct
  misc_feature 1..20: note = chemically synthesized
  source 1..20: mol_type = other DNA
tccgcctccaaaaaaaaaaa

SEQ ID NO: 18211 - DNA, 20 bp, synthetic construct
  misc_feature 1..20: note = chemically synthesized
  source 1..20: mol_type = other DNA
ctccaaaaaaaaaaaaaaga

SEQ ID NO: 18212 - DNA, 20 bp, synthetic construct
  misc_feature 1..20: note = chemically synthesized
  source 1..20: mol_type = other DNA
aaaaaaaaaaaaaagaaaag

SEQ ID NO: 18213 - DNA, 20 bp, synthetic construct
  misc_feature 1..20: note = chemically synthesized
  source 1..20: mol_type = other DNA
aaaaaaaaagaaaagaaaga

SEQ ID NO: 18214 - DNA, 20 bp, synthetic construct
  misc_feature 1..20: note = chemically synthesized
  source 1..20: mol_type = other DNA
tggatggaaataatggaaga

SEQ ID NO: 18215 - DNA, 20 bp, synthetic construct
  misc_feature 1..20: note = chemically synthesized
  source 1..20: mol_type = other DNA
aatggaagatgagaaatgcg

SEQ ID NO: 18216 - DNA, 20 bp, synthetic construct
  misc_feature 1..20: note = chemically synthesized
  source 1..20: mol_type = other DNA
ctctataaaatgaaacactg

SEQ ID NO: 18217 - DNA, 20 bp, synthetic construct
  misc_feature 1..20: note = chemically synthesized
  source 1..20: mol_type = other DNA
aaatgaaacactgggagaaa

SEQ ID NO: 18218 - DNA, 20 bp, synthetic construct
  misc_feature 1..20: note = chemically synthesized
  source 1..20: mol_type = other DNA
aaaagaattaaaaaatggaa

SEQ ID NO: 18219 - DNA, 20 bp, synthetic construct
  misc_feature 1..20: note = chemically synthesized
  source 1..20: mol_type = other DNA
atgcataattgaaatcttta

SEQ ID NO: 18220 - DNA, 20 bp, synthetic construct
  misc_feature 1..20: note = chemically synthesized
  source 1..20: mol_type = other DNA
tttaaaagaaaaagggggta

SEQ ID NO: 18221 - DNA, 20 bp, synthetic construct
  misc_feature 1..20: note = chemically synthesized
  source 1..20: mol_type = other DNA
agctcactctcccattaatt

SEQ ID NO: 18222 - DNA, 20 bp, synthetic construct
  misc_feature 1..20: note = chemically synthesized
  source 1..20: mol_type = other DNA
gacagagggggagcaaagcc

SEQ ID NO: 18223 - DNA, 20 bp, synthetic construct
  misc_feature 1..20: note = chemically synthesized
  source 1..20: mol_type = other DNA
caaattaaaaaaaatttttt

SEQ ID NO: 18224 - DNA, 20 bp, synthetic construct
  misc_feature 1..20: note = chemically synthesized
  source 1..20: mol_type = other DNA
ggtacatagtgaacactcag

SEQ ID NO: 18225 - DNA, 20 bp, synthetic construct
  misc_feature 1..20: note = chemically synthesized
  source 1..20: mol_type = other DNA
tgctgaatcttctgagggtg

SEQ ID NO: 18226 - DNA, 20 bp, synthetic construct
  misc_feature 1..20: note = chemically synthesized
  source 1..20: mol_type = other DNA
tgtgatctccattttacaca

SEQ ID NO: 18227 - DNA, 20 bp, synthetic construct
  misc_feature 1..20: note = chemically synthesized
  source 1..20: mol_type = other DNA
acacgagaaaatggaagcat

SEQ ID NO: 18228 - DNA, 20 bp, synthetic construct
  misc_feature 1..20: note = chemically synthesized
  source 1..20: mol_type = other DNA
acacattgctcacttcactc

SEQ ID NO: 18229 - DNA, 20 bp, synthetic construct
  misc_feature 1..20: note = chemically synthesized
  source 1..20: mol_type = other DNA
cttctctccccagaaacaat

SEQ ID NO: 18230 - DNA, 20 bp, synthetic construct
  misc_feature 1..20: note = chemically synthesized
  source 1..20: mol_type = other DNA
tccccagaaacaatcaaaac

SEQ ID NO: 18231 - DNA, 20 bp, synthetic construct
  misc_feature 1..20: note = chemically synthesized
  source 1..20: mol_type = other DNA
agctgagagtccgaggagac

SEQ ID NO: 18232 - DNA, 20 bp, synthetic construct
  misc_feature 1..20: note = chemically synthesized
  source 1..20: mol_type = other DNA
caaggcatgcaatgaaacgg

SEQ ID NO: 18233 - DNA, 20 bp, synthetic construct
  misc_feature 1..20: note = chemically synthesized
  source 1..20: mol_type = other DNA
gaattagcaggcaaggatgg

SEQ ID NO: 18234 - DNA, 20 bp, synthetic construct
  misc_feature 1..20: note = chemically synthesized
  source 1..20: mol_type = other DNA
ccaggtgaacttctagagat

SEQ ID NO: 18235 - DNA, 20 bp, synthetic construct
  misc_feature 1..20: note = chemically synthesized
  source 1..20: mol_type = other DNA
aactacaatgtctgaaatga

SEQ ID NO: 18236 - DNA, 20 bp, synthetic construct
  misc_feature 1..20: note = chemically synthesized
  source 1..20: mol_type = other DNA
aaaagaaaagaaagaaaaga

SEQ ID NO: 18237 - DNA, 20 bp, synthetic construct
  misc_feature 1..20: note = chemically synthesized
  source 1..20: mol_type = other DNA
gactagtctgggcagcatgg

SEQ ID NO: 18238 - DNA, 20 bp, synthetic construct
  misc_feature 1..20: note = chemically synthesized
  source 1..20: mol_type = other DNA
ggcaaaacccctctacatgg

SEQ ID NO: 18239 - DNA, 20 bp, synthetic construct
  misc_feature 1..20: note = chemically synthesized
  source 1..20: mol_type = other DNA
tgccactggctggatgggag

SEQ ID NO: 18240 - DNA, 20 bp, synthetic construct
  misc_feature 1..20: note = chemically synthesized
  source 1..20: mol_type = other DNA
gaggaggcataacctgggcg

SEQ ID NO: 18241 - DNA, 20 bp, synthetic construct
  misc_feature 1..20: note = chemically synthesized
  source 1..20: mol_type = other DNA
ggccatgggggggggtcatc

SEQ ID NO: 18242 - DNA, 20 bp, synthetic construct
  misc_feature 1..20: note = chemically synthesized
  source 1..20: mol_type = other DNA
cctgagaagggggatctgtg

SEQ ID NO: 18243 - DNA, 20 bp, synthetic construct
  misc_feature 1..20: note = chemically synthesized
  source 1..20: mol_type = other DNA
tcttctaaggctcctgtccc

SEQ ID NO: 18244 - DNA, 20 bp, synthetic construct
  misc_feature 1..20: note = chemically synthesized
  source 1..20: mol_type = other DNA
tcctccccagcgccctttgc

SEQ ID NO: 18245 - DNA, 20 bp, synthetic construct
  misc_feature 1..20: note = chemically synthesized
  source 1..20: mol_type = other DNA
cctccactcagagggtcctg

SEQ ID NO: 18246 - DNA, 20 bp, synthetic construct
  misc_feature 1..20: note = chemically synthesized
  source 1..20: mol_type = other DNA
tgcaccagcattcaatttct

SEQ ID NO: 18247 - DNA, 20 bp, synthetic construct
  misc_feature 1..20: note = chemically synthesized
  source 1..20: mol_type = other DNA
tggagatcacagtcgtagct

SEQ ID NO: 18248 - DNA, 20 bp, synthetic construct
  misc_feature 1..20: note = chemically synthesized
  source 1..20: mol_type = other DNA
atcacagtcgtagctacccg

SEQ ID NO: 18249 - DNA, 20 bp, synthetic construct
  misc_feature 1..20: note = chemically synthesized
  source 1..20: mol_type = other DNA
tagatgagttaaaatatgta

SEQ ID NO: 18250 - DNA, 20 bp, synthetic construct
  misc_feature 1..20: note = chemically synthesized
  source 1..20: mol_type = other DNA
atgtaatgtgcttcttaggc

SEQ ID NO: 18251 - DNA, 20 bp, synthetic construct
  misc_feature 1..20: note = chemically synthesized
  source 1..20: mol_type = other DNA
aacagacaactatagaacat

SEQ ID NO: 18252 - DNA, 20 bp, synthetic construct
  misc_feature 1..20: note = chemically synthesized
  source 1..20: mol_type = other DNA
aacaggaaccctccgatcac

SEQ ID NO: 18253 - DNA, 20 bp, synthetic construct
  misc_feature 1..20: note = chemically synthesized
  source 1..20: mol_type = other DNA
accctccgatcaccccagct

SEQ ID NO: 18254 - DNA, 20 bp, synthetic construct
  misc_feature 1..20: note = chemically synthesized
  source 1..20: mol_type = other DNA
aaacgatcaaactgactcta

SEQ ID NO: 18255 - DNA, 20 bp, synthetic construct
  misc_feature 1..20: note = chemically synthesized
  source 1..20: mol_type = other DNA
gacaatgtctggcagccaat

SEQ ID NO: 18256 - DNA, 20 bp, synthetic construct
  misc_feature 1..20: note = chemically synthesized
  source 1..20: mol_type = other DNA
aatggcatgaacccgggagg

SEQ ID NO: 18257 - DNA, 20 bp, synthetic construct
  misc_feature 1..20: note = chemically synthesized
  source 1..20: mol_type = other DNA
ctctaaattctgtcaccctc

SEQ ID NO: 18258 - DNA, 20 bp, synthetic construct
  misc_feature 1..20: note = chemically synthesized
  source 1..20: mol_type = other DNA
ttgggaggctgaggtgggag

SEQ ID NO: 18259 - DNA, 20 bp, synthetic construct
  misc_feature 1..20: note = chemically synthesized
  source 1..20: mol_type = other DNA
aagatacttaggtccttcag

SEQ ID NO: 18260 - DNA, 20 bp, synthetic construct
  misc_feature 1..20: note = chemically synthesized
  source 1..20: mol_type = other DNA
ctgcacacttgcctttcaaa

SEQ ID NO: 18261 - DNA, 20 bp, synthetic construct
  misc_feature 1..20: note = chemically synthesized
  source 1..20: mol_type = other DNA
tcaaaaatggatttcctctc

SEQ ID NO: 18262 - DNA, 20 bp, synthetic construct
  misc_feature 1..20: note = chemically synthesized
  source 1..20: mol_type = other DNA
ggctggggctggggcagagg

SEQ ID NO: 18263 - DNA, 20 bp, synthetic construct
  misc_feature 1..20: note = chemically synthesized
  source 1..20: mol_type = other DNA
ccatttttgaaaggcaagtg

SEQ ID NO: 18264 - DNA, 20 bp, synthetic construct
  misc_feature 1..20: note = chemically synthesized
  source 1..20: mol_type = other DNA
aaaggcaagtgtgcagtttc

SEQ ID NO: 18265 - DNA, 20 bp, synthetic construct
  misc_feature 1..20: note = chemically synthesized
  source 1..20: mol_type = other DNA
tgctccccctctgtctcagc

SEQ ID NO: 18266 - DNA, 20 bp, synthetic construct
  misc_feature 1..20: note = chemically synthesized
  source 1..20: mol_type = other DNA
gactgaggagggcccgacac

SEQ ID NO: 18267 - DNA, 20 bp, synthetic construct
  misc_feature 1..20: note = chemically synthesized
  source 1..20: mol_type = other DNA
acgtatgtgcatatgaggaa

SEQ ID NO: 18268 - DNA, 20 bp, synthetic construct
  misc_feature 1..20: note = chemically synthesized
  source 1..20: mol_type = other DNA
tgtgtattgtgtgagtgtat

SEQ ID NO: 18269 - DNA, 20 bp, synthetic construct
  misc_feature 1..20: note = chemically synthesized
  source 1..20: mol_type = other DNA
gtgtgtgtgttagtgtgtgt

SEQ ID NO: 18270 - DNA, 20 bp, synthetic construct
  misc_feature 1..20: note = chemically synthesized
  source 1..20: mol_type = other DNA
atgttgcccaggctggtggg

SEQ ID NO: 18271 - DNA, 20 bp, synthetic construct
  misc_feature 1..20: note = chemically synthesized
  source 1..20: mol_type = other DNA
tccatggaggcaggaggagc

SEQ ID NO: 18272 - DNA, 20 bp, synthetic construct
  misc_feature 1..20: note = chemically synthesized
  source 1..20: mol_type = other DNA
aggcaggaggagcaggggct

SEQ ID NO: 18273 - DNA, 20 bp, synthetic construct
  misc_feature 1..20: note = chemically synthesized
  source 1..20: mol_type = other DNA
caggggcttggagcttagga

SEQ ID NO: 18274 - DNA, 20 bp, synthetic construct
  misc_feature 1..20: note = chemically synthesized
  source 1..20: mol_type = other DNA
cttctgagggtgacagaatt

SEQ ID NO: 18275 - DNA, 20 bp, synthetic construct
  misc_feature 1..20: note = chemically synthesized
  source 1..20: mol_type = other DNA
cagaatttagagtttgagca

SEQ ID NO: 18276 - DNA, 20 bp, synthetic construct
  misc_feature 1..20: note = chemically synthesized
  source 1..20: mol_type = other DNA
gcaggaggcttggagagagg

SEQ ID NO: 18277 - DNA, 20 bp, synthetic construct
  misc_feature 1..20: note = chemically synthesized
  source 1..20: mol_type = other DNA
catcttccacttgtctcagc

SEQ ID NO: 18278 - DNA, 20 bp, synthetic construct
  misc_feature 1..20: note = chemically synthesized
  source 1..20: mol_type = other DNA
ctgctaccccctttttcttt

SEQ ID NO: 18279 - DNA, 20 bp, synthetic construct
  misc_feature 1..20: note = chemically synthesized
  source 1..20: mol_type = other DNA
tttttaattcttttttctcc

SEQ ID NO: 18280 - DNA, 20 bp, synthetic construct
  misc_feature 1..20: note = chemically synthesized
  source 1..20: mol_type = other DNA
cccctcccctcctttccttc

SEQ ID NO: 18281 - DNA, 20 bp, synthetic construct
  misc_feature 1..20: note = chemically synthesized
  source 1..20: mol_type = other DNA
tgttgcccaggctggaatgc

SEQ ID NO: 18282 - DNA, 20 bp, synthetic construct
  misc_feature 1..20: note = chemically synthesized
  source 1..20: mol_type = other DNA
taaaaatttttttttgtaga

SEQ ID NO: 18283 - DNA, 20 bp, synthetic construct
  misc_feature 1..20: note = chemically synthesized
  source 1..20: mol_type = other DNA
gagacggttttgccatgtag

SEQ ID NO: 18284 - DNA, 20 bp, synthetic construct
  misc_feature 1..20: note = chemically synthesized
  source 1..20: mol_type = other DNA
agtcttgagctcctgggctc

SEQ ID NO: 18285 - DNA, 20 bp, synthetic construct
  misc_feature 1..20: note = chemically synthesized
  source 1..20: mol_type = other DNA
cgtgtcgacctcccaaagtg

SEQ ID NO: 18286 - DNA, 20 bp, synthetic construct
  misc_feature 1..20: note = chemically synthesized
  source 1..20: mol_type = other DNA
tcttccattatttccatcca

SEQ ID NO: 18287 - DNA, 20 bp, synthetic construct
  misc_feature 1..20: note = chemically synthesized
  source 1..20: mol_type = other DNA
ttttgtatttttagtagaga

SEQ ID NO: 18288 - DNA, 20 bp, synthetic construct
  misc_feature 1..20: note = chemically synthesized
  source 1..20: mol_type = other DNA
cgccttggcctcccacagtg

SEQ ID NO: 18289 - DNA, 20 bp, synthetic construct
  misc_feature 1..20: note = chemically synthesized
  source 1..20: mol_type = other DNA
tgagccacggcgcctggcca

SEQ ID NO: 18290 - DNA, 20 bp, synthetic construct
  misc_feature 1..20: note = chemically synthesized
  source 1..20: mol_type = other DNA
tgttttttcatttcagacat

SEQ ID NO: 18291 - DNA, 20 bp, synthetic construct
  misc_feature 1..20: note = chemically synthesized
  source 1..20: mol_type = other DNA
taatgggatatggctataat

SEQ ID NO: 18292 - DNA, 20 bp, synthetic construct
  misc_feature 1..20: note = chemically synthesized
  source 1..20: mol_type = other DNA
atgaacctcctcgttatgca

SEQ ID NO: 18293 - DNA, 20 bp, synthetic construct
  misc_feature 1..20: note = chemically synthesized
  source 1..20: mol_type = other DNA
cctcgttatgcattgtgttt

SEQ ID NO: 18294 - DNA, 20 bp, synthetic construct
  misc_feature 1..20: note = chemically synthesized
  source 1..20: mol_type = other DNA
ttcattgcatgccttgtaat

SEQ ID NO: 18295 - DNA, 20 bp, synthetic construct
  misc_feature 1..20: note = chemically synthesized
  source 1..20: mol_type = other DNA
ttgtattcctctaaatgttc

SEQ ID NO: 18296 - DNA, 20 bp, synthetic construct
  misc_feature 1..20: note = chemically synthesized
  source 1..20: mol_type = other DNA
atgcagttaagcaacttaga

SEQ ID NO: 18297 - DNA, 20 bp, synthetic construct
  misc_feature 1..20: note = chemically synthesized
  source 1..20: mol_type = other DNA
aagcaacttagagtcagttt

SEQ ID NO: 18298 - DNA, 20 bp, synthetic construct
  misc_feature 1..20: note = chemically synthesized
  source 1..20: mol_type = other DNA
gtttgatcgtttgaactctt

SEQ ID NO: 18299 - DNA, 20 bp, synthetic construct
  misc_feature 1..20: note = chemically synthesized
  source 1..20: mol_type = other DNA
tggggtgatcggagggttcc

SEQ ID NO: 18300 - DNA, 20 bp, synthetic construct
  misc_feature 1..20: note = chemically synthesized
  source 1..20: mol_type = other DNA
gtgatcggagggttcctgtt

SEQ ID NO: 18301 - DNA, 20 bp, synthetic construct
  misc_feature 1..20: note = chemically synthesized
  source 1..20: mol_type = other DNA
agctgccatgttctatagtt

SEQ ID NO: 18302 - DNA, 20 bp, synthetic construct
  misc_feature 1..20: note = chemically synthesized
  source 1..20: mol_type = other DNA
catgttctatagttgtctgt

SEQ ID NO: 18303 - DNA, 20 bp, synthetic construct
  misc_feature 1..20: note = chemically synthesized
  source 1..20: mol_type = other DNA
tctatagttgtctgtttttg

SEQ ID NO: 18304 - DNA, 20 bp, synthetic construct
  misc_feature 1..20: note = chemically synthesized
  source 1..20: mol_type = other DNA
tagttgtctgtttttgtttt

SEQ ID NO: 18305 - DNA, 20 bp, synthetic construct
  misc_feature 1..20: note = chemically synthesized
  source 1..20: mol_type = other DNA
ctgggctaccctgtgggcag

SEQ ID NO: 18306 - DNA, 20 bp, synthetic construct
  misc_feature 1..20: note = chemically synthesized
  source 1..20: mol_type = other DNA
cagggactcagccatggagg

SEQ ID NO: 18307 - DNA, 20 bp, synthetic construct
  misc_feature 1..20: note = chemically synthesized
  source 1..20: mol_type = other DNA
tggggaacaccgtggtcatg

SEQ ID NO: 18308 - DNA, 20 bp, synthetic construct
  misc_feature 1..20: note = chemically synthesized
  source 1..20: mol_type = other DNA
ggcaggaagtgacctgggga

SEQ ID NO: 18309 - DNA, 20 bp, synthetic construct
  misc_feature 1..20: note = chemically synthesized
  source 1..20: mol_type = other DNA
ggtccaaggcctagaaggtg

SEQ ID NO: 18310 - DNA, 20 bp, synthetic construct
  misc_feature 1..20: note = chemically synthesized
  source 1..20: mol_type = other DNA
ggtcatgagtgtgtgcaaat

SEQ ID NO: 18311 - DNA, 20 bp, synthetic construct
  misc_feature 1..20: note = chemically synthesized
  source 1..20: mol_type = other DNA
gtgtgagtgtgtgagtgtgt

SEQ ID NO: 18312 - DNA, 20 bp, synthetic construct
  misc_feature 1..20: note = chemically synthesized
  source 1..20: mol_type = other DNA
ggagcaaatttagtgtggaa

SEQ ID NO: 18313 - DNA, 20 bp, synthetic construct
  misc_feature 1..20: note = chemically synthesized
  source 1..20: mol_type = other DNA
aacaggtgggacctggaggg

SEQ ID NO: 18314 - DNA, 20 bp, synthetic construct
  misc_feature 1..20: note = chemically synthesized
  source 1..20: mol_type = other DNA
agtgggctatggtggaatga

SEQ ID NO: 18315 - DNA, 20 bp, synthetic construct
  misc_feature 1..20: note = chemically synthesized
  source 1..20: mol_type = other DNA
caggggagggactgttccag

SEQ ID NO: 18316 - DNA, 20 bp, synthetic construct
  misc_feature 1..20: note = chemically synthesized
  source 1..20: mol_type = other DNA
attttaggaagaacacaggg

SEQ ID NO: 18317 - DNA, 20 bp, synthetic construct
  misc_feature 1..20: note = chemically synthesized
  source 1..20: mol_type = other DNA
cagtcccccagctccaggat

SEQ ID NO: 18318 - DNA, 20 bp, synthetic construct
  misc_feature 1..20: note = chemically synthesized
  source 1..20: mol_type = other DNA
gtgtgcatgggtgtgtgtgc

SEQ ID NO: 18319 - DNA, 20 bp, synthetic construct
  misc_feature 1..20: note = chemically synthesized
  source 1..20: mol_type = other DNA
cccgcccaggttatgcctcc

SEQ ID NO: 18320 - DNA, 20 bp, synthetic construct
  misc_feature 1..20: note = chemically synthesized
  source 1..20: mol_type = other DNA
cacagcgtctctgctccatg

SEQ ID NO: 18321 - DNA, 20 bp, synthetic construct
  misc_feature 1..20: note = chemically synthesized
  source 1..20: mol_type = other DNA
ctgctccatggtctgcttca

SEQ ID NO: 18322 - DNA, 20 bp, synthetic construct
  misc_feature 1..20: note = chemically synthesized
  source 1..20: mol_type = other DNA
tctgcttcagtctgcttgcc

SEQ ID NO: 18323 - DNA, 22 bp, synthetic construct
  misc_feature 1..22: note = chemically synthesized
  source 1..22: mol_type = other DNA
cccatgtctctttccctacccc

SEQ ID NO: 18324 - DNA, 22 bp, synthetic construct
  misc_feature 1..22: note = chemically synthesized
  source 1..22: mol_type = other DNA
tttccctaccccttgcccatcc

SEQ ID NO: 18325 - DNA, 22 bp, synthetic construct
  misc_feature 1..22: note = chemically synthesized
  source 1..22: mol_type = other DNA
tccctaccccttgcccatccct

SEQ ID NO: 18326 - DNA, 22 bp, synthetic construct
  misc_feature 1..22: note = chemically synthesized
  source 1..22: mol_type = other DNA
ccctaccccttgcccatccctg

SEQ ID NO: 18327 - DNA, 22 bp, synthetic construct
  misc_feature 1..22: note = chemically synthesized
  source 1..22: mol_type = other DNA
cctaccccttgcccatccctgc

SEQ ID NO: 18328 - DNA, 22 bp, synthetic construct
  misc_feature 1..22: note = chemically synthesized
  source 1..22: mol_type = other DNA
ccccttgcccatccctgctggc

SEQ ID NO: 18329 - DNA, 22 bp, synthetic construct
  misc_feature 1..22: note = chemically synthesized
  source 1..22: mol_type = other DNA
gcccatccctgctggcccccgt

SEQ ID NO: 18330 - DNA, 22 bp, synthetic construct
  misc_feature 1..22: note = chemically synthesized
  source 1..22: mol_type = other DNA
cccatccctgctggcccccgtg

SEQ ID NO: 18331 - DNA, 22 bp, synthetic construct
  misc_feature 1..22: note = chemically synthesized
  source 1..22: mol_type = other DNA
ctggcccccgtgaccctcactt

SEQ ID NO: 18332 - DNA, 22 bp, synthetic construct
  misc_feature 1..22: note = chemically synthesized
  source 1..22: mol_type = other DNA
gcccccgtgaccctcactttgg

SEQ ID NO: 18333 - DNA, 22 bp, synthetic construct
  misc_feature 1..22: note = chemically synthesized
  source 1..22: mol_type = other DNA
actttgggacccagtcacacag

SEQ ID NO: 18334 - DNA, 22 bp, synthetic construct
  misc_feature 1..22: note = chemically synthesized
  source 1..22: mol_type = other DNA
tgggacccagtcacacagatga

SEQ ID NO: 18335 - DNA, 22 bp, synthetic construct
  misc_feature 1..22: note = chemically synthesized
  source 1..22: mol_type = other DNA
gggacccagtcacacagatgac

SEQ ID NO: 18336 - DNA, 22 bp, synthetic construct
  misc_feature 1..22: note = chemically synthesized
  source 1..22: mol_type = other DNA
ggacccagtcacacagatgacc

SEQ ID NO: 18337 - DNA, 22 bp, synthetic construct
  misc_feature 1..22: note = chemically synthesized
  source 1..22: mol_type = other DNA
aagctcagggcaagcagactga

SEQ ID NO: 18338 - DNA, 22 bp, synthetic construct
  misc_feature 1..22: note = chemically synthesized
  source 1..22: mol_type = other DNA
agggcaagcagactgaagcaga

SEQ ID NO: 18339 - DNA, 22 bp, synthetic construct
  misc_feature 1..22: note = chemically synthesized
  source 1..22: mol_type = other DNA
aagcagaccatggagcagagac

SEQ ID NO: 18340 - DNA, 22 bp, synthetic construct
  misc_feature 1..22: note = chemically synthesized
  source 1..22: mol_type = other DNA
tgccaggggctgggcaggaggt

SEQ ID NO: 18341 - DNA, 22 bp, synthetic construct
  misc_feature 1..22: note = chemically synthesized
  source 1..22: mol_type = other DNA
ggcaggaggtggccctgtggga

SEQ ID NO: 18342 - DNA, 22 bp, synthetic construct
  misc_feature 1..22: note = chemically synthesized
  source 1..22: mol_type = other DNA
tgggagaggggcatcaggagcc

SEQ ID NO: 18343 - DNA, 22 bp, synthetic construct
  misc_feature 1..22: note = chemically synthesized
  source 1..22: mol_type = other DNA
ggtgtggggagccggagggtaa

SEQ ID NO: 18344 - DNA, 22 bp, synthetic construct
  misc_feature 1..22: note = chemically synthesized
  source 1..22: mol_type = other DNA
aggaggcataacctgggcgggg

SEQ ID NO: 18345 - DNA, 22 bp, synthetic construct
  misc_feature 1..22: note = chemically synthesized
  source 1..22: mol_type = other DNA
ggcggggggattggttggggcc

SEQ ID NO: 18346 - DNA, 22 bp, synthetic construct
  misc_feature 1..22: note = chemically synthesized
  source 1..22: mol_type = other DNA
gttggggccatgggggggggtc

SEQ ID NO: 18347 - DNA, 22 bp, synthetic construct
  misc_feature 1..22: note = chemically synthesized
  source 1..22: mol_type = other DNA
gggccatgggggggggtcatca

SEQ ID NO: 18348 - DNA, 22 bp, synthetic construct
  misc_feature 1..22: note = chemically synthesized
  source 1..22: mol_type = other DNA
tgaccccagcatttgagcatta

SEQ ID NO: 18349 - DNA, 22 bp, synthetic construct
  misc_feature 1..22: note = chemically synthesized
  source 1..22: mol_type = other DNA
gaccccagcatttgagcattac

SEQ ID NO: 18350 - DNA, 22 bp, synthetic construct
  misc_feature 1..22: note = chemically synthesized
  source 1..22: mol_type = other DNA
accccagcatttgagcattaca

SEQ ID NO: 18351 - DNA, 22 bp, synthetic construct
  misc_feature 1..22: note = chemically synthesized
  source 1..22: mol_type = other DNA
gagcattacacacacactctta

SEQ ID NO: 18352 - DNA, 22 bp, synthetic construct
  misc_feature 1..22: note = chemically synthesized
  source 1..22: mol_type = other DNA
agcattacacacacactcttac

SEQ ID NO: 18353 - DNA, 22 bp, synthetic construct
  misc_feature 1..22: note = chemically synthesized
  source 1..22: mol_type = other DNA
cacacacactcttacacactcg

SEQ ID NO: 18354 - DNA, 22 bp, synthetic construct
  misc_feature 1..22: note = chemically synthesized
  source 1..22: mol_type = other DNA
ttacacactcgcacccatatta

SEQ ID NO: 18355 - DNA, 22 bp, synthetic construct
  misc_feature 1..22: note = chemically synthesized
  source 1..22: mol_type = other DNA
acacactcgcacccatattacc

SEQ ID NO: 18356 - DNA, 22 bp, synthetic construct
  misc_feature 1..22: note = chemically synthesized
  source 1..22: mol_type = other DNA
cacactcgcacccatattacca

SEQ ID NO: 18357 - DNA, 22 bp, synthetic construct
  misc_feature 1..22: note = chemically synthesized
  source 1..22: mol_type = other DNA
gcacccatattaccatgtataa

SEQ ID NO: 18358 - DNA, 22 bp, synthetic construct
  misc_feature 1..22: note = chemically synthesized
  source 1..22: mol_type = other DNA
ccatgtataaatatacacacgc

SEQ ID NO: 18359 - DNA, 22 bp, synthetic construct
  misc_feature 1..22: note = chemically synthesized
  source 1..22: mol_type = other DNA
atctggtgcacacacacccatg

SEQ ID NO: 18360 - DNA, 22 bp, synthetic construct
  misc_feature 1..22: note = chemically synthesized
  source 1..22: mol_type = other DNA
gtgcacacacacccatgcacac

SEQ ID NO: 18361 - DNA, 22 bp, synthetic construct
  misc_feature 1..22: note = chemically synthesized
  source 1..22: mol_type = other DNA
aggatattcacatcagctgtgt

SEQ ID NO: 18362 - DNA, 22 bp, synthetic construct
  misc_feature 1..22: note = chemically synthesized
  source 1..22: mol_type = other DNA
acatcagctgtgtgcaaagccc

SEQ ID NO: 18363 - DNA, 22 bp, synthetic construct
  misc_feature 1..22: note = chemically synthesized
  source 1..22: mol_type = other DNA
tgtgcaaagcccggatcctgga

SEQ ID NO: 18364 - DNA, 22 bp, synthetic construct
  misc_feature 1..22: note = chemically synthesized
  source 1..22: mol_type = other DNA
gagctgggggactgggagacgc

SEQ ID NO: 18365 - DNA, 22 bp, synthetic construct
  misc_feature 1..22: note = chemically synthesized
  source 1..22: mol_type = other DNA
ggggactgggagacgcacaggg

SEQ ID NO: 18366 - DNA, 22 bp, synthetic construct
  misc_feature 1..22: note = chemically synthesized
  source 1..22: mol_type = other DNA
ggagacgcacagggggcggggg

SEQ ID NO: 18367 - DNA, 22 bp, synthetic construct
  misc_feature 1..22: note = chemically synthesized
  source 1..22: mol_type = other DNA
cctaggcacacatcctgagaag

SEQ ID NO: 18368 - DNA, 22 bp, synthetic construct
  misc_feature 1..22: note = chemically synthesized
  source 1..22: mol_type = other DNA
ggcacacatcctgagaaggggg

SEQ ID NO: 18369 - DNA, 22 bp, synthetic construct
  misc_feature 1..22: note = chemically synthesized
  source 1..22: mol_type = other DNA
agaagggggatctgtgaatggt

SEQ ID NO: 18370 - DNA, 22 bp, synthetic construct
  misc_feature 1..22: note = chemically synthesized
  source 1..22: mol_type = other DNA
tgaatggttttcctcccatcca

SEQ ID NO: 18371 - DNA, 22 bp, synthetic construct
  misc_feature 1..22: note = chemically synthesized
  source 1..22: mol_type = other DNA
tcctcccatccagccagtggca

SEQ ID NO: 18372 - DNA, 22 bp, synthetic construct
  misc_feature 1..22: note = chemically synthesized
  source 1..22: mol_type = other DNA
cctcccatccagccagtggcag

SEQ ID NO: 18373 - DNA, 22 bp, synthetic construct
  misc_feature 1..22: note = chemically synthesized
  source 1..22: mol_type = other DNA
ctcccatccagccagtggcaga

SEQ ID NO: 18374 - DNA, 22 bp, synthetic construct
  misc_feature 1..22: note = chemically synthesized
  source 1..22: mol_type = other DNA
ccatccagccagtggcagaggc

SEQ ID NO: 18375 - DNA, 22 bp, synthetic construct
  misc_feature 1..22: note = chemically synthesized
  source 1..22: mol_type = other DNA
cagatcacctcgggccttagtc

SEQ ID NO: 18376 - DNA, 22 bp, synthetic construct
  misc_feature 1..22: note = chemically synthesized
  source 1..22: mol_type = other DNA
gggccttagtctcagctcttct

SEQ ID NO: 18377 - DNA, 22 bp, synthetic construct
  misc_feature 1..22: note = chemically synthesized
  source 1..22: mol_type = other DNA
agtctcagctcttctaaggctc

SEQ ID NO: 18378 - DNA, 22 bp, synthetic construct
  misc_feature 1..22: note = chemically synthesized
  source 1..22: mol_type = other DNA
gtctcagctcttctaaggctcc

SEQ ID NO: 18379 - DNA, 22 bp, synthetic construct
  misc_feature 1..22: note = chemically synthesized
  source 1..22: mol_type = other DNA
agctcttctaaggctcctgtcc

SEQ ID NO: 18380 - DNA, 22 bp, synthetic construct
  misc_feature 1..22: note = chemically synthesized
  source 1..22: mol_type = other DNA
ttctaaggctcctgtcccctca

SEQ ID NO: 18381 - DNA, 22 bp, synthetic construct
  misc_feature 1..22: note = chemically synthesized
  source 1..22: mol_type = other DNA
ctaaggctcctgtcccctcaga

SEQ ID NO: 18382 - DNA, 22 bp, synthetic construct
  misc_feature 1..22: note = chemically synthesized
  source 1..22: mol_type = other DNA
taaggctcctgtcccctcagat

SEQ ID NO: 18383 - DNA, 22 bp, synthetic construct
  misc_feature 1..22: note = chemically synthesized
  source 1..22: mol_type = other DNA
aggctcctgtcccctcagattg

SEQ ID NO: 18384 - DNA, 22 bp, synthetic construct
  misc_feature 1..22: note = chemically synthesized
  source 1..22: mol_type = other DNA
ctgtcccctcagattggagact

SEQ ID NO: 18385 - DNA, 22 bp, synthetic construct
  misc_feature 1..22: note = chemically synthesized
  source 1..22: mol_type = other DNA
tcccctcagattggagactcca

SEQ ID NO: 18386 - DNA, 22 bp, synthetic construct
  misc_feature 1..22: note = chemically synthesized
  source 1..22: mol_type = other DNA
agattggagactccagaagctg

SEQ ID NO: 18387 - DNA, 22 bp, synthetic construct
  misc_feature 1..22: note = chemically synthesized
  source 1..22: mol_type = other DNA
gagactccagaagctgggccct

SEQ ID NO: 18388 - DNA, 22 bp, synthetic construct
  misc_feature 1..22: note = chemically synthesized
  source 1..22: mol_type = other DNA
cagaagctgggccctgtgttct

SEQ ID NO: 18389 - DNA, 22 bp, synthetic construct
  misc_feature 1..22: note = chemically synthesized
  source 1..22: mol_type = other DNA
ggccctgtgttcttcctaaaat

SEQ ID NO: 18390 - DNA, 22 bp, synthetic construct
  misc_feature 1..22: note = chemically synthesized
  source 1..22: mol_type = other DNA
tgttcttcctaaaatccatact

SEQ ID NO: 18391 - DNA, 22 bp, synthetic construct
  misc_feature 1..22: note = chemically synthesized
  source 1..22: mol_type = other DNA
ttcctaaaatccatactggaac

SEQ ID NO: 18392 - DNA, 22 bp, synthetic construct
  misc_feature 1..22: note = chemically synthesized
  source 1..22: mol_type = other DNA
cctaaaatccatactggaacag

SEQ ID NO: 18393 - DNA, 22 bp, synthetic construct
  misc_feature 1..22: note = chemically synthesized
  source 1..22: mol_type = other DNA
ctaaaatccatactggaacagt

SEQ ID NO: 18394 - DNA, 22 bp, synthetic construct
  misc_feature 1..22: note = chemically synthesized
  source 1..22: mol_type = other DNA
aaatccatactggaacagtccc

SEQ ID NO: 18395 - DNA, 22 bp, synthetic construct
  misc_feature 1..22: note = chemically synthesized
  source 1..22: mol_type = other DNA
gaacagtccctcccctgccaaa

SEQ ID NO: 18396 - DNA, 22 bp, synthetic construct
  misc_feature 1..22: note = chemically synthesized
  source 1..22: mol_type = other DNA
ccctgccaaaattccattgaga

SEQ ID NO: 18397 - DNA, 22 bp, synthetic construct
  misc_feature 1..22: note = chemically synthesized
  source 1..22: mol_type = other DNA
ccaaaattccattgagatcctt

SEQ ID NO: 18398 - DNA, 22 bp, synthetic construct
  misc_feature 1..22: note = chemically synthesized
  source 1..22: mol_type = other DNA
cattgagatccttaaatctggg

SEQ ID NO: 18399 - DNA, 22 bp, synthetic construct
  misc_feature 1..22: note = chemically synthesized
  source 1..22: mol_type = other DNA
agatccttaaatctgggtcatt

SEQ ID NO: 18400 - DNA, 22 bp, synthetic construct
  misc_feature 1..22: note = chemically synthesized
  source 1..22: mol_type = other DNA
aaatctgggtcattccaccata

SEQ ID NO: 18401 - DNA, 22 bp, synthetic construct
  misc_feature 1..22: note = chemically synthesized
  source 1..22: mol_type = other DNA
aatctgggtcattccaccatag

SEQ ID NO: 18402 - DNA, 22 bp, synthetic construct
  misc_feature 1..22: note = chemically synthesized
  source 1..22: mol_type = other DNA
ggtcattccaccatagcccact

SEQ ID NO: 18403 - DNA, 22 bp, synthetic construct
  misc_feature 1..22: note = chemically synthesized
  source 1..22: mol_type = other DNA
caccatagcccactctccaagc

SEQ ID NO: 18404 - DNA, 22 bp, synthetic construct
  misc_feature 1..22: note = chemically synthesized
  source 1..22: mol_type = other DNA
tccaagcacaaccctccaggtc

SEQ ID NO: 18405 - DNA, 22 bp, synthetic construct
  misc_feature 1..22: note = chemically synthesized
  source 1..22: mol_type = other DNA
caagcacaaccctccaggtccc

SEQ ID NO: 18406 - DNA, 22 bp, synthetic construct
  misc_feature 1..22: note = chemically synthesized
  source 1..22: mol_type = other DNA
caggtcccacctgttgtcctca

SEQ ID NO: 18407 - DNA, 22 bp, synthetic construct
  misc_feature 1..22: note = chemically synthesized
  source 1..22: mol_type = other DNA
ttgtcctcatcccccaccacgc

SEQ ID NO: 18408 - DNA, 22 bp, synthetic construct
  misc_feature 1..22: note = chemically synthesized
  source 1..22: mol_type = other DNA
tcctcatcccccaccacgcaag

SEQ ID NO: 18409 - DNA, 22 bp, synthetic construct
  misc_feature 1..22: note = chemically synthesized
  source 1..22: mol_type = other DNA
atcccccaccacgcaaggcctc

SEQ ID NO: 18410 - DNA, 22 bp, synthetic construct
  misc_feature 1..22: note = chemically synthesized
  source 1..22: mol_type = other DNA
ctccccagcgccctttgccctc

SEQ ID NO: 18411 - DNA, 22 bp, synthetic construct
  misc_feature 1..22: note = chemically synthesized
  source 1..22: mol_type = other DNA
cccagcgccctttgccctcgct

SEQ ID NO: 18412 - DNA, 22 bp, synthetic construct
  misc_feature 1..22: note = chemically synthesized
  source 1..22: mol_type = other DNA
tgccctcgcttccctagaaacc

SEQ ID NO: 18413 - DNA, 22 bp, synthetic construct
  misc_feature 1..22: note = chemically synthesized
  source 1..22: mol_type = other DNA
gccctcgcttccctagaaacct

SEQ ID NO: 18414 - DNA, 22 bp, synthetic construct
  misc_feature 1..22: note = chemically synthesized
  source 1..22: mol_type = other DNA
ccctcgcttccctagaaacctc

SEQ ID NO: 18415 - DNA, 22 bp, synthetic construct
  misc_feature 1..22: note = chemically synthesized
  source 1..22: mol_type = other DNA
gcttccctagaaacctcgttcc

SEQ ID NO: 18416 - DNA, 22 bp, synthetic construct
  misc_feature 1..22: note = chemically synthesized
  source 1..22: mol_type = other DNA
ccctagaaacctcgttccacac

SEQ ID NO: 18417 - DNA, 22 bp, synthetic construct
  misc_feature 1..22: note = chemically synthesized
  source 1..22: mol_type = other DNA
cctagaaacctcgttccacact

SEQ ID NO: 18418 - DNA, 22 bp, synthetic construct
  misc_feature 1..22: note = chemically synthesized
  source 1..22: mol_type = other DNA
gaaacctcgttccacactaaat

SEQ ID NO: 18419 - DNA, 22 bp, synthetic construct
  misc_feature 1..22: note = chemically synthesized
  source 1..22: mol_type = other DNA
gttccacactaaatttgctccc

SEQ ID NO: 18420 - DNA, 22 bp, synthetic construct
  misc_feature 1..22: note = chemically synthesized
  source 1..22: mol_type = other DNA
cacactaaatttgctcccctca

SEQ ID NO: 18421 - DNA, 22 bp, synthetic construct
  misc_feature 1..22: note = chemically synthesized
  source 1..22: mol_type = other DNA
aatttgctcccctcagcccgag

SEQ ID NO: 18422 - DNA, 22 bp, synthetic construct
  misc_feature 1..22: note = chemically synthesized
  source 1..22: mol_type = other DNA
gctcccctcagcccgaggtcat

SEQ ID NO: 18423 - DNA, 22 bp, synthetic construct
  misc_feature 1..22: note = chemically synthesized
  source 1..22: mol_type = other DNA
ctcccctcagcccgaggtcatc

SEQ ID NO: 18424 - DNA, 22 bp, synthetic construct
  misc_feature 1..22: note = chemically synthesized
  source 1..22: mol_type = other DNA
ccctcagcccgaggtcatctca

SEQ ID NO: 18425 - DNA, 22 bp, synthetic construct
  misc_feature 1..22: note = chemically synthesized
  source 1..22: mol_type = other DNA
agcccgaggtcatctcacaggt

SEQ ID NO: 18426 - DNA, 22 bp, synthetic construct
  misc_feature 1..22: note = chemically synthesized
  source 1..22: mol_type = other DNA
acaggtacctctcctgcccctt

SEQ ID NO: 18427 - DNA, 22 bp, synthetic construct
  misc_feature 1..22: note = chemically synthesized
  source 1..22: mol_type = other DNA
tcctgccccttgatccatctgc

SEQ ID NO: 18428 - DNA, 22 bp, synthetic construct
  misc_feature 1..22: note = chemically synthesized
  source 1..22: mol_type = other DNA
ctgccccttgatccatctgcac

SEQ ID NO: 18429 - DNA, 22 bp, synthetic construct
  misc_feature 1..22: note = chemically synthesized
  source 1..22: mol_type = other DNA
ccccttgatccatctgcaccct

SEQ ID NO: 18430 - DNA, 22 bp, synthetic construct
  misc_feature 1..22: note = chemically synthesized
  source 1..22: mol_type = other DNA
gatccatctgcaccctgacagc

SEQ ID NO: 18431 - DNA, 22 bp, synthetic construct
  misc_feature 1..22: note = chemically synthesized
  source 1..22: mol_type = other DNA
atccatctgcaccctgacagca

SEQ ID NO: 18432 - DNA, 22 bp, synthetic construct
  misc_feature 1..22: note = chemically synthesized
  source 1..22: mol_type = other DNA
caccctgacagcactgacacac

SEQ ID NO: 18433 - DNA, 22 bp, synthetic construct
  misc_feature 1..22: note = chemically synthesized
  source 1..22: mol_type = other DNA
acagcactgacacacacattca

SEQ ID NO: 18434 - DNA, 22 bp, synthetic construct
  misc_feature 1..22: note = chemically synthesized
  source 1..22: mol_type = other DNA
acacacacattcacatgccctc

SEQ ID NO: 18435 - DNA, 22 bp, synthetic construct
  misc_feature 1..22: note = chemically synthesized
  source 1..22: mol_type = other DNA
acatgccctcacaaactcacac

SEQ ID NO: 18436 - DNA, 22 bp, synthetic construct
  misc_feature 1..22: note = chemically synthesized
  source 1..22: mol_type = other DNA
acaaactcacacacactcacac

SEQ ID NO: 18437 - DNA, 22 bp, synthetic construct
  misc_feature 1..22: note = chemically synthesized
  source 1..22: mol_type = other DNA
acacacactcacacactcacac

SEQ ID NO: 18438 - DNA, 22 bp, synthetic construct
  misc_feature 1..22: note = chemically synthesized
  source 1..22: mol_type = other DNA
acacactcacacattgctcact

SEQ ID NO: 18439 - DNA, 22 bp, synthetic construct
  misc_feature 1..22: note = chemically synthesized
  source 1..22: mol_type = other DNA
acacattgctcacttcactcaa

SEQ ID NO: 18440 - DNA, 22 bp, synthetic construct
  misc_feature 1..22: note = chemically synthesized
  source 1..22: mol_type = other DNA
ctcacttcactcaaaaacacac

SEQ ID NO: 18441 - DNA, 22 bp, synthetic construct
  misc_feature 1..22: note = chemically synthesized
  source 1..22: mol_type = other DNA
acttcactcaaaaacacacatt

SEQ ID NO: 18442 - DNA, 22 bp, synthetic construct
  misc_feature 1..22: note = chemically synthesized
  source 1..22: mol_type = other DNA
cactcaaaaacacacatttgca

SEQ ID NO: 18443 - DNA, 22 bp, synthetic construct
  misc_feature 1..22: note = chemically synthesized
  source 1..22: mol_type = other DNA
actcaaaaacacacatttgcac

SEQ ID NO: 18444 - DNA, 22 bp, synthetic construct
  misc_feature 1..22: note = chemically synthesized
  source 1..22: mol_type = other DNA
aaaaacacacatttgcacacac

SEQ ID NO: 18445 - DNA, 22 bp, synthetic construct
  misc_feature 1..22: note = chemically synthesized
  source 1..22: mol_type = other DNA
gcacacactcatgaccacgctc

SEQ ID NO: 18446 - DNA, 22 bp, synthetic construct
  misc_feature 1..22: note = chemically synthesized
  source 1..22: mol_type = other DNA
cacacactcatgaccacgctct

SEQ ID NO: 18447 - DNA, 22 bp, synthetic construct
  misc_feature 1..22: note = chemically synthesized
  source 1..22: mol_type = other DNA
atgaccacgctctgctgtaccc

SEQ ID NO: 18448 - DNA, 22 bp, synthetic construct
  misc_feature 1..22: note = chemically synthesized
  source 1..22: mol_type = other DNA
tgctgtacccactctcacatgt

SEQ ID NO: 18449 - DNA, 22 bp, synthetic construct
  misc_feature 1..22: note = chemically synthesized
  source 1..22: mol_type = other DNA
ctgtacccactctcacatgtgc

SEQ ID NO: 18450 - DNA, 22 bp, synthetic construct
  misc_feature 1..22: note = chemically synthesized
  source 1..22: mol_type = other DNA
tacccactctcacatgtgcata

SEQ ID NO: 18451 - DNA, 22 bp, synthetic construct
  misc_feature 1..22: note = chemically synthesized
  source 1..22: mol_type = other DNA
tcacatgtgcatatgcatgcta

SEQ ID NO: 18452 - DNA, 22 bp, synthetic construct
  misc_feature 1..22: note = chemically synthesized
  source 1..22: mol_type = other DNA
acatgtgcatatgcatgctaat

SEQ ID NO: 18453 - DNA, 22 bp, synthetic construct
  misc_feature 1..22: note = chemically synthesized
  source 1..22: mol_type = other DNA
atgcacacattcatactccctc

SEQ ID NO: 18454 - DNA, 22 bp, synthetic construct
  misc_feature 1..22: note = chemically synthesized
  source 1..22: mol_type = other DNA
atactccctcccacacacacac

SEQ ID NO: 18455 - DNA, 22 bp, synthetic construct
  misc_feature 1..22: note = chemically synthesized
  source 1..22: mol_type = other DNA
cctcccacacacacacacctga

SEQ ID NO: 18456 - DNA, 22 bp, synthetic construct
  misc_feature 1..22: note = chemically synthesized
  source 1..22: mol_type = other DNA
ccacacacacacacctgacaca

SEQ ID NO: 18457 - DNA, 22 bp, synthetic construct
  misc_feature 1..22: note = chemically synthesized
  source 1..22: mol_type = other DNA
acacacccacacacgtacactc

SEQ ID NO: 18458 - DNA, 22 bp, synthetic construct
  misc_feature 1..22: note = chemically synthesized
  source 1..22: mol_type = other DNA
acacacccacgtcttcctgcac

SEQ ID NO: 18459 - DNA, 22 bp, synthetic construct
  misc_feature 1..22: note = chemically synthesized
  source 1..22: mol_type = other DNA
cctgcacacagagctgggctcc

SEQ ID NO: 18460 - DNA, 22 bp, synthetic construct
  misc_feature 1..22: note = chemically synthesized
  source 1..22: mol_type = other DNA
ctgcacacagagctgggctccc

SEQ ID NO: 18461 - DNA, 22 bp, synthetic construct
  misc_feature 1..22: note = chemically synthesized
  source 1..22: mol_type = other DNA
cacacagagctgggctccctct

SEQ ID NO: 18462 - DNA, 22 bp, synthetic construct
  misc_feature 1..22: note = chemically synthesized
  source 1..22: mol_type = other DNA
ggctccctctctgctgcctcca

SEQ ID NO: 18463 - DNA, 22 bp, synthetic construct
  misc_feature 1..22: note = chemically synthesized
  source 1..22: mol_type = other DNA
cctctctgctgcctccagaccc

SEQ ID NO: 18464 - DNA, 22 bp, synthetic construct
  misc_feature 1..22: note = chemically synthesized
  source 1..22: mol_type = other DNA
tctgctgcctccagacccagag

SEQ ID NO: 18465 - DNA, 22 bp, synthetic construct
  misc_feature 1..22: note = chemically synthesized
  source 1..22: mol_type = other DNA
tgctgcctccagacccagagca

SEQ ID NO: 18466 - DNA, 22 bp, synthetic construct
  misc_feature 1..22: note = chemically synthesized
  source 1..22: mol_type = other DNA
ctgcctccagacccagagcagc

SEQ ID NO: 18467 - DNA, 22 bp, synthetic construct
  misc_feature 1..22: note = chemically synthesized
  source 1..22: mol_type = other DNA
cctccagacccagagcagctcc

SEQ ID NO: 18468 - DNA, 22 bp, synthetic construct
  misc_feature 1..22: note = chemically synthesized
  source 1..22: mol_type = other DNA
cagacccagagcagctccagtt

SEQ ID NO: 18469 - DNA, 22 bp, synthetic construct
  misc_feature 1..22: note = chemically synthesized
  source 1..22: mol_type = other DNA
cagttgtcccagccctgagctc

SEQ ID NO: 18470 - DNA, 22 bp, synthetic construct
  misc_feature 1..22: note = chemically synthesized
  source 1..22: mol_type = other DNA
tcccagccctgagctcctctct

SEQ ID NO: 18471 - DNA, 22 bp, synthetic construct
  misc_feature 1..22: note = chemically synthesized
  source 1..22: mol_type = other DNA
agctcctctctttgcagcatcc

SEQ ID NO: 18472 - DNA, 22 bp, synthetic construct
  misc_feature 1..22: note = chemically synthesized
  source 1..22: mol_type = other DNA
ctctctttgcagcatccacctg

SEQ ID NO: 18473 - DNA, 22 bp, synthetic construct
  misc_feature 1..22: note = chemically synthesized
  source 1..22: mol_type = other DNA
tctttgcagcatccacctgcaa

SEQ ID NO: 18474 - DNA, 22 bp, synthetic construct
  misc_feature 1..22: note = chemically synthesized
  source 1..22: mol_type = other DNA
tttgcagcatccacctgcaaac

SEQ ID NO: 18475 - DNA, 22 bp, synthetic construct
  misc_feature 1..22: note = chemically synthesized
  source 1..22: mol_type = other DNA
tgcagcatccacctgcaaacag

SEQ ID NO: 18476 - DNA, 22 bp, synthetic construct
  misc_feature 1..22: note = chemically synthesized
  source 1..22: mol_type = other DNA
gcagcatccacctgcaaacaga

SEQ ID NO: 18477 - DNA, 22 bp, synthetic construct
  misc_feature 1..22: note = chemically synthesized
  source 1..22: mol_type = other DNA
cagcatccacctgcaaacagaa

SEQ ID NO: 18478 - DNA, 22 bp, synthetic construct
  misc_feature 1..22: note = chemically synthesized
  source 1..22: mol_type = other DNA
caaacagaacaccttctaggcc

SEQ ID NO: 18479 - DNA, 22 bp, synthetic construct
  misc_feature 1..22: note = chemically synthesized
  source 1..22: mol_type = other DNA
ctaggccttggaccctgactct

SEQ ID NO: 18480 - DNA, 22 bp, synthetic construct
  misc_feature 1..22: note = chemically synthesized
  source 1..22: mol_type = other DNA
taggccttggaccctgactctg

SEQ ID NO: 18481 - DNA, 22 bp, synthetic construct
  misc_feature 1..22: note = chemically synthesized
  source 1..22: mol_type = other DNA
ggccttggaccctgactctgtg

SEQ ID NO: 18482 - DNA, 22 bp, synthetic construct
  misc_feature 1..22: note = chemically synthesized
  source 1..22: mol_type = other DNA
ggaccctgactctgtggacttc

SEQ ID NO: 18483 - DNA, 22 bp, synthetic construct
  misc_feature 1..22: note = chemically synthesized
  source 1..22: mol_type = other DNA
gaccctgactctgtggacttcc

SEQ ID NO: 18484 - DNA, 22 bp, synthetic construct
  misc_feature 1..22: note = chemically synthesized
  source 1..22: mol_type = other DNA
actctgtggacttccttgtctt

SEQ ID NO: 18485 - DNA, 22 bp, synthetic construct
  misc_feature 1..22: note = chemically synthesized
  source 1..22: mol_type = other DNA
tgtggacttccttgtcttctca

SEQ ID NO: 18486 - DNA, 22 bp, synthetic construct
  misc_feature 1..22: note = chemically synthesized
  source 1..22: mol_type = other DNA
tggacttccttgtcttctcatt

SEQ ID NO: 18487 - DNA, 22 bp, synthetic construct
  misc_feature 1..22: note = chemically synthesized
  source 1..22: mol_type = other DNA
ccttgtcttctcattcctatca

SEQ ID NO: 18488 - DNA, 22 bp, synthetic construct
  misc_feature 1..22: note = chemically synthesized
  source 1..22: mol_type = other DNA
cttgtcttctcattcctatcac

SEQ ID NO: 18489 - DNA, 22 bp, synthetic construct
  misc_feature 1..22: note = chemically synthesized
  source 1..22: mol_type = other DNA
gtcttctcattcctatcacccc

SEQ ID NO: 18490 - DNA, 22 bp, synthetic construct
  misc_feature 1..22: note = chemically synthesized
  source 1..22: mol_type = other DNA
tcttctcattcctatcaccccc

SEQ ID NO: 18491 - DNA, 22 bp, synthetic construct
  misc_feature 1..22: note = chemically synthesized
  source 1..22: mol_type = other DNA
ctcattcctatcaccccccgac

SEQ ID NO: 18492 - DNA, 22 bp, synthetic construct
  misc_feature 1..22: note = chemically synthesized
  source 1..22: mol_type = other DNA
tcattcctatcaccccccgacc

SEQ ID NO: 18493 - DNA, 22 bp, synthetic construct
  misc_feature 1..22: note = chemically synthesized
  source 1..22: mol_type = other DNA
attcctatcaccccccgaccca

SEQ ID NO: 18494 - DNA, 22 bp, synthetic construct
  misc_feature 1..22: note = chemically synthesized
  source 1..22: mol_type = other DNA
ctatcaccccccgacccagcag

SEQ ID NO: 18495 - DNA, 22 bp, synthetic construct
  misc_feature 1..22: note = chemically synthesized
  source 1..22: mol_type = other DNA
tcaccccccgacccagcaggac

SEQ ID NO: 18496 - DNA, 22 bp, synthetic construct
  misc_feature 1..22: note = chemically synthesized
  source 1..22: mol_type = other DNA
gggaggctcagtcaggggccca

SEQ ID NO: 18497 - DNA, 22 bp, synthetic construct
  misc_feature 1..22: note = chemically synthesized
  source 1..22: mol_type = other DNA
agtcaggggcccagaatcttcc

SEQ ID NO: 18498 - DNA, 22 bp, synthetic construct
  misc_feature 1..22: note = chemically synthesized
  source 1..22: mol_type = other DNA
cctccccaggtcacttcctgcc

SEQ ID NO: 18499 - DNA, 22 bp, synthetic construct
  misc_feature 1..22: note = chemically synthesized
  source 1..22: mol_type = other DNA
ctccccaggtcacttcctgcca

SEQ ID NO: 18500 - DNA, 22 bp, synthetic construct
  misc_feature 1..22: note = chemically synthesized
  source 1..22: mol_type = other DNA
cccaggtcacttcctgccactg

SEQ ID NO: 18501 - DNA, 22 bp, synthetic construct
  misc_feature 1..22: note = chemically synthesized
  source 1..22: mol_type = other DNA
cctgccactgtcctgagtcaga

SEQ ID NO: 18502 - DNA, 22 bp, synthetic construct
  misc_feature 1..22: note = chemically synthesized
  source 1..22: mol_type = other DNA
ctgccactgtcctgagtcagac

SEQ ID NO: 18503 - DNA, 22 bp, synthetic construct
  misc_feature 1..22: note = chemically synthesized
  source 1..22: mol_type = other DNA
ccactgtcctgagtcagacact

SEQ ID NO: 18504 - DNA, 22 bp, synthetic construct
  misc_feature 1..22: note = chemically synthesized
  source 1..22: mol_type = other DNA
tcctgagtcagacactgcccct

SEQ ID NO: 18505 - DNA, 22 bp, synthetic construct
  misc_feature 1..22: note = chemically synthesized
  source 1..22: mol_type = other DNA
agtcagacactgcccctgtaag

SEQ ID NO: 18506 - DNA, 22 bp, synthetic construct
  misc_feature 1..22: note = chemically synthesized
  source 1..22: mol_type = other DNA
cccctgtaagtgactgtccata

SEQ ID NO: 18507 - DNA, 22 bp, synthetic construct
  misc_feature 1..22: note = chemically synthesized
  source 1..22: mol_type = other DNA
taagtgactgtccataactctt

SEQ ID NO: 18508 - DNA, 22 bp, synthetic construct
  misc_feature 1..22: note = chemically synthesized
  source 1..22: mol_type = other DNA
tccataactcttcatctttttc

SEQ ID NO: 18509 - DNA, 22 bp, synthetic construct
  misc_feature 1..22: note = chemically synthesized
  source 1..22: mol_type = other DNA
ttcatctttttcacaccagtga

SEQ ID NO: 18510 - DNA, 22 bp, synthetic construct
  misc_feature 1..22: note = chemically synthesized
  source 1..22: mol_type = other DNA
catctttttcacaccagtgact

SEQ ID NO: 18511 - DNA, 22 bp, synthetic construct
  misc_feature 1..22: note = chemically synthesized
  source 1..22: mol_type = other DNA
atctttttcacaccagtgactt

SEQ ID NO: 18512 - DNA, 22 bp, synthetic construct
  misc_feature 1..22: note = chemically synthesized
  source 1..22: mol_type = other DNA
tttcacaccagtgacttccacc

SEQ ID NO: 18513 - DNA, 22 bp, synthetic construct
  misc_feature 1..22: note = chemically synthesized
  source 1..22: mol_type = other DNA
ttcacaccagtgacttccacct

SEQ ID NO: 18514 - DNA, 22 bp, synthetic construct
  misc_feature 1..22: note = chemically synthesized
  source 1..22: mol_type = other DNA
tcacaccagtgacttccacctt

SEQ ID NO: 18515 - DNA, 22 bp, synthetic construct
  misc_feature 1..22: note = chemically synthesized
  source 1..22: mol_type = other DNA
cacaccagtgacttccaccttc

SEQ ID NO: 18516 - DNA, 22 bp, synthetic construct
  misc_feature 1..22: note = chemically synthesized
  source 1..22: mol_type = other DNA
acaccagtgacttccaccttcc

SEQ ID NO: 18517 - DNA, 22 bp, synthetic construct
  misc_feature 1..22: note = chemically synthesized
  source 1..22: mol_type = other DNA
ccaccttccccactgcagccac

SEQ ID NO: 18518 - DNA, 22 bp, synthetic construct
  misc_feature 1..22: note = chemically synthesized
  source 1..22: mol_type = other DNA
caccttccccactgcagccaca

SEQ ID NO: 18519 - DNA, 22 bp, synthetic construct
  misc_feature 1..22: note = chemically synthesized
  source 1..22: mol_type = other DNA
ccccactgcagccacactcagg

SEQ ID NO: 18520 - DNA, 22 bp, synthetic construct
  misc_feature 1..22: note = chemically synthesized
  source 1..22: mol_type = other DNA
cccactgcagccacactcagga

SEQ ID NO: 18521 - DNA, 22 bp, synthetic construct
  misc_feature 1..22: note = chemically synthesized
  source 1..22: mol_type = other DNA
cagccacactcaggaccccatt

SEQ ID NO: 18522 - DNA, 22 bp, synthetic construct
  misc_feature 1..22: note = chemically synthesized
  source 1..22: mol_type = other DNA
aggaccccatttgacccaggga

SEQ ID NO: 18523 - DNA, 22 bp, synthetic construct
  misc_feature 1..22: note = chemically synthesized
  source 1..22: mol_type = other DNA
gacccagggaggcctctgacac

SEQ ID NO: 18524 - DNA, 22 bp, synthetic construct
  misc_feature 1..22: note = chemically synthesized
  source 1..22: mol_type = other DNA
acccagggaggcctctgacacc

SEQ ID NO: 18525 - DNA, 22 bp, synthetic construct
  misc_feature 1..22: note = chemically synthesized
  source 1..22: mol_type = other DNA
tgacacctccactgcccactcc

SEQ ID NO: 18526 - DNA, 22 bp, synthetic construct
  misc_feature 1..22: note = chemically synthesized
  source 1..22: mol_type = other DNA
acacctccactgcccactcccg

SEQ ID NO: 18527 - DNA, 22 bp, synthetic construct
  misc_feature 1..22: note = chemically synthesized
  source 1..22: mol_type = other DNA
cactgcccactcccgctctgag

SEQ ID NO: 18528 - DNA, 22 bp, synthetic construct
  misc_feature 1..22: note = chemically synthesized
  source 1..22: mol_type = other DNA
cccactcccgctctgagcacag

SEQ ID NO: 18529 - DNA, 22 bp, synthetic construct
  misc_feature 1..22: note = chemically synthesized
  source 1..22: mol_type = other DNA
ccgctctgagcacagccccacc

SEQ ID NO: 18530 - DNA, 22 bp, synthetic construct
  misc_feature 1..22: note = chemically synthesized
  source 1..22: mol_type = other DNA
tgagcacagccccaccctccct

SEQ ID NO: 18531 - DNA, 22 bp, synthetic construct
  misc_feature 1..22: note = chemically synthesized
  source 1..22: mol_type = other DNA
agcacagccccaccctccctct

SEQ ID NO: 18532 - DNA, 22 bp, synthetic construct
  misc_feature 1..22: note = chemically synthesized
  source 1..22: mol_type = other DNA
cctctcactgcccccacccctt

SEQ ID NO: 18533 - DNA, 22 bp, synthetic construct
  misc_feature 1..22: note = chemically synthesized
  source 1..22: mol_type = other DNA
tcactgcccccaccccttcctc

SEQ ID NO: 18534 - DNA, 22 bp, synthetic construct
  misc_feature 1..22: note = chemically synthesized
  source 1..22: mol_type = other DNA
actgcccccaccccttcctcca

SEQ ID NO: 18535 - DNA, 22 bp, synthetic construct
  misc_feature 1..22: note = chemically synthesized
  source 1..22: mol_type = other DNA
cccccaccccttcctccaaggc

SEQ ID NO: 18536 - DNA, 22 bp, synthetic construct
  misc_feature 1..22: note = chemically synthesized
  source 1..22: mol_type = other DNA
cctccaaggcctttgcattcct

SEQ ID NO: 18537 - DNA, 22 bp, synthetic construct
  misc_feature 1..22: note = chemically synthesized
  source 1..22: mol_type = other DNA
ctccaaggcctttgcattcctc

SEQ ID NO: 18538 - DNA, 22 bp, synthetic construct
  misc_feature 1..22: note = chemically synthesized
  source 1..22: mol_type = other DNA
caaggcctttgcattcctctcc

SEQ ID NO: 18539 - DNA, 22 bp, synthetic construct
  misc_feature 1..22: note = chemically synthesized
  source 1..22: mol_type = other DNA
tgcattcctctccatccagaag

SEQ ID NO: 18540 - DNA, 22 bp, synthetic construct
  misc_feature 1..22: note = chemically synthesized
  source 1..22: mol_type = other DNA
gcattcctctccatccagaagc

SEQ ID NO: 18541 - DNA, 22 bp, synthetic construct
  misc_feature 1..22: note = chemically synthesized
  source 1..22: mol_type = other DNA
cattcctctccatccagaagcg

SEQ ID NO: 18542 - DNA, 22 bp, synthetic construct
  misc_feature 1..22: note = chemically synthesized
  source 1..22: mol_type = other DNA
ctctccatccagaagcgctcca

SEQ ID NO: 18543 - DNA, 22 bp, synthetic construct
  misc_feature 1..22: note = chemically synthesized
  source 1..22: mol_type = other DNA
tccatccagaagcgctccatga

SEQ ID NO: 18544 - DNA, 22 bp, synthetic construct
  misc_feature 1..22: note = chemically synthesized
  source 1..22: mol_type = other DNA
catccagaagcgctccatgacc

SEQ ID NO: 18545 - DNA, 22 bp, synthetic construct
  misc_feature 1..22: note = chemically synthesized
  source 1..22: mol_type = other DNA
catgaccacggtgttccccacc

SEQ ID NO: 18546 - DNA, 22 bp, synthetic construct
  misc_feature 1..22: note = chemically synthesized
  source 1..22: mol_type = other DNA
cccaccaagctggccctccatg

SEQ ID NO: 18547 - DNA, 22 bp, synthetic construct
  misc_feature 1..22: note = chemically synthesized
  source 1..22: mol_type = other DNA
gccctccatggctgagtccctg

SEQ ID NO: 18548 - DNA, 22 bp, synthetic construct
  misc_feature 1..22: note = chemically synthesized
  source 1..22: mol_type = other DNA
catggctgagtccctgactgct

SEQ ID NO: 18549 - DNA, 22 bp, synthetic construct
  misc_feature 1..22: note = chemically synthesized
  source 1..22: mol_type = other DNA
agtccctgactgctgtcttcag

SEQ ID NO: 18550 - DNA, 22 bp, synthetic construct
  misc_feature 1..22: note = chemically synthesized
  source 1..22: mol_type = other DNA
actgctgtcttcagcaccctcc

SEQ ID NO: 18551 - DNA, 22 bp, synthetic construct
  misc_feature 1..22: note = chemically synthesized
  source 1..22: mol_type = other DNA
ctgtcttcagcaccctccactc

SEQ ID NO: 18552 - DNA, 22 bp, synthetic construct
  misc_feature 1..22: note = chemically synthesized
  source 1..22: mol_type = other DNA
tcttcagcaccctccactcaga

SEQ ID NO: 18553 - DNA, 22 bp, synthetic construct
  misc_feature 1..22: note = chemically synthesized
  source 1..22: mol_type = other DNA
cagcaccctccactcagagggt

SEQ ID NO: 18554 - DNA, 22 bp, synthetic construct
  misc_feature 1..22: note = chemically synthesized
  source 1..22: mol_type = other DNA
agcaccctccactcagagggtc

SEQ ID NO: 18555 - DNA, 22 bp, synthetic construct
  misc_feature 1..22: note = chemically synthesized
  source 1..22: mol_type = other DNA
cactcagagggtcctgtcctgc

SEQ ID NO: 18556 - DNA, 22 bp, synthetic construct
  misc_feature 1..22: note = chemically synthesized
  source 1..22: mol_type = other DNA
agagggtcctgtcctgcttccc

SEQ ID NO: 18557 - DNA, 22 bp, synthetic construct
  misc_feature 1..22: note = chemically synthesized
  source 1..22: mol_type = other DNA
tcctgcttcccagtccgactta

SEQ ID NO: 18558 - DNA, 22 bp, synthetic construct
  misc_feature 1..22: note = chemically synthesized
  source 1..22: mol_type = other DNA
cttcccagtccgacttatcaac

SEQ ID NO: 18559 - DNA, 22 bp, synthetic construct
  misc_feature 1..22: note = chemically synthesized
  source 1..22: mol_type = other DNA
cccagtccgacttatcaactcc

SEQ ID NO: 18560 - DNA, 22 bp, synthetic construct
  misc_feature 1..22: note = chemically synthesized
  source 1..22: mol_type = other DNA
ccagtccgacttatcaactccc

SEQ ID NO: 18561 - DNA, 22 bp, synthetic construct
  misc_feature 1..22: note = chemically synthesized
  source 1..22: mol_type = other DNA
atcaactcccaatgctgggtca

SEQ ID NO: 18562 - DNA, 22 bp, synthetic construct
  misc_feature 1..22: note = chemically synthesized
  source 1..22: mol_type = other DNA
tcaactcccaatgctgggtcag

SEQ ID NO: 18563 - DNA, 22 bp, synthetic construct
  misc_feature 1..22: note = chemically synthesized
  source 1..22: mol_type = other DNA
ccaatgctgggtcagcccagca

SEQ ID NO: 18564 - DNA, 22 bp, synthetic construct
  misc_feature 1..22: note = chemically synthesized
  source 1..22: mol_type = other DNA
ggtcagcccagcaacgtgtctg

SEQ ID NO: 18565 - DNA, 22 bp, synthetic construct
  misc_feature 1..22: note = chemically synthesized
  source 1..22: mol_type = other DNA
tatatccaccctgaaaccagac

SEQ ID NO: 18566 - DNA, 22 bp, synthetic construct
  misc_feature 1..22: note = chemically synthesized
  source 1..22: mol_type = other DNA
aaaccagactgcccacagggta

SEQ ID NO: 18567 - DNA, 22 bp, synthetic construct
  misc_feature 1..22: note = chemically synthesized
  source 1..22: mol_type = other DNA
cccacagggtagcccagctgtg

SEQ ID NO: 18568 - DNA, 22 bp, synthetic construct
  misc_feature 1..22: note = chemically synthesized
  source 1..22: mol_type = other DNA
tgcctccaggtagctctgagat

SEQ ID NO: 18569 - DNA, 22 bp, synthetic construct
  misc_feature 1..22: note = chemically synthesized
  source 1..22: mol_type = other DNA
caggtagctctgagatcatgca

SEQ ID NO: 18570 - DNA, 22 bp, synthetic construct
  misc_feature 1..22: note = chemically synthesized
  source 1..22: mol_type = other DNA
tgagatcatgcaccagcattca

SEQ ID NO: 18571 - DNA, 22 bp, synthetic construct
  misc_feature 1..22: note = chemically synthesized
  source 1..22: mol_type = other DNA
agatcatgcaccagcattcaat

SEQ ID NO: 18572 - DNA, 22 bp, synthetic construct
  misc_feature 1..22: note = chemically synthesized
  source 1..22: mol_type = other DNA
aatttctccatgcttccatttt

SEQ ID NO: 18573 - DNA, 22 bp, synthetic construct
  misc_feature 1..22: note = chemically synthesized
  source 1..22: mol_type = other DNA
ctccatgcttccattttctcgt

SEQ ID NO: 18574 - DNA, 22 bp, synthetic construct
  misc_feature 1..22: note = chemically synthesized
  source 1..22: mol_type = other DNA
tccatgcttccattttctcgtg

SEQ ID NO: 18575 - DNA, 22 bp, synthetic construct
  misc_feature 1..22: note = chemically synthesized
  source 1..22: mol_type = other DNA
catgcttccattttctcgtgtg

SEQ ID NO: 18576 - DNA, 22 bp, synthetic construct
  misc_feature 1..22: note = chemically synthesized
  source 1..22: mol_type = other DNA
ccattttctcgtgtgtaaaatg

SEQ ID NO: 18577 - DNA, 22 bp, synthetic construct
  misc_feature 1..22: note = chemically synthesized
  source 1..22: mol_type = other DNA
cattttctcgtgtgtaaaatgg

SEQ ID NO: 18578 - DNA, 22 bp, synthetic construct
  misc_feature 1..22: note = chemically synthesized
  source 1..22: mol_type = other DNA
tctcgtgtgtaaaatggagatc

SEQ ID NO: 18579 - DNA, 22 bp, synthetic construct
  misc_feature 1..22: note = chemically synthesized
  source 1..22: mol_type = other DNA
ctcgtgtgtaaaatggagatca

SEQ ID NO: 18580 - DNA, 22 bp, synthetic construct
  misc_feature 1..22: note = chemically synthesized
  source 1..22: mol_type = other DNA
tcgtgtgtaaaatggagatcac

SEQ ID NO: 18581 - DNA, 22 bp, synthetic construct
  misc_feature 1..22: note = chemically synthesized
  source 1..22: mol_type = other DNA
gtgtgtaaaatggagatcacag

SEQ ID NO: 18582 - DNA, 22 bp, synthetic construct
  misc_feature 1..22: note = chemically synthesized
  source 1..22: mol_type = other DNA
cccgattggattgctcggataa

SEQ ID NO: 18583 - DNA, 22 bp, synthetic construct
  misc_feature 1..22: note = chemically synthesized
  source 1..22: mol_type = other DNA
gattgctcggataattagatga

SEQ ID NO: 18584 - DNA, 22 bp, synthetic construct
  misc_feature 1..22: note = chemically synthesized
  source 1..22: mol_type = other DNA
ctcggataattagatgagttaa

SEQ ID NO: 18585 - DNA, 22 bp, synthetic construct
  misc_feature 1..22: note = chemically synthesized
  source 1..22: mol_type = other DNA
ggataattagatgagttaaaat

SEQ ID NO: 18586 - DNA, 22 bp, synthetic construct
  misc_feature 1..22: note = chemically synthesized
  source 1..22: mol_type = other DNA
gatgagttaaaatatgtaatgt

SEQ ID NO: 18587 - DNA, 22 bp, synthetic construct
  misc_feature 1..22: note = chemically synthesized
  source 1..22: mol_type = other DNA
aaatatgtaatgtgcttcttag

SEQ ID NO: 18588 - DNA, 22 bp, synthetic construct
  misc_feature 1..22: note = chemically synthesized
  source 1..22: mol_type = other DNA
cttaggcaaaagtttgaacata

SEQ ID NO: 18589 - DNA, 22 bp, synthetic construct
  misc_feature 1..22: note = chemically synthesized
  source 1..22: mol_type = other DNA
ttaggcaaaagtttgaacataa

SEQ ID NO: 18590 - DNA, 22 bp, synthetic construct
  misc_feature 1..22: note = chemically synthesized
  source 1..22: mol_type = other DNA
aggcaaaagtttgaacataaaa

SEQ ID NO: 18591 - DNA, 22 bp, synthetic construct
  misc_feature 1..22: note = chemically synthesized
  source 1..22: mol_type = other DNA
ggcaaaagtttgaacataaaag

SEQ ID NO: 18592 - DNA, 22 bp, synthetic construct
  misc_feature 1..22: note = chemically synthesized
  source 1..22: mol_type = other DNA
gaacataaaagacagggtctgc

SEQ ID NO: 18593 - DNA, 22 bp, synthetic construct
  misc_feature 1..22: note = chemically synthesized
  source 1..22: mol_type = other DNA
aacataaaagacagggtctgcc

SEQ ID NO: 18594 - DNA, 22 bp, synthetic construct
  misc_feature 1..22: note = chemically synthesized
  source 1..22: mol_type = other DNA
cccaagatgggaagagttcttc

SEQ ID NO: 18595 - DNA, 22 bp, synthetic construct
  misc_feature 1..22: note = chemically synthesized
  source 1..22: mol_type = other DNA
ttctctccccagaaacaatcaa

SEQ ID NO: 18596 - DNA, 22 bp, synthetic construct
  misc_feature 1..22: note = chemically synthesized
  source 1..22: mol_type = other DNA
ctctccccagaaacaatcaaaa

SEQ ID NO: 18597 - DNA, 22 bp, synthetic construct
  misc_feature 1..22: note = chemically synthesized
  source 1..22: mol_type = other DNA
tctccccagaaacaatcaaaac

SEQ ID NO: 18598 - DNA, 22 bp, synthetic construct
  misc_feature 1..22: note = chemically synthesized
  source 1..22: mol_type = other DNA
tccccagaaacaatcaaaacaa

SEQ ID NO: 18599 - DNA, 22 bp, synthetic construct
  misc_feature 1..22: note = chemically synthesized
  source 1..22: mol_type = other DNA
cccagaaacaatcaaaacaaaa

SEQ ID NO: 18600 - DNA, 22 bp, synthetic construct
  misc_feature 1..22: note = chemically synthesized
  source 1..22: mol_type = other DNA
tagaacatggcagctttcaaga

SEQ ID NO: 18601 - DNA, 22 bp, synthetic construct
  misc_feature 1..22: note = chemically synthesized
  source 1..22: mol_type = other DNA
tcaagactctggacatcaggca

SEQ ID NO: 18602 - DNA, 22 bp, synthetic construct
  misc_feature 1..22: note = chemically synthesized
  source 1..22: mol_type = other DNA
caagactctggacatcaggcaa

SEQ ID NO: 18603 - DNA, 22 bp, synthetic construct
  misc_feature 1..22: note = chemically synthesized
  source 1..22: mol_type = other DNA
aagactctggacatcaggcaag

SEQ ID NO: 18604 - DNA, 22 bp, synthetic construct
  misc_feature 1..22: note = chemically synthesized
  source 1..22: mol_type = other DNA
tggacatcaggcaaggaggagt

SEQ ID NO: 18605 - DNA, 22 bp, synthetic construct
  misc_feature 1..22: note = chemically synthesized
  source 1..22: mol_type = other DNA
gacatcaggcaaggaggagtaa

SEQ ID NO: 18606 - DNA, 22 bp, synthetic construct
  misc_feature 1..22: note = chemically synthesized
  source 1..22: mol_type = other DNA
agggataagaagcaaacaacag

SEQ ID NO: 18607 - DNA, 22 bp, synthetic construct
  misc_feature 1..22: note = chemically synthesized
  source 1..22: mol_type = other DNA
cgatcaccccagcttactgttt

SEQ ID NO: 18608 - DNA, 22 bp, synthetic construct
  misc_feature 1..22: note = chemically synthesized
  source 1..22: mol_type = other DNA
actgtttggagagagtctgcag

SEQ ID NO: 18609 - DNA, 22 bp, synthetic construct
  misc_feature 1..22: note = chemically synthesized
  source 1..22: mol_type = other DNA
ctgtttggagagagtctgcagg

SEQ ID NO: 18610 - DNA, 22 bp, synthetic construct
  misc_feature 1..22: note = chemically synthesized
  source 1..22: mol_type = other DNA
tttggagagagtctgcaggtta

SEQ ID NO: 18611 - DNA, 22 bp, synthetic construct
  misc_feature 1..22: note = chemically synthesized
  source 1..22: mol_type = other DNA
ggagagagtctgcaggttacag

SEQ ID NO: 18612 - DNA, 22 bp, synthetic construct
  misc_feature 1..22: note = chemically synthesized
  source 1..22: mol_type = other DNA
gagagagtctgcaggttacagg

SEQ ID NO: 18613 - DNA, 22 bp, synthetic construct
  misc_feature 1..22: note = chemically synthesized
  source 1..22: mol_type = other DNA
caggttacaggccaggaaaggg

SEQ ID NO: 18614 - DNA, 22 bp, synthetic construct
  misc_feature 1..22: note = chemically synthesized
  source 1..22: mol_type = other DNA
caggccaggaaagggaagtcca

SEQ ID NO: 18615 - DNA, 22 bp, synthetic construct
  misc_feature 1..22: note = chemically synthesized
  source 1..22: mol_type = other DNA
cccacgttgaggagatggagct

SEQ ID NO: 18616 - DNA, 22 bp, synthetic construct
  misc_feature 1..22: note = chemically synthesized
  source 1..22: mol_type = other DNA
aggagatggagctgagagtccg

SEQ ID NO: 18617 - DNA, 22 bp, synthetic construct
  misc_feature 1..22: note = chemically synthesized
  source 1..22: mol_type = other DNA
agagtccgaggagaccaaaaca

SEQ ID NO: 18618 - DNA, 22 bp, synthetic construct
  misc_feature 1..22: note = chemically synthesized
  source 1..22: mol_type = other DNA
agagttcaaacgatcaaactga

SEQ ID NO: 18619 - DNA, 22 bp, synthetic construct
  misc_feature 1..22: note = chemically synthesized
  source 1..22: mol_type = other DNA
aaacgatcaaactgactctaag

SEQ ID NO: 18620 - DNA, 22 bp, synthetic construct
  misc_feature 1..22: note = chemically synthesized
  source 1..22: mol_type = other DNA
actctaagttgcttaactgcat

SEQ ID NO: 18621 - DNA, 22 bp, synthetic construct
  misc_feature 1..22: note = chemically synthesized
  source 1..22: mol_type = other DNA
taagttgcttaactgcatcccg

SEQ ID NO: 18622 - DNA, 22 bp, synthetic construct
  misc_feature 1..22: note = chemically synthesized
  source 1..22: mol_type = other DNA
agttgcttaactgcatcccgga

SEQ ID NO: 18623 - DNA, 22 bp, synthetic construct
  misc_feature 1..22: note = chemically synthesized
  source 1..22: mol_type = other DNA
cttaactgcatcccggagcaaa

SEQ ID NO: 18624 - DNA, 22 bp, synthetic construct
  misc_feature 1..22: note = chemically synthesized
  source 1..22: mol_type = other DNA
aactgcatcccggagcaaagct

SEQ ID NO: 18625 - DNA, 22 bp, synthetic construct
  misc_feature 1..22: note = chemically synthesized
  source 1..22: mol_type = other DNA
actgcatcccggagcaaagctc

SEQ ID NO: 18626 - DNA, 22 bp, synthetic construct
  misc_feature 1..22: note = chemically synthesized
  source 1..22: mol_type = other DNA
catcccggagcaaagctcaaga

SEQ ID NO: 18627 - DNA, 22 bp, synthetic construct
  misc_feature 1..22: note = chemically synthesized
  source 1..22: mol_type = other DNA
aagaacatttagaggaatacaa

SEQ ID NO: 18628 - DNA, 22 bp, synthetic construct
  misc_feature 1..22: note = chemically synthesized
  source 1..22: mol_type = other DNA
agaggaatacaaaaatatccag

SEQ ID NO: 18629 - DNA, 22 bp, synthetic construct
  misc_feature 1..22: note = chemically synthesized
  source 1..22: mol_type = other DNA
gaggaatacaaaaatatccagc

SEQ ID NO: 18630 - DNA, 22 bp, synthetic construct
  misc_feature 1..22: note = chemically synthesized
  source 1..22: mol_type = other DNA
acaatgtctggcagccaatcaa

SEQ ID NO: 18631 - DNA, 22 bp, synthetic construct
  misc_feature 1..22: note = chemically synthesized
  source 1..22: mol_type = other DNA
gcagccaatcaaagattacaag

SEQ ID NO: 18632 - DNA, 22 bp, synthetic construct
  misc_feature 1..22: note = chemically synthesized
  source 1..22: mol_type = other DNA
caaggcatgcaatgaaacggga

SEQ ID NO: 18633 - DNA, 22 bp, synthetic construct
  misc_feature 1..22: note = chemically synthesized
  source 1..22: mol_type = other DNA
ataaatatcaaaagagatccag

SEQ ID NO: 18634 - DNA, 22 bp, synthetic construct
  misc_feature 1..22: note = chemically synthesized
  source 1..22: mol_type = other DNA
acacggatgctagaattagcag

SEQ ID NO: 18635 - DNA, 22 bp, synthetic construct
  misc_feature 1..22: note = chemically synthesized
  source 1..22: mol_type = other DNA
gaattagcaggcaaggatggta

SEQ ID NO: 18636 - DNA, 22 bp, synthetic construct
  misc_feature 1..22: note = chemically synthesized
  source 1..22: mol_type = other DNA
gcaggcaaggatggtaaaacag

SEQ ID NO: 18637 - DNA, 22 bp, synthetic construct
  misc_feature 1..22: note = chemically synthesized
  source 1..22: mol_type = other DNA
tagccatatcccattatgttca

SEQ ID NO: 18638 - DNA, 22 bp, synthetic construct
  misc_feature 1..22: note = chemically synthesized
  source 1..22: mol_type = other DNA
tgttcaaaaaattaagtagaat

SEQ ID NO: 18639 - DNA, 22 bp, synthetic construct
  misc_feature 1..22: note = chemically synthesized
  source 1..22: mol_type = other DNA
aaaaaattaagtagaattgtgg

SEQ ID NO: 18640 - DNA, 22 bp, synthetic construct
  misc_feature 1..22: note = chemically synthesized
  source 1..22: mol_type = other DNA
agtagaattgtggaggatattt

SEQ ID NO: 18641 - DNA, 22 bp, synthetic construct
  misc_feature 1..22: note = chemically synthesized
  source 1..22: mol_type = other DNA
tggaggatatttaagagtcccc

SEQ ID NO: 18642 - DNA, 22 bp, synthetic construct
  misc_feature 1..22: note = chemically synthesized
  source 1..22: mol_type = other DNA
aagagtccccaggtgaacttct

SEQ ID NO: 18643 - DNA, 22 bp, synthetic construct
  misc_feature 1..22: note = chemically synthesized
  source 1..22: mol_type = other DNA
agagtccccaggtgaacttcta

SEQ ID NO: 18644 - DNA, 22 bp, synthetic construct
  misc_feature 1..22: note = chemically synthesized
  source 1..22: mol_type = other DNA
ctagagataaaaactacaatgt

SEQ ID NO: 18645 - DNA, 22 bp, synthetic construct
  misc_feature 1..22: note = chemically synthesized
  source 1..22: mol_type = other DNA
tagagataaaaactacaatgtc

SEQ ID NO: 18646 - DNA, 22 bp, synthetic construct
  misc_feature 1..22: note = chemically synthesized
  source 1..22: mol_type = other DNA
gagataaaaactacaatgtctg

SEQ ID NO: 18647 - DNA, 22 bp, synthetic construct
  misc_feature 1..22: note = chemically synthesized
  source 1..22: mol_type = other DNA
caatgtctgaaatgaaaaaaca

SEQ ID NO: 18648 - DNA, 22 bp, synthetic construct
  misc_feature 1..22: note = chemically synthesized
  source 1..22: mol_type = other DNA
aaatgaaaaaacacactggcca

SEQ ID NO: 18649 - DNA, 22 bp, synthetic construct
  misc_feature 1..22: note = chemically synthesized
  source 1..22: mol_type = other DNA
gccaggcgccgtggctcacgcc

SEQ ID NO: 18650 - DNA, 22 bp, synthetic construct
  misc_feature 1..22: note = chemically synthesized
  source 1..22: mol_type = other DNA
acgcctggaatcccagcactgt

SEQ ID NO: 18651 - DNA, 22 bp, synthetic construct
  misc_feature 1..22: note = chemically synthesized
  source 1..22: mol_type = other DNA
gaatcccagcactgtgggaggc

SEQ ID NO: 18652 - DNA, 22 bp, synthetic construct
  misc_feature 1..22: note = chemically synthesized
  source 1..22: mol_type = other DNA
tgggaggccaaggcgggcagat

SEQ ID NO: 18653 - DNA, 22 bp, synthetic construct
  misc_feature 1..22: note = chemically synthesized
  source 1..22: mol_type = other DNA
gctaacatggtgaaaccccatc

SEQ ID NO: 18654 - DNA, 22 bp, synthetic construct
  misc_feature 1..22: note = chemically synthesized
  source 1..22: mol_type = other DNA
acatggtgaaaccccatctcta

SEQ ID NO: 18655 - DNA, 22 bp, synthetic construct
  misc_feature 1..22: note = chemically synthesized
  source 1..22: mol_type = other DNA
tactaaaaatacaaaaaattag

SEQ ID NO: 18656 - DNA, 22 bp, synthetic construct
  misc_feature 1..22: note = chemically synthesized
  source 1..22: mol_type = other DNA
ctaaaaatacaaaaaattagcc

SEQ ID NO: 18657 - DNA, 22 bp, synthetic construct
  misc_feature 1..22: note = chemically synthesized
  source 1..22: mol_type = other DNA
aaaatacaaaaaattagccaga

SEQ ID NO: 18658 - DNA, 22 bp, synthetic construct
  misc_feature 1..22: note = chemically synthesized
  source 1..22: mol_type = other DNA
gccagacgtggtggcaggcgcc

SEQ ID NO: 18659 - DNA, 22 bp, synthetic construct
  misc_feature 1..22: note = chemically synthesized
  source 1..22: mol_type = other DNA
tagtcccagctactcgggaggc

SEQ ID NO: 18660 - DNA, 22 bp, synthetic construct
  misc_feature 1..22: note = chemically synthesized
  source 1..22: mol_type = other DNA
ctcgggaggctgaggcaggaga

SEQ ID NO: 18661 - DNA, 22 bp, synthetic construct
  misc_feature 1..22: note = chemically synthesized
  source 1..22: mol_type = other DNA
gggaggctgaggcaggagaatg

SEQ ID NO: 18662 - DNA, 22 bp, synthetic construct
  misc_feature 1..22: note = chemically synthesized
  source 1..22: mol_type = other DNA
aggcaggagaatggcatgaacc

SEQ ID NO: 18663 - DNA, 22 bp, synthetic construct
  misc_feature 1..22: note = chemically synthesized
  source 1..22: mol_type = other DNA
gcagtgagccaagatcgcgcca

SEQ ID NO: 18664 - DNA, 22 bp, synthetic construct
  misc_feature 1..22: note = chemically synthesized
  source 1..22: mol_type = other DNA
cagtgagccaagatcgcgccac

SEQ ID NO: 18665 - DNA, 22 bp, synthetic construct
  misc_feature 1..22: note = chemically synthesized
  source 1..22: mol_type = other DNA
cactccggcctgggcaacagag

SEQ ID NO: 18666 - DNA, 22 bp, synthetic construct
  misc_feature 1..22: note = chemically synthesized
  source 1..22: mol_type = other DNA
cggcctgggcaacagagcgaga

SEQ ID NO: 18667 - DNA, 22 bp, synthetic construct
  misc_feature 1..22: note = chemically synthesized
  source 1..22: mol_type = other DNA
ggcaacagagcgagactccgcc

SEQ ID NO: 18668 - DNA, 22 bp, synthetic construct
  misc_feature 1..22: note = chemically synthesized
  source 1..22: mol_type = other DNA
cgcctccaaaaaaaaaaaaaag

SEQ ID NO: 18669 - DNA, 22 bp, synthetic construct
  misc_feature 1..22: note = chemically synthesized
  source 1..22: mol_type = other DNA
caaaaaaaaaaaaaagaaaaga

SEQ ID NO: 18670 - DNA, 22 bp, synthetic construct
  misc_feature 1..22: note = chemically synthesized
  source 1..22: mol_type = other DNA
gatggaaataatggaagatgag

SEQ ID NO: 18671 - DNA, 22 bp, synthetic construct
  misc_feature 1..22: note = chemically synthesized
  source 1..22: mol_type = other DNA
agggccaggcactgtggatcac

SEQ ID NO: 18672 - DNA, 22 bp, synthetic construct
  misc_feature 1..22: note = chemically synthesized
  source 1..22: mol_type = other DNA
gggccaggcactgtggatcaca

SEQ ID NO: 18673 - DNA, 22 bp, synthetic construct
  misc_feature 1..22: note = chemically synthesized
  source 1..22: mol_type = other DNA
tggatcacatctgtaatcccag

SEQ ID NO: 18674 - DNA, 22 bp, synthetic construct
  misc_feature 1..22: note = chemically synthesized
  source 1..22: mol_type = other DNA
taatcccagcactttgggaggt

SEQ ID NO: 18675 - DNA, 22 bp, synthetic construct
  misc_feature 1..22: note = chemically synthesized
  source 1..22: mol_type = other DNA
tgggaggtcgacacggggggaa

SEQ ID NO: 18676 - DNA, 22 bp, synthetic construct
  misc_feature 1..22: note = chemically synthesized
  source 1..22: mol_type = other DNA
gggaggtcgacacggggggaat

SEQ ID NO: 18677 - DNA, 22 bp, synthetic construct
  misc_feature 1..22: note = chemically synthesized
  source 1..22: mol_type = other DNA
ggaggtcgacacggggggaatc

SEQ ID NO: 18678 - DNA, 22 bp, synthetic construct
  misc_feature 1..22: note = chemically synthesized
  source 1..22: mol_type = other DNA
gagcccaggagctcaagactag

SEQ ID NO: 18679 - DNA, 22 bp, synthetic construct
  misc_feature 1..22: note = chemically synthesized
  source 1..22: mol_type = other DNA
agcccaggagctcaagactagt

SEQ ID NO: 18680 - DNA, 22 bp, synthetic construct
  misc_feature 1..22: note = chemically synthesized
  source 1..22: mol_type = other DNA
aagactagtctgggcagcatgg

SEQ ID NO: 18681 - DNA, 22 bp, synthetic construct
  misc_feature 1..22: note = chemically synthesized
  source 1..22: mol_type = other DNA
gtctgggcagcatggcaaaacc

SEQ ID NO: 18682 - DNA, 22 bp, synthetic construct
  misc_feature 1..22: note = chemically synthesized
  source 1..22: mol_type = other DNA
ggcagcatggcaaaacccctct

SEQ ID NO: 18683 - DNA, 22 bp, synthetic construct
  misc_feature 1..22: note = chemically synthesized
  source 1..22: mol_type = other DNA
tacatggcaaaaccgtctctac

SEQ ID NO: 18684 - DNA, 22 bp, synthetic construct
  misc_feature 1..22: note = chemically synthesized
  source 1..22: mol_type = other DNA
catggcaaaaccgtctctacaa

SEQ ID NO: 18685 - DNA, 22 bp, synthetic construct
  misc_feature 1..22: note = chemically synthesized
  source 1..22: mol_type = other DNA
tacaaaaaaaaatttttaatta

SEQ ID NO: 18686 - DNA, 22 bp, synthetic construct
  misc_feature 1..22: note = chemically synthesized
  source 1..22: mol_type = other DNA
caaaaaaaaatttttaattagc

SEQ ID NO: 18687 - DNA, 22 bp, synthetic construct
  misc_feature 1..22: note = chemically synthesized
  source 1..22: mol_type = other DNA
ttaattagccaggtgtggtgcc

SEQ ID NO: 18688 - DNA, 22 bp, synthetic construct
  misc_feature 1..22: note = chemically synthesized
  source 1..22: mol_type = other DNA
taattagccaggtgtggtgcca

SEQ ID NO: 18689 - DNA, 22 bp, synthetic construct
  misc_feature 1..22: note = chemically synthesized
  source 1..22: mol_type = other DNA
aattagccaggtgtggtgccac

SEQ ID NO: 18690 - DNA, 22 bp, synthetic construct
  misc_feature 1..22: note = chemically synthesized
  source 1..22: mol_type = other DNA
attagccaggtgtggtgccaca

SEQ ID NO: 18691 - DNA, 22 bp, synthetic construct
  misc_feature 1..22: note = chemically synthesized
  source 1..22: mol_type = other DNA
gccaggtgtggtgccacatgcc

SEQ ID NO: 18692 - DNA, 22 bp, synthetic construct
  misc_feature 1..22: note = chemically synthesized
  source 1..22: mol_type = other DNA
tagtcccagctacctgggaggc

SEQ ID NO: 18693 - DNA, 22 bp, synthetic construct
  misc_feature 1..22: note = chemically synthesized
  source 1..22: mol_type = other DNA
cctgggaggctgaagtggaagg

SEQ ID NO: 18694 - DNA, 22 bp, synthetic construct
  misc_feature 1..22: note = chemically synthesized
  source 1..22: mol_type = other DNA
ggaggctgaagtggaaggatcg

SEQ ID NO: 18695 - DNA, 22 bp, synthetic construct
  misc_feature 1..22: note = chemically synthesized
  source 1..22: mol_type = other DNA
aagtggaaggatcgcctgagcc

SEQ ID NO: 18696 - DNA, 22 bp, synthetic construct
  misc_feature 1..22: note = chemically synthesized
  source 1..22: mol_type = other DNA
agcccaggaggtggaggccaca

SEQ ID NO: 18697 - DNA, 22 bp, synthetic construct
  misc_feature 1..22: note = chemically synthesized
  source 1..22: mol_type = other DNA
tgacaagctactgcattccagc

SEQ ID NO: 18698 - DNA, 22 bp, synthetic construct
  misc_feature 1..22: note = chemically synthesized
  source 1..22: mol_type = other DNA
ctgcattccagcctgggcaaca

SEQ ID NO: 18699 - DNA, 22 bp, synthetic construct
  misc_feature 1..22: note = chemically synthesized
  source 1..22: mol_type = other DNA
cattccagcctgggcaacagag

SEQ ID NO: 18700 - DNA, 22 bp, synthetic construct
  misc_feature 1..22: note = chemically synthesized
  source 1..22: mol_type = other DNA
cagcctgggcaacagagtgaga

SEQ ID NO: 18701 - DNA, 22 bp, synthetic construct
  misc_feature 1..22: note = chemically synthesized
  source 1..22: mol_type = other DNA
ggcaacagagtgagatgagaga

SEQ ID NO: 18702 - DNA, 22 bp, synthetic construct
  misc_feature 1..22: note = chemically synthesized
  source 1..22: mol_type = other DNA
tagttaacttaatgaacagcaa

SEQ ID NO: 18703 - DNA, 22 bp, synthetic construct
  misc_feature 1..22: note = chemically synthesized
  source 1..22: mol_type = other DNA
agttaacttaatgaacagcaat

SEQ ID NO: 18704 - DNA, 22 bp, synthetic construct
  misc_feature 1..22: note = chemically synthesized
  source 1..22: mol_type = other DNA
gttaacttaatgaacagcaata

SEQ ID NO: 18705 - DNA, 22 bp, synthetic construct
  misc_feature 1..22: note = chemically synthesized
  source 1..22: mol_type = other DNA
acttaatgaacagcaataactc

SEQ ID NO: 18706 - DNA, 22 bp, synthetic construct
  misc_feature 1..22: note = chemically synthesized
  source 1..22: mol_type = other DNA
aatgaacagcaataactctata

SEQ ID NO: 18707 - DNA, 22 bp, synthetic construct
  misc_feature 1..22: note = chemically synthesized
  source 1..22: mol_type = other DNA
atgaacagcaataactctataa

SEQ ID NO: 18708 - DNA, 22 bp, synthetic construct
  misc_feature 1..22: note = chemically synthesized
  source 1..22: mol_type = other DNA
tataaaatgaaacactgggaga

SEQ ID NO: 18709 - DNA, 22 bp, synthetic construct
  misc_feature 1..22: note = chemically synthesized
  source 1..22: mol_type = other DNA
taaaatgaaacactgggagaaa

SEQ ID NO: 18710 - DNA, 22 bp, synthetic construct
  misc_feature 1..22: note = chemically synthesized
  source 1..22: mol_type = other DNA
ggagaaaaaagaattaaaaaat

SEQ ID NO: 18711 - DNA, 22 bp, synthetic construct
  misc_feature 1..22: note = chemically synthesized
  source 1..22: mol_type = other DNA
aaaaatggaaagagaatgagtg

SEQ ID NO: 18712 - DNA, 22 bp, synthetic construct
  misc_feature 1..22: note = chemically synthesized
  source 1..22: mol_type = other DNA
tgggacccttaatacatgcata

SEQ ID NO: 18713 - DNA, 22 bp, synthetic construct
  misc_feature 1..22: note = chemically synthesized
  source 1..22: mol_type = other DNA
aatacatgcataattgaaatct

SEQ ID NO: 18714 - DNA, 22 bp, synthetic construct
  misc_feature 1..22: note = chemically synthesized
  source 1..22: mol_type = other DNA
atacatgcataattgaaatctt

SEQ ID NO: 18715 - DNA, 22 bp, synthetic construct
  misc_feature 1..22: note = chemically synthesized
  source 1..22: mol_type = other DNA
aaatctttaaaagaaaaagggg

SEQ ID NO: 18716 - DNA, 22 bp, synthetic construct
  misc_feature 1..22: note = chemically synthesized
  source 1..22: mol_type = other DNA
taaaagaaaaagggggtagcag

SEQ ID NO: 18717 - DNA, 22 bp, synthetic construct
  misc_feature 1..22: note = chemically synthesized
  source 1..22: mol_type = other DNA
aaaagaaaaagggggtagcaga

SEQ ID NO: 18718 - DNA, 22 bp, synthetic construct
  misc_feature 1..22: note = chemically synthesized
  source 1..22: mol_type = other DNA
aaagaaaaagggggtagcagaa

SEQ ID NO: 18719 - DNA, 22 bp, synthetic construct
  misc_feature 1..22: note = chemically synthesized
  source 1..22: mol_type = other DNA
agacaagtggaagatgggcccc

SEQ ID NO: 18720 - DNA, 22 bp, synthetic construct
  misc_feature 1..22: note = chemically synthesized
  source 1..22: mol_type = other DNA
atcagtgtcagctcccatgatg

SEQ ID NO: 18721 - DNA, 22 bp, synthetic construct
  misc_feature 1..22: note = chemically synthesized
  source 1..22: mol_type = other DNA
ccatgatgacgttcccccagcc

SEQ ID NO: 18722 - DNA, 22 bp, synthetic construct
  misc_feature 1..22: note = chemically synthesized
  source 1..22: mol_type = other DNA
ccccagcccccaccacccgggc

SEQ ID NO: 18723 - DNA, 22 bp, synthetic construct
  misc_feature 1..22: note = chemically synthesized
  source 1..22: mol_type = other DNA
ctggagggaaatgcggtgactt

SEQ ID NO: 18724 - DNA, 22 bp, synthetic construct
  misc_feature 1..22: note = chemically synthesized
  source 1..22: mol_type = other DNA
gagggaaatgcggtgactttgc

SEQ ID NO: 18725 - DNA, 22 bp, synthetic construct
  misc_feature 1..22: note = chemically synthesized
  source 1..22: mol_type = other DNA
tgctacatcccttcagacggtc

SEQ ID NO: 18726 - DNA, 22 bp, synthetic construct
  misc_feature 1..22: note = chemically synthesized
  source 1..22: mol_type = other DNA
gctacatcccttcagacggtcc

SEQ ID NO: 18727 - DNA, 22 bp, synthetic construct
  misc_feature 1..22: note = chemically synthesized
  source 1..22: mol_type = other DNA
ctacatcccttcagacggtccc

SEQ ID NO: 18728 - DNA, 22 bp, synthetic construct
  misc_feature 1..22: note = chemically synthesized
  source 1..22: mol_type = other DNA
catcccttcagacggtccctca

SEQ ID NO: 18729 - DNA, 22 bp, synthetic construct
  misc_feature 1..22: note = chemically synthesized
  source 1..22: mol_type = other DNA
cagacggtccctcactggtgtc

SEQ ID NO: 18730 - DNA, 22 bp, synthetic construct
  misc_feature 1..22: note = chemically synthesized
  source 1..22: mol_type = other DNA
agacggtccctcactggtgtcc

SEQ ID NO: 18731 - DNA, 22 bp, synthetic construct
  misc_feature 1..22: note = chemically synthesized
  source 1..22: mol_type = other DNA
actggtgtccctcagcccattc

SEQ ID NO: 18732 - DNA, 22 bp, synthetic construct
  misc_feature 1..22: note = chemically synthesized
  source 1..22: mol_type = other DNA
gtgtccctcagcccattcgcgt

SEQ ID NO: 18733 - DNA, 22 bp, synthetic construct
  misc_feature 1..22: note = chemically synthesized
  source 1..22: mol_type = other DNA
agcccattcgcgtgagctcact

SEQ ID NO: 18734 - DNA, 22 bp, synthetic construct
  misc_feature 1..22: note = chemically synthesized
  source 1..22: mol_type = other DNA
gcgtgagctcactctcccatta

SEQ ID NO: 18735 - DNA, 22 bp, synthetic construct
  misc_feature 1..22: note = chemically synthesized
  source 1..22: mol_type = other DNA
actctcccattaatttcagaaa

SEQ ID NO: 18736 - DNA, 22 bp, synthetic construct
  misc_feature 1..22: note = chemically synthesized
  source 1..22: mol_type = other DNA
tcccattaatttcagaaatcct

SEQ ID NO: 18737 - DNA, 22 bp, synthetic construct
  misc_feature 1..22: note = chemically synthesized
  source 1..22: mol_type = other DNA
ccattaatttcagaaatcctgg

SEQ ID NO: 18738 - DNA, 22 bp, synthetic construct
  misc_feature 1..22: note = chemically synthesized
  source 1..22: mol_type = other DNA
atttcagaaatcctggcctctc

SEQ ID NO: 18739 - DNA, 22 bp, synthetic construct
  misc_feature 1..22: note = chemically synthesized
  source 1..22: mol_type = other DNA
cagaaatcctggcctctctcca

SEQ ID NO: 18740 - DNA, 22 bp, synthetic construct
  misc_feature 1..22: note = chemically synthesized
  source 1..22: mol_type = other DNA
agaaatcctggcctctctccaa

SEQ ID NO: 18741 - DNA, 22 bp, synthetic construct
  misc_feature 1..22: note = chemically synthesized
  source 1..22: mol_type = other DNA
gcctctctccaagcctcctgct

SEQ ID NO: 18742 - DNA, 22 bp, synthetic construct
  misc_feature 1..22: note = chemically synthesized
  source 1..22: mol_type = other DNA
tctccaagcctcctgctcaaac

SEQ ID NO: 18743 - DNA, 22 bp, synthetic construct
  misc_feature 1..22: note = chemically synthesized
  source 1..22: mol_type = other DNA
tccaagcctcctgctcaaactc

SEQ ID NO: 18744 - DNA, 22 bp, synthetic construct
  misc_feature 1..22: note = chemically synthesized
  source 1..22: mol_type = other DNA
caagcctcctgctcaaactcta

SEQ ID NO: 18745 - DNA, 22 bp, synthetic construct
  misc_feature 1..22: note = chemically synthesized
  source 1..22: mol_type = other DNA
ctgctcaaactctaaattctgt

SEQ ID NO: 18746 - DNA, 22 bp, synthetic construct
  misc_feature 1..22: note = chemically synthesized
  source 1..22: mol_type = other DNA
ctcaaactctaaattctgtcac

SEQ ID NO: 18747 - DNA, 22 bp, synthetic construct
  misc_feature 1..22: note = chemically synthesized
  source 1..22: mol_type = other DNA
aaactctaaattctgtcaccct

SEQ ID NO: 18748 - DNA, 22 bp, synthetic construct
  misc_feature 1..22: note = chemically synthesized
  source 1..22: mol_type = other DNA
taaattctgtcaccctcagaag

SEQ ID NO: 18749 - DNA, 22 bp, synthetic construct
  misc_feature 1..22: note = chemically synthesized
  source 1..22: mol_type = other DNA
aattctgtcaccctcagaagat

SEQ ID NO: 18750 - DNA, 22 bp, synthetic construct
  misc_feature 1..22: note = chemically synthesized
  source 1..22: mol_type = other DNA
tgtcaccctcagaagattcagc

SEQ ID NO: 18751 - DNA, 22 bp, synthetic construct
  misc_feature 1..22: note = chemically synthesized
  source 1..22: mol_type = other DNA
tcaccctcagaagattcagcag

SEQ ID NO: 18752 - DNA, 22 bp, synthetic construct
  misc_feature 1..22: note = chemically synthesized
  source 1..22: mol_type = other DNA
agaagattcagcagcatcccgt

SEQ ID NO: 18753 - DNA, 22 bp, synthetic construct
  misc_feature 1..22: note = chemically synthesized
  source 1..22: mol_type = other DNA
agcagcatcccgtattctctct

SEQ ID NO: 18754 - DNA, 22 bp, synthetic construct
  misc_feature 1..22: note = chemically synthesized
  source 1..22: mol_type = other DNA
tctctgagtgttcactatgtac

SEQ ID NO: 18755 - DNA, 22 bp, synthetic construct
  misc_feature 1..22: note = chemically synthesized
  source 1..22: mol_type = other DNA
tctgagtgttcactatgtaccg

SEQ ID NO: 18756 - DNA, 22 bp, synthetic construct
  misc_feature 1..22: note = chemically synthesized
  source 1..22: mol_type = other DNA
tgagtgttcactatgtaccggg

SEQ ID NO: 18757 - DNA, 22 bp, synthetic construct
  misc_feature 1..22: note = chemically synthesized
  source 1..22: mol_type = other DNA
agtgttcactatgtaccgggtg

SEQ ID NO: 18758 - DNA, 22 bp, synthetic construct
  misc_feature 1..22: note = chemically synthesized
  source 1..22: mol_type = other DNA
actatgtaccgggtgccgtgtg

SEQ ID NO: 18759 - DNA, 22 bp, synthetic construct
  misc_feature 1..22: note = chemically synthesized
  source 1..22: mol_type = other DNA
tgtaccgggtgccgtgtgggca

SEQ ID NO: 18760 - DNA, 22 bp, synthetic construct
  misc_feature 1..22: note = chemically synthesized
  source 1..22: mol_type = other DNA
gagttgcagaggagagtgaggc

SEQ ID NO: 18761 - DNA, 22 bp, synthetic construct
  misc_feature 1..22: note = chemically synthesized
  source 1..22: mol_type = other DNA
cagaggagagtgaggcggacag

SEQ ID NO: 18762 - DNA, 22 bp, synthetic construct
  misc_feature 1..22: note = chemically synthesized
  source 1..22: mol_type = other DNA
tgcctgtggggacaccgcctgg

SEQ ID NO: 18763 - DNA, 22 bp, synthetic construct
  misc_feature 1..22: note = chemically synthesized
  source 1..22: mol_type = other DNA
cctgtggggacaccgcctggtg

SEQ ID NO: 18764 - DNA, 22 bp, synthetic construct
  misc_feature 1..22: note = chemically synthesized
  source 1..22: mol_type = other DNA
tggggacaccgcctggtgggaa

SEQ ID NO: 18765 - DNA, 22 bp, synthetic construct
  misc_feature 1..22: note = chemically synthesized
  source 1..22: mol_type = other DNA
gtgggaagtccagccagccccc

SEQ ID NO: 18766 - DNA, 22 bp, synthetic construct
  misc_feature 1..22: note = chemically synthesized
  source 1..22: mol_type = other DNA
cagagagaggagatgctactgg

SEQ ID NO: 18767 - DNA, 22 bp, synthetic construct
  misc_feature 1..22: note = chemically synthesized
  source 1..22: mol_type = other DNA
ctggtgttcctgagtggtcctc

SEQ ID NO: 18768 - DNA, 22 bp, synthetic construct
  misc_feature 1..22: note = chemically synthesized
  source 1..22: mol_type = other DNA
gtgttcctgagtggtcctcggg

SEQ ID NO: 18769 - DNA, 22 bp, synthetic construct
  misc_feature 1..22: note = chemically synthesized
  source 1..22: mol_type = other DNA
ctgagtggtcctcgggagggac

SEQ ID NO: 18770 - DNA, 22 bp, synthetic construct
  misc_feature 1..22: note = chemically synthesized
  source 1..22: mol_type = other DNA
agtggtcctcgggagggacctc

SEQ ID NO: 18771 - DNA, 22 bp, synthetic construct
  misc_feature 1..22: note = chemically synthesized
  source 1..22: mol_type = other DNA
gggagggacctcctatccctcc

SEQ ID NO: 18772 - DNA, 22 bp, synthetic construct
  misc_feature 1..22: note = chemically synthesized
  source 1..22: mol_type = other DNA
ctatccctcctgtcccctgccc

SEQ ID NO: 18773 - DNA, 22 bp, synthetic construct
  misc_feature 1..22: note = chemically synthesized
  source 1..22: mol_type = other DNA
tccctcctgtcccctgccctgc

SEQ ID NO: 18774 - DNA, 22 bp, synthetic construct
  misc_feature 1..22: note = chemically synthesized
  source 1..22: mol_type = other DNA
ctgtcccctgccctgccctgcc

SEQ ID NO: 18775 - DNA, 22 bp, synthetic construct
  misc_feature 1..22: note = chemically synthesized
  source 1..22: mol_type = other DNA
tcccctgccctgccctgcccag

SEQ ID NO: 18776 - DNA, 22 bp, synthetic construct
  misc_feature 1..22: note = chemically synthesized
  source 1..22: mol_type = other DNA
ccctgccctgcccagcaccggc

SEQ ID NO: 18777 - DNA, 22 bp, synthetic construct
  misc_feature 1..22: note = chemically synthesized
  source 1..22: mol_type = other DNA
ccctgcccagcaccggccctcc

SEQ ID NO: 18778 - DNA, 22 bp, synthetic construct
  misc_feature 1..22: note = chemically synthesized
  source 1..22: mol_type = other DNA
cccagcaccggccctccctcgg

SEQ ID NO: 18779 - DNA, 22 bp, synthetic construct
  misc_feature 1..22: note = chemically synthesized
  source 1..22: mol_type = other DNA
cctcggttggccagcctcagga

SEQ ID NO: 18780 - DNA, 22 bp, synthetic construct
  misc_feature 1..22: note = chemically synthesized
  source 1..22: mol_type = other DNA
ggttggccagcctcaggaatga

SEQ ID NO: 18781 - DNA, 22 bp, synthetic construct
  misc_feature 1..22: note = chemically synthesized
  source 1..22: mol_type = other DNA
gccagcctcaggaatgaggagt

SEQ ID NO: 18782 - DNA, 22 bp, synthetic construct
  misc_feature 1..22: note = chemically synthesized
  source 1..22: mol_type = other DNA
aggaatgaggagtccctcattc

SEQ ID NO: 18783 - DNA, 22 bp, synthetic construct
  misc_feature 1..22: note = chemically synthesized
  source 1..22: mol_type = other DNA
attccagcccagctaaccaatc

SEQ ID NO: 18784 - DNA, 22 bp, synthetic construct
  misc_feature 1..22: note = chemically synthesized
  source 1..22: mol_type = other DNA
cagcccagctaaccaatcccct

SEQ ID NO: 18785 - DNA, 22 bp, synthetic construct
  misc_feature 1..22: note = chemically synthesized
  source 1..22: mol_type = other DNA
accaatccccttcctaagctcc

SEQ ID NO: 18786 - DNA, 22 bp, synthetic construct
  misc_feature 1..22: note = chemically synthesized
  source 1..22: mol_type = other DNA
cctaagctccaagcccctgctc

SEQ ID NO: 18787 - DNA, 22 bp, synthetic construct
  misc_feature 1..22: note = chemically synthesized
  source 1..22: mol_type = other DNA
ctaagctccaagcccctgctcc

SEQ ID NO: 18788 - DNA, 22 bp, synthetic construct
  misc_feature 1..22: note = chemically synthesized
  source 1..22: mol_type = other DNA
agctccaagcccctgctcctcc

SEQ ID NO: 18789 - DNA, 22 bp, synthetic construct
  misc_feature 1..22: note = chemically synthesized
  source 1..22: mol_type = other DNA
caagcccctgctcctcctgcct

SEQ ID NO: 18790 - DNA, 22 bp, synthetic construct
  misc_feature 1..22: note = chemically synthesized
  source 1..22: mol_type = other DNA
ctcctcctgcctccatggaacc

SEQ ID NO: 18791 - DNA, 22 bp, synthetic construct
  misc_feature 1..22: note = chemically synthesized
  source 1..22: mol_type = other DNA
ctcctgcctccatggaacccgg

SEQ ID NO: 18792 - DNA, 22 bp, synthetic construct
  misc_feature 1..22: note = chemically synthesized
  source 1..22: mol_type = other DNA
ctgcctccatggaacccggctc

SEQ ID NO: 18793 - DNA, 22 bp, synthetic construct
  misc_feature 1..22: note = chemically synthesized
  source 1..22: mol_type = other DNA
cctccatggaacccggctccac

SEQ ID NO: 18794 - DNA, 22 bp, synthetic construct
  misc_feature 1..22: note = chemically synthesized
  source 1..22: mol_type = other DNA
catggaacccggctccaccacc

SEQ ID NO: 18795 - DNA, 22 bp, synthetic construct
  misc_feature 1..22: note = chemically synthesized
  source 1..22: mol_type = other DNA
caccaccagcacccacacacct

SEQ ID NO: 18796 - DNA, 22 bp, synthetic construct
  misc_feature 1..22: note = chemically synthesized
  source 1..22: mol_type = other DNA
acactcctccattcctggctct

SEQ ID NO: 18797 - DNA, 22 bp, synthetic construct
  misc_feature 1..22: note = chemically synthesized
  source 1..22: mol_type = other DNA
ctccattcctggctcttgccct

SEQ ID NO: 18798 - DNA, 22 bp, synthetic construct
  misc_feature 1..22: note = chemically synthesized
  source 1..22: mol_type = other DNA
cattcctggctcttgcccttct

SEQ ID NO: 18799 - DNA, 22 bp, synthetic construct
  misc_feature 1..22: note = chemically synthesized
  source 1..22: mol_type = other DNA
ctggctcttgcccttctgccta

SEQ ID NO: 18800 - DNA, 22 bp, synthetic construct
  misc_feature 1..22: note = chemically synthesized
  source 1..22: mol_type = other DNA
gctcttgcccttctgcctagca

SEQ ID NO: 18801 - DNA, 22 bp, synthetic construct
  misc_feature 1..22: note = chemically synthesized
  source 1..22: mol_type = other DNA
ttgcccttctgcctagcactgc

SEQ ID NO: 18802 - DNA, 22 bp, synthetic construct
  misc_feature 1..22: note = chemically synthesized
  source 1..22: mol_type = other DNA
gcccttctgcctagcactgctc

SEQ ID NO: 18803 - DNA, 22 bp, synthetic construct
  misc_feature 1..22: note = chemically synthesized
  source 1..22: mol_type = other DNA
cccttctgcctagcactgctca

SEQ ID NO: 18804 - DNA, 22 bp, synthetic construct
  misc_feature 1..22: note = chemically synthesized
  source 1..22: mol_type = other DNA
ctgcctagcactgctcagatct

SEQ ID NO: 18805 - DNA, 22 bp, synthetic construct
  misc_feature 1..22: note = chemically synthesized
  source 1..22: mol_type = other DNA
tgcctagcactgctcagatctc

SEQ ID NO: 18806 - DNA, 22 bp, synthetic construct
  misc_feature 1..22: note = chemically synthesized
  source 1..22: mol_type = other DNA
cctagcactgctcagatctctc

SEQ ID NO: 18807 - DNA, 22 bp, synthetic construct
  misc_feature 1..22: note = chemically synthesized
  source 1..22: mol_type = other DNA
gcactgctcagatctctctcac

SEQ ID NO: 18808 - DNA, 22 bp, synthetic construct
  misc_feature 1..22: note = chemically synthesized
  source 1..22: mol_type = other DNA
ctcagatctctctcaccttaaa

SEQ ID NO: 18809 - DNA, 22 bp, synthetic construct
  misc_feature 1..22: note = chemically synthesized
  source 1..22: mol_type = other DNA
agatctctctcaccttaaaatc

SEQ ID NO: 18810 - DNA, 22 bp, synthetic construct
  misc_feature 1..22: note = chemically synthesized
  source 1..22: mol_type = other DNA
tctcaccttaaaatcttttccc

SEQ ID NO: 18811 - DNA, 22 bp, synthetic construct
  misc_feature 1..22: note = chemically synthesized
  source 1..22: mol_type = other DNA
tcaccttaaaatcttttcccac

SEQ ID NO: 18812 - DNA, 22 bp, synthetic construct
  misc_feature 1..22: note = chemically synthesized
  source 1..22: mol_type = other DNA
accttaaaatcttttcccacca

SEQ ID NO: 18813 - DNA, 22 bp, synthetic construct
  misc_feature 1..22: note = chemically synthesized
  source 1..22: mol_type = other DNA
aaaatcttttcccaccagcctg

SEQ ID NO: 18814 - DNA, 22 bp, synthetic construct
  misc_feature 1..22: note = chemically synthesized
  source 1..22: mol_type = other DNA
aaatcttttcccaccagcctgg

SEQ ID NO: 18815 - DNA, 22 bp, synthetic construct
  misc_feature 1..22: note = chemically synthesized
  source 1..22: mol_type = other DNA
ttcccaccagcctgggcaacat

SEQ ID NO: 18816 - DNA, 22 bp, synthetic construct
  misc_feature 1..22: note = chemically synthesized
  source 1..22: mol_type = other DNA
tcccaccagcctgggcaacata

SEQ ID NO: 18817 - DNA, 22 bp, synthetic construct
  misc_feature 1..22: note = chemically synthesized
  source 1..22: mol_type = other DNA
cccaccagcctgggcaacatag

SEQ ID NO: 18818 - DNA, 22 bp, synthetic construct
  misc_feature 1..22: note = chemically synthesized
  source 1..22: mol_type = other DNA
ccaccagcctgggcaacatagc

SEQ ID NO: 18819 - DNA, 22 bp, synthetic construct
  misc_feature 1..22: note = chemically synthesized
  source 1..22: mol_type = other DNA
ggcaacatagcaagaccccatt

SEQ ID NO: 18820 - DNA, 22 bp, synthetic construct
  misc_feature 1..22: note = chemically synthesized
  source 1..22: mol_type = other DNA
ctctaaaaaattttttttaatt

SEQ ID NO: 18821 - DNA, 22 bp, synthetic construct
  misc_feature 1..22: note = chemically synthesized
  source 1..22: mol_type = other DNA
tctaaaaaattttttttaattt

SEQ ID NO: 18822 - DNA, 22 bp, synthetic construct
  misc_feature 1..22: note = chemically synthesized
  source 1..22: mol_type = other DNA
taaaaaattttttttaatttgc

SEQ ID NO: 18823 - DNA, 22 bp, synthetic construct
  misc_feature 1..22: note = chemically synthesized
  source 1..22: mol_type = other DNA
aaaaattttttttaatttgcca

SEQ ID NO: 18824 - DNA, 22 bp, synthetic construct
  misc_feature 1..22: note = chemically synthesized
  source 1..22: mol_type = other DNA
tttttaatttgccaggcacagt

SEQ ID NO: 18825 - DNA, 22 bp, synthetic construct
  misc_feature 1..22: note = chemically synthesized
  source 1..22: mol_type = other DNA
ttttaatttgccaggcacagtg

SEQ ID NO: 18826 - DNA, 22 bp, synthetic construct
  misc_feature 1..22: note = chemically synthesized
  source 1..22: mol_type = other DNA
tttaatttgccaggcacagtgg

SEQ ID NO: 18827 - DNA, 22 bp, synthetic construct
  misc_feature 1..22: note = chemically synthesized
  source 1..22: mol_type = other DNA
ttaatttgccaggcacagtggt

SEQ ID NO: 18828 - DNA, 22 bp, synthetic construct
  misc_feature 1..22: note = chemically synthesized
  source 1..22: mol_type = other DNA
taatttgccaggcacagtggtg

SEQ ID NO: 18829 - DNA, 22 bp, synthetic construct
  misc_feature 1..22: note = chemically synthesized
  source 1..22: mol_type = other DNA
aatttgccaggcacagtggtgc

SEQ ID NO: 18830 - DNA, 22 bp, synthetic construct
  misc_feature 1..22: note = chemically synthesized
  source 1..22: mol_type = other DNA
atttgccaggcacagtggtgca

SEQ ID NO: 18831 - DNA, 22 bp, synthetic construct
  misc_feature 1..22: note = chemically synthesized
  source 1..22: mol_type = other DNA
gccaggcacagtggtgcacacc

SEQ ID NO: 18832 - DNA, 22 bp, synthetic construct
  misc_feature 1..22: note = chemically synthesized
  source 1..22: mol_type = other DNA
ccaggcacagtggtgcacacct

SEQ ID NO: 18833 - DNA, 22 bp, synthetic construct
  misc_feature 1..22: note = chemically synthesized
  source 1..22: mol_type = other DNA
taagtcctaactacttgggagg

SEQ ID NO: 18834 - DNA, 22 bp, synthetic construct
  misc_feature 1..22: note = chemically synthesized
  source 1..22: mol_type = other DNA
actacttgggaggctgaggtgg

SEQ ID NO: 18835 - DNA, 22 bp, synthetic construct
  misc_feature 1..22: note = chemically synthesized
  source 1..22: mol_type = other DNA
cttgggaggctgaggtgggagg

SEQ ID NO: 18836 - DNA, 22 bp, synthetic construct
  misc_feature 1..22: note = chemically synthesized
  source 1..22: mol_type = other DNA
gggaggctgaggtgggaggatg

SEQ ID NO: 18837 - DNA, 22 bp, synthetic construct
  misc_feature 1..22: note = chemically synthesized
  source 1..22: mol_type = other DNA
ggaggctgaggtgggaggatgg

SEQ ID NO: 18838 - DNA, 22 bp, synthetic construct
  misc_feature 1..22: note = chemically synthesized
  source 1..22: mol_type = other DNA
aggtgggaggatggcttgagcc

SEQ ID NO: 18839 - DNA, 22 bp, synthetic construct
  misc_feature 1..22: note = chemically synthesized
  source 1..22: mol_type = other DNA
gagcccaggagttcgaggttgc

SEQ ID NO: 18840 - DNA, 22 bp, synthetic construct
  misc_feature 1..22: note = chemically synthesized
  source 1..22: mol_type = other DNA
agcccaggagttcgaggttgca

SEQ ID NO: 18841 - DNA, 22 bp, synthetic construct
  misc_feature 1..22: note = chemically synthesized
  source 1..22: mol_type = other DNA
gaggttgcagtgagctatgatc

SEQ ID NO: 18842 - DNA, 22 bp, synthetic construct
  misc_feature 1..22: note = chemically synthesized
  source 1..22: mol_type = other DNA
cagtgagctatgatcctgccac

SEQ ID NO: 18843 - DNA, 22 bp, synthetic construct
  misc_feature 1..22: note = chemically synthesized
  source 1..22: mol_type = other DNA
tgatcctgccactacactcctg

SEQ ID NO: 18844 - DNA, 22 bp, synthetic construct
  misc_feature 1..22: note = chemically synthesized
  source 1..22: mol_type = other DNA
ccactacactcctgtctctaaa

SEQ ID NO: 18845 - DNA, 22 bp, synthetic construct
  misc_feature 1..22: note = chemically synthesized
  source 1..22: mol_type = other DNA
cactcctgtctctaaaaaaaaa

SEQ ID NO: 18846 - DNA, 22 bp, synthetic construct
  misc_feature 1..22: note = chemically synthesized
  source 1..22: mol_type = other DNA
ctgtctctaaaaaaaaaatgtc

SEQ ID NO: 18847 - DNA, 22 bp, synthetic construct
  misc_feature 1..22: note = chemically synthesized
  source 1..22: mol_type = other DNA
tctctaaaaaaaaaatgtccaa

SEQ ID NO: 18848 - DNA, 22 bp, synthetic construct
  misc_feature 1..22: note = chemically synthesized
  source 1..22: mol_type = other DNA
taaaaaaaaaatgtccaagata

SEQ ID NO: 18849 - DNA, 22 bp, synthetic construct
  misc_feature 1..22: note = chemically synthesized
  source 1..22: mol_type = other DNA
aaaaaaaaatgtccaagatact

SEQ ID NO: 18850 - DNA, 22 bp, synthetic construct
  misc_feature 1..22: note = chemically synthesized
  source 1..22: mol_type = other DNA
aggtccttcagtcaagatttat

SEQ ID NO: 18851 - DNA, 22 bp, synthetic construct
  misc_feature 1..22: note = chemically synthesized
  source 1..22: mol_type = other DNA
ggtccttcagtcaagatttatt

SEQ ID NO: 18852 - DNA, 22 bp, synthetic construct
  misc_feature 1..22: note = chemically synthesized
  source 1..22: mol_type = other DNA
cagtcaagatttattacagaag

SEQ ID NO: 18853 - DNA, 22 bp, synthetic construct
  misc_feature 1..22: note = chemically synthesized
  source 1..22: mol_type = other DNA
agtcaagatttattacagaagg

SEQ ID NO: 18854 - DNA, 22 bp, synthetic construct
  misc_feature 1..22: note = chemically synthesized
  source 1..22: mol_type = other DNA
attacagaaggatccagggaag

SEQ ID NO: 18855 - DNA, 22 bp, synthetic construct
  misc_feature 1..22: note = chemically synthesized
  source 1..22: mol_type = other DNA
ttacagaaggatccagggaagg

SEQ ID NO: 18856 - DNA, 22 bp, synthetic construct
  misc_feature 1..22: note = chemically synthesized
  source 1..22: mol_type = other DNA
cagaaggatccagggaagggtc

SEQ ID NO: 18857 - DNA, 22 bp, synthetic construct
  misc_feature 1..22: note = chemically synthesized
  source 1..22: mol_type = other DNA
gggagatgagaggagcagggat

SEQ ID NO: 18858 - DNA, 22 bp, synthetic construct
  misc_feature 1..22: note = chemically synthesized
  source 1..22: mol_type = other DNA
ggagatgagaggagcagggatc

SEQ ID NO: 18859 - DNA, 22 bp, synthetic construct
  misc_feature 1..22: note = chemically synthesized
  source 1..22: mol_type = other DNA
ccaggatctctctgtgctcacg

SEQ ID NO: 18860 - DNA, 22 bp, synthetic construct
  misc_feature 1..22: note = chemically synthesized
  source 1..22: mol_type = other DNA
caggatctctctgtgctcacgt

SEQ ID NO: 18861 - DNA, 22 bp, synthetic construct
  misc_feature 1..22: note = chemically synthesized
  source 1..22: mol_type = other DNA
tctgtgctcacgtcccccaccc

SEQ ID NO: 18862 - DNA, 22 bp, synthetic construct
  misc_feature 1..22: note = chemically synthesized
  source 1..22: mol_type = other DNA
tgtgctcacgtcccccacccat

SEQ ID NO: 18863 - DNA, 22 bp, synthetic construct
  misc_feature 1..22: note = chemically synthesized
  source 1..22: mol_type = other DNA
tgctcacgtcccccacccatcc

SEQ ID NO: 18864 - DNA, 22 bp, synthetic construct
  misc_feature 1..22: note = chemically synthesized
  source 1..22: mol_type = other DNA
acgtcccccacccatcccaact

SEQ ID NO: 18865 - DNA, 22 bp, synthetic construct
  misc_feature 1..22: note = chemically synthesized
  source 1..22: mol_type = other DNA
accccacctctacacacacaca

SEQ ID NO: 18866 - DNA, 22 bp, synthetic construct
  misc_feature 1..22: note = chemically synthesized
  source 1..22: mol_type = other DNA
tacacacacacacacacacaca

SEQ ID NO: 18867 - DNA, 22 bp, synthetic construct
  misc_feature 1..22: note = chemically synthesized
  source 1..22: mol_type = other DNA
cacacacacacacacacacata

SEQ ID NO: 18868 - DNA, 22 bp, synthetic construct
  misc_feature 1..22: note = chemically synthesized
  source 1..22: mol_type = other DNA
acacacacactcacgcaacaca

SEQ ID NO: 18869 - DNA, 22 bp, synthetic construct
  misc_feature 1..22: note = chemically synthesized
  source 1..22: mol_type = other DNA
acgcaacacactcacacacaca

SEQ ID NO: 18870 - DNA, 22 bp, synthetic construct
  misc_feature 1..22: note = chemically synthesized
  source 1..22: mol_type = other DNA
acacacacaacatacataacac

SEQ ID NO: 18871 - DNA, 22 bp, synthetic construct
  misc_feature 1..22: note = chemically synthesized
  source 1..22: mol_type = other DNA
acaacatacacacacaacacac

SEQ ID NO: 18872 - DNA, 22 bp, synthetic construct
  misc_feature 1..22: note = chemically synthesized
  source 1..22: mol_type = other DNA
gcacaacatacacacacgcaca

SEQ ID NO: 18873 - DNA, 22 bp, synthetic construct
  misc_feature 1..22: note = chemically synthesized
  source 1..22: mol_type = other DNA
acacaacacacaaacatacata

SEQ ID NO: 18874 - DNA, 22 bp, synthetic construct
  misc_feature 1..22: note = chemically synthesized
  source 1..22: mol_type = other DNA
acacaatacacacacacaacac

SEQ ID NO: 18875 - DNA, 22 bp, synthetic construct
  misc_feature 1..22: note = chemically synthesized
  source 1..22: mol_type = other DNA
atacacaacatacatacacaca

SEQ ID NO: 18876 - DNA, 22 bp, synthetic construct
  misc_feature 1..22: note = chemically synthesized
  source 1..22: mol_type = other DNA
acatacacaacatacactcgca

SEQ ID NO: 18877 - DNA, 22 bp, synthetic construct
  misc_feature 1..22: note = chemically synthesized
  source 1..22: mol_type = other DNA
gcacaacatacacacatgcaca

SEQ ID NO: 18878 - DNA, 22 bp, synthetic construct
  misc_feature 1..22: note = chemically synthesized
  source 1..22: mol_type = other DNA
acacacaagatacacacaacat

SEQ ID NO: 18879 - DNA, 22 bp, synthetic construct
  misc_feature 1..22: note = chemically synthesized
  source 1..22: mol_type = other DNA
acacaacatacacacacaacac

SEQ ID NO: 18880 - DNA, 22 bp, synthetic construct
  misc_feature 1..22: note = chemically synthesized
  source 1..22: mol_type = other DNA
tcacacacaacataccctctca

SEQ ID NO: 18881 - DNA, 22 bp, synthetic construct
  misc_feature 1..22: note = chemically synthesized
  source 1..22: mol_type = other DNA
acacacaacataccctctcaca

SEQ ID NO: 18882 - DNA, 22 bp, synthetic construct
  misc_feature 1..22: note = chemically synthesized
  source 1..22: mol_type = other DNA
tcacatacacgacatacacaca

SEQ ID NO: 18883 - DNA, 22 bp, synthetic construct
  misc_feature 1..22: note = chemically synthesized
  source 1..22: mol_type = other DNA
acatacacgacatacacacaca

SEQ ID NO: 18884 - DNA, 22 bp, synthetic construct
  misc_feature 1..22: note = chemically synthesized
  source 1..22: mol_type = other DNA
tcgcgcacatatacacacacac

SEQ ID NO: 18885 - DNA, 22 bp, synthetic construct
  misc_feature 1..22: note = chemically synthesized
  source 1..22: mol_type = other DNA
gcgcacatatacacacacacaa

SEQ ID NO: 18886 - DNA, 22 bp, synthetic construct
  misc_feature 1..22: note = chemically synthesized
  source 1..22: mol_type = other DNA
actcacacacacacacagagtc

SEQ ID NO: 18887 - DNA, 22 bp, synthetic construct
  misc_feature 1..22: note = chemically synthesized
  source 1..22: mol_type = other DNA
acacacacacacagagtcccag

SEQ ID NO: 18888 - DNA, 22 bp, synthetic construct
  misc_feature 1..22: note = chemically synthesized
  source 1..22: mol_type = other DNA
aatctgcattcctcatatgcac

SEQ ID NO: 18889 - DNA, 22 bp, synthetic construct
  misc_feature 1..22: note = chemically synthesized
  source 1..22: mol_type = other DNA
cattcctcatatgcacatacgt

SEQ ID NO: 18890 - DNA, 22 bp, synthetic construct
  misc_feature 1..22: note = chemically synthesized
  source 1..22: mol_type = other DNA
ctcatatgcacatacgtgcaca

SEQ ID NO: 18891 - DNA, 22 bp, synthetic construct
  misc_feature 1..22: note = chemically synthesized
  source 1..22: mol_type = other DNA
atatgcacatacgtgcacacgc

SEQ ID NO: 18892 - DNA, 22 bp, synthetic construct
  misc_feature 1..22: note = chemically synthesized
  source 1..22: mol_type = other DNA
ttgggttgggaggagaagggca

SEQ ID NO: 18893 - DNA, 22 bp, synthetic construct
  misc_feature 1..22: note = chemically synthesized
  source 1..22: mol_type = other DNA
gggttgggaggagaagggcagg

SEQ ID NO: 18894 - DNA, 22 bp, synthetic construct
  misc_feature 1..22: note = chemically synthesized
  source 1..22: mol_type = other DNA
ggttgggaggagaagggcaggc

SEQ ID NO: 18895 - DNA, 22 bp, synthetic construct
  misc_feature 1..22: note = chemically synthesized
  source 1..22: mol_type = other DNA
ggaggagaagggcaggcagtta

SEQ ID NO: 18896 - DNA, 22 bp, synthetic construct
  misc_feature 1..22: note = chemically synthesized
  source 1..22: mol_type = other DNA
tcttccagatctccccacacct

SEQ ID NO: 18897 - DNA, 22 bp, synthetic construct
  misc_feature 1..22: note = chemically synthesized
  source 1..22: mol_type = other DNA
ccagatctccccacacctctgg

SEQ ID NO: 18898 - DNA, 22 bp, synthetic construct
  misc_feature 1..22: note = chemically synthesized
  source 1..22: mol_type = other DNA
cagatctccccacacctctggc

SEQ ID NO: 18899 - DNA, 22 bp, synthetic construct
  misc_feature 1..22: note = chemically synthesized
  source 1..22: mol_type = other DNA
cccacacctctggcacatgcct

SEQ ID NO: 18900 - DNA, 22 bp, synthetic construct
  misc_feature 1..22: note = chemically synthesized
  source 1..22: mol_type = other DNA
tggcacatgcctttcctggggt

SEQ ID NO: 18901 - DNA, 22 bp, synthetic construct
  misc_feature 1..22: note = chemically synthesized
  source 1..22: mol_type = other DNA
gcacatgcctttcctggggtcc

SEQ ID NO: 18902 - DNA, 22 bp, synthetic construct
  misc_feature 1..22: note = chemically synthesized
  source 1..22: mol_type = other DNA
tcctggggtcctggggtagaca

SEQ ID NO: 18903 - DNA, 22 bp, synthetic construct
  misc_feature 1..22: note = chemically synthesized
  source 1..22: mol_type = other DNA
cctggggtcctggggtagacag

SEQ ID NO: 18904 - DNA, 22 bp, synthetic construct
  misc_feature 1..22: note = chemically synthesized
  source 1..22: mol_type = other DNA
ctggggtcctggggtagacagg

SEQ ID NO: 18905 - DNA, 22 bp, synthetic construct
  misc_feature 1..22: note = chemically synthesized
  source 1..22: mol_type = other DNA
gggtcctggggtagacaggaag

SEQ ID NO: 18906 - DNA, 22 bp, synthetic construct
  misc_feature 1..22: note = chemically synthesized
  source 1..22: mol_type = other DNA
gggtagacaggaaggtgaggtg

SEQ ID NO: 18907 - DNA, 22 bp, synthetic construct
  misc_feature 1..22: note = chemically synthesized
  source 1..22: mol_type = other DNA
ctcagtccctgttcacagagtg

SEQ ID NO: 18908 - DNA, 22 bp, synthetic construct
  misc_feature 1..22: note = chemically synthesized
  source 1..22: mol_type = other DNA
agtccctgttcacagagtgggt

SEQ ID NO: 18909 - DNA, 22 bp, synthetic construct
  misc_feature 1..22: note = chemically synthesized
  source 1..22: mol_type = other DNA
ttcacagagtgggtgcggcaga

SEQ ID NO: 18910 - DNA, 22 bp, synthetic construct
  misc_feature 1..22: note = chemically synthesized
  source 1..22: mol_type = other DNA
acagagtgggtgcggcagagac

SEQ ID NO: 18911 - DNA, 22 bp, synthetic construct
  misc_feature 1..22: note = chemically synthesized
  source 1..22: mol_type = other DNA
aaagggacagagcaatcatgag

SEQ ID NO: 18912 - DNA, 22 bp, synthetic construct
  misc_feature 1..22: note = chemically synthesized
  source 1..22: mol_type = other DNA
agacagagggggagcaaagccg

SEQ ID NO: 18913 - DNA, 22 bp, synthetic construct
  misc_feature 1..22: note = chemically synthesized
  source 1..22: mol_type = other DNA
cacacttgcctttcaaaaatgg

SEQ ID NO: 18914 - DNA, 22 bp, synthetic construct
  misc_feature 1..22: note = chemically synthesized
  source 1..22: mol_type = other DNA
gcctttcaaaaatggatttcct

SEQ ID NO: 18915 - DNA, 22 bp, synthetic construct
  misc_feature 1..22: note = chemically synthesized
  source 1..22: mol_type = other DNA
cctttcaaaaatggatttcctc

SEQ ID NO: 18916 - DNA, 22 bp, synthetic construct
  misc_feature 1..22: note = chemically synthesized
  source 1..22: mol_type = other DNA
tcaaaaatggatttcctctcct

SEQ ID NO: 18917 - DNA, 22 bp, synthetic construct
  misc_feature 1..22: note = chemically synthesized
  source 1..22: mol_type = other DNA
caaaaatggatttcctctcctg

SEQ ID NO: 18918 - DNA, 22 bp, synthetic construct
  misc_feature 1..22: note = chemically synthesized
  source 1..22: mol_type = other DNA
aaaaatggatttcctctcctgg

SEQ ID NO: 18919 - DNA, 22 bp, synthetic construct
  misc_feature 1..22: note = chemically synthesized
  source 1..22: mol_type = other DNA
cctctcctgggattcagcctgc

SEQ ID NO: 18920 - DNA, 22 bp, synthetic construct
  misc_feature 1..22: note = chemically synthesized
  source 1..22: mol_type = other DNA
ctctcctgggattcagcctgcg

SEQ ID NO: 18921 - DNA, 22 bp, synthetic construct
  misc_feature 1..22: note = chemically synthesized
  source 1..22: mol_type = other DNA
tcctgggattcagcctgcgagt

SEQ ID NO: 18922 - DNA, 22 bp, synthetic construct
  misc_feature 1..22: note = chemically synthesized
  source 1..22: mol_type = other DNA
ctgggattcagcctgcgagtgc

SEQ ID NO: 18923 - DNA, 22 bp, synthetic construct
  misc_feature 1..22: note = chemically synthesized
  source 1..22: mol_type = other DNA
ggattcagcctgcgagtgcctg

SEQ ID NO: 18924 - DNA, 22 bp, synthetic construct
  misc_feature 1..22: note = chemically synthesized
  source 1..22: mol_type = other DNA
agcctgcgagtgcctggcccct

SEQ ID NO: 18925 - DNA, 22 bp, synthetic construct
  misc_feature 1..22: note = chemically synthesized
  source 1..22: mol_type = other DNA
cgagtgcctggcccctcacctt

SEQ ID NO: 18926 - DNA, 22 bp, synthetic construct
  misc_feature 1..22: note = chemically synthesized
  source 1..22: mol_type = other DNA
gcccctcaccttgatggaaagg

SEQ ID NO: 18927 - DNA, 22 bp, synthetic construct
  misc_feature 1..22: note = chemically synthesized
  source 1..22: mol_type = other DNA
accttgatggaaaggatggtca

SEQ ID NO: 18928 - DNA, 22 bp, synthetic construct
  misc_feature 1..22: note = chemically synthesized
  source 1..22: mol_type = other DNA
gatggaaaggatggtcattttc

SEQ ID NO: 18929 - DNA, 22 bp, synthetic construct
  misc_feature 1..22: note = chemically synthesized
  source 1..22: mol_type = other DNA
atggaaaggatggtcattttcc

SEQ ID NO: 18930 - DNA, 22 bp, synthetic construct
  misc_feature 1..22: note = chemically synthesized
  source 1..22: mol_type = other DNA
tcctccgagctcagctgctgga

SEQ ID NO: 18931 - DNA, 22 bp, synthetic construct
  misc_feature 1..22: note = chemically synthesized
  source 1..22: mol_type = other DNA
cctccgagctcagctgctggat

SEQ ID NO: 18932 - DNA, 22 bp, synthetic construct
  misc_feature 1..22: note = chemically synthesized
  source 1..22: mol_type = other DNA
ctccgagctcagctgctggata

SEQ ID NO: 18933 - DNA, 22 bp, synthetic construct
  misc_feature 1..22: note = chemically synthesized
  source 1..22: mol_type = other DNA
cgagctcagctgctggatatct

SEQ ID NO: 18934 - DNA, 22 bp, synthetic construct
  misc_feature 1..22: note = chemically synthesized
  source 1..22: mol_type = other DNA
agctgctggatatcttgaaagt

SEQ ID NO: 18935 - DNA, 22 bp, synthetic construct
  misc_feature 1..22: note = chemically synthesized
  source 1..22: mol_type = other DNA
ctggatatcttgaaagtccttg

SEQ ID NO: 18936 - DNA, 22 bp, synthetic construct
  misc_feature 1..22: note = chemically synthesized
  source 1..22: mol_type = other DNA
gatatcttgaaagtccttggcc

SEQ ID NO: 18937 - DNA, 22 bp, synthetic construct
  misc_feature 1..22: note = chemically synthesized
  source 1..22: mol_type = other DNA
gaaagtccttggccatgatggg

SEQ ID NO: 18938 - DNA, 22 bp, synthetic construct
  misc_feature 1..22: note = chemically synthesized
  source 1..22: mol_type = other DNA
aaagtccttggccatgatgggg

SEQ ID NO: 18939 - DNA, 22 bp, synthetic construct
  misc_feature 1..22: note = chemically synthesized
  source 1..22: mol_type = other DNA
ggccatgatggggcccgggctg

SEQ ID NO: 18940 - DNA, 22 bp, synthetic construct
  misc_feature 1..22: note = chemically synthesized
  source 1..22: mol_type = other DNA
gccatgatggggcccgggctgg

SEQ ID NO: 18941 - DNA, 22 bp, synthetic construct
  misc_feature 1..22: note = chemically synthesized
  source 1..22: mol_type = other DNA
gagctggagctggagctgggct

SEQ ID NO: 18942 - DNA, 22 bp, synthetic construct
  misc_feature 1..22: note = chemically synthesized
  source 1..22: mol_type = other DNA
gagctggagctgggctgggctg

SEQ ID NO: 18943 - DNA, 22 bp, synthetic construct
  misc_feature 1..22: note = chemically synthesized
  source 1..22: mol_type = other DNA
gagctgggctgggctgggctga

SEQ ID NO: 18944 - DNA, 22 bp, synthetic construct
  misc_feature 1..22: note = chemically synthesized
  source 1..22: mol_type = other DNA
ggctgggctgggctgaggttgc

SEQ ID NO: 18945 - DNA, 22 bp, synthetic construct
  misc_feature 1..22: note = chemically synthesized
  source 1..22: mol_type = other DNA
ggctgggctgaggttgctctga

SEQ ID NO: 18946 - DNA, 22 bp, synthetic construct
  misc_feature 1..22: note = chemically synthesized
  source 1..22: mol_type = other DNA
ggctgaggttgctctgagggct

SEQ ID NO: 18947 - DNA, 22 bp, synthetic construct
  misc_feature 1..22: note = chemically synthesized
  source 1..22: mol_type = other DNA
aggttgctctgagggctggggc

SEQ ID NO: 18948 - DNA, 22 bp, synthetic construct
  misc_feature 1..22: note = chemically synthesized
  source 1..22: mol_type = other DNA
ctctgagggctggggctggggc

SEQ ID NO: 18949 - DNA, 22 bp, synthetic construct
  misc_feature 1..22: note = chemically synthesized
  source 1..22: mol_type = other DNA
tgagggctggggctggggcaga

SEQ ID NO: 18950 - DNA, 22 bp, synthetic construct
  misc_feature 1..22: note = chemically synthesized
  source 1..22: mol_type = other DNA
agggctggggctggggcagagg

SEQ ID NO: 18951 - DNA, 22 bp, synthetic construct
  misc_feature 1..22: note = chemically synthesized
  source 1..22: mol_type = other DNA
gggctggggcagaggtgcagat

SEQ ID NO: 18952 - DNA, 22 bp, synthetic construct
  misc_feature 1..22: note = chemically synthesized
  source 1..22: mol_type = other DNA
gggcagaggtgcagattcacgt

SEQ ID NO: 18953 - DNA, 22 bp, synthetic construct
  misc_feature 1..22: note = chemically synthesized
  source 1..22: mol_type = other DNA
acgtggaggttgatggtgggat

SEQ ID NO: 18954 - DNA, 22 bp, synthetic construct
  misc_feature 1..22: note = chemically synthesized
  source 1..22: mol_type = other DNA
atggtgggatggaacgcagggt

SEQ ID NO: 18955 - DNA, 22 bp, synthetic construct
  misc_feature 1..22: note = chemically synthesized
  source 1..22: mol_type = other DNA
ggggtggtggcctgggtaggat

SEQ ID NO: 18956 - DNA, 22 bp, synthetic construct
  misc_feature 1..22: note = chemically synthesized
  source 1..22: mol_type = other DNA
agatcctacccaggccaccacc

SEQ ID NO: 18957 - DNA, 22 bp, synthetic construct
  misc_feature 1..22: note = chemically synthesized
  source 1..22: mol_type = other DNA
cccaggccaccaccccgaaccc

SEQ ID NO: 18958 - DNA, 22 bp, synthetic construct
  misc_feature 1..22: note = chemically synthesized
  source 1..22: mol_type = other DNA
cgaccctgcgttccatcccacc

SEQ ID NO: 18959 - DNA, 22 bp, synthetic construct
  misc_feature 1..22: note = chemically synthesized
  source 1..22: mol_type = other DNA
cgttccatcccaccatcaacct

SEQ ID NO: 18960 - DNA, 22 bp, synthetic construct
  misc_feature 1..22: note = chemically synthesized
  source 1..22: mol_type = other DNA
catcccaccatcaacctccacg

SEQ ID NO: 18961 - DNA, 22 bp, synthetic construct
  misc_feature 1..22: note = chemically synthesized
  source 1..22: mol_type = other DNA
cacgtgaatctgcacctctgcc

SEQ ID NO: 18962 - DNA, 22 bp, synthetic construct
  misc_feature 1..22: note = chemically synthesized
  source 1..22: mol_type = other DNA
cacctctgccccagccccagcc

SEQ ID NO: 18963 - DNA, 22 bp, synthetic construct
  misc_feature 1..22: note = chemically synthesized
  source 1..22: mol_type = other DNA
tgccccagccccagccctcaga

SEQ ID NO: 18964 - DNA, 22 bp, synthetic construct
  misc_feature 1..22: note = chemically synthesized
  source 1..22: mol_type = other DNA
ccccagccccagccctcagagc

SEQ ID NO: 18965 - DNA, 22 bp, synthetic construct
  misc_feature 1..22: note = chemically synthesized
  source 1..22: mol_type = other DNA
agagcaacctcagcccagccca

SEQ ID NO: 18966 - DNA, 22 bp, synthetic construct
  misc_feature 1..22: note = chemically synthesized
  source 1..22: mol_type = other DNA
agcccagcccagcccagctcca

SEQ ID NO: 18967 - DNA, 22 bp, synthetic construct
  misc_feature 1..22: note = chemically synthesized
  source 1..22: mol_type = other DNA
cagctccagctccagcccgggc

SEQ ID NO: 18968 - DNA, 22 bp, synthetic construct
  misc_feature 1..22: note = chemically synthesized
  source 1..22: mol_type = other DNA
cagctccagcccgggccccatc

SEQ ID NO: 18969 - DNA, 22 bp, synthetic construct
  misc_feature 1..22: note = chemically synthesized
  source 1..22: mol_type = other DNA
cagcccgggccccatcatggcc

SEQ ID NO: 18970 - DNA, 22 bp, synthetic construct
  misc_feature 1..22: note = chemically synthesized
  source 1..22: mol_type = other DNA
tcaagatatccagcagctgagc

SEQ ID NO: 18971 - DNA, 22 bp, synthetic construct
  misc_feature 1..22: note = chemically synthesized
  source 1..22: mol_type = other DNA
caagatatccagcagctgagct

SEQ ID NO: 18972 - DNA, 22 bp, synthetic construct
  misc_feature 1..22: note = chemically synthesized
  source 1..22: mol_type = other DNA
aagatatccagcagctgagctc

SEQ ID NO: 18973 - DNA, 22 bp, synthetic construct
  misc_feature 1..22: note = chemically synthesized
  source 1..22: mol_type = other DNA
agctcggaggaaaatgaccatc

SEQ ID NO: 18974 - DNA, 22 bp, synthetic construct
  misc_feature 1..22: note = chemically synthesized
  source 1..22: mol_type = other DNA
ggaggaaaatgaccatcctttc

SEQ ID NO: 18975 - DNA, 22 bp, synthetic construct
  misc_feature 1..22: note = chemically synthesized
  source 1..22: mol_type = other DNA
tccatcaaggtgaggggccagg

SEQ ID NO: 18976 - DNA, 22 bp, synthetic construct
  misc_feature 1..22: note = chemically synthesized
  source 1..22: mol_type = other DNA
ccatcaaggtgaggggccaggc

SEQ ID NO: 18977 - DNA, 22 bp, synthetic construct
  misc_feature 1..22: note = chemically synthesized
  source 1..22: mol_type = other DNA
catcaaggtgaggggccaggca

SEQ ID NO: 18978 - DNA, 22 bp, synthetic construct
  misc_feature 1..22: note = chemically synthesized
  source 1..22: mol_type = other DNA
gcaggctgaatcccaggagagg

SEQ ID NO: 18979 - DNA, 22 bp, synthetic construct
  misc_feature 1..22: note = chemically synthesized
  source 1..22: mol_type = other DNA
aatcccaggagaggaaatccat

SEQ ID NO: 18980 - DNA, 22 bp, synthetic construct
  misc_feature 1..22: note = chemically synthesized
  source 1..22: mol_type = other DNA
ttgaaaggcaagtgtgcagttt

SEQ ID NO: 18981 - DNA, 22 bp, synthetic construct
  misc_feature 1..22: note = chemically synthesized
  source 1..22: mol_type = other DNA
tgaaaggcaagtgtgcagtttc

SEQ ID NO: 18982 - DNA, 22 bp, synthetic construct
  misc_feature 1..22: note = chemically synthesized
  source 1..22: mol_type = other DNA
gaaaggcaagtgtgcagtttct

SEQ ID NO: 18983 - DNA, 22 bp, synthetic construct
  misc_feature 1..22: note = chemically synthesized
  source 1..22: mol_type = other DNA
aaaggcaagtgtgcagtttctg

SEQ ID NO: 18984 - DNA, 22 bp, synthetic construct
  misc_feature 1..22: note = chemically synthesized
  source 1..22: mol_type = other DNA
ctgcggctttgctccccctctg

SEQ ID NO: 18985 - DNA, 22 bp, synthetic construct
  misc_feature 1..22: note = chemically synthesized
  source 1..22: mol_type = other DNA
tgcggctttgctccccctctgt

SEQ ID NO: 18986 - DNA, 22 bp, synthetic construct
  misc_feature 1..22: note = chemically synthesized
  source 1..22: mol_type = other DNA
cggctttgctccccctctgtct

SEQ ID NO: 18987 - DNA, 22 bp, synthetic construct
  misc_feature 1..22: note = chemically synthesized
  source 1..22: mol_type = other DNA
tgctccccctctgtctcagctc

SEQ ID NO: 18988 - DNA, 22 bp, synthetic construct
  misc_feature 1..22: note = chemically synthesized
  source 1..22: mol_type = other DNA
gctccccctctgtctcagctca

SEQ ID NO: 18989 - DNA, 22 bp, synthetic construct
  misc_feature 1..22: note = chemically synthesized
  source 1..22: mol_type = other DNA
ctccccctctgtctcagctcat

SEQ ID NO: 18990 - DNA, 22 bp, synthetic construct
  misc_feature 1..22: note = chemically synthesized
  source 1..22: mol_type = other DNA
cccctctgtctcagctcatgat

SEQ ID NO: 18991 - DNA, 22 bp, synthetic construct
  misc_feature 1..22: note = chemically synthesized
  source 1..22: mol_type = other DNA
tgtctcagctcatgattgctct

SEQ ID NO: 18992 - DNA, 22 bp, synthetic construct
  misc_feature 1..22: note = chemically synthesized
  source 1..22: mol_type = other DNA
tctcagctcatgattgctctgt

SEQ ID NO: 18993 - DNA, 22 bp, synthetic construct
  misc_feature 1..22: note = chemically synthesized
  source 1..22: mol_type = other DNA
agctcatgattgctctgtccct

SEQ ID NO: 18994 - DNA, 22 bp, synthetic construct
  misc_feature 1..22: note = chemically synthesized
  source 1..22: mol_type = other DNA
atgattgctctgtccctttgag

SEQ ID NO: 18995 - DNA, 22 bp, synthetic construct
  misc_feature 1..22: note = chemically synthesized
  source 1..22: mol_type = other DNA
ctctgtccctttgaggtctctg

SEQ ID NO: 18996 - DNA, 22 bp, synthetic construct
  misc_feature 1..22: note = chemically synthesized
  source 1..22: mol_type = other DNA
tgtccctttgaggtctctgccg

SEQ ID NO: 18997 - DNA, 22 bp, synthetic construct
  misc_feature 1..22: note = chemically synthesized
  source 1..22: mol_type = other DNA
tccctttgaggtctctgccgca

SEQ ID NO: 18998 - DNA, 22 bp, synthetic construct
  misc_feature 1..22: note = chemically synthesized
  source 1..22: mol_type = other DNA
tgaggtctctgccgcacccact

SEQ ID NO: 18999 - DNA, 22 bp, synthetic construct
  misc_feature 1..22: note = chemically synthesized
  source 1..22: mol_type = other DNA
gaggtctctgccgcacccactc

SEQ ID NO: 19000 - DNA, 22 bp, synthetic construct
  misc_feature 1..22: note = chemically synthesized
  source 1..22: mol_type = other DNA
aggtctctgccgcacccactct

SEQ ID NO: 19001 - DNA, 22 bp, synthetic construct
  misc_feature 1..22: note = chemically synthesized
  source 1..22: mol_type = other DNA
tgccgcacccactctgtgaaca

SEQ ID NO: 19002 - DNA, 22 bp, synthetic construct
  misc_feature 1..22: note = chemically synthesized
  source 1..22: mol_type = other DNA
ccgcacccactctgtgaacagg

SEQ ID NO: 19003 - DNA, 22 bp, synthetic construct
  misc_feature 1..22: note = chemically synthesized
  source 1..22: mol_type = other DNA
tgtgaacagggactgaggaggg

SEQ ID NO: 19004 - DNA, 22 bp, synthetic construct
  misc_feature 1..22: note = chemically synthesized
  source 1..22: mol_type = other DNA
tgaacagggactgaggagggcc

SEQ ID NO: 19005 - DNA, 22 bp, synthetic construct
  misc_feature 1..22: note = chemically synthesized
  source 1..22: mol_type = other DNA
aggagggcccgacacccccgct

SEQ ID NO: 19006 - DNA, 22 bp, synthetic construct
  misc_feature 1..22: note = chemically synthesized
  source 1..22: mol_type = other DNA
gttccctcacctcaccttcctg

SEQ ID NO: 19007 - DNA, 22 bp, synthetic construct
  misc_feature 1..22: note = chemically synthesized
  source 1..22: mol_type = other DNA
ttccctcacctcaccttcctgt

SEQ ID NO: 19008 - DNA, 22 bp, synthetic construct
  misc_feature 1..22: note = chemically synthesized
  source 1..22: mol_type = other DNA
cctcacctcaccttcctgtcta

SEQ ID NO: 19009 - DNA, 22 bp, synthetic construct
  misc_feature 1..22: note = chemically synthesized
  source 1..22: mol_type = other DNA
acctcaccttcctgtctacccc

SEQ ID NO: 19010 - DNA, 22 bp, synthetic construct
  misc_feature 1..22: note = chemically synthesized
  source 1..22: mol_type = other DNA
accttcctgtctaccccaggac

SEQ ID NO: 19011 - DNA, 22 bp, synthetic construct
  misc_feature 1..22: note = chemically synthesized
  source 1..22: mol_type = other DNA
cctgtctaccccaggaccccag

SEQ ID NO: 19012 - DNA, 22 bp, synthetic construct
  misc_feature 1..22: note = chemically synthesized
  source 1..22: mol_type = other DNA
ctgtctaccccaggaccccagg

SEQ ID NO: 19013 - DNA, 22 bp, synthetic construct
  misc_feature 1..22: note = chemically synthesized
  source 1..22: mol_type = other DNA
tctaccccaggaccccaggaaa

SEQ ID NO: 19014 - DNA, 22 bp, synthetic construct
  misc_feature 1..22: note = chemically synthesized
  source 1..22: mol_type = other DNA
ccccaggaccccaggaaaggca

SEQ ID NO: 19015 - DNA, 22 bp, synthetic construct
  misc_feature 1..22: note = chemically synthesized
  source 1..22: mol_type = other DNA
gaagataactgcctgcccttct

SEQ ID NO: 19016 - DNA, 22 bp, synthetic construct
  misc_feature 1..22: note = chemically synthesized
  source 1..22: mol_type = other DNA
cctgcccttctcctcccaaccc

SEQ ID NO: 19017 - DNA, 22 bp, synthetic construct
  misc_feature 1..22: note = chemically synthesized
  source 1..22: mol_type = other DNA
cccttctcctcccaacccaaga

SEQ ID NO: 19018 - DNA, 22 bp, synthetic construct
  misc_feature 1..22: note = chemically synthesized
  source 1..22: mol_type = other DNA
ctcctcccaacccaagaacaca

SEQ ID NO: 19019 - DNA, 22 bp, synthetic construct
  misc_feature 1..22: note = chemically synthesized
  source 1..22: mol_type = other DNA
tcctcccaacccaagaacacat

SEQ ID NO: 19020 - DNA, 22 bp, synthetic construct
  misc_feature 1..22: note = chemically synthesized
  source 1..22: mol_type = other DNA
ctcccaacccaagaacacatgt

SEQ ID NO: 19021 - DNA, 22 bp, synthetic construct
  misc_feature 1..22: note = chemically synthesized
  source 1..22: mol_type = other DNA
ccaacccaagaacacatgtgcc

SEQ ID NO: 19022 - DNA, 22 bp, synthetic construct
  misc_feature 1..22: note = chemically synthesized
  source 1..22: mol_type = other DNA
gtatgtgcgtgtgcacgtatgt

SEQ ID NO: 19023 - DNA, 22 bp, synthetic construct
  misc_feature 1..22: note = chemically synthesized
  source 1..22: mol_type = other DNA
agctgggactctgtgtgtgtgt

SEQ ID NO: 19024 - DNA, 22 bp, synthetic construct
  misc_feature 1..22: note = chemically synthesized
  source 1..22: mol_type = other DNA
ggactctgtgtgtgtgtgtgag

SEQ ID NO: 19025 - DNA, 22 bp, synthetic construct
  misc_feature 1..22: note = chemically synthesized
  source 1..22: mol_type = other DNA
tgtgtgtgtgtgtgagtgaatg

SEQ ID NO: 19026 - DNA, 22 bp, synthetic construct
  misc_feature 1..22: note = chemically synthesized
  source 1..22: mol_type = other DNA
tgtgtgtgtgtgagtgaatgtt

SEQ ID NO: 19027 - DNA, 22 bp, synthetic construct
  misc_feature 1..22: note = chemically synthesized
  source 1..22: mol_type = other DNA
tgtgtgtgtatatgtgcgcgag

SEQ ID NO: 19028 - DNA, 22 bp, synthetic construct
  misc_feature 1..22: note = chemically synthesized
  source 1..22: mol_type = other DNA
tgtgtgtgtatgtcgtgtatgt

SEQ ID NO: 19029 - DNA, 22 bp, synthetic construct
  misc_feature 1..22: note = chemically synthesized
  source 1..22: mol_type = other DNA
tgtgtgagagtgtgttgtgtgt

SEQ ID NO: 19030 - DNA, 22 bp, synthetic construct
  misc_feature 1..22: note = chemically synthesized
  source 1..22: mol_type = other DNA
tgtgtgtatgttgtgtgagtat

SEQ ID NO: 19031 - DNA, 22 bp, synthetic construct
  misc_feature 1..22: note = chemically synthesized
  source 1..22: mol_type = other DNA
tgtgagtatatgttgtgtgtat

SEQ ID NO: 19032 - DNA, 22 bp, synthetic construct
  misc_feature 1..22: note = chemically synthesized
  source 1..22: mol_type = other DNA
tgtgtatcttgtgtgtgagtgt

SEQ ID NO: 19033 - DNA, 22 bp, synthetic construct
  misc_feature 1..22: note = chemically synthesized
  source 1..22: mol_type = other DNA
gtgtgtgagtgtatgttgtgtg

SEQ ID NO: 19034 - DNA, 22 bp, synthetic construct
  misc_feature 1..22: note = chemically synthesized
  source 1..22: mol_type = other DNA
tgtgtgagtgtatgttgtgtgt

SEQ ID NO: 19035 - DNA, 22 bp, synthetic construct
  misc_feature 1..22: note = chemically synthesized
  source 1..22: mol_type = other DNA
tgtgttgtgtgtgtatcttgtg

SEQ ID NO: 19036 - DNA, 22 bp, synthetic construct
  misc_feature 1..22: note = chemically synthesized
  source 1..22: mol_type = other DNA
tgtgtgtatcttgtgcatgtgt

SEQ ID NO: 19037 - DNA, 22 bp, synthetic construct
  misc_feature 1..22: note = chemically synthesized
  source 1..22: mol_type = other DNA
gtgcatgtgtgtatgttgtgcg

SEQ ID NO: 19038 - DNA, 22 bp, synthetic construct
  misc_feature 1..22: note = chemically synthesized
  source 1..22: mol_type = other DNA
tgcatgtgtgtatgttgtgcga

SEQ ID NO: 19039 - DNA, 22 bp, synthetic construct
  misc_feature 1..22: note = chemically synthesized
  source 1..22: mol_type = other DNA
tgcgagtgtatgttgtgtatgt

SEQ ID NO: 19040 - DNA, 22 bp, synthetic construct
  misc_feature 1..22: note = chemically synthesized
  source 1..22: mol_type = other DNA
tgtatgtgagtgtgtgtatgtt

SEQ ID NO: 19041 - DNA, 22 bp, synthetic construct
  misc_feature 1..22: note = chemically synthesized
  source 1..22: mol_type = other DNA
tgtgtatgttgtgtgtatgtat

SEQ ID NO: 19042 - DNA, 22 bp, synthetic construct
  misc_feature 1..22: note = chemically synthesized
  source 1..22: mol_type = other DNA
tgtgtatgtatgttgtgtatga

SEQ ID NO: 19043 - DNA, 22 bp, synthetic construct
  misc_feature 1..22: note = chemically synthesized
  source 1..22: mol_type = other DNA
tgtatgagtgtgtgtatgttgt

SEQ ID NO: 19044 - DNA, 22 bp, synthetic construct
  misc_feature 1..22: note = chemically synthesized
  source 1..22: mol_type = other DNA
tgtgtgtgtacgttgtgtatgt

SEQ ID NO: 19045 - DNA, 22 bp, synthetic construct
  misc_feature 1..22: note = chemically synthesized
  source 1..22: mol_type = other DNA
tgtatgttgtgtgtgtgttgtg

SEQ ID NO: 19046 - DNA, 22 bp, synthetic construct
  misc_feature 1..22: note = chemically synthesized
  source 1..22: mol_type = other DNA
tgtgtgtgttgtgtgtgtgtat

SEQ ID NO: 19047 - DNA, 22 bp, synthetic construct
  misc_feature 1..22: note = chemically synthesized
  source 1..22: mol_type = other DNA
tgtgtgtgtattgtgtgagtgt

SEQ ID NO: 19048 - DNA, 22 bp, synthetic construct
  misc_feature 1..22: note = chemically synthesized
  source 1..22: mol_type = other DNA
tgtgagtgtatgtatgtttgtg

SEQ ID NO: 19049 - DNA, 22 bp, synthetic construct
  misc_feature 1..22: note = chemically synthesized
  source 1..22: mol_type = other DNA
gtgtgttgtgtgagtgttgtgt

SEQ ID NO: 19050 - DNA, 22 bp, synthetic construct
  misc_feature 1..22: note = chemically synthesized
  source 1..22: mol_type = other DNA
tgtgttgtgtgagtgttgtgta

SEQ ID NO: 19051 - DNA, 22 bp, synthetic construct
  misc_feature 1..22: note = chemically synthesized
  source 1..22: mol_type = other DNA
tgtgagtgttgtgtatgttgtg

SEQ ID NO: 19052 - DNA, 22 bp, synthetic construct
  misc_feature 1..22: note = chemically synthesized
  source 1..22: mol_type = other DNA
tgtatgttgtgcgtgtgtgtat

SEQ ID NO: 19053 - DNA, 22 bp, synthetic construct
  misc_feature 1..22: note = chemically synthesized
  source 1..22: mol_type = other DNA
tgcgtgtgtgtatgttgtgcga

SEQ ID NO: 19054 - DNA, 22 bp, synthetic construct
  misc_feature 1..22: note = chemically synthesized
  source 1..22: mol_type = other DNA
tgcgagtgtgtgtgttgtgtgt

SEQ ID NO: 19055 - DNA, 22 bp, synthetic construct
  misc_feature 1..22: note = chemically synthesized
  source 1..22: mol_type = other DNA
tgtgtgtatgttgtgagtgtgt

SEQ ID NO: 19056 - DNA, 22 bp, synthetic construct
  misc_feature 1..22: note = chemically synthesized
  source 1..22: mol_type = other DNA
tgagtgtgttatgtatgttgtg

SEQ ID NO: 19057 - DNA, 22 bp, synthetic construct
  misc_feature 1..22: note = chemically synthesized
  source 1..22: mol_type = other DNA
tgtatgttgtgtgtgtgagtgt

SEQ ID NO: 19058 - DNA, 22 bp, synthetic construct
  misc_feature 1..22: note = chemically synthesized
  source 1..22: mol_type = other DNA
tgtgtgtgagtgtgttgcgtga

SEQ ID NO: 19059 - DNA, 22 bp, synthetic construct
  misc_feature 1..22: note = chemically synthesized
  source 1..22: mol_type = other DNA
cgtgagtgtgtgtgttagtgtg

SEQ ID NO: 19060 - DNA, 22 bp, synthetic construct
  misc_feature 1..22: note = chemically synthesized
  source 1..22: mol_type = other DNA
gtgtgtgtatgtgattgtatgt

SEQ ID NO: 19061 - DNA, 22 bp, synthetic construct
  misc_feature 1..22: note = chemically synthesized
  source 1..22: mol_type = other DNA
tatgtgtgtgtgtgtgtgtgtg

SEQ ID NO: 19062 - DNA, 22 bp, synthetic construct
  misc_feature 1..22: note = chemically synthesized
  source 1..22: mol_type = other DNA
ggatgggtgggggacgtgagca

SEQ ID NO: 19063 - DNA, 22 bp, synthetic construct
  misc_feature 1..22: note = chemically synthesized
  source 1..22: mol_type = other DNA
gaagatccctgctcctctcatc

SEQ ID NO: 19064 - DNA, 22 bp, synthetic construct
  misc_feature 1..22: note = chemically synthesized
  source 1..22: mol_type = other DNA
ctcctctcatctcccaagaccc

SEQ ID NO: 19065 - DNA, 22 bp, synthetic construct
  misc_feature 1..22: note = chemically synthesized
  source 1..22: mol_type = other DNA
ctctcatctcccaagacccttc

SEQ ID NO: 19066 - DNA, 22 bp, synthetic construct
  misc_feature 1..22: note = chemically synthesized
  source 1..22: mol_type = other DNA
tcatctcccaagacccttccct

SEQ ID NO: 19067 - DNA, 22 bp, synthetic construct
  misc_feature 1..22: note = chemically synthesized
  source 1..22: mol_type = other DNA
atctcccaagacccttccctgg

SEQ ID NO: 19068 - DNA, 22 bp, synthetic construct
  misc_feature 1..22: note = chemically synthesized
  source 1..22: mol_type = other DNA
ccaagacccttccctggatcct

SEQ ID NO: 19069 - DNA, 22 bp, synthetic construct
  misc_feature 1..22: note = chemically synthesized
  source 1..22: mol_type = other DNA
ccctggatccttctgtaataaa

SEQ ID NO: 19070 - DNA, 22 bp, synthetic construct
  misc_feature 1..22: note = chemically synthesized
  source 1..22: mol_type = other DNA
cctggatccttctgtaataaat

SEQ ID NO: 19071 - DNA, 22 bp, synthetic construct
  misc_feature 1..22: note = chemically synthesized
  source 1..22: mol_type = other DNA
gatccttctgtaataaatcttg

SEQ ID NO: 19072 - DNA, 22 bp, synthetic construct
  misc_feature 1..22: note = chemically synthesized
  source 1..22: mol_type = other DNA
ctgtaataaatcttgactgaag

SEQ ID NO: 19073 - DNA, 22 bp, synthetic construct
  misc_feature 1..22: note = chemically synthesized
  source 1..22: mol_type = other DNA
tgtaataaatcttgactgaagg

SEQ ID NO: 19074 - DNA, 22 bp, synthetic construct
  misc_feature 1..22: note = chemically synthesized
  source 1..22: mol_type = other DNA
taataaatcttgactgaaggac

SEQ ID NO: 19075 - DNA, 22 bp, synthetic construct
  misc_feature 1..22: note = chemically synthesized
  source 1..22: mol_type = other DNA
gactgaaggacctaagtatctt

SEQ ID NO: 19076 - DNA, 22 bp, synthetic construct
  misc_feature 1..22: note = chemically synthesized
  source 1..22: mol_type = other DNA
actgaaggacctaagtatcttg

SEQ ID NO: 19077 - DNA, 22 bp, synthetic construct
  misc_feature 1..22: note = chemically synthesized
  source 1..22: mol_type = other DNA
aaggacctaagtatcttggaca

SEQ ID NO: 19078 - DNA, 22 bp, synthetic construct
  misc_feature 1..22: note = chemically synthesized
  source 1..22: mol_type = other DNA
agtatcttggacattttttttt

SEQ ID NO: 19079 - DNA, 22 bp, synthetic construct
  misc_feature 1..22: note = chemically synthesized
  source 1..22: mol_type = other DNA
ggacattttttttttagagaca

SEQ ID NO: 19080 - DNA, 22 bp, synthetic construct
  misc_feature 1..22: note = chemically synthesized
  source 1..22: mol_type = other DNA
gacattttttttttagagacag

SEQ ID NO: 19081 - DNA, 22 bp, synthetic construct
  misc_feature 1..22: note = chemically synthesized
  source 1..22: mol_type = other DNA
tttttttagagacaggagtgta

SEQ ID NO: 19082 - DNA, 22 bp, synthetic construct
  misc_feature 1..22: note = chemically synthesized
  source 1..22: mol_type = other DNA
ttttttagagacaggagtgtag

SEQ ID NO: 19083 - DNA, 22 bp, synthetic construct
  misc_feature 1..22: note = chemically synthesized
  source 1..22: mol_type = other DNA
tttttagagacaggagtgtagt

SEQ ID NO: 19084 - DNA, 22 bp, synthetic construct
  misc_feature 1..22: note = chemically synthesized
  source 1..22: mol_type = other DNA
ttttagagacaggagtgtagtg

SEQ ID NO: 19085 - DNA, 22 bp, synthetic construct
  misc_feature 1..22: note = chemically synthesized
  source 1..22: mol_type = other DNA
tttagagacaggagtgtagtgg

SEQ ID NO: 19086 - DNA, 22 bp, synthetic construct
  misc_feature 1..22: note = chemically synthesized
  source 1..22: mol_type = other DNA
ttagagacaggagtgtagtggc

SEQ ID NO: 19087 - DNA, 22 bp, synthetic construct
  misc_feature 1..22: note = chemically synthesized
  source 1..22: mol_type = other DNA
tagagacaggagtgtagtggca

SEQ ID NO: 19088 - DNA, 22 bp, synthetic construct
  misc_feature 1..22: note = chemically synthesized
  source 1..22: mol_type = other DNA
agagacaggagtgtagtggcag

SEQ ID NO: 19089 - DNA, 22 bp, synthetic construct
  misc_feature 1..22: note = chemically synthesized
  source 1..22: mol_type = other DNA
gagacaggagtgtagtggcagg

SEQ ID NO: 19090 - DNA, 22 bp, synthetic construct
  misc_feature 1..22: note = chemically synthesized
  source 1..22: mol_type = other DNA
actgcaacctcgaactcctggg

SEQ ID NO: 19091 - DNA, 22 bp, synthetic construct
  misc_feature 1..22: note = chemically synthesized
  source 1..22: mol_type = other DNA
caacctcgaactcctgggctca

SEQ ID NO: 19092 - DNA, 22 bp, synthetic construct
  misc_feature 1..22: note = chemically synthesized
  source 1..22: mol_type = other DNA
gaactcctgggctcaagccatc

SEQ ID NO: 19093 - DNA, 22 bp, synthetic construct
  misc_feature 1..22: note = chemically synthesized
  source 1..22: mol_type = other DNA
ctgggctcaagccatcctccca

SEQ ID NO: 19094 - DNA, 22 bp, synthetic construct
  misc_feature 1..22: note = chemically synthesized
  source 1..22: mol_type = other DNA
ggctcaagccatcctcccacct

SEQ ID NO: 19095 - DNA, 22 bp, synthetic construct
  misc_feature 1..22: note = chemically synthesized
  source 1..22: mol_type = other DNA
aagccatcctcccacctcagcc

SEQ ID NO: 19096 - DNA, 22 bp, synthetic construct
  misc_feature 1..22: note = chemically synthesized
  source 1..22: mol_type = other DNA
ccacctcagcctcccaagtagt

SEQ ID NO: 19097 - DNA, 22 bp, synthetic construct
  misc_feature 1..22: note = chemically synthesized
  source 1..22: mol_type = other DNA
agcctcccaagtagttaggact

SEQ ID NO: 19098 - DNA, 22 bp, synthetic construct
  misc_feature 1..22: note = chemically synthesized
  source 1..22: mol_type = other DNA
ccaagtagttaggacttacagg

SEQ ID NO: 19099 - DNA, 22 bp, synthetic construct
  misc_feature 1..22: note = chemically synthesized
  source 1..22: mol_type = other DNA
ggacttacaggtgtgcaccact

SEQ ID NO: 19100 - DNA, 22 bp, synthetic construct
  misc_feature 1..22: note = chemically synthesized
  source 1..22: mol_type = other DNA
acaggtgtgcaccactgtgcct

SEQ ID NO: 19101 - DNA, 22 bp, synthetic construct
  misc_feature 1..22: note = chemically synthesized
  source 1..22: mol_type = other DNA
caggtgtgcaccactgtgcctg

SEQ ID NO: 19102 - DNA, 22 bp, synthetic construct
  misc_feature 1..22: note = chemically synthesized
  source 1..22: mol_type = other DNA
tgcctggcaaattaaaaaaaat

SEQ ID NO: 19103 - DNA, 22 bp, synthetic construct
  misc_feature 1..22: note = chemically synthesized
  source 1..22: mol_type = other DNA
gcaaattaaaaaaaatttttta

SEQ ID NO: 19104 - DNA, 22 bp, synthetic construct
  misc_feature 1..22: note = chemically synthesized
  source 1..22: mol_type = other DNA
aaaaaaattttttagagaaatg

SEQ ID NO: 19105 - DNA, 22 bp, synthetic construct
  misc_feature 1..22: note = chemically synthesized
  source 1..22: mol_type = other DNA
tttagagaaatggggtcttgct

SEQ ID NO: 19106 - DNA, 22 bp, synthetic construct
  misc_feature 1..22: note = chemically synthesized
  source 1..22: mol_type = other DNA
ttagagaaatggggtcttgcta

SEQ ID NO: 19107 - DNA, 22 bp, synthetic construct
  misc_feature 1..22: note = chemically synthesized
  source 1..22: mol_type = other DNA
tagagaaatggggtcttgctat

SEQ ID NO: 19108 - DNA, 22 bp, synthetic construct
  misc_feature 1..22: note = chemically synthesized
  source 1..22: mol_type = other DNA
agagaaatggggtcttgctatg

SEQ ID NO: 19109 - DNA, 22 bp, synthetic construct
  misc_feature 1..22: note = chemically synthesized
  source 1..22: mol_type = other DNA
gagaaatggggtcttgctatgt

SEQ ID NO: 19110 - DNA, 22 bp, synthetic construct
  misc_feature 1..22: note = chemically synthesized
  source 1..22: mol_type = other DNA
gctatgttgcccaggctggtgg

SEQ ID NO: 19111 - DNA, 22 bp, synthetic construct
  misc_feature 1..22: note = chemically synthesized
  source 1..22: mol_type = other DNA
ctatgttgcccaggctggtggg

SEQ ID NO: 19112 - DNA, 22 bp, synthetic construct
  misc_feature 1..22: note = chemically synthesized
  source 1..22: mol_type = other DNA
tgttgcccaggctggtgggaaa

SEQ ID NO: 19113 - DNA, 22 bp, synthetic construct
  misc_feature 1..22: note = chemically synthesized
  source 1..22: mol_type = other DNA
cccaggctggtgggaaaagatt

SEQ ID NO: 19114 - DNA, 22 bp, synthetic construct
  misc_feature 1..22: note = chemically synthesized
  source 1..22: mol_type = other DNA
gtgggaaaagattttaaggtga

SEQ ID NO: 19115 - DNA, 22 bp, synthetic construct
  misc_feature 1..22: note = chemically synthesized
  source 1..22: mol_type = other DNA
taaggtgagagagatctgagca

SEQ ID NO: 19116 - DNA, 22 bp, synthetic construct
  misc_feature 1..22: note = chemically synthesized
  source 1..22: mol_type = other DNA
aaggtgagagagatctgagcag

SEQ ID NO: 19117 - DNA, 22 bp, synthetic construct
  misc_feature 1..22: note = chemically synthesized
  source 1..22: mol_type = other DNA
aggtgagagagatctgagcagt

SEQ ID NO: 19118 - DNA, 22 bp, synthetic construct
  misc_feature 1..22: note = chemically synthesized
  source 1..22: mol_type = other DNA
agcagtgctaggcagaagggca

SEQ ID NO: 19119 - DNA, 22 bp, synthetic construct
  misc_feature 1..22: note = chemically synthesized
  source 1..22: mol_type = other DNA
ggcagaagggcaagagccagga

SEQ ID NO: 19120 - DNA, 22 bp, synthetic construct
  misc_feature 1..22: note = chemically synthesized
  source 1..22: mol_type = other DNA
gtggtggagccgggttccatgg

SEQ ID NO: 19121 - DNA, 22 bp, synthetic construct
  misc_feature 1..22: note = chemically synthesized
  source 1..22: mol_type = other DNA
catggaggcaggaggagcaggg

SEQ ID NO: 19122 - DNA, 22 bp, synthetic construct
  misc_feature 1..22: note = chemically synthesized
  source 1..22: mol_type = other DNA
ggagcttaggaaggggattggt

SEQ ID NO: 19123 - DNA, 22 bp, synthetic construct
  misc_feature 1..22: note = chemically synthesized
  source 1..22: mol_type = other DNA
gagcttaggaaggggattggtt

SEQ ID NO: 19124 - DNA, 22 bp, synthetic construct
  misc_feature 1..22: note = chemically synthesized
  source 1..22: mol_type = other DNA
aggaaggggattggttagctgg

SEQ ID NO: 19125 - DNA, 22 bp, synthetic construct
  misc_feature 1..22: note = chemically synthesized
  source 1..22: mol_type = other DNA
ggaaggggattggttagctggg

SEQ ID NO: 19126 - DNA, 22 bp, synthetic construct
  misc_feature 1..22: note = chemically synthesized
  source 1..22: mol_type = other DNA
gttagctgggctggaatgaggg

SEQ ID NO: 19127 - DNA, 22 bp, synthetic construct
  misc_feature 1..22: note = chemically synthesized
  source 1..22: mol_type = other DNA
gctgggctggaatgagggactc

SEQ ID NO: 19128 - DNA, 22 bp, synthetic construct
  misc_feature 1..22: note = chemically synthesized
  source 1..22: mol_type = other DNA
ggctggaatgagggactcctca

SEQ ID NO: 19129 - DNA, 22 bp, synthetic construct
  misc_feature 1..22: note = chemically synthesized
  source 1..22: mol_type = other DNA
gaatgagggactcctcattcct

SEQ ID NO: 19130 - DNA, 22 bp, synthetic construct
  misc_feature 1..22: note = chemically synthesized
  source 1..22: mol_type = other DNA
ctcattcctgaggctggccaac

SEQ ID NO: 19131 - DNA, 22 bp, synthetic construct
  misc_feature 1..22: note = chemically synthesized
  source 1..22: mol_type = other DNA
attcctgaggctggccaaccga

SEQ ID NO: 19132 - DNA, 22 bp, synthetic construct
  misc_feature 1..22: note = chemically synthesized
  source 1..22: mol_type = other DNA
ctgaggctggccaaccgaggga

SEQ ID NO: 19133 - DNA, 22 bp, synthetic construct
  misc_feature 1..22: note = chemically synthesized
  source 1..22: mol_type = other DNA
aggctggccaaccgagggaggg

SEQ ID NO: 19134 - DNA, 22 bp, synthetic construct
  misc_feature 1..22: note = chemically synthesized
  source 1..22: mol_type = other DNA
gccaaccgagggagggccggtg

SEQ ID NO: 19135 - DNA, 22 bp, synthetic construct
  misc_feature 1..22: note = chemically synthesized
  source 1..22: mol_type = other DNA
ggcagggcagggcaggggacag

SEQ ID NO: 19136 - DNA, 22 bp, synthetic construct
  misc_feature 1..22: note = chemically synthesized
  source 1..22: mol_type = other DNA
ccgaggaccactcaggaacacc

SEQ ID NO: 19137 - DNA, 22 bp, synthetic construct
  misc_feature 1..22: note = chemically synthesized
  source 1..22: mol_type = other DNA
aggaacaccagtagcatctcct

SEQ ID NO: 19138 - DNA, 22 bp, synthetic construct
  misc_feature 1..22: note = chemically synthesized
  source 1..22: mol_type = other DNA
ctctctctgtagggggctggct

SEQ ID NO: 19139 - DNA, 22 bp, synthetic construct
  misc_feature 1..22: note = chemically synthesized
  source 1..22: mol_type = other DNA
tctctgtagggggctggctgga

SEQ ID NO: 19140 - DNA, 22 bp, synthetic construct
  misc_feature 1..22: note = chemically synthesized
  source 1..22: mol_type = other DNA
tctgtagggggctggctggact

SEQ ID NO: 19141 - DNA, 22 bp, synthetic construct
  misc_feature 1..22: note = chemically synthesized
  source 1..22: mol_type = other DNA
tgtagggggctggctggacttc

SEQ ID NO: 19142 - DNA, 22 bp, synthetic construct
  misc_feature 1..22: note = chemically synthesized
  source 1..22: mol_type = other DNA
tagggggctggctggacttccc

SEQ ID NO: 19143 - DNA, 22 bp, synthetic construct
  misc_feature 1..22: note = chemically synthesized
  source 1..22: mol_type = other DNA
gctggacttcccaccaggcggt

SEQ ID NO: 19144 - DNA, 22 bp, synthetic construct
  misc_feature 1..22: note = chemically synthesized
  source 1..22: mol_type = other DNA
gacttcccaccaggcggtgtcc

SEQ ID NO: 19145 - DNA, 22 bp, synthetic construct
  misc_feature 1..22: note = chemically synthesized
  source 1..22: mol_type = other DNA
cccaccaggcggtgtccccaca

SEQ ID NO: 19146 - DNA, 22 bp, synthetic construct
  misc_feature 1..22: note = chemically synthesized
  source 1..22: mol_type = other DNA
ccaccaggcggtgtccccacag

SEQ ID NO: 19147 - DNA, 22 bp, synthetic construct
  misc_feature 1..22: note = chemically synthesized
  source 1..22: mol_type = other DNA
tccgcctcactctcctctgcaa

SEQ ID NO: 19148 - DNA, 22 bp, synthetic construct
  misc_feature 1..22: note = chemically synthesized
  source 1..22: mol_type = other DNA
actctcctctgcaactccagtg

SEQ ID NO: 19149 - DNA, 22 bp, synthetic construct
  misc_feature 1..22: note = chemically synthesized
  source 1..22: mol_type = other DNA
tcctctgcaactccagtgccca

SEQ ID NO: 19150 - DNA, 22 bp, synthetic construct
  misc_feature 1..22: note = chemically synthesized
  source 1..22: mol_type = other DNA
ctctgcaactccagtgcccaca

SEQ ID NO: 19151 - DNA, 22 bp, synthetic construct
  misc_feature 1..22: note = chemically synthesized
  source 1..22: mol_type = other DNA
tgcaactccagtgcccacacgg

SEQ ID NO: 19152 - DNA, 22 bp, synthetic construct
  misc_feature 1..22: note = chemically synthesized
  source 1..22: mol_type = other DNA
caactccagtgcccacacggca

SEQ ID NO: 19153 - DNA, 22 bp, synthetic construct
  misc_feature 1..22: note = chemically synthesized
  source 1..22: mol_type = other DNA
cagtgcccacacggcacccggt

SEQ ID NO: 19154 - DNA, 22 bp, synthetic construct
  misc_feature 1..22: note = chemically synthesized
  source 1..22: mol_type = other DNA
agagagaatacgggatgctgct

SEQ ID NO: 19155 - DNA, 22 bp, synthetic construct
  misc_feature 1..22: note = chemically synthesized
  source 1..22: mol_type = other DNA
ctgaatcttctgagggtgacag

SEQ ID NO: 19156 - DNA, 22 bp, synthetic construct
  misc_feature 1..22: note = chemically synthesized
  source 1..22: mol_type = other DNA
aatcttctgagggtgacagaat

SEQ ID NO: 19157 - DNA, 22 bp, synthetic construct
  misc_feature 1..22: note = chemically synthesized
  source 1..22: mol_type = other DNA
ctgagggtgacagaatttagag

SEQ ID NO: 19158 - DNA, 22 bp, synthetic construct
  misc_feature 1..22: note = chemically synthesized
  source 1..22: mol_type = other DNA
tgagggtgacagaatttagagt

SEQ ID NO: 19159 - DNA, 22 bp, synthetic construct
  misc_feature 1..22: note = chemically synthesized
  source 1..22: mol_type = other DNA
agggtgacagaatttagagttt

SEQ ID NO: 19160 - DNA, 22 bp, synthetic construct
  misc_feature 1..22: note = chemically synthesized
  source 1..22: mol_type = other DNA
agagtttgagcaggaggcttgg

SEQ ID NO: 19161 - DNA, 22 bp, synthetic construct
  misc_feature 1..22: note = chemically synthesized
  source 1..22: mol_type = other DNA
gagtttgagcaggaggcttgga

SEQ ID NO: 19162 - DNA, 22 bp, synthetic construct
  misc_feature 1..22: note = chemically synthesized
  source 1..22: mol_type = other DNA
gagcaggaggcttggagagagg

SEQ ID NO: 19163 - DNA, 22 bp, synthetic construct
  misc_feature 1..22: note = chemically synthesized
  source 1..22: mol_type = other DNA
agcaggaggcttggagagaggc

SEQ ID NO: 19164 - DNA, 22 bp, synthetic construct
  misc_feature 1..22: note = chemically synthesized
  source 1..22: mol_type = other DNA
ggagagaggccaggatttctga

SEQ ID NO: 19165 - DNA, 22 bp, synthetic construct
  misc_feature 1..22: note = chemically synthesized
  source 1..22: mol_type = other DNA
gagagaggccaggatttctgaa

SEQ ID NO: 19166 - DNA, 22 bp, synthetic construct
  misc_feature 1..22: note = chemically synthesized
  source 1..22: mol_type = other DNA
ctgaaattaatgggagagtgag

SEQ ID NO: 19167 - DNA, 22 bp, synthetic construct
  misc_feature 1..22: note = chemically synthesized
  source 1..22: mol_type = other DNA
tgaaattaatgggagagtgagc

SEQ ID NO: 19168 - DNA, 22 bp, synthetic construct
  misc_feature 1..22: note = chemically synthesized
  source 1..22: mol_type = other DNA
aaattaatgggagagtgagctc

SEQ ID NO: 19169 - DNA, 22 bp, synthetic construct
  misc_feature 1..22: note = chemically synthesized
  source 1..22: mol_type = other DNA
atgggagagtgagctcacgcga

SEQ ID NO: 19170 - DNA, 22 bp, synthetic construct
  misc_feature 1..22: note = chemically synthesized
  source 1..22: mol_type = other DNA
acgcgaatgggctgagggacac

SEQ ID NO: 19171 - DNA, 22 bp, synthetic construct
  misc_feature 1..22: note = chemically synthesized
  source 1..22: mol_type = other DNA
agggacaccagtgagggaccgt

SEQ ID NO: 19172 - DNA, 22 bp, synthetic construct
  misc_feature 1..22: note = chemically synthesized
  source 1..22: mol_type = other DNA
aagggatgtagcaaagtcaccg

SEQ ID NO: 19173 - DNA, 22 bp, synthetic construct
  misc_feature 1..22: note = chemically synthesized
  source 1..22: mol_type = other DNA
ccctccagcagcccgggtggtg

SEQ ID NO: 19174 - DNA, 22 bp, synthetic construct
  misc_feature 1..22: note = chemically synthesized
  source 1..22: mol_type = other DNA
cctccagcagcccgggtggtgg

SEQ ID NO: 19175 - DNA, 22 bp, synthetic construct
  misc_feature 1..22: note = chemically synthesized
  source 1..22: mol_type = other DNA
cagcagcccgggtggtgggggc

SEQ ID NO: 19176 - DNA, 22 bp, synthetic construct
  misc_feature 1..22: note = chemically synthesized
  source 1..22: mol_type = other DNA
ggggaacgtcatcatgggagct

SEQ ID NO: 19177 - DNA, 22 bp, synthetic construct
  misc_feature 1..22: note = chemically synthesized
  source 1..22: mol_type = other DNA
acactgatcagctgctcaccgg

SEQ ID NO: 19178 - DNA, 22 bp, synthetic construct
  misc_feature 1..22: note = chemically synthesized
  source 1..22: mol_type = other DNA
atcagctgctcaccggggccca

SEQ ID NO: 19179 - DNA, 22 bp, synthetic construct
  misc_feature 1..22: note = chemically synthesized
  source 1..22: mol_type = other DNA
ctcaccggggcccatcttccac

SEQ ID NO: 19180 - DNA, 22 bp, synthetic construct
  misc_feature 1..22: note = chemically synthesized
  source 1..22: mol_type = other DNA
accggggcccatcttccacttg

SEQ ID NO: 19181 - DNA, 22 bp, synthetic construct
  misc_feature 1..22: note = chemically synthesized
  source 1..22: mol_type = other DNA
ccacttgtctcagcacttgatt

SEQ ID NO: 19182 - DNA, 22 bp, synthetic construct
  misc_feature 1..22: note = chemically synthesized
  source 1..22: mol_type = other DNA
cacttgtctcagcacttgattt

SEQ ID NO: 19183 - DNA, 22 bp, synthetic construct
  misc_feature 1..22: note = chemically synthesized
  source 1..22: mol_type = other DNA
gtctcagcacttgatttttttc

SEQ ID NO: 19184 - DNA, 22 bp, synthetic construct
  misc_feature 1..22: note = chemically synthesized
  source 1..22: mol_type = other DNA
tctcagcacttgatttttttct

SEQ ID NO: 19185 - DNA, 22 bp, synthetic construct
  misc_feature 1..22: note = chemically synthesized
  source 1..22: mol_type = other DNA
agcacttgatttttttctgcta

SEQ ID NO: 19186 - DNA, 22 bp, synthetic construct
  misc_feature 1..22: note = chemically synthesized
  source 1..22: mol_type = other DNA
gatttttttctgctaccccctt

SEQ ID NO: 19187 - DNA, 22 bp, synthetic construct
  misc_feature 1..22: note = chemically synthesized
  source 1..22: mol_type = other DNA
atttttttctgctacccccttt

SEQ ID NO: 19188 - DNA, 22 bp, synthetic construct
  misc_feature 1..22: note = chemically synthesized
  source 1..22: mol_type = other DNA
ttttctgctaccccctttttct

SEQ ID NO: 19189 - DNA, 22 bp, synthetic construct
  misc_feature 1..22: note = chemically synthesized
  source 1..22: mol_type = other DNA
tttctgctaccccctttttctt

SEQ ID NO: 19190 - DNA, 22 bp, synthetic construct
  misc_feature 1..22: note = chemically synthesized
  source 1..22: mol_type = other DNA
ttctgctaccccctttttcttt

SEQ ID NO: 19191 - DNA, 22 bp, synthetic construct
  misc_feature 1..22: note = chemically synthesized
  source 1..22: mol_type = other DNA
tctgctaccccctttttctttt

SEQ ID NO: 19192 - DNA, 22 bp, synthetic construct
  misc_feature 1..22: note = chemically synthesized
  source 1..22: mol_type = other DNA
ctgctaccccctttttctttta

SEQ ID NO: 19193 - DNA, 22 bp, synthetic construct
  misc_feature 1..22: note = chemically synthesized
  source 1..22: mol_type = other DNA
tgctaccccctttttcttttaa

SEQ ID NO: 19194 - DNA, 22 bp, synthetic construct
  misc_feature 1..22: note = chemically synthesized
  source 1..22: mol_type = other DNA
ctaccccctttttcttttaaag

SEQ ID NO: 19195 - DNA, 22 bp, synthetic construct
  misc_feature 1..22: note = chemically synthesized
  source 1..22: mol_type = other DNA
ccccctttttcttttaaagatt

SEQ ID NO: 19196 - DNA, 22 bp, synthetic construct
  misc_feature 1..22: note = chemically synthesized
  source 1..22: mol_type = other DNA
tttcttttaaagatttcaatta

SEQ ID NO: 19197 - DNA, 22 bp, synthetic construct
  misc_feature 1..22: note = chemically synthesized
  source 1..22: mol_type = other DNA
ttcttttaaagatttcaattat

SEQ ID NO: 19198 - DNA, 22 bp, synthetic construct
  misc_feature 1..22: note = chemically synthesized
  source 1..22: mol_type = other DNA
tcttttaaagatttcaattatg

SEQ ID NO: 19199 - DNA, 22 bp, synthetic construct
  misc_feature 1..22: note = chemically synthesized
  source 1..22: mol_type = other DNA
cttttaaagatttcaattatgc

SEQ ID NO: 19200 - DNA, 22 bp, synthetic construct
  misc_feature 1..22: note = chemically synthesized
  source 1..22: mol_type = other DNA
ttttaaagatttcaattatgca

SEQ ID NO: 19201 - DNA, 22 bp, synthetic construct
  misc_feature 1..22: note = chemically synthesized
  source 1..22: mol_type = other DNA
ttaaagatttcaattatgcatg

SEQ ID NO: 19202 - DNA, 22 bp, synthetic construct
  misc_feature 1..22: note = chemically synthesized
  source 1..22: mol_type = other DNA
taaagatttcaattatgcatgt

SEQ ID NO: 19203 - DNA, 22 bp, synthetic construct
  misc_feature 1..22: note = chemically synthesized
  source 1..22: mol_type = other DNA
aaagatttcaattatgcatgta

SEQ ID NO: 19204 - DNA, 22 bp, synthetic construct
  misc_feature 1..22: note = chemically synthesized
  source 1..22: mol_type = other DNA
aagatttcaattatgcatgtat

SEQ ID NO: 19205 - DNA, 22 bp, synthetic construct
  misc_feature 1..22: note = chemically synthesized
  source 1..22: mol_type = other DNA
caattatgcatgtattaagggt

SEQ ID NO: 19206 - DNA, 22 bp, synthetic construct
  misc_feature 1..22: note = chemically synthesized
  source 1..22: mol_type = other DNA
aattatgcatgtattaagggtc

SEQ ID NO: 19207 - DNA, 22 bp, synthetic construct
  misc_feature 1..22: note = chemically synthesized
  source 1..22: mol_type = other DNA
tgcatgtattaagggtcccaca

SEQ ID NO: 19208 - DNA, 22 bp, synthetic construct
  misc_feature 1..22: note = chemically synthesized
  source 1..22: mol_type = other DNA
agggtcccacagctcactcatt

SEQ ID NO: 19209 - DNA, 22 bp, synthetic construct
  misc_feature 1..22: note = chemically synthesized
  source 1..22: mol_type = other DNA
actcattctctttccatttttt

SEQ ID NO: 19210 - DNA, 22 bp, synthetic construct
  misc_feature 1..22: note = chemically synthesized
  source 1..22: mol_type = other DNA
attctctttccattttttaatt

SEQ ID NO: 19211 - DNA, 22 bp, synthetic construct
  misc_feature 1..22: note = chemically synthesized
  source 1..22: mol_type = other DNA
tctttccattttttaattcttt

SEQ ID NO: 19212 - DNA, 22 bp, synthetic construct
  misc_feature 1..22: note = chemically synthesized
  source 1..22: mol_type = other DNA
tttccattttttaattcttttt

SEQ ID NO: 19213 - DNA, 22 bp, synthetic construct
  misc_feature 1..22: note = chemically synthesized
  source 1..22: mol_type = other DNA
tccattttttaattcttttttc

SEQ ID NO: 19214 - DNA, 22 bp, synthetic construct
  misc_feature 1..22: note = chemically synthesized
  source 1..22: mol_type = other DNA
ccattttttaattcttttttct

SEQ ID NO: 19215 - DNA, 22 bp, synthetic construct
  misc_feature 1..22: note = chemically synthesized
  source 1..22: mol_type = other DNA
cattttttaattcttttttctc

SEQ ID NO: 19216 - DNA, 22 bp, synthetic construct
  misc_feature 1..22: note = chemically synthesized
  source 1..22: mol_type = other DNA
tttaattcttttttctcccagt

SEQ ID NO: 19217 - DNA, 22 bp, synthetic construct
  misc_feature 1..22: note = chemically synthesized
  source 1..22: mol_type = other DNA
ttaattcttttttctcccagtg

SEQ ID NO: 19218 - DNA, 22 bp, synthetic construct
  misc_feature 1..22: note = chemically synthesized
  source 1..22: mol_type = other DNA
taattcttttttctcccagtgt

SEQ ID NO: 19219 - DNA, 22 bp, synthetic construct
  misc_feature 1..22: note = chemically synthesized
  source 1..22: mol_type = other DNA
aattcttttttctcccagtgtt

SEQ ID NO: 19220 - DNA, 22 bp, synthetic construct
  misc_feature 1..22: note = chemically synthesized
  source 1..22: mol_type = other DNA
attcttttttctcccagtgttt

SEQ ID NO: 19221 - DNA, 22 bp, synthetic construct
  misc_feature 1..22: note = chemically synthesized
  source 1..22: mol_type = other DNA
ttttttctcccagtgtttcatt

SEQ ID NO: 19222 - DNA, 22 bp, synthetic construct
  misc_feature 1..22: note = chemically synthesized
  source 1..22: mol_type = other DNA
ttttctcccagtgtttcatttt

SEQ ID NO: 19223 - DNA, 22 bp, synthetic construct
  misc_feature 1..22: note = chemically synthesized
  source 1..22: mol_type = other DNA
tttctcccagtgtttcatttta

SEQ ID NO: 19224 - DNA, 22 bp, synthetic construct
  misc_feature 1..22: note = chemically synthesized
  source 1..22: mol_type = other DNA
ttctcccagtgtttcattttat

SEQ ID NO: 19225 - DNA, 22 bp, synthetic construct
  misc_feature 1..22: note = chemically synthesized
  source 1..22: mol_type = other DNA
tctcccagtgtttcattttata

SEQ ID NO: 19226 - DNA, 22 bp, synthetic construct
  misc_feature 1..22: note = chemically synthesized
  source 1..22: mol_type = other DNA
ctcccagtgtttcattttatag

SEQ ID NO: 19227 - DNA, 22 bp, synthetic construct
  misc_feature 1..22: note = chemically synthesized
  source 1..22: mol_type = other DNA
tcccagtgtttcattttataga

SEQ ID NO: 19228 - DNA, 22 bp, synthetic construct
  misc_feature 1..22: note = chemically synthesized
  source 1..22: mol_type = other DNA
ccagtgtttcattttatagagt

SEQ ID NO: 19229 - DNA, 22 bp, synthetic construct
  misc_feature 1..22: note = chemically synthesized
  source 1..22: mol_type = other DNA
cattttatagagttattgctgt

SEQ ID NO: 19230 - DNA, 22 bp, synthetic construct
  misc_feature 1..22: note = chemically synthesized
  source 1..22: mol_type = other DNA
attttatagagttattgctgtt

SEQ ID NO: 19231 - DNA, 22 bp, synthetic construct
  misc_feature 1..22: note = chemically synthesized
  source 1..22: mol_type = other DNA
tatagagttattgctgttcatt

SEQ ID NO: 19232 - DNA, 22 bp, synthetic construct
  misc_feature 1..22: note = chemically synthesized
  source 1..22: mol_type = other DNA
atagagttattgctgttcatta

SEQ ID NO: 19233 - DNA, 22 bp, synthetic construct
  misc_feature 1..22: note = chemically synthesized
  source 1..22: mol_type = other DNA
tagagttattgctgttcattaa

SEQ ID NO: 19234 - DNA, 22 bp, synthetic construct
  misc_feature 1..22: note = chemically synthesized
  source 1..22: mol_type = other DNA
ttgctgttcattaagttaacta

SEQ ID NO: 19235 - DNA, 22 bp, synthetic construct
  misc_feature 1..22: note = chemically synthesized
  source 1..22: mol_type = other DNA
ctgttcattaagttaactaaaa

SEQ ID NO: 19236 - DNA, 22 bp, synthetic construct
  misc_feature 1..22: note = chemically synthesized
  source 1..22: mol_type = other DNA
ttcattaagttaactaaaattt

SEQ ID NO: 19237 - DNA, 22 bp, synthetic construct
  misc_feature 1..22: note = chemically synthesized
  source 1..22: mol_type = other DNA
attaagttaactaaaattttcc

SEQ ID NO: 19238 - DNA, 22 bp, synthetic construct
  misc_feature 1..22: note = chemically synthesized
  source 1..22: mol_type = other DNA
agttaactaaaattttcccctt

SEQ ID NO: 19239 - DNA, 22 bp, synthetic construct
  misc_feature 1..22: note = chemically synthesized
  source 1..22: mol_type = other DNA
actaaaattttccccttcccct

SEQ ID NO: 19240 - DNA, 22 bp, synthetic construct
  misc_feature 1..22: note = chemically synthesized
  source 1..22: mol_type = other DNA
aaattttccccttcccctcccc

SEQ ID NO: 19241 - DNA, 22 bp, synthetic construct
  misc_feature 1..22: note = chemically synthesized
  source 1..22: mol_type = other DNA
tccccttcccctccccctcccc

SEQ ID NO: 19242 - DNA, 22 bp, synthetic construct
  misc_feature 1..22: note = chemically synthesized
  source 1..22: mol_type = other DNA
ccccttcccctccccctcccct

SEQ ID NO: 19243 - DNA, 22 bp, synthetic construct
  misc_feature 1..22: note = chemically synthesized
  source 1..22: mol_type = other DNA
cccttcccctccccctcccctc

SEQ ID NO: 19244 - DNA, 22 bp, synthetic construct
  misc_feature 1..22: note = chemically synthesized
  source 1..22: mol_type = other DNA
cccctccccctcccctcccctc

SEQ ID NO: 19245 - DNA, 22 bp, synthetic construct
  misc_feature 1..22: note = chemically synthesized
  source 1..22: mol_type = other DNA
ccctccccctcccctcccctcc

SEQ ID NO: 19246 - DNA, 22 bp, synthetic construct
  misc_feature 1..22: note = chemically synthesized
  source 1..22: mol_type = other DNA
cccctcccctcccctcctttcc

SEQ ID NO: 19247 - DNA, 22 bp, synthetic construct
  misc_feature 1..22: note = chemically synthesized
  source 1..22: mol_type = other DNA
ccctcccctcctttccttccct

SEQ ID NO: 19248 - DNA, 22 bp, synthetic construct
  misc_feature 1..22: note = chemically synthesized
  source 1..22: mol_type = other DNA
ccctcctttccttccctcgctt

SEQ ID NO: 19249 - DNA, 22 bp, synthetic construct
  misc_feature 1..22: note = chemically synthesized
  source 1..22: mol_type = other DNA
ctttccttccctcgcttcccct

SEQ ID NO: 19250 - DNA, 22 bp, synthetic construct
  misc_feature 1..22: note = chemically synthesized
  source 1..22: mol_type = other DNA
tccttccctcgcttcccctccc

SEQ ID NO: 19251 - DNA, 22 bp, synthetic construct
  misc_feature 1..22: note = chemically synthesized
  source 1..22: mol_type = other DNA
ccttccctcgcttcccctcccc

SEQ ID NO: 19252 - DNA, 22 bp, synthetic construct
  misc_feature 1..22: note = chemically synthesized
  source 1..22: mol_type = other DNA
cttccctcgcttcccctcccct

SEQ ID NO: 19253 - DNA, 22 bp, synthetic construct
  misc_feature 1..22: note = chemically synthesized
  source 1..22: mol_type = other DNA
ccctcgcttcccctcccctctc

SEQ ID NO: 19254 - DNA, 22 bp, synthetic construct
  misc_feature 1..22: note = chemically synthesized
  source 1..22: mol_type = other DNA
cctcgcttcccctcccctctct

SEQ ID NO: 19255 - DNA, 22 bp, synthetic construct
  misc_feature 1..22: note = chemically synthesized
  source 1..22: mol_type = other DNA
gcttcccctcccctctctctct

SEQ ID NO: 19256 - DNA, 22 bp, synthetic construct
  misc_feature 1..22: note = chemically synthesized
  source 1..22: mol_type = other DNA
cccctcccctctctctctctca

SEQ ID NO: 19257 - DNA, 22 bp, synthetic construct
  misc_feature 1..22: note = chemically synthesized
  source 1..22: mol_type = other DNA
ccctcccctctctctctctcat

SEQ ID NO: 19258 - DNA, 22 bp, synthetic construct
  misc_feature 1..22: note = chemically synthesized
  source 1..22: mol_type = other DNA
ccctctctctctctcatctcac

SEQ ID NO: 19259 - DNA, 22 bp, synthetic construct
  misc_feature 1..22: note = chemically synthesized
  source 1..22: mol_type = other DNA
tctctctctcatctcactctgt

SEQ ID NO: 19260 - DNA, 22 bp, synthetic construct
  misc_feature 1..22: note = chemically synthesized
  source 1..22: mol_type = other DNA
tctctctcatctcactctgttg

SEQ ID NO: 19261 - DNA, 22 bp, synthetic construct
  misc_feature 1..22: note = chemically synthesized
  source 1..22: mol_type = other DNA
tctctcatctcactctgttgcc

SEQ ID NO: 19262 - DNA, 22 bp, synthetic construct
  misc_feature 1..22: note = chemically synthesized
  source 1..22: mol_type = other DNA
tctcatctcactctgttgccca

SEQ ID NO: 19263 - DNA, 22 bp, synthetic construct
  misc_feature 1..22: note = chemically synthesized
  source 1..22: mol_type = other DNA
tcatctcactctgttgcccagg

SEQ ID NO: 19264 - DNA, 22 bp, synthetic construct
  misc_feature 1..22: note = chemically synthesized
  source 1..22: mol_type = other DNA
atctcactctgttgcccaggct

SEQ ID NO: 19265 - DNA, 22 bp, synthetic construct
  misc_feature 1..22: note = chemically synthesized
  source 1..22: mol_type = other DNA
actctgttgcccaggctggaat

SEQ ID NO: 19266 - DNA, 22 bp, synthetic construct
  misc_feature 1..22: note = chemically synthesized
  source 1..22: mol_type = other DNA
tgttgcccaggctggaatgcag

SEQ ID NO: 19267 - DNA, 22 bp, synthetic construct
  misc_feature 1..22: note = chemically synthesized
  source 1..22: mol_type = other DNA
ttgcccaggctggaatgcagta

SEQ ID NO: 19268 - DNA, 22 bp, synthetic construct
  misc_feature 1..22: note = chemically synthesized
  source 1..22: mol_type = other DNA
cccaggctggaatgcagtagct

SEQ ID NO: 19269 - DNA, 22 bp, synthetic construct
  misc_feature 1..22: note = chemically synthesized
  source 1..22: mol_type = other DNA
gaatgcagtagcttgtcacaac

SEQ ID NO: 19270 - DNA, 22 bp, synthetic construct
  misc_feature 1..22: note = chemically synthesized
  source 1..22: mol_type = other DNA
gtcacaactcactgtggcctcc

SEQ ID NO: 19271 - DNA, 22 bp, synthetic construct
  misc_feature 1..22: note = chemically synthesized
  source 1..22: mol_type = other DNA
tcacaactcactgtggcctcca

SEQ ID NO: 19272 - DNA, 22 bp, synthetic construct
  misc_feature 1..22: note = chemically synthesized
  source 1..22: mol_type = other DNA
actgtggcctccacctcctggg

SEQ ID NO: 19273 - DNA, 22 bp, synthetic construct
  misc_feature 1..22: note = chemically synthesized
  source 1..22: mol_type = other DNA
tggcctccacctcctgggctca

SEQ ID NO: 19274 - DNA, 22 bp, synthetic construct
  misc_feature 1..22: note = chemically synthesized
  source 1..22: mol_type = other DNA
cacctcctgggctcaggcgatc

SEQ ID NO: 19275 - DNA, 22 bp, synthetic construct
  misc_feature 1..22: note = chemically synthesized
  source 1..22: mol_type = other DNA
ctgggctcaggcgatccttcca

SEQ ID NO: 19276 - DNA, 22 bp, synthetic construct
  misc_feature 1..22: note = chemically synthesized
  source 1..22: mol_type = other DNA
ggctcaggcgatccttccactt

SEQ ID NO: 19277 - DNA, 22 bp, synthetic construct
  misc_feature 1..22: note = chemically synthesized
  source 1..22: mol_type = other DNA
aggcgatccttccacttcagcc

SEQ ID NO: 19278 - DNA, 22 bp, synthetic construct
  misc_feature 1..22: note = chemically synthesized
  source 1..22: mol_type = other DNA
ccacttcagcctcccaggtagc

SEQ ID NO: 19279 - DNA, 22 bp, synthetic construct
  misc_feature 1..22: note = chemically synthesized
  source 1..22: mol_type = other DNA
cacttcagcctcccaggtagct

SEQ ID NO: 19280 - DNA, 22 bp, synthetic construct
  misc_feature 1..22: note = chemically synthesized
  source 1..22: mol_type = other DNA
cagcctcccaggtagctgggac

SEQ ID NO: 19281 - DNA, 22 bp, synthetic construct
  misc_feature 1..22: note = chemically synthesized
  source 1..22: mol_type = other DNA
agcctcccaggtagctgggact

SEQ ID NO: 19282 - DNA, 22 bp, synthetic construct
  misc_feature 1..22: note = chemically synthesized
  source 1..22: mol_type = other DNA
ccaggtagctgggactataggc

SEQ ID NO: 19283 - DNA, 22 bp, synthetic construct
  misc_feature 1..22: note = chemically synthesized
  source 1..22: mol_type = other DNA
ggactataggcatgtggcacca

SEQ ID NO: 19284 - DNA, 22 bp, synthetic construct
  misc_feature 1..22: note = chemically synthesized
  source 1..22: mol_type = other DNA
taggcatgtggcaccacacctg

SEQ ID NO: 19285 - DNA, 22 bp, synthetic construct
  misc_feature 1..22: note = chemically synthesized
  source 1..22: mol_type = other DNA
gctaattaaaaatttttttttg

SEQ ID NO: 19286 - DNA, 22 bp, synthetic construct
  misc_feature 1..22: note = chemically synthesized
  source 1..22: mol_type = other DNA
attaaaaatttttttttgtaga

SEQ ID NO: 19287 - DNA, 22 bp, synthetic construct
  misc_feature 1..22: note = chemically synthesized
  source 1..22: mol_type = other DNA
aaaatttttttttgtagagacg

SEQ ID NO: 19288 - DNA, 22 bp, synthetic construct
  misc_feature 1..22: note = chemically synthesized
  source 1..22: mol_type = other DNA
ttttttgtagagacggttttgc

SEQ ID NO: 19289 - DNA, 22 bp, synthetic construct
  misc_feature 1..22: note = chemically synthesized
  source 1..22: mol_type = other DNA
tttttgtagagacggttttgcc

SEQ ID NO: 19290 - DNA, 22 bp, synthetic construct
  misc_feature 1..22: note = chemically synthesized
  source 1..22: mol_type = other DNA
ttttgtagagacggttttgcca

SEQ ID NO: 19291 - DNA, 22 bp, synthetic construct
  misc_feature 1..22: note = chemically synthesized
  source 1..22: mol_type = other DNA
tttgtagagacggttttgccat

SEQ ID NO: 19292 - DNA, 22 bp, synthetic construct
  misc_feature 1..22: note = chemically synthesized
  source 1..22: mol_type = other DNA
ttgtagagacggttttgccatg

SEQ ID NO: 19293 - DNA, 22 bp, synthetic construct
  misc_feature 1..22: note = chemically synthesized
  source 1..22: mol_type = other DNA
tgtagagacggttttgccatgt

SEQ ID NO: 19294 - DNA, 22 bp, synthetic construct
  misc_feature 1..22: note = chemically synthesized
  source 1..22: mol_type = other DNA
gtagagacggttttgccatgta

SEQ ID NO: 19295 - DNA, 22 bp, synthetic construct
  misc_feature 1..22: note = chemically synthesized
  source 1..22: mol_type = other DNA
tagagacggttttgccatgtag

SEQ ID NO: 19296 - DNA, 22 bp, synthetic construct
  misc_feature 1..22: note = chemically synthesized
  source 1..22: mol_type = other DNA
tgccatgtagaggggttttgcc

SEQ ID NO: 19297 - DNA, 22 bp, synthetic construct
  misc_feature 1..22: note = chemically synthesized
  source 1..22: mol_type = other DNA
gccatgtagaggggttttgcca

SEQ ID NO: 19298 - DNA, 22 bp, synthetic construct
  misc_feature 1..22: note = chemically synthesized
  source 1..22: mol_type = other DNA
ccatgtagaggggttttgccat

SEQ ID NO: 19299 - DNA, 22 bp, synthetic construct
  misc_feature 1..22: note = chemically synthesized
  source 1..22: mol_type = other DNA
tgccatgctgcccagactagtc

SEQ ID NO: 19300 - DNA, 22 bp, synthetic construct
  misc_feature 1..22: note = chemically synthesized
  source 1..22: mol_type = other DNA
gccatgctgcccagactagtct

SEQ ID NO: 19301 - DNA, 22 bp, synthetic construct
  misc_feature 1..22: note = chemically synthesized
  source 1..22: mol_type = other DNA
ccatgctgcccagactagtctt

SEQ ID NO: 19302 - DNA, 22 bp, synthetic construct
  misc_feature 1..22: note = chemically synthesized
  source 1..22: mol_type = other DNA
cccagactagtcttgagctcct

SEQ ID NO: 19303 - DNA, 22 bp, synthetic construct
  misc_feature 1..22: note = chemically synthesized
  source 1..22: mol_type = other DNA
gtcttgagctcctgggctcaag

SEQ ID NO: 19304 - DNA, 22 bp, synthetic construct
  misc_feature 1..22: note = chemically synthesized
  source 1..22: mol_type = other DNA
gagctcctgggctcaagtgatt

SEQ ID NO: 19305 - DNA, 22 bp, synthetic construct
  misc_feature 1..22: note = chemically synthesized
  source 1..22: mol_type = other DNA
agctcctgggctcaagtgattc

SEQ ID NO: 19306 - DNA, 22 bp, synthetic construct
  misc_feature 1..22: note = chemically synthesized
  source 1..22: mol_type = other DNA
ctgggctcaagtgattcccccc

SEQ ID NO: 19307 - DNA, 22 bp, synthetic construct
  misc_feature 1..22: note = chemically synthesized
  source 1..22: mol_type = other DNA
ggctcaagtgattccccccgtg

SEQ ID NO: 19308 - DNA, 22 bp, synthetic construct
  misc_feature 1..22: note = chemically synthesized
  source 1..22: mol_type = other DNA
aagtgattccccccgtgtcgac

SEQ ID NO: 19309 - DNA, 22 bp, synthetic construct
  misc_feature 1..22: note = chemically synthesized
  source 1..22: mol_type = other DNA
cccccgtgtcgacctcccaaag

SEQ ID NO: 19310 - DNA, 22 bp, synthetic construct
  misc_feature 1..22: note = chemically synthesized
  source 1..22: mol_type = other DNA
ccaaagtgctgggattacagat

SEQ ID NO: 19311 - DNA, 22 bp, synthetic construct
  misc_feature 1..22: note = chemically synthesized
  source 1..22: mol_type = other DNA
ggattacagatgtgatccacag

SEQ ID NO: 19312 - DNA, 22 bp, synthetic construct
  misc_feature 1..22: note = chemically synthesized
  source 1..22: mol_type = other DNA
cagatgtgatccacagtgcctg

SEQ ID NO: 19313 - DNA, 22 bp, synthetic construct
  misc_feature 1..22: note = chemically synthesized
  source 1..22: mol_type = other DNA
gccctaaatttttcttacgcat

SEQ ID NO: 19314 - DNA, 22 bp, synthetic construct
  misc_feature 1..22: note = chemically synthesized
  source 1..22: mol_type = other DNA
aatttttcttacgcatttctca

SEQ ID NO: 19315 - DNA, 22 bp, synthetic construct
  misc_feature 1..22: note = chemically synthesized
  source 1..22: mol_type = other DNA
ttcttacgcatttctcatcttc

SEQ ID NO: 19316 - DNA, 22 bp, synthetic construct
  misc_feature 1..22: note = chemically synthesized
  source 1..22: mol_type = other DNA
tcttacgcatttctcatcttcc

SEQ ID NO: 19317 - DNA, 22 bp, synthetic construct
  misc_feature 1..22: note = chemically synthesized
  source 1..22: mol_type = other DNA
cttacgcatttctcatcttcca

SEQ ID NO: 19318 - DNA, 22 bp, synthetic construct
  misc_feature 1..22: note = chemically synthesized
  source 1..22: mol_type = other DNA
ttacgcatttctcatcttccat

SEQ ID NO: 19319 - DNA, 22 bp, synthetic construct
  misc_feature 1..22: note = chemically synthesized
  source 1..22: mol_type = other DNA
acgcatttctcatcttccatta

SEQ ID NO: 19320 - DNA, 22 bp, synthetic construct
  misc_feature 1..22: note = chemically synthesized
  source 1..22: mol_type = other DNA
cgcatttctcatcttccattat

SEQ ID NO: 19321 - DNA, 22 bp, synthetic construct
  misc_feature 1..22: note = chemically synthesized
  source 1..22: mol_type = other DNA
ctcatcttccattatttccatc

SEQ ID NO: 19322 - DNA, 22 bp, synthetic construct
  misc_feature 1..22: note = chemically synthesized
  source 1..22: mol_type = other DNA
tcatcttccattatttccatcc

SEQ ID NO: 19323 - DNA, 22 bp, synthetic construct
  misc_feature 1..22: note = chemically synthesized
  source 1..22: mol_type = other DNA
atcttccattatttccatccag

SEQ ID NO: 19324 - DNA, 22 bp, synthetic construct
  misc_feature 1..22: note = chemically synthesized
  source 1..22: mol_type = other DNA
ccattatttccatccagtgtgt

SEQ ID NO: 19325 - DNA, 22 bp, synthetic construct
  misc_feature 1..22: note = chemically synthesized
  source 1..22: mol_type = other DNA
cattatttccatccagtgtgtt

SEQ ID NO: 19326 - DNA, 22 bp, synthetic construct
  misc_feature 1..22: note = chemically synthesized
  source 1..22: mol_type = other DNA
tttccatccagtgtgttttttc

SEQ ID NO: 19327 - DNA, 22 bp, synthetic construct
  misc_feature 1..22: note = chemically synthesized
  source 1..22: mol_type = other DNA
ccatccagtgtgttttttcttt

SEQ ID NO: 19328 - DNA, 22 bp, synthetic construct
  misc_feature 1..22: note = chemically synthesized
  source 1..22: mol_type = other DNA
catccagtgtgttttttctttt

SEQ ID NO: 19329 - DNA, 22 bp, synthetic construct
  misc_feature 1..22: note = chemically synthesized
  source 1..22: mol_type = other DNA
tttcttttctttcttttctttt

SEQ ID NO: 19330 - DNA, 22 bp, synthetic construct
  misc_feature 1..22: note = chemically synthesized
  source 1..22: mol_type = other DNA
ttcttttctttcttttcttttt

SEQ ID NO: 19331 - DNA, 22 bp, synthetic construct
  misc_feature 1..22: note = chemically synthesized
  source 1..22: mol_type = other DNA
tcttttctttcttttctttttt

SEQ ID NO: 19332 - DNA, 22 bp, synthetic construct
  misc_feature 1..22: note = chemically synthesized
  source 1..22: mol_type = other DNA
cttttctttcttttcttttttt

SEQ ID NO: 19333 - DNA, 22 bp, synthetic construct
  misc_feature 1..22: note = chemically synthesized
  source 1..22: mol_type = other DNA
ttttctttcttttctttttttt

SEQ ID NO: 19334 - DNA, 22 bp, synthetic construct
  misc_feature 1..22: note = chemically synthesized
  source 1..22: mol_type = other DNA
ttctttcttttctttttttttt

SEQ ID NO: 19335 - DNA, 22 bp, synthetic construct
  misc_feature 1..22: note = chemically synthesized
  source 1..22: mol_type = other DNA
tctttcttttcttttttttttt

SEQ ID NO: 19336 - DNA, 22 bp, synthetic construct
  misc_feature 1..22: note = chemically synthesized
  source 1..22: mol_type = other DNA
ctttcttttctttttttttttt

SEQ ID NO: 19337 - DNA, 22 bp, synthetic construct
  misc_feature 1..22: note = chemically synthesized
  source 1..22: mol_type = other DNA
tttcttttcttttttttttttt

SEQ ID NO: 19338 - DNA, 22 bp, synthetic construct
  misc_feature 1..22: note = chemically synthesized
  source 1..22: mol_type = other DNA
tcttttcttttttttttttttg

SEQ ID NO: 19339 - DNA, 22 bp, synthetic construct
  misc_feature 1..22: note = chemically synthesized
  source 1..22: mol_type = other DNA
cttttcttttttttttttttgg

SEQ ID NO: 19340 - DNA, 22 bp, synthetic construct
  misc_feature 1..22: note = chemically synthesized
  source 1..22: mol_type = other DNA
ttttcttttttttttttttgga

SEQ ID NO: 19341 - DNA, 22 bp, synthetic construct
  misc_feature 1..22: note = chemically synthesized
  source 1..22: mol_type = other DNA
ttcttttttttttttttggagg

SEQ ID NO: 19342 - DNA, 22 bp, synthetic construct
  misc_feature 1..22: note = chemically synthesized
  source 1..22: mol_type = other DNA
tcttttttttttttttggaggc

SEQ ID NO: 19343 - DNA, 22 bp, synthetic construct
  misc_feature 1..22: note = chemically synthesized
  source 1..22: mol_type = other DNA
cttttttttttttttggaggcg

SEQ ID NO: 19344 - DNA, 22 bp, synthetic construct
  misc_feature 1..22: note = chemically synthesized
  source 1..22: mol_type = other DNA
ttttttttttttttggaggcgg

SEQ ID NO: 19345 - DNA, 22 bp, synthetic construct
  misc_feature 1..22: note = chemically synthesized
  source 1..22: mol_type = other DNA
ttttttttttttggaggcggag

SEQ ID NO: 19346 - DNA, 22 bp, synthetic construct
  misc_feature 1..22: note = chemically synthesized
  source 1..22: mol_type = other DNA
tttttttttttggaggcggagt

SEQ ID NO: 19347 - DNA, 22 bp, synthetic construct
  misc_feature 1..22: note = chemically synthesized
  source 1..22: mol_type = other DNA
ttttttttttggaggcggagtc

SEQ ID NO: 19348 - DNA, 22 bp, synthetic construct
  misc_feature 1..22: note = chemically synthesized
  source 1..22: mol_type = other DNA
tttttttttggaggcggagtct

SEQ ID NO: 19349 - DNA, 22 bp, synthetic construct
  misc_feature 1..22: note = chemically synthesized
  source 1..22: mol_type = other DNA
ttttttttggaggcggagtctc

SEQ ID NO: 19350 - DNA, 22 bp, synthetic construct
  misc_feature 1..22: note = chemically synthesized
  source 1..22: mol_type = other DNA
tttttttggaggcggagtctcg

SEQ ID NO: 19351 - DNA, 22 bp, synthetic construct
  misc_feature 1..22: note = chemically synthesized
  source 1..22: mol_type = other DNA
ttttttggaggcggagtctcgc

SEQ ID NO: 19352 - DNA, 22 bp, synthetic construct
  misc_feature 1..22: note = chemically synthesized
  source 1..22: mol_type = other DNA
tttttggaggcggagtctcgct

SEQ ID NO: 19353 - DNA, 22 bp, synthetic construct
  misc_feature 1..22: note = chemically synthesized
  source 1..22: mol_type = other DNA
ttttggaggcggagtctcgctc

SEQ ID NO: 19354 - DNA, 22 bp, synthetic construct
  misc_feature 1..22: note = chemically synthesized
  source 1..22: mol_type = other DNA
tttggaggcggagtctcgctct

SEQ ID NO: 19355 - DNA, 22 bp, synthetic construct
  misc_feature 1..22: note = chemically synthesized
  source 1..22: mol_type = other DNA
ttggaggcggagtctcgctctg

SEQ ID NO: 19356 - DNA, 22 bp, synthetic construct
  misc_feature 1..22: note = chemically synthesized
  source 1..22: mol_type = other DNA
tggaggcggagtctcgctctgt

SEQ ID NO: 19357 - DNA, 22 bp, synthetic construct
  misc_feature 1..22: note = chemically synthesized
  source 1..22: mol_type = other DNA
ggaggcggagtctcgctctgtt

SEQ ID NO: 19358 - DNA, 22 bp, synthetic construct
  misc_feature 1..22: note = chemically synthesized
  source 1..22: mol_type = other DNA
gaggcggagtctcgctctgttg

SEQ ID NO: 19359 - DNA, 22 bp, synthetic construct
  misc_feature 1..22: note = chemically synthesized
  source 1..22: mol_type = other DNA
gctctgttgcccaggccggagt

SEQ ID NO: 19360 - DNA, 22 bp, synthetic construct
  misc_feature 1..22: note = chemically synthesized
  source 1..22: mol_type = other DNA
tgttgcccaggccggagtgcag

SEQ ID NO: 19361 - DNA, 22 bp, synthetic construct
  misc_feature 1..22: note = chemically synthesized
  source 1..22: mol_type = other DNA
ttgcccaggccggagtgcagtg

SEQ ID NO: 19362 - DNA, 22 bp, synthetic construct
  misc_feature 1..22: note = chemically synthesized
  source 1..22: mol_type = other DNA
cccaggccggagtgcagtggcg

SEQ ID NO: 19363 - DNA, 22 bp, synthetic construct
  misc_feature 1..22: note = chemically synthesized
  source 1..22: mol_type = other DNA
ggctcactgcaagctctgcctc

SEQ ID NO: 19364 - DNA, 22 bp, synthetic construct
  misc_feature 1..22: note = chemically synthesized
  source 1..22: mol_type = other DNA
gctcactgcaagctctgcctcc

SEQ ID NO: 19365 - DNA, 22 bp, synthetic construct
  misc_feature 1..22: note = chemically synthesized
  source 1..22: mol_type = other DNA
actgcaagctctgcctcccggg

SEQ ID NO: 19366 - DNA, 22 bp, synthetic construct
  misc_feature 1..22: note = chemically synthesized
  source 1..22: mol_type = other DNA
caagctctgcctcccgggttca

SEQ ID NO: 19367 - DNA, 22 bp, synthetic construct
  misc_feature 1..22: note = chemically synthesized
  source 1..22: mol_type = other DNA
tgcctcccgggttcatgccatt

SEQ ID NO: 19368 - DNA, 22 bp, synthetic construct
  misc_feature 1..22: note = chemically synthesized
  source 1..22: mol_type = other DNA
cctcccgggttcatgccattct

SEQ ID NO: 19369 - DNA, 22 bp, synthetic construct
  misc_feature 1..22: note = chemically synthesized
  source 1..22: mol_type = other DNA
ccgggttcatgccattctcctg

SEQ ID NO: 19370 - DNA, 22 bp, synthetic construct
  misc_feature 1..22: note = chemically synthesized
  source 1..22: mol_type = other DNA
atgccattctcctgcctcagcc

SEQ ID NO: 19371 - DNA, 22 bp, synthetic construct
  misc_feature 1..22: note = chemically synthesized
  source 1..22: mol_type = other DNA
tcctgcctcagcctcccgagta

SEQ ID NO: 19372 - DNA, 22 bp, synthetic construct
  misc_feature 1..22: note = chemically synthesized
  source 1..22: mol_type = other DNA
ctgcctcagcctcccgagtagc

SEQ ID NO: 19373 - DNA, 22 bp, synthetic construct
  misc_feature 1..22: note = chemically synthesized
  source 1..22: mol_type = other DNA
cctcagcctcccgagtagctgg

SEQ ID NO: 19374 - DNA, 22 bp, synthetic construct
  misc_feature 1..22: note = chemically synthesized
  source 1..22: mol_type = other DNA
agcctcccgagtagctgggact

SEQ ID NO: 19375 - DNA, 22 bp, synthetic construct
  misc_feature 1..22: note = chemically synthesized
  source 1..22: mol_type = other DNA
ccgagtagctgggactacaggc

SEQ ID NO: 19376 - DNA, 22 bp, synthetic construct
  misc_feature 1..22: note = chemically synthesized
  source 1..22: mol_type = other DNA
ggactacaggcgcctgccacca

SEQ ID NO: 19377 - DNA, 22 bp, synthetic construct
  misc_feature 1..22: note = chemically synthesized
  source 1..22: mol_type = other DNA
caggcgcctgccaccacgtctg

SEQ ID NO: 19378 - DNA, 22 bp, synthetic construct
  misc_feature 1..22: note = chemically synthesized
  source 1..22: mol_type = other DNA
ccaccacgtctggctaattttt

SEQ ID NO: 19379 - DNA, 22 bp, synthetic construct
  misc_feature 1..22: note = chemically synthesized
  source 1..22: mol_type = other DNA
gctaattttttgtatttttagt

SEQ ID NO: 19380 - DNA, 22 bp, synthetic construct
  misc_feature 1..22: note = chemically synthesized
  source 1..22: mol_type = other DNA
attttttgtatttttagtagag

SEQ ID NO: 19381 - DNA, 22 bp, synthetic construct
  misc_feature 1..22: note = chemically synthesized
  source 1..22: mol_type = other DNA
tttgtatttttagtagagatgg

SEQ ID NO: 19382 - DNA, 22 bp, synthetic construct
  misc_feature 1..22: note = chemically synthesized
  source 1..22: mol_type = other DNA
ttgtatttttagtagagatggg

SEQ ID NO: 19383 - DNA, 22 bp, synthetic construct
  misc_feature 1..22: note = chemically synthesized
  source 1..22: mol_type = other DNA
tgtatttttagtagagatgggg

SEQ ID NO: 19384 - DNA, 22 bp, synthetic construct
  misc_feature 1..22: note = chemically synthesized
  source 1..22: mol_type = other DNA
gtatttttagtagagatggggt

SEQ ID NO: 19385 - DNA, 22 bp, synthetic construct
  misc_feature 1..22: note = chemically synthesized
  source 1..22: mol_type = other DNA
tatttttagtagagatggggtt

SEQ ID NO: 19386 - DNA, 22 bp, synthetic construct
  misc_feature 1..22: note = chemically synthesized
  source 1..22: mol_type = other DNA
ttagtagagatggggtttcacc

SEQ ID NO: 19387 - DNA, 22 bp, synthetic construct
  misc_feature 1..22: note = chemically synthesized
  source 1..22: mol_type = other DNA
tagtagagatggggtttcacca

SEQ ID NO: 19388 - DNA, 22 bp, synthetic construct
  misc_feature 1..22: note = chemically synthesized
  source 1..22: mol_type = other DNA
agtagagatggggtttcaccat

SEQ ID NO: 19389 - DNA, 22 bp, synthetic construct
  misc_feature 1..22: note = chemically synthesized
  source 1..22: mol_type = other DNA
gtagagatggggtttcaccatg

SEQ ID NO: 19390 - DNA, 22 bp, synthetic construct
  misc_feature 1..22: note = chemically synthesized
  source 1..22: mol_type = other DNA
caccatgttagccaggatggtg

SEQ ID NO: 19391 - DNA, 22 bp, synthetic construct
  misc_feature 1..22: note = chemically synthesized
  source 1..22: mol_type = other DNA
accatgttagccaggatggtgt

SEQ ID NO: 19392 - DNA, 22 bp, synthetic construct
  misc_feature 1..22: note = chemically synthesized
  source 1..22: mol_type = other DNA
gccaggatggtgtcgatctcct

SEQ ID NO: 19393 - DNA, 22 bp, synthetic construct
  misc_feature 1..22: note = chemically synthesized
  source 1..22: mol_type = other DNA
ctgacctcatgatctgcccgcc

SEQ ID NO: 19394 - DNA, 22 bp, synthetic construct
  misc_feature 1..22: note = chemically synthesized
  source 1..22: mol_type = other DNA
acctcatgatctgcccgccttg

SEQ ID NO: 19395 - DNA, 22 bp, synthetic construct
  misc_feature 1..22: note = chemically synthesized
  source 1..22: mol_type = other DNA
atgatctgcccgccttggcctc

SEQ ID NO: 19396 - DNA, 22 bp, synthetic construct
  misc_feature 1..22: note = chemically synthesized
  source 1..22: mol_type = other DNA
cccgccttggcctcccacagtg

SEQ ID NO: 19397 - DNA, 22 bp, synthetic construct
  misc_feature 1..22: note = chemically synthesized
  source 1..22: mol_type = other DNA
ggcctcccacagtgctgggatt

SEQ ID NO: 19398 - DNA, 22 bp, synthetic construct
  misc_feature 1..22: note = chemically synthesized
  source 1..22: mol_type = other DNA
gcctcccacagtgctgggattc

SEQ ID NO: 19399 - DNA, 22 bp, synthetic construct
  misc_feature 1..22: note = chemically synthesized
  source 1..22: mol_type = other DNA
ccacagtgctgggattccaggc

SEQ ID NO: 19400 - DNA, 22 bp, synthetic construct
  misc_feature 1..22: note = chemically synthesized
  source 1..22: mol_type = other DNA
ggattccaggcgtgagccacgg

SEQ ID NO: 19401 - DNA, 22 bp, synthetic construct
  misc_feature 1..22: note = chemically synthesized
  source 1..22: mol_type = other DNA
caggcgtgagccacggcgcctg

SEQ ID NO: 19402 - DNA, 22 bp, synthetic construct
  misc_feature 1..22: note = chemically synthesized
  source 1..22: mol_type = other DNA
gccagtgtgttttttcatttca

SEQ ID NO: 19403 - DNA, 22 bp, synthetic construct
  misc_feature 1..22: note = chemically synthesized
  source 1..22: mol_type = other DNA
tttcatttcagacattgtagtt

SEQ ID NO: 19404 - DNA, 22 bp, synthetic construct
  misc_feature 1..22: note = chemically synthesized
  source 1..22: mol_type = other DNA
ttcatttcagacattgtagttt

SEQ ID NO: 19405 - DNA, 22 bp, synthetic construct
  misc_feature 1..22: note = chemically synthesized
  source 1..22: mol_type = other DNA
tcatttcagacattgtagtttt

SEQ ID NO: 19406 - DNA, 22 bp, synthetic construct
  misc_feature 1..22: note = chemically synthesized
  source 1..22: mol_type = other DNA
catttcagacattgtagttttt

SEQ ID NO: 19407 - DNA, 22 bp, synthetic construct
  misc_feature 1..22: note = chemically synthesized
  source 1..22: mol_type = other DNA
atttcagacattgtagttttta

SEQ ID NO: 19408 - DNA, 22 bp, synthetic construct
  misc_feature 1..22: note = chemically synthesized
  source 1..22: mol_type = other DNA
cagacattgtagtttttatctc

SEQ ID NO: 19409 - DNA, 22 bp, synthetic construct
  misc_feature 1..22: note = chemically synthesized
  source 1..22: mol_type = other DNA
agacattgtagtttttatctct

SEQ ID NO: 19410 - DNA, 22 bp, synthetic construct
  misc_feature 1..22: note = chemically synthesized
  source 1..22: mol_type = other DNA
tagtttttatctctagaagttc

SEQ ID NO: 19411 - DNA, 22 bp, synthetic construct
  misc_feature 1..22: note = chemically synthesized
  source 1..22: mol_type = other DNA
ttatctctagaagttcacctgg

SEQ ID NO: 19412 - DNA, 22 bp, synthetic construct
  misc_feature 1..22: note = chemically synthesized
  source 1..22: mol_type = other DNA
tatctctagaagttcacctggg

SEQ ID NO: 19413 - DNA, 22 bp, synthetic construct
  misc_feature 1..22: note = chemically synthesized
  source 1..22: mol_type = other DNA
atctctagaagttcacctgggg

SEQ ID NO: 19414 - DNA, 22 bp, synthetic construct
  misc_feature 1..22: note = chemically synthesized
  source 1..22: mol_type = other DNA
tctctagaagttcacctgggga

SEQ ID NO: 19415 - DNA, 22 bp, synthetic construct
  misc_feature 1..22: note = chemically synthesized
  source 1..22: mol_type = other DNA
tagaagttcacctggggactct

SEQ ID NO: 19416 - DNA, 22 bp, synthetic construct
  misc_feature 1..22: note = chemically synthesized
  source 1..22: mol_type = other DNA
gaagttcacctggggactctta

SEQ ID NO: 19417 - DNA, 22 bp, synthetic construct
  misc_feature 1..22: note = chemically synthesized
  source 1..22: mol_type = other DNA
acctggggactcttaaatatcc

SEQ ID NO: 19418 - DNA, 22 bp, synthetic construct
  misc_feature 1..22: note = chemically synthesized
  source 1..22: mol_type = other DNA
gggactcttaaatatcctccac

SEQ ID NO: 19419 - DNA, 22 bp, synthetic construct
  misc_feature 1..22: note = chemically synthesized
  source 1..22: mol_type = other DNA
ttaaatatcctccacaattcta

SEQ ID NO: 19420 - DNA, 22 bp, synthetic construct
  misc_feature 1..22: note = chemically synthesized
  source 1..22: mol_type = other DNA
aaatatcctccacaattctact

SEQ ID NO: 19421 - DNA, 22 bp, synthetic construct
  misc_feature 1..22: note = chemically synthesized
  source 1..22: mol_type = other DNA
aatatcctccacaattctactt

SEQ ID NO: 19422 - DNA, 22 bp, synthetic construct
  misc_feature 1..22: note = chemically synthesized
  source 1..22: mol_type = other DNA
cacaattctacttaattttttg

SEQ ID NO: 19423 - DNA, 22 bp, synthetic construct
  misc_feature 1..22: note = chemically synthesized
  source 1..22: mol_type = other DNA
tacttaattttttgaacataat

SEQ ID NO: 19424 - DNA, 22 bp, synthetic construct
  misc_feature 1..22: note = chemically synthesized
  source 1..22: mol_type = other DNA
cttaattttttgaacataatgg

SEQ ID NO: 19425 - DNA, 22 bp, synthetic construct
  misc_feature 1..22: note = chemically synthesized
  source 1..22: mol_type = other DNA
aattttttgaacataatgggat

SEQ ID NO: 19426 - DNA, 22 bp, synthetic construct
  misc_feature 1..22: note = chemically synthesized
  source 1..22: mol_type = other DNA
attttttgaacataatgggata

SEQ ID NO: 19427 - DNA, 22 bp, synthetic construct
  misc_feature 1..22: note = chemically synthesized
  source 1..22: mol_type = other DNA
tttgaacataatgggatatggc

SEQ ID NO: 19428 - DNA, 22 bp, synthetic construct
  misc_feature 1..22: note = chemically synthesized
  source 1..22: mol_type = other DNA
ttgaacataatgggatatggct

SEQ ID NO: 19429 - DNA, 22 bp, synthetic construct
  misc_feature 1..22: note = chemically synthesized
  source 1..22: mol_type = other DNA
tgaacataatgggatatggcta

SEQ ID NO: 19430 - DNA, 22 bp, synthetic construct
  misc_feature 1..22: note = chemically synthesized
  source 1..22: mol_type = other DNA
gaacataatgggatatggctat

SEQ ID NO: 19431 - DNA, 22 bp, synthetic construct
  misc_feature 1..22: note = chemically synthesized
  source 1..22: mol_type = other DNA
aacataatgggatatggctata

SEQ ID NO: 19432 - DNA, 22 bp, synthetic construct
  misc_feature 1..22: note = chemically synthesized
  source 1..22: mol_type = other DNA
taatatctgttttaccatcctt

SEQ ID NO: 19433 - DNA, 22 bp, synthetic construct
  misc_feature 1..22: note = chemically synthesized
  source 1..22: mol_type = other DNA
ttttaccatccttgcctgctaa

SEQ ID NO: 19434 - DNA, 22 bp, synthetic construct
  misc_feature 1..22: note = chemically synthesized
  source 1..22: mol_type = other DNA
taccatccttgcctgctaattc

SEQ ID NO: 19435 - DNA, 22 bp, synthetic construct
  misc_feature 1..22: note = chemically synthesized
  source 1..22: mol_type = other DNA
accatccttgcctgctaattct

SEQ ID NO: 19436 - DNA, 22 bp, synthetic construct
  misc_feature 1..22: note = chemically synthesized
  source 1..22: mol_type = other DNA
ccatccttgcctgctaattcta

SEQ ID NO: 19437 - DNA, 22 bp, synthetic construct
  misc_feature 1..22: note = chemically synthesized
  source 1..22: mol_type = other DNA
gcctgctaattctagcatccgt

SEQ ID NO: 19438 - DNA, 22 bp, synthetic construct
  misc_feature 1..22: note = chemically synthesized
  source 1..22: mol_type = other DNA
cctgctaattctagcatccgtg

SEQ ID NO: 19439 - DNA, 22 bp, synthetic construct
  misc_feature 1..22: note = chemically synthesized
  source 1..22: mol_type = other DNA
ctaattctagcatccgtgtcag

SEQ ID NO: 19440 - DNA, 22 bp, synthetic construct
  misc_feature 1..22: note = chemically synthesized
  source 1..22: mol_type = other DNA
attctagcatccgtgtcagttc

SEQ ID NO: 19441 - DNA, 22 bp, synthetic construct
  misc_feature 1..22: note = chemically synthesized
  source 1..22: mol_type = other DNA
tagcatccgtgtcagttctgga

SEQ ID NO: 19442 - DNA, 22 bp, synthetic construct
  misc_feature 1..22: note = chemically synthesized
  source 1..22: mol_type = other DNA
gcatccgtgtcagttctggatc

SEQ ID NO: 19443 - DNA, 22 bp, synthetic construct
  misc_feature 1..22: note = chemically synthesized
  source 1..22: mol_type = other DNA
tggatctcttttgatatttatg

SEQ ID NO: 19444 - DNA, 22 bp, synthetic construct
  misc_feature 1..22: note = chemically synthesized
  source 1..22: mol_type = other DNA
gatctcttttgatatttatgaa

SEQ ID NO: 19445 - DNA, 22 bp, synthetic construct
  misc_feature 1..22: note = chemically synthesized
  source 1..22: mol_type = other DNA
ttttgatatttatgaacctcct

SEQ ID NO: 19446 - DNA, 22 bp, synthetic construct
  misc_feature 1..22: note = chemically synthesized
  source 1..22: mol_type = other DNA
ttgatatttatgaacctcctcg

SEQ ID NO: 19447 - DNA, 22 bp, synthetic construct
  misc_feature 1..22: note = chemically synthesized
  source 1..22: mol_type = other DNA
tgatatttatgaacctcctcgt

SEQ ID NO: 19448 - DNA, 22 bp, synthetic construct
  misc_feature 1..22: note = chemically synthesized
  source 1..22: mol_type = other DNA
gatatttatgaacctcctcgtt

SEQ ID NO: 19449 - DNA, 22 bp, synthetic construct
  misc_feature 1..22: note = chemically synthesized
  source 1..22: mol_type = other DNA
atatttatgaacctcctcgtta

SEQ ID NO: 19450 - DNA, 22 bp, synthetic construct
  misc_feature 1..22: note = chemically synthesized
  source 1..22: mol_type = other DNA
atgaacctcctcgttatgcatt

SEQ ID NO: 19451 - DNA, 22 bp, synthetic construct
  misc_feature 1..22: note = chemically synthesized
  source 1..22: mol_type = other DNA
tgaacctcctcgttatgcattg

SEQ ID NO: 19452 - DNA, 22 bp, synthetic construct
  misc_feature 1..22: note = chemically synthesized
  source 1..22: mol_type = other DNA
ctcgttatgcattgtgttttcc

SEQ ID NO: 19453 - DNA, 22 bp, synthetic construct
  misc_feature 1..22: note = chemically synthesized
  source 1..22: mol_type = other DNA
gttatgcattgtgttttcccgt

SEQ ID NO: 19454 - DNA, 22 bp, synthetic construct
  misc_feature 1..22: note = chemically synthesized
  source 1..22: mol_type = other DNA
tgcattgtgttttcccgtttca

SEQ ID NO: 19455 - DNA, 22 bp, synthetic construct
  misc_feature 1..22: note = chemically synthesized
  source 1..22: mol_type = other DNA
tgttttcccgtttcattgcatg

SEQ ID NO: 19456 - DNA, 22 bp, synthetic construct
  misc_feature 1..22: note = chemically synthesized
  source 1..22: mol_type = other DNA
tcccgtttcattgcatgccttg

SEQ ID NO: 19457 - DNA, 22 bp, synthetic construct
  misc_feature 1..22: note = chemically synthesized
  source 1..22: mol_type = other DNA
cccgtttcattgcatgccttgt

SEQ ID NO: 19458 - DNA, 22 bp, synthetic construct
  misc_feature 1..22: note = chemically synthesized
  source 1..22: mol_type = other DNA
ccgtttcattgcatgccttgta

SEQ ID NO: 19459 - DNA, 22 bp, synthetic construct
  misc_feature 1..22: note = chemically synthesized
  source 1..22: mol_type = other DNA
cattgcatgccttgtaatcttt

SEQ ID NO: 19460 - DNA, 22 bp, synthetic construct
  misc_feature 1..22: note = chemically synthesized
  source 1..22: mol_type = other DNA
attgcatgccttgtaatctttg

SEQ ID NO: 19461 - DNA, 22 bp, synthetic construct
  misc_feature 1..22: note = chemically synthesized
  source 1..22: mol_type = other DNA
catgccttgtaatctttgattg

SEQ ID NO: 19462 - DNA, 22 bp, synthetic construct
  misc_feature 1..22: note = chemically synthesized
  source 1..22: mol_type = other DNA
gtaatctttgattggctgccag

SEQ ID NO: 19463 - DNA, 22 bp, synthetic construct
  misc_feature 1..22: note = chemically synthesized
  source 1..22: mol_type = other DNA
taatctttgattggctgccaga

SEQ ID NO: 19464 - DNA, 22 bp, synthetic construct
  misc_feature 1..22: note = chemically synthesized
  source 1..22: mol_type = other DNA
tgattggctgccagacattgtc

SEQ ID NO: 19465 - DNA, 22 bp, synthetic construct
  misc_feature 1..22: note = chemically synthesized
  source 1..22: mol_type = other DNA
gattggctgccagacattgtca

SEQ ID NO: 19466 - DNA, 22 bp, synthetic construct
  misc_feature 1..22: note = chemically synthesized
  source 1..22: mol_type = other DNA
attggctgccagacattgtcaa

SEQ ID NO: 19467 - DNA, 22 bp, synthetic construct
  misc_feature 1..22: note = chemically synthesized
  source 1..22: mol_type = other DNA
gctgccagacattgtcaatttc

SEQ ID NO: 19468 - DNA, 22 bp, synthetic construct
  misc_feature 1..22: note = chemically synthesized
  source 1..22: mol_type = other DNA
ccagacattgtcaatttcacct

SEQ ID NO: 19469 - DNA, 22 bp, synthetic construct
  misc_feature 1..22: note = chemically synthesized
  source 1..22: mol_type = other DNA
tcaatttcaccttgttgggtgc

SEQ ID NO: 19470 - DNA, 22 bp, synthetic construct
  misc_feature 1..22: note = chemically synthesized
  source 1..22: mol_type = other DNA
caccttgttgggtgctggatat

SEQ ID NO: 19471 - DNA, 22 bp, synthetic construct
  misc_feature 1..22: note = chemically synthesized
  source 1..22: mol_type = other DNA
accttgttgggtgctggatatt

SEQ ID NO: 19472 - DNA, 22 bp, synthetic construct
  misc_feature 1..22: note = chemically synthesized
  source 1..22: mol_type = other DNA
gttgggtgctggatatttttgt

SEQ ID NO: 19473 - DNA, 22 bp, synthetic construct
  misc_feature 1..22: note = chemically synthesized
  source 1..22: mol_type = other DNA
ttgggtgctggatatttttgta

SEQ ID NO: 19474 - DNA, 22 bp, synthetic construct
  misc_feature 1..22: note = chemically synthesized
  source 1..22: mol_type = other DNA
ggtgctggatatttttgtattc

SEQ ID NO: 19475 - DNA, 22 bp, synthetic construct
  misc_feature 1..22: note = chemically synthesized
  source 1..22: mol_type = other DNA
gatatttttgtattcctctaaa

SEQ ID NO: 19476 - DNA, 22 bp, synthetic construct
  misc_feature 1..22: note = chemically synthesized
  source 1..22: mol_type = other DNA
ttgtattcctctaaatgttctt

SEQ ID NO: 19477 - DNA, 22 bp, synthetic construct
  misc_feature 1..22: note = chemically synthesized
  source 1..22: mol_type = other DNA
tgtattcctctaaatgttcttg

SEQ ID NO: 19478 - DNA, 22 bp, synthetic construct
  misc_feature 1..22: note = chemically synthesized
  source 1..22: mol_type = other DNA
gtattcctctaaatgttcttga

SEQ ID NO: 19479 - DNA, 22 bp, synthetic construct
  misc_feature 1..22: note = chemically synthesized
  source 1..22: mol_type = other DNA
tattcctctaaatgttcttgag

SEQ ID NO: 19480 - DNA, 22 bp, synthetic construct
  misc_feature 1..22: note = chemically synthesized
  source 1..22: mol_type = other DNA
ctctaaatgttcttgagctttg

SEQ ID NO: 19481 - DNA, 22 bp, synthetic construct
  misc_feature 1..22: note = chemically synthesized
  source 1..22: mol_type = other DNA
taaatgttcttgagctttgctc

SEQ ID NO: 19482 - DNA, 22 bp, synthetic construct
  misc_feature 1..22: note = chemically synthesized
  source 1..22: mol_type = other DNA
aatgttcttgagctttgctccg

SEQ ID NO: 19483 - DNA, 22 bp, synthetic construct
  misc_feature 1..22: note = chemically synthesized
  source 1..22: mol_type = other DNA
ttgagctttgctccgggatgca

SEQ ID NO: 19484 - DNA, 22 bp, synthetic construct
  misc_feature 1..22: note = chemically synthesized
  source 1..22: mol_type = other DNA
gagctttgctccgggatgcagt

SEQ ID NO: 19485 - DNA, 22 bp, synthetic construct
  misc_feature 1..22: note = chemically synthesized
  source 1..22: mol_type = other DNA
agctttgctccgggatgcagtt

SEQ ID NO: 19486 - DNA, 22 bp, synthetic construct
  misc_feature 1..22: note = chemically synthesized
  source 1..22: mol_type = other DNA
tgctccgggatgcagttaagca

SEQ ID NO: 19487 - DNA, 22 bp, synthetic construct
  misc_feature 1..22: note = chemically synthesized
  source 1..22: mol_type = other DNA
gctccgggatgcagttaagcaa

SEQ ID NO: 19488 - DNA, 22 bp, synthetic construct
  misc_feature 1..22: note = chemically synthesized
  source 1..22: mol_type = other DNA
ctccgggatgcagttaagcaac

SEQ ID NO: 19489 - DNA, 22 bp, synthetic construct
  misc_feature 1..22: note = chemically synthesized
  source 1..22: mol_type = other DNA
cgggatgcagttaagcaactta

SEQ ID NO: 19490 - DNA, 22 bp, synthetic construct
  misc_feature 1..22: note = chemically synthesized
  source 1..22: mol_type = other DNA
agcaacttagagtcagtttgat

SEQ ID NO: 19491 - DNA, 22 bp, synthetic construct
  misc_feature 1..22: note = chemically synthesized
  source 1..22: mol_type = other DNA
agagtcagtttgatcgtttgaa

SEQ ID NO: 19492 - DNA, 22 bp, synthetic construct
  misc_feature 1..22: note = chemically synthesized
  source 1..22: mol_type = other DNA
gagtcagtttgatcgtttgaac

SEQ ID NO: 19493 - DNA, 22 bp, synthetic construct
  misc_feature 1..22: note = chemically synthesized
  source 1..22: mol_type = other DNA
gatcgtttgaactcttaattgt

SEQ ID NO: 19494 - DNA, 22 bp, synthetic construct
  misc_feature 1..22: note = chemically synthesized
  source 1..22: mol_type = other DNA
atcgtttgaactcttaattgtt

SEQ ID NO: 19495 - DNA, 22 bp, synthetic construct
  misc_feature 1..22: note = chemically synthesized
  source 1..22: mol_type = other DNA
gaactcttaattgttttggtct

SEQ ID NO: 19496 - DNA, 22 bp, synthetic construct
  misc_feature 1..22: note = chemically synthesized
  source 1..22: mol_type = other DNA
aactcttaattgttttggtctc

SEQ ID NO: 19497 - DNA, 22 bp, synthetic construct
  misc_feature 1..22: note = chemically synthesized
  source 1..22: mol_type = other DNA
ttaattgttttggtctcctcgg

SEQ ID NO: 19498 - DNA, 22 bp, synthetic construct
  misc_feature 1..22: note = chemically synthesized
  source 1..22: mol_type = other DNA
aattgttttggtctcctcggac

SEQ ID NO: 19499 - DNA, 22 bp, synthetic construct
  misc_feature 1..22: note = chemically synthesized
  source 1..22: mol_type = other DNA
attgttttggtctcctcggact

SEQ ID NO: 19500 - DNA, 22 bp, synthetic construct
  misc_feature 1..22: note = chemically synthesized
  source 1..22: mol_type = other DNA
ttttggtctcctcggactctca

SEQ ID NO: 19501 - DNA, 22 bp, synthetic construct
  misc_feature 1..22: note = chemically synthesized
  source 1..22: mol_type = other DNA
tggtctcctcggactctcagct

SEQ ID NO: 19502 - DNA, 22 bp, synthetic construct
  misc_feature 1..22: note = chemically synthesized
  source 1..22: mol_type = other DNA
ggtctcctcggactctcagctc

SEQ ID NO: 19503 - DNA, 22 bp, synthetic construct
  misc_feature 1..22: note = chemically synthesized
  source 1..22: mol_type = other DNA
gtctcctcggactctcagctcc

SEQ ID NO: 19504 - DNA, 22 bp, synthetic construct
  misc_feature 1..22: note = chemically synthesized
  source 1..22: mol_type = other DNA
ctcggactctcagctccatctc

SEQ ID NO: 19505 - DNA, 22 bp, synthetic construct
  misc_feature 1..22: note = chemically synthesized
  source 1..22: mol_type = other DNA
ggactctcagctccatctcctc

SEQ ID NO: 19506 - DNA, 22 bp, synthetic construct
  misc_feature 1..22: note = chemically synthesized
  source 1..22: mol_type = other DNA
tcagctccatctcctcaacgtg

SEQ ID NO: 19507 - DNA, 22 bp, synthetic construct
  misc_feature 1..22: note = chemically synthesized
  source 1..22: mol_type = other DNA
agctccatctcctcaacgtggg

SEQ ID NO: 19508 - DNA, 22 bp, synthetic construct
  misc_feature 1..22: note = chemically synthesized
  source 1..22: mol_type = other DNA
catctcctcaacgtggggagtc

SEQ ID NO: 19509 - DNA, 22 bp, synthetic construct
  misc_feature 1..22: note = chemically synthesized
  source 1..22: mol_type = other DNA
ctcaacgtggggagtctcttgg

SEQ ID NO: 19510 - DNA, 22 bp, synthetic construct
  misc_feature 1..22: note = chemically synthesized
  source 1..22: mol_type = other DNA
aacgtggggagtctcttgggct

SEQ ID NO: 19511 - DNA, 22 bp, synthetic construct
  misc_feature 1..22: note = chemically synthesized
  source 1..22: mol_type = other DNA
ttgggctctgcctggacttccc

SEQ ID NO: 19512 - DNA, 22 bp, synthetic construct
  misc_feature 1..22: note = chemically synthesized
  source 1..22: mol_type = other DNA
gggctctgcctggacttccctt

SEQ ID NO: 19513 - DNA, 22 bp, synthetic construct
  misc_feature 1..22: note = chemically synthesized
  source 1..22: mol_type = other DNA
ggctctgcctggacttcccttt

SEQ ID NO: 19514 - DNA, 22 bp, synthetic construct
  misc_feature 1..22: note = chemically synthesized
  source 1..22: mol_type = other DNA
tgcctggacttccctttcctgg

SEQ ID NO: 19515 - DNA, 22 bp, synthetic construct
  misc_feature 1..22: note = chemically synthesized
  source 1..22: mol_type = other DNA
cctggacttccctttcctggcc

SEQ ID NO: 19516 - DNA, 22 bp, synthetic construct
  misc_feature 1..22: note = chemically synthesized
  source 1..22: mol_type = other DNA
gacttccctttcctggcctgta

SEQ ID NO: 19517 - DNA, 22 bp, synthetic construct
  misc_feature 1..22: note = chemically synthesized
  source 1..22: mol_type = other DNA
ccctttcctggcctgtaacctg

SEQ ID NO: 19518 - DNA, 22 bp, synthetic construct
  misc_feature 1..22: note = chemically synthesized
  source 1..22: mol_type = other DNA
cctttcctggcctgtaacctgc

SEQ ID NO: 19519 - DNA, 22 bp, synthetic construct
  misc_feature 1..22: note = chemically synthesized
  source 1..22: mol_type = other DNA
tcctggcctgtaacctgcagac

SEQ ID NO: 19520 - DNA, 22 bp, synthetic construct
  misc_feature 1..22: note = chemically synthesized
  source 1..22: mol_type = other DNA
cctggcctgtaacctgcagact

SEQ ID NO: 19521 - DNA, 22 bp, synthetic construct
  misc_feature 1..22: note = chemically synthesized
  source 1..22: mol_type = other DNA
ctggcctgtaacctgcagactc

SEQ ID NO: 19522 - DNA, 22 bp, synthetic construct
  misc_feature 1..22: note = chemically synthesized
  source 1..22: mol_type = other DNA
gcctgtaacctgcagactctct

SEQ ID NO: 19523 - DNA, 22 bp, synthetic construct
  misc_feature 1..22: note = chemically synthesized
  source 1..22: mol_type = other DNA
taacctgcagactctctccaaa

SEQ ID NO: 19524 - DNA, 22 bp, synthetic construct
  misc_feature 1..22: note = chemically synthesized
  source 1..22: mol_type = other DNA
cagactctctccaaacagtaag

SEQ ID NO: 19525 - DNA, 22 bp, synthetic construct
  misc_feature 1..22: note = chemically synthesized
  source 1..22: mol_type = other DNA
tctccaaacagtaagctggggt

SEQ ID NO: 19526 - DNA, 22 bp, synthetic construct
  misc_feature 1..22: note = chemically synthesized
  source 1..22: mol_type = other DNA
tccaaacagtaagctggggtga

SEQ ID NO: 19527 - DNA, 22 bp, synthetic construct
  misc_feature 1..22: note = chemically synthesized
  source 1..22: mol_type = other DNA
caaacagtaagctggggtgatc

SEQ ID NO: 19528 - DNA, 22 bp, synthetic construct
  misc_feature 1..22: note = chemically synthesized
  source 1..22: mol_type = other DNA
gggtgatcggagggttcctgtt

SEQ ID NO: 19529 - DNA, 22 bp, synthetic construct
  misc_feature 1..22: note = chemically synthesized
  source 1..22: mol_type = other DNA
ctgttgtttgcttcttatccct

SEQ ID NO: 19530 - DNA, 22 bp, synthetic construct
  misc_feature 1..22: note = chemically synthesized
  source 1..22: mol_type = other DNA
ttgtttgcttcttatccctcag

SEQ ID NO: 19531 - DNA, 22 bp, synthetic construct
  misc_feature 1..22: note = chemically synthesized
  source 1..22: mol_type = other DNA
tttgcttcttatccctcaggga

SEQ ID NO: 19532 - DNA, 22 bp, synthetic construct
  misc_feature 1..22: note = chemically synthesized
  source 1..22: mol_type = other DNA
gcttcttatccctcagggatct

SEQ ID NO: 19533 - DNA, 22 bp, synthetic construct
  misc_feature 1..22: note = chemically synthesized
  source 1..22: mol_type = other DNA
cttcttatccctcagggatctt

SEQ ID NO: 19534 - DNA, 22 bp, synthetic construct
  misc_feature 1..22: note = chemically synthesized
  source 1..22: mol_type = other DNA
cttatccctcagggatctttac

SEQ ID NO: 19535 - DNA, 22 bp, synthetic construct
  misc_feature 1..22: note = chemically synthesized
  source 1..22: mol_type = other DNA
ttatccctcagggatctttact

SEQ ID NO: 19536 - DNA, 22 bp, synthetic construct
  misc_feature 1..22: note = chemically synthesized
  source 1..22: mol_type = other DNA
atccctcagggatctttactcc

SEQ ID NO: 19537 - DNA, 22 bp, synthetic construct
  misc_feature 1..22: note = chemically synthesized
  source 1..22: mol_type = other DNA
tccctcagggatctttactcct

SEQ ID NO: 19538 - DNA, 22 bp, synthetic construct
  misc_feature 1..22: note = chemically synthesized
  source 1..22: mol_type = other DNA
agggatctttactcctccttgc

SEQ ID NO: 19539 - DNA, 22 bp, synthetic construct
  misc_feature 1..22: note = chemically synthesized
  source 1..22: mol_type = other DNA
tactcctccttgcctgatgtcc

SEQ ID NO: 19540 - DNA, 22 bp, synthetic construct
  misc_feature 1..22: note = chemically synthesized
  source 1..22: mol_type = other DNA
actcctccttgcctgatgtcca

SEQ ID NO: 19541 - DNA, 22 bp, synthetic construct
  misc_feature 1..22: note = chemically synthesized
  source 1..22: mol_type = other DNA
ctcctccttgcctgatgtccag

SEQ ID NO: 19542 - DNA, 22 bp, synthetic construct
  misc_feature 1..22: note = chemically synthesized
  source 1..22: mol_type = other DNA
ctccttgcctgatgtccagagt

SEQ ID NO: 19543 - DNA, 22 bp, synthetic construct
  misc_feature 1..22: note = chemically synthesized
  source 1..22: mol_type = other DNA
cttgcctgatgtccagagtctt

SEQ ID NO: 19544 - DNA, 22 bp, synthetic construct
  misc_feature 1..22: note = chemically synthesized
  source 1..22: mol_type = other DNA
gcctgatgtccagagtcttgaa

SEQ ID NO: 19545 - DNA, 22 bp, synthetic construct
  misc_feature 1..22: note = chemically synthesized
  source 1..22: mol_type = other DNA
cctgatgtccagagtcttgaaa

SEQ ID NO: 19546 - DNA, 22 bp, synthetic construct
  misc_feature 1..22: note = chemically synthesized
  source 1..22: mol_type = other DNA
atgtccagagtcttgaaagctg

SEQ ID NO: 19547 - DNA, 22 bp, synthetic construct
  misc_feature 1..22: note = chemically synthesized
  source 1..22: mol_type = other DNA
gaaagctgccatgttctatagt

SEQ ID NO: 19548 - DNA, 22 bp, synthetic construct
  misc_feature 1..22: note = chemically synthesized
  source 1..22: mol_type = other DNA
aaagctgccatgttctatagtt

SEQ ID NO: 19549 - DNA, 22 bp, synthetic construct
  misc_feature 1..22: note = chemically synthesized
  source 1..22: mol_type = other DNA
ccatgttctatagttgtctgtt

SEQ ID NO: 19550 - DNA, 22 bp, synthetic construct
  misc_feature 1..22: note = chemically synthesized
  source 1..22: mol_type = other DNA
tatagttgtctgtttttgtttt

SEQ ID NO: 19551 - DNA, 22 bp, synthetic construct
  misc_feature 1..22: note = chemically synthesized
  source 1..22: mol_type = other DNA
tagttgtctgtttttgttttga

SEQ ID NO: 19552 - DNA, 22 bp, synthetic construct
  misc_feature 1..22: note = chemically synthesized
  source 1..22: mol_type = other DNA
tctgtttttgttttgattgttt

SEQ ID NO: 19553 - DNA, 22 bp, synthetic construct
  misc_feature 1..22: note = chemically synthesized
  source 1..22: mol_type = other DNA
tttttgttttgattgtttctgg

SEQ ID NO: 19554 - DNA, 22 bp, synthetic construct
  misc_feature 1..22: note = chemically synthesized
  source 1..22: mol_type = other DNA
ttgttttgattgtttctgggga

SEQ ID NO: 19555 - DNA, 22 bp, synthetic construct
  misc_feature 1..22: note = chemically synthesized
  source 1..22: mol_type = other DNA
tgttttgattgtttctggggag

SEQ ID NO: 19556 - DNA, 22 bp, synthetic construct
  misc_feature 1..22: note = chemically synthesized
  source 1..22: mol_type = other DNA
gttttgattgtttctggggaga

SEQ ID NO: 19557 - DNA, 22 bp, synthetic construct
  misc_feature 1..22: note = chemically synthesized
  source 1..22: mol_type = other DNA
ttttgattgtttctggggagag

SEQ ID NO: 19558 - DNA, 22 bp, synthetic construct
  misc_feature 1..22: note = chemically synthesized
  source 1..22: mol_type = other DNA
tgattgtttctggggagagaag

SEQ ID NO: 19559 - DNA, 22 bp, synthetic construct
  misc_feature 1..22: note = chemically synthesized
  source 1..22: mol_type = other DNA
gattgtttctggggagagaaga

SEQ ID NO: 19560 - DNA, 22 bp, synthetic construct
  misc_feature 1..22: note = chemically synthesized
  source 1..22: mol_type = other DNA
attgtttctggggagagaagaa

SEQ ID NO: 19561 - DNA, 22 bp, synthetic construct
  misc_feature 1..22: note = chemically synthesized
  source 1..22: mol_type = other DNA
tttctggggagagaagaactct

SEQ ID NO: 19562 - DNA, 22 bp, synthetic construct
  misc_feature 1..22: note = chemically synthesized
  source 1..22: mol_type = other DNA
ctggggagagaagaactcttcc

SEQ ID NO: 19563 - DNA, 22 bp, synthetic construct
  misc_feature 1..22: note = chemically synthesized
  source 1..22: mol_type = other DNA
tggggagagaagaactcttccc

SEQ ID NO: 19564 - DNA, 22 bp, synthetic construct
  misc_feature 1..22: note = chemically synthesized
  source 1..22: mol_type = other DNA
gggagagaagaactcttcccat

SEQ ID NO: 19565 - DNA, 22 bp, synthetic construct
  misc_feature 1..22: note = chemically synthesized
  source 1..22: mol_type = other DNA
ttcccatcttgggcagaccctg

SEQ ID NO: 19566 - DNA, 22 bp, synthetic construct
  misc_feature 1..22: note = chemically synthesized
  source 1..22: mol_type = other DNA
cccatcttgggcagaccctgtc

SEQ ID NO: 19567 - DNA, 22 bp, synthetic construct
  misc_feature 1..22: note = chemically synthesized
  source 1..22: mol_type = other DNA
ccatcttgggcagaccctgtct

SEQ ID NO: 19568 - DNA, 22 bp, synthetic construct
  misc_feature 1..22: note = chemically synthesized
  source 1..22: mol_type = other DNA
gggcagaccctgtcttttatgt

SEQ ID NO: 19569 - DNA, 22 bp, synthetic construct
  misc_feature 1..22: note = chemically synthesized
  source 1..22: mol_type = other DNA
ggcagaccctgtcttttatgtt

SEQ ID NO: 19570 - DNA, 22 bp, synthetic construct
  misc_feature 1..22: note = chemically synthesized
  source 1..22: mol_type = other DNA
tcttttatgttcaaacttttgc

SEQ ID NO: 19571 - DNA, 22 bp, synthetic construct
  misc_feature 1..22: note = chemically synthesized
  source 1..22: mol_type = other DNA
ttatgttcaaacttttgcctaa

SEQ ID NO: 19572 - DNA, 22 bp, synthetic construct
  misc_feature 1..22: note = chemically synthesized
  source 1..22: mol_type = other DNA
tatgttcaaacttttgcctaag

SEQ ID NO: 19573 - DNA, 22 bp, synthetic construct
  misc_feature 1..22: note = chemically synthesized
  source 1..22: mol_type = other DNA
atgttcaaacttttgcctaaga

SEQ ID NO: 19574 - DNA, 22 bp, synthetic construct
  misc_feature 1..22: note = chemically synthesized
  source 1..22: mol_type = other DNA
tgttcaaacttttgcctaagaa

SEQ ID NO: 19575 - DNA, 22 bp, synthetic construct
  misc_feature 1..22: note = chemically synthesized
  source 1..22: mol_type = other DNA
aaacttttgcctaagaagcaca

SEQ ID NO: 19576 - DNA, 22 bp, synthetic construct
  misc_feature 1..22: note = chemically synthesized
  source 1..22: mol_type = other DNA
ttgcctaagaagcacattacat

SEQ ID NO: 19577 - DNA, 22 bp, synthetic construct
  misc_feature 1..22: note = chemically synthesized
  source 1..22: mol_type = other DNA
tgcctaagaagcacattacata

SEQ ID NO: 19578 - DNA, 22 bp, synthetic construct
  misc_feature 1..22: note = chemically synthesized
  source 1..22: mol_type = other DNA
gcctaagaagcacattacatat

SEQ ID NO: 19579 - DNA, 22 bp, synthetic construct
  misc_feature 1..22: note = chemically synthesized
  source 1..22: mol_type = other DNA
cctaagaagcacattacatatt

SEQ ID NO: 19580 - DNA, 22 bp, synthetic construct
  misc_feature 1..22: note = chemically synthesized
  source 1..22: mol_type = other DNA
agaagcacattacatattttaa

SEQ ID NO: 19581 - DNA, 22 bp, synthetic construct
  misc_feature 1..22: note = chemically synthesized
  source 1..22: mol_type = other DNA
catattttaactcatctaatta

SEQ ID NO: 19582 - DNA, 22 bp, synthetic construct
  misc_feature 1..22: note = chemically synthesized
  source 1..22: mol_type = other DNA
taactcatctaattatccgagc

SEQ ID NO: 19583 - DNA, 22 bp, synthetic construct
  misc_feature 1..22: note = chemically synthesized
  source 1..22: mol_type = other DNA
aactcatctaattatccgagca

SEQ ID NO: 19584 - DNA, 22 bp, synthetic construct
  misc_feature 1..22: note = chemically synthesized
  source 1..22: mol_type = other DNA
actcatctaattatccgagcaa

SEQ ID NO: 19585 - DNA, 22 bp, synthetic construct
  misc_feature 1..22: note = chemically synthesized
  source 1..22: mol_type = other DNA
atctaattatccgagcaatcca

SEQ ID NO: 19586 - DNA, 22 bp, synthetic construct
  misc_feature 1..22: note = chemically synthesized
  source 1..22: mol_type = other DNA
attatccgagcaatccaatcgg

SEQ ID NO: 19587 - DNA, 22 bp, synthetic construct
  misc_feature 1..22: note = chemically synthesized
  source 1..22: mol_type = other DNA
tccgagcaatccaatcgggtag

SEQ ID NO: 19588 - DNA, 22 bp, synthetic construct
  misc_feature 1..22: note = chemically synthesized
  source 1..22: mol_type = other DNA
cgactgtgatctccattttaca

SEQ ID NO: 19589 - DNA, 22 bp, synthetic construct
  misc_feature 1..22: note = chemically synthesized
  source 1..22: mol_type = other DNA
tgatctccattttacacacgag

SEQ ID NO: 19590 - DNA, 22 bp, synthetic construct
  misc_feature 1..22: note = chemically synthesized
  source 1..22: mol_type = other DNA
cattttacacacgagaaaatgg

SEQ ID NO: 19591 - DNA, 22 bp, synthetic construct
  misc_feature 1..22: note = chemically synthesized
  source 1..22: mol_type = other DNA
tacacacgagaaaatggaagca

SEQ ID NO: 19592 - DNA, 22 bp, synthetic construct
  misc_feature 1..22: note = chemically synthesized
  source 1..22: mol_type = other DNA
acacacgagaaaatggaagcat

SEQ ID NO: 19593 - DNA, 22 bp, synthetic construct
  misc_feature 1..22: note = chemically synthesized
  source 1..22: mol_type = other DNA
cacacgagaaaatggaagcatg

SEQ ID NO: 19594 - DNA, 22 bp, synthetic construct
  misc_feature 1..22: note = chemically synthesized
  source 1..22: mol_type = other DNA
aatgctggtgcatgatctcaga

SEQ ID NO: 19595 - DNA, 22 bp, synthetic construct
  misc_feature 1..22: note = chemically synthesized
  source 1..22: mol_type = other DNA
gtgcatgatctcagagctacct

SEQ ID NO: 19596 - DNA, 22 bp, synthetic construct
  misc_feature 1..22: note = chemically synthesized
  source 1..22: mol_type = other DNA
agagctacctggaggcacagct

SEQ ID NO: 19597 - DNA, 22 bp, synthetic construct
  misc_feature 1..22: note = chemically synthesized
  source 1..22: mol_type = other DNA
cctggaggcacagctgggctac

SEQ ID NO: 19598 - DNA, 22 bp, synthetic construct
  misc_feature 1..22: note = chemically synthesized
  source 1..22: mol_type = other DNA
gaggcacagctgggctaccctg

SEQ ID NO: 19599 - DNA, 22 bp, synthetic construct
  misc_feature 1..22: note = chemically synthesized
  source 1..22: mol_type = other DNA
ggctaccctgtgggcagtctgg

SEQ ID NO: 19600 - DNA, 22 bp, synthetic construct
  misc_feature 1..22: note = chemically synthesized
  source 1..22: mol_type = other DNA
ccctgtgggcagtctggtttca

SEQ ID NO: 19601 - DNA, 22 bp, synthetic construct
  misc_feature 1..22: note = chemically synthesized
  source 1..22: mol_type = other DNA
tgggcagtctggtttcagggtg

SEQ ID NO: 19602 - DNA, 22 bp, synthetic construct
  misc_feature 1..22: note = chemically synthesized
  source 1..22: mol_type = other DNA
gtttcagggtggatatacagac

SEQ ID NO: 19603 - DNA, 22 bp, synthetic construct
  misc_feature 1..22: note = chemically synthesized
  source 1..22: mol_type = other DNA
cagggtggatatacagacacgt

SEQ ID NO: 19604 - DNA, 22 bp, synthetic construct
  misc_feature 1..22: note = chemically synthesized
  source 1..22: mol_type = other DNA
agggtggatatacagacacgtt

SEQ ID NO: 19605 - DNA, 22 bp, synthetic construct
  misc_feature 1..22: note = chemically synthesized
  source 1..22: mol_type = other DNA
ctgggctgacccagcattggga

SEQ ID NO: 19606 - DNA, 22 bp, synthetic construct
  misc_feature 1..22: note = chemically synthesized
  source 1..22: mol_type = other DNA
ggctgacccagcattgggagtt

SEQ ID NO: 19607 - DNA, 22 bp, synthetic construct
  misc_feature 1..22: note = chemically synthesized
  source 1..22: mol_type = other DNA
acccagcattgggagttgataa

SEQ ID NO: 19608 - DNA, 22 bp, synthetic construct
  misc_feature 1..22: note = chemically synthesized
  source 1..22: mol_type = other DNA
ggagttgataagtcggactggg

SEQ ID NO: 19609 - DNA, 22 bp, synthetic construct
  misc_feature 1..22: note = chemically synthesized
  source 1..22: mol_type = other DNA
ataagtcggactgggaagcagg

SEQ ID NO: 19610 - DNA, 22 bp, synthetic construct
  misc_feature 1..22: note = chemically synthesized
  source 1..22: mol_type = other DNA
ggaagcaggacaggaccctctg

SEQ ID NO: 19611 - DNA, 22 bp, synthetic construct
  misc_feature 1..22: note = chemically synthesized
  source 1..22: mol_type = other DNA
tgagtggagggtgctgaagaca

SEQ ID NO: 19612 - DNA, 22 bp, synthetic construct
  misc_feature 1..22: note = chemically synthesized
  source 1..22: mol_type = other DNA
agtggagggtgctgaagacagc

SEQ ID NO: 19613 - DNA, 22 bp, synthetic construct
  misc_feature 1..22: note = chemically synthesized
  source 1..22: mol_type = other DNA
aagacagcagtcagggactcag

SEQ ID NO: 19614 - DNA, 22 bp, synthetic construct
  misc_feature 1..22: note = chemically synthesized
  source 1..22: mol_type = other DNA
agccatggagggccagcttggt

SEQ ID NO: 19615 - DNA, 22 bp, synthetic construct
  misc_feature 1..22: note = chemically synthesized
  source 1..22: mol_type = other DNA
ggtggggaacaccgtggtcatg

SEQ ID NO: 19616 - DNA, 22 bp, synthetic construct
  misc_feature 1..22: note = chemically synthesized
  source 1..22: mol_type = other DNA
gtggggaacaccgtggtcatgg

SEQ ID NO: 19617 - DNA, 22 bp, synthetic construct
  misc_feature 1..22: note = chemically synthesized
  source 1..22: mol_type = other DNA
ctggatggagaggaatgcaaag

SEQ ID NO: 19618 - DNA, 22 bp, synthetic construct
  misc_feature 1..22: note = chemically synthesized
  source 1..22: mol_type = other DNA
tggatggagaggaatgcaaagg

SEQ ID NO: 19619 - DNA, 22 bp, synthetic construct
  misc_feature 1..22: note = chemically synthesized
  source 1..22: mol_type = other DNA
gatggagaggaatgcaaaggcc

SEQ ID NO: 19620 - DNA, 22 bp, synthetic construct
  misc_feature 1..22: note = chemically synthesized
  source 1..22: mol_type = other DNA
ggaggaaggggtgggggcagtg

SEQ ID NO: 19621 - DNA, 22 bp, synthetic construct
  misc_feature 1..22: note = chemically synthesized
  source 1..22: mol_type = other DNA
gaggaaggggtgggggcagtga

SEQ ID NO: 19622 - DNA, 22 bp, synthetic construct
  misc_feature 1..22: note = chemically synthesized
  source 1..22: mol_type = other DNA
tgctcagagcgggagtgggcag

SEQ ID NO: 19623 - DNA, 22 bp, synthetic construct
  misc_feature 1..22: note = chemically synthesized
  source 1..22: mol_type = other DNA
agagcgggagtgggcagtggag

SEQ ID NO: 19624 - DNA, 22 bp, synthetic construct
  misc_feature 1..22: note = chemically synthesized
  source 1..22: mol_type = other DNA
cctgggtcaaatggggtcctga

SEQ ID NO: 19625 - DNA, 22 bp, synthetic construct
  misc_feature 1..22: note = chemically synthesized
  source 1..22: mol_type = other DNA
ggtcaaatggggtcctgagtgt

SEQ ID NO: 19626 - DNA, 22 bp, synthetic construct
  misc_feature 1..22: note = chemically synthesized
  source 1..22: mol_type = other DNA
agtgtggctgcagtggggaagg

SEQ ID NO: 19627 - DNA, 22 bp, synthetic construct
  misc_feature 1..22: note = chemically synthesized
  source 1..22: mol_type = other DNA
cagtggggaaggtggaagtcac

SEQ ID NO: 19628 - DNA, 22 bp, synthetic construct
  misc_feature 1..22: note = chemically synthesized
  source 1..22: mol_type = other DNA
gtgtgaaaaagatgaagagtta

SEQ ID NO: 19629 - DNA, 22 bp, synthetic construct
  misc_feature 1..22: note = chemically synthesized
  source 1..22: mol_type = other DNA
tggacagtcacttacaggggca

SEQ ID NO: 19630 - DNA, 22 bp, synthetic construct
  misc_feature 1..22: note = chemically synthesized
  source 1..22: mol_type = other DNA
acaggggcagtgtctgactcag

SEQ ID NO: 19631 - DNA, 22 bp, synthetic construct
  misc_feature 1..22: note = chemically synthesized
  source 1..22: mol_type = other DNA
caggggcagtgtctgactcagg

SEQ ID NO: 19632 - DNA, 22 bp, synthetic construct
  misc_feature 1..22: note = chemically synthesized
  source 1..22: mol_type = other DNA
actcaggacagtggcaggaagt

SEQ ID NO: 19633 - DNA, 22 bp, synthetic construct
  misc_feature 1..22: note = chemically synthesized
  source 1..22: mol_type = other DNA
aggacagtggcaggaagtgacc

SEQ ID NO: 19634 - DNA, 22 bp, synthetic construct
  misc_feature 1..22: note = chemically synthesized
  source 1..22: mol_type = other DNA
gggaggaagattctgggcccct

SEQ ID NO: 19635 - DNA, 22 bp, synthetic construct
  misc_feature 1..22: note = chemically synthesized
  source 1..22: mol_type = other DNA
tgggcccctgactgagcctccc

SEQ ID NO: 19636 - DNA, 22 bp, synthetic construct
  misc_feature 1..22: note = chemically synthesized
  source 1..22: mol_type = other DNA
ggcccctgactgagcctcccca

SEQ ID NO: 19637 - DNA, 22 bp, synthetic construct
  misc_feature 1..22: note = chemically synthesized
  source 1..22: mol_type = other DNA
actgagcctccccaggatgtgg

SEQ ID NO: 19638 - DNA, 22 bp, synthetic construct
  misc_feature 1..22: note = chemically synthesized
  source 1..22: mol_type = other DNA
agcctccccaggatgtggtcct

SEQ ID NO: 19639 - DNA, 22 bp, synthetic construct
  misc_feature 1..22: note = chemically synthesized
  source 1..22: mol_type = other DNA
cccaggatgtggtcctgctggg

SEQ ID NO: 19640 - DNA, 22 bp, synthetic construct
  misc_feature 1..22: note = chemically synthesized
  source 1..22: mol_type = other DNA
ctgggtcggggggtgataggaa

SEQ ID NO: 19641 - DNA, 22 bp, synthetic construct
  misc_feature 1..22: note = chemically synthesized
  source 1..22: mol_type = other DNA
ggtcggggggtgataggaatga

SEQ ID NO: 19642 - DNA, 22 bp, synthetic construct
  misc_feature 1..22: note = chemically synthesized
  source 1..22: mol_type = other DNA
gaaggtgttctgtttgcaggtg

SEQ ID NO: 19643 - DNA, 22 bp, synthetic construct
  misc_feature 1..22: note = chemically synthesized
  source 1..22: mol_type = other DNA
tgtttgcaggtggatgctgcaa

SEQ ID NO: 19644 - DNA, 22 bp, synthetic construct
  misc_feature 1..22: note = chemically synthesized
  source 1..22: mol_type = other DNA
tttgcaggtggatgctgcaaag

SEQ ID NO: 19645 - DNA, 22 bp, synthetic construct
  misc_feature 1..22: note = chemically synthesized
  source 1..22: mol_type = other DNA
gcaggtggatgctgcaaagaga

SEQ ID NO: 19646 - DNA, 22 bp, synthetic construct
  misc_feature 1..22: note = chemically synthesized
  source 1..22: mol_type = other DNA
caggtggatgctgcaaagagag

SEQ ID NO: 19647 - DNA, 22 bp, synthetic construct
  misc_feature 1..22: note = chemically synthesized
  source 1..22: mol_type = other DNA
caaagagaggagctcagggctg

SEQ ID NO: 19648 - DNA, 22 bp, synthetic construct
  misc_feature 1..22: note = chemically synthesized
  source 1..22: mol_type = other DNA
agggctgggacaactggagctg

SEQ ID NO: 19649 - DNA, 22 bp, synthetic construct
  misc_feature 1..22: note = chemically synthesized
  source 1..22: mol_type = other DNA
ggacaactggagctgctctggg

SEQ ID NO: 19650 - DNA, 22 bp, synthetic construct
  misc_feature 1..22: note = chemically synthesized
  source 1..22: mol_type = other DNA
gagctgctctgggtctggaggc

SEQ ID NO: 19651 - DNA, 22 bp, synthetic construct
  misc_feature 1..22: note = chemically synthesized
  source 1..22: mol_type = other DNA
ctctgggtctggaggcagcaga

SEQ ID NO: 19652 - DNA, 22 bp, synthetic construct
  misc_feature 1..22: note = chemically synthesized
  source 1..22: mol_type = other DNA
tgggtctggaggcagcagagag

SEQ ID NO: 19653 - DNA, 22 bp, synthetic construct
  misc_feature 1..22: note = chemically synthesized
  source 1..22: mol_type = other DNA
ggtctggaggcagcagagaggg

SEQ ID NO: 19654 - DNA, 22 bp, synthetic construct
  misc_feature 1..22: note = chemically synthesized
  source 1..22: mol_type = other DNA
gaggcagcagagagggagccca

SEQ ID NO: 19655 - DNA, 22 bp, synthetic construct
  misc_feature 1..22: note = chemically synthesized
  source 1..22: mol_type = other DNA
tgtgtgcaggaagacgtgggtg

SEQ ID NO: 19656 - DNA, 22 bp, synthetic construct
  misc_feature 1..22: note = chemically synthesized
  source 1..22: mol_type = other DNA
tgtgcaggaagacgtgggtgtg

SEQ ID NO: 19657 - DNA, 22 bp, synthetic construct
  misc_feature 1..22: note = chemically synthesized
  source 1..22: mol_type = other DNA
gcatgcatatgcacatgtgaga

SEQ ID NO: 19658 - DNA, 22 bp, synthetic construct
  misc_feature 1..22: note = chemically synthesized
  source 1..22: mol_type = other DNA
ttgagtgaagtgagcaatgtgt

SEQ ID NO: 19659 - DNA, 22 bp, synthetic construct
  misc_feature 1..22: note = chemically synthesized
  source 1..22: mol_type = other DNA
tgagtgaagtgagcaatgtgtg

SEQ ID NO: 19660 - DNA, 22 bp, synthetic construct
  misc_feature 1..22: note = chemically synthesized
  source 1..22: mol_type = other DNA
gagtgaagtgagcaatgtgtga

SEQ ID NO: 19661 - DNA, 22 bp, synthetic construct
  misc_feature 1..22: note = chemically synthesized
  source 1..22: mol_type = other DNA
agtgaagtgagcaatgtgtgag

SEQ ID NO: 19662 - DNA, 22 bp, synthetic construct
  misc_feature 1..22: note = chemically synthesized
  source 1..22: mol_type = other DNA
gtgagggcatgtgaatgtgtgt

SEQ ID NO: 19663 - DNA, 22 bp, synthetic construct
  misc_feature 1..22: note = chemically synthesized
  source 1..22: mol_type = other DNA
tgagggcatgtgaatgtgtgtg

SEQ ID NO: 19664 - DNA, 22 bp, synthetic construct
  misc_feature 1..22: note = chemically synthesized
  source 1..22: mol_type = other DNA
tcagggtgcagatggatcaagg

SEQ ID NO: 19665 - DNA, 22 bp, synthetic construct
  misc_feature 1..22: note = chemically synthesized
  source 1..22: mol_type = other DNA
tgagatgacctcgggctgaggg

SEQ ID NO: 19666 - DNA, 22 bp, synthetic construct
  misc_feature 1..22: note = chemically synthesized
  source 1..22: mol_type = other DNA
gggctgaggggagcaaatttag

SEQ ID NO: 19667 - DNA, 22 bp, synthetic construct
  misc_feature 1..22: note = chemically synthesized
  source 1..22: mol_type = other DNA
aggggagcaaatttagtgtgga

SEQ ID NO: 19668 - DNA, 22 bp, synthetic construct
  misc_feature 1..22: note = chemically synthesized
  source 1..22: mol_type = other DNA
agtgtggaacgaggtttctagg

SEQ ID NO: 19669 - DNA, 22 bp, synthetic construct
  misc_feature 1..22: note = chemically synthesized
  source 1..22: mol_type = other DNA
gtgtggaacgaggtttctaggg

SEQ ID NO: 19670 - DNA, 22 bp, synthetic construct
  misc_feature 1..22: note = chemically synthesized
  source 1..22: mol_type = other DNA
ctagggaagcgagggcaaaggg

SEQ ID NO: 19671 - DNA, 22 bp, synthetic construct
  misc_feature 1..22: note = chemically synthesized
  source 1..22: mol_type = other DNA
tagggaagcgagggcaaagggc

SEQ ID NO: 19672 - DNA, 22 bp, synthetic construct
  misc_feature 1..22: note = chemically synthesized
  source 1..22: mol_type = other DNA
gggaagcgagggcaaagggcgc

SEQ ID NO: 19673 - DNA, 22 bp, synthetic construct
  misc_feature 1..22: note = chemically synthesized
  source 1..22: mol_type = other DNA
gggaggaggccttgcgtggtgg

SEQ ID NO: 19674 - DNA, 22 bp, synthetic construct
  misc_feature 1..22: note = chemically synthesized
  source 1..22: mol_type = other DNA
gcgtggtgggggatgaggacaa

SEQ ID NO: 19675 - DNA, 22 bp, synthetic construct
  misc_feature 1..22: note = chemically synthesized
  source 1..22: mol_type = other DNA
cgtggtgggggatgaggacaac

SEQ ID NO: 19676 - DNA, 22 bp, synthetic construct
  misc_feature 1..22: note = chemically synthesized
  source 1..22: mol_type = other DNA
gagggttgtgcttggagagtgg

SEQ ID NO: 19677 - DNA, 22 bp, synthetic construct
  misc_feature 1..22: note = chemically synthesized
  source 1..22: mol_type = other DNA
tgcttggagagtgggctatggt

SEQ ID NO: 19678 - DNA, 22 bp, synthetic construct
  misc_feature 1..22: note = chemically synthesized
  source 1..22: mol_type = other DNA
ggagagtgggctatggtggaat

SEQ ID NO: 19679 - DNA, 22 bp, synthetic construct
  misc_feature 1..22: note = chemically synthesized
  source 1..22: mol_type = other DNA
gagagtgggctatggtggaatg

SEQ ID NO: 19680 - DNA, 22 bp, synthetic construct
  misc_feature 1..22: note = chemically synthesized
  source 1..22: mol_type = other DNA
tggtggaatgacccagatttaa

SEQ ID NO: 19681 - DNA, 22 bp, synthetic construct
  misc_feature 1..22: note = chemically synthesized
  source 1..22: mol_type = other DNA
aaggatctcaatggaattttgg

SEQ ID NO: 19682 - DNA, 22 bp, synthetic construct
  misc_feature 1..22: note = chemically synthesized
  source 1..22: mol_type = other DNA
aggatctcaatggaattttggc

SEQ ID NO: 19683 - DNA, 22 bp, synthetic construct
  misc_feature 1..22: note = chemically synthesized
  source 1..22: mol_type = other DNA
aatggaattttggcaggggagg

SEQ ID NO: 19684 - DNA, 22 bp, synthetic construct
  misc_feature 1..22: note = chemically synthesized
  source 1..22: mol_type = other DNA
tggcaggggagggactgttcca

SEQ ID NO: 19685 - DNA, 22 bp, synthetic construct
  misc_feature 1..22: note = chemically synthesized
  source 1..22: mol_type = other DNA
ggcaggggagggactgttccag

SEQ ID NO: 19686 - DNA, 22 bp, synthetic construct
  misc_feature 1..22: note = chemically synthesized
  source 1..22: mol_type = other DNA
gcaggggagggactgttccagt

SEQ ID NO: 19687 - DNA, 22 bp, synthetic construct
  misc_feature 1..22: note = chemically synthesized
  source 1..22: mol_type = other DNA
ttccagtatggattttaggaag

SEQ ID NO: 19688 - DNA, 22 bp, synthetic construct
  misc_feature 1..22: note = chemically synthesized
  source 1..22: mol_type = other DNA
cagtatggattttaggaagaac

SEQ ID NO: 19689 - DNA, 22 bp, synthetic construct
  misc_feature 1..22: note = chemically synthesized
  source 1..22: mol_type = other DNA
taggaagaacacagggcccagc

SEQ ID NO: 19690 - DNA, 22 bp, synthetic construct
  misc_feature 1..22: note = chemically synthesized
  source 1..22: mol_type = other DNA
aggaagaacacagggcccagct

SEQ ID NO: 19691 - DNA, 22 bp, synthetic construct
  misc_feature 1..22: note = chemically synthesized
  source 1..22: mol_type = other DNA
ggaagaacacagggcccagctt

SEQ ID NO: 19692 - DNA, 22 bp, synthetic construct
  misc_feature 1..22: note = chemically synthesized
  source 1..22: mol_type = other DNA
ctggagtctccaatctgagggg

SEQ ID NO: 19693 - DNA, 22 bp, synthetic construct
  misc_feature 1..22: note = chemically synthesized
  source 1..22: mol_type = other DNA
tggagtctccaatctgagggga

SEQ ID NO: 19694 - DNA, 22 bp, synthetic construct
  misc_feature 1..22: note = chemically synthesized
  source 1..22: mol_type = other DNA
gagtctccaatctgaggggaca

SEQ ID NO: 19695 - DNA, 22 bp, synthetic construct
  misc_feature 1..22: note = chemically synthesized
  source 1..22: mol_type = other DNA
caatctgaggggacaggagcct

SEQ ID NO: 19696 - DNA, 22 bp, synthetic construct
  misc_feature 1..22: note = chemically synthesized
  source 1..22: mol_type = other DNA
aggggacaggagccttagaaga

SEQ ID NO: 19697 - DNA, 22 bp, synthetic construct
  misc_feature 1..22: note = chemically synthesized
  source 1..22: mol_type = other DNA
agaagagctgagactaaggccc

SEQ ID NO: 19698 - DNA, 22 bp, synthetic construct
  misc_feature 1..22: note = chemically synthesized
  source 1..22: mol_type = other DNA
gaagagctgagactaaggcccg

SEQ ID NO: 19699 - DNA, 22 bp, synthetic construct
  misc_feature 1..22: note = chemically synthesized
  source 1..22: mol_type = other DNA
agactaaggcccgaggtgatct

SEQ ID NO: 19700 - DNA, 22 bp, synthetic construct
  misc_feature 1..22: note = chemically synthesized
  source 1..22: mol_type = other DNA
aggcccgaggtgatctggaggc

SEQ ID NO: 19701 - DNA, 22 bp, synthetic construct
  misc_feature 1..22: note = chemically synthesized
  source 1..22: mol_type = other DNA
gaggcctctgccactggctgga

SEQ ID NO: 19702 - DNA, 22 bp, synthetic construct
  misc_feature 1..22: note = chemically synthesized
  source 1..22: mol_type = other DNA
tgccactggctggatgggagga

SEQ ID NO: 19703 - DNA, 22 bp, synthetic construct
  misc_feature 1..22: note = chemically synthesized
  source 1..22: mol_type = other DNA
ccactggctggatgggaggaaa

SEQ ID NO: 19704 - DNA, 22 bp, synthetic construct
  misc_feature 1..22: note = chemically synthesized
  source 1..22: mol_type = other DNA
gctggatgggaggaaaaccatt

SEQ ID NO: 19705 - DNA, 22 bp, synthetic construct
  misc_feature 1..22: note = chemically synthesized
  source 1..22: mol_type = other DNA
gatgggaggaaaaccattcaca

SEQ ID NO: 19706 - DNA, 22 bp, synthetic construct
  misc_feature 1..22: note = chemically synthesized
  source 1..22: mol_type = other DNA
acagatcccccttctcaggatg

SEQ ID NO: 19707 - DNA, 22 bp, synthetic construct
  misc_feature 1..22: note = chemically synthesized
  source 1..22: mol_type = other DNA
ctcaggatgtgtgcctaggcag

SEQ ID NO: 19708 - DNA, 22 bp, synthetic construct
  misc_feature 1..22: note = chemically synthesized
  source 1..22: mol_type = other DNA
tcaggatgtgtgcctaggcagg

SEQ ID NO: 19709 - DNA, 22 bp, synthetic construct
  misc_feature 1..22: note = chemically synthesized
  source 1..22: mol_type = other DNA
aggatgtgtgcctaggcagggc

SEQ ID NO: 19710 - DNA, 22 bp, synthetic construct
  misc_feature 1..22: note = chemically synthesized
  source 1..22: mol_type = other DNA
ggcagggccgggtctgcccccc

SEQ ID NO: 19711 - DNA, 22 bp, synthetic construct
  misc_feature 1..22: note = chemically synthesized
  source 1..22: mol_type = other DNA
cccccccgccccctgtgcgtct

SEQ ID NO: 19712 - DNA, 22 bp, synthetic construct
  misc_feature 1..22: note = chemically synthesized
  source 1..22: mol_type = other DNA
tgcgtctcccagtcccccagct

SEQ ID NO: 19713 - DNA, 22 bp, synthetic construct
  misc_feature 1..22: note = chemically synthesized
  source 1..22: mol_type = other DNA
ccagtcccccagctccaggatc

SEQ ID NO: 19714 - DNA, 22 bp, synthetic construct
  misc_feature 1..22: note = chemically synthesized
  source 1..22: mol_type = other DNA
caggatccgggctttgcacaca

SEQ ID NO: 19715 - DNA, 22 bp, synthetic construct
  misc_feature 1..22: note = chemically synthesized
  source 1..22: mol_type = other DNA
tgcacacagctgatgtgaatat

SEQ ID NO: 19716 - DNA, 22 bp, synthetic construct
  misc_feature 1..22: note = chemically synthesized
  source 1..22: mol_type = other DNA
gcacacagctgatgtgaatatc

SEQ ID NO: 19717 - DNA, 22 bp, synthetic construct
  misc_feature 1..22: note = chemically synthesized
  source 1..22: mol_type = other DNA
cacacagctgatgtgaatatcc

SEQ ID NO: 19718 - DNA, 22 bp, synthetic construct
  misc_feature 1..22: note = chemically synthesized
  source 1..22: mol_type = other DNA
atgtgaatatcctgagtcgtgt

SEQ ID NO: 19719 - DNA, 22 bp, synthetic construct
  misc_feature 1..22: note = chemically synthesized
  source 1..22: mol_type = other DNA
agtcgtgtgcatgggtgtgtgt

SEQ ID NO: 19720 - DNA, 22 bp, synthetic construct
  misc_feature 1..22: note = chemically synthesized
  source 1..22: mol_type = other DNA
gctgcgtgtgtatatttataca

SEQ ID NO: 19721 - DNA, 22 bp, synthetic construct
  misc_feature 1..22: note = chemically synthesized
  source 1..22: mol_type = other DNA
cgtgtgtatatttatacatggt

SEQ ID NO: 19722 - DNA, 22 bp, synthetic construct
  misc_feature 1..22: note = chemically synthesized
  source 1..22: mol_type = other DNA
atacatggtaatatgggtgcga

SEQ ID NO: 19723 - DNA, 22 bp, synthetic construct
  misc_feature 1..22: note = chemically synthesized
  source 1..22: mol_type = other DNA
tacatggtaatatgggtgcgag

SEQ ID NO: 19724 - DNA, 22 bp, synthetic construct
  misc_feature 1..22: note = chemically synthesized
  source 1..22: mol_type = other DNA
aaatgctggggtcaaagcctat

SEQ ID NO: 19725 - DNA, 22 bp, synthetic construct
  misc_feature 1..22: note = chemically synthesized
  source 1..22: mol_type = other DNA
gggtcaaagcctatgatgaccc

SEQ ID NO: 19726 - DNA, 22 bp, synthetic construct
  misc_feature 1..22: note = chemically synthesized
  source 1..22: mol_type = other DNA
tgatgacccccccccatggccc

SEQ ID NO: 19727 - DNA, 22 bp, synthetic construct
  misc_feature 1..22: note = chemically synthesized
  source 1..22: mol_type = other DNA
tgcctcctcaggcttcggtgcc

SEQ ID NO: 19728 - DNA, 22 bp, synthetic construct
  misc_feature 1..22: note = chemically synthesized
  source 1..22: mol_type = other DNA
ctcaggcttcggtgccctgtct

SEQ ID NO: 19729 - DNA, 22 bp, synthetic construct
  misc_feature 1..22: note = chemically synthesized
  source 1..22: mol_type = other DNA
aggcttcggtgccctgtcttta

SEQ ID NO: 19730 - DNA, 22 bp, synthetic construct
  misc_feature 1..22: note = chemically synthesized
  source 1..22: mol_type = other DNA
cggtgccctgtctttaccctcc

SEQ ID NO: 19731 - DNA, 22 bp, synthetic construct
  misc_feature 1..22: note = chemically synthesized
  source 1..22: mol_type = other DNA
ggtgccctgtctttaccctccg

SEQ ID NO: 19732 - DNA, 22 bp, synthetic construct
  misc_feature 1..22: note = chemically synthesized
  source 1..22: mol_type = other DNA
tctttaccctccggctccccac

SEQ ID NO: 19733 - DNA, 22 bp, synthetic construct
  misc_feature 1..22: note = chemically synthesized
  source 1..22: mol_type = other DNA
taccctccggctccccacaccc

SEQ ID NO: 19734 - DNA, 22 bp, synthetic construct
  misc_feature 1..22: note = chemically synthesized
  source 1..22: mol_type = other DNA
accctccggctccccacaccca

SEQ ID NO: 19735 - DNA, 22 bp, synthetic construct
  misc_feature 1..22: note = chemically synthesized
  source 1..22: mol_type = other DNA
ccctccggctccccacacccag

SEQ ID NO: 19736 - DNA, 22 bp, synthetic construct
  misc_feature 1..22: note = chemically synthesized
  source 1..22: mol_type = other DNA
cggctccccacacccaggctgc

SEQ ID NO: 19737 - DNA, 22 bp, synthetic construct
  misc_feature 1..22: note = chemically synthesized
  source 1..22: mol_type = other DNA
cccacacccaggctgccggctc

SEQ ID NO: 19738 - DNA, 22 bp, synthetic construct
  misc_feature 1..22: note = chemically synthesized
  source 1..22: mol_type = other DNA
ccggctcctgatgcccctctcc

SEQ ID NO: 19739 - DNA, 22 bp, synthetic construct
  misc_feature 1..22: note = chemically synthesized
  source 1..22: mol_type = other DNA
ctgatgcccctctcccacaggg

SEQ ID NO: 19740 - DNA, 22 bp, synthetic construct
  misc_feature 1..22: note = chemically synthesized
  source 1..22: mol_type = other DNA
atgcccctctcccacagggcca

SEQ ID NO: 19741 - DNA, 22 bp, synthetic construct
  misc_feature 1..22: note = chemically synthesized
  source 1..22: mol_type = other DNA
tcccacagggccacctcctgcc

SEQ ID NO: 19742 - DNA, 22 bp, synthetic construct
  misc_feature 1..22: note = chemically synthesized
  source 1..22: mol_type = other DNA
ccacagggccacctcctgccca

SEQ ID NO: 19743 - DNA, 22 bp, synthetic construct
  misc_feature 1..22: note = chemically synthesized
  source 1..22: mol_type = other DNA
ctgcccagcccctggcacagcg

SEQ ID NO: 19744 - DNA, 22 bp, synthetic construct
  misc_feature 1..22: note = chemically synthesized
  source 1..22: mol_type = other DNA
cccagcccctggcacagcgtct

SEQ ID NO: 19745 - DNA, 22 bp, synthetic construct
  misc_feature 1..22: note = chemically synthesized
  source 1..22: mol_type = other DNA
gcacagcgtctctgctccatgg

SEQ ID NO: 19746 - DNA, 22 bp, synthetic construct
  misc_feature 1..22: note = chemically synthesized
  source 1..22: mol_type = other DNA
tgctccatggtctgcttcagtc

SEQ ID NO: 19747 - DNA, 22 bp, synthetic construct
  misc_feature 1..22: note = chemically synthesized
  source 1..22: mol_type = other DNA
ctccatggtctgcttcagtctg

SEQ ID NO: 19748 - DNA, 22 bp, synthetic construct
  misc_feature 1..22: note = chemically synthesized
  source 1..22: mol_type = other DNA
catggtctgcttcagtctgctt

SEQ ID NO: 19749 - DNA, 22 bp, synthetic construct
  misc_feature 1..22: note = chemically synthesized
  source 1..22: mol_type = other DNA
cttcagtctgcttgccctgagc

SEQ ID NO: 19750 - DNA, 22 bp, synthetic construct
  misc_feature 1..22: note = chemically synthesized
  source 1..22: mol_type = other DNA
cagtctgcttgccctgagcttc

SEQ ID NO: 19751 - DNA, 22 bp, synthetic construct
  misc_feature 1..22: note = chemically synthesized
  source 1..22: mol_type = other DNA
agtctgcttgccctgagcttca

SEQ ID NO: 19752 - DNA, 22 bp, synthetic construct
  misc_feature 1..22: note = chemically synthesized
  source 1..22: mol_type = other DNA
cttgccctgagcttcaacatcc

SEQ ID NO: 19753 - DNA, 22 bp, synthetic construct
  misc_feature 1..22: note = chemically synthesized
  source 1..22: mol_type = other DNA
gccctgagcttcaacatcctgc

SEQ ID NO: 19754 - DNA, 22 bp, synthetic construct
  misc_feature 1..22: note = chemically synthesized
  source 1..22: mol_type = other DNA
ccctgagcttcaacatcctgct

SEQ ID NO: 19755 - DNA, 22 bp, synthetic construct
  misc_feature 1..22: note = chemically synthesized
  source 1..22: mol_type = other DNA
agcttcaacatcctgctgctgg

SEQ ID NO: 19756 - DNA, 22 bp, synthetic construct
  misc_feature 1..22: note = chemically synthesized
  source 1..22: mol_type = other DNA
caacatcctgctgctggtggtc

SEQ ID NO: 19757 - DNA, 22 bp, synthetic construct
  misc_feature 1..22: note = chemically synthesized
  source 1..22: mol_type = other DNA
aacatcctgctgctggtggtca

SEQ ID NO: 19758 - DNA, 22 bp, synthetic construct
  misc_feature 1..22: note = chemically synthesized
  source 1..22: mol_type = other DNA
ctgctggtggtcatctgtgtga

SEQ ID NO: 19759 - DNA, 22 bp, synthetic construct
  misc_feature 1..22: note = chemically synthesized
  source 1..22: mol_type = other DNA
ctggtggtcatctgtgtgactg

SEQ ID NO: 19760 - DNA, 22 bp, synthetic construct
  misc_feature 1..22: note = chemically synthesized
  source 1..22: mol_type = other DNA
gtggtcatctgtgtgactgggt

SEQ ID NO: 19761 - DNA, 22 bp, synthetic construct
  misc_feature 1..22: note = chemically synthesized
  source 1..22: mol_type = other DNA
tgtgactgggtcccaaagtgag

SEQ ID NO: 19762 - DNA, 22 bp, synthetic construct
  misc_feature 1..22: note = chemically synthesized
  source 1..22: mol_type = other DNA
ggtcccaaagtgagggtcacgg

SEQ ID NO: 19763 - DNA, 20 bp, synthetic construct
  misc_feature 1..20: note = chemically synthesized
  source 1..20: mol_type = other DNA
cttcagatagattatatctg

SEQ ID NO: 19764 - DNA, 20 bp, synthetic construct
  misc_feature 1..20: note = chemically synthesized
  source 1..20: mol_type = other DNA
gatagattatatctggagtg

SEQ ID NO: 19765 - DNA, 20 bp, synthetic construct
  misc_feature 1..20: note = chemically synthesized
  source 1..20: mol_type = other DNA
aatcctgccacctatgtatc

SEQ ID NO: 19766 - DNA, 20 bp, synthetic construct
  misc_feature 1..20: note = chemically synthesized
  source 1..20: mol_type = other DNA
tgccacctatgtatctggca

SEQ ID NO: 19767 - DNA, 20 bp, synthetic construct
  misc_feature 1..20: note = chemically synthesized
  source 1..20: mol_type = other DNA
ctatgtatctggcatagtgt

SEQ ID NO: 19768 - DNA, 20 bp, synthetic construct
  misc_feature 1..20: note = chemically synthesized
  source 1..20: mol_type = other DNA
gagtcctcataaatgcttac

SEQ ID NO: 19769 - DNA, 20 bp, synthetic construct
  misc_feature 1..20: note = chemically synthesized
  source 1..20: mol_type = other DNA
cataaatgcttactggtttg

SEQ ID NO: 19770 - DNA, 20 bp, synthetic construct
  misc_feature 1..20: note = chemically synthesized
  source 1..20: mol_type = other DNA
ataaatgcttactggtttga

SEQ ID NO: 19771 - DNA, 20 bp, synthetic construct
  misc_feature 1..20: note = chemically synthesized
  source 1..20: mol_type = other DNA
taaatgcttactggtttgaa

SEQ ID NO: 19772 - DNA, 20 bp, synthetic construct
  misc_feature 1..20: note = chemically synthesized
  source 1..20: mol_type = other DNA
tggtttgaagggcaacaaaa

SEQ ID NO: 19773 - DNA, 20 bp, synthetic construct
  misc_feature 1..20: note = chemically synthesized
  source 1..20: mol_type = other DNA
aagggcaacaaaatagtgaa

SEQ ID NO: 19774 - DNA, 20 bp, synthetic construct
  misc_feature 1..20: note = chemically synthesized
  source 1..20: mol_type = other DNA
gggcaacaaaatagtgaaca

SEQ ID NO: 19775 - DNA, 20 bp, synthetic construct
  misc_feature 1..20: note = chemically synthesized
  source 1..20: mol_type = other DNA
acagagtgaaaatccccact

SEQ ID NO: 19776 - DNA, 20 bp, synthetic construct
  misc_feature 1..20: note = chemically synthesized
  source 1..20: mol_type = other DNA
gaaaatccccactaagatcc

SEQ ID NO: 19777 - DNA, 20 bp, synthetic construct
  misc_feature 1..20: note = chemically synthesized
  source 1..20: mol_type = other DNA
aaaatccccactaagatcct

SEQ ID NO: 19778 - DNA, 20 bp, synthetic construct
  misc_feature 1..20: note = chemically synthesized
  source 1..20: mol_type = other DNA
ccccactaagatcctgggtc

SEQ ID NO: 19779 - DNA, 20 bp, synthetic construct
  misc_feature 1..20: note = chemically synthesized
  source 1..20: mol_type = other DNA
taagatcctgggtccagaaa

SEQ ID NO: 19780 - DNA, 20 bp, synthetic construct
  misc_feature 1..20: note = chemically synthesized
  source 1..20: mol_type = other DNA
atcctgggtccagaaaaaga

SEQ ID NO: 19781 - DNA, 20 bp, synthetic construct
  misc_feature 1..20: note = chemically synthesized
  source 1..20: mol_type = other DNA
tcctgggtccagaaaaagat

SEQ ID NO: 19782 - DNA, 20 bp, synthetic construct
  misc_feature 1..20: note = chemically synthesized
  source 1..20: mol_type = other DNA
aaaaagatgggaaacctgtt

SEQ ID NO: 19783 - DNA, 20 bp, synthetic construct
  misc_feature 1..20: note = chemically synthesized
  source 1..20: mol_type = other DNA
aacctgtttagctcacccgt

SEQ ID NO: 19784 - DNA, 20 bp, synthetic construct
  misc_feature 1..20: note = chemically synthesized
  source 1..20: mol_type = other DNA
ttagctcacccgtgagccca

SEQ ID NO: 19785 - DNA, 20 bp, synthetic construct
  misc_feature 1..20: note = chemically synthesized
  source 1..20: mol_type = other DNA
agcccatagttaaaactctt

SEQ ID NO: 19786 - DNA, 20 bp, synthetic construct
  misc_feature 1..20: note = chemically synthesized
  source 1..20: mol_type = other DNA
agttaaaactctttagacaa

SEQ ID NO: 19787 - DNA, 20 bp, synthetic construct
  misc_feature 1..20: note = chemically synthesized
  source 1..20: mol_type = other DNA
gttaaaactctttagacaac

SEQ ID NO: 19788 - DNA, 20 bp, synthetic construct
  misc_feature 1..20: note = chemically synthesized
  source 1..20: mol_type = other DNA
caacaggttgtttccgttta

SEQ ID NO: 19789 - DNA, 20 bp, synthetic construct
  misc_feature 1..20: note = chemically synthesized
  source 1..20: mol_type = other DNA
acaggttgtttccgtttaca

SEQ ID NO: 19790 - DNA, 20 bp, synthetic construct
  misc_feature 1..20: note = chemically synthesized
  source 1..20: mol_type = other DNA
tttacagagaacaataatat

SEQ ID NO: 19791 - DNA, 20 bp, synthetic construct
  misc_feature 1..20: note = chemically synthesized
  source 1..20: mol_type = other DNA
ttacagagaacaataatatt

SEQ ID NO: 19792 - DNA, 20 bp, synthetic construct
  misc_feature 1..20: note = chemically synthesized
  source 1..20: mol_type = other DNA
cagagaacaataatattggg

SEQ ID NO: 19793 - DNA, 20 bp, synthetic construct
  misc_feature 1..20: note = chemically synthesized
  source 1..20: mol_type = other DNA
gaacaataatattgggtggt

SEQ ID NO: 19794 - DNA, 20 bp, synthetic construct
  misc_feature 1..20: note = chemically synthesized
  source 1..20: mol_type = other DNA
ttgggtggtgagcatctgtg

SEQ ID NO: 19795 - DNA, 20 bp, synthetic construct
  misc_feature 1..20: note = chemically synthesized
  source 1..20: mol_type = other DNA
tgggtggtgagcatctgtgt

SEQ ID NO: 19796 - DNA, 20 bp, synthetic construct
  misc_feature 1..20: note = chemically synthesized
  source 1..20: mol_type = other DNA
gggtggtgagcatctgtgtg

SEQ ID NO: 19797 - DNA, 20 bp, synthetic construct
  misc_feature 1..20: note = chemically synthesized
  source 1..20: mol_type = other DNA
ggtggtgagcatctgtgtgg

SEQ ID NO: 19798 - DNA, 20 bp, synthetic construct
  misc_feature 1..20: note = chemically synthesized
  source 1..20: mol_type = other DNA
gtgagcatctgtgtgggggt

SEQ ID NO: 19799 - DNA, 20 bp, synthetic construct
  misc_feature 1..20: note = chemically synthesized
  source 1..20: mol_type = other DNA
tgagcatctgtgtgggggtt

SEQ ID NO: 19800 - DNA, 20 bp, synthetic construct
  misc_feature 1..20: note = chemically synthesized
  source 1..20: mol_type = other DNA
gagcatctgtgtgggggttg

SEQ ID NO: 19801 - DNA, 20 bp, synthetic construct
  misc_feature 1..20: note = chemically synthesized
  source 1..20: mol_type = other DNA
catctgtgtgggggttgggg

SEQ ID NO: 19802 - DNA, 20 bp, synthetic construct
  misc_feature 1..20: note = chemically synthesized
  source 1..20: mol_type = other DNA
atctgtgtgggggttggggt

SEQ ID NO: 19803 - DNA, 20 bp, synthetic construct
  misc_feature 1..20: note = chemically synthesized
  source 1..20: mol_type = other DNA
gtgtgggggttggggtggga

SEQ ID NO: 19804 - DNA, 20 bp, synthetic construct
  misc_feature 1..20: note = chemically synthesized
  source 1..20: mol_type = other DNA
tgtgggggttggggtgggat

SEQ ID NO: 19805 - DNA, 20 bp, synthetic construct
  misc_feature 1..20: note = chemically synthesized
  source 1..20: mol_type = other DNA
gtgggggttggggtgggata

SEQ ID NO: 19806 - DNA, 20 bp, synthetic construct
  misc_feature 1..20: note = chemically synthesized
  source 1..20: mol_type = other DNA
tgggggttggggtgggatag

SEQ ID NO: 19807 - DNA, 20 bp, synthetic construct
  misc_feature 1..20: note = chemically synthesized
  source 1..20: mol_type = other DNA
ttggggtgggataggggata

SEQ ID NO: 19808 - DNA, 20 bp, synthetic construct
  misc_feature 1..20: note = chemically synthesized
  source 1..20: mol_type = other DNA
tggggtgggataggggatac

SEQ ID NO: 19809 - DNA, 20 bp, synthetic construct
  misc_feature 1..20: note = chemically synthesized
  source 1..20: mol_type = other DNA
ggggtgggataggggatacg

SEQ ID NO: 19810 - DNA, 20 bp, synthetic construct
  misc_feature 1..20: note = chemically synthesized
  source 1..20: mol_type = other DNA
ggtgggataggggatacggg

SEQ ID NO: 19811 - DNA, 20 bp, synthetic construct
  misc_feature 1..20: note = chemically synthesized
  source 1..20: mol_type = other DNA
tgggataggggatacgggga

SEQ ID NO: 19812 - DNA, 20 bp, synthetic construct
  misc_feature 1..20: note = chemically synthesized
  source 1..20: mol_type = other DNA
gataggggatacggggagag

SEQ ID NO: 19813 - DNA, 20 bp, synthetic construct
  misc_feature 1..20: note = chemically synthesized
  source 1..20: mol_type = other DNA
taggggatacggggagagtg

SEQ ID NO: 19814 - DNA, 20 bp, synthetic construct
  misc_feature 1..20: note = chemically synthesized
  source 1..20: mol_type = other DNA
atacggggagagtggagaaa

SEQ ID NO: 19815 - DNA, 20 bp, synthetic construct
  misc_feature 1..20: note = chemically synthesized
  source 1..20: mol_type = other DNA
tacggggagagtggagaaaa

SEQ ID NO: 19816 - DNA, 20 bp, synthetic construct
  misc_feature 1..20: note = chemically synthesized
  source 1..20: mol_type = other DNA
acggggagagtggagaaaaa

SEQ ID NO: 19817 - DNA, 20 bp, synthetic construct
  misc_feature 1..20: note = chemically synthesized
  source 1..20: mol_type = other DNA
cggggagagtggagaaaaag

SEQ ID NO: 19818 - DNA, 20 bp, synthetic construct
  misc_feature 1..20: note = chemically synthesized
  source 1..20: mol_type = other DNA
gagtggagaaaaaggggaca

SEQ ID NO: 19819 - DNA, 20 bp, synthetic construct
  misc_feature 1..20: note = chemically synthesized
  source 1..20: mol_type = other DNA
agtggagaaaaaggggacac

SEQ ID NO: 19820 - DNA, 20 bp, synthetic construct
  misc_feature 1..20: note = chemically synthesized
  source 1..20: mol_type = other DNA
gtggagaaaaaggggacaca

SEQ ID NO: 19821 - DNA, 20 bp, synthetic construct
  misc_feature 1..20: note = chemically synthesized
  source 1..20: mol_type = other DNA
ggggacacagggttaatgtg

SEQ ID NO: 19822 - DNA, 20 bp, synthetic construct
  misc_feature 1..20: note = chemically synthesized
  source 1..20: mol_type = other DNA
cacagggttaatgtgaagtc

SEQ ID NO: 19823 - DNA, 20 bp, synthetic construct
  misc_feature 1..20: note = chemically synthesized
  source 1..20: mol_type = other DNA
acagggttaatgtgaagtcc

SEQ ID NO: 19824 - DNA, 20 bp, synthetic construct
  misc_feature 1..20: note = chemically synthesized
  source 1..20: mol_type = other DNA
aggatccccctctacattta

SEQ ID NO: 19825 - DNA, 20 bp, synthetic construct
  misc_feature 1..20: note = chemically synthesized
  source 1..20: mol_type = other DNA
tccccctctacatttaaagt

SEQ ID NO: 19826 - DNA, 20 bp, synthetic construct
  misc_feature 1..20: note = chemically synthesized
  source 1..20: mol_type = other DNA
tctacatttaaagttggttt

SEQ ID NO: 19827 - DNA, 20 bp, synthetic construct
  misc_feature 1..20: note = chemically synthesized
  source 1..20: mol_type = other DNA
catttaaagttggtttaagt

SEQ ID NO: 19828 - DNA, 20 bp, synthetic construct
  misc_feature 1..20: note = chemically synthesized
  source 1..20: mol_type = other DNA
tttaagttggctttaattaa

SEQ ID NO: 19829 - DNA, 20 bp, synthetic construct
  misc_feature 1..20: note = chemically synthesized
  source 1..20: mol_type = other DNA
tttaattaatagcaactctt

SEQ ID NO: 19830 - DNA, 20 bp, synthetic construct
  misc_feature 1..20: note = chemically synthesized
  source 1..20: mol_type = other DNA
atagcaactcttaagataat

SEQ ID NO: 19831 - DNA, 20 bp, synthetic construct
  misc_feature 1..20: note = chemically synthesized
  source 1..20: mol_type = other DNA
tcagaattttcttaaccttt

SEQ ID NO: 19832 - DNA, 20 bp, synthetic construct
  misc_feature 1..20: note = chemically synthesized
  source 1..20: mol_type = other DNA
cttttagccttactgttgaa

SEQ ID NO: 19833 - DNA, 20 bp, synthetic construct
  misc_feature 1..20: note = chemically synthesized
  source 1..20: mol_type = other DNA
tgtacaaatcatttgcttct

SEQ ID NO: 19834 - DNA, 20 bp, synthetic construct
  misc_feature 1..20: note = chemically synthesized
  source 1..20: mol_type = other DNA
caaatcatttgcttcttgga

SEQ ID NO: 19835 - DNA, 20 bp, synthetic construct
  misc_feature 1..20: note = chemically synthesized
  source 1..20: mol_type = other DNA
taatttcttttactaaaatg

SEQ ID NO: 19836 - DNA, 20 bp, synthetic construct
  misc_feature 1..20: note = chemically synthesized
  source 1..20: mol_type = other DNA
aatttcttttactaaaatgt

SEQ ID NO: 19837 - DNA, 20 bp, synthetic construct
  misc_feature 1..20: note = chemically synthesized
  source 1..20: mol_type = other DNA
ctaaaatgtgggcttttgac

SEQ ID NO: 19838 - DNA, 20 bp, synthetic construct
  misc_feature 1..20: note = chemically synthesized
  source 1..20: mol_type = other DNA
gatgaatgtaaatgttcttc

SEQ ID NO: 19839 - DNA, 20 bp, synthetic construct
  misc_feature 1..20: note = chemically synthesized
  source 1..20: mol_type = other DNA
ttattctttatattttctaa

SEQ ID NO: 19840 - DNA, 20 bp, synthetic construct
  misc_feature 1..20: note = chemically synthesized
  source 1..20: mol_type = other DNA
attttctaacagattctgtg

SEQ ID NO: 19841 - DNA, 20 bp, synthetic construct
  misc_feature 1..20: note = chemically synthesized
  source 1..20: mol_type = other DNA
ttctaacagattctgtgtag

SEQ ID NO: 19842 - DNA, 20 bp, synthetic construct
  misc_feature 1..20: note = chemically synthesized
  source 1..20: mol_type = other DNA
tctaacagattctgtgtagt

SEQ ID NO: 19843 - DNA, 20 bp, synthetic construct
  misc_feature 1..20: note = chemically synthesized
  source 1..20: mol_type = other DNA
cagattctgtgtagtgggat

SEQ ID NO: 19844 - DNA, 20 bp, synthetic construct
  misc_feature 1..20: note = chemically synthesized
  source 1..20: mol_type = other DNA
attctgtgtagtgggatgag

SEQ ID NO: 19845 - DNA, 20 bp, synthetic construct
  misc_feature 1..20: note = chemically synthesized
  source 1..20: mol_type = other DNA
tctgtgtagtgggatgagca

SEQ ID NO: 19846 - DNA, 20 bp, synthetic construct
  misc_feature 1..20: note = chemically synthesized
  source 1..20: mol_type = other DNA
agaacaaaaacaaaataatc

SEQ ID NO: 19847 - DNA, 20 bp, synthetic construct
  misc_feature 1..20: note = chemically synthesized
  source 1..20: mol_type = other DNA
caaaaacaaaataatccagt

SEQ ID NO: 19848 - DNA, 20 bp, synthetic construct
  misc_feature 1..20: note = chemically synthesized
  source 1..20: mol_type = other DNA
acaaaataatccagtgagaa

SEQ ID NO: 19849 - DNA, 20 bp, synthetic construct
  misc_feature 1..20: note = chemically synthesized
  source 1..20: mol_type = other DNA
aaagcccgtaaataaacctt

SEQ ID NO: 19850 - DNA, 20 bp, synthetic construct
  misc_feature 1..20: note = chemically synthesized
  source 1..20: mol_type = other DNA
ccgtaaataaaccttcagac

SEQ ID NO: 19851 - DNA, 20 bp, synthetic construct
  misc_feature 1..20: note = chemically synthesized
  source 1..20: mol_type = other DNA
gtaaataaaccttcagacca

SEQ ID NO: 19852 - DNA, 20 bp, synthetic construct
  misc_feature 1..20: note = chemically synthesized
  source 1..20: mol_type = other DNA
cagaccagagatctattctc

SEQ ID NO: 19853 - DNA, 20 bp, synthetic construct
  misc_feature 1..20: note = chemically synthesized
  source 1..20: mol_type = other DNA
tctattctctagcttatttt

SEQ ID NO: 19854 - DNA, 20 bp, synthetic construct
  misc_feature 1..20: note = chemically synthesized
  source 1..20: mol_type = other DNA
tattttaagctcaacttaaa

SEQ ID NO: 19855 - DNA, 20 bp, synthetic construct
  misc_feature 1..20: note = chemically synthesized
  source 1..20: mol_type = other DNA
tttaagctcaacttaaaaag

SEQ ID NO: 19856 - DNA, 20 bp, synthetic construct
  misc_feature 1..20: note = chemically synthesized
  source 1..20: mol_type = other DNA
ttaactccaccctccttcaa

SEQ ID NO: 19857 - DNA, 20 bp, synthetic construct
  misc_feature 1..20: note = chemically synthesized
  source 1..20: mol_type = other DNA
ccaccctccttcaaaagaaa

SEQ ID NO: 19858 - DNA, 20 bp, synthetic construct
  misc_feature 1..20: note = chemically synthesized
  source 1..20: mol_type = other DNA
gtctatatgattgatttgca

SEQ ID NO: 19859 - DNA, 20 bp, synthetic construct
  misc_feature 1..20: note = chemically synthesized
  source 1..20: mol_type = other DNA
attgatttgcacagctcatc

SEQ ID NO: 19860 - DNA, 20 bp, synthetic construct
  misc_feature 1..20: note = chemically synthesized
  source 1..20: mol_type = other DNA
atttgcacagctcatctggc

SEQ ID NO: 19861 - DNA, 20 bp, synthetic construct
  misc_feature 1..20: note = chemically synthesized
  source 1..20: mol_type = other DNA
tgcacagctcatctggccag

SEQ ID NO: 19862 - DNA, 20 bp, synthetic construct
  misc_feature 1..20: note = chemically synthesized
  source 1..20: mol_type = other DNA
cacagctcatctggccagaa

SEQ ID NO: 19863 - DNA, 20 bp, synthetic construct
  misc_feature 1..20: note = chemically synthesized
  source 1..20: mol_type = other DNA
ctcatctggccagaagagct

SEQ ID NO: 19864 - DNA, 20 bp, synthetic construct
  misc_feature 1..20: note = chemically synthesized
  source 1..20: mol_type = other DNA
tgagacatccgttcccctac

SEQ ID NO: 19865 - DNA, 20 bp, synthetic construct
  misc_feature 1..20: note = chemically synthesized
  source 1..20: mol_type = other DNA
gagagtttcttgtaggggaa

SEQ ID NO: 19866 - DNA, 20 bp, synthetic construct
  misc_feature 1..20: note = chemically synthesized
  source 1..20: mol_type = other DNA
ttgtaggggaacggatgtct

SEQ ID NO: 19867 - DNA, 20 bp, synthetic construct
  misc_feature 1..20: note = chemically synthesized
  source 1..20: mol_type = other DNA
aacggatgtctcagctcttc

SEQ ID NO: 19868 - DNA, 20 bp, synthetic construct
  misc_feature 1..20: note = chemically synthesized
  source 1..20: mol_type = other DNA
gatgtctcagctcttctggc

SEQ ID NO: 19869 - DNA, 20 bp, synthetic construct
  misc_feature 1..20: note = chemically synthesized
  source 1..20: mol_type = other DNA
ctcagctcttctggccagat

SEQ ID NO: 19870 - DNA, 20 bp, synthetic construct
  misc_feature 1..20: note = chemically synthesized
  source 1..20: mol_type = other DNA
agctgtgcaaatcaatcata

SEQ ID NO: 19871 - DNA, 20 bp, synthetic construct
  misc_feature 1..20: note = chemically synthesized
  source 1..20: mol_type = other DNA
gtgcaaatcaatcatataga

SEQ ID NO: 19872 - DNA, 20 bp, synthetic construct
  misc_feature 1..20: note = chemically synthesized
  source 1..20: mol_type = other DNA
caatcatatagacagtataa

SEQ ID NO: 19873 - DNA, 20 bp, synthetic construct
  misc_feature 1..20: note = chemically synthesized
  source 1..20: mol_type = other DNA
tcatatagacagtataaaag

SEQ ID NO: 19874 - DNA, 20 bp, synthetic construct
  misc_feature 1..20: note = chemically synthesized
  source 1..20: mol_type = other DNA
catatagacagtataaaagt

SEQ ID NO: 19875 - DNA, 20 bp, synthetic construct
  misc_feature 1..20: note = chemically synthesized
  source 1..20: mol_type = other DNA
aggaaatgctgtttcttttg

SEQ ID NO: 19876 - DNA, 20 bp, synthetic construct
  misc_feature 1..20: note = chemically synthesized
  source 1..20: mol_type = other DNA
ggaaatgctgtttcttttga

SEQ ID NO: 19877 - DNA, 20 bp, synthetic construct
  misc_feature 1..20: note = chemically synthesized
  source 1..20: mol_type = other DNA
aaatgctgtttcttttgaag

SEQ ID NO: 19878 - DNA, 20 bp, synthetic construct
  misc_feature 1..20: note = chemically synthesized
  source 1..20: mol_type = other DNA
aatgctgtttcttttgaagg

SEQ ID NO: 19879 - DNA, 20 bp, synthetic construct
  misc_feature 1..20: note = chemically synthesized
  source 1..20: mol_type = other DNA
atgctgtttcttttgaagga

SEQ ID NO: 19880 - DNA, 20 bp, synthetic construct
  misc_feature 1..20: note = chemically synthesized
  source 1..20: mol_type = other DNA
ctgtttcttttgaaggaggg

SEQ ID NO: 19881 - DNA, 20 bp, synthetic construct
  misc_feature 1..20: note = chemically synthesized
  source 1..20: mol_type = other DNA
gtttcttttgaaggagggtg

SEQ ID NO: 19882 - DNA, 20 bp, synthetic construct
  misc_feature 1..20: note = chemically synthesized
  source 1..20: mol_type = other DNA
gagggtggagttaaatcatt

SEQ ID NO: 19883 - DNA, 20 bp, synthetic construct
  misc_feature 1..20: note = chemically synthesized
  source 1..20: mol_type = other DNA
ttaaatcattaagtgtattg

SEQ ID NO: 19884 - DNA, 20 bp, synthetic construct
  misc_feature 1..20: note = chemically synthesized
  source 1..20: mol_type = other DNA
taaatcattaagtgtattga

SEQ ID NO: 19885 - DNA, 20 bp, synthetic construct
  misc_feature 1..20: note = chemically synthesized
  source 1..20: mol_type = other DNA
ttaagtgtattgaaggcgaa

SEQ ID NO: 19886 - DNA, 20 bp, synthetic construct
  misc_feature 1..20: note = chemically synthesized
  source 1..20: mol_type = other DNA
gtattgaaggcgaaaagaat

SEQ ID NO: 19887 - DNA, 20 bp, synthetic construct
  misc_feature 1..20: note = chemically synthesized
  source 1..20: mol_type = other DNA
attgaaggcgaaaagaatca

SEQ ID NO: 19888 - DNA, 20 bp, synthetic construct
  misc_feature 1..20: note = chemically synthesized
  source 1..20: mol_type = other DNA
aggcgaaaagaatcagagaa

SEQ ID NO: 19889 - DNA, 20 bp, synthetic construct
  misc_feature 1..20: note = chemically synthesized
  source 1..20: mol_type = other DNA
agagaacagttcttcttttt

SEQ ID NO: 19890 - DNA, 20 bp, synthetic construct
  misc_feature 1..20: note = chemically synthesized
  source 1..20: mol_type = other DNA
acagttcttctttttaagtt

SEQ ID NO: 19891 - DNA, 20 bp, synthetic construct
  misc_feature 1..20: note = chemically synthesized
  source 1..20: mol_type = other DNA
ttttaagttgagcttaaaat

SEQ ID NO: 19892 - DNA, 20 bp, synthetic construct
  misc_feature 1..20: note = chemically synthesized
  source 1..20: mol_type = other DNA
aagttgagcttaaaataagc

SEQ ID NO: 19893 - DNA, 20 bp, synthetic construct
  misc_feature 1..20: note = chemically synthesized
  source 1..20: mol_type = other DNA
gttgagcttaaaataagcta

SEQ ID NO: 19894 - DNA, 20 bp, synthetic construct
  misc_feature 1..20: note = chemically synthesized
  source 1..20: mol_type = other DNA
gcttaaaataagctagagaa

SEQ ID NO: 19895 - DNA, 20 bp, synthetic construct
  misc_feature 1..20: note = chemically synthesized
  source 1..20: mol_type = other DNA
taagctagagaatagatctc

SEQ ID NO: 19896 - DNA, 20 bp, synthetic construct
  misc_feature 1..20: note = chemically synthesized
  source 1..20: mol_type = other DNA
gagaatagatctctggtctg

SEQ ID NO: 19897 - DNA, 20 bp, synthetic construct
  misc_feature 1..20: note = chemically synthesized
  source 1..20: mol_type = other DNA
agaatagatctctggtctga

SEQ ID NO: 19898 - DNA, 20 bp, synthetic construct
  misc_feature 1..20: note = chemically synthesized
  source 1..20: mol_type = other DNA
ctggtctgaaggtttattta

SEQ ID NO: 19899 - DNA, 20 bp, synthetic construct
  misc_feature 1..20: note = chemically synthesized
  source 1..20: mol_type = other DNA
tggtctgaaggtttatttac

SEQ ID NO: 19900 - DNA, 20 bp, synthetic construct
  misc_feature 1..20: note = chemically synthesized
  source 1..20: mol_type = other DNA
tatttacgggcttttctcac

SEQ ID NO: 19901 - DNA, 20 bp, synthetic construct
  misc_feature 1..20: note = chemically synthesized
  source 1..20: mol_type = other DNA
tctctgctcatcccactaca

SEQ ID NO: 19902 - DNA, 20 bp, synthetic construct
  misc_feature 1..20: note = chemically synthesized
  source 1..20: mol_type = other DNA
tcccactacacagaatctgt

SEQ ID NO: 19903 - DNA, 20 bp, synthetic construct
  misc_feature 1..20: note = chemically synthesized
  source 1..20: mol_type = other DNA
agaatctgttagaaaatata

SEQ ID NO: 19904 - DNA, 20 bp, synthetic construct
  misc_feature 1..20: note = chemically synthesized
  source 1..20: mol_type = other DNA
gttagaaaatataaagaata

SEQ ID NO: 19905 - DNA, 20 bp, synthetic construct
  misc_feature 1..20: note = chemically synthesized
  source 1..20: mol_type = other DNA
ttagaaaatataaagaataa

SEQ ID NO: 19906 - DNA, 20 bp, synthetic construct
  misc_feature 1..20: note = chemically synthesized
  source 1..20: mol_type = other DNA
atataaagaataaaggatat

SEQ ID NO: 19907 - DNA, 20 bp, synthetic construct
  misc_feature 1..20: note = chemically synthesized
  source 1..20: mol_type = other DNA
ataaagaataaaggatatca

SEQ ID NO: 19908 - DNA, 20 bp, synthetic construct
  misc_feature 1..20: note = chemically synthesized
  source 1..20: mol_type = other DNA
agaataaaggatatcagagc

SEQ ID NO: 19909 - DNA, 20 bp, synthetic construct
  misc_feature 1..20: note = chemically synthesized
  source 1..20: mol_type = other DNA
ataaaggatatcagagctag

SEQ ID NO: 19910 - DNA, 20 bp, synthetic construct
  misc_feature 1..20: note = chemically synthesized
  source 1..20: mol_type = other DNA
gaagaacatttacattcatc

SEQ ID NO: 19911 - DNA, 20 bp, synthetic construct
  misc_feature 1..20: note = chemically synthesized
  source 1..20: mol_type = other DNA
atttacattcatctagtcaa

SEQ ID NO: 19912 - DNA, 20 bp, synthetic construct
  misc_feature 1..20: note = chemically synthesized
  source 1..20: mol_type = other DNA
ctagtcaaaagcccacattt

SEQ ID NO: 19913 - DNA, 20 bp, synthetic construct
  misc_feature 1..20: note = chemically synthesized
  source 1..20: mol_type = other DNA
aaaagcccacattttagtaa

SEQ ID NO: 19914 - DNA, 20 bp, synthetic construct
  misc_feature 1..20: note = chemically synthesized
  source 1..20: mol_type = other DNA
agtaaaagaaattactatcc

SEQ ID NO: 19915 - DNA, 20 bp, synthetic construct
  misc_feature 1..20: note = chemically synthesized
  source 1..20: mol_type = other DNA
aaaagaaattactatccaag

SEQ ID NO: 19916 - DNA, 20 bp, synthetic construct
  misc_feature 1..20: note = chemically synthesized
  source 1..20: mol_type = other DNA
aagaagcaaatgatttgtac

SEQ ID NO: 19917 - DNA, 20 bp, synthetic construct
  misc_feature 1..20: note = chemically synthesized
  source 1..20: mol_type = other DNA
aaatgatttgtacaagatca

SEQ ID NO: 19918 - DNA, 20 bp, synthetic construct
  misc_feature 1..20: note = chemically synthesized
  source 1..20: mol_type = other DNA
aatgatttgtacaagatcac

SEQ ID NO: 19919 - DNA, 20 bp, synthetic construct
  misc_feature 1..20: note = chemically synthesized
  source 1..20: mol_type = other DNA
atgatttgtacaagatcaca

SEQ ID NO: 19920 - DNA, 20 bp, synthetic construct
  misc_feature 1..20: note = chemically synthesized
  source 1..20: mol_type = other DNA
aagatcacagggcttttcaa

SEQ ID NO: 19921 - DNA, 20 bp, synthetic construct
  misc_feature 1..20: note = chemically synthesized
  source 1..20: mol_type = other DNA
tcacagggcttttcaacagt

SEQ ID NO: 19922 - DNA, 20 bp, synthetic construct
  misc_feature 1..20: note = chemically synthesized
  source 1..20: mol_type = other DNA
cacagggcttttcaacagta

SEQ ID NO: 19923 - DNA, 20 bp, synthetic construct
  misc_feature 1..20: note = chemically synthesized
  source 1..20: mol_type = other DNA
cttttcaacagtaaggctaa

SEQ ID NO: 19924 - DNA, 20 bp, synthetic construct
  misc_feature 1..20: note = chemically synthesized
  source 1..20: mol_type = other DNA
ttttcaacagtaaggctaaa

SEQ ID NO: 19925 - DNA, 20 bp, synthetic construct
  misc_feature 1..20: note = chemically synthesized
  source 1..20: mol_type = other DNA
aacagtaaggctaaaaggtt

SEQ ID NO: 19926 - DNA, 20 bp, synthetic construct
  misc_feature 1..20: note = chemically synthesized
  source 1..20: mol_type = other DNA
aagaaaattctgattatctt

SEQ ID NO: 19927 - DNA, 20 bp, synthetic construct
  misc_feature 1..20: note = chemically synthesized
  source 1..20: mol_type = other DNA
gaaaattctgattatcttaa

SEQ ID NO: 19928 - DNA, 20 bp, synthetic construct
  misc_feature 1..20: note = chemically synthesized
  source 1..20: mol_type = other DNA
ttaagagttgctattaatta

SEQ ID NO: 19929 - DNA, 20 bp, synthetic construct
  misc_feature 1..20: note = chemically synthesized
  source 1..20: mol_type = other DNA
acttaaaccaactttaaatg

SEQ ID NO: 19930 - DNA, 20 bp, synthetic construct
  misc_feature 1..20: note = chemically synthesized
  source 1..20: mol_type = other DNA
ttaaaccaactttaaatgta

SEQ ID NO: 19931 - DNA, 20 bp, synthetic construct
  misc_feature 1..20: note = chemically synthesized
  source 1..20: mol_type = other DNA
taaaccaactttaaatgtag

SEQ ID NO: 19932 - DNA, 20 bp, synthetic construct
  misc_feature 1..20: note = chemically synthesized
  source 1..20: mol_type = other DNA
aaaccaactttaaatgtaga

SEQ ID NO: 19933 - DNA, 20 bp, synthetic construct
  misc_feature 1..20: note = chemically synthesized
  source 1..20: mol_type = other DNA
aaccaactttaaatgtagag

SEQ ID NO: 19934 - DNA, 20 bp, synthetic construct
  misc_feature 1..20: note = chemically synthesized
  source 1..20: mol_type = other DNA
accaactttaaatgtagagg

SEQ ID NO: 19935 - DNA, 20 bp, synthetic construct
  misc_feature 1..20: note = chemically synthesized
  source 1..20: mol_type = other DNA
ttaaatgtagagggggatcc

SEQ ID NO: 19936 - DNA, 20 bp, synthetic construct
  misc_feature 1..20: note = chemically synthesized
  source 1..20: mol_type = other DNA
atcccaccccaacccccaca

SEQ ID NO: 19937 - DNA, 20 bp, synthetic construct
  misc_feature 1..20: note = chemically synthesized
  source 1..20: mol_type = other DNA
atattattgttctctgtaaa

SEQ ID NO: 19938 - DNA, 20 bp, synthetic construct
  misc_feature 1..20: note = chemically synthesized
  source 1..20: mol_type = other DNA
cggaaacaacctgttgtcta

SEQ ID NO: 19939 - DNA, 20 bp, synthetic construct
  misc_feature 1..20: note = chemically synthesized
  source 1..20: mol_type = other DNA
gaaacaacctgttgtctaaa

SEQ ID NO: 19940 - DNA, 20 bp, synthetic construct
  misc_feature 1..20: note = chemically synthesized
  source 1..20: mol_type = other DNA
tgtctaaagagttttaacta

SEQ ID NO: 19941 - DNA, 20 bp, synthetic construct
  misc_feature 1..20: note = chemically synthesized
  source 1..20: mol_type = other DNA
gtctaaagagttttaactat

SEQ ID NO: 19942 - DNA, 20 bp, synthetic construct
  misc_feature 1..20: note = chemically synthesized
  source 1..20: mol_type = other DNA
gagttttaactatgggctca

SEQ ID NO: 19943 - DNA, 20 bp, synthetic construct
  misc_feature 1..20: note = chemically synthesized
  source 1..20: mol_type = other DNA
agttttaactatgggctcac

SEQ ID NO: 19944 - DNA, 20 bp, synthetic construct
  misc_feature 1..20: note = chemically synthesized
  source 1..20: mol_type = other DNA
ttaactatgggctcacgggt

SEQ ID NO: 19945 - DNA, 20 bp, synthetic construct
  misc_feature 1..20: note = chemically synthesized
  source 1..20: mol_type = other DNA
gggctcacgggtgagctaaa

SEQ ID NO: 19946 - DNA, 20 bp, synthetic construct
  misc_feature 1..20: note = chemically synthesized
  source 1..20: mol_type = other DNA
ggctcacgggtgagctaaac

SEQ ID NO: 19947 - DNA, 20 bp, synthetic construct
  misc_feature 1..20: note = chemically synthesized
  source 1..20: mol_type = other DNA
acaggtttcccatctttttc

SEQ ID NO: 19948 - DNA, 20 bp, synthetic construct
  misc_feature 1..20: note = chemically synthesized
  source 1..20: mol_type = other DNA
ttcccatctttttctggacc

SEQ ID NO: 19949 - DNA, 20 bp, synthetic construct
  misc_feature 1..20: note = chemically synthesized
  source 1..20: mol_type = other DNA
tcccatctttttctggaccc

SEQ ID NO: 19950 - DNA, 20 bp, synthetic construct
  misc_feature 1..20: note = chemically synthesized
  source 1..20: mol_type = other DNA
tttttctggacccaggatct

SEQ ID NO: 19951 - DNA, 20 bp, synthetic construct
  misc_feature 1..20: note = chemically synthesized
  source 1..20: mol_type = other DNA
ttctggacccaggatcttag

SEQ ID NO: 19952 - DNA, 20 bp, synthetic construct
  misc_feature 1..20: note = chemically synthesized
  source 1..20: mol_type = other DNA
tctggacccaggatcttagt

SEQ ID NO: 19953 - DNA, 20 bp, synthetic construct
  misc_feature 1..20: note = chemically synthesized
  source 1..20: mol_type = other DNA
ctggacccaggatcttagtg

SEQ ID NO: 19954 - DNA, 20 bp, synthetic construct
  misc_feature 1..20: note = chemically synthesized
  source 1..20: mol_type = other DNA
tattttgttgcccttcaaac

SEQ ID NO: 19955 - DNA, 20 bp, synthetic construct
  misc_feature 1..20: note = chemically synthesized
  source 1..20: mol_type = other DNA
ttgttgcccttcaaaccagt

SEQ ID NO: 19956 - DNA, 20 bp, synthetic construct
  misc_feature 1..20: note = chemically synthesized
  source 1..20: mol_type = other DNA
tcaaaccagtaagcatttat

SEQ ID NO: 19957 - DNA, 20 bp, synthetic construct
  misc_feature 1..20: note = chemically synthesized
  source 1..20: mol_type = other DNA
caaaccagtaagcatttatg

SEQ ID NO: 19958 - DNA, 20 bp, synthetic construct
  misc_feature 1..20: note = chemically synthesized
  source 1..20: mol_type = other DNA
tatgaggactcacactatgc

SEQ ID NO: 19959 - DNA, 20 bp, synthetic construct
  misc_feature 1..20: note = chemically synthesized
  source 1..20: mol_type = other DNA
ctcacactatgccagataca

SEQ ID NO: 19960 - DNA, 20 bp, synthetic construct
  misc_feature 1..20: note = chemically synthesized
  source 1..20: mol_type = other DNA
tcacactatgccagatacat

SEQ ID NO: 19961 - DNA, 20 bp, synthetic construct
  misc_feature 1..20: note = chemically synthesized
  source 1..20: mol_type = other DNA
cactatgccagatacatagg

SEQ ID NO: 19962 - DNA, 20 bp, synthetic construct
  misc_feature 1..20: note = chemically synthesized
  source 1..20: mol_type = other DNA
tatgccagatacataggtgg

SEQ ID NO: 19963 - DNA, 20 bp, synthetic construct
  misc_feature 1..20: note = chemically synthesized
  source 1..20: mol_type = other DNA
atgccagatacataggtggc

SEQ ID NO: 19964 - DNA, 20 bp, synthetic construct
  misc_feature 1..20: note = chemically synthesized
  source 1..20: mol_type = other DNA
ggtggcaggattcttcactc

SEQ ID NO: 19965 - DNA, 20 bp, synthetic construct
  misc_feature 1..20: note = chemically synthesized
  source 1..20: mol_type = other DNA
ctccagatataatctatctg

SEQ ID NO: 19966 - DNA, 20 bp, synthetic construct
  misc_feature 1..20: note = chemically synthesized
  source 1..20: mol_type = other DNA
gatagattatatctggagtg

SEQ ID NO: 19967 - DNA, 20 bp, synthetic construct
  misc_feature 1..20: note = chemically synthesized
  source 1..20: mol_type = other DNA
acctatgtatctggcatagt

SEQ ID NO: 19968 - DNA, 20 bp, synthetic construct
  misc_feature 1..20: note = chemically synthesized
  source 1..20: mol_type = other DNA
aagggcaacaaaatagtgaa

SEQ ID NO: 19969 - DNA, 20 bp, synthetic construct
  misc_feature 1..20: note = chemically synthesized
  source 1..20: mol_type = other DNA
tgaaaatccccactaagatc

SEQ ID NO: 19970 - DNA, 20 bp, synthetic construct
  misc_feature 1..20: note = chemically synthesized
  source 1..20: mol_type = other DNA
gtttacagagaacaataata

SEQ ID NO: 19971 - DNA, 20 bp, synthetic construct
  misc_feature 1..20: note = chemically synthesized
  source 1..20: mol_type = other DNA
tgggtggtgagcatctgtgt

SEQ ID NO: 19972 - DNA, 20 bp, synthetic construct
  misc_feature 1..20: note = chemically synthesized
  source 1..20: mol_type = other DNA
gtgagcatctgtgtgggggt

SEQ ID NO: 19973 - DNA, 20 bp, synthetic construct
  misc_feature 1..20: note = chemically synthesized
  source 1..20: mol_type = other DNA
catctgtgtgggggttgggg

SEQ ID NO: 19974 - DNA, 20 bp, synthetic construct
  misc_feature 1..20: note = chemically synthesized
  source 1..20: mol_type = other DNA
gtgggggttggggtgggata

SEQ ID NO: 19975 - DNA, 20 bp, synthetic construct
  misc_feature 1..20: note = chemically synthesized
  source 1..20: mol_type = other DNA
ggtgggataggggatacggg

SEQ ID NO: 19976 - DNA, 20 bp, synthetic construct
  misc_feature 1..20: note = chemically synthesized
  source 1..20: mol_type = other DNA
gagtggagaaaaaggggaca

SEQ ID NO: 19977 - DNA, 20 bp, synthetic construct
  misc_feature 1..20: note = chemically synthesized
  source 1..20: mol_type = other DNA
cacagggttaatgtgaagtc

SEQ ID NO: 19978 - DNA, 20 bp, synthetic construct
  misc_feature 1..20: note = chemically synthesized
  source 1..20: mol_type = other DNA
atagcaactcttaagataat

SEQ ID NO: 19979 - DNA, 20 bp, synthetic construct
  misc_feature 1..20: note = chemically synthesized
  source 1..20: mol_type = other DNA
ttgtacaaatcatttgcttc

SEQ ID NO: 19980 - DNA, 20 bp, synthetic construct
  misc_feature 1..20: note = chemically synthesized
  source 1..20: mol_type = other DNA
aaatgtgggcttttgactag

SEQ ID NO: 19981 - DNA, 20 bp, synthetic construct
  misc_feature 1..20: note = chemically synthesized
  source 1..20: mol_type = other DNA
ttctaacagattctgtgtag

SEQ ID NO: 19982 - DNA, 20 bp, synthetic construct
  misc_feature 1..20: note = chemically synthesized
  source 1..20: mol_type = other DNA
ggagagtttcttgtagggga

SEQ ID NO: 19983 - DNA, 20 bp, synthetic construct
  misc_feature 1..20: note = chemically synthesized
  source 1..20: mol_type = other DNA
aaatgctgtttcttttgaag

SEQ ID NO: 19984 - DNA, 20 bp, synthetic construct
  misc_feature 1..20: note = chemically synthesized
  source 1..20: mol_type = other DNA
ctgtttcttttgaaggaggg

SEQ ID NO: 19985 - DNA, 20 bp, synthetic construct
  misc_feature 1..20: note = chemically synthesized
  source 1..20: mol_type = other DNA
ttaagtgtattgaaggcgaa

SEQ ID NO: 19986 - DNA, 20 bp, synthetic construct
  misc_feature 1..20: note = chemically synthesized
  source 1..20: mol_type = other DNA
gttgagcttaaaataagcta

SEQ ID NO: 19987 - DNA, 20 bp, synthetic construct
  misc_feature 1..20: note = chemically synthesized
  source 1..20: mol_type = other DNA
ttatttacgggcttttctca

SEQ ID NO: 19988 - DNA, 20 bp, synthetic construct
  misc_feature 1..20: note = chemically synthesized
  source 1..20: mol_type = other DNA
tctctgctcatcccactaca

SEQ ID NO: 19989 - DNA, 20 bp, synthetic construct
  misc_feature 1..20: note = chemically synthesized
  source 1..20: mol_type = other DNA
agaatctgttagaaaatata

SEQ ID NO: 19990 - DNA, 20 bp, synthetic construct
  misc_feature 1..20: note = chemically synthesized
  source 1..20: mol_type = other DNA
gttagaaaatataaagaata

SEQ ID NO: 19991 - DNA, 20 bp, synthetic construct
  misc_feature 1..20: note = chemically synthesized
  source 1..20: mol_type = other DNA
aagaaaattctgattatctt

SEQ ID NO: 19992 - DNA, 20 bp, synthetic construct
  misc_feature 1..20: note = chemically synthesized
  source 1..20: mol_type = other DNA
aaccaactttaaatgtagag

SEQ ID NO: 19993 - DNA, 20 bp, synthetic construct
  misc_feature 1..20: note = chemically synthesized
  source 1..20: mol_type = other DNA
cggaaacaacctgttgtcta

SEQ ID NO: 19994 - DNA, 20 bp, synthetic construct
  misc_feature 1..20: note = chemically synthesized
  source 1..20: mol_type = other DNA
agagttttaactatgggctc

SEQ ID NO: 19995 - DNA, 20 bp, synthetic construct
  misc_feature 1..20: note = chemically synthesized
  source 1..20: mol_type = other DNA
ttcccatctttttctggacc

SEQ ID NO: 19996 - DNA, 20 bp, synthetic construct
  misc_feature 1..20: note = chemically synthesized
  source 1..20: mol_type = other DNA
tctggacccaggatcttagt

SEQ ID NO: 19997 - DNA, 20 bp, synthetic construct
  misc_feature 1..20: note = chemically synthesized
  source 1..20: mol_type = other DNA
tatgccagatacataggtgg

SEQ ID NO: 19998 - DNA, 20 bp, synthetic construct
  misc_feature 1..20: note = chemically synthesized
  source 1..20: mol_type = other DNA
agatagattatatctggagt

SEQ ID NO: 19999 - DNA, 20 bp, synthetic construct
  misc_feature 1..20: note = chemically synthesized
  source 1..20: mol_type = other DNA
tccccactaagatcctgggt

SEQ ID NO: 20000 - DNA, 20 bp, synthetic construct
  misc_feature 1..20: note = chemically synthesized
  source 1..20: mol_type = other DNA
ataggggatacggggagagt

SEQ ID NO: 20001 - DNA, 20 bp, synthetic construct
  misc_feature 1..20: note = chemically synthesized
  source 1..20: mol_type = other DNA
aatagcaactcttaagataa

SEQ ID NO: 20002 - DNA, 20 bp, synthetic construct
  misc_feature 1..20: note = chemically synthesized
  source 1..20: mol_type = other DNA
acaaaaacaaaataatccag

SEQ ID NO: 20003 - DNA, 20 bp, synthetic construct
  misc_feature 1..20: note = chemically synthesized
  source 1..20: mol_type = other DNA
tttaactccaccctccttca

SEQ ID NO: 20004 - DNA, 20 bp, synthetic construct
  misc_feature 1..20: note = chemically synthesized
  source 1..20: mol_type = other DNA
ctgagacatccgttccccta

SEQ ID NO: 20005 - DNA, 20 bp, synthetic construct
  misc_feature 1..20: note = chemically synthesized
  source 1..20: mol_type = other DNA
attaagtgtattgaaggcga

SEQ ID NO: 20006 - DNA, 20 bp, synthetic construct
  misc_feature 1..20: note = chemically synthesized
  source 1..20: mol_type = other DNA
agttgagcttaaaataagct

SEQ ID NO: 20007 - DNA, 20 bp, synthetic construct
  misc_feature 1..20: note = chemically synthesized
  source 1..20: mol_type = other DNA
ttctctgctcatcccactac

SEQ ID NO: 20008 - DNA, 20 bp, synthetic construct
  misc_feature 1..20: note = chemically synthesized
  source 1..20: mol_type = other DNA
atcccactacacagaatctg

SEQ ID NO: 20009 - DNA, 20 bp, synthetic construct
  misc_feature 1..20: note = chemically synthesized
  source 1..20: mol_type = other DNA
cagaatctgttagaaaatat

SEQ ID NO: 20010 - DNA, 20 bp, synthetic construct
  misc_feature 1..20: note = chemically synthesized
  source 1..20: mol_type = other DNA
caaaagcccacattttagta

SEQ ID NO: 20011 - DNA, 20 bp, synthetic construct
  misc_feature 1..20: note = chemically synthesized
  source 1..20: mol_type = other DNA
caacagtaaggctaaaaggt

SEQ ID NO: 20012 - DNA, 20 bp, synthetic construct
  misc_feature 1..20: note = chemically synthesized
  source 1..20: mol_type = other DNA
ctcacccgtgagcccatagt

SEQ ID NO: 20013 - DNA, 20 bp, synthetic construct
  misc_feature 1..20: note = chemically synthesized
  source 1..20: mol_type = other DNA
tagtgggatgagcagagaac

SEQ ID NO: 20014 - DNA, 20 bp, synthetic construct
  misc_feature 1..20: note = chemically synthesized
  source 1..20: mol_type = other DNA
ggcatagtgtgagtcctcat

SEQ ID NO: 20015 - DNA, 20 bp, synthetic construct
  misc_feature 1..20: note = chemically synthesized
  source 1..20: mol_type = other DNA
gtgagtcctcataaatgctt

SEQ ID NO: 20016 - DNA, 20 bp, synthetic construct
  misc_feature 1..20: note = chemically synthesized
  source 1..20: mol_type = other DNA
ggtccagaaaaagatgggaa

SEQ ID NO: 20017 - DNA, 20 bp, synthetic construct
  misc_feature 1..20: note = chemically synthesized
  source 1..20: mol_type = other DNA
ttaaaactctttagacaaca

SEQ ID NO: 20018 - DNA, 20 bp, synthetic construct
  misc_feature 1..20: note = chemically synthesized
  source 1..20: mol_type = other DNA
ctctttagacaacaggttgt

SEQ ID NO: 20019 - DNA, 20 bp, synthetic construct
  misc_feature 1..20: note = chemically synthesized
  source 1..20: mol_type = other DNA
gatccccctctacatttaaa

SEQ ID NO: 20020 - DNA, 20 bp, synthetic construct
  misc_feature 1..20: note = chemically synthesized
  source 1..20: mol_type = other DNA
tacatttaaagttggtttaa

SEQ ID NO: 20021 - DNA, 20 bp, synthetic construct
  misc_feature 1..20: note = chemically synthesized
  source 1..20: mol_type = other DNA
cctgtgatcttgtacaaatc

SEQ ID NO: 20022 - DNA, 20 bp, synthetic construct
  misc_feature 1..20: note = chemically synthesized
  source 1..20: mol_type = other DNA
gtaatttcttttactaaaat

SEQ ID NO: 20023 - DNA, 20 bp, synthetic construct
  misc_feature 1..20: note = chemically synthesized
  source 1..20: mol_type = other DNA
ctttattctttatattttct

SEQ ID NO: 20024 - DNA, 20 bp, synthetic construct
  misc_feature 1..20: note = chemically synthesized
  source 1..20: mol_type = other DNA
ttcagaccagagatctattc

SEQ ID NO: 20025 - DNA, 20 bp, synthetic construct
  misc_feature 1..20: note = chemically synthesized
  source 1..20: mol_type = other DNA
acttaaaaagaagaactgtt

SEQ ID NO: 20026 - DNA, 20 bp, synthetic construct
  misc_feature 1..20: note = chemically synthesized
  source 1..20: mol_type = other DNA
cttttcgccttcaatacact

SEQ ID NO: 20027 - DNA, 20 bp, synthetic construct
  misc_feature 1..20: note = chemically synthesized
  source 1..20: mol_type = other DNA
ttcctacttttatactgtct

SEQ ID NO: 20028 - DNA, 20 bp, synthetic construct
  misc_feature 1..20: note = chemically synthesized
  source 1..20: mol_type = other DNA
tacttttatactgtctatat

SEQ ID NO: 20029 - DNA, 20 bp, synthetic construct
  misc_feature 1..20: note = chemically synthesized
  source 1..20: mol_type = other DNA
gacagtataaaagtaggaaa

SEQ ID NO: 20030 - DNA, 20 bp, synthetic construct
  misc_feature 1..20: note = chemically synthesized
  source 1..20: mol_type = other DNA
gaacagttcttctttttaag

SEQ ID NO: 20031 - DNA, 20 bp, synthetic construct
  misc_feature 1..20: note = chemically synthesized
  source 1..20: mol_type = other DNA
agagaatagatctctggtct

SEQ ID NO: 20032 - DNA, 20 bp, synthetic construct
  misc_feature 1..20: note = chemically synthesized
  source 1..20: mol_type = other DNA
tctggtctgaaggtttattt

SEQ ID NO: 20033 - DNA, 20 bp, synthetic construct
  misc_feature 1..20: note = chemically synthesized
  source 1..20: mol_type = other DNA
tttatttacgggcttttctc

SEQ ID NO: 20034 - DNA, 20 bp, synthetic construct
  misc_feature 1..20: note = chemically synthesized
  source 1..20: mol_type = other DNA
gggcttttctcactggatta

SEQ ID NO: 20035 - DNA, 20 bp, synthetic construct
  misc_feature 1..20: note = chemically synthesized
  source 1..20: mol_type = other DNA
gaaattactatccaagaagc

SEQ ID NO: 20036 - DNA, 20 bp, synthetic construct
  misc_feature 1..20: note = chemically synthesized
  source 1..20: mol_type = other DNA
aaatgatttgtacaagatca

SEQ ID NO: 20037 - DNA, 20 bp, synthetic construct
  misc_feature 1..20: note = chemically synthesized
  source 1..20: mol_type = other DNA
aggctaaaaggttaagaaaa

SEQ ID NO: 20038 - DNA, 20 bp, synthetic construct
  misc_feature 1..20: note = chemically synthesized
  source 1..20: mol_type = other DNA
cggaaacaacctgttgtcta

SEQ ID NO: 20039 - DNA, 20 bp, synthetic construct
  misc_feature 1..20: note = chemically synthesized
  source 1..20: mol_type = other DNA
tgggctcacgggtgagctaa

SEQ ID NO: 20040 - DNA, 20 bp, synthetic construct
  misc_feature 1..20: note = chemically synthesized
  source 1..20: mol_type = other DNA
ttctggacccaggatcttag

SEQ ID NO: 20041 - DNA, 20 bp, synthetic construct
  misc_feature 1..20: note = chemically synthesized
  source 1..20: mol_type = other DNA
ctatgccagatacataggtg

SEQ ID NO: 20042 - DNA, 22 bp, synthetic construct
  misc_feature 1..22: note = chemically synthesized
  source 1..22: mol_type = other DNA
cagatagattatatctggagtg

SEQ ID NO: 20043 - DNA, 22 bp, synthetic construct
  misc_feature 1..22: note = chemically synthesized
  source 1..22: mol_type = other DNA
agatagattatatctggagtga

SEQ ID NO: 20044 - DNA, 22 bp, synthetic construct
  misc_feature 1..22: note = chemically synthesized
  source 1..22: mol_type = other DNA
tatctggagtgaagaatcctgc

SEQ ID NO: 20045 - DNA, 22 bp, synthetic construct
  misc_feature 1..22: note = chemically synthesized
  source 1..22: mol_type = other DNA
gagtgaagaatcctgccaccta

SEQ ID NO: 20046 - DNA, 22 bp, synthetic construct
  misc_feature 1..22: note = chemically synthesized
  source 1..22: mol_type = other DNA
ccacctatgtatctggcatagt

SEQ ID NO: 20047 - DNA, 22 bp, synthetic construct
  misc_feature 1..22: note = chemically synthesized
  source 1..22: mol_type = other DNA
tgtatctggcatagtgtgagtc

SEQ ID NO: 20048 - DNA, 22 bp, synthetic construct
  misc_feature 1..22: note = chemically synthesized
  source 1..22: mol_type = other DNA
gcatagtgtgagtcctcataaa

SEQ ID NO: 20049 - DNA, 22 bp, synthetic construct
  misc_feature 1..22: note = chemically synthesized
  source 1..22: mol_type = other DNA
ataaatgcttactggtttgaag

SEQ ID NO: 20050 - DNA, 22 bp, synthetic construct
  misc_feature 1..22: note = chemically synthesized
  source 1..22: mol_type = other DNA
actggtttgaagggcaacaaaa

SEQ ID NO: 20051 - DNA, 22 bp, synthetic construct
  misc_feature 1..22: note = chemically synthesized
  source 1..22: mol_type = other DNA
ctggtttgaagggcaacaaaat

SEQ ID NO: 20052 - DNA, 22 bp, synthetic construct
  misc_feature 1..22: note = chemically synthesized
  source 1..22: mol_type = other DNA
gtttgaagggcaacaaaatagt

SEQ ID NO: 20053 - DNA, 22 bp, synthetic construct
  misc_feature 1..22: note = chemically synthesized
  source 1..22: mol_type = other DNA
gaagggcaacaaaatagtgaac

SEQ ID NO: 20054 - DNA, 22 bp, synthetic construct
  misc_feature 1..22: note = chemically synthesized
  source 1..22: mol_type = other DNA
aagggcaacaaaatagtgaaca

SEQ ID NO: 20055 - DNA, 22 bp, synthetic construct
  misc_feature 1..22: note = chemically synthesized
  source 1..22: mol_type = other DNA
agatcctgggtccagaaaaaga

SEQ ID NO: 20056 - DNA, 22 bp, synthetic construct
  misc_feature 1..22: note = chemically synthesized
  source 1..22: mol_type = other DNA
ggtccagaaaaagatgggaaac

SEQ ID NO: 20057 - DNA, 22 bp, synthetic construct
  misc_feature 1..22: note = chemically synthesized
  source 1..22: mol_type = other DNA
tttagctcacccgtgagcccat

SEQ ID NO: 20058 - DNA, 22 bp, synthetic construct
  misc_feature 1..22: note = chemically synthesized
  source 1..22: mol_type = other DNA
agctcacccgtgagcccatagt

SEQ ID NO: 20059 - DNA, 22 bp, synthetic construct
  misc_feature 1..22: note = chemically synthesized
  source 1..22: mol_type = other DNA
gctcacccgtgagcccatagtt

SEQ ID NO: 20060 - DNA, 22 bp, synthetic construct
  misc_feature 1..22: note = chemically synthesized
  source 1..22: mol_type = other DNA
acccgtgagcccatagttaaaa

SEQ ID NO: 20061 - DNA, 22 bp, synthetic construct
  misc_feature 1..22: note = chemically synthesized
  source 1..22: mol_type = other DNA
aaactctttagacaacaggttg

SEQ ID NO: 20062 - DNA, 22 bp, synthetic construct
  misc_feature 1..22: note = chemically synthesized
  source 1..22: mol_type = other DNA
tttagacaacaggttgtttccg

SEQ ID NO: 20063 - DNA, 22 bp, synthetic construct
  misc_feature 1..22: note = chemically synthesized
  source 1..22: mol_type = other DNA
tagacaacaggttgtttccgtt

SEQ ID NO: 20064 - DNA, 22 bp, synthetic construct
  misc_feature 1..22: note = chemically synthesized
  source 1..22: mol_type = other DNA
agacaacaggttgtttccgttt

SEQ ID NO: 20065 - DNA, 22 bp, synthetic construct
  misc_feature 1..22: note = chemically synthesized
  source 1..22: mol_type = other DNA
gacaacaggttgtttccgttta

SEQ ID NO: 20066 - DNA, 22 bp, synthetic construct
  misc_feature 1..22: note = chemically synthesized
  source 1..22: mol_type = other DNA
tttccgtttacagagaacaata

SEQ ID NO: 20067 - DNA, 22 bp, synthetic construct
  misc_feature 1..22: note = chemically synthesized
  source 1..22: mol_type = other DNA
ccgtttacagagaacaataata

SEQ ID NO: 20068 - DNA, 22 bp, synthetic construct
  misc_feature 1..22: note = chemically synthesized
  source 1..22: mol_type = other DNA
cgtttacagagaacaataatat

SEQ ID NO: 20069 - DNA, 22 bp, synthetic construct
  misc_feature 1..22: note = chemically synthesized
  source 1..22: mol_type = other DNA
acagagaacaataatattgggt

SEQ ID NO: 20070 - DNA, 22 bp, synthetic construct
  misc_feature 1..22: note = chemically synthesized
  source 1..22: mol_type = other DNA
cagagaacaataatattgggtg

SEQ ID NO: 20071 - DNA, 22 bp, synthetic construct
  misc_feature 1..22: note = chemically synthesized
  source 1..22: mol_type = other DNA
ggtggtgagcatctgtgtgggg

SEQ ID NO: 20072 - DNA, 22 bp, synthetic construct
  misc_feature 1..22: note = chemically synthesized
  source 1..22: mol_type = other DNA
tgtgggggttggggtgggatag

SEQ ID NO: 20073 - DNA, 22 bp, synthetic construct
  misc_feature 1..22: note = chemically synthesized
  source 1..22: mol_type = other DNA
gggtgggataggggatacgggg

SEQ ID NO: 20074 - DNA, 22 bp, synthetic construct
  misc_feature 1..22: note = chemically synthesized
  source 1..22: mol_type = other DNA
atgtgaagtccaggatccccct

SEQ ID NO: 20075 - DNA, 22 bp, synthetic construct
  misc_feature 1..22: note = chemically synthesized
  source 1..22: mol_type = other DNA
tacatttaaagttggtttaagt

SEQ ID NO: 20076 - DNA, 22 bp, synthetic construct
  misc_feature 1..22: note = chemically synthesized
  source 1..22: mol_type = other DNA
catttaaagttggtttaagttg

SEQ ID NO: 20077 - DNA, 22 bp, synthetic construct
  misc_feature 1..22: note = chemically synthesized
  source 1..22: mol_type = other DNA
aaagttggtttaagttggcttt

SEQ ID NO: 20078 - DNA, 22 bp, synthetic construct
  misc_feature 1..22: note = chemically synthesized
  source 1..22: mol_type = other DNA
aagttggtttaagttggcttta

SEQ ID NO: 20079 - DNA, 22 bp, synthetic construct
  misc_feature 1..22: note = chemically synthesized
  source 1..22: mol_type = other DNA
gtttaagttggctttaattaat

SEQ ID NO: 20080 - DNA, 22 bp, synthetic construct
  misc_feature 1..22: note = chemically synthesized
  source 1..22: mol_type = other DNA
aagttggctttaattaatagca

SEQ ID NO: 20081 - DNA, 22 bp, synthetic construct
  misc_feature 1..22: note = chemically synthesized
  source 1..22: mol_type = other DNA
agttggctttaattaatagcaa

SEQ ID NO: 20082 - DNA, 22 bp, synthetic construct
  misc_feature 1..22: note = chemically synthesized
  source 1..22: mol_type = other DNA
gctttaattaatagcaactctt

SEQ ID NO: 20083 - DNA, 22 bp, synthetic construct
  misc_feature 1..22: note = chemically synthesized
  source 1..22: mol_type = other DNA
taattaatagcaactcttaaga

SEQ ID NO: 20084 - DNA, 22 bp, synthetic construct
  misc_feature 1..22: note = chemically synthesized
  source 1..22: mol_type = other DNA
aattaatagcaactcttaagat

SEQ ID NO: 20085 - DNA, 22 bp, synthetic construct
  misc_feature 1..22: note = chemically synthesized
  source 1..22: mol_type = other DNA
attaatagcaactcttaagata

SEQ ID NO: 20086 - DNA, 22 bp, synthetic construct
  misc_feature 1..22: note = chemically synthesized
  source 1..22: mol_type = other DNA
atagcaactcttaagataatca

SEQ ID NO: 20087 - DNA, 22 bp, synthetic construct
  misc_feature 1..22: note = chemically synthesized
  source 1..22: mol_type = other DNA
ttaagataatcagaattttctt

SEQ ID NO: 20088 - DNA, 22 bp, synthetic construct
  misc_feature 1..22: note = chemically synthesized
  source 1..22: mol_type = other DNA
aagataatcagaattttcttaa

SEQ ID NO: 20089 - DNA, 22 bp, synthetic construct
  misc_feature 1..22: note = chemically synthesized
  source 1..22: mol_type = other DNA
agataatcagaattttcttaac

SEQ ID NO: 20090 - DNA, 22 bp, synthetic construct
  misc_feature 1..22: note = chemically synthesized
  source 1..22: mol_type = other DNA
tcttaaccttttagccttactg

SEQ ID NO: 20091 - DNA, 22 bp, synthetic construct
  misc_feature 1..22: note = chemically synthesized
  source 1..22: mol_type = other DNA
cttaaccttttagccttactgt

SEQ ID NO: 20092 - DNA, 22 bp, synthetic construct
  misc_feature 1..22: note = chemically synthesized
  source 1..22: mol_type = other DNA
ttaaccttttagccttactgtt

SEQ ID NO: 20093 - DNA, 22 bp, synthetic construct
  misc_feature 1..22: note = chemically synthesized
  source 1..22: mol_type = other DNA
aaccttttagccttactgttga

SEQ ID NO: 20094 - DNA, 22 bp, synthetic construct
  misc_feature 1..22: note = chemically synthesized
  source 1..22: mol_type = other DNA
accttttagccttactgttgaa

SEQ ID NO: 20095 - DNA, 22 bp, synthetic construct
  misc_feature 1..22: note = chemically synthesized
  source 1..22: mol_type = other DNA
ttagccttactgttgaaaagcc

SEQ ID NO: 20096 - DNA, 22 bp, synthetic construct
  misc_feature 1..22: note = chemically synthesized
  source 1..22: mol_type = other DNA
tagccttactgttgaaaagccc

SEQ ID NO: 20097 - DNA, 22 bp, synthetic construct
  misc_feature 1..22: note = chemically synthesized
  source 1..22: mol_type = other DNA
agccttactgttgaaaagccct

SEQ ID NO: 20098 - DNA, 22 bp, synthetic construct
  misc_feature 1..22: note = chemically synthesized
  source 1..22: mol_type = other DNA
gccttactgttgaaaagccctg

SEQ ID NO: 20099 - DNA, 22 bp, synthetic construct
  misc_feature 1..22: note = chemically synthesized
  source 1..22: mol_type = other DNA
actgttgaaaagccctgtgatc

SEQ ID NO: 20100 - DNA, 22 bp, synthetic construct
  misc_feature 1..22: note = chemically synthesized
  source 1..22: mol_type = other DNA
ctgttgaaaagccctgtgatct

SEQ ID NO: 20101 - DNA, 22 bp, synthetic construct
  misc_feature 1..22: note = chemically synthesized
  source 1..22: mol_type = other DNA
ttgaaaagccctgtgatcttgt

SEQ ID NO: 20102 - DNA, 22 bp, synthetic construct
  misc_feature 1..22: note = chemically synthesized
  source 1..22: mol_type = other DNA
aaaagccctgtgatcttgtaca

SEQ ID NO: 20103 - DNA, 22 bp, synthetic construct
  misc_feature 1..22: note = chemically synthesized
  source 1..22: mol_type = other DNA
tgatcttgtacaaatcatttgc

SEQ ID NO: 20104 - DNA, 22 bp, synthetic construct
  misc_feature 1..22: note = chemically synthesized
  source 1..22: mol_type = other DNA
gtacaaatcatttgcttcttgg

SEQ ID NO: 20105 - DNA, 22 bp, synthetic construct
  misc_feature 1..22: note = chemically synthesized
  source 1..22: mol_type = other DNA
tacaaatcatttgcttcttgga

SEQ ID NO: 20106 - DNA, 22 bp, synthetic construct
  misc_feature 1..22: note = chemically synthesized
  source 1..22: mol_type = other DNA
gcttcttggatagtaatttctt

SEQ ID NO: 20107 - DNA, 22 bp, synthetic construct
  misc_feature 1..22: note = chemically synthesized
  source 1..22: mol_type = other DNA
cttcttggatagtaatttcttt

SEQ ID NO: 20108 - DNA, 22 bp, synthetic construct
  misc_feature 1..22: note = chemically synthesized
  source 1..22: mol_type = other DNA
cttggatagtaatttcttttac

SEQ ID NO: 20109 - DNA, 22 bp, synthetic construct
  misc_feature 1..22: note = chemically synthesized
  source 1..22: mol_type = other DNA
ttggatagtaatttcttttact

SEQ ID NO: 20110 - DNA, 22 bp, synthetic construct
  misc_feature 1..22: note = chemically synthesized
  source 1..22: mol_type = other DNA
ggatagtaatttcttttactaa

SEQ ID NO: 20111 - DNA, 22 bp, synthetic construct
  misc_feature 1..22: note = chemically synthesized
  source 1..22: mol_type = other DNA
gatagtaatttcttttactaaa

SEQ ID NO: 20112 - DNA, 22 bp, synthetic construct
  misc_feature 1..22: note = chemically synthesized
  source 1..22: mol_type = other DNA
cttttactaaaatgtgggcttt

SEQ ID NO: 20113 - DNA, 22 bp, synthetic construct
  misc_feature 1..22: note = chemically synthesized
  source 1..22: mol_type = other DNA
ttttactaaaatgtgggctttt

SEQ ID NO: 20114 - DNA, 22 bp, synthetic construct
  misc_feature 1..22: note = chemically synthesized
  source 1..22: mol_type = other DNA
ttactaaaatgtgggcttttga

SEQ ID NO: 20115 - DNA, 22 bp, synthetic construct
  misc_feature 1..22: note = chemically synthesized
  source 1..22: mol_type = other DNA
tactaaaatgtgggcttttgac

SEQ ID NO: 20116 - DNA, 22 bp, synthetic construct
  misc_feature 1..22: note = chemically synthesized
  source 1..22: mol_type = other DNA
actaaaatgtgggcttttgact

SEQ ID NO: 20117 - DNA, 22 bp, synthetic construct
  misc_feature 1..22: note = chemically synthesized
  source 1..22: mol_type = other DNA
ctaaaatgtgggcttttgacta

SEQ ID NO: 20118 - DNA, 22 bp, synthetic construct
  misc_feature 1..22: note = chemically synthesized
  source 1..22: mol_type = other DNA
aaatgtgggcttttgactagat

SEQ ID NO: 20119 - DNA, 22 bp, synthetic construct
  misc_feature 1..22: note = chemically synthesized
  source 1..22: mol_type = other DNA
ttgactagatgaatgtaaatgt

SEQ ID NO: 20120 - DNA, 22 bp, synthetic construct
  misc_feature 1..22: note = chemically synthesized
  source 1..22: mol_type = other DNA
tgactagatgaatgtaaatgtt

SEQ ID NO: 20121 - DNA, 22 bp, synthetic construct
  misc_feature 1..22: note = chemically synthesized
  source 1..22: mol_type = other DNA
gactagatgaatgtaaatgttc

SEQ ID NO: 20122 - DNA, 22 bp, synthetic construct
  misc_feature 1..22: note = chemically synthesized
  source 1..22: mol_type = other DNA
actagatgaatgtaaatgttct

SEQ ID NO: 20123 - DNA, 22 bp, synthetic construct
  misc_feature 1..22: note = chemically synthesized
  source 1..22: mol_type = other DNA
gatgaatgtaaatgttcttcta

SEQ ID NO: 20124 - DNA, 22 bp, synthetic construct
  misc_feature 1..22: note = chemically synthesized
  source 1..22: mol_type = other DNA
ttctagctctgatatcctttat

SEQ ID NO: 20125 - DNA, 22 bp, synthetic construct
  misc_feature 1..22: note = chemically synthesized
  source 1..22: mol_type = other DNA
ctagctctgatatcctttattc

SEQ ID NO: 20126 - DNA, 22 bp, synthetic construct
  misc_feature 1..22: note = chemically synthesized
  source 1..22: mol_type = other DNA
tagctctgatatcctttattct

SEQ ID NO: 20127 - DNA, 22 bp, synthetic construct
  misc_feature 1..22: note = chemically synthesized
  source 1..22: mol_type = other DNA
gctctgatatcctttattcttt

SEQ ID NO: 20128 - DNA, 22 bp, synthetic construct
  misc_feature 1..22: note = chemically synthesized
  source 1..22: mol_type = other DNA
tgatatcctttattctttatat

SEQ ID NO: 20129 - DNA, 22 bp, synthetic construct
  misc_feature 1..22: note = chemically synthesized
  source 1..22: mol_type = other DNA
atatcctttattctttatattt

SEQ ID NO: 20130 - DNA, 22 bp, synthetic construct
  misc_feature 1..22: note = chemically synthesized
  source 1..22: mol_type = other DNA
tattctttatattttctaacag

SEQ ID NO: 20131 - DNA, 22 bp, synthetic construct
  misc_feature 1..22: note = chemically synthesized
  source 1..22: mol_type = other DNA
attctttatattttctaacaga

SEQ ID NO: 20132 - DNA, 22 bp, synthetic construct
  misc_feature 1..22: note = chemically synthesized
  source 1..22: mol_type = other DNA
ttctttatattttctaacagat

SEQ ID NO: 20133 - DNA, 22 bp, synthetic construct
  misc_feature 1..22: note = chemically synthesized
  source 1..22: mol_type = other DNA
tttatattttctaacagattct

SEQ ID NO: 20134 - DNA, 22 bp, synthetic construct
  misc_feature 1..22: note = chemically synthesized
  source 1..22: mol_type = other DNA
tatattttctaacagattctgt

SEQ ID NO: 20135 - DNA, 22 bp, synthetic construct
  misc_feature 1..22: note = chemically synthesized
  source 1..22: mol_type = other DNA
atattttctaacagattctgtg

SEQ ID NO: 20136 - DNA, 22 bp, synthetic construct
  misc_feature 1..22: note = chemically synthesized
  source 1..22: mol_type = other DNA
tattttctaacagattctgtgt

SEQ ID NO: 20137 - DNA, 22 bp, synthetic construct
  misc_feature 1..22: note = chemically synthesized
  source 1..22: mol_type = other DNA
tctaacagattctgtgtagtgg

SEQ ID NO: 20138 - DNA, 22 bp, synthetic construct
  misc_feature 1..22: note = chemically synthesized
  source 1..22: mol_type = other DNA
ctaacagattctgtgtagtggg

SEQ ID NO: 20139 - DNA, 22 bp, synthetic construct
  misc_feature 1..22: note = chemically synthesized
  source 1..22: mol_type = other DNA
taacagattctgtgtagtggga

SEQ ID NO: 20140 - DNA, 22 bp, synthetic construct
  misc_feature 1..22: note = chemically synthesized
  source 1..22: mol_type = other DNA
acagattctgtgtagtgggatg

SEQ ID NO: 20141 - DNA, 22 bp, synthetic construct
  misc_feature 1..22: note = chemically synthesized
  source 1..22: mol_type = other DNA
tgtgtagtgggatgagcagaga

SEQ ID NO: 20142 - DNA, 22 bp, synthetic construct
  misc_feature 1..22: note = chemically synthesized
  source 1..22: mol_type = other DNA
tgtagtgggatgagcagagaac

SEQ ID NO: 20143 - DNA, 22 bp, synthetic construct
  misc_feature 1..22: note = chemically synthesized
  source 1..22: mol_type = other DNA
cagaccagagatctattctcta

SEQ ID NO: 20144 - DNA, 22 bp, synthetic construct
  misc_feature 1..22: note = chemically synthesized
  source 1..22: mol_type = other DNA
agaccagagatctattctctag

SEQ ID NO: 20145 - DNA, 22 bp, synthetic construct
  misc_feature 1..22: note = chemically synthesized
  source 1..22: mol_type = other DNA
ttctctagcttattttaagctc

SEQ ID NO: 20146 - DNA, 22 bp, synthetic construct
  misc_feature 1..22: note = chemically synthesized
  source 1..22: mol_type = other DNA
tctagcttattttaagctcaac

SEQ ID NO: 20147 - DNA, 22 bp, synthetic construct
  misc_feature 1..22: note = chemically synthesized
  source 1..22: mol_type = other DNA
tagcttattttaagctcaactt

SEQ ID NO: 20148 - DNA, 22 bp, synthetic construct
  misc_feature 1..22: note = chemically synthesized
  source 1..22: mol_type = other DNA
gcttattttaagctcaacttaa

SEQ ID NO: 20149 - DNA, 22 bp, synthetic construct
  misc_feature 1..22: note = chemically synthesized
  source 1..22: mol_type = other DNA
attttaagctcaacttaaaaag

SEQ ID NO: 20150 - DNA, 22 bp, synthetic construct
  misc_feature 1..22: note = chemically synthesized
  source 1..22: mol_type = other DNA
ttttaagctcaacttaaaaaga

SEQ ID NO: 20151 - DNA, 22 bp, synthetic construct
  misc_feature 1..22: note = chemically synthesized
  source 1..22: mol_type = other DNA
taagctcaacttaaaaagaaga

SEQ ID NO: 20152 - DNA, 22 bp, synthetic construct
  misc_feature 1..22: note = chemically synthesized
  source 1..22: mol_type = other DNA
aagctcaacttaaaaagaagaa

SEQ ID NO: 20153 - DNA, 22 bp, synthetic construct
  misc_feature 1..22: note = chemically synthesized
  source 1..22: mol_type = other DNA
agctcaacttaaaaagaagaac

SEQ ID NO: 20154 - DNA, 22 bp, synthetic construct
  misc_feature 1..22: note = chemically synthesized
  source 1..22: mol_type = other DNA
aacttaaaaagaagaactgttc

SEQ ID NO: 20155 - DNA, 22 bp, synthetic construct
  misc_feature 1..22: note = chemically synthesized
  source 1..22: mol_type = other DNA
aaaaagaagaactgttctctga

SEQ ID NO: 20156 - DNA, 22 bp, synthetic construct
  misc_feature 1..22: note = chemically synthesized
  source 1..22: mol_type = other DNA
aaaagaagaactgttctctgat

SEQ ID NO: 20157 - DNA, 22 bp, synthetic construct
  misc_feature 1..22: note = chemically synthesized
  source 1..22: mol_type = other DNA
ttctctgattcttttcgccttc

SEQ ID NO: 20158 - DNA, 22 bp, synthetic construct
  misc_feature 1..22: note = chemically synthesized
  source 1..22: mol_type = other DNA
tctgattcttttcgccttcaat

SEQ ID NO: 20159 - DNA, 22 bp, synthetic construct
  misc_feature 1..22: note = chemically synthesized
  source 1..22: mol_type = other DNA
tgattcttttcgccttcaatac

SEQ ID NO: 20160 - DNA, 22 bp, synthetic construct
  misc_feature 1..22: note = chemically synthesized
  source 1..22: mol_type = other DNA
attcttttcgccttcaatacac

SEQ ID NO: 20161 - DNA, 22 bp, synthetic construct
  misc_feature 1..22: note = chemically synthesized
  source 1..22: mol_type = other DNA
ttttcgccttcaatacacttaa

SEQ ID NO: 20162 - DNA, 22 bp, synthetic construct
  misc_feature 1..22: note = chemically synthesized
  source 1..22: mol_type = other DNA
ttcgccttcaatacacttaatg

SEQ ID NO: 20163 - DNA, 22 bp, synthetic construct
  misc_feature 1..22: note = chemically synthesized
  source 1..22: mol_type = other DNA
tcgccttcaatacacttaatga

SEQ ID NO: 20164 - DNA, 22 bp, synthetic construct
  misc_feature 1..22: note = chemically synthesized
  source 1..22: mol_type = other DNA
cgccttcaatacacttaatgat

SEQ ID NO: 20165 - DNA, 22 bp, synthetic construct
  misc_feature 1..22: note = chemically synthesized
  source 1..22: mol_type = other DNA
gccttcaatacacttaatgatt

SEQ ID NO: 20166 - DNA, 22 bp, synthetic construct
  misc_feature 1..22: note = chemically synthesized
  source 1..22: mol_type = other DNA
caatacacttaatgatttaact

SEQ ID NO: 20167 - DNA, 22 bp, synthetic construct
  misc_feature 1..22: note = chemically synthesized
  source 1..22: mol_type = other DNA
aatacacttaatgatttaactc

SEQ ID NO: 20168 - DNA, 22 bp, synthetic construct
  misc_feature 1..22: note = chemically synthesized
  source 1..22: mol_type = other DNA
aatgatttaactccaccctcct

SEQ ID NO: 20169 - DNA, 22 bp, synthetic construct
  misc_feature 1..22: note = chemically synthesized
  source 1..22: mol_type = other DNA
atgatttaactccaccctcctt

SEQ ID NO: 20170 - DNA, 22 bp, synthetic construct
  misc_feature 1..22: note = chemically synthesized
  source 1..22: mol_type = other DNA
aactccaccctccttcaaaaga

SEQ ID NO: 20171 - DNA, 22 bp, synthetic construct
  misc_feature 1..22: note = chemically synthesized
  source 1..22: mol_type = other DNA
actccaccctccttcaaaagaa

SEQ ID NO: 20172 - DNA, 22 bp, synthetic construct
  misc_feature 1..22: note = chemically synthesized
  source 1..22: mol_type = other DNA
caccctccttcaaaagaaacag

SEQ ID NO: 20173 - DNA, 22 bp, synthetic construct
  misc_feature 1..22: note = chemically synthesized
  source 1..22: mol_type = other DNA
cttcaaaagaaacagcatttcc

SEQ ID NO: 20174 - DNA, 22 bp, synthetic construct
  misc_feature 1..22: note = chemically synthesized
  source 1..22: mol_type = other DNA
caaaagaaacagcatttcctac

SEQ ID NO: 20175 - DNA, 22 bp, synthetic construct
  misc_feature 1..22: note = chemically synthesized
  source 1..22: mol_type = other DNA
aaaagaaacagcatttcctact

SEQ ID NO: 20176 - DNA, 22 bp, synthetic construct
  misc_feature 1..22: note = chemically synthesized
  source 1..22: mol_type = other DNA
cctacttttatactgtctatat

SEQ ID NO: 20177 - DNA, 22 bp, synthetic construct
  misc_feature 1..22: note = chemically synthesized
  source 1..22: mol_type = other DNA
ctacttttatactgtctatatg

SEQ ID NO: 20178 - DNA, 22 bp, synthetic construct
  misc_feature 1..22: note = chemically synthesized
  source 1..22: mol_type = other DNA
cttttatactgtctatatgatt

SEQ ID NO: 20179 - DNA, 22 bp, synthetic construct
  misc_feature 1..22: note = chemically synthesized
  source 1..22: mol_type = other DNA
ttatactgtctatatgattgat

SEQ ID NO: 20180 - DNA, 22 bp, synthetic construct
  misc_feature 1..22: note = chemically synthesized
  source 1..22: mol_type = other DNA
tatactgtctatatgattgatt

SEQ ID NO: 20181 - DNA, 22 bp, synthetic construct
  misc_feature 1..22: note = chemically synthesized
  source 1..22: mol_type = other DNA
atactgtctatatgattgattt

SEQ ID NO: 20182 - DNA, 22 bp, synthetic construct
  misc_feature 1..22: note = chemically synthesized
  source 1..22: mol_type = other DNA
tactgtctatatgattgatttg

SEQ ID NO: 20183 - DNA, 22 bp, synthetic construct
  misc_feature 1..22: note = chemically synthesized
  source 1..22: mol_type = other DNA
tctatatgattgatttgcacag

SEQ ID NO: 20184 - DNA, 22 bp, synthetic construct
  misc_feature 1..22: note = chemically synthesized
  source 1..22: mol_type = other DNA
tatgattgatttgcacagctca

SEQ ID NO: 20185 - DNA, 22 bp, synthetic construct
  misc_feature 1..22: note = chemically synthesized
  source 1..22: mol_type = other DNA
atttgcacagctcatctggcca

SEQ ID NO: 20186 - DNA, 22 bp, synthetic construct
  misc_feature 1..22: note = chemically synthesized
  source 1..22: mol_type = other DNA
gcacagctcatctggccagaag

SEQ ID NO: 20187 - DNA, 22 bp, synthetic construct
  misc_feature 1..22: note = chemically synthesized
  source 1..22: mol_type = other DNA
cacagctcatctggccagaaga

SEQ ID NO: 20188 - DNA, 22 bp, synthetic construct
  misc_feature 1..22: note = chemically synthesized
  source 1..22: mol_type = other DNA
atctggccagaagagctgagac

SEQ ID NO: 20189 - DNA, 22 bp, synthetic construct
  misc_feature 1..22: note = chemically synthesized
  source 1..22: mol_type = other DNA
gccagaagagctgagacatccg

SEQ ID NO: 20190 - DNA, 22 bp, synthetic construct
  misc_feature 1..22: note = chemically synthesized
  source 1..22: mol_type = other DNA
agacatccgttcccctacaaga

SEQ ID NO: 20191 - DNA, 22 bp, synthetic construct
  misc_feature 1..22: note = chemically synthesized
  source 1..22: mol_type = other DNA
cttgtaggggaacggatgtctc

SEQ ID NO: 20192 - DNA, 22 bp, synthetic construct
  misc_feature 1..22: note = chemically synthesized
  source 1..22: mol_type = other DNA
ttgtaggggaacggatgtctca

SEQ ID NO: 20193 - DNA, 22 bp, synthetic construct
  misc_feature 1..22: note = chemically synthesized
  source 1..22: mol_type = other DNA
gtaggggaacggatgtctcagc

SEQ ID NO: 20194 - DNA, 22 bp, synthetic construct
  misc_feature 1..22: note = chemically synthesized
  source 1..22: mol_type = other DNA
taggggaacggatgtctcagct

SEQ ID NO: 20195 - DNA, 22 bp, synthetic construct
  misc_feature 1..22: note = chemically synthesized
  source 1..22: mol_type = other DNA
agctcttctggccagatgagct

SEQ ID NO: 20196 - DNA, 22 bp, synthetic construct
  misc_feature 1..22: note = chemically synthesized
  source 1..22: mol_type = other DNA
ttctggccagatgagctgtgca

SEQ ID NO: 20197 - DNA, 22 bp, synthetic construct
  misc_feature 1..22: note = chemically synthesized
  source 1..22: mol_type = other DNA
ctggccagatgagctgtgcaaa

SEQ ID NO: 20198 - DNA, 22 bp, synthetic construct
  misc_feature 1..22: note = chemically synthesized
  source 1..22: mol_type = other DNA
tggccagatgagctgtgcaaat

SEQ ID NO: 20199 - DNA, 22 bp, synthetic construct
  misc_feature 1..22: note = chemically synthesized
  source 1..22: mol_type = other DNA
gccagatgagctgtgcaaatca

SEQ ID NO: 20200 - DNA, 22 bp, synthetic construct
  misc_feature 1..22: note = chemically synthesized
  source 1..22: mol_type = other DNA
tgcaaatcaatcatatagacag

SEQ ID NO: 20201 - DNA, 22 bp, synthetic construct
  misc_feature 1..22: note = chemically synthesized
  source 1..22: mol_type = other DNA
tttcttttgaaggagggtggag

SEQ ID NO: 20202 - DNA, 22 bp, synthetic construct
  misc_feature 1..22: note = chemically synthesized
  source 1..22: mol_type = other DNA
cttttgaaggagggtggagtta

SEQ ID NO: 20203 - DNA, 22 bp, synthetic construct
  misc_feature 1..22: note = chemically synthesized
  source 1..22: mol_type = other DNA
ttttgaaggagggtggagttaa

SEQ ID NO: 20204 - DNA, 22 bp, synthetic construct
  misc_feature 1..22: note = chemically synthesized
  source 1..22: mol_type = other DNA
ttgaaggagggtggagttaaat

SEQ ID NO: 20205 - DNA, 22 bp, synthetic construct
  misc_feature 1..22: note = chemically synthesized
  source 1..22: mol_type = other DNA
tgaaggagggtggagttaaatc

SEQ ID NO: 20206 - DNA, 22 bp, synthetic construct
  misc_feature 1..22: note = chemically synthesized
  source 1..22: mol_type = other DNA
gaaggagggtggagttaaatca

SEQ ID NO: 20207 - DNA, 22 bp, synthetic construct
  misc_feature 1..22: note = chemically synthesized
  source 1..22: mol_type = other DNA
aaggagggtggagttaaatcat

SEQ ID NO: 20208 - DNA, 22 bp, synthetic construct
  misc_feature 1..22: note = chemically synthesized
  source 1..22: mol_type = other DNA
aatcattaagtgtattgaaggc

SEQ ID NO: 20209 - DNA, 22 bp, synthetic construct
  misc_feature 1..22: note = chemically synthesized
  source 1..22: mol_type = other DNA
agtgtattgaaggcgaaaagaa

SEQ ID NO: 20210 - DNA, 22 bp, synthetic construct
  misc_feature 1..22: note = chemically synthesized
  source 1..22: mol_type = other DNA
aaggcgaaaagaatcagagaac

SEQ ID NO: 20211 - DNA, 22 bp, synthetic construct
  misc_feature 1..22: note = chemically synthesized
  source 1..22: mol_type = other DNA
ttctttttaagttgagcttaaa

SEQ ID NO: 20212 - DNA, 22 bp, synthetic construct
  misc_feature 1..22: note = chemically synthesized
  source 1..22: mol_type = other DNA
ctttttaagttgagcttaaaat

SEQ ID NO: 20213 - DNA, 22 bp, synthetic construct
  misc_feature 1..22: note = chemically synthesized
  source 1..22: mol_type = other DNA
tttttaagttgagcttaaaata

SEQ ID NO: 20214 - DNA, 22 bp, synthetic construct
  misc_feature 1..22: note = chemically synthesized
  source 1..22: mol_type = other DNA
tttaagttgagcttaaaataag

SEQ ID NO: 20215 - DNA, 22 bp, synthetic construct
  misc_feature 1..22: note = chemically synthesized
  source 1..22: mol_type = other DNA
ttaagttgagcttaaaataagc

SEQ ID NO: 20216 - DNA, 22 bp, synthetic construct
  misc_feature 1..22: note = chemically synthesized
  source 1..22: mol_type = other DNA
taagttgagcttaaaataagct

SEQ ID NO: 20217 - DNA, 22 bp, synthetic construct
  misc_feature 1..22: note = chemically synthesized
  source 1..22: mol_type = other DNA
aagttgagcttaaaataagcta

SEQ ID NO: 20218 - DNA, 22 bp, synthetic construct
  misc_feature 1..22: note = chemically synthesized
  source 1..22: mol_type = other DNA
agttgagcttaaaataagctag

SEQ ID NO: 20219 - DNA, 22 bp, synthetic construct
  misc_feature 1..22: note = chemically synthesized
  source 1..22: mol_type = other DNA
agcttaaaataagctagagaat

SEQ ID NO: 20220 - DNA, 22 bp, synthetic construct
  misc_feature 1..22: note = chemically synthesized
  source 1..22: mol_type = other DNA
aaaataagctagagaatagatc

SEQ ID NO: 20221 - DNA, 22 bp, synthetic construct
  misc_feature 1..22: note = chemically synthesized
  source 1..22: mol_type = other DNA
aaataagctagagaatagatct

SEQ ID NO: 20222 - DNA, 22 bp, synthetic construct
  misc_feature 1..22: note = chemically synthesized
  source 1..22: mol_type = other DNA
gagaatagatctctggtctgaa

SEQ ID NO: 20223 - DNA, 22 bp, synthetic construct
  misc_feature 1..22: note = chemically synthesized
  source 1..22: mol_type = other DNA
tggtctgaaggtttatttacgg

SEQ ID NO: 20224 - DNA, 22 bp, synthetic construct
  misc_feature 1..22: note = chemically synthesized
  source 1..22: mol_type = other DNA
gtctgaaggtttatttacgggc

SEQ ID NO: 20225 - DNA, 22 bp, synthetic construct
  misc_feature 1..22: note = chemically synthesized
  source 1..22: mol_type = other DNA
aaggtttatttacgggcttttc

SEQ ID NO: 20226 - DNA, 22 bp, synthetic construct
  misc_feature 1..22: note = chemically synthesized
  source 1..22: mol_type = other DNA
atttacgggcttttctcactgg

SEQ ID NO: 20227 - DNA, 22 bp, synthetic construct
  misc_feature 1..22: note = chemically synthesized
  source 1..22: mol_type = other DNA
tttacgggcttttctcactgga

SEQ ID NO: 20228 - DNA, 22 bp, synthetic construct
  misc_feature 1..22: note = chemically synthesized
  source 1..22: mol_type = other DNA
acgggcttttctcactggatta

SEQ ID NO: 20229 - DNA, 22 bp, synthetic construct
  misc_feature 1..22: note = chemically synthesized
  source 1..22: mol_type = other DNA
cgggcttttctcactggattat

SEQ ID NO: 20230 - DNA, 22 bp, synthetic construct
  misc_feature 1..22: note = chemically synthesized
  source 1..22: mol_type = other DNA
ttctcactggattattttgttt

SEQ ID NO: 20231 - DNA, 22 bp, synthetic construct
  misc_feature 1..22: note = chemically synthesized
  source 1..22: mol_type = other DNA
tctcactggattattttgtttt

SEQ ID NO: 20232 - DNA, 22 bp, synthetic construct
  misc_feature 1..22: note = chemically synthesized
  source 1..22: mol_type = other DNA
ctcactggattattttgttttt

SEQ ID NO: 20233 - DNA, 22 bp, synthetic construct
  misc_feature 1..22: note = chemically synthesized
  source 1..22: mol_type = other DNA
tcactggattattttgtttttg

SEQ ID NO: 20234 - DNA, 22 bp, synthetic construct
  misc_feature 1..22: note = chemically synthesized
  source 1..22: mol_type = other DNA
actggattattttgtttttgtt

SEQ ID NO: 20235 - DNA, 22 bp, synthetic construct
  misc_feature 1..22: note = chemically synthesized
  source 1..22: mol_type = other DNA
gattattttgtttttgttctct

SEQ ID NO: 20236 - DNA, 22 bp, synthetic construct
  misc_feature 1..22: note = chemically synthesized
  source 1..22: mol_type = other DNA
ttttgtttttgttctctgctca

SEQ ID NO: 20237 - DNA, 22 bp, synthetic construct
  misc_feature 1..22: note = chemically synthesized
  source 1..22: mol_type = other DNA
tgtttttgttctctgctcatcc

SEQ ID NO: 20238 - DNA, 22 bp, synthetic construct
  misc_feature 1..22: note = chemically synthesized
  source 1..22: mol_type = other DNA
gtttttgttctctgctcatccc

SEQ ID NO: 20239 - DNA, 22 bp, synthetic construct
  misc_feature 1..22: note = chemically synthesized
  source 1..22: mol_type = other DNA
tttttgttctctgctcatccca

SEQ ID NO: 20240 - DNA, 22 bp, synthetic construct
  misc_feature 1..22: note = chemically synthesized
  source 1..22: mol_type = other DNA
ttgttctctgctcatcccacta

SEQ ID NO: 20241 - DNA, 22 bp, synthetic construct
  misc_feature 1..22: note = chemically synthesized
  source 1..22: mol_type = other DNA
tgttctctgctcatcccactac

SEQ ID NO: 20242 - DNA, 22 bp, synthetic construct
  misc_feature 1..22: note = chemically synthesized
  source 1..22: mol_type = other DNA
gttctctgctcatcccactaca

SEQ ID NO: 20243 - DNA, 22 bp, synthetic construct
  misc_feature 1..22: note = chemically synthesized
  source 1..22: mol_type = other DNA
ttctctgctcatcccactacac

SEQ ID NO: 20244 - DNA, 22 bp, synthetic construct
  misc_feature 1..22: note = chemically synthesized
  source 1..22: mol_type = other DNA
tctgctcatcccactacacaga

SEQ ID NO: 20245 - DNA, 22 bp, synthetic construct
  misc_feature 1..22: note = chemically synthesized
  source 1..22: mol_type = other DNA
tgctcatcccactacacagaat

SEQ ID NO: 20246 - DNA, 22 bp, synthetic construct
  misc_feature 1..22: note = chemically synthesized
  source 1..22: mol_type = other DNA
ctcatcccactacacagaatct

SEQ ID NO: 20247 - DNA, 22 bp, synthetic construct
  misc_feature 1..22: note = chemically synthesized
  source 1..22: mol_type = other DNA
atcccactacacagaatctgtt

SEQ ID NO: 20248 - DNA, 22 bp, synthetic construct
  misc_feature 1..22: note = chemically synthesized
  source 1..22: mol_type = other DNA
cacagaatctgttagaaaatat

SEQ ID NO: 20249 - DNA, 22 bp, synthetic construct
  misc_feature 1..22: note = chemically synthesized
  source 1..22: mol_type = other DNA
ttagaaaatataaagaataaag

SEQ ID NO: 20250 - DNA, 22 bp, synthetic construct
  misc_feature 1..22: note = chemically synthesized
  source 1..22: mol_type = other DNA
gaaaatataaagaataaaggat

SEQ ID NO: 20251 - DNA, 22 bp, synthetic construct
  misc_feature 1..22: note = chemically synthesized
  source 1..22: mol_type = other DNA
gaagaacatttacattcatcta

SEQ ID NO: 20252 - DNA, 22 bp, synthetic construct
  misc_feature 1..22: note = chemically synthesized
  source 1..22: mol_type = other DNA
acattcatctagtcaaaagccc

SEQ ID NO: 20253 - DNA, 22 bp, synthetic construct
  misc_feature 1..22: note = chemically synthesized
  source 1..22: mol_type = other DNA
cattcatctagtcaaaagccca

SEQ ID NO: 20254 - DNA, 22 bp, synthetic construct
  misc_feature 1..22: note = chemically synthesized
  source 1..22: mol_type = other DNA
atctagtcaaaagcccacattt

SEQ ID NO: 20255 - DNA, 22 bp, synthetic construct
  misc_feature 1..22: note = chemically synthesized
  source 1..22: mol_type = other DNA
gtcaaaagcccacattttagta

SEQ ID NO: 20256 - DNA, 22 bp, synthetic construct
  misc_feature 1..22: note = chemically synthesized
  source 1..22: mol_type = other DNA
tagtaaaagaaattactatcca

SEQ ID NO: 20257 - DNA, 22 bp, synthetic construct
  misc_feature 1..22: note = chemically synthesized
  source 1..22: mol_type = other DNA
agtaaaagaaattactatccaa

SEQ ID NO: 20258 - DNA, 22 bp, synthetic construct
  misc_feature 1..22: note = chemically synthesized
  source 1..22: mol_type = other DNA
gtaaaagaaattactatccaag

SEQ ID NO: 20259 - DNA, 22 bp, synthetic construct
  misc_feature 1..22: note = chemically synthesized
  source 1..22: mol_type = other DNA
ctatccaagaagcaaatgattt

SEQ ID NO: 20260 - DNA, 22 bp, synthetic construct
  misc_feature 1..22: note = chemically synthesized
  source 1..22: mol_type = other DNA
tccaagaagcaaatgatttgta

SEQ ID NO: 20261 - DNA, 22 bp, synthetic construct
  misc_feature 1..22: note = chemically synthesized
  source 1..22: mol_type = other DNA
gtacaagatcacagggcttttc

SEQ ID NO: 20262 - DNA, 22 bp, synthetic construct
  misc_feature 1..22: note = chemically synthesized
  source 1..22: mol_type = other DNA
tacaagatcacagggcttttca

SEQ ID NO: 20263 - DNA, 22 bp, synthetic construct
  misc_feature 1..22: note = chemically synthesized
  source 1..22: mol_type = other DNA
ttcaacagtaaggctaaaaggt

SEQ ID NO: 20264 - DNA, 22 bp, synthetic construct
  misc_feature 1..22: note = chemically synthesized
  source 1..22: mol_type = other DNA
tcaacagtaaggctaaaaggtt

SEQ ID NO: 20265 - DNA, 22 bp, synthetic construct
  misc_feature 1..22: note = chemically synthesized
  source 1..22: mol_type = other DNA
caacagtaaggctaaaaggtta

SEQ ID NO: 20266 - DNA, 22 bp, synthetic construct
  misc_feature 1..22: note = chemically synthesized
  source 1..22: mol_type = other DNA
aacagtaaggctaaaaggttaa

SEQ ID NO: 20267 - DNA, 22 bp, synthetic construct
  misc_feature 1..22: note = chemically synthesized
  source 1..22: mol_type = other DNA
aaaggttaagaaaattctgatt

SEQ ID NO: 20268 - DNA, 22 bp, synthetic construct
  misc_feature 1..22: note = chemically synthesized
  source 1..22: mol_type = other DNA
agaaaattctgattatcttaag

SEQ ID NO: 20269 - DNA, 22 bp, synthetic construct
  misc_feature 1..22: note = chemically synthesized
  source 1..22: mol_type = other DNA
tgattatcttaagagttgctat

SEQ ID NO: 20270 - DNA, 22 bp, synthetic construct
  misc_feature 1..22: note = chemically synthesized
  source 1..22: mol_type = other DNA
attatcttaagagttgctatta

SEQ ID NO: 20271 - DNA, 22 bp, synthetic construct
  misc_feature 1..22: note = chemically synthesized
  source 1..22: mol_type = other DNA
tcttaagagttgctattaatta

SEQ ID NO: 20272 - DNA, 22 bp, synthetic construct
  misc_feature 1..22: note = chemically synthesized
  source 1..22: mol_type = other DNA
aagagttgctattaattaaagc

SEQ ID NO: 20273 - DNA, 22 bp, synthetic construct
  misc_feature 1..22: note = chemically synthesized
  source 1..22: mol_type = other DNA
agagttgctattaattaaagcc

SEQ ID NO: 20274 - DNA, 22 bp, synthetic construct
  misc_feature 1..22: note = chemically synthesized
  source 1..22: mol_type = other DNA
ctattaattaaagccaacttaa

SEQ ID NO: 20275 - DNA, 22 bp, synthetic construct
  misc_feature 1..22: note = chemically synthesized
  source 1..22: mol_type = other DNA
ttaattaaagccaacttaaacc

SEQ ID NO: 20276 - DNA, 22 bp, synthetic construct
  misc_feature 1..22: note = chemically synthesized
  source 1..22: mol_type = other DNA
attaaagccaacttaaaccaac

SEQ ID NO: 20277 - DNA, 22 bp, synthetic construct
  misc_feature 1..22: note = chemically synthesized
  source 1..22: mol_type = other DNA
aagccaacttaaaccaacttta

SEQ ID NO: 20278 - DNA, 22 bp, synthetic construct
  misc_feature 1..22: note = chemically synthesized
  source 1..22: mol_type = other DNA
aaaccaactttaaatgtagagg

SEQ ID NO: 20279 - DNA, 22 bp, synthetic construct
  misc_feature 1..22: note = chemically synthesized
  source 1..22: mol_type = other DNA
aaccaactttaaatgtagaggg

SEQ ID NO: 20280 - DNA, 22 bp, synthetic construct
  misc_feature 1..22: note = chemically synthesized
  source 1..22: mol_type = other DNA
taaatgtagagggggatcctgg

SEQ ID NO: 20281 - DNA, 22 bp, synthetic construct
  misc_feature 1..22: note = chemically synthesized
  source 1..22: mol_type = other DNA
aaatgtagagggggatcctgga

SEQ ID NO: 20282 - DNA, 22 bp, synthetic construct
  misc_feature 1..22: note = chemically synthesized
  source 1..22: mol_type = other DNA
aatgtagagggggatcctggac

SEQ ID NO: 20283 - DNA, 22 bp, synthetic construct
  misc_feature 1..22: note = chemically synthesized
  source 1..22: mol_type = other DNA
gacttcacattaaccctgtgtc

SEQ ID NO: 20284 - DNA, 22 bp, synthetic construct
  misc_feature 1..22: note = chemically synthesized
  source 1..22: mol_type = other DNA
cacattaaccctgtgtcccctt

SEQ ID NO: 20285 - DNA, 22 bp, synthetic construct
  misc_feature 1..22: note = chemically synthesized
  source 1..22: mol_type = other DNA
acattaaccctgtgtccccttt

SEQ ID NO: 20286 - DNA, 22 bp, synthetic construct
  misc_feature 1..22: note = chemically synthesized
  source 1..22: mol_type = other DNA
accctgtgtcccctttttctcc

SEQ ID NO: 20287 - DNA, 22 bp, synthetic construct
  misc_feature 1..22: note = chemically synthesized
  source 1..22: mol_type = other DNA
tgtcccctttttctccactctc

SEQ ID NO: 20288 - DNA, 22 bp, synthetic construct
  misc_feature 1..22: note = chemically synthesized
  source 1..22: mol_type = other DNA
tttctccactctccccgtatcc

SEQ ID NO: 20289 - DNA, 22 bp, synthetic construct
  misc_feature 1..22: note = chemically synthesized
  source 1..22: mol_type = other DNA
ttctccactctccccgtatccc

SEQ ID NO: 20290 - DNA, 22 bp, synthetic construct
  misc_feature 1..22: note = chemically synthesized
  source 1..22: mol_type = other DNA
tctccactctccccgtatcccc

SEQ ID NO: 20291 - DNA, 22 bp, synthetic construct
  misc_feature 1..22: note = chemically synthesized
  source 1..22: mol_type = other DNA
ctccactctccccgtatcccct

SEQ ID NO: 20292 - DNA, 22 bp, synthetic construct
  misc_feature 1..22: note = chemically synthesized
  source 1..22: mol_type = other DNA
tccactctccccgtatccccta

SEQ ID NO: 20293 - DNA, 22 bp, synthetic construct
  misc_feature 1..22: note = chemically synthesized
  source 1..22: mol_type = other DNA
cactctccccgtatcccctatc

SEQ ID NO: 20294 - DNA, 22 bp, synthetic construct
  misc_feature 1..22: note = chemically synthesized
  source 1..22: mol_type = other DNA
tccccgtatcccctatcccacc

SEQ ID NO: 20295 - DNA, 22 bp, synthetic construct
  misc_feature 1..22: note = chemically synthesized
  source 1..22: mol_type = other DNA
cccgtatcccctatcccacccc

SEQ ID NO: 20296 - DNA, 22 bp, synthetic construct
  misc_feature 1..22: note = chemically synthesized
  source 1..22: mol_type = other DNA
tcccaccccaacccccacacag

SEQ ID NO: 20297 - DNA, 22 bp, synthetic construct
  misc_feature 1..22: note = chemically synthesized
  source 1..22: mol_type = other DNA
accacccaatattattgttctc

SEQ ID NO: 20298 - DNA, 22 bp, synthetic construct
  misc_feature 1..22: note = chemically synthesized
  source 1..22: mol_type = other DNA
ttgttctctgtaaacggaaaca

SEQ ID NO: 20299 - DNA, 22 bp, synthetic construct
  misc_feature 1..22: note = chemically synthesized
  source 1..22: mol_type = other DNA
ttctctgtaaacggaaacaacc

SEQ ID NO: 20300 - DNA, 22 bp, synthetic construct
  misc_feature 1..22: note = chemically synthesized
  source 1..22: mol_type = other DNA
tctgtaaacggaaacaacctgt

SEQ ID NO: 20301 - DNA, 22 bp, synthetic construct
  misc_feature 1..22: note = chemically synthesized
  source 1..22: mol_type = other DNA
tgtaaacggaaacaacctgttg

SEQ ID NO: 20302 - DNA, 22 bp, synthetic construct
  misc_feature 1..22: note = chemically synthesized
  source 1..22: mol_type = other DNA
taaacggaaacaacctgttgtc

SEQ ID NO: 20303 - DNA, 22 bp, synthetic construct
  misc_feature 1..22: note = chemically synthesized
  source 1..22: mol_type = other DNA
ttgtctaaagagttttaactat

SEQ ID NO: 20304 - DNA, 22 bp, synthetic construct
  misc_feature 1..22: note = chemically synthesized
  source 1..22: mol_type = other DNA
tctaaagagttttaactatggg

SEQ ID NO: 20305 - DNA, 22 bp, synthetic construct
  misc_feature 1..22: note = chemically synthesized
  source 1..22: mol_type = other DNA
aagagttttaactatgggctca

SEQ ID NO: 20306 - DNA, 22 bp, synthetic construct
  misc_feature 1..22: note = chemically synthesized
  source 1..22: mol_type = other DNA
taactatgggctcacgggtgag

SEQ ID NO: 20307 - DNA, 22 bp, synthetic construct
  misc_feature 1..22: note = chemically synthesized
  source 1..22: mol_type = other DNA
aactatgggctcacgggtgagc

SEQ ID NO: 20308 - DNA, 22 bp, synthetic construct
  misc_feature 1..22: note = chemically synthesized
  source 1..22: mol_type = other DNA
actatgggctcacgggtgagct

SEQ ID NO: 20309 - DNA, 22 bp, synthetic construct
  misc_feature 1..22: note = chemically synthesized
  source 1..22: mol_type = other DNA
tgggctcacgggtgagctaaac

SEQ ID NO: 20310 - DNA, 22 bp, synthetic construct
  misc_feature 1..22: note = chemically synthesized
  source 1..22: mol_type = other DNA
acgggtgagctaaacaggtttc

SEQ ID NO: 20311 - DNA, 22 bp, synthetic construct
  misc_feature 1..22: note = chemically synthesized
  source 1..22: mol_type = other DNA
aacaggtttcccatctttttct

SEQ ID NO: 20312 - DNA, 22 bp, synthetic construct
  misc_feature 1..22: note = chemically synthesized
  source 1..22: mol_type = other DNA
cccatctttttctggacccagg

SEQ ID NO: 20313 - DNA, 22 bp, synthetic construct
  misc_feature 1..22: note = chemically synthesized
  source 1..22: mol_type = other DNA
ccatctttttctggacccagga

SEQ ID NO: 20314 - DNA, 22 bp, synthetic construct
  misc_feature 1..22: note = chemically synthesized
  source 1..22: mol_type = other DNA
tttctggacccaggatcttagt

SEQ ID NO: 20315 - DNA, 22 bp, synthetic construct
  misc_feature 1..22: note = chemically synthesized
  source 1..22: mol_type = other DNA
ttctggacccaggatcttagtg

SEQ ID NO: 20316 - DNA, 22 bp, synthetic construct
  misc_feature 1..22: note = chemically synthesized
  source 1..22: mol_type = other DNA
tctggacccaggatcttagtgg

SEQ ID NO: 20317 - DNA, 22 bp, synthetic construct
  misc_feature 1..22: note = chemically synthesized
  source 1..22: mol_type = other DNA
ctggacccaggatcttagtggg

SEQ ID NO: 20318 - DNA, 22 bp, synthetic construct
  misc_feature 1..22: note = chemically synthesized
  source 1..22: mol_type = other DNA
tggacccaggatcttagtgggg

SEQ ID NO: 20319 - DNA, 22 bp, synthetic construct
  misc_feature 1..22: note = chemically synthesized
  source 1..22: mol_type = other DNA
gacccaggatcttagtggggat

SEQ ID NO: 20320 - DNA, 22 bp, synthetic construct
  misc_feature 1..22: note = chemically synthesized
  source 1..22: mol_type = other DNA
agtggggattttcactctgttc

SEQ ID NO: 20321 - DNA, 22 bp, synthetic construct
  misc_feature 1..22: note = chemically synthesized
  source 1..22: mol_type = other DNA
gtggggattttcactctgttca

SEQ ID NO: 20322 - DNA, 22 bp, synthetic construct
  misc_feature 1..22: note = chemically synthesized
  source 1..22: mol_type = other DNA
tcactctgttcactattttgtt

SEQ ID NO: 20323 - DNA, 22 bp, synthetic construct
  misc_feature 1..22: note = chemically synthesized
  source 1..22: mol_type = other DNA
cactctgttcactattttgttg

SEQ ID NO: 20324 - DNA, 22 bp, synthetic construct
  misc_feature 1..22: note = chemically synthesized
  source 1..22: mol_type = other DNA
actctgttcactattttgttgc

SEQ ID NO: 20325 - DNA, 22 bp, synthetic construct
  misc_feature 1..22: note = chemically synthesized
  source 1..22: mol_type = other DNA
tgttcactattttgttgccctt

SEQ ID NO: 20326 - DNA, 22 bp, synthetic construct
  misc_feature 1..22: note = chemically synthesized
  source 1..22: mol_type = other DNA
ttcactattttgttgcccttca

SEQ ID NO: 20327 - DNA, 22 bp, synthetic construct
  misc_feature 1..22: note = chemically synthesized
  source 1..22: mol_type = other DNA
actattttgttgcccttcaaac

SEQ ID NO: 20328 - DNA, 22 bp, synthetic construct
  misc_feature 1..22: note = chemically synthesized
  source 1..22: mol_type = other DNA
ttttgttgcccttcaaaccagt

SEQ ID NO: 20329 - DNA, 22 bp, synthetic construct
  misc_feature 1..22: note = chemically synthesized
  source 1..22: mol_type = other DNA
tgttgcccttcaaaccagtaag

SEQ ID NO: 20330 - DNA, 22 bp, synthetic construct
  misc_feature 1..22: note = chemically synthesized
  source 1..22: mol_type = other DNA
gttgcccttcaaaccagtaagc

SEQ ID NO: 20331 - DNA, 22 bp, synthetic construct
  misc_feature 1..22: note = chemically synthesized
  source 1..22: mol_type = other DNA
ttgcccttcaaaccagtaagca

SEQ ID NO: 20332 - DNA, 22 bp, synthetic construct
  misc_feature 1..22: note = chemically synthesized
  source 1..22: mol_type = other DNA
cccttcaaaccagtaagcattt

SEQ ID NO: 20333 - DNA, 22 bp, synthetic construct
  misc_feature 1..22: note = chemically synthesized
  source 1..22: mol_type = other DNA
caaaccagtaagcatttatgag

SEQ ID NO: 20334 - DNA, 22 bp, synthetic construct
  misc_feature 1..22: note = chemically synthesized
  source 1..22: mol_type = other DNA
aaaccagtaagcatttatgagg

SEQ ID NO: 20335 - DNA, 22 bp, synthetic construct
  misc_feature 1..22: note = chemically synthesized
  source 1..22: mol_type = other DNA
atgaggactcacactatgccag

SEQ ID NO: 20336 - DNA, 22 bp, synthetic construct
  misc_feature 1..22: note = chemically synthesized
  source 1..22: mol_type = other DNA
tgaggactcacactatgccaga

SEQ ID NO: 20337 - DNA, 22 bp, synthetic construct
  misc_feature 1..22: note = chemically synthesized
  source 1..22: mol_type = other DNA
acactatgccagatacataggt

SEQ ID NO: 20338 - DNA, 22 bp, synthetic construct
  misc_feature 1..22: note = chemically synthesized
  source 1..22: mol_type = other DNA
tgccagatacataggtggcagg

SEQ ID NO: 20339 - DNA, 22 bp, synthetic construct
  misc_feature 1..22: note = chemically synthesized
  source 1..22: mol_type = other DNA
ttcactccagatataatctatc

SEQ ID NO: 20340 - DNA, 22 bp, synthetic construct
  misc_feature 1..22: note = chemically synthesized
  source 1..22: mol_type = other DNA
cactccagatataatctatctg

SEQ ID NO: 20341 - DNA, 22 bp, synthetic construct
  misc_feature 1..22: note = chemically synthesized
  source 1..22: mol_type = other DNA
actccagatataatctatctga

SEQ ID NO: 20342 - DNA, 20 bp, synthetic construct
  misc_feature 1..20: note = chemically synthesized
  source 1..20: mol_type = other DNA
actttcacaatctgctagca

SEQ ID NO: 20343 - DNA, 20 bp, synthetic construct
  misc_feature 1..20: note = chemically synthesized
  source 1..20: mol_type = other DNA
ctttcacaatctgctagcaa

SEQ ID NO: 20344 - DNA, 20 bp, synthetic construct
  misc_feature 1..20: note = chemically synthesized
  source 1..20: mol_type = other DNA
atctgctagcaaaggttatg

SEQ ID NO: 20345 - DNA, 20 bp, synthetic construct
  misc_feature 1..20: note = chemically synthesized
  source 1..20: mol_type = other DNA
gcagcgcgtgaacatgatca

SEQ ID NO: 20346 - DNA, 20 bp, synthetic construct
  misc_feature 1..20: note = chemically synthesized
  source 1..20: mol_type = other DNA
gcgcgtgaacatgatcatgg

SEQ ID NO: 20347 - DNA, 20 bp, synthetic construct
  misc_feature 1..20: note = chemically synthesized
  source 1..20: mol_type = other DNA
catgatcatggcagaatcac

SEQ ID NO: 20348 - DNA, 20 bp, synthetic construct
  misc_feature 1..20: note = chemically synthesized
  source 1..20: mol_type = other DNA
atgatcatggcagaatcacc

SEQ ID NO: 20349 - DNA, 20 bp, synthetic construct
  misc_feature 1..20: note = chemically synthesized
  source 1..20: mol_type = other DNA
cctcatcaccatctgccttt

SEQ ID NO: 20350 - DNA, 20 bp, synthetic construct
  misc_feature 1..20: note = chemically synthesized
  source 1..20: mol_type = other DNA
ctcatcaccatctgcctttt

SEQ ID NO: 20351 - DNA, 20 bp, synthetic construct
  misc_feature 1..20: note = chemically synthesized
  source 1..20: mol_type = other DNA
tgccttttaggatatctact

SEQ ID NO: 20352 - DNA, 20 bp, synthetic construct
  misc_feature 1..20: note = chemically synthesized
  source 1..20: mol_type = other DNA
tctactcagtgctgaatgta

SEQ ID NO: 20353 - DNA, 20 bp, synthetic construct
  misc_feature 1..20: note = chemically synthesized
  source 1..20: mol_type = other DNA
ctactcagtgctgaatgtac

SEQ ID NO: 20354 - DNA, 20 bp, synthetic construct
  misc_feature 1..20: note = chemically synthesized
  source 1..20: mol_type = other DNA
ttccttttttaaaatacatt

SEQ ID NO: 20355 - DNA, 20 bp, synthetic construct
  misc_feature 1..20: note = chemically synthesized
  source 1..20: mol_type = other DNA
cattgagtatgcttgccttt

SEQ ID NO: 20356 - DNA, 20 bp, synthetic construct
  misc_feature 1..20: note = chemically synthesized
  source 1..20: mol_type = other DNA
gtatgcttgccttttagata

SEQ ID NO: 20357 - DNA, 20 bp, synthetic construct
  misc_feature 1..20: note = chemically synthesized
  source 1..20: mol_type = other DNA
attttgattacatgatttga

SEQ ID NO: 20358 - DNA, 20 bp, synthetic construct
  misc_feature 1..20: note = chemically synthesized
  source 1..20: mol_type = other DNA
atgatttgacagcaatattg

SEQ ID NO: 20359 - DNA, 20 bp, synthetic construct
  misc_feature 1..20: note = chemically synthesized
  source 1..20: mol_type = other DNA
gatttgacagcaatattgaa

SEQ ID NO: 20360 - DNA, 20 bp, synthetic construct
  misc_feature 1..20: note = chemically synthesized
  source 1..20: mol_type = other DNA
agcaatattgaagagtctaa

SEQ ID NO: 20361 - DNA, 20 bp, synthetic construct
  misc_feature 1..20: note = chemically synthesized
  source 1..20: mol_type = other DNA
atattgaagagtctaacagc

SEQ ID NO: 20362 - DNA, 20 bp, synthetic construct
  misc_feature 1..20: note = chemically synthesized
  source 1..20: mol_type = other DNA
agagtctaacagccagcacg

SEQ ID NO: 20363 - DNA, 20 bp, synthetic construct
  misc_feature 1..20: note = chemically synthesized
  source 1..20: mol_type = other DNA
gagtctaacagccagcacgc

SEQ ID NO: 20364 - DNA, 20 bp, synthetic construct
  misc_feature 1..20: note = chemically synthesized
  source 1..20: mol_type = other DNA
ctaacagccagcacgcaggt

SEQ ID NO: 20365 - DNA, 20 bp, synthetic construct
  misc_feature 1..20: note = chemically synthesized
  source 1..20: mol_type = other DNA
cagccagcacgcaggttggt

SEQ ID NO: 20366 - DNA, 20 bp, synthetic construct
  misc_feature 1..20: note = chemically synthesized
  source 1..20: mol_type = other DNA
gcacgcaggttggtaagtac

SEQ ID NO: 20367 - DNA, 20 bp, synthetic construct
  misc_feature 1..20: note = chemically synthesized
  source 1..20: mol_type = other DNA
ggtaagtactggttctttgt

SEQ ID NO: 20368 - DNA, 20 bp, synthetic construct
  misc_feature 1..20: note = chemically synthesized
  source 1..20: mol_type = other DNA
agtactggttctttgttagc

SEQ ID NO: 20369 - DNA, 20 bp, synthetic construct
  misc_feature 1..20: note = chemically synthesized
  source 1..20: mol_type = other DNA
gtactggttctttgttagct

SEQ ID NO: 20370 - DNA, 20 bp, synthetic construct
  misc_feature 1..20: note = chemically synthesized
  source 1..20: mol_type = other DNA
tcttcatttttaaaactaaa

SEQ ID NO: 20371 - DNA, 20 bp, synthetic construct
  misc_feature 1..20: note = chemically synthesized
  source 1..20: mol_type = other DNA
tatgtttaataaacactgtt

SEQ ID NO: 20372 - DNA, 20 bp, synthetic construct
  misc_feature 1..20: note = chemically synthesized
  source 1..20: mol_type = other DNA
acactgttcagttcatgatt

SEQ ID NO: 20373 - DNA, 20 bp, synthetic construct
  misc_feature 1..20: note = chemically synthesized
  source 1..20: mol_type = other DNA
tttggtcatgtaattcctgt

SEQ ID NO: 20374 - DNA, 20 bp, synthetic construct
  misc_feature 1..20: note = chemically synthesized
  source 1..20: mol_type = other DNA
ttagaaaacattcatctcct

SEQ ID NO: 20375 - DNA, 20 bp, synthetic construct
  misc_feature 1..20: note = chemically synthesized
  source 1..20: mol_type = other DNA
ccttggtttaaaaaaattaa

SEQ ID NO: 20376 - DNA, 20 bp, synthetic construct
  misc_feature 1..20: note = chemically synthesized
  source 1..20: mol_type = other DNA
tggtttaaaaaaattaaaag

SEQ ID NO: 20377 - DNA, 20 bp, synthetic construct
  misc_feature 1..20: note = chemically synthesized
  source 1..20: mol_type = other DNA
ggtttaaaaaaattaaaagt

SEQ ID NO: 20378 - DNA, 20 bp, synthetic construct
  misc_feature 1..20: note = chemically synthesized
  source 1..20: mol_type = other DNA
aaattaaaagtgggaaaaca

SEQ ID NO: 20379 - DNA, 20 bp, synthetic construct
  misc_feature 1..20: note = chemically synthesized
  source 1..20: mol_type = other DNA
aaagtgggaaaacaaagaaa

SEQ ID NO: 20380 - DNA, 20 bp, synthetic construct
  misc_feature 1..20: note = chemically synthesized
  source 1..20: mol_type = other DNA
gtgggaaaacaaagaaatag

SEQ ID NO: 20381 - DNA, 20 bp, synthetic construct
  misc_feature 1..20: note = chemically synthesized
  source 1..20: mol_type = other DNA
aacaaagaaatagcagaata

SEQ ID NO: 20382 - DNA, 20 bp, synthetic construct
  misc_feature 1..20: note = chemically synthesized
  source 1..20: mol_type = other DNA
ataaccacattatttttgtt

SEQ ID NO: 20383 - DNA, 20 bp, synthetic construct
  misc_feature 1..20: note = chemically synthesized
  source 1..20: mol_type = other DNA
ttaccactttgaaatcaaaa

SEQ ID NO: 20384 - DNA, 20 bp, synthetic construct
  misc_feature 1..20: note = chemically synthesized
  source 1..20: mol_type = other DNA
taccactttgaaatcaaaat

SEQ ID NO: 20385 - DNA, 20 bp, synthetic construct
  misc_feature 1..20: note = chemically synthesized
  source 1..20: mol_type = other DNA
gaaatcaaaatgggaaacaa

SEQ ID NO: 20386 - DNA, 20 bp, synthetic construct
  misc_feature 1..20: note = chemically synthesized
  source 1..20: mol_type = other DNA
ggaaacaaaagcacaaacaa

SEQ ID NO: 20387 - DNA, 20 bp, synthetic construct
  misc_feature 1..20: note = chemically synthesized
  source 1..20: mol_type = other DNA
aatggccttatttacacaaa

SEQ ID NO: 20388 - DNA, 20 bp, synthetic construct
  misc_feature 1..20: note = chemically synthesized
  source 1..20: mol_type = other DNA
tacacaaaaagtctgatttt

SEQ ID NO: 20389 - DNA, 20 bp, synthetic construct
  misc_feature 1..20: note = chemically synthesized
  source 1..20: mol_type = other DNA
tttaagatatatgacatttc

SEQ ID NO: 20390 - DNA, 20 bp, synthetic construct
  misc_feature 1..20: note = chemically synthesized
  source 1..20: mol_type = other DNA
ttaagatatatgacatttca

SEQ ID NO: 20391 - DNA, 20 bp, synthetic construct
  misc_feature 1..20: note = chemically synthesized
  source 1..20: mol_type = other DNA
tatatgacatttcaaggttt

SEQ ID NO: 20392 - DNA, 20 bp, synthetic construct
  misc_feature 1..20: note = chemically synthesized
  source 1..20: mol_type = other DNA
atgacatttcaaggtttcag

SEQ ID NO: 20393 - DNA, 20 bp, synthetic construct
  misc_feature 1..20: note = chemically synthesized
  source 1..20: mol_type = other DNA
aggtttcagaagtatgtaat

SEQ ID NO: 20394 - DNA, 20 bp, synthetic construct
  misc_feature 1..20: note = chemically synthesized
  source 1..20: mol_type = other DNA
ggtttcagaagtatgtaatg

SEQ ID NO: 20395 - DNA, 20 bp, synthetic construct
  misc_feature 1..20: note = chemically synthesized
  source 1..20: mol_type = other DNA
aattatatatcttcaattta

SEQ ID NO: 20396 - DNA, 20 bp, synthetic construct
  misc_feature 1..20: note = chemically synthesized
  source 1..20: mol_type = other DNA
atatcttcaatttaaagttt

SEQ ID NO: 20397 - DNA, 20 bp, synthetic construct
  misc_feature 1..20: note = chemically synthesized
  source 1..20: mol_type = other DNA
aaagttttagttaaaacata

SEQ ID NO: 20398 - DNA, 20 bp, synthetic construct
  misc_feature 1..20: note = chemically synthesized
  source 1..20: mol_type = other DNA
cataaagattaacctttcat

SEQ ID NO: 20399 - DNA, 20 bp, synthetic construct
  misc_feature 1..20: note = chemically synthesized
  source 1..20: mol_type = other DNA
aagattaacctttcattagc

SEQ ID NO: 20400 - DNA, 20 bp, synthetic construct
  misc_feature 1..20: note = chemically synthesized
  source 1..20: mol_type = other DNA
acctttcattagcaagctgt

SEQ ID NO: 20401 - DNA, 20 bp, synthetic construct
  misc_feature 1..20: note = chemically synthesized
  source 1..20: mol_type = other DNA
caagctgttagttatcacca

SEQ ID NO: 20402 - DNA, 20 bp, synthetic construct
  misc_feature 1..20: note = chemically synthesized
  source 1..20: mol_type = other DNA
gttatcaccaaagcttttca

SEQ ID NO: 20403 - DNA, 20 bp, synthetic construct
  misc_feature 1..20: note = chemically synthesized
  source 1..20: mol_type = other DNA
caccaaagcttttcatggat

SEQ ID NO: 20404 - DNA, 20 bp, synthetic construct
  misc_feature 1..20: note = chemically synthesized
  source 1..20: mol_type = other DNA
accaaagcttttcatggatt

SEQ ID NO: 20405 - DNA, 20 bp, synthetic construct
  misc_feature 1..20: note = chemically synthesized
  source 1..20: mol_type = other DNA
tgtctctatgtcaaacatct

SEQ ID NO: 20406 - DNA, 20 bp, synthetic construct
  misc_feature 1..20: note = chemically synthesized
  source 1..20: mol_type = other DNA
tctctatgtcaaacatcttg

SEQ ID NO: 20407 - DNA, 20 bp, synthetic construct
  misc_feature 1..20: note = chemically synthesized
  source 1..20: mol_type = other DNA
aacatcttggagttgatatt

SEQ ID NO: 20408 - DNA, 20 bp, synthetic construct
  misc_feature 1..20: note = chemically synthesized
  source 1..20: mol_type = other DNA
acatcttggagttgatattt

SEQ ID NO: 20409 - DNA, 20 bp, synthetic construct
  misc_feature 1..20: note = chemically synthesized
  source 1..20: mol_type = other DNA
catcttggagttgatatttg

SEQ ID NO: 20410 - DNA, 20 bp, synthetic construct
  misc_feature 1..20: note = chemically synthesized
  source 1..20: mol_type = other DNA
atttggggaaacacaatact

SEQ ID NO: 20411 - DNA, 20 bp, synthetic construct
  misc_feature 1..20: note = chemically synthesized
  source 1..20: mol_type = other DNA
gggaaacacaatactcagtt

SEQ ID NO: 20412 - DNA, 20 bp, synthetic construct
  misc_feature 1..20: note = chemically synthesized
  source 1..20: mol_type = other DNA
caatactcagttgagttccc

SEQ ID NO: 20413 - DNA, 20 bp, synthetic construct
  misc_feature 1..20: note = chemically synthesized
  source 1..20: mol_type = other DNA
aatactcagttgagttccct

SEQ ID NO: 20414 - DNA, 20 bp, synthetic construct
  misc_feature 1..20: note = chemically synthesized
  source 1..20: mol_type = other DNA
atactcagttgagttcccta

SEQ ID NO: 20415 - DNA, 20 bp, synthetic construct
  misc_feature 1..20: note = chemically synthesized
  source 1..20: mol_type = other DNA
tactcagttgagttccctag

SEQ ID NO: 20416 - DNA, 20 bp, synthetic construct
  misc_feature 1..20: note = chemically synthesized
  source 1..20: mol_type = other DNA
ctcagttgagttccctaggg

SEQ ID NO: 20417 - DNA, 20 bp, synthetic construct
  misc_feature 1..20: note = chemically synthesized
  source 1..20: mol_type = other DNA
ttgagttccctaggggagaa

SEQ ID NO: 20418 - DNA, 20 bp, synthetic construct
  misc_feature 1..20: note = chemically synthesized
  source 1..20: mol_type = other DNA
gttccctaggggagaaaagc

SEQ ID NO: 20419 - DNA, 20 bp, synthetic construct
  misc_feature 1..20: note = chemically synthesized
  source 1..20: mol_type = other DNA
taggggagaaaagcaagctt

SEQ ID NO: 20420 - DNA, 20 bp, synthetic construct
  misc_feature 1..20: note = chemically synthesized
  source 1..20: mol_type = other DNA
caagcttaagaattgacata

SEQ ID NO: 20421 - DNA, 20 bp, synthetic construct
  misc_feature 1..20: note = chemically synthesized
  source 1..20: mol_type = other DNA
agcttaagaattgacataaa

SEQ ID NO: 20422 - DNA, 20 bp, synthetic construct
  misc_feature 1..20: note = chemically synthesized
  source 1..20: mol_type = other DNA
ttaagaattgacataaagag

SEQ ID NO: 20423 - DNA, 20 bp, synthetic construct
  misc_feature 1..20: note = chemically synthesized
  source 1..20: mol_type = other DNA
taagaattgacataaagagt

SEQ ID NO: 20424 - DNA, 20 bp, synthetic construct
  misc_feature 1..20: note = chemically synthesized
  source 1..20: mol_type = other DNA
gaattgacataaagagtagg

SEQ ID NO: 20425 - DNA, 20 bp, synthetic construct
  misc_feature 1..20: note = chemically synthesized
  source 1..20: mol_type = other DNA
tgacataaagagtaggaagt

SEQ ID NO: 20426 - DNA, 20 bp, synthetic construct
  misc_feature 1..20: note = chemically synthesized
  source 1..20: mol_type = other DNA
actttgttttttcacaacta

SEQ ID NO: 20427 - DNA, 20 bp, synthetic construct
  misc_feature 1..20: note = chemically synthesized
  source 1..20: mol_type = other DNA
cagtgactttatgtatttcc

SEQ ID NO: 20428 - DNA, 20 bp, synthetic construct
  misc_feature 1..20: note = chemically synthesized
  source 1..20: mol_type = other DNA
gtgactttatgtatttccca

SEQ ID NO: 20429 - DNA, 20 bp, synthetic construct
  misc_feature 1..20: note = chemically synthesized
  source 1..20: mol_type = other DNA
tgactttatgtatttcccag

SEQ ID NO: 20430 - DNA, 20 bp, synthetic construct
  misc_feature 1..20: note = chemically synthesized
  source 1..20: mol_type = other DNA
ctttatgtatttcccagagg

SEQ ID NO: 20431 - DNA, 20 bp, synthetic construct
  misc_feature 1..20: note = chemically synthesized
  source 1..20: mol_type = other DNA
tttatgtatttcccagagga

SEQ ID NO: 20432 - DNA, 20 bp, synthetic construct
  misc_feature 1..20: note = chemically synthesized
  source 1..20: mol_type = other DNA
atttcccagaggaaggcata

SEQ ID NO: 20433 - DNA, 20 bp, synthetic construct
  misc_feature 1..20: note = chemically synthesized
  source 1..20: mol_type = other DNA
tttcccagaggaaggcatac

SEQ ID NO: 20434 - DNA, 20 bp, synthetic construct
  misc_feature 1..20: note = chemically synthesized
  source 1..20: mol_type = other DNA
ttcccagaggaaggcataca

SEQ ID NO: 20435 - DNA, 20 bp, synthetic construct
  misc_feature 1..20: note = chemically synthesized
  source 1..20: mol_type = other DNA
ccagaggaaggcatacaggg

SEQ ID NO: 20436 - DNA, 20 bp, synthetic construct
  misc_feature 1..20: note = chemically synthesized
  source 1..20: mol_type = other DNA
agggaagaaattatcccatt

SEQ ID NO: 20437 - DNA, 20 bp, synthetic construct
  misc_feature 1..20: note = chemically synthesized
  source 1..20: mol_type = other DNA
aattatcccatttggacaaa

SEQ ID NO: 20438 - DNA, 20 bp, synthetic construct
  misc_feature 1..20: note = chemically synthesized
  source 1..20: mol_type = other DNA
ggacaaacagcatgttctca

SEQ ID NO: 20439 - DNA, 20 bp, synthetic construct
  misc_feature 1..20: note = chemically synthesized
  source 1..20: mol_type = other DNA
gacaaacagcatgttctcac

SEQ ID NO: 20440 - DNA, 20 bp, synthetic construct
  misc_feature 1..20: note = chemically synthesized
  source 1..20: mol_type = other DNA
aaacagcatgttctcacagg

SEQ ID NO: 20441 - DNA, 20 bp, synthetic construct
  misc_feature 1..20: note = chemically synthesized
  source 1..20: mol_type = other DNA
acacttacttgtcaactttc

SEQ ID NO: 20442 - DNA, 20 bp, synthetic construct
  misc_feature 1..20: note = chemically synthesized
  source 1..20: mol_type = other DNA
caactttctagaatcaaatc

SEQ ID NO: 20443 - DNA, 20 bp, synthetic construct
  misc_feature 1..20: note = chemically synthesized
  source 1..20: mol_type = other DNA
ctttctagaatcaaatctag

SEQ ID NO: 20444 - DNA, 20 bp, synthetic construct
  misc_feature 1..20: note = chemically synthesized
  source 1..20: mol_type = other DNA
gaatcaaatctagtagctga

SEQ ID NO: 20445 - DNA, 20 bp, synthetic construct
  misc_feature 1..20: note = chemically synthesized
  source 1..20: mol_type = other DNA
aatctagtagctgacagtac

SEQ ID NO: 20446 - DNA, 20 bp, synthetic construct
  misc_feature 1..20: note = chemically synthesized
  source 1..20: mol_type = other DNA
atctagtagctgacagtacc

SEQ ID NO: 20447 - DNA, 20 bp, synthetic construct
  misc_feature 1..20: note = chemically synthesized
  source 1..20: mol_type = other DNA
gtagctgacagtaccaggat

SEQ ID NO: 20448 - DNA, 20 bp, synthetic construct
  misc_feature 1..20: note = chemically synthesized
  source 1..20: mol_type = other DNA
tagctgacagtaccaggatc

SEQ ID NO: 20449 - DNA, 20 bp, synthetic construct
  misc_feature 1..20: note = chemically synthesized
  source 1..20: mol_type = other DNA
agctgacagtaccaggatca

SEQ ID NO: 20450 - DNA, 20 bp, synthetic construct
  misc_feature 1..20: note = chemically synthesized
  source 1..20: mol_type = other DNA
gctgacagtaccaggatcag

SEQ ID NO: 20451 - DNA, 20 bp, synthetic construct
  misc_feature 1..20: note = chemically synthesized
  source 1..20: mol_type = other DNA
ggatcaggggtgccaaccct

SEQ ID NO: 20452 - DNA, 20 bp, synthetic construct
  misc_feature 1..20: note = chemically synthesized
  source 1..20: mol_type = other DNA
gtgccaaccctaagcacccc

SEQ ID NO: 20453 - DNA, 20 bp, synthetic construct
  misc_feature 1..20: note = chemically synthesized
  source 1..20: mol_type = other DNA
caaccctaagcacccccaga

SEQ ID NO: 20454 - DNA, 20 bp, synthetic construct
  misc_feature 1..20: note = chemically synthesized
  source 1..20: mol_type = other DNA
agcacccccagaaagctgac

SEQ ID NO: 20455 - DNA, 20 bp, synthetic construct
  misc_feature 1..20: note = chemically synthesized
  source 1..20: mol_type = other DNA
cagaaagctgactggccctg

SEQ ID NO: 20456 - DNA, 20 bp, synthetic construct
  misc_feature 1..20: note = chemically synthesized
  source 1..20: mol_type = other DNA
tggccctgtggttcccactc

SEQ ID NO: 20457 - DNA, 20 bp, synthetic construct
  misc_feature 1..20: note = chemically synthesized
  source 1..20: mol_type = other DNA
tcccactccagacatgatgt

SEQ ID NO: 20458 - DNA, 20 bp, synthetic construct
  misc_feature 1..20: note = chemically synthesized
  source 1..20: mol_type = other DNA
catgatgtcagctgtgaaat

SEQ ID NO: 20459 - DNA, 20 bp, synthetic construct
  misc_feature 1..20: note = chemically synthesized
  source 1..20: mol_type = other DNA
aataacgataaaaaaaaata

SEQ ID NO: 20460 - DNA, 20 bp, synthetic construct
  misc_feature 1..20: note = chemically synthesized
  source 1..20: mol_type = other DNA
taacgataaaaaaaaataca

SEQ ID NO: 20461 - DNA, 20 bp, synthetic construct
  misc_feature 1..20: note = chemically synthesized
  source 1..20: mol_type = other DNA
aacgataaaaaaaaatacag

SEQ ID NO: 20462 - DNA, 20 bp, synthetic construct
  misc_feature 1..20: note = chemically synthesized
  source 1..20: mol_type = other DNA
aaaaaatacagaggttaaac

SEQ ID NO: 20463 - DNA, 20 bp, synthetic construct
  misc_feature 1..20: note = chemically synthesized
  source 1..20: mol_type = other DNA
atacagaggttaaactagca

SEQ ID NO: 20464 - DNA, 20 bp, synthetic construct
  misc_feature 1..20: note = chemically synthesized
  source 1..20: mol_type = other DNA
agaggttaaactagcaaagt

SEQ ID NO: 20465 - DNA, 20 bp, synthetic construct
  misc_feature 1..20: note = chemically synthesized
  source 1..20: mol_type = other DNA
ttaaactagcaaagtgagta

SEQ ID NO: 20466 - DNA, 20 bp, synthetic construct
  misc_feature 1..20: note = chemically synthesized
  source 1..20: mol_type = other DNA
ctagcaaagtgagtaaagtc

SEQ ID NO: 20467 - DNA, 20 bp, synthetic construct
  misc_feature 1..20: note = chemically synthesized
  source 1..20: mol_type = other DNA
tagcaaagtgagtaaagtca

SEQ ID NO: 20468 - DNA, 20 bp, synthetic construct
  misc_feature 1..20: note = chemically synthesized
  source 1..20: mol_type = other DNA
agcaaagtgagtaaagtcaa

SEQ ID NO: 20469 - DNA, 20 bp, synthetic construct
  misc_feature 1..20: note = chemically synthesized
  source 1..20: mol_type = other DNA
gtgagtaaagtcaagggata

SEQ ID NO: 20470 - DNA, 20 bp, synthetic construct
  misc_feature 1..20: note = chemically synthesized
  source 1..20: mol_type = other DNA
aagggataaagaaaatttgt

SEQ ID NO: 20471 - DNA, 20 bp, synthetic construct
  misc_feature 1..20: note = chemically synthesized
  source 1..20: mol_type = other DNA
aatttgttggaaaactcaca

SEQ ID NO: 20472 - DNA, 20 bp, synthetic construct
  misc_feature 1..20: note = chemically synthesized
  source 1..20: mol_type = other DNA
ttgttggaaaactcacaaag

SEQ ID NO: 20473 - DNA, 20 bp, synthetic construct
  misc_feature 1..20: note = chemically synthesized
  source 1..20: mol_type = other DNA
tgttggaaaactcacaaagc

SEQ ID NO: 20474 - DNA, 20 bp, synthetic construct
  misc_feature 1..20: note = chemically synthesized
  source 1..20: mol_type = other DNA
aactcacaaagcaggacata

SEQ ID NO: 20475 - DNA, 20 bp, synthetic construct
  misc_feature 1..20: note = chemically synthesized
  source 1..20: mol_type = other DNA
cacaaagcaggacataaagc

SEQ ID NO: 20476 - DNA, 20 bp, synthetic construct
  misc_feature 1..20: note = chemically synthesized
  source 1..20: mol_type = other DNA
acaaagcaggacataaagca

SEQ ID NO: 20477 - DNA, 20 bp, synthetic construct
  misc_feature 1..20: note = chemically synthesized
  source 1..20: mol_type = other DNA
aggacataaagcaaggccat

SEQ ID NO: 20478 - DNA, 20 bp, synthetic construct
  misc_feature 1..20: note = chemically synthesized
  source 1..20: mol_type = other DNA
ggccattagatatatctcat

SEQ ID NO: 20479 - DNA, 20 bp, synthetic construct
  misc_feature 1..20: note = chemically synthesized
  source 1..20: mol_type = other DNA
tatctcattagtgtgacatc

SEQ ID NO: 20480 - DNA, 20 bp, synthetic construct
  misc_feature 1..20: note = chemically synthesized
  source 1..20: mol_type = other DNA
atctcattagtgtgacatct

SEQ ID NO: 20481 - DNA, 20 bp, synthetic construct
  misc_feature 1..20: note = chemically synthesized
  source 1..20: mol_type = other DNA
ctcattagtgtgacatctgg

SEQ ID NO: 20482 - DNA, 20 bp, synthetic construct
  misc_feature 1..20: note = chemically synthesized
  source 1..20: mol_type = other DNA
tcattagtgtgacatctggg

SEQ ID NO: 20483 - DNA, 20 bp, synthetic construct
  misc_feature 1..20: note = chemically synthesized
  source 1..20: mol_type = other DNA
gtgtgacatctgggaggaca

SEQ ID NO: 20484 - DNA, 20 bp, synthetic construct
  misc_feature 1..20: note = chemically synthesized
  source 1..20: mol_type = other DNA
ccaaaccctttcttctatat

SEQ ID NO: 20485 - DNA, 20 bp, synthetic construct
  misc_feature 1..20: note = chemically synthesized
  source 1..20: mol_type = other DNA
aaccctttcttctatataag

SEQ ID NO: 20486 - DNA, 20 bp, synthetic construct
  misc_feature 1..20: note = chemically synthesized
  source 1..20: mol_type = other DNA
ctttcttctatataagtggt

SEQ ID NO: 20487 - DNA, 20 bp, synthetic construct
  misc_feature 1..20: note = chemically synthesized
  source 1..20: mol_type = other DNA
atataagtggtgagatgatg

SEQ ID NO: 20488 - DNA, 20 bp, synthetic construct
  misc_feature 1..20: note = chemically synthesized
  source 1..20: mol_type = other DNA
tataagtggtgagatgatga

SEQ ID NO: 20489 - DNA, 20 bp, synthetic construct
  misc_feature 1..20: note = chemically synthesized
  source 1..20: mol_type = other DNA
ggtgagatgatgaaggttgt

SEQ ID NO: 20490 - DNA, 20 bp, synthetic construct
  misc_feature 1..20: note = chemically synthesized
  source 1..20: mol_type = other DNA
tgagatgatgaaggttgtaa

SEQ ID NO: 20491 - DNA, 20 bp, synthetic construct
  misc_feature 1..20: note = chemically synthesized
  source 1..20: mol_type = other DNA
gagatgatgaaggttgtaag

SEQ ID NO: 20492 - DNA, 20 bp, synthetic construct
  misc_feature 1..20: note = chemically synthesized
  source 1..20: mol_type = other DNA
agatgatgaaggttgtaaga

SEQ ID NO: 20493 - DNA, 20 bp, synthetic construct
  misc_feature 1..20: note = chemically synthesized
  source 1..20: mol_type = other DNA
agagggcttctgcccccttg

SEQ ID NO: 20494 - DNA, 20 bp, synthetic construct
  misc_feature 1..20: note = chemically synthesized
  source 1..20: mol_type = other DNA
ttctgcccccttgaagactt

SEQ ID NO: 20495 - DNA, 20 bp, synthetic construct
  misc_feature 1..20: note = chemically synthesized
  source 1..20: mol_type = other DNA
cccttgaagacttcagatgc

SEQ ID NO: 20496 - DNA, 20 bp, synthetic construct
  misc_feature 1..20: note = chemically synthesized
  source 1..20: mol_type = other DNA
ccttgaagacttcagatgct

SEQ ID NO: 20497 - DNA, 20 bp, synthetic construct
  misc_feature 1..20: note = chemically synthesized
  source 1..20: mol_type = other DNA
cttgaagacttcagatgctg

SEQ ID NO: 20498 - DNA, 20 bp, synthetic construct
  misc_feature 1..20: note = chemically synthesized
  source 1..20: mol_type = other DNA
aagacttcagatgctgggga

SEQ ID NO: 20499 - DNA, 20 bp, synthetic construct
  misc_feature 1..20: note = chemically synthesized
  source 1..20: mol_type = other DNA
agacttcagatgctggggaa

SEQ ID NO: 20500 - DNA, 20 bp, synthetic construct
  misc_feature 1..20: note = chemically synthesized
  source 1..20: mol_type = other DNA
ttcagatgctggggaaagga

SEQ ID NO: 20501 - DNA, 20 bp, synthetic construct
  misc_feature 1..20: note = chemically synthesized
  source 1..20: mol_type = other DNA
atgctggggaaaggatagat

SEQ ID NO: 20502 - DNA, 20 bp, synthetic construct
  misc_feature 1..20: note = chemically synthesized
  source 1..20: mol_type = other DNA
gggaaaggatagataagaat

SEQ ID NO: 20503 - DNA, 20 bp, synthetic construct
  misc_feature 1..20: note = chemically synthesized
  source 1..20: mol_type = other DNA
ggaaaggatagataagaata

SEQ ID NO: 20504 - DNA, 20 bp, synthetic construct
  misc_feature 1..20: note = chemically synthesized
  source 1..20: mol_type = other DNA
agataagaataaggatgaac

SEQ ID NO: 20505 - DNA, 20 bp, synthetic construct
  misc_feature 1..20: note = chemically synthesized
  source 1..20: mol_type = other DNA
gataagaataaggatgaacc

SEQ ID NO: 20506 - DNA, 20 bp, synthetic construct
  misc_feature 1..20: note = chemically synthesized
  source 1..20: mol_type = other DNA
ataaggatgaaccaggcttt

SEQ ID NO: 20507 - DNA, 20 bp, synthetic construct
  misc_feature 1..20: note = chemically synthesized
  source 1..20: mol_type = other DNA
aaggatgaaccaggcttttg

SEQ ID NO: 20508 - DNA, 20 bp, synthetic construct
  misc_feature 1..20: note = chemically synthesized
  source 1..20: mol_type = other DNA
tgaaccaggcttttggagcc

SEQ ID NO: 20509 - DNA, 20 bp, synthetic construct
  misc_feature 1..20: note = chemically synthesized
  source 1..20: mol_type = other DNA
gaaccaggcttttggagcct

SEQ ID NO: 20510 - DNA, 20 bp, synthetic construct
  misc_feature 1..20: note = chemically synthesized
  source 1..20: mol_type = other DNA
ggagcctgggaaataatgac

SEQ ID NO: 20511 - DNA, 20 bp, synthetic construct
  misc_feature 1..20: note = chemically synthesized
  source 1..20: mol_type = other DNA
aatgactagcgataaacctg

SEQ ID NO: 20512 - DNA, 20 bp, synthetic construct
  misc_feature 1..20: note = chemically synthesized
  source 1..20: mol_type = other DNA
atgactagcgataaacctga

SEQ ID NO: 20513 - DNA, 20 bp, synthetic construct
  misc_feature 1..20: note = chemically synthesized
  source 1..20: mol_type = other DNA
tgactagcgataaacctgaa

SEQ ID NO: 20514 - DNA, 20 bp, synthetic construct
  misc_feature 1..20: note = chemically synthesized
  source 1..20: mol_type = other DNA
ctagcgataaacctgaaggg

SEQ ID NO: 20515 - DNA, 20 bp, synthetic construct
  misc_feature 1..20: note = chemically synthesized
  source 1..20: mol_type = other DNA
gataaacctgaagggaagtt

SEQ ID NO: 20516 - DNA, 20 bp, synthetic construct
  misc_feature 1..20: note = chemically synthesized
  source 1..20: mol_type = other DNA
gaagttaagtatacgatccc

SEQ ID NO: 20517 - DNA, 20 bp, synthetic construct
  misc_feature 1..20: note = chemically synthesized
  source 1..20: mol_type = other DNA
tacgatccccagataatact

SEQ ID NO: 20518 - DNA, 20 bp, synthetic construct
  misc_feature 1..20: note = chemically synthesized
  source 1..20: mol_type = other DNA
acgatccccagataatacta

SEQ ID NO: 20519 - DNA, 20 bp, synthetic construct
  misc_feature 1..20: note = chemically synthesized
  source 1..20: mol_type = other DNA
gatccccagataatactaag

SEQ ID NO: 20520 - DNA, 20 bp, synthetic construct
  misc_feature 1..20: note = chemically synthesized
  source 1..20: mol_type = other DNA
cccagataatactaaggaga

SEQ ID NO: 20521 - DNA, 20 bp, synthetic construct
  misc_feature 1..20: note = chemically synthesized
  source 1..20: mol_type = other DNA
ccagataatactaaggagaa

SEQ ID NO: 20522 - DNA, 20 bp, synthetic construct
  misc_feature 1..20: note = chemically synthesized
  source 1..20: mol_type = other DNA
agaaaggcaatgtgattctg

SEQ ID NO: 20523 - DNA, 20 bp, synthetic construct
  misc_feature 1..20: note = chemically synthesized
  source 1..20: mol_type = other DNA
atgtgattctgcagccattg

SEQ ID NO: 20524 - DNA, 20 bp, synthetic construct
  misc_feature 1..20: note = chemically synthesized
  source 1..20: mol_type = other DNA
gattctgcagccattgtagc

SEQ ID NO: 20525 - DNA, 20 bp, synthetic construct
  misc_feature 1..20: note = chemically synthesized
  source 1..20: mol_type = other DNA
ttctgcagccattgtagcca

SEQ ID NO: 20526 - DNA, 20 bp, synthetic construct
  misc_feature 1..20: note = chemically synthesized
  source 1..20: mol_type = other DNA
ccattgtagccagagataat

SEQ ID NO: 20527 - DNA, 20 bp, synthetic construct
  misc_feature 1..20: note = chemically synthesized
  source 1..20: mol_type = other DNA
gccagagataataagccctt

SEQ ID NO: 20528 - DNA, 20 bp, synthetic construct
  misc_feature 1..20: note = chemically synthesized
  source 1..20: mol_type = other DNA
ccagagataataagcccttg

SEQ ID NO: 20529 - DNA, 20 bp, synthetic construct
  misc_feature 1..20: note = chemically synthesized
  source 1..20: mol_type = other DNA
gagataataagcccttgagg

SEQ ID NO: 20530 - DNA, 20 bp, synthetic construct
  misc_feature 1..20: note = chemically synthesized
  source 1..20: mol_type = other DNA
agataataagcccttgagga

SEQ ID NO: 20531 - DNA, 20 bp, synthetic construct
  misc_feature 1..20: note = chemically synthesized
  source 1..20: mol_type = other DNA
gataataagcccttgaggaa

SEQ ID NO: 20532 - DNA, 20 bp, synthetic construct
  misc_feature 1..20: note = chemically synthesized
  source 1..20: mol_type = other DNA
ataataagcccttgaggaag

SEQ ID NO: 20533 - DNA, 20 bp, synthetic construct
  misc_feature 1..20: note = chemically synthesized
  source 1..20: mol_type = other DNA
taagcccttgaggaaggggc

SEQ ID NO: 20534 - DNA, 20 bp, synthetic construct
  misc_feature 1..20: note = chemically synthesized
  source 1..20: mol_type = other DNA
aagcccttgaggaaggggcc

SEQ ID NO: 20535 - DNA, 20 bp, synthetic construct
  misc_feature 1..20: note = chemically synthesized
  source 1..20: mol_type = other DNA
agcccttgaggaaggggcca

SEQ ID NO: 20536 - DNA, 20 bp, synthetic construct
  misc_feature 1..20: note = chemically synthesized
  source 1..20: mol_type = other DNA
gcccttgaggaaggggccag

SEQ ID NO: 20537 - DNA, 20 bp, synthetic construct
  misc_feature 1..20: note = chemically synthesized
  source 1..20: mol_type = other DNA
ggggccaggggaatttttct

SEQ ID NO: 20538 - DNA, 20 bp, synthetic construct
  misc_feature 1..20: note = chemically synthesized
  source 1..20: mol_type = other DNA
gggccaggggaatttttcta

SEQ ID NO: 20539 - DNA, 20 bp, synthetic construct
  misc_feature 1..20: note = chemically synthesized
  source 1..20: mol_type = other DNA
caggggaatttttctaagga

SEQ ID NO: 20540 - DNA, 20 bp, synthetic construct
  misc_feature 1..20: note = chemically synthesized
  source 1..20: mol_type = other DNA
ggaatttttctaaggataga

SEQ ID NO: 20541 - DNA, 20 bp, synthetic construct
  misc_feature 1..20: note = chemically synthesized
  source 1..20: mol_type = other DNA
aaggatagacagtattaatg

SEQ ID NO: 20542 - DNA, 20 bp, synthetic construct
  misc_feature 1..20: note = chemically synthesized
  source 1..20: mol_type = other DNA
ttctgctattaaactctcat

SEQ ID NO: 20543 - DNA, 20 bp, synthetic construct
  misc_feature 1..20: note = chemically synthesized
  source 1..20: mol_type = other DNA
aaactctcattggcttctaa

SEQ ID NO: 20544 - DNA, 20 bp, synthetic construct
  misc_feature 1..20: note = chemically synthesized
  source 1..20: mol_type = other DNA
aactctcattggcttctaaa

SEQ ID NO: 20545 - DNA, 20 bp, synthetic construct
  misc_feature 1..20: note = chemically synthesized
  source 1..20: mol_type = other DNA
ctctcattggcttctaaaag

SEQ ID NO: 20546 - DNA, 20 bp, synthetic construct
  misc_feature 1..20: note = chemically synthesized
  source 1..20: mol_type = other DNA
ttggcttctaaaaggagttt

SEQ ID NO: 20547 - DNA, 20 bp, synthetic construct
  misc_feature 1..20: note = chemically synthesized
  source 1..20: mol_type = other DNA
cttctaaaaggagtttcggt

SEQ ID NO: 20548 - DNA, 20 bp, synthetic construct
  misc_feature 1..20: note = chemically synthesized
  source 1..20: mol_type = other DNA
gtttcggtgagtgatttgct

SEQ ID NO: 20549 - DNA, 20 bp, synthetic construct
  misc_feature 1..20: note = chemically synthesized
  source 1..20: mol_type = other DNA
gctgagatgttgcattttca

SEQ ID NO: 20550 - DNA, 20 bp, synthetic construct
  misc_feature 1..20: note = chemically synthesized
  source 1..20: mol_type = other DNA
attttcatggctgctgcctt

SEQ ID NO: 20551 - DNA, 20 bp, synthetic construct
  misc_feature 1..20: note = chemically synthesized
  source 1..20: mol_type = other DNA
ttttcatggctgctgccttt

SEQ ID NO: 20552 - DNA, 20 bp, synthetic construct
  misc_feature 1..20: note = chemically synthesized
  source 1..20: mol_type = other DNA
gcctttaggtattattgcaa

SEQ ID NO: 20553 - DNA, 20 bp, synthetic construct
  misc_feature 1..20: note = chemically synthesized
  source 1..20: mol_type = other DNA
taggtattattgcaacagtt

SEQ ID NO: 20554 - DNA, 20 bp, synthetic construct
  misc_feature 1..20: note = chemically synthesized
  source 1..20: mol_type = other DNA
ttggaattttgaaattaaaa

SEQ ID NO: 20555 - DNA, 20 bp, synthetic construct
  misc_feature 1..20: note = chemically synthesized
  source 1..20: mol_type = other DNA
ttaaaacagttctgtaaaac

SEQ ID NO: 20556 - DNA, 20 bp, synthetic construct
  misc_feature 1..20: note = chemically synthesized
  source 1..20: mol_type = other DNA
acagttctgtaaaaccagtt

SEQ ID NO: 20557 - DNA, 20 bp, synthetic construct
  misc_feature 1..20: note = chemically synthesized
  source 1..20: mol_type = other DNA
aaaaccagtttagttttgta

SEQ ID NO: 20558 - DNA, 20 bp, synthetic construct
  misc_feature 1..20: note = chemically synthesized
  source 1..20: mol_type = other DNA
tttgtaaagtgtatgcatca

SEQ ID NO: 20559 - DNA, 20 bp, synthetic construct
  misc_feature 1..20: note = chemically synthesized
  source 1..20: mol_type = other DNA
catcaaagatgtccttcatt

SEQ ID NO: 20560 - DNA, 20 bp, synthetic construct
  misc_feature 1..20: note = chemically synthesized
  source 1..20: mol_type = other DNA
tccttcattcagacattact

SEQ ID NO: 20561 - DNA, 20 bp, synthetic construct
  misc_feature 1..20: note = chemically synthesized
  source 1..20: mol_type = other DNA
acattactgagttacaacta

SEQ ID NO: 20562 - DNA, 20 bp, synthetic construct
  misc_feature 1..20: note = chemically synthesized
  source 1..20: mol_type = other DNA
ctgagttacaactatggtgc

SEQ ID NO: 20563 - DNA, 20 bp, synthetic construct
  misc_feature 1..20: note = chemically synthesized
  source 1..20: mol_type = other DNA
tgagttacaactatggtgcc

SEQ ID NO: 20564 - DNA, 20 bp, synthetic construct
  misc_feature 1..20: note = chemically synthesized
  source 1..20: mol_type = other DNA
tatggtgccaggtactgtgt

SEQ ID NO: 20565 - DNA, 20 bp, synthetic construct
  misc_feature 1..20: note = chemically synthesized
  source 1..20: mol_type = other DNA
atggtgccaggtactgtgtc

SEQ ID NO: 20566 - DNA, 20 bp, synthetic construct
  misc_feature 1..20: note = chemically synthesized
  source 1..20: mol_type = other DNA
tggtgccaggtactgtgtca

SEQ ID NO: 20567 - DNA, 20 bp, synthetic construct
  misc_feature 1..20: note = chemically synthesized
  source 1..20: mol_type = other DNA
caggtactgtgtcagggtac

SEQ ID NO: 20568 - DNA, 20 bp, synthetic construct
  misc_feature 1..20: note = chemically synthesized
  source 1..20: mol_type = other DNA
aggtactgtgtcagggtact

SEQ ID NO: 20569 - DNA, 20 bp, synthetic construct
  misc_feature 1..20: note = chemically synthesized
  source 1..20: mol_type = other DNA
ggtactgtgtcagggtacta

SEQ ID NO: 20570 - DNA, 20 bp, synthetic construct
  misc_feature 1..20: note = chemically synthesized
  source 1..20: mol_type = other DNA
gtactgtgtcagggtactag

SEQ ID NO: 20571 - DNA, 20 bp, synthetic construct
  misc_feature 1..20: note = chemically synthesized
  source 1..20: mol_type = other DNA
gtgtcagggtactaggggta

SEQ ID NO: 20572 - DNA, 20 bp, synthetic construct
  misc_feature 1..20: note = chemically synthesized
  source 1..20: mol_type = other DNA
tgtcagggtactaggggtat

SEQ ID NO: 20573 - DNA, 20 bp, synthetic construct
  misc_feature 1..20: note = chemically synthesized
  source 1..20: mol_type = other DNA
gtcagggtactaggggtatg

SEQ ID NO: 20574 - DNA, 20 bp, synthetic construct
  misc_feature 1..20: note = chemically synthesized
  source 1..20: mol_type = other DNA
ctaggggtatggggataaac

SEQ ID NO: 20575 - DNA, 20 bp, synthetic construct
  misc_feature 1..20: note = chemically synthesized
  source 1..20: mol_type = other DNA
cagactccctctttgatcta

SEQ ID NO: 20576 - DNA, 20 bp, synthetic construct
  misc_feature 1..20: note = chemically synthesized
  source 1..20: mol_type = other DNA
actccctctttgatctaaag

SEQ ID NO: 20577 - DNA, 20 bp, synthetic construct
  misc_feature 1..20: note = chemically synthesized
  source 1..20: mol_type = other DNA
tctttgatctaaagcagcat

SEQ ID NO: 20578 - DNA, 20 bp, synthetic construct
  misc_feature 1..20: note = chemically synthesized
  source 1..20: mol_type = other DNA
ctttgatctaaagcagcatg

SEQ ID NO: 20579 - DNA, 20 bp, synthetic construct
  misc_feature 1..20: note = chemically synthesized
  source 1..20: mol_type = other DNA
gatctaaagcagcatgaggc

SEQ ID NO: 20580 - DNA, 20 bp, synthetic construct
  misc_feature 1..20: note = chemically synthesized
  source 1..20: mol_type = other DNA
atctaaagcagcatgaggcc

SEQ ID NO: 20581 - DNA, 20 bp, synthetic construct
  misc_feature 1..20: note = chemically synthesized
  source 1..20: mol_type = other DNA
aaagcagcatgaggccaggt

SEQ ID NO: 20582 - DNA, 20 bp, synthetic construct
  misc_feature 1..20: note = chemically synthesized
  source 1..20: mol_type = other DNA
agcagcatgaggccaggtga

SEQ ID NO: 20583 - DNA, 20 bp, synthetic construct
  misc_feature 1..20: note = chemically synthesized
  source 1..20: mol_type = other DNA
gcagcatgaggccaggtgag

SEQ ID NO: 20584 - DNA, 20 bp, synthetic construct
  misc_feature 1..20: note = chemically synthesized
  source 1..20: mol_type = other DNA
taatgtgataaaatgtgcac

SEQ ID NO: 20585 - DNA, 20 bp, synthetic construct
  misc_feature 1..20: note = chemically synthesized
  source 1..20: mol_type = other DNA
aatgtgataaaatgtgcact

SEQ ID NO: 20586 - DNA, 20 bp, synthetic construct
  misc_feature 1..20: note = chemically synthesized
  source 1..20: mol_type = other DNA
taaaatgtgcactaggtact

SEQ ID NO: 20587 - DNA, 20 bp, synthetic construct
  misc_feature 1..20: note = chemically synthesized
  source 1..20: mol_type = other DNA
aaaatgtgcactaggtacta

SEQ ID NO: 20588 - DNA, 20 bp, synthetic construct
  misc_feature 1..20: note = chemically synthesized
  source 1..20: mol_type = other DNA
aaatgtgcactaggtactaa

SEQ ID NO: 20589 - DNA, 20 bp, synthetic construct
  misc_feature 1..20: note = chemically synthesized
  source 1..20: mol_type = other DNA
cactaggtactaagggatca

SEQ ID NO: 20590 - DNA, 20 bp, synthetic construct
  misc_feature 1..20: note = chemically synthesized
  source 1..20: mol_type = other DNA
ctaggtactaagggatcata

SEQ ID NO: 20591 - DNA, 20 bp, synthetic construct
  misc_feature 1..20: note = chemically synthesized
  source 1..20: mol_type = other DNA
gtactaagggatcatagaga

SEQ ID NO: 20592 - DNA, 20 bp, synthetic construct
  misc_feature 1..20: note = chemically synthesized
  source 1..20: mol_type = other DNA
tactaagggatcatagagaa

SEQ ID NO: 20593 - DNA, 20 bp, synthetic construct
  misc_feature 1..20: note = chemically synthesized
  source 1..20: mol_type = other DNA
agagaaaggaacacattaaa

SEQ ID NO: 20594 - DNA, 20 bp, synthetic construct
  misc_feature 1..20: note = chemically synthesized
  source 1..20: mol_type = other DNA
gagaaaggaacacattaaat

SEQ ID NO: 20595 - DNA, 20 bp, synthetic construct
  misc_feature 1..20: note = chemically synthesized
  source 1..20: mol_type = other DNA
agaaaggaacacattaaatg

SEQ ID NO: 20596 - DNA, 20 bp, synthetic construct
  misc_feature 1..20: note = chemically synthesized
  source 1..20: mol_type = other DNA
ttaaatggggaaacaattga

SEQ ID NO: 20597 - DNA, 20 bp, synthetic construct
  misc_feature 1..20: note = chemically synthesized
  source 1..20: mol_type = other DNA
aaatggggaaacaattgata

SEQ ID NO: 20598 - DNA, 20 bp, synthetic construct
  misc_feature 1..20: note = chemically synthesized
  source 1..20: mol_type = other DNA
atggggaaacaattgataga

SEQ ID NO: 20599 - DNA, 20 bp, synthetic construct
  misc_feature 1..20: note = chemically synthesized
  source 1..20: mol_type = other DNA
ggggaaacaattgatagaga

SEQ ID NO: 20600 - DNA, 20 bp, synthetic construct
  misc_feature 1..20: note = chemically synthesized
  source 1..20: mol_type = other DNA
agagagagaatattttcatc

SEQ ID NO: 20601 - DNA, 20 bp, synthetic construct
  misc_feature 1..20: note = chemically synthesized
  source 1..20: mol_type = other DNA
gagagagaatattttcatct

SEQ ID NO: 20602 - DNA, 20 bp, synthetic construct
  misc_feature 1..20: note = chemically synthesized
  source 1..20: mol_type = other DNA
tattttcatctgggtcttaa

SEQ ID NO: 20603 - DNA, 20 bp, synthetic construct
  misc_feature 1..20: note = chemically synthesized
  source 1..20: mol_type = other DNA
tcatctgggtcttaaaagat

SEQ ID NO: 20604 - DNA, 20 bp, synthetic construct
  misc_feature 1..20: note = chemically synthesized
  source 1..20: mol_type = other DNA
tctgggtcttaaaagatgag

SEQ ID NO: 20605 - DNA, 20 bp, synthetic construct
  misc_feature 1..20: note = chemically synthesized
  source 1..20: mol_type = other DNA
ctgggtcttaaaagatgagt

SEQ ID NO: 20606 - DNA, 20 bp, synthetic construct
  misc_feature 1..20: note = chemically synthesized
  source 1..20: mol_type = other DNA
tctctttaaatgtctgatat

SEQ ID NO: 20607 - DNA, 20 bp, synthetic construct
  misc_feature 1..20: note = chemically synthesized
  source 1..20: mol_type = other DNA
ctctttaaatgtctgatata

SEQ ID NO: 20608 - DNA, 20 bp, synthetic construct
  misc_feature 1..20: note = chemically synthesized
  source 1..20: mol_type = other DNA
tctttaaatgtctgatataa

SEQ ID NO: 20609 - DNA, 20 bp, synthetic construct
  misc_feature 1..20: note = chemically synthesized
  source 1..20: mol_type = other DNA
atataagggcattttatgca

SEQ ID NO: 20610 - DNA, 20 bp, synthetic construct
  misc_feature 1..20: note = chemically synthesized
  source 1..20: mol_type = other DNA
ataagggcattttatgcaaa

SEQ ID NO: 20611 - DNA, 20 bp, synthetic construct
  misc_feature 1..20: note = chemically synthesized
  source 1..20: mol_type = other DNA
taagggcattttatgcaaag

SEQ ID NO: 20612 - DNA, 20 bp, synthetic construct
  misc_feature 1..20: note = chemically synthesized
  source 1..20: mol_type = other DNA
caaagaggatcactcgtgca

SEQ ID NO: 20613 - DNA, 20 bp, synthetic construct
  misc_feature 1..20: note = chemically synthesized
  source 1..20: mol_type = other DNA
ggatcactcgtgcaaagact

SEQ ID NO: 20614 - DNA, 20 bp, synthetic construct
  misc_feature 1..20: note = chemically synthesized
  source 1..20: mol_type = other DNA
gtgcaaagactcagatttgc

SEQ ID NO: 20615 - DNA, 20 bp, synthetic construct
  misc_feature 1..20: note = chemically synthesized
  source 1..20: mol_type = other DNA
actcagatttgcaagaacgt

SEQ ID NO: 20616 - DNA, 20 bp, synthetic construct
  misc_feature 1..20: note = chemically synthesized
  source 1..20: mol_type = other DNA
ctcagatttgcaagaacgtg

SEQ ID NO: 20617 - DNA, 20 bp, synthetic construct
  misc_feature 1..20: note = chemically synthesized
  source 1..20: mol_type = other DNA
tgcaagaacgtgaggtattt

SEQ ID NO: 20618 - DNA, 20 bp, synthetic construct
  misc_feature 1..20: note = chemically synthesized
  source 1..20: mol_type = other DNA
gcaagaacgtgaggtatttc

SEQ ID NO: 20619 - DNA, 20 bp, synthetic construct
  misc_feature 1..20: note = chemically synthesized
  source 1..20: mol_type = other DNA
aagaacgtgaggtatttcag

SEQ ID NO: 20620 - DNA, 20 bp, synthetic construct
  misc_feature 1..20: note = chemically synthesized
  source 1..20: mol_type = other DNA
ggtatttcaggagttttgta

SEQ ID NO: 20621 - DNA, 20 bp, synthetic construct
  misc_feature 1..20: note = chemically synthesized
  source 1..20: mol_type = other DNA
gagttttgtatggttccata

SEQ ID NO: 20622 - DNA, 20 bp, synthetic construct
  misc_feature 1..20: note = chemically synthesized
  source 1..20: mol_type = other DNA
ggttccatatggactatgac

SEQ ID NO: 20623 - DNA, 20 bp, synthetic construct
  misc_feature 1..20: note = chemically synthesized
  source 1..20: mol_type = other DNA
ccatatggactatgacaagt

SEQ ID NO: 20624 - DNA, 20 bp, synthetic construct
  misc_feature 1..20: note = chemically synthesized
  source 1..20: mol_type = other DNA
atggactatgacaagtgaga

SEQ ID NO: 20625 - DNA, 20 bp, synthetic construct
  misc_feature 1..20: note = chemically synthesized
  source 1..20: mol_type = other DNA
tggactatgacaagtgagac

SEQ ID NO: 20626 - DNA, 20 bp, synthetic construct
  misc_feature 1..20: note = chemically synthesized
  source 1..20: mol_type = other DNA
gacaagtgagacaggtaaac

SEQ ID NO: 20627 - DNA, 20 bp, synthetic construct
  misc_feature 1..20: note = chemically synthesized
  source 1..20: mol_type = other DNA
acaagtgagacaggtaaact

SEQ ID NO: 20628 - DNA, 20 bp, synthetic construct
  misc_feature 1..20: note = chemically synthesized
  source 1..20: mol_type = other DNA
agtgagacaggtaaactagg

SEQ ID NO: 20629 - DNA, 20 bp, synthetic construct
  misc_feature 1..20: note = chemically synthesized
  source 1..20: mol_type = other DNA
tgagacaggtaaactaggca

SEQ ID NO: 20630 - DNA, 20 bp, synthetic construct
  misc_feature 1..20: note = chemically synthesized
  source 1..20: mol_type = other DNA
acaggtaaactaggcagagc

SEQ ID NO: 20631 - DNA, 20 bp, synthetic construct
  misc_feature 1..20: note = chemically synthesized
  source 1..20: mol_type = other DNA
aactaggcagagctggtcat

SEQ ID NO: 20632 - DNA, 20 bp, synthetic construct
  misc_feature 1..20: note = chemically synthesized
  source 1..20: mol_type = other DNA
gagctggtcatcagataatg

SEQ ID NO: 20633 - DNA, 20 bp, synthetic construct
  misc_feature 1..20: note = chemically synthesized
  source 1..20: mol_type = other DNA
gataatgaagtcattaacct

SEQ ID NO: 20634 - DNA, 20 bp, synthetic construct
  misc_feature 1..20: note = chemically synthesized
  source 1..20: mol_type = other DNA
ataatgaagtcattaaccta

SEQ ID NO: 20635 - DNA, 20 bp, synthetic construct
  misc_feature 1..20: note = chemically synthesized
  source 1..20: mol_type = other DNA
aatgaagtcattaacctaag

SEQ ID NO: 20636 - DNA, 20 bp, synthetic construct
  misc_feature 1..20: note = chemically synthesized
  source 1..20: mol_type = other DNA
agtcattaacctaaggagat

SEQ ID NO: 20637 - DNA, 20 bp, synthetic construct
  misc_feature 1..20: note = chemically synthesized
  source 1..20: mol_type = other DNA
ttggacaataaaatgcaata

SEQ ID NO: 20638 - DNA, 20 bp, synthetic construct
  misc_feature 1..20: note = chemically synthesized
  source 1..20: mol_type = other DNA
ggacaataaaatgcaatatg

SEQ ID NO: 20639 - DNA, 20 bp, synthetic construct
  misc_feature 1..20: note = chemically synthesized
  source 1..20: mol_type = other DNA
gacaataaaatgcaatatgg

SEQ ID NO: 20640 - DNA, 20 bp, synthetic construct
  misc_feature 1..20: note = chemically synthesized
  source 1..20: mol_type = other DNA
aatgcaatatggaggtatcg

SEQ ID NO: 20641 - DNA, 20 bp, synthetic construct
  misc_feature 1..20: note = chemically synthesized
  source 1..20: mol_type = other DNA
aggtatcgaagtataaacat

SEQ ID NO: 20642 - DNA, 20 bp, synthetic construct
  misc_feature 1..20: note = chemically synthesized
  source 1..20: mol_type = other DNA
ggtatcgaagtataaacata

SEQ ID NO: 20643 - DNA, 20 bp, synthetic construct
  misc_feature 1..20: note = chemically synthesized
  source 1..20: mol_type = other DNA
tatcgaagtataaacataag

SEQ ID NO: 20644 - DNA, 20 bp, synthetic construct
  misc_feature 1..20: note = chemically synthesized
  source 1..20: mol_type = other DNA
aacataaggagtaccactga

SEQ ID NO: 20645 - DNA, 20 bp, synthetic construct
  misc_feature 1..20: note = chemically synthesized
  source 1..20: mol_type = other DNA
agtaccactgatggctgatt

SEQ ID NO: 20646 - DNA, 20 bp, synthetic construct
  misc_feature 1..20: note = chemically synthesized
  source 1..20: mol_type = other DNA
gtaccactgatggctgattt

SEQ ID NO: 20647 - DNA, 20 bp, synthetic construct
  misc_feature 1..20: note = chemically synthesized
  source 1..20: mol_type = other DNA
gatggctgatttaggatgcc

SEQ ID NO: 20648 - DNA, 20 bp, synthetic construct
  misc_feature 1..20: note = chemically synthesized
  source 1..20: mol_type = other DNA
ctgatttaggatgcccagtc

SEQ ID NO: 20649 - DNA, 20 bp, synthetic construct
  misc_feature 1..20: note = chemically synthesized
  source 1..20: mol_type = other DNA
gcaacacgctaatgaaatga

SEQ ID NO: 20650 - DNA, 20 bp, synthetic construct
  misc_feature 1..20: note = chemically synthesized
  source 1..20: mol_type = other DNA
acacgctaatgaaatgatag

SEQ ID NO: 20651 - DNA, 20 bp, synthetic construct
  misc_feature 1..20: note = chemically synthesized
  source 1..20: mol_type = other DNA
cacgctaatgaaatgatagt

SEQ ID NO: 20652 - DNA, 20 bp, synthetic construct
  misc_feature 1..20: note = chemically synthesized
  source 1..20: mol_type = other DNA
acgctaatgaaatgatagtg

SEQ ID NO: 20653 - DNA, 20 bp, synthetic construct
  misc_feature 1..20: note = chemically synthesized
  source 1..20: mol_type = other DNA
cgctaatgaaatgatagtgg

SEQ ID NO: 20654 - DNA, 20 bp, synthetic construct
  misc_feature 1..20: note = chemically synthesized
  source 1..20: mol_type = other DNA
ctaatgaaatgatagtgggg

SEQ ID NO: 20655 - DNA, 20 bp, synthetic construct
  misc_feature 1..20: note = chemically synthesized
  source 1..20: mol_type = other DNA
taatgaaatgatagtggggg

SEQ ID NO: 20656 - DNA, 20 bp, synthetic construct
  misc_feature 1..20: note = chemically synthesized
  source 1..20: mol_type = other DNA
aatgaaatgatagtggggga

SEQ ID NO: 20657 - DNA, 20 bp, synthetic construct
  misc_feature 1..20: note = chemically synthesized
  source 1..20: mol_type = other DNA
atgaaatgatagtgggggag

SEQ ID NO: 20658 - DNA, 20 bp, synthetic construct
  misc_feature 1..20: note = chemically synthesized
  source 1..20: mol_type = other DNA
tgaaatgatagtgggggagg

SEQ ID NO: 20659 - DNA, 20 bp, synthetic construct
  misc_feature 1..20: note = chemically synthesized
  source 1..20: mol_type = other DNA
gtgggggagggggccgtacc

SEQ ID NO: 20660 - DNA, 20 bp, synthetic construct
  misc_feature 1..20: note = chemically synthesized
  source 1..20: mol_type = other DNA
ggagggggccgtaccaagac

SEQ ID NO: 20661 - DNA, 20 bp, synthetic construct
  misc_feature 1..20: note = chemically synthesized
  source 1..20: mol_type = other DNA
gagggggccgtaccaagact

SEQ ID NO: 20662 - DNA, 20 bp, synthetic construct
  misc_feature 1..20: note = chemically synthesized
  source 1..20: mol_type = other DNA
gggggccgtaccaagactag

SEQ ID NO: 20663 - DNA, 20 bp, synthetic construct
  misc_feature 1..20: note = chemically synthesized
  source 1..20: mol_type = other DNA
gggccgtaccaagactagga

SEQ ID NO: 20664 - DNA, 20 bp, synthetic construct
  misc_feature 1..20: note = chemically synthesized
  source 1..20: mol_type = other DNA
gccgtaccaagactaggaga

SEQ ID NO: 20665 - DNA, 20 bp, synthetic construct
  misc_feature 1..20: note = chemically synthesized
  source 1..20: mol_type = other DNA
gtaccaagactaggagagag

SEQ ID NO: 20666 - DNA, 20 bp, synthetic construct
  misc_feature 1..20: note = chemically synthesized
  source 1..20: mol_type = other DNA
gactaggagagagcagtcct

SEQ ID NO: 20667 - DNA, 20 bp, synthetic construct
  misc_feature 1..20: note = chemically synthesized
  source 1..20: mol_type = other DNA
gagactattgcaattatctg

SEQ ID NO: 20668 - DNA, 20 bp, synthetic construct
  misc_feature 1..20: note = chemically synthesized
  source 1..20: mol_type = other DNA
agactattgcaattatctgc

SEQ ID NO: 20669 - DNA, 20 bp, synthetic construct
  misc_feature 1..20: note = chemically synthesized
  source 1..20: mol_type = other DNA
actattgcaattatctgcgg

SEQ ID NO: 20670 - DNA, 20 bp, synthetic construct
  misc_feature 1..20: note = chemically synthesized
  source 1..20: mol_type = other DNA
aattatctgcgggagacata

SEQ ID NO: 20671 - DNA, 20 bp, synthetic construct
  misc_feature 1..20: note = chemically synthesized
  source 1..20: mol_type = other DNA
attatctgcgggagacataa

SEQ ID NO: 20672 - DNA, 20 bp, synthetic construct
  misc_feature 1..20: note = chemically synthesized
  source 1..20: mol_type = other DNA
tctgcgggagacataaaggc

SEQ ID NO: 20673 - DNA, 20 bp, synthetic construct
  misc_feature 1..20: note = chemically synthesized
  source 1..20: mol_type = other DNA
cataaaggctagaacctgaa

SEQ ID NO: 20674 - DNA, 20 bp, synthetic construct
  misc_feature 1..20: note = chemically synthesized
  source 1..20: mol_type = other DNA
aaaggctagaacctgaacag

SEQ ID NO: 20675 - DNA, 20 bp, synthetic construct
  misc_feature 1..20: note = chemically synthesized
  source 1..20: mol_type = other DNA
ggctagaacctgaacagtag

SEQ ID NO: 20676 - DNA, 20 bp, synthetic construct
  misc_feature 1..20: note = chemically synthesized
  source 1..20: mol_type = other DNA
gaacagtagcagtacaaaaa

SEQ ID NO: 20677 - DNA, 20 bp, synthetic construct
  misc_feature 1..20: note = chemically synthesized
  source 1..20: mol_type = other DNA
acagtagcagtacaaaaaaa

SEQ ID NO: 20678 - DNA, 20 bp, synthetic construct
  misc_feature 1..20: note = chemically synthesized
  source 1..20: mol_type = other DNA
cagtagcagtacaaaaaaag

SEQ ID NO: 20679 - DNA, 20 bp, synthetic construct
  misc_feature 1..20: note = chemically synthesized
  source 1..20: mol_type = other DNA
agtagcagtacaaaaaaaga

SEQ ID NO: 20680 - DNA, 20 bp, synthetic construct
  misc_feature 1..20: note = chemically synthesized
  source 1..20: mol_type = other DNA
gtagcagtacaaaaaaagag

SEQ ID NO: 20681 - DNA, 20 bp, synthetic construct
  misc_feature 1..20: note = chemically synthesized
  source 1..20: mol_type = other DNA
agcagtacaaaaaaagaggg

SEQ ID NO: 20682 - DNA, 20 bp, synthetic construct
  misc_feature 1..20: note = chemically synthesized
  source 1..20: mol_type = other DNA
aggggagttcaaatgatatt

SEQ ID NO: 20683 - DNA, 20 bp, synthetic construct
  misc_feature 1..20: note = chemically synthesized
  source 1..20: mol_type = other DNA
ggggagttcaaatgatatta

SEQ ID NO: 20684 - DNA, 20 bp, synthetic construct
  misc_feature 1..20: note = chemically synthesized
  source 1..20: mol_type = other DNA
gagttcaaatgatattaagg

SEQ ID NO: 20685 - DNA, 20 bp, synthetic construct
  misc_feature 1..20: note = chemically synthesized
  source 1..20: mol_type = other DNA
ttcaaatgatattaaggaag

SEQ ID NO: 20686 - DNA, 20 bp, synthetic construct
  misc_feature 1..20: note = chemically synthesized
  source 1..20: mol_type = other DNA
aaatgatattaaggaagtag

SEQ ID NO: 20687 - DNA, 20 bp, synthetic construct
  misc_feature 1..20: note = chemically synthesized
  source 1..20: mol_type = other DNA
tgatattaaggaagtagaag

SEQ ID NO: 20688 - DNA, 20 bp, synthetic construct
  misc_feature 1..20: note = chemically synthesized
  source 1..20: mol_type = other DNA
agtggtatgacttaaccatc

SEQ ID NO: 20689 - DNA, 20 bp, synthetic construct
  misc_feature 1..20: note = chemically synthesized
  source 1..20: mol_type = other DNA
gtggtatgacttaaccatct

SEQ ID NO: 20690 - DNA, 20 bp, synthetic construct
  misc_feature 1..20: note = chemically synthesized
  source 1..20: mol_type = other DNA
atgacttaaccatctgggta

SEQ ID NO: 20691 - DNA, 20 bp, synthetic construct
  misc_feature 1..20: note = chemically synthesized
  source 1..20: mol_type = other DNA
acttaaccatctgggtatgg

SEQ ID NO: 20692 - DNA, 20 bp, synthetic construct
  misc_feature 1..20: note = chemically synthesized
  source 1..20: mol_type = other DNA
cttaaccatctgggtatgga

SEQ ID NO: 20693 - DNA, 20 bp, synthetic construct
  misc_feature 1..20: note = chemically synthesized
  source 1..20: mol_type = other DNA
ttaaccatctgggtatggaa

SEQ ID NO: 20694 - DNA, 20 bp, synthetic construct
  misc_feature 1..20: note = chemically synthesized
  source 1..20: mol_type = other DNA
taaccatctgggtatggaag

SEQ ID NO: 20695 - DNA, 20 bp, synthetic construct
  misc_feature 1..20: note = chemically synthesized
  source 1..20: mol_type = other DNA
tctgggtatggaaggggaaa

SEQ ID NO: 20696 - DNA, 20 bp, synthetic construct
  misc_feature 1..20: note = chemically synthesized
  source 1..20: mol_type = other DNA
ggtatggaaggggaaatggc

SEQ ID NO: 20697 - DNA, 20 bp, synthetic construct
  misc_feature 1..20: note = chemically synthesized
  source 1..20: mol_type = other DNA
tatggaaggggaaatggcta

SEQ ID NO: 20698 - DNA, 20 bp, synthetic construct
  misc_feature 1..20: note = chemically synthesized
  source 1..20: mol_type = other DNA
aggggaaatggctagagtct

SEQ ID NO: 20699 - DNA, 20 bp, synthetic construct
  misc_feature 1..20: note = chemically synthesized
  source 1..20: mol_type = other DNA
ggggaaatggctagagtctt

SEQ ID NO: 20700 - DNA, 20 bp, synthetic construct
  misc_feature 1..20: note = chemically synthesized
  source 1..20: mol_type = other DNA
gggaaatggctagagtcttg

SEQ ID NO: 20701 - DNA, 20 bp, synthetic construct
  misc_feature 1..20: note = chemically synthesized
  source 1..20: mol_type = other DNA
ctttgtgtttgatgtgatta

SEQ ID NO: 20702 - DNA, 20 bp, synthetic construct
  misc_feature 1..20: note = chemically synthesized
  source 1..20: mol_type = other DNA
tttgatgtgattatggacca

SEQ ID NO: 20703 - DNA, 20 bp, synthetic construct
  misc_feature 1..20: note = chemically synthesized
  source 1..20: mol_type = other DNA
tggaccacagaataatgtct

SEQ ID NO: 20704 - DNA, 20 bp, synthetic construct
  misc_feature 1..20: note = chemically synthesized
  source 1..20: mol_type = other DNA
gaccacagaataatgtctaa

SEQ ID NO: 20705 - DNA, 20 bp, synthetic construct
  misc_feature 1..20: note = chemically synthesized
  source 1..20: mol_type = other DNA
agaataatgtctaagagaac

SEQ ID NO: 20706 - DNA, 20 bp, synthetic construct
  misc_feature 1..20: note = chemically synthesized
  source 1..20: mol_type = other DNA
gtctaagagaactggctctt

SEQ ID NO: 20707 - DNA, 20 bp, synthetic construct
  misc_feature 1..20: note = chemically synthesized
  source 1..20: mol_type = other DNA
tggctctttagtctgactgc

SEQ ID NO: 20708 - DNA, 20 bp, synthetic construct
  misc_feature 1..20: note = chemically synthesized
  source 1..20: mol_type = other DNA
gctctttagtctgactgcca

SEQ ID NO: 20709 - DNA, 20 bp, synthetic construct
  misc_feature 1..20: note = chemically synthesized
  source 1..20: mol_type = other DNA
agtctgaatcctgaatgttt

SEQ ID NO: 20710 - DNA, 20 bp, synthetic construct
  misc_feature 1..20: note = chemically synthesized
  source 1..20: mol_type = other DNA
aatgttttagtatgttacct

SEQ ID NO: 20711 - DNA, 20 bp, synthetic construct
  misc_feature 1..20: note = chemically synthesized
  source 1..20: mol_type = other DNA
atgttttagtatgttacctt

SEQ ID NO: 20712 - DNA, 20 bp, synthetic construct
  misc_feature 1..20: note = chemically synthesized
  source 1..20: mol_type = other DNA
ttagtatgttaccttgggca

SEQ ID NO: 20713 - DNA, 20 bp, synthetic construct
  misc_feature 1..20: note = chemically synthesized
  source 1..20: mol_type = other DNA
gttaccttgggcaaagccct

SEQ ID NO: 20714 - DNA, 20 bp, synthetic construct
  misc_feature 1..20: note = chemically synthesized
  source 1..20: mol_type = other DNA
tcttcctcattcataaaaat

SEQ ID NO: 20715 - DNA, 20 bp, synthetic construct
  misc_feature 1..20: note = chemically synthesized
  source 1..20: mol_type = other DNA
cattcataaaaataagatga

SEQ ID NO: 20716 - DNA, 20 bp, synthetic construct
  misc_feature 1..20: note = chemically synthesized
  source 1..20: mol_type = other DNA
agatgacagtgcctatctcg

SEQ ID NO: 20717 - DNA, 20 bp, synthetic construct
  misc_feature 1..20: note = chemically synthesized
  source 1..20: mol_type = other DNA
gatgacagtgcctatctcgt

SEQ ID NO: 20718 - DNA, 20 bp, synthetic construct
  misc_feature 1..20: note = chemically synthesized
  source 1..20: mol_type = other DNA
ctatctcgtgggacttttgt

SEQ ID NO: 20719 - DNA, 20 bp, synthetic construct
  misc_feature 1..20: note = chemically synthesized
  source 1..20: mol_type = other DNA
tatctcgtgggacttttgtg

SEQ ID NO: 20720 - DNA, 20 bp, synthetic construct
  misc_feature 1..20: note = chemically synthesized
  source 1..20: mol_type = other DNA
gtgggacttttgtgaggatg

SEQ ID NO: 20721 - DNA, 20 bp, synthetic construct
  misc_feature 1..20: note = chemically synthesized
  source 1..20: mol_type = other DNA
gacttttgtgaggatgaagt

SEQ ID NO: 20722 - DNA, 20 bp, synthetic construct
  misc_feature 1..20: note = chemically synthesized
  source 1..20: mol_type = other DNA
gtgaggatgaagtgagataa

SEQ ID NO: 20723 - DNA, 20 bp, synthetic construct
  misc_feature 1..20: note = chemically synthesized
  source 1..20: mol_type = other DNA
gaagtgagataatggatgca

SEQ ID NO: 20724 - DNA, 20 bp, synthetic construct
  misc_feature 1..20: note = chemically synthesized
  source 1..20: mol_type = other DNA
ataatggatgcaaagttact

SEQ ID NO: 20725 - DNA, 20 bp, synthetic construct
  misc_feature 1..20: note = chemically synthesized
  source 1..20: mol_type = other DNA
ggatgcaaagttactgagca

SEQ ID NO: 20726 - DNA, 20 bp, synthetic construct
  misc_feature 1..20: note = chemically synthesized
  source 1..20: mol_type = other DNA
actgagcacagtgtccaaca

SEQ ID NO: 20727 - DNA, 20 bp, synthetic construct
  misc_feature 1..20: note = chemically synthesized
  source 1..20: mol_type = other DNA
gagcacagtgtccaacacag

SEQ ID NO: 20728 - DNA, 20 bp, synthetic construct
  misc_feature 1..20: note = chemically synthesized
  source 1..20: mol_type = other DNA
cacagtgtccaacacagcag

SEQ ID NO: 20729 - DNA, 20 bp, synthetic construct
  misc_feature 1..20: note = chemically synthesized
  source 1..20: mol_type = other DNA
cagaagcattacatatacat

SEQ ID NO: 20730 - DNA, 20 bp, synthetic construct
  misc_feature 1..20: note = chemically synthesized
  source 1..20: mol_type = other DNA
acatatacattagctattac

SEQ ID NO: 20731 - DNA, 20 bp, synthetic construct
  misc_feature 1..20: note = chemically synthesized
  source 1..20: mol_type = other DNA
actggctacattatgatata

SEQ ID NO: 20732 - DNA, 20 bp, synthetic construct
  misc_feature 1..20: note = chemically synthesized
  source 1..20: mol_type = other DNA
gctacattatgatatacagt

SEQ ID NO: 20733 - DNA, 20 bp, synthetic construct
  misc_feature 1..20: note = chemically synthesized
  source 1..20: mol_type = other DNA
ctacattatgatatacagtt

SEQ ID NO: 20734 - DNA, 20 bp, synthetic construct
  misc_feature 1..20: note = chemically synthesized
  source 1..20: mol_type = other DNA
tacattatgatatacagtta

SEQ ID NO: 20735 - DNA, 20 bp, synthetic construct
  misc_feature 1..20: note = chemically synthesized
  source 1..20: mol_type = other DNA
cattatgatatacagttagg

SEQ ID NO: 20736 - DNA, 20 bp, synthetic construct
  misc_feature 1..20: note = chemically synthesized
  source 1..20: mol_type = other DNA
atgatatacagttagggagt

SEQ ID NO: 20737 - DNA, 20 bp, synthetic construct
  misc_feature 1..20: note = chemically synthesized
  source 1..20: mol_type = other DNA
tatacagttagggagttgga

SEQ ID NO: 20738 - DNA, 20 bp, synthetic construct
  misc_feature 1..20: note = chemically synthesized
  source 1..20: mol_type = other DNA
tggaaagataatctgaaatt

SEQ ID NO: 20739 - DNA, 20 bp, synthetic construct
  misc_feature 1..20: note = chemically synthesized
  source 1..20: mol_type = other DNA
ggaaagataatctgaaattc

SEQ ID NO: 20740 - DNA, 20 bp, synthetic construct
  misc_feature 1..20: note = chemically synthesized
  source 1..20: mol_type = other DNA
aaagataatctgaaattcag

SEQ ID NO: 20741 - DNA, 20 bp, synthetic construct
  misc_feature 1..20: note = chemically synthesized
  source 1..20: mol_type = other DNA
tcaggagacgtatctgacta

SEQ ID NO: 20742 - DNA, 20 bp, synthetic construct
  misc_feature 1..20: note = chemically synthesized
  source 1..20: mol_type = other DNA
caggagacgtatctgactat

SEQ ID NO: 20743 - DNA, 20 bp, synthetic construct
  misc_feature 1..20: note = chemically synthesized
  source 1..20: mol_type = other DNA
agacgtatctgactataggt

SEQ ID NO: 20744 - DNA, 20 bp, synthetic construct
  misc_feature 1..20: note = chemically synthesized
  source 1..20: mol_type = other DNA
tctgactataggtgagtatt

SEQ ID NO: 20745 - DNA, 20 bp, synthetic construct
  misc_feature 1..20: note = chemically synthesized
  source 1..20: mol_type = other DNA
ggaactcattgttctgtaaa

SEQ ID NO: 20746 - DNA, 20 bp, synthetic construct
  misc_feature 1..20: note = chemically synthesized
  source 1..20: mol_type = other DNA
actcattgttctgtaaacag

SEQ ID NO: 20747 - DNA, 20 bp, synthetic construct
  misc_feature 1..20: note = chemically synthesized
  source 1..20: mol_type = other DNA
tgttctgtaaacagtagtta

SEQ ID NO: 20748 - DNA, 20 bp, synthetic construct
  misc_feature 1..20: note = chemically synthesized
  source 1..20: mol_type = other DNA
agtagttacagccacgtgtg

SEQ ID NO: 20749 - DNA, 20 bp, synthetic construct
  misc_feature 1..20: note = chemically synthesized
  source 1..20: mol_type = other DNA
gtagttacagccacgtgtgt

SEQ ID NO: 20750 - DNA, 20 bp, synthetic construct
  misc_feature 1..20: note = chemically synthesized
  source 1..20: mol_type = other DNA
cagccacgtgtgtgggcatc

SEQ ID NO: 20751 - DNA, 20 bp, synthetic construct
  misc_feature 1..20: note = chemically synthesized
  source 1..20: mol_type = other DNA
gccacgtgtgtgggcatctg

SEQ ID NO: 20752 - DNA, 20 bp, synthetic construct
  misc_feature 1..20: note = chemically synthesized
  source 1..20: mol_type = other DNA
cacgtgtgtgggcatctgga

SEQ ID NO: 20753 - DNA, 20 bp, synthetic construct
  misc_feature 1..20: note = chemically synthesized
  source 1..20: mol_type = other DNA
tgtgtgggcatctggagagt

SEQ ID NO: 20754 - DNA, 20 bp, synthetic construct
  misc_feature 1..20: note = chemically synthesized
  source 1..20: mol_type = other DNA
gggcatctggagagtgagca

SEQ ID NO: 20755 - DNA, 20 bp, synthetic construct
  misc_feature 1..20: note = chemically synthesized
  source 1..20: mol_type = other DNA
agcatggatattgtgatacc

SEQ ID NO: 20756 - DNA, 20 bp, synthetic construct
  misc_feature 1..20: note = chemically synthesized
  source 1..20: mol_type = other DNA
ggatattgtgatacctagta

SEQ ID NO: 20757 - DNA, 20 bp, synthetic construct
  misc_feature 1..20: note = chemically synthesized
  source 1..20: mol_type = other DNA
gtgatacctagtacagtgcc

SEQ ID NO: 20758 - DNA, 20 bp, synthetic construct
  misc_feature 1..20: note = chemically synthesized
  source 1..20: mol_type = other DNA
atacctagtacagtgcctgg

SEQ ID NO: 20759 - DNA, 20 bp, synthetic construct
  misc_feature 1..20: note = chemically synthesized
  source 1..20: mol_type = other DNA
cctagtacagtgcctggcag

SEQ ID NO: 20760 - DNA, 20 bp, synthetic construct
  misc_feature 1..20: note = chemically synthesized
  source 1..20: mol_type = other DNA
agtacagtgcctggcagtag

SEQ ID NO: 20761 - DNA, 20 bp, synthetic construct
  misc_feature 1..20: note = chemically synthesized
  source 1..20: mol_type = other DNA
ggcagtagtggttgtatgct

SEQ ID NO: 20762 - DNA, 20 bp, synthetic construct
  misc_feature 1..20: note = chemically synthesized
  source 1..20: mol_type = other DNA
tgctcagtaaattttgttga

SEQ ID NO: 20763 - DNA, 20 bp, synthetic construct
  misc_feature 1..20: note = chemically synthesized
  source 1..20: mol_type = other DNA
gctcagtaaattttgttgac

SEQ ID NO: 20764 - DNA, 20 bp, synthetic construct
  misc_feature 1..20: note = chemically synthesized
  source 1..20: mol_type = other DNA
ctcagtaaattttgttgaca

SEQ ID NO: 20765 - DNA, 20 bp, synthetic construct
  misc_feature 1..20: note = chemically synthesized
  source 1..20: mol_type = other DNA
gtaaattttgttgacagggt

SEQ ID NO: 20766 - DNA, 20 bp, synthetic construct
  misc_feature 1..20: note = chemically synthesized
  source 1..20: mol_type = other DNA
taaattttgttgacagggtc

SEQ ID NO: 20767 - DNA, 20 bp, synthetic construct
  misc_feature 1..20: note = chemically synthesized
  source 1..20: mol_type = other DNA
aaattttgttgacagggtca

SEQ ID NO: 20768 - DNA, 20 bp, synthetic construct
  misc_feature 1..20: note = chemically synthesized
  source 1..20: mol_type = other DNA
tttgttgacagggtcagggc

SEQ ID NO: 20769 - DNA, 20 bp, synthetic construct
  misc_feature 1..20: note = chemically synthesized
  source 1..20: mol_type = other DNA
tgacagggtcagggccggac

SEQ ID NO: 20770 - DNA, 20 bp, synthetic construct
  misc_feature 1..20: note = chemically synthesized
  source 1..20: mol_type = other DNA
gtcagggccggactagactg

SEQ ID NO: 20771 - DNA, 20 bp, synthetic construct
  misc_feature 1..20: note = chemically synthesized
  source 1..20: mol_type = other DNA
gggccggactagactgtggt

SEQ ID NO: 20772 - DNA, 20 bp, synthetic construct
  misc_feature 1..20: note = chemically synthesized
  source 1..20: mol_type = other DNA
cggactagactgtggtaagc

SEQ ID NO: 20773 - DNA, 20 bp, synthetic construct
  misc_feature 1..20: note = chemically synthesized
  source 1..20: mol_type = other DNA
ggactagactgtggtaagca

SEQ ID NO: 20774 - DNA, 20 bp, synthetic construct
  misc_feature 1..20: note = chemically synthesized
  source 1..20: mol_type = other DNA
actgtggtaagcaaggcctg

SEQ ID NO: 20775 - DNA, 20 bp, synthetic construct
  misc_feature 1..20: note = chemically synthesized
  source 1..20: mol_type = other DNA
ctgtggtaagcaaggcctgt

SEQ ID NO: 20776 - DNA, 20 bp, synthetic construct
  misc_feature 1..20: note = chemically synthesized
  source 1..20: mol_type = other DNA
tgtggtaagcaaggcctgta

SEQ ID NO: 20777 - DNA, 20 bp, synthetic construct
  misc_feature 1..20: note = chemically synthesized
  source 1..20: mol_type = other DNA
taaatatacttgtatgcccc

SEQ ID NO: 20778 - DNA, 20 bp, synthetic construct
  misc_feature 1..20: note = chemically synthesized
  source 1..20: mol_type = other DNA
atatacttgtatgccccgag

SEQ ID NO: 20779 - DNA, 20 bp, synthetic construct
  misc_feature 1..20: note = chemically synthesized
  source 1..20: mol_type = other DNA
acttgtatgccccgagaagt

SEQ ID NO: 20780 - DNA, 20 bp, synthetic construct
  misc_feature 1..20: note = chemically synthesized
  source 1..20: mol_type = other DNA
cttgtatgccccgagaagtg

SEQ ID NO: 20781 - DNA, 20 bp, synthetic construct
  misc_feature 1..20: note = chemically synthesized
  source 1..20: mol_type = other DNA
tgtgccctacatgccttgtt

SEQ ID NO: 20782 - DNA, 20 bp, synthetic construct
  misc_feature 1..20: note = chemically synthesized
  source 1..20: mol_type = other DNA
tgtttggttcactcttgtcc

SEQ ID NO: 20783 - DNA, 20 bp, synthetic construct
  misc_feature 1..20: note = chemically synthesized
  source 1..20: mol_type = other DNA
gttcactcttgtcccagccc

SEQ ID NO: 20784 - DNA, 20 bp, synthetic construct
  misc_feature 1..20: note = chemically synthesized
  source 1..20: mol_type = other DNA
actcttgtcccagccctagc

SEQ ID NO: 20785 - DNA, 20 bp, synthetic construct
  misc_feature 1..20: note = chemically synthesized
  source 1..20: mol_type = other DNA
cagccctagcaagtatatat

SEQ ID NO: 20786 - DNA, 20 bp, synthetic construct
  misc_feature 1..20: note = chemically synthesized
  source 1..20: mol_type = other DNA
agccctagcaagtatatata

SEQ ID NO: 20787 - DNA, 20 bp, synthetic construct
  misc_feature 1..20: note = chemically synthesized
  source 1..20: mol_type = other DNA
caagtatatataaggtgaaa

SEQ ID NO: 20788 - DNA, 20 bp, synthetic construct
  misc_feature 1..20: note = chemically synthesized
  source 1..20: mol_type = other DNA
aagtatatataaggtgaaaa

SEQ ID NO: 20789 - DNA, 20 bp, synthetic construct
  misc_feature 1..20: note = chemically synthesized
  source 1..20: mol_type = other DNA
atataaggtgaaaaaggaaa

SEQ ID NO: 20790 - DNA, 20 bp, synthetic construct
  misc_feature 1..20: note = chemically synthesized
  source 1..20: mol_type = other DNA
aggtgaaaaaggaaaaagct

SEQ ID NO: 20791 - DNA, 20 bp, synthetic construct
  misc_feature 1..20: note = chemically synthesized
  source 1..20: mol_type = other DNA
ggtgaaaaaggaaaaagctg

SEQ ID NO: 20792 - DNA, 20 bp, synthetic construct
  misc_feature 1..20: note = chemically synthesized
  source 1..20: mol_type = other DNA
aaaaaggaaaaagctgaggc

SEQ ID NO: 20793 - DNA, 20 bp, synthetic construct
  misc_feature 1..20: note = chemically synthesized
  source 1..20: mol_type = other DNA
aaaggaaaaagctgaggctg

SEQ ID NO: 20794 - DNA, 20 bp, synthetic construct
  misc_feature 1..20: note = chemically synthesized
  source 1..20: mol_type = other DNA
aaaaagctgaggctggagcc

SEQ ID NO: 20795 - DNA, 20 bp, synthetic construct
  misc_feature 1..20: note = chemically synthesized
  source 1..20: mol_type = other DNA
aaaagctgaggctggagcct

SEQ ID NO: 20796 - DNA, 20 bp, synthetic construct
  misc_feature 1..20: note = chemically synthesized
  source 1..20: mol_type = other DNA
aagctgaggctggagcctgg

SEQ ID NO: 20797 - DNA, 20 bp, synthetic construct
  misc_feature 1..20: note = chemically synthesized
  source 1..20: mol_type = other DNA
gctggagcctgggagaaccc

SEQ ID NO: 20798 - DNA, 20 bp, synthetic construct
  misc_feature 1..20: note = chemically synthesized
  source 1..20: mol_type = other DNA
tgggagaaccctggacattt

SEQ ID NO: 20799 - DNA, 20 bp, synthetic construct
  misc_feature 1..20: note = chemically synthesized
  source 1..20: mol_type = other DNA
gggagaaccctggacattta

SEQ ID NO: 20800 - DNA, 20 bp, synthetic construct
  misc_feature 1..20: note = chemically synthesized
  source 1..20: mol_type = other DNA
ggagaaccctggacatttaa

SEQ ID NO: 20801 - DNA, 20 bp, synthetic construct
  misc_feature 1..20: note = chemically synthesized
  source 1..20: mol_type = other DNA
ccctggacatttaagggcca

SEQ ID NO: 20802 - DNA, 20 bp, synthetic construct
  misc_feature 1..20: note = chemically synthesized
  source 1..20: mol_type = other DNA
ctggacatttaagggccatg

SEQ ID NO: 20803 - DNA, 20 bp, synthetic construct
  misc_feature 1..20: note = chemically synthesized
  source 1..20: mol_type = other DNA
ggacatttaagggccatgga

SEQ ID NO: 20804 - DNA, 20 bp, synthetic construct
  misc_feature 1..20: note = chemically synthesized
  source 1..20: mol_type = other DNA
gacatttaagggccatggag

SEQ ID NO: 20805 - DNA, 20 bp, synthetic construct
  misc_feature 1..20: note = chemically synthesized
  source 1..20: mol_type = other DNA
ttaagggccatggagaggaa

SEQ ID NO: 20806 - DNA, 20 bp, synthetic construct
  misc_feature 1..20: note = chemically synthesized
  source 1..20: mol_type = other DNA
taagggccatggagaggaac

SEQ ID NO: 20807 - DNA, 20 bp, synthetic construct
  misc_feature 1..20: note = chemically synthesized
  source 1..20: mol_type = other DNA
agggccatggagaggaacag

SEQ ID NO: 20808 - DNA, 20 bp, synthetic construct
  misc_feature 1..20: note = chemically synthesized
  source 1..20: mol_type = other DNA
gaacaggagttaatcaattc

SEQ ID NO: 20809 - DNA, 20 bp, synthetic construct
  misc_feature 1..20: note = chemically synthesized
  source 1..20: mol_type = other DNA
gagttaatcaattcaagtgc

SEQ ID NO: 20810 - DNA, 20 bp, synthetic construct
  misc_feature 1..20: note = chemically synthesized
  source 1..20: mol_type = other DNA
taatcaattcaagtgctgga

SEQ ID NO: 20811 - DNA, 20 bp, synthetic construct
  misc_feature 1..20: note = chemically synthesized
  source 1..20: mol_type = other DNA
ttcaagtgctggatggataa

SEQ ID NO: 20812 - DNA, 20 bp, synthetic construct
  misc_feature 1..20: note = chemically synthesized
  source 1..20: mol_type = other DNA
tcaagtgctggatggataac

SEQ ID NO: 20813 - DNA, 20 bp, synthetic construct
  misc_feature 1..20: note = chemically synthesized
  source 1..20: mol_type = other DNA
aagtgctggatggataacag

SEQ ID NO: 20814 - DNA, 20 bp, synthetic construct
  misc_feature 1..20: note = chemically synthesized
  source 1..20: mol_type = other DNA
gctggatggataacaggagt

SEQ ID NO: 20815 - DNA, 20 bp, synthetic construct
  misc_feature 1..20: note = chemically synthesized
  source 1..20: mol_type = other DNA
tggatggataacaggagtta

SEQ ID NO: 20816 - DNA, 20 bp, synthetic construct
  misc_feature 1..20: note = chemically synthesized
  source 1..20: mol_type = other DNA
ggataacaggagttagagca

SEQ ID NO: 20817 - DNA, 20 bp, synthetic construct
  misc_feature 1..20: note = chemically synthesized
  source 1..20: mol_type = other DNA
taacaggagttagagcaaag

SEQ ID NO: 20818 - DNA, 20 bp, synthetic construct
  misc_feature 1..20: note = chemically synthesized
  source 1..20: mol_type = other DNA
aacaggagttagagcaaagc

SEQ ID NO: 20819 - DNA, 20 bp, synthetic construct
  misc_feature 1..20: note = chemically synthesized
  source 1..20: mol_type = other DNA
acaggagttagagcaaagcg

SEQ ID NO: 20820 - DNA, 20 bp, synthetic construct
  misc_feature 1..20: note = chemically synthesized
  source 1..20: mol_type = other DNA
gttagagcaaagcggggaac

SEQ ID NO: 20821 - DNA, 20 bp, synthetic construct
  misc_feature 1..20: note = chemically synthesized
  source 1..20: mol_type = other DNA
agcaaagcggggaaccagaa

SEQ ID NO: 20822 - DNA, 20 bp, synthetic construct
  misc_feature 1..20: note = chemically synthesized
  source 1..20: mol_type = other DNA
caaagcggggaaccagaata

SEQ ID NO: 20823 - DNA, 20 bp, synthetic construct
  misc_feature 1..20: note = chemically synthesized
  source 1..20: mol_type = other DNA
aatagagtgattattataaa

SEQ ID NO: 20824 - DNA, 20 bp, synthetic construct
  misc_feature 1..20: note = chemically synthesized
  source 1..20: mol_type = other DNA
tagagtgattattataaaaa

SEQ ID NO: 20825 - DNA, 20 bp, synthetic construct
  misc_feature 1..20: note = chemically synthesized
  source 1..20: mol_type = other DNA
tataaaaagagtttcctaaa

SEQ ID NO: 20826 - DNA, 20 bp, synthetic construct
  misc_feature 1..20: note = chemically synthesized
  source 1..20: mol_type = other DNA
ataaaaagagtttcctaaaa

SEQ ID NO: 20827 - DNA, 20 bp, synthetic construct
  misc_feature 1..20: note = chemically synthesized
  source 1..20: mol_type = other DNA
taaaaagagtttcctaaaaa

SEQ ID NO: 20828 - DNA, 20 bp, synthetic construct
  misc_feature 1..20: note = chemically synthesized
  source 1..20: mol_type = other DNA
aaaagagtttcctaaaaagg

SEQ ID NO: 20829 - DNA, 20 bp, synthetic construct
  misc_feature 1..20: note = chemically synthesized
  source 1..20: mol_type = other DNA
aagagtttcctaaaaaggga

SEQ ID NO: 20830 - DNA, 20 bp, synthetic construct
  misc_feature 1..20: note = chemically synthesized
  source 1..20: mol_type = other DNA
aaaagggagagatcaacaat

SEQ ID NO: 20831 - DNA, 20 bp, synthetic construct
  misc_feature 1..20: note = chemically synthesized
  source 1..20: mol_type = other DNA
atcaacaattagaaattatt

SEQ ID NO: 20832 - DNA, 20 bp, synthetic construct
  misc_feature 1..20: note = chemically synthesized
  source 1..20: mol_type = other DNA
caacaattagaaattattta

SEQ ID NO: 20833 - DNA, 20 bp, synthetic construct
  misc_feature 1..20: note = chemically synthesized
  source 1..20: mol_type = other DNA
caattagaaattatttagag

SEQ ID NO: 20834 - DNA, 20 bp, synthetic construct
  misc_feature 1..20: note = chemically synthesized
  source 1..20: mol_type = other DNA
tagaaattatttagagcagc

SEQ ID NO: 20835 - DNA, 20 bp, synthetic construct
  misc_feature 1..20: note = chemically synthesized
  source 1..20: mol_type = other DNA
ataaactcaaaattattctt

SEQ ID NO: 20836 - DNA, 20 bp, synthetic construct
  misc_feature 1..20: note = chemically synthesized
  source 1..20: mol_type = other DNA
taaactcaaaattattcttt

SEQ ID NO: 20837 - DNA, 20 bp, synthetic construct
  misc_feature 1..20: note = chemically synthesized
  source 1..20: mol_type = other DNA
gtcattcctgattgtgacaa

SEQ ID NO: 20838 - DNA, 20 bp, synthetic construct
  misc_feature 1..20: note = chemically synthesized
  source 1..20: mol_type = other DNA
ttcattatataaatgtgatt

SEQ ID NO: 20839 - DNA, 20 bp, synthetic construct
  misc_feature 1..20: note = chemically synthesized
  source 1..20: mol_type = other DNA
tcattatataaatgtgatta

SEQ ID NO: 20840 - DNA, 20 bp, synthetic construct
  misc_feature 1..20: note = chemically synthesized
  source 1..20: mol_type = other DNA
ttatataaatgtgattaagg

SEQ ID NO: 20841 - DNA, 20 bp, synthetic construct
  misc_feature 1..20: note = chemically synthesized
  source 1..20: mol_type = other DNA
tatataaatgtgattaagga

SEQ ID NO: 20842 - DNA, 20 bp, synthetic construct
  misc_feature 1..20: note = chemically synthesized
  source 1..20: mol_type = other DNA
aaatgtgattaaggaaggaa

SEQ ID NO: 20843 - DNA, 20 bp, synthetic construct
  misc_feature 1..20: note = chemically synthesized
  source 1..20: mol_type = other DNA
atgtgattaaggaaggaaaa

SEQ ID NO: 20844 - DNA, 20 bp, synthetic construct
  misc_feature 1..20: note = chemically synthesized
  source 1..20: mol_type = other DNA
aaggaaggaaaagagctaca

SEQ ID NO: 20845 - DNA, 20 bp, synthetic construct
  misc_feature 1..20: note = chemically synthesized
  source 1..20: mol_type = other DNA
gaaggaaaagagctacacag

SEQ ID NO: 20846 - DNA, 20 bp, synthetic construct
  misc_feature 1..20: note = chemically synthesized
  source 1..20: mol_type = other DNA
gagctacacagaagttatta

SEQ ID NO: 20847 - DNA, 20 bp, synthetic construct
  misc_feature 1..20: note = chemically synthesized
  source 1..20: mol_type = other DNA
gctacacagaagttattaaa

SEQ ID NO: 20848 - DNA, 20 bp, synthetic construct
  misc_feature 1..20: note = chemically synthesized
  source 1..20: mol_type = other DNA
cagaagttattaaagagcta

SEQ ID NO: 20849 - DNA, 20 bp, synthetic construct
  misc_feature 1..20: note = chemically synthesized
  source 1..20: mol_type = other DNA
gaagttattaaagagctaaa

SEQ ID NO: 20850 - DNA, 20 bp, synthetic construct
  misc_feature 1..20: note = chemically synthesized
  source 1..20: mol_type = other DNA
ttaaagagctaaagagaatt

SEQ ID NO: 20851 - DNA, 20 bp, synthetic construct
  misc_feature 1..20: note = chemically synthesized
  source 1..20: mol_type = other DNA
gagaattgagaaatttaaaa

SEQ ID NO: 20852 - DNA, 20 bp, synthetic construct
  misc_feature 1..20: note = chemically synthesized
  source 1..20: mol_type = other DNA
aattgagaaatttaaaacag

SEQ ID NO: 20853 - DNA, 20 bp, synthetic construct
  misc_feature 1..20: note = chemically synthesized
  source 1..20: mol_type = other DNA
gagaaatttaaaacagaaga

SEQ ID NO: 20854 - DNA, 20 bp, synthetic construct
  misc_feature 1..20: note = chemically synthesized
  source 1..20: mol_type = other DNA
aaatttaaaacagaagaaag

SEQ ID NO: 20855 - DNA, 20 bp, synthetic construct
  misc_feature 1..20: note = chemically synthesized
  source 1..20: mol_type = other DNA
aatttaaaacagaagaaagt

SEQ ID NO: 20856 - DNA, 20 bp, synthetic construct
  misc_feature 1..20: note = chemically synthesized
  source 1..20: mol_type = other DNA
atttaaaacagaagaaagta

SEQ ID NO: 20857 - DNA, 20 bp, synthetic construct
  misc_feature 1..20: note = chemically synthesized
  source 1..20: mol_type = other DNA
agaaagtagggccaacatga

SEQ ID NO: 20858 - DNA, 20 bp, synthetic construct
  misc_feature 1..20: note = chemically synthesized
  source 1..20: mol_type = other DNA
gaaagtagggccaacatgaa

SEQ ID NO: 20859 - DNA, 20 bp, synthetic construct
  misc_feature 1..20: note = chemically synthesized
  source 1..20: mol_type = other DNA
aagtagggccaacatgaaag

SEQ ID NO: 20860 - DNA, 20 bp, synthetic construct
  misc_feature 1..20: note = chemically synthesized
  source 1..20: mol_type = other DNA
tagggccaacatgaaaggag

SEQ ID NO: 20861 - DNA, 20 bp, synthetic construct
  misc_feature 1..20: note = chemically synthesized
  source 1..20: mol_type = other DNA
agggccaacatgaaaggagt

SEQ ID NO: 20862 - DNA, 20 bp, synthetic construct
  misc_feature 1..20: note = chemically synthesized
  source 1..20: mol_type = other DNA
gggccaacatgaaaggagta

SEQ ID NO: 20863 - DNA, 20 bp, synthetic construct
  misc_feature 1..20: note = chemically synthesized
  source 1..20: mol_type = other DNA
gccaacatgaaaggagtagg

SEQ ID NO: 20864 - DNA, 20 bp, synthetic construct
  misc_feature 1..20: note = chemically synthesized
  source 1..20: mol_type = other DNA
atgaaaggagtagggagaaa

SEQ ID NO: 20865 - DNA, 20 bp, synthetic construct
  misc_feature 1..20: note = chemically synthesized
  source 1..20: mol_type = other DNA
gaaaggagtagggagaaaaa

SEQ ID NO: 20866 - DNA, 20 bp, synthetic construct
  misc_feature 1..20: note = chemically synthesized
  source 1..20: mol_type = other DNA
tagggagaaaaagagataac

SEQ ID NO: 20867 - DNA, 20 bp, synthetic construct
  misc_feature 1..20: note = chemically synthesized
  source 1..20: mol_type = other DNA
ctgatcctgccaacacctgt

SEQ ID NO: 20868 - DNA, 20 bp, synthetic construct
  misc_feature 1..20: note = chemically synthesized
  source 1..20: mol_type = other DNA
tcctgccaacacctgtgaga

SEQ ID NO: 20869 - DNA, 20 bp, synthetic construct
  misc_feature 1..20: note = chemically synthesized
  source 1..20: mol_type = other DNA
aacctaatttacatttgaca

SEQ ID NO: 20870 - DNA, 20 bp, synthetic construct
  misc_feature 1..20: note = chemically synthesized
  source 1..20: mol_type = other DNA
aatttacatttgacaaagtt

SEQ ID NO: 20871 - DNA, 20 bp, synthetic construct
  misc_feature 1..20: note = chemically synthesized
  source 1..20: mol_type = other DNA
atttacatttgacaaagtta

SEQ ID NO: 20872 - DNA, 20 bp, synthetic construct
  misc_feature 1..20: note = chemically synthesized
  source 1..20: mol_type = other DNA
catttgacaaagttaaggtt

SEQ ID NO: 20873 - DNA, 20 bp, synthetic construct
  misc_feature 1..20: note = chemically synthesized
  source 1..20: mol_type = other DNA
tttgacaaagttaaggttca

SEQ ID NO: 20874 - DNA, 20 bp, synthetic construct
  misc_feature 1..20: note = chemically synthesized
  source 1..20: mol_type = other DNA
agagcttgtgtgacttgtcc

SEQ ID NO: 20875 - DNA, 20 bp, synthetic construct
  misc_feature 1..20: note = chemically synthesized
  source 1..20: mol_type = other DNA
gagcttgtgtgacttgtcca

SEQ ID NO: 20876 - DNA, 20 bp, synthetic construct
  misc_feature 1..20: note = chemically synthesized
  source 1..20: mol_type = other DNA
gtgtgacttgtccaaggtca

SEQ ID NO: 20877 - DNA, 20 bp, synthetic construct
  misc_feature 1..20: note = chemically synthesized
  source 1..20: mol_type = other DNA
tgtgacttgtccaaggtcac

SEQ ID NO: 20878 - DNA, 20 bp, synthetic construct
  misc_feature 1..20: note = chemically synthesized
  source 1..20: mol_type = other DNA
cttgtccaaggtcacaggtc

SEQ ID NO: 20879 - DNA, 20 bp, synthetic construct
  misc_feature 1..20: note = chemically synthesized
  source 1..20: mol_type = other DNA
tgtccaaggtcacaggtcta

SEQ ID NO: 20880 - DNA, 20 bp, synthetic construct
  misc_feature 1..20: note = chemically synthesized
  source 1..20: mol_type = other DNA
gtccaaggtcacaggtctag

SEQ ID NO: 20881 - DNA, 20 bp, synthetic construct
  misc_feature 1..20: note = chemically synthesized
  source 1..20: mol_type = other DNA
ccaaggtcacaggtctagag

SEQ ID NO: 20882 - DNA, 20 bp, synthetic construct
  misc_feature 1..20: note = chemically synthesized
  source 1..20: mol_type = other DNA
caaggtcacaggtctagagg

SEQ ID NO: 20883 - DNA, 20 bp, synthetic construct
  misc_feature 1..20: note = chemically synthesized
  source 1..20: mol_type = other DNA
ggtcacaggtctagaggagg

SEQ ID NO: 20884 - DNA, 20 bp, synthetic construct
  misc_feature 1..20: note = chemically synthesized
  source 1..20: mol_type = other DNA
ttctgtctgatctgattcta

SEQ ID NO: 20885 - DNA, 20 bp, synthetic construct
  misc_feature 1..20: note = chemically synthesized
  source 1..20: mol_type = other DNA
tttcactcaaccacactgta

SEQ ID NO: 20886 - DNA, 20 bp, synthetic construct
  misc_feature 1..20: note = chemically synthesized
  source 1..20: mol_type = other DNA
actcaaccacactgtacagt

SEQ ID NO: 20887 - DNA, 20 bp, synthetic construct
  misc_feature 1..20: note = chemically synthesized
  source 1..20: mol_type = other DNA
gtacagtcagctctccttgt

SEQ ID NO: 20888 - DNA, 20 bp, synthetic construct
  misc_feature 1..20: note = chemically synthesized
  source 1..20: mol_type = other DNA
agctctccttgtgagttcca

SEQ ID NO: 20889 - DNA, 20 bp, synthetic construct
  misc_feature 1..20: note = chemically synthesized
  source 1..20: mol_type = other DNA
ccttgtgagttccacagcca

SEQ ID NO: 20890 - DNA, 20 bp, synthetic construct
  misc_feature 1..20: note = chemically synthesized
  source 1..20: mol_type = other DNA
gccacagattcaattaactg

SEQ ID NO: 20891 - DNA, 20 bp, synthetic construct
  misc_feature 1..20: note = chemically synthesized
  source 1..20: mol_type = other DNA
actgcagatcaaaaatattc

SEQ ID NO: 20892 - DNA, 20 bp, synthetic construct
  misc_feature 1..20: note = chemically synthesized
  source 1..20: mol_type = other DNA
aaaaatattcaagaaaaaaa

SEQ ID NO: 20893 - DNA, 20 bp, synthetic construct
  misc_feature 1..20: note = chemically synthesized
  source 1..20: mol_type = other DNA
atattcaagaaaaaaatgga

SEQ ID NO: 20894 - DNA, 20 bp, synthetic construct
  misc_feature 1..20: note = chemically synthesized
  source 1..20: mol_type = other DNA
gcatctctactgaacatgta

SEQ ID NO: 20895 - DNA, 20 bp, synthetic construct
  misc_feature 1..20: note = chemically synthesized
  source 1..20: mol_type = other DNA
tcattattccctaaacaata

SEQ ID NO: 20896 - DNA, 20 bp, synthetic construct
  misc_feature 1..20: note = chemically synthesized
  source 1..20: mol_type = other DNA
cagcataacaactatttaca

SEQ ID NO: 20897 - DNA, 20 bp, synthetic construct
  misc_feature 1..20: note = chemically synthesized
  source 1..20: mol_type = other DNA
acatagcatttacattgtat

SEQ ID NO: 20898 - DNA, 20 bp, synthetic construct
  misc_feature 1..20: note = chemically synthesized
  source 1..20: mol_type = other DNA
tttacattgtattagctatt

SEQ ID NO: 20899 - DNA, 20 bp, synthetic construct
  misc_feature 1..20: note = chemically synthesized
  source 1..20: mol_type = other DNA
tacattgtattagctattaa

SEQ ID NO: 20900 - DNA, 20 bp, synthetic construct
  misc_feature 1..20: note = chemically synthesized
  source 1..20: mol_type = other DNA
attagctattaagagaaacc

SEQ ID NO: 20901 - DNA, 20 bp, synthetic construct
  misc_feature 1..20: note = chemically synthesized
  source 1..20: mol_type = other DNA
tagctattaagagaaaccta

SEQ ID NO: 20902 - DNA, 20 bp, synthetic construct
  misc_feature 1..20: note = chemically synthesized
  source 1..20: mol_type = other DNA
agaaacctagagatgattta

SEQ ID NO: 20903 - DNA, 20 bp, synthetic construct
  misc_feature 1..20: note = chemically synthesized
  source 1..20: mol_type = other DNA
tagagatgatttaaagtaca

SEQ ID NO: 20904 - DNA, 20 bp, synthetic construct
  misc_feature 1..20: note = chemically synthesized
  source 1..20: mol_type = other DNA
agagatgatttaaagtacaa

SEQ ID NO: 20905 - DNA, 20 bp, synthetic construct
  misc_feature 1..20: note = chemically synthesized
  source 1..20: mol_type = other DNA
agatgatttaaagtacaaag

SEQ ID NO: 20906 - DNA, 20 bp, synthetic construct
  misc_feature 1..20: note = chemically synthesized
  source 1..20: mol_type = other DNA
gatgatttaaagtacaaagg

SEQ ID NO: 20907 - DNA, 20 bp, synthetic construct
  misc_feature 1..20: note = chemically synthesized
  source 1..20: mol_type = other DNA
agtacaaaggaggatgtgtt

SEQ ID NO: 20908 - DNA, 20 bp, synthetic construct
  misc_feature 1..20: note = chemically synthesized
  source 1..20: mol_type = other DNA
gtacaaaggaggatgtgttt

SEQ ID NO: 20909 - DNA, 20 bp, synthetic construct
  misc_feature 1..20: note = chemically synthesized
  source 1..20: mol_type = other DNA
gtgtttaggttatatgcaaa

SEQ ID NO: 20910 - DNA, 20 bp, synthetic construct
  misc_feature 1..20: note = chemically synthesized
  source 1..20: mol_type = other DNA
ttaggttatatgcaaatagt

SEQ ID NO: 20911 - DNA, 20 bp, synthetic construct
  misc_feature 1..20: note = chemically synthesized
  source 1..20: mol_type = other DNA
atagtaagccatttttatat

SEQ ID NO: 20912 - DNA, 20 bp, synthetic construct
  misc_feature 1..20: note = chemically synthesized
  source 1..20: mol_type = other DNA
agtaagccatttttatatcg

SEQ ID NO: 20913 - DNA, 20 bp, synthetic construct
  misc_feature 1..20: note = chemically synthesized
  source 1..20: mol_type = other DNA
catttttatatcggagactt

SEQ ID NO: 20914 - DNA, 20 bp, synthetic construct
  misc_feature 1..20: note = chemically synthesized
  source 1..20: mol_type = other DNA
atcggagacttgagcatcca

SEQ ID NO: 20915 - DNA, 20 bp, synthetic construct
  misc_feature 1..20: note = chemically synthesized
  source 1..20: mol_type = other DNA
tccacagatcttgatatttg

SEQ ID NO: 20916 - DNA, 20 bp, synthetic construct
  misc_feature 1..20: note = chemically synthesized
  source 1..20: mol_type = other DNA
ccacagatcttgatatttgc

SEQ ID NO: 20917 - DNA, 20 bp, synthetic construct
  misc_feature 1..20: note = chemically synthesized
  source 1..20: mol_type = other DNA
cacagatcttgatatttgca

SEQ ID NO: 20918 - DNA, 20 bp, synthetic construct
  misc_feature 1..20: note = chemically synthesized
  source 1..20: mol_type = other DNA
acagatcttgatatttgcag

SEQ ID NO: 20919 - DNA, 20 bp, synthetic construct
  misc_feature 1..20: note = chemically synthesized
  source 1..20: mol_type = other DNA
cagatcttgatatttgcagg

SEQ ID NO: 20920 - DNA, 20 bp, synthetic construct
  misc_feature 1..20: note = chemically synthesized
  source 1..20: mol_type = other DNA
gtcttgccaccaattttcca

SEQ ID NO: 20921 - DNA, 20 bp, synthetic construct
  misc_feature 1..20: note = chemically synthesized
  source 1..20: mol_type = other DNA
accaattttccatggatact

SEQ ID NO: 20922 - DNA, 20 bp, synthetic construct
  misc_feature 1..20: note = chemically synthesized
  source 1..20: mol_type = other DNA
ccaattttccatggatactg

SEQ ID NO: 20923 - DNA, 20 bp, synthetic construct
  misc_feature 1..20: note = chemically synthesized
  source 1..20: mol_type = other DNA
tactgaggaacgactgtaaa

SEQ ID NO: 20924 - DNA, 20 bp, synthetic construct
  misc_feature 1..20: note = chemically synthesized
  source 1..20: mol_type = other DNA
ggaacgactgtaaatggatg

SEQ ID NO: 20925 - DNA, 20 bp, synthetic construct
  misc_feature 1..20: note = chemically synthesized
  source 1..20: mol_type = other DNA
gaacgactgtaaatggatgc

SEQ ID NO: 20926 - DNA, 20 bp, synthetic construct
  misc_feature 1..20: note = chemically synthesized
  source 1..20: mol_type = other DNA
actgtaaatggatgcaggca

SEQ ID NO: 20927 - DNA, 20 bp, synthetic construct
  misc_feature 1..20: note = chemically synthesized
  source 1..20: mol_type = other DNA
atgcaggcatggatgctatt

SEQ ID NO: 20928 - DNA, 20 bp, synthetic construct
  misc_feature 1..20: note = chemically synthesized
  source 1..20: mol_type = other DNA
tgcaggcatggatgctattt

SEQ ID NO: 20929 - DNA, 20 bp, synthetic construct
  misc_feature 1..20: note = chemically synthesized
  source 1..20: mol_type = other DNA
caggcatggatgctatttag

SEQ ID NO: 20930 - DNA, 20 bp, synthetic construct
  misc_feature 1..20: note = chemically synthesized
  source 1..20: mol_type = other DNA
ggatgctatttaggagtgtc

SEQ ID NO: 20931 - DNA, 20 bp, synthetic construct
  misc_feature 1..20: note = chemically synthesized
  source 1..20: mol_type = other DNA
gatgctatttaggagtgtcc

SEQ ID NO: 20932 - DNA, 20 bp, synthetic construct
  misc_feature 1..20: note = chemically synthesized
  source 1..20: mol_type = other DNA
atgctatttaggagtgtcca

SEQ ID NO: 20933 - DNA, 20 bp, synthetic construct
  misc_feature 1..20: note = chemically synthesized
  source 1..20: mol_type = other DNA
atttaggagtgtccagggcc

SEQ ID NO: 20934 - DNA, 20 bp, synthetic construct
  misc_feature 1..20: note = chemically synthesized
  source 1..20: mol_type = other DNA
gtgtccagggccaagtaaat

SEQ ID NO: 20935 - DNA, 20 bp, synthetic construct
  misc_feature 1..20: note = chemically synthesized
  source 1..20: mol_type = other DNA
ggccaagtaaatgagttgct

SEQ ID NO: 20936 - DNA, 20 bp, synthetic construct
  misc_feature 1..20: note = chemically synthesized
  source 1..20: mol_type = other DNA
caagtaaatgagttgctgag

SEQ ID NO: 20937 - DNA, 20 bp, synthetic construct
  misc_feature 1..20: note = chemically synthesized
  source 1..20: mol_type = other DNA
agtaaatgagttgctgagca

SEQ ID NO: 20938 - DNA, 20 bp, synthetic construct
  misc_feature 1..20: note = chemically synthesized
  source 1..20: mol_type = other DNA
taaatgagttgctgagcaga

SEQ ID NO: 20939 - DNA, 20 bp, synthetic construct
  misc_feature 1..20: note = chemically synthesized
  source 1..20: mol_type = other DNA
aaatgagttgctgagcagag

SEQ ID NO: 20940 - DNA, 20 bp, synthetic construct
  misc_feature 1..20: note = chemically synthesized
  source 1..20: mol_type = other DNA
tgagttgctgagcagagagg

SEQ ID NO: 20941 - DNA, 20 bp, synthetic construct
  misc_feature 1..20: note = chemically synthesized
  source 1..20: mol_type = other DNA
gagttgctgagcagagaggt

SEQ ID NO: 20942 - DNA, 20 bp, synthetic construct
  misc_feature 1..20: note = chemically synthesized
  source 1..20: mol_type = other DNA
ttgctgagcagagaggtggg

SEQ ID NO: 20943 - DNA, 20 bp, synthetic construct
  misc_feature 1..20: note = chemically synthesized
  source 1..20: mol_type = other DNA
gctgagcagagaggtgggtg

SEQ ID NO: 20944 - DNA, 20 bp, synthetic construct
  misc_feature 1..20: note = chemically synthesized
  source 1..20: mol_type = other DNA
ctgagcagagaggtgggtgg

SEQ ID NO: 20945 - DNA, 20 bp, synthetic construct
  misc_feature 1..20: note = chemically synthesized
  source 1..20: mol_type = other DNA
gagaggtgggtggaggctgt

SEQ ID NO: 20946 - DNA, 20 bp, synthetic construct
  misc_feature 1..20: note = chemically synthesized
  source 1..20: mol_type = other DNA
agaggtgggtggaggctgtg

SEQ ID NO: 20947 - DNA, 20 bp, synthetic construct
  misc_feature 1..20: note = chemically synthesized
  source 1..20: mol_type = other DNA
ggctgtgaggcatcaatatg

SEQ ID NO: 20948 - DNA, 20 bp, synthetic construct
  misc_feature 1..20: note = chemically synthesized
  source 1..20: mol_type = other DNA
tgtgaggcatcaatatgtgg

SEQ ID NO: 20949 - DNA, 20 bp, synthetic construct
  misc_feature 1..20: note = chemically synthesized
  source 1..20: mol_type = other DNA
ggtggcatccatctgcattt

SEQ ID NO: 20950 - DNA, 20 bp, synthetic construct
  misc_feature 1..20: note = chemically synthesized
  source 1..20: mol_type = other DNA
ttggtgatttttttccttca

SEQ ID NO: 20951 - DNA, 20 bp, synthetic construct
  misc_feature 1..20: note = chemically synthesized
  source 1..20: mol_type = other DNA
tttttttccttcacagtcct

SEQ ID NO: 20952 - DNA, 20 bp, synthetic construct
  misc_feature 1..20: note = chemically synthesized
  source 1..20: mol_type = other DNA
cttcacagtcctcggctgtc

SEQ ID NO: 20953 - DNA, 20 bp, synthetic construct
  misc_feature 1..20: note = chemically synthesized
  source 1..20: mol_type = other DNA
ttcacagtcctcggctgtct

SEQ ID NO: 20954 - DNA, 20 bp, synthetic construct
  misc_feature 1..20: note = chemically synthesized
  source 1..20: mol_type = other DNA
acagtcctcggctgtctggg

SEQ ID NO: 20955 - DNA, 20 bp, synthetic construct
  misc_feature 1..20: note = chemically synthesized
  source 1..20: mol_type = other DNA
agtcctcggctgtctgggaa

SEQ ID NO: 20956 - DNA, 20 bp, synthetic construct
  misc_feature 1..20: note = chemically synthesized
  source 1..20: mol_type = other DNA
cctcggctgtctgggaagag

SEQ ID NO: 20957 - DNA, 20 bp, synthetic construct
  misc_feature 1..20: note = chemically synthesized
  source 1..20: mol_type = other DNA
ctcggctgtctgggaagaga

SEQ ID NO: 20958 - DNA, 20 bp, synthetic construct
  misc_feature 1..20: note = chemically synthesized
  source 1..20: mol_type = other DNA
tgtctgggaagagaaggatg

SEQ ID NO: 20959 - DNA, 20 bp, synthetic construct
  misc_feature 1..20: note = chemically synthesized
  source 1..20: mol_type = other DNA
gtctgggaagagaaggatga

SEQ ID NO: 20960 - DNA, 20 bp, synthetic construct
  misc_feature 1..20: note = chemically synthesized
  source 1..20: mol_type = other DNA
tgggaagagaaggatgaagg

SEQ ID NO: 20961 - DNA, 20 bp, synthetic construct
  misc_feature 1..20: note = chemically synthesized
  source 1..20: mol_type = other DNA
aagagaaggatgaaggcaga

SEQ ID NO: 20962 - DNA, 20 bp, synthetic construct
  misc_feature 1..20: note = chemically synthesized
  source 1..20: mol_type = other DNA
ggcagatggctgctccaatt

SEQ ID NO: 20963 - DNA, 20 bp, synthetic construct
  misc_feature 1..20: note = chemically synthesized
  source 1..20: mol_type = other DNA
gcagatggctgctccaattt

SEQ ID NO: 20964 - DNA, 20 bp, synthetic construct
  misc_feature 1..20: note = chemically synthesized
  source 1..20: mol_type = other DNA
cagatggctgctccaattta

SEQ ID NO: 20965 - DNA, 20 bp, synthetic construct
  misc_feature 1..20: note = chemically synthesized
  source 1..20: mol_type = other DNA
agatggctgctccaatttag

SEQ ID NO: 20966 - DNA, 20 bp, synthetic construct
  misc_feature 1..20: note = chemically synthesized
  source 1..20: mol_type = other DNA
ggctgctccaatttaggggc

SEQ ID NO: 20967 - DNA, 20 bp, synthetic construct
  misc_feature 1..20: note = chemically synthesized
  source 1..20: mol_type = other DNA
gctgctccaatttaggggct

SEQ ID NO: 20968 - DNA, 20 bp, synthetic construct
  misc_feature 1..20: note = chemically synthesized
  source 1..20: mol_type = other DNA
caatttaggggctaggattg

SEQ ID NO: 20969 - DNA, 20 bp, synthetic construct
  misc_feature 1..20: note = chemically synthesized
  source 1..20: mol_type = other DNA
aatttaggggctaggattgc

SEQ ID NO: 20970 - DNA, 20 bp, synthetic construct
  misc_feature 1..20: note = chemically synthesized
  source 1..20: mol_type = other DNA
atttaggggctaggattgca

SEQ ID NO: 20971 - DNA, 20 bp, synthetic construct
  misc_feature 1..20: note = chemically synthesized
  source 1..20: mol_type = other DNA
taggggctaggattgcaggg

SEQ ID NO: 20972 - DNA, 20 bp, synthetic construct
  misc_feature 1..20: note = chemically synthesized
  source 1..20: mol_type = other DNA
aggggctaggattgcagggt

SEQ ID NO: 20973 - DNA, 20 bp, synthetic construct
  misc_feature 1..20: note = chemically synthesized
  source 1..20: mol_type = other DNA
ctaggattgcagggtgggca

SEQ ID NO: 20974 - DNA, 20 bp, synthetic construct
  misc_feature 1..20: note = chemically synthesized
  source 1..20: mol_type = other DNA
gtgggcacagcattgcaaac

SEQ ID NO: 20975 - DNA, 20 bp, synthetic construct
  misc_feature 1..20: note = chemically synthesized
  source 1..20: mol_type = other DNA
cacagcattgcaaacgagtg

SEQ ID NO: 20976 - DNA, 20 bp, synthetic construct
  misc_feature 1..20: note = chemically synthesized
  source 1..20: mol_type = other DNA
acagcattgcaaacgagtga

SEQ ID NO: 20977 - DNA, 20 bp, synthetic construct
  misc_feature 1..20: note = chemically synthesized
  source 1..20: mol_type = other DNA
gcaaacgagtgaaggaaatt

SEQ ID NO: 20978 - DNA, 20 bp, synthetic construct
  misc_feature 1..20: note = chemically synthesized
  source 1..20: mol_type = other DNA
gtgaaggaaattgagaaata

SEQ ID NO: 20979 - DNA, 20 bp, synthetic construct
  misc_feature 1..20: note = chemically synthesized
  source 1..20: mol_type = other DNA
attgagaaatatggccaatg

SEQ ID NO: 20980 - DNA, 20 bp, synthetic construct
  misc_feature 1..20: note = chemically synthesized
  source 1..20: mol_type = other DNA
tgagaaatatggccaatgaa

SEQ ID NO: 20981 - DNA, 20 bp, synthetic construct
  misc_feature 1..20: note = chemically synthesized
  source 1..20: mol_type = other DNA
atatggccaatgaagagttg

SEQ ID NO: 20982 - DNA, 20 bp, synthetic construct
  misc_feature 1..20: note = chemically synthesized
  source 1..20: mol_type = other DNA
atggccaatgaagagttgaa

SEQ ID NO: 20983 - DNA, 20 bp, synthetic construct
  misc_feature 1..20: note = chemically synthesized
  source 1..20: mol_type = other DNA
ggccaatgaagagttgaaga

SEQ ID NO: 20984 - DNA, 20 bp, synthetic construct
  misc_feature 1..20: note = chemically synthesized
  source 1..20: mol_type = other DNA
gccaatgaagagttgaagag

SEQ ID NO: 20985 - DNA, 20 bp, synthetic construct
  misc_feature 1..20: note = chemically synthesized
  source 1..20: mol_type = other DNA
tgaagagttgaagagaggcc

SEQ ID NO: 20986 - DNA, 20 bp, synthetic construct
  misc_feature 1..20: note = chemically synthesized
  source 1..20: mol_type = other DNA
agttgaagagaggcctggca

SEQ ID NO: 20987 - DNA, 20 bp, synthetic construct
  misc_feature 1..20: note = chemically synthesized
  source 1..20: mol_type = other DNA
tgaagagaggcctggcatgg

SEQ ID NO: 20988 - DNA, 20 bp, synthetic construct
  misc_feature 1..20: note = chemically synthesized
  source 1..20: mol_type = other DNA
gtggctcacacctataatcc

SEQ ID NO: 20989 - DNA, 20 bp, synthetic construct
  misc_feature 1..20: note = chemically synthesized
  source 1..20: mol_type = other DNA
acctataatcccagcacttt

SEQ ID NO: 20990 - DNA, 20 bp, synthetic construct
  misc_feature 1..20: note = chemically synthesized
  source 1..20: mol_type = other DNA
ctataatcccagcactttca

SEQ ID NO: 20991 - DNA, 20 bp, synthetic construct
  misc_feature 1..20: note = chemically synthesized
  source 1..20: mol_type = other DNA
tataatcccagcactttcag

SEQ ID NO: 20992 - DNA, 20 bp, synthetic construct
  misc_feature 1..20: note = chemically synthesized
  source 1..20: mol_type = other DNA
tcccagcactttcagaggcc

SEQ ID NO: 20993 - DNA, 20 bp, synthetic construct
  misc_feature 1..20: note = chemically synthesized
  source 1..20: mol_type = other DNA
cccagcactttcagaggccc

SEQ ID NO: 20994 - DNA, 20 bp, synthetic construct
  misc_feature 1..20: note = chemically synthesized
  source 1..20: mol_type = other DNA
agcactttcagaggcccagg

SEQ ID NO: 20995 - DNA, 20 bp, synthetic construct
  misc_feature 1..20: note = chemically synthesized
  source 1..20: mol_type = other DNA
gcactttcagaggcccaggc

SEQ ID NO: 20996 - DNA, 20 bp, synthetic construct
  misc_feature 1..20: note = chemically synthesized
  source 1..20: mol_type = other DNA
ctttcagaggcccaggcagg

SEQ ID NO: 20997 - DNA, 20 bp, synthetic construct
  misc_feature 1..20: note = chemically synthesized
  source 1..20: mol_type = other DNA
cccaggcaggcagatcactt

SEQ ID NO: 20998 - DNA, 20 bp, synthetic construct
  misc_feature 1..20: note = chemically synthesized
  source 1..20: mol_type = other DNA
ccaggcaggcagatcacttg

SEQ ID NO: 20999 - DNA, 20 bp, synthetic construct
  misc_feature 1..20: note = chemically synthesized
  source 1..20: mol_type = other DNA
gcaggcagatcacttgaggt

SEQ ID NO: 21000 - DNA, 20 bp, synthetic construct
  misc_feature 1..20: note = chemically synthesized
  source 1..20: mol_type = other DNA
caggcagatcacttgaggtc

SEQ ID NO: 21001 - DNA, 20 bp, synthetic construct
  misc_feature 1..20: note = chemically synthesized
  source 1..20: mol_type = other DNA
ggcagatcacttgaggtcag

SEQ ID NO: 21002 - DNA, 20 bp, synthetic construct
  misc_feature 1..20: note = chemically synthesized
  source 1..20: mol_type = other DNA
tgaggtcaggagttcgacac

SEQ ID NO: 21003 - DNA, 20 bp, synthetic construct
  misc_feature 1..20: note = chemically synthesized
  source 1..20: mol_type = other DNA
tcaggagttcgacaccagcc

SEQ ID NO: 21004 - DNA, 20 bp, synthetic construct
  misc_feature 1..20: note = chemically synthesized
  source 1..20: mol_type = other DNA
tcgacaccagcctggccaac

SEQ ID NO: 21005 - DNA, 20 bp, synthetic construct
  misc_feature 1..20: note = chemically synthesized
  source 1..20: mol_type = other DNA
cgacaccagcctggccaaca

SEQ ID NO: 21006 - DNA, 20 bp, synthetic construct
  misc_feature 1..20: note = chemically synthesized
  source 1..20: mol_type = other DNA
gcctggccaacaaggtgaaa

SEQ ID NO: 21007 - DNA, 20 bp, synthetic construct
  misc_feature 1..20: note = chemically synthesized
  source 1..20: mol_type = other DNA
aaggtgaaatggtgaaaccc

SEQ ID NO: 21008 - DNA, 20 bp, synthetic construct
  misc_feature 1..20: note = chemically synthesized
  source 1..20: mol_type = other DNA
tttactaaaaatacaaaaat

SEQ ID NO: 21009 - DNA, 20 bp, synthetic construct
  misc_feature 1..20: note = chemically synthesized
  source 1..20: mol_type = other DNA
ctaaaaatacaaaaattagc

SEQ ID NO: 21010 - DNA, 20 bp, synthetic construct
  misc_feature 1..20: note = chemically synthesized
  source 1..20: mol_type = other DNA
taaaaatacaaaaattagct

SEQ ID NO: 21011 - DNA, 20 bp, synthetic construct
  misc_feature 1..20: note = chemically synthesized
  source 1..20: mol_type = other DNA
atacaaaaattagctgggca

SEQ ID NO: 21012 - DNA, 20 bp, synthetic construct
  misc_feature 1..20: note = chemically synthesized
  source 1..20: mol_type = other DNA
caaaaattagctgggcatgg

SEQ ID NO: 21013 - DNA, 20 bp, synthetic construct
  misc_feature 1..20: note = chemically synthesized
  source 1..20: mol_type = other DNA
aaattagctgggcatggtgg

SEQ ID NO: 21014 - DNA, 20 bp, synthetic construct
  misc_feature 1..20: note = chemically synthesized
  source 1..20: mol_type = other DNA
aattagctgggcatggtggc

SEQ ID NO: 21015 - DNA, 20 bp, synthetic construct
  misc_feature 1..20: note = chemically synthesized
  source 1..20: mol_type = other DNA
gtggcgggtgcctgtaatcc

SEQ ID NO: 21016 - DNA, 20 bp, synthetic construct
  misc_feature 1..20: note = chemically synthesized
  source 1..20: mol_type = other DNA
tgcctgtaatcccagctact

SEQ ID NO: 21017 - DNA, 20 bp, synthetic construct
  misc_feature 1..20: note = chemically synthesized
  source 1..20: mol_type = other DNA
gcctgtaatcccagctactt

SEQ ID NO: 21018 - DNA, 20 bp, synthetic construct
  misc_feature 1..20: note = chemically synthesized
  source 1..20: mol_type = other DNA
ctgtaatcccagctacttgg

SEQ ID NO: 21019 - DNA, 20 bp, synthetic construct
  misc_feature 1..20: note = chemically synthesized
  source 1..20: mol_type = other DNA
tgtaatcccagctacttggg

SEQ ID NO: 21020 - DNA, 20 bp, synthetic construct
  misc_feature 1..20: note = chemically synthesized
  source 1..20: mol_type = other DNA
tcccagctacttgggaggct

SEQ ID NO: 21021 - DNA, 20 bp, synthetic construct
  misc_feature 1..20: note = chemically synthesized
  source 1..20: mol_type = other DNA
cccagctacttgggaggctg

SEQ ID NO: 21022 - DNA, 20 bp, synthetic construct
  misc_feature 1..20: note = chemically synthesized
  source 1..20: mol_type = other DNA
agctacttgggaggctgagg

SEQ ID NO: 21023 - DNA, 20 bp, synthetic construct
  misc_feature 1..20: note = chemically synthesized
  source 1..20: mol_type = other DNA
gctacttgggaggctgaggc

SEQ ID NO: 21024 - DNA, 20 bp, synthetic construct
  misc_feature 1..20: note = chemically synthesized
  source 1..20: mol_type = other DNA
tacttgggaggctgaggcag

SEQ ID NO: 21025 - DNA, 20 bp, synthetic construct
  misc_feature 1..20: note = chemically synthesized
  source 1..20: mol_type = other DNA
gggaggctgaggcaggagaa

SEQ ID NO: 21026 - DNA, 20 bp, synthetic construct
  misc_feature 1..20: note = chemically synthesized
  source 1..20: mol_type = other DNA
gcaggagaatagcttgaacc

SEQ ID NO: 21027 - DNA, 20 bp, synthetic construct
  misc_feature 1..20: note = chemically synthesized
  source 1..20: mol_type = other DNA
caggagaatagcttgaacct

SEQ ID NO: 21028 - DNA, 20 bp, synthetic construct
  misc_feature 1..20: note = chemically synthesized
  source 1..20: mol_type = other DNA
ggagaatagcttgaacctgg

SEQ ID NO: 21029 - DNA, 20 bp, synthetic construct
  misc_feature 1..20: note = chemically synthesized
  source 1..20: mol_type = other DNA
aatagcttgaacctgggaga

SEQ ID NO: 21030 - DNA, 20 bp, synthetic construct
  misc_feature 1..20: note = chemically synthesized
  source 1..20: mol_type = other DNA
tagcttgaacctgggagatg

SEQ ID NO: 21031 - DNA, 20 bp, synthetic construct
  misc_feature 1..20: note = chemically synthesized
  source 1..20: mol_type = other DNA
agcttgaacctgggagatgg

SEQ ID NO: 21032 - DNA, 20 bp, synthetic construct
  misc_feature 1..20: note = chemically synthesized
  source 1..20: mol_type = other DNA
aacctgggagatggaggttg

SEQ ID NO: 21033 - DNA, 20 bp, synthetic construct
  misc_feature 1..20: note = chemically synthesized
  source 1..20: mol_type = other DNA
tgggagatggaggttgcagt

SEQ ID NO: 21034 - DNA, 20 bp, synthetic construct
  misc_feature 1..20: note = chemically synthesized
  source 1..20: mol_type = other DNA
gatggaggttgcagtgagct

SEQ ID NO: 21035 - DNA, 20 bp, synthetic construct
  misc_feature 1..20: note = chemically synthesized
  source 1..20: mol_type = other DNA
gagatcgcaccactgcactc

SEQ ID NO: 21036 - DNA, 20 bp, synthetic construct
  misc_feature 1..20: note = chemically synthesized
  source 1..20: mol_type = other DNA
cgcaccactgcactccagcc

SEQ ID NO: 21037 - DNA, 20 bp, synthetic construct
  misc_feature 1..20: note = chemically synthesized
  source 1..20: mol_type = other DNA
gcaccactgcactccagcct

SEQ ID NO: 21038 - DNA, 20 bp, synthetic construct
  misc_feature 1..20: note = chemically synthesized
  source 1..20: mol_type = other DNA
ctgcactccagcctgggcga

SEQ ID NO: 21039 - DNA, 20 bp, synthetic construct
  misc_feature 1..20: note = chemically synthesized
  source 1..20: mol_type = other DNA
gcactccagcctgggcgaca

SEQ ID NO: 21040 - DNA, 20 bp, synthetic construct
  misc_feature 1..20: note = chemically synthesized
  source 1..20: mol_type = other DNA
tccagcctgggcgacagagc

SEQ ID NO: 21041 - DNA, 20 bp, synthetic construct
  misc_feature 1..20: note = chemically synthesized
  source 1..20: mol_type = other DNA
caagactctgtcaaaaaaaa

SEQ ID NO: 21042 - DNA, 20 bp, synthetic construct
  misc_feature 1..20: note = chemically synthesized
  source 1..20: mol_type = other DNA
agactctgtcaaaaaaaaaa

SEQ ID NO: 21043 - DNA, 20 bp, synthetic construct
  misc_feature 1..20: note = chemically synthesized
  source 1..20: mol_type = other DNA
tgtcaaaaaaaaaagagttg

SEQ ID NO: 21044 - DNA, 20 bp, synthetic construct
  misc_feature 1..20: note = chemically synthesized
  source 1..20: mol_type = other DNA
tcaaaaaaaaaagagttgaa

SEQ ID NO: 21045 - DNA, 20 bp, synthetic construct
  misc_feature 1..20: note = chemically synthesized
  source 1..20: mol_type = other DNA
aaaaaagagttgaagagaaa

SEQ ID NO: 21046 - DNA, 20 bp, synthetic construct
  misc_feature 1..20: note = chemically synthesized
  source 1..20: mol_type = other DNA
agagttgaagagaaaaagtc

SEQ ID NO: 21047 - DNA, 20 bp, synthetic construct
  misc_feature 1..20: note = chemically synthesized
  source 1..20: mol_type = other DNA
gagttgaagagaaaaagtct

SEQ ID NO: 21048 - DNA, 20 bp, synthetic construct
  misc_feature 1..20: note = chemically synthesized
  source 1..20: mol_type = other DNA
aaaagtctaggctaaattca

SEQ ID NO: 21049 - DNA, 20 bp, synthetic construct
  misc_feature 1..20: note = chemically synthesized
  source 1..20: mol_type = other DNA
aggctaaattcaaagaaaaa

SEQ ID NO: 21050 - DNA, 20 bp, synthetic construct
  misc_feature 1..20: note = chemically synthesized
  source 1..20: mol_type = other DNA
taaattcaaagaaaaaaagt

SEQ ID NO: 21051 - DNA, 20 bp, synthetic construct
  misc_feature 1..20: note = chemically synthesized
  source 1..20: mol_type = other DNA
aagaaaaaaagtgagcccaa

SEQ ID NO: 21052 - DNA, 20 bp, synthetic construct
  misc_feature 1..20: note = chemically synthesized
  source 1..20: mol_type = other DNA
agaaaaaaagtgagcccaaa

SEQ ID NO: 21053 - DNA, 20 bp, synthetic construct
  misc_feature 1..20: note = chemically synthesized
  source 1..20: mol_type = other DNA
gtgagcccaaaaggaacttg

SEQ ID NO: 21054 - DNA, 20 bp, synthetic construct
  misc_feature 1..20: note = chemically synthesized
  source 1..20: mol_type = other DNA
gagcccaaaaggaacttgca

SEQ ID NO: 21055 - DNA, 20 bp, synthetic construct
  misc_feature 1..20: note = chemically synthesized
  source 1..20: mol_type = other DNA
ccaaaaggaacttgcagagc

SEQ ID NO: 21056 - DNA, 20 bp, synthetic construct
  misc_feature 1..20: note = chemically synthesized
  source 1..20: mol_type = other DNA
caaaaggaacttgcagagca

SEQ ID NO: 21057 - DNA, 20 bp, synthetic construct
  misc_feature 1..20: note = chemically synthesized
  source 1..20: mol_type = other DNA
aaaaggaacttgcagagcaa

SEQ ID NO: 21058 - DNA, 20 bp, synthetic construct
  misc_feature 1..20: note = chemically synthesized
  source 1..20: mol_type = other DNA
gaacttgcagagcaagggaa

SEQ ID NO: 21059 - DNA, 20 bp, synthetic construct
  misc_feature 1..20: note = chemically synthesized
  source 1..20: mol_type = other DNA
cttgcagagcaagggaaaag

SEQ ID NO: 21060 - DNA, 20 bp, synthetic construct
  misc_feature 1..20: note = chemically synthesized
  source 1..20: mol_type = other DNA
ttgcagagcaagggaaaagc

SEQ ID NO: 21061 - DNA, 20 bp, synthetic construct
  misc_feature 1..20: note = chemically synthesized
  source 1..20: mol_type = other DNA
tgcagagcaagggaaaagca

SEQ ID NO: 21062 - DNA, 20 bp, synthetic construct
  misc_feature 1..20: note = chemically synthesized
  source 1..20: mol_type = other DNA
aagggaaaagcagggatgtc

SEQ ID NO: 21063 - DNA, 20 bp, synthetic construct
  misc_feature 1..20: note = chemically synthesized
  source 1..20: mol_type = other DNA
agggaaaagcagggatgtca

SEQ ID NO: 21064 - DNA, 20 bp, synthetic construct
  misc_feature 1..20: note = chemically synthesized
  source 1..20: mol_type = other DNA
gggaaaagcagggatgtcaa

SEQ ID NO: 21065 - DNA, 20 bp, synthetic construct
  misc_feature 1..20: note = chemically synthesized
  source 1..20: mol_type = other DNA
aagcagggatgtcaagggac

SEQ ID NO: 21066 - DNA, 20 bp, synthetic construct
  misc_feature 1..20: note = chemically synthesized
  source 1..20: mol_type = other DNA
agggactagaacactccata

SEQ ID NO: 21067 - DNA, 20 bp, synthetic construct
  misc_feature 1..20: note = chemically synthesized
  source 1..20: mol_type = other DNA
agaacactccataaagtgaa

SEQ ID NO: 21068 - DNA, 20 bp, synthetic construct
  misc_feature 1..20: note = chemically synthesized
  source 1..20: mol_type = other DNA
tgaacagctgcaatgaaaat

SEQ ID NO: 21069 - DNA, 20 bp, synthetic construct
  misc_feature 1..20: note = chemically synthesized
  source 1..20: mol_type = other DNA
gaacagctgcaatgaaaata

SEQ ID NO: 21070 - DNA, 20 bp, synthetic construct
  misc_feature 1..20: note = chemically synthesized
  source 1..20: mol_type = other DNA
aacagctgcaatgaaaataa

SEQ ID NO: 21071 - DNA, 20 bp, synthetic construct
  misc_feature 1..20: note = chemically synthesized
  source 1..20: mol_type = other DNA
agctgcaatgaaaataaggg

SEQ ID NO: 21072 - DNA, 20 bp, synthetic construct
  misc_feature 1..20: note = chemically synthesized
  source 1..20: mol_type = other DNA
gcaatgaaaataagggaaga

SEQ ID NO: 21073 - DNA, 20 bp, synthetic construct
  misc_feature 1..20: note = chemically synthesized
  source 1..20: mol_type = other DNA
gaaaataagggaagaaagtt

SEQ ID NO: 21074 - DNA, 20 bp, synthetic construct
  misc_feature 1..20: note = chemically synthesized
  source 1..20: mol_type = other DNA
ctttcctttctcttcctttt

SEQ ID NO: 21075 - DNA, 20 bp, synthetic construct
  misc_feature 1..20: note = chemically synthesized
  source 1..20: mol_type = other DNA
ttcctttctcttcctttttg

SEQ ID NO: 21076 - DNA, 20 bp, synthetic construct
  misc_feature 1..20: note = chemically synthesized
  source 1..20: mol_type = other DNA
tcttcctttttggagttaat

SEQ ID NO: 21077 - DNA, 20 bp, synthetic construct
  misc_feature 1..20: note = chemically synthesized
  source 1..20: mol_type = other DNA
cttcctttttggagttaatc

SEQ ID NO: 21078 - DNA, 20 bp, synthetic construct
  misc_feature 1..20: note = chemically synthesized
  source 1..20: mol_type = other DNA
cctttttggagttaatcagg

SEQ ID NO: 21079 - DNA, 20 bp, synthetic construct
  misc_feature 1..20: note = chemically synthesized
  source 1..20: mol_type = other DNA
ttttggagttaatcaggaag

SEQ ID NO: 21080 - DNA, 20 bp, synthetic construct
  misc_feature 1..20: note = chemically synthesized
  source 1..20: mol_type = other DNA
ggaagtagtcccaaataccc

SEQ ID NO: 21081 - DNA, 20 bp, synthetic construct
  misc_feature 1..20: note = chemically synthesized
  source 1..20: mol_type = other DNA
gtagtcccaaataccccaga

SEQ ID NO: 21082 - DNA, 20 bp, synthetic construct
  misc_feature 1..20: note = chemically synthesized
  source 1..20: mol_type = other DNA
ccccagaaagttcatcttat

SEQ ID NO: 21083 - DNA, 20 bp, synthetic construct
  misc_feature 1..20: note = chemically synthesized
  source 1..20: mol_type = other DNA
aagttcatcttataagccct

SEQ ID NO: 21084 - DNA, 20 bp, synthetic construct
  misc_feature 1..20: note = chemically synthesized
  source 1..20: mol_type = other DNA
tataagcccttggtcctctt

SEQ ID NO: 21085 - DNA, 20 bp, synthetic construct
  misc_feature 1..20: note = chemically synthesized
  source 1..20: mol_type = other DNA
agcccttggtcctcttgaga

SEQ ID NO: 21086 - DNA, 20 bp, synthetic construct
  misc_feature 1..20: note = chemically synthesized
  source 1..20: mol_type = other DNA
tggtcctcttgagatggtat

SEQ ID NO: 21087 - DNA, 20 bp, synthetic construct
  misc_feature 1..20: note = chemically synthesized
  source 1..20: mol_type = other DNA
gatggtatcagatatattgc

SEQ ID NO: 21088 - DNA, 20 bp, synthetic construct
  misc_feature 1..20: note = chemically synthesized
  source 1..20: mol_type = other DNA
gatatattgctagacccttg

SEQ ID NO: 21089 - DNA, 20 bp, synthetic construct
  misc_feature 1..20: note = chemically synthesized
  source 1..20: mol_type = other DNA
tattgctagacccttgaaga

SEQ ID NO: 21090 - DNA, 20 bp, synthetic construct
  misc_feature 1..20: note = chemically synthesized
  source 1..20: mol_type = other DNA
attgctagacccttgaagaa

SEQ ID NO: 21091 - DNA, 20 bp, synthetic construct
  misc_feature 1..20: note = chemically synthesized
  source 1..20: mol_type = other DNA
cttgaagaaaggaacaactc

SEQ ID NO: 21092 - DNA, 20 bp, synthetic construct
  misc_feature 1..20: note = chemically synthesized
  source 1..20: mol_type = other DNA
ttgaagaaaggaacaactcc

SEQ ID NO: 21093 - DNA, 20 bp, synthetic construct
  misc_feature 1..20: note = chemically synthesized
  source 1..20: mol_type = other DNA
acaactccaggcaacttctt

SEQ ID NO: 21094 - DNA, 20 bp, synthetic construct
  misc_feature 1..20: note = chemically synthesized
  source 1..20: mol_type = other DNA
caaacacatgtgtgtgtata

SEQ ID NO: 21095 - DNA, 20 bp, synthetic construct
  misc_feature 1..20: note = chemically synthesized
  source 1..20: mol_type = other DNA
agccatgcattccttaacaa

SEQ ID NO: 21096 - DNA, 20 bp, synthetic construct
  misc_feature 1..20: note = chemically synthesized
  source 1..20: mol_type = other DNA
gccatgcattccttaacaat

SEQ ID NO: 21097 - DNA, 20 bp, synthetic construct
  misc_feature 1..20: note = chemically synthesized
  source 1..20: mol_type = other DNA
ccatgcattccttaacaatg

SEQ ID NO: 21098 - DNA, 20 bp, synthetic construct
  misc_feature 1..20: note = chemically synthesized
  source 1..20: mol_type = other DNA
taacaatggggatatattct

SEQ ID NO: 21099 - DNA, 20 bp, synthetic construct
  misc_feature 1..20: note = chemically synthesized
  source 1..20: mol_type = other DNA
attctgagaaatgtgtcatt

SEQ ID NO: 21100 - DNA, 20 bp, synthetic construct
  misc_feature 1..20: note = chemically synthesized
  source 1..20: mol_type = other DNA
tcatcattgtgcgaacataa

SEQ ID NO: 21101 - DNA, 20 bp, synthetic construct
  misc_feature 1..20: note = chemically synthesized
  source 1..20: mol_type = other DNA
atcattgtgcgaacataata

SEQ ID NO: 21102 - DNA, 20 bp, synthetic construct
  misc_feature 1..20: note = chemically synthesized
  source 1..20: mol_type = other DNA
tgtacttacctaaacctaaa

SEQ ID NO: 21103 - DNA, 20 bp, synthetic construct
  misc_feature 1..20: note = chemically synthesized
  source 1..20: mol_type = other DNA
ttacctaaacctaaatggta

SEQ ID NO: 21104 - DNA, 20 bp, synthetic construct
  misc_feature 1..20: note = chemically synthesized
  source 1..20: mol_type = other DNA
ggtatagcttactacatacc

SEQ ID NO: 21105 - DNA, 20 bp, synthetic construct
  misc_feature 1..20: note = chemically synthesized
  source 1..20: mol_type = other DNA
gtatagcttactacatacct

SEQ ID NO: 21106 - DNA, 20 bp, synthetic construct
  misc_feature 1..20: note = chemically synthesized
  source 1..20: mol_type = other DNA
atacctaggttgtattgatg

SEQ ID NO: 21107 - DNA, 20 bp, synthetic construct
  misc_feature 1..20: note = chemically synthesized
  source 1..20: mol_type = other DNA
ttgatgtggcctattgctcc

SEQ ID NO: 21108 - DNA, 20 bp, synthetic construct
  misc_feature 1..20: note = chemically synthesized
  source 1..20: mol_type = other DNA
tgatgtggcctattgctcct

SEQ ID NO: 21109 - DNA, 20 bp, synthetic construct
  misc_feature 1..20: note = chemically synthesized
  source 1..20: mol_type = other DNA
gcctattgctcctaggctcc

SEQ ID NO: 21110 - DNA, 20 bp, synthetic construct
  misc_feature 1..20: note = chemically synthesized
  source 1..20: mol_type = other DNA
cctattgctcctaggctcct

SEQ ID NO: 21111 - DNA, 20 bp, synthetic construct
  misc_feature 1..20: note = chemically synthesized
  source 1..20: mol_type = other DNA
tcctgggctgcaaacctgta

SEQ ID NO: 21112 - DNA, 20 bp, synthetic construct
  misc_feature 1..20: note = chemically synthesized
  source 1..20: mol_type = other DNA
tgtgactgtactgaacactg

SEQ ID NO: 21113 - DNA, 20 bp, synthetic construct
  misc_feature 1..20: note = chemically synthesized
  source 1..20: mol_type = other DNA
gtgactgtactgaacactgt

SEQ ID NO: 21114 - DNA, 20 bp, synthetic construct
  misc_feature 1..20: note = chemically synthesized
  source 1..20: mol_type = other DNA
gtactgaacactgtaggcaa

SEQ ID NO: 21115 - DNA, 20 bp, synthetic construct
  misc_feature 1..20: note = chemically synthesized
  source 1..20: mol_type = other DNA
aacactgtaggcaatggtaa

SEQ ID NO: 21116 - DNA, 20 bp, synthetic construct
  misc_feature 1..20: note = chemically synthesized
  source 1..20: mol_type = other DNA
actgtaggcaatggtaacag

SEQ ID NO: 21117 - DNA, 20 bp, synthetic construct
  misc_feature 1..20: note = chemically synthesized
  source 1..20: mol_type = other DNA
ggtatttgtgtatctaaaca

SEQ ID NO: 21118 - DNA, 20 bp, synthetic construct
  misc_feature 1..20: note = chemically synthesized
  source 1..20: mol_type = other DNA
ttgtgtatctaaacatagaa

SEQ ID NO: 21119 - DNA, 20 bp, synthetic construct
  misc_feature 1..20: note = chemically synthesized
  source 1..20: mol_type = other DNA
tgtgtatctaaacatagaaa

SEQ ID NO: 21120 - DNA, 20 bp, synthetic construct
  misc_feature 1..20: note = chemically synthesized
  source 1..20: mol_type = other DNA
atctaaacatagaaaaggta

SEQ ID NO: 21121 - DNA, 20 bp, synthetic construct
  misc_feature 1..20: note = chemically synthesized
  source 1..20: mol_type = other DNA
gaaaaggtacagtgaaaata

SEQ ID NO: 21122 - DNA, 20 bp, synthetic construct
  misc_feature 1..20: note = chemically synthesized
  source 1..20: mol_type = other DNA
aatacagtattataacctta

SEQ ID NO: 21123 - DNA, 20 bp, synthetic construct
  misc_feature 1..20: note = chemically synthesized
  source 1..20: mol_type = other DNA
atacagtattataaccttat

SEQ ID NO: 21124 - DNA, 20 bp, synthetic construct
  misc_feature 1..20: note = chemically synthesized
  source 1..20: mol_type = other DNA
gggaccactgtcgtataatg

SEQ ID NO: 21125 - DNA, 20 bp, synthetic construct
  misc_feature 1..20: note = chemically synthesized
  source 1..20: mol_type = other DNA
ttgaccaaaatgtcattgtg

SEQ ID NO: 21126 - DNA, 20 bp, synthetic construct
  misc_feature 1..20: note = chemically synthesized
  source 1..20: mol_type = other DNA
tatatgtacacacacacaca

SEQ ID NO: 21127 - DNA, 20 bp, synthetic construct
  misc_feature 1..20: note = chemically synthesized
  source 1..20: mol_type = other DNA
tatgtacacacacacacata

SEQ ID NO: 21128 - DNA, 20 bp, synthetic construct
  misc_feature 1..20: note = chemically synthesized
  source 1..20: mol_type = other DNA
tgtacacacacacacataga

SEQ ID NO: 21129 - DNA, 20 bp, synthetic construct
  misc_feature 1..20: note = chemically synthesized
  source 1..20: mol_type = other DNA
tacacacacacacatagaga

SEQ ID NO: 21130 - DNA, 20 bp, synthetic construct
  misc_feature 1..20: note = chemically synthesized
  source 1..20: mol_type = other DNA
cacacacacacatagagaga

SEQ ID NO: 21131 - DNA, 20 bp, synthetic construct
  misc_feature 1..20: note = chemically synthesized
  source 1..20: mol_type = other DNA
cacacacacatagagagaga

SEQ ID NO: 21132 - DNA, 20 bp, synthetic construct
  misc_feature 1..20: note = chemically synthesized
  source 1..20: mol_type = other DNA
cacacacatagagagagaga

SEQ ID NO: 21133 - DNA, 20 bp, synthetic construct
  misc_feature 1..20: note = chemically synthesized
  source 1..20: mol_type = other DNA
cacacatagagagagagaga

SEQ ID NO: 21134 - DNA, 20 bp, synthetic construct
  misc_feature 1..20: note = chemically synthesized
  source 1..20: mol_type = other DNA
acacatagagagagagagag

SEQ ID NO: 21135 - DNA, 20 bp, synthetic construct
  misc_feature 1..20: note = chemically synthesized
  source 1..20: mol_type = other DNA
acatagagagagagagagag

SEQ ID NO: 21136 - DNA, 20 bp, synthetic construct
  misc_feature 1..20: note = chemically synthesized
  source 1..20: mol_type = other DNA
atagagagagagagagagga

SEQ ID NO: 21137 - DNA, 20 bp, synthetic construct
  misc_feature 1..20: note = chemically synthesized
  source 1..20: mol_type = other DNA
tagagagagagagagaggag

SEQ ID NO: 21138 - DNA, 20 bp, synthetic construct
  misc_feature 1..20: note = chemically synthesized
  source 1..20: mol_type = other DNA
gagagagagagagaggagag

SEQ ID NO: 21139 - DNA, 20 bp, synthetic construct
  misc_feature 1..20: note = chemically synthesized
  source 1..20: mol_type = other DNA
gagagagagagaggagagga

SEQ ID NO: 21140 - DNA, 20 bp, synthetic construct
  misc_feature 1..20: note = chemically synthesized
  source 1..20: mol_type = other DNA
agagagagagaggagaggag

SEQ ID NO: 21141 - DNA, 20 bp, synthetic construct
  misc_feature 1..20: note = chemically synthesized
  source 1..20: mol_type = other DNA
gagagagaggagaggagagg

SEQ ID NO: 21142 - DNA, 20 bp, synthetic construct
  misc_feature 1..20: note = chemically synthesized
  source 1..20: mol_type = other DNA
agagagaggagaggagagga

SEQ ID NO: 21143 - DNA, 20 bp, synthetic construct
  misc_feature 1..20: note = chemically synthesized
  source 1..20: mol_type = other DNA
agagaggagaggagaggaag

SEQ ID NO: 21144 - DNA, 20 bp, synthetic construct
  misc_feature 1..20: note = chemically synthesized
  source 1..20: mol_type = other DNA
gagaggagaggagaggaagg

SEQ ID NO: 21145 - DNA, 20 bp, synthetic construct
  misc_feature 1..20: note = chemically synthesized
  source 1..20: mol_type = other DNA
agaggagaggagaggaagga

SEQ ID NO: 21146 - DNA, 20 bp, synthetic construct
  misc_feature 1..20: note = chemically synthesized
  source 1..20: mol_type = other DNA
aggagaggagaggaaggagg

SEQ ID NO: 21147 - DNA, 20 bp, synthetic construct
  misc_feature 1..20: note = chemically synthesized
  source 1..20: mol_type = other DNA
ggagaggagaggaaggaggg

SEQ ID NO: 21148 - DNA, 20 bp, synthetic construct
  misc_feature 1..20: note = chemically synthesized
  source 1..20: mol_type = other DNA
gagaggagaggaaggaggga

SEQ ID NO: 21149 - DNA, 20 bp, synthetic construct
  misc_feature 1..20: note = chemically synthesized
  source 1..20: mol_type = other DNA
aggagaggaaggagggaggg

SEQ ID NO: 21150 - DNA, 20 bp, synthetic construct
  misc_feature 1..20: note = chemically synthesized
  source 1..20: mol_type = other DNA
ggagaggaaggagggaggga

SEQ ID NO: 21151 - DNA, 20 bp, synthetic construct
  misc_feature 1..20: note = chemically synthesized
  source 1..20: mol_type = other DNA
agaggaaggagggagggaag

SEQ ID NO: 21152 - DNA, 20 bp, synthetic construct
  misc_feature 1..20: note = chemically synthesized
  source 1..20: mol_type = other DNA
agggaaggagaaatatgatt

SEQ ID NO: 21153 - DNA, 20 bp, synthetic construct
  misc_feature 1..20: note = chemically synthesized
  source 1..20: mol_type = other DNA
aaggagaaatatgattcaga

SEQ ID NO: 21154 - DNA, 20 bp, synthetic construct
  misc_feature 1..20: note = chemically synthesized
  source 1..20: mol_type = other DNA
ggagaaatatgattcagata

SEQ ID NO: 21155 - DNA, 20 bp, synthetic construct
  misc_feature 1..20: note = chemically synthesized
  source 1..20: mol_type = other DNA
agatagagacatctatcctc

SEQ ID NO: 21156 - DNA, 20 bp, synthetic construct
  misc_feature 1..20: note = chemically synthesized
  source 1..20: mol_type = other DNA
atagagacatctatcctcca

SEQ ID NO: 21157 - DNA, 20 bp, synthetic construct
  misc_feature 1..20: note = chemically synthesized
  source 1..20: mol_type = other DNA
gacatctatcctccagagtt

SEQ ID NO: 21158 - DNA, 20 bp, synthetic construct
  misc_feature 1..20: note = chemically synthesized
  source 1..20: mol_type = other DNA
acatctatcctccagagttc

SEQ ID NO: 21159 - DNA, 20 bp, synthetic construct
  misc_feature 1..20: note = chemically synthesized
  source 1..20: mol_type = other DNA
atctatcctccagagttcag

SEQ ID NO: 21160 - DNA, 20 bp, synthetic construct
  misc_feature 1..20: note = chemically synthesized
  source 1..20: mol_type = other DNA
agagttcaggagtgtctctt

SEQ ID NO: 21161 - DNA, 20 bp, synthetic construct
  misc_feature 1..20: note = chemically synthesized
  source 1..20: mol_type = other DNA
tcaggagtgtctcttcagac

SEQ ID NO: 21162 - DNA, 20 bp, synthetic construct
  misc_feature 1..20: note = chemically synthesized
  source 1..20: mol_type = other DNA
caggagtgtctcttcagact

SEQ ID NO: 21163 - DNA, 20 bp, synthetic construct
  misc_feature 1..20: note = chemically synthesized
  source 1..20: mol_type = other DNA
gagtgtctcttcagactagg

SEQ ID NO: 21164 - DNA, 20 bp, synthetic construct
  misc_feature 1..20: note = chemically synthesized
  source 1..20: mol_type = other DNA
ctcttcagactaggtagatg

SEQ ID NO: 21165 - DNA, 20 bp, synthetic construct
  misc_feature 1..20: note = chemically synthesized
  source 1..20: mol_type = other DNA
aaaaaacatatcctgaattc

SEQ ID NO: 21166 - DNA, 20 bp, synthetic construct
  misc_feature 1..20: note = chemically synthesized
  source 1..20: mol_type = other DNA
aaaacatatcctgaattcta

SEQ ID NO: 21167 - DNA, 20 bp, synthetic construct
  misc_feature 1..20: note = chemically synthesized
  source 1..20: mol_type = other DNA
aacatatcctgaattctaga

SEQ ID NO: 21168 - DNA, 20 bp, synthetic construct
  misc_feature 1..20: note = chemically synthesized
  source 1..20: mol_type = other DNA
cctataacacttgccaacca

SEQ ID NO: 21169 - DNA, 20 bp, synthetic construct
  misc_feature 1..20: note = chemically synthesized
  source 1..20: mol_type = other DNA
ctataacacttgccaaccaa

SEQ ID NO: 21170 - DNA, 20 bp, synthetic construct
  misc_feature 1..20: note = chemically synthesized
  source 1..20: mol_type = other DNA
attgcttttttaaattaatg

SEQ ID NO: 21171 - DNA, 20 bp, synthetic construct
  misc_feature 1..20: note = chemically synthesized
  source 1..20: mol_type = other DNA
agtgatttttctttaacatc

SEQ ID NO: 21172 - DNA, 20 bp, synthetic construct
  misc_feature 1..20: note = chemically synthesized
  source 1..20: mol_type = other DNA
ttttctttaacatctagtga

SEQ ID NO: 21173 - DNA, 20 bp, synthetic construct
  misc_feature 1..20: note = chemically synthesized
  source 1..20: mol_type = other DNA
taacatctagtgacagacac

SEQ ID NO: 21174 - DNA, 20 bp, synthetic construct
  misc_feature 1..20: note = chemically synthesized
  source 1..20: mol_type = other DNA
aacatctagtgacagacact

SEQ ID NO: 21175 - DNA, 20 bp, synthetic construct
  misc_feature 1..20: note = chemically synthesized
  source 1..20: mol_type = other DNA
acatctagtgacagacactg

SEQ ID NO: 21176 - DNA, 20 bp, synthetic construct
  misc_feature 1..20: note = chemically synthesized
  source 1..20: mol_type = other DNA
agacactggggtcacatttg

SEQ ID NO: 21177 - DNA, 20 bp, synthetic construct
  misc_feature 1..20: note = chemically synthesized
  source 1..20: mol_type = other DNA
actggggtcacatttgcagc

SEQ ID NO: 21178 - DNA, 20 bp, synthetic construct
  misc_feature 1..20: note = chemically synthesized
  source 1..20: mol_type = other DNA
atttgcagctggaccataat

SEQ ID NO: 21179 - DNA, 20 bp, synthetic construct
  misc_feature 1..20: note = chemically synthesized
  source 1..20: mol_type = other DNA
tttgcagctggaccataatt

SEQ ID NO: 21180 - DNA, 20 bp, synthetic construct
  misc_feature 1..20: note = chemically synthesized
  source 1..20: mol_type = other DNA
ataattaggcttctgttctt

SEQ ID NO: 21181 - DNA, 20 bp, synthetic construct
  misc_feature 1..20: note = chemically synthesized
  source 1..20: mol_type = other DNA
taattaggcttctgttcttc

SEQ ID NO: 21182 - DNA, 20 bp, synthetic construct
  misc_feature 1..20: note = chemically synthesized
  source 1..20: mol_type = other DNA
attaggcttctgttcttcag

SEQ ID NO: 21183 - DNA, 20 bp, synthetic construct
  misc_feature 1..20: note = chemically synthesized
  source 1..20: mol_type = other DNA
cttcaggagacatttgttca

SEQ ID NO: 21184 - DNA, 20 bp, synthetic construct
  misc_feature 1..20: note = chemically synthesized
  source 1..20: mol_type = other DNA
gacatttgttcaaagtcatt

SEQ ID NO: 21185 - DNA, 20 bp, synthetic construct
  misc_feature 1..20: note = chemically synthesized
  source 1..20: mol_type = other DNA
acatttgttcaaagtcattt

SEQ ID NO: 21186 - DNA, 20 bp, synthetic construct
  misc_feature 1..20: note = chemically synthesized
  source 1..20: mol_type = other DNA
gggcaaccatattctgaaaa

SEQ ID NO: 21187 - DNA, 20 bp, synthetic construct
  misc_feature 1..20: note = chemically synthesized
  source 1..20: mol_type = other DNA
accatattctgaaaacagcc

SEQ ID NO: 21188 - DNA, 20 bp, synthetic construct
  misc_feature 1..20: note = chemically synthesized
  source 1..20: mol_type = other DNA
tattctgaaaacagcccagc

SEQ ID NO: 21189 - DNA, 20 bp, synthetic construct
  misc_feature 1..20: note = chemically synthesized
  source 1..20: mol_type = other DNA
attctgaaaacagcccagcc

SEQ ID NO: 21190 - DNA, 20 bp, synthetic construct
  misc_feature 1..20: note = chemically synthesized
  source 1..20: mol_type = other DNA
ttctgaaaacagcccagcca

SEQ ID NO: 21191 - DNA, 20 bp, synthetic construct
  misc_feature 1..20: note = chemically synthesized
  source 1..20: mol_type = other DNA
aaacagcccagccagggtga

SEQ ID NO: 21192 - DNA, 20 bp, synthetic construct
  misc_feature 1..20: note = chemically synthesized
  source 1..20: mol_type = other DNA
gggtgatggatcactttgca

SEQ ID NO: 21193 - DNA, 20 bp, synthetic construct
  misc_feature 1..20: note = chemically synthesized
  source 1..20: mol_type = other DNA
actttgcaaagatcctcaat

SEQ ID NO: 21194 - DNA, 20 bp, synthetic construct
  misc_feature 1..20: note = chemically synthesized
  source 1..20: mol_type = other DNA
atcctcaatgagctattttc

SEQ ID NO: 21195 - DNA, 20 bp, synthetic construct
  misc_feature 1..20: note = chemically synthesized
  source 1..20: mol_type = other DNA
gctattttcaagtgatgaca

SEQ ID NO: 21196 - DNA, 20 bp, synthetic construct
  misc_feature 1..20: note = chemically synthesized
  source 1..20: mol_type = other DNA
tcaagtgatgacaaagtgtg

SEQ ID NO: 21197 - DNA, 20 bp, synthetic construct
  misc_feature 1..20: note = chemically synthesized
  source 1..20: mol_type = other DNA
gtgaagttaaccgctcattt

SEQ ID NO: 21198 - DNA, 20 bp, synthetic construct
  misc_feature 1..20: note = chemically synthesized
  source 1..20: mol_type = other DNA
agaactttctttttcatcca

SEQ ID NO: 21199 - DNA, 20 bp, synthetic construct
  misc_feature 1..20: note = chemically synthesized
  source 1..20: mol_type = other DNA
aaagtaaattcaaatatgat

SEQ ID NO: 21200 - DNA, 20 bp, synthetic construct
  misc_feature 1..20: note = chemically synthesized
  source 1..20: mol_type = other DNA
gaaatctgaccttttattac

SEQ ID NO: 21201 - DNA, 20 bp, synthetic construct
  misc_feature 1..20: note = chemically synthesized
  source 1..20: mol_type = other DNA
actggaattctcttgactaa

SEQ ID NO: 21202 - DNA, 20 bp, synthetic construct
  misc_feature 1..20: note = chemically synthesized
  source 1..20: mol_type = other DNA
cctaaatctccatgtgtata

SEQ ID NO: 21203 - DNA, 20 bp, synthetic construct
  misc_feature 1..20: note = chemically synthesized
  source 1..20: mol_type = other DNA
tccatgtgtatacagtactg

SEQ ID NO: 21204 - DNA, 20 bp, synthetic construct
  misc_feature 1..20: note = chemically synthesized
  source 1..20: mol_type = other DNA
ccatgtgtatacagtactgt

SEQ ID NO: 21205 - DNA, 20 bp, synthetic construct
  misc_feature 1..20: note = chemically synthesized
  source 1..20: mol_type = other DNA
acagtactgtgggaacatca

SEQ ID NO: 21206 - DNA, 20 bp, synthetic construct
  misc_feature 1..20: note = chemically synthesized
  source 1..20: mol_type = other DNA
tgtgggaacatcacagattt

SEQ ID NO: 21207 - DNA, 20 bp, synthetic construct
  misc_feature 1..20: note = chemically synthesized
  source 1..20: mol_type = other DNA
gattttggctccatgcccta

SEQ ID NO: 21208 - DNA, 20 bp, synthetic construct
  misc_feature 1..20: note = chemically synthesized
  source 1..20: mol_type = other DNA
ttttggctccatgccctaaa

SEQ ID NO: 21209 - DNA, 20 bp, synthetic construct
  misc_feature 1..20: note = chemically synthesized
  source 1..20: mol_type = other DNA
tccatgccctaaagagaaat

SEQ ID NO: 21210 - DNA, 20 bp, synthetic construct
  misc_feature 1..20: note = chemically synthesized
  source 1..20: mol_type = other DNA
cctaaagagaaattggcttt

SEQ ID NO: 21211 - DNA, 20 bp, synthetic construct
  misc_feature 1..20: note = chemically synthesized
  source 1..20: mol_type = other DNA
aaattggctttcagattatt

SEQ ID NO: 21212 - DNA, 20 bp, synthetic construct
  misc_feature 1..20: note = chemically synthesized
  source 1..20: mol_type = other DNA
gattatttggattaaaaaca

SEQ ID NO: 21213 - DNA, 20 bp, synthetic construct
  misc_feature 1..20: note = chemically synthesized
  source 1..20: mol_type = other DNA
ttaaaaacaaagactttctt

SEQ ID NO: 21214 - DNA, 20 bp, synthetic construct
  misc_feature 1..20: note = chemically synthesized
  source 1..20: mol_type = other DNA
aaaaacaaagactttcttaa

SEQ ID NO: 21215 - DNA, 20 bp, synthetic construct
  misc_feature 1..20: note = chemically synthesized
  source 1..20: mol_type = other DNA
tttcttttttgctaaaacta

SEQ ID NO: 21216 - DNA, 20 bp, synthetic construct
  misc_feature 1..20: note = chemically synthesized
  source 1..20: mol_type = other DNA
agaattattcttttacattt

SEQ ID NO: 21217 - DNA, 20 bp, synthetic construct
  misc_feature 1..20: note = chemically synthesized
  source 1..20: mol_type = other DNA
acgccaacaaaattctgaat

SEQ ID NO: 21218 - DNA, 20 bp, synthetic construct
  misc_feature 1..20: note = chemically synthesized
  source 1..20: mol_type = other DNA
acaaaattctgaatcggcca

SEQ ID NO: 21219 - DNA, 20 bp, synthetic construct
  misc_feature 1..20: note = chemically synthesized
  source 1..20: mol_type = other DNA
aaaattctgaatcggccaaa

SEQ ID NO: 21220 - DNA, 20 bp, synthetic construct
  misc_feature 1..20: note = chemically synthesized
  source 1..20: mol_type = other DNA
aaattctgaatcggccaaag

SEQ ID NO: 21221 - DNA, 20 bp, synthetic construct
  misc_feature 1..20: note = chemically synthesized
  source 1..20: mol_type = other DNA
tcggccaaagaggtataatt

SEQ ID NO: 21222 - DNA, 20 bp, synthetic construct
  misc_feature 1..20: note = chemically synthesized
  source 1..20: mol_type = other DNA
cggccaaagaggtataattc

SEQ ID NO: 21223 - DNA, 20 bp, synthetic construct
  misc_feature 1..20: note = chemically synthesized
  source 1..20: mol_type = other DNA
gaggtataattcaggtaaat

SEQ ID NO: 21224 - DNA, 20 bp, synthetic construct
  misc_feature 1..20: note = chemically synthesized
  source 1..20: mol_type = other DNA
gtataattcaggtaaattgg

SEQ ID NO: 21225 - DNA, 20 bp, synthetic construct
  misc_feature 1..20: note = chemically synthesized
  source 1..20: mol_type = other DNA
ataattcaggtaaattggaa

SEQ ID NO: 21226 - DNA, 20 bp, synthetic construct
  misc_feature 1..20: note = chemically synthesized
  source 1..20: mol_type = other DNA
taaattggaagagtttgttc

SEQ ID NO: 21227 - DNA, 20 bp, synthetic construct
  misc_feature 1..20: note = chemically synthesized
  source 1..20: mol_type = other DNA
aaattggaagagtttgttca

SEQ ID NO: 21228 - DNA, 20 bp, synthetic construct
  misc_feature 1..20: note = chemically synthesized
  source 1..20: mol_type = other DNA
aattggaagagtttgttcaa

SEQ ID NO: 21229 - DNA, 20 bp, synthetic construct
  misc_feature 1..20: note = chemically synthesized
  source 1..20: mol_type = other DNA
agtttgttcaagggaacctt

SEQ ID NO: 21230 - DNA, 20 bp, synthetic construct
  misc_feature 1..20: note = chemically synthesized
  source 1..20: mol_type = other DNA
tttgttcaagggaaccttga

SEQ ID NO: 21231 - DNA, 20 bp, synthetic construct
  misc_feature 1..20: note = chemically synthesized
  source 1..20: mol_type = other DNA
tgttcaagggaaccttgaga

SEQ ID NO: 21232 - DNA, 20 bp, synthetic construct
  misc_feature 1..20: note = chemically synthesized
  source 1..20: mol_type = other DNA
gaaccttgagagagaatgta

SEQ ID NO: 21233 - DNA, 20 bp, synthetic construct
  misc_feature 1..20: note = chemically synthesized
  source 1..20: mol_type = other DNA
ccttgagagagaatgtatgg

SEQ ID NO: 21234 - DNA, 20 bp, synthetic construct
  misc_feature 1..20: note = chemically synthesized
  source 1..20: mol_type = other DNA
agagagaatgtatggaagaa

SEQ ID NO: 21235 - DNA, 20 bp, synthetic construct
  misc_feature 1..20: note = chemically synthesized
  source 1..20: mol_type = other DNA
gaatgtatggaagaaaagtg

SEQ ID NO: 21236 - DNA, 20 bp, synthetic construct
  misc_feature 1..20: note = chemically synthesized
  source 1..20: mol_type = other DNA
ggaagaaaagtgtagttttg

SEQ ID NO: 21237 - DNA, 20 bp, synthetic construct
  misc_feature 1..20: note = chemically synthesized
  source 1..20: mol_type = other DNA
agaaaagtgtagttttgaag

SEQ ID NO: 21238 - DNA, 20 bp, synthetic construct
  misc_feature 1..20: note = chemically synthesized
  source 1..20: mol_type = other DNA
gtgtagttttgaagaagcac

SEQ ID NO: 21239 - DNA, 20 bp, synthetic construct
  misc_feature 1..20: note = chemically synthesized
  source 1..20: mol_type = other DNA
tagttttgaagaagcacgag

SEQ ID NO: 21240 - DNA, 20 bp, synthetic construct
  misc_feature 1..20: note = chemically synthesized
  source 1..20: mol_type = other DNA
gaagtttttgaaaacactga

SEQ ID NO: 21241 - DNA, 20 bp, synthetic construct
  misc_feature 1..20: note = chemically synthesized
  source 1..20: mol_type = other DNA
tcttccatacattctctctc

SEQ ID NO: 21242 - DNA, 20 bp, synthetic construct
  misc_feature 1..20: note = chemically synthesized
  source 1..20: mol_type = other DNA
cttccatacattctctctca

SEQ ID NO: 21243 - DNA, 20 bp, synthetic construct
  misc_feature 1..20: note = chemically synthesized
  source 1..20: mol_type = other DNA
ttacctgaattatacctctt

SEQ ID NO: 21244 - DNA, 20 bp, synthetic construct
  misc_feature 1..20: note = chemically synthesized
  source 1..20: mol_type = other DNA
ttatacctctttggccgatt

SEQ ID NO: 21245 - DNA, 20 bp, synthetic construct
  misc_feature 1..20: note = chemically synthesized
  source 1..20: mol_type = other DNA
tggccgattcagaattttgt

SEQ ID NO: 21246 - DNA, 20 bp, synthetic construct
  misc_feature 1..20: note = chemically synthesized
  source 1..20: mol_type = other DNA
ttgttggcgttttcatgatc

SEQ ID NO: 21247 - DNA, 20 bp, synthetic construct
  misc_feature 1..20: note = chemically synthesized
  source 1..20: mol_type = other DNA
caagaaaaactgaaatgtaa

SEQ ID NO: 21248 - DNA, 20 bp, synthetic construct
  misc_feature 1..20: note = chemically synthesized
  source 1..20: mol_type = other DNA
aatgtaaaagaataattctt

SEQ ID NO: 21249 - DNA, 20 bp, synthetic construct
  misc_feature 1..20: note = chemically synthesized
  source 1..20: mol_type = other DNA
aaagaataattctttagttt

SEQ ID NO: 21250 - DNA, 20 bp, synthetic construct
  misc_feature 1..20: note = chemically synthesized
  source 1..20: mol_type = other DNA
attctttagttttagcaaaa

SEQ ID NO: 21251 - DNA, 20 bp, synthetic construct
  misc_feature 1..20: note = chemically synthesized
  source 1..20: mol_type = other DNA
atgaaaattttacatctctt

SEQ ID NO: 21252 - DNA, 20 bp, synthetic construct
  misc_feature 1..20: note = chemically synthesized
  source 1..20: mol_type = other DNA
aaattttacatctcttaaga

SEQ ID NO: 21253 - DNA, 20 bp, synthetic construct
  misc_feature 1..20: note = chemically synthesized
  source 1..20: mol_type = other DNA
ttttaatccaaataatctga

SEQ ID NO: 21254 - DNA, 20 bp, synthetic construct
  misc_feature 1..20: note = chemically synthesized
  source 1..20: mol_type = other DNA
tctgaaagccaatttctctt

SEQ ID NO: 21255 - DNA, 20 bp, synthetic construct
  misc_feature 1..20: note = chemically synthesized
  source 1..20: mol_type = other DNA
ctgaaagccaatttctcttt

SEQ ID NO: 21256 - DNA, 20 bp, synthetic construct
  misc_feature 1..20: note = chemically synthesized
  source 1..20: mol_type = other DNA
tgaaagccaatttctcttta

SEQ ID NO: 21257 - DNA, 20 bp, synthetic construct
  misc_feature 1..20: note = chemically synthesized
  source 1..20: mol_type = other DNA
gccaatttctctttagggca

SEQ ID NO: 21258 - DNA, 20 bp, synthetic construct
  misc_feature 1..20: note = chemically synthesized
  source 1..20: mol_type = other DNA
caatttctctttagggcatg

SEQ ID NO: 21259 - DNA, 20 bp, synthetic construct
  misc_feature 1..20: note = chemically synthesized
  source 1..20: mol_type = other DNA
caaaatctgtgatgttccca

SEQ ID NO: 21260 - DNA, 20 bp, synthetic construct
  misc_feature 1..20: note = chemically synthesized
  source 1..20: mol_type = other DNA
cccacagtactgtatacaca

SEQ ID NO: 21261 - DNA, 20 bp, synthetic construct
  misc_feature 1..20: note = chemically synthesized
  source 1..20: mol_type = other DNA
cacagtactgtatacacatg

SEQ ID NO: 21262 - DNA, 20 bp, synthetic construct
  misc_feature 1..20: note = chemically synthesized
  source 1..20: mol_type = other DNA
actgtatacacatggagatt

SEQ ID NO: 21263 - DNA, 20 bp, synthetic construct
  misc_feature 1..20: note = chemically synthesized
  source 1..20: mol_type = other DNA
ctgtatacacatggagattt

SEQ ID NO: 21264 - DNA, 20 bp, synthetic construct
  misc_feature 1..20: note = chemically synthesized
  source 1..20: mol_type = other DNA
ttaaaattcaattttacttt

SEQ ID NO: 21265 - DNA, 20 bp, synthetic construct
  misc_feature 1..20: note = chemically synthesized
  source 1..20: mol_type = other DNA
attcaattttacttttagtc

SEQ ID NO: 21266 - DNA, 20 bp, synthetic construct
  misc_feature 1..20: note = chemically synthesized
  source 1..20: mol_type = other DNA
tcaattttacttttagtcaa

SEQ ID NO: 21267 - DNA, 20 bp, synthetic construct
  misc_feature 1..20: note = chemically synthesized
  source 1..20: mol_type = other DNA
acttttagtcaagagaattc

SEQ ID NO: 21268 - DNA, 20 bp, synthetic construct
  misc_feature 1..20: note = chemically synthesized
  source 1..20: mol_type = other DNA
caagagaattccagtaataa

SEQ ID NO: 21269 - DNA, 20 bp, synthetic construct
  misc_feature 1..20: note = chemically synthesized
  source 1..20: mol_type = other DNA
aagagaattccagtaataaa

SEQ ID NO: 21270 - DNA, 20 bp, synthetic construct
  misc_feature 1..20: note = chemically synthesized
  source 1..20: mol_type = other DNA
gaattccagtaataaaaggt

SEQ ID NO: 21271 - DNA, 20 bp, synthetic construct
  misc_feature 1..20: note = chemically synthesized
  source 1..20: mol_type = other DNA
aatcatatttgaatttactt

SEQ ID NO: 21272 - DNA, 20 bp, synthetic construct
  misc_feature 1..20: note = chemically synthesized
  source 1..20: mol_type = other DNA
tgaatttactttggatgaaa

SEQ ID NO: 21273 - DNA, 20 bp, synthetic construct
  misc_feature 1..20: note = chemically synthesized
  source 1..20: mol_type = other DNA
tttactttggatgaaaaaga

SEQ ID NO: 21274 - DNA, 20 bp, synthetic construct
  misc_feature 1..20: note = chemically synthesized
  source 1..20: mol_type = other DNA
gaaaaagaaagttctcaaat

SEQ ID NO: 21275 - DNA, 20 bp, synthetic construct
  misc_feature 1..20: note = chemically synthesized
  source 1..20: mol_type = other DNA
aaagaaagttctcaaatgag

SEQ ID NO: 21276 - DNA, 20 bp, synthetic construct
  misc_feature 1..20: note = chemically synthesized
  source 1..20: mol_type = other DNA
actttgtcatcacttgaaaa

SEQ ID NO: 21277 - DNA, 20 bp, synthetic construct
  misc_feature 1..20: note = chemically synthesized
  source 1..20: mol_type = other DNA
tcacttgaaaatagctcatt

SEQ ID NO: 21278 - DNA, 20 bp, synthetic construct
  misc_feature 1..20: note = chemically synthesized
  source 1..20: mol_type = other DNA
cacttgaaaatagctcattg

SEQ ID NO: 21279 - DNA, 20 bp, synthetic construct
  misc_feature 1..20: note = chemically synthesized
  source 1..20: mol_type = other DNA
gctcattgaggatctttgca

SEQ ID NO: 21280 - DNA, 20 bp, synthetic construct
  misc_feature 1..20: note = chemically synthesized
  source 1..20: mol_type = other DNA
tgcaaagtgatccatcaccc

SEQ ID NO: 21281 - DNA, 20 bp, synthetic construct
  misc_feature 1..20: note = chemically synthesized
  source 1..20: mol_type = other DNA
aagtgatccatcaccctggc

SEQ ID NO: 21282 - DNA, 20 bp, synthetic construct
  misc_feature 1..20: note = chemically synthesized
  source 1..20: mol_type = other DNA
agtgatccatcaccctggct

SEQ ID NO: 21283 - DNA, 20 bp, synthetic construct
  misc_feature 1..20: note = chemically synthesized
  source 1..20: mol_type = other DNA
caccctggctgggctgtttt

SEQ ID NO: 21284 - DNA, 20 bp, synthetic construct
  misc_feature 1..20: note = chemically synthesized
  source 1..20: mol_type = other DNA
gctgggctgttttcagaata

SEQ ID NO: 21285 - DNA, 20 bp, synthetic construct
  misc_feature 1..20: note = chemically synthesized
  source 1..20: mol_type = other DNA
ctttgaacaaatgtctcctg

SEQ ID NO: 21286 - DNA, 20 bp, synthetic construct
  misc_feature 1..20: note = chemically synthesized
  source 1..20: mol_type = other DNA
aacaaatgtctcctgaagaa

SEQ ID NO: 21287 - DNA, 20 bp, synthetic construct
  misc_feature 1..20: note = chemically synthesized
  source 1..20: mol_type = other DNA
aaatgtctcctgaagaacag

SEQ ID NO: 21288 - DNA, 20 bp, synthetic construct
  misc_feature 1..20: note = chemically synthesized
  source 1..20: mol_type = other DNA
gaagaacagaagcctaatta

SEQ ID NO: 21289 - DNA, 20 bp, synthetic construct
  misc_feature 1..20: note = chemically synthesized
  source 1..20: mol_type = other DNA
acagaagcctaattatggtc

SEQ ID NO: 21290 - DNA, 20 bp, synthetic construct
  misc_feature 1..20: note = chemically synthesized
  source 1..20: mol_type = other DNA
tccagctgcaaatgtgaccc

SEQ ID NO: 21291 - DNA, 20 bp, synthetic construct
  misc_feature 1..20: note = chemically synthesized
  source 1..20: mol_type = other DNA
gtgaccccagtgtctgtcac

SEQ ID NO: 21292 - DNA, 20 bp, synthetic construct
  misc_feature 1..20: note = chemically synthesized
  source 1..20: mol_type = other DNA
gtgtctgtcactagatgtta

SEQ ID NO: 21293 - DNA, 20 bp, synthetic construct
  misc_feature 1..20: note = chemically synthesized
  source 1..20: mol_type = other DNA
atcactgcattaatttaaaa

SEQ ID NO: 21294 - DNA, 20 bp, synthetic construct
  misc_feature 1..20: note = chemically synthesized
  source 1..20: mol_type = other DNA
ttaatttaaaaaagcaattt

SEQ ID NO: 21295 - DNA, 20 bp, synthetic construct
  misc_feature 1..20: note = chemically synthesized
  source 1..20: mol_type = other DNA
aaaaagcaatttcagatcaa

SEQ ID NO: 21296 - DNA, 20 bp, synthetic construct
  misc_feature 1..20: note = chemically synthesized
  source 1..20: mol_type = other DNA
tttcagatcaacagcacctt

SEQ ID NO: 21297 - DNA, 20 bp, synthetic construct
  misc_feature 1..20: note = chemically synthesized
  source 1..20: mol_type = other DNA
agatcaacagcacctttggt

SEQ ID NO: 21298 - DNA, 20 bp, synthetic construct
  misc_feature 1..20: note = chemically synthesized
  source 1..20: mol_type = other DNA
caacagcacctttggttggc

SEQ ID NO: 21299 - DNA, 20 bp, synthetic construct
  misc_feature 1..20: note = chemically synthesized
  source 1..20: mol_type = other DNA
cctttggttggcaagtgtta

SEQ ID NO: 21300 - DNA, 20 bp, synthetic construct
  misc_feature 1..20: note = chemically synthesized
  source 1..20: mol_type = other DNA
ctttggttggcaagtgttat

SEQ ID NO: 21301 - DNA, 20 bp, synthetic construct
  misc_feature 1..20: note = chemically synthesized
  source 1..20: mol_type = other DNA
ggcaagtgttataggaattg

SEQ ID NO: 21302 - DNA, 20 bp, synthetic construct
  misc_feature 1..20: note = chemically synthesized
  source 1..20: mol_type = other DNA
tataggaattgcagtgattt

SEQ ID NO: 21303 - DNA, 20 bp, synthetic construct
  misc_feature 1..20: note = chemically synthesized
  source 1..20: mol_type = other DNA
cagtgatttaagcatctctc

SEQ ID NO: 21304 - DNA, 20 bp, synthetic construct
  misc_feature 1..20: note = chemically synthesized
  source 1..20: mol_type = other DNA
ttaagcatctctctagaatt

SEQ ID NO: 21305 - DNA, 20 bp, synthetic construct
  misc_feature 1..20: note = chemically synthesized
  source 1..20: mol_type = other DNA
taagcatctctctagaattc

SEQ ID NO: 21306 - DNA, 20 bp, synthetic construct
  misc_feature 1..20: note = chemically synthesized
  source 1..20: mol_type = other DNA
attcaggatatgtttttttt

SEQ ID NO: 21307 - DNA, 20 bp, synthetic construct
  misc_feature 1..20: note = chemically synthesized
  source 1..20: mol_type = other DNA
ttttttaagctacatctacc

SEQ ID NO: 21308 - DNA, 20 bp, synthetic construct
  misc_feature 1..20: note = chemically synthesized
  source 1..20: mol_type = other DNA
agctacatctacctagtctg

SEQ ID NO: 21309 - DNA, 20 bp, synthetic construct
  misc_feature 1..20: note = chemically synthesized
  source 1..20: mol_type = other DNA
ctacatctacctagtctgaa

SEQ ID NO: 21310 - DNA, 20 bp, synthetic construct
  misc_feature 1..20: note = chemically synthesized
  source 1..20: mol_type = other DNA
gaagagacactcctgaactc

SEQ ID NO: 21311 - DNA, 20 bp, synthetic construct
  misc_feature 1..20: note = chemically synthesized
  source 1..20: mol_type = other DNA
agagacactcctgaactctg

SEQ ID NO: 21312 - DNA, 20 bp, synthetic construct
  misc_feature 1..20: note = chemically synthesized
  source 1..20: mol_type = other DNA
gagacactcctgaactctgg

SEQ ID NO: 21313 - DNA, 20 bp, synthetic construct
  misc_feature 1..20: note = chemically synthesized
  source 1..20: mol_type = other DNA
cactcctgaactctggagga

SEQ ID NO: 21314 - DNA, 20 bp, synthetic construct
  misc_feature 1..20: note = chemically synthesized
  source 1..20: mol_type = other DNA
tatcatatatatatatatat

SEQ ID NO: 21315 - DNA, 20 bp, synthetic construct
  misc_feature 1..20: note = chemically synthesized
  source 1..20: mol_type = other DNA
tttgctgcacaatgacattt

SEQ ID NO: 21316 - DNA, 20 bp, synthetic construct
  misc_feature 1..20: note = chemically synthesized
  source 1..20: mol_type = other DNA
aatgacattttggtcaatga

SEQ ID NO: 21317 - DNA, 20 bp, synthetic construct
  misc_feature 1..20: note = chemically synthesized
  source 1..20: mol_type = other DNA
tgatggaccacattatacga

SEQ ID NO: 21318 - DNA, 20 bp, synthetic construct
  misc_feature 1..20: note = chemically synthesized
  source 1..20: mol_type = other DNA
tggaccacattatacgacag

SEQ ID NO: 21319 - DNA, 20 bp, synthetic construct
  misc_feature 1..20: note = chemically synthesized
  source 1..20: mol_type = other DNA
ttatacgacagtggtcccat

SEQ ID NO: 21320 - DNA, 20 bp, synthetic construct
  misc_feature 1..20: note = chemically synthesized
  source 1..20: mol_type = other DNA
tatacgacagtggtcccata

SEQ ID NO: 21321 - DNA, 20 bp, synthetic construct
  misc_feature 1..20: note = chemically synthesized
  source 1..20: mol_type = other DNA
cactgtaccttttctatgtt

SEQ ID NO: 21322 - DNA, 20 bp, synthetic construct
  misc_feature 1..20: note = chemically synthesized
  source 1..20: mol_type = other DNA
accactgttaccattgccta

SEQ ID NO: 21323 - DNA, 20 bp, synthetic construct
  misc_feature 1..20: note = chemically synthesized
  source 1..20: mol_type = other DNA
ttaccattgcctacagtgtt

SEQ ID NO: 21324 - DNA, 20 bp, synthetic construct
  misc_feature 1..20: note = chemically synthesized
  source 1..20: mol_type = other DNA
attgcctacagtgttcagta

SEQ ID NO: 21325 - DNA, 20 bp, synthetic construct
  misc_feature 1..20: note = chemically synthesized
  source 1..20: mol_type = other DNA
cagtacagtcacatgctgta

SEQ ID NO: 21326 - DNA, 20 bp, synthetic construct
  misc_feature 1..20: note = chemically synthesized
  source 1..20: mol_type = other DNA
agtacagtcacatgctgtac

SEQ ID NO: 21327 - DNA, 20 bp, synthetic construct
  misc_feature 1..20: note = chemically synthesized
  source 1..20: mol_type = other DNA
tcacatgctgtacaggtttg

SEQ ID NO: 21328 - DNA, 20 bp, synthetic construct
  misc_feature 1..20: note = chemically synthesized
  source 1..20: mol_type = other DNA
tgctgtacaggtttgcagcc

SEQ ID NO: 21329 - DNA, 20 bp, synthetic construct
  misc_feature 1..20: note = chemically synthesized
  source 1..20: mol_type = other DNA
gctgtacaggtttgcagccc

SEQ ID NO: 21330 - DNA, 20 bp, synthetic construct
  misc_feature 1..20: note = chemically synthesized
  source 1..20: mol_type = other DNA
tgtacaggtttgcagcccag

SEQ ID NO: 21331 - DNA, 20 bp, synthetic construct
  misc_feature 1..20: note = chemically synthesized
  source 1..20: mol_type = other DNA
aggtttgcagcccaggagcc

SEQ ID NO: 21332 - DNA, 20 bp, synthetic construct
  misc_feature 1..20: note = chemically synthesized
  source 1..20: mol_type = other DNA
ggtttgcagcccaggagcct

SEQ ID NO: 21333 - DNA, 20 bp, synthetic construct
  misc_feature 1..20: note = chemically synthesized
  source 1..20: mol_type = other DNA
tttgcagcccaggagcctag

SEQ ID NO: 21334 - DNA, 20 bp, synthetic construct
  misc_feature 1..20: note = chemically synthesized
  source 1..20: mol_type = other DNA
gcccaggagcctaggagcaa

SEQ ID NO: 21335 - DNA, 20 bp, synthetic construct
  misc_feature 1..20: note = chemically synthesized
  source 1..20: mol_type = other DNA
cccaggagcctaggagcaat

SEQ ID NO: 21336 - DNA, 20 bp, synthetic construct
  misc_feature 1..20: note = chemically synthesized
  source 1..20: mol_type = other DNA
taggccacatcaatacaacc

SEQ ID NO: 21337 - DNA, 20 bp, synthetic construct
  misc_feature 1..20: note = chemically synthesized
  source 1..20: mol_type = other DNA
aggccacatcaatacaacct

SEQ ID NO: 21338 - DNA, 20 bp, synthetic construct
  misc_feature 1..20: note = chemically synthesized
  source 1..20: mol_type = other DNA
atcaatacaacctaggtatg

SEQ ID NO: 21339 - DNA, 20 bp, synthetic construct
  misc_feature 1..20: note = chemically synthesized
  source 1..20: mol_type = other DNA
atacaacctaggtatgtagt

SEQ ID NO: 21340 - DNA, 20 bp, synthetic construct
  misc_feature 1..20: note = chemically synthesized
  source 1..20: mol_type = other DNA
atgtagtaagctataccatt

SEQ ID NO: 21341 - DNA, 20 bp, synthetic construct
  misc_feature 1..20: note = chemically synthesized
  source 1..20: mol_type = other DNA
tgtagtaagctataccattt

SEQ ID NO: 21342 - DNA, 20 bp, synthetic construct
  misc_feature 1..20: note = chemically synthesized
  source 1..20: mol_type = other DNA
taagctataccatttaggtt

SEQ ID NO: 21343 - DNA, 20 bp, synthetic construct
  misc_feature 1..20: note = chemically synthesized
  source 1..20: mol_type = other DNA
aagctataccatttaggttt

SEQ ID NO: 21344 - DNA, 20 bp, synthetic construct
  misc_feature 1..20: note = chemically synthesized
  source 1..20: mol_type = other DNA
tataccatttaggtttaggt

SEQ ID NO: 21345 - DNA, 20 bp, synthetic construct
  misc_feature 1..20: note = chemically synthesized
  source 1..20: mol_type = other DNA
ttgcttaatgacacatttct

SEQ ID NO: 21346 - DNA, 20 bp, synthetic construct
  misc_feature 1..20: note = chemically synthesized
  source 1..20: mol_type = other DNA
cagaatatatccccattgtt

SEQ ID NO: 21347 - DNA, 20 bp, synthetic construct
  misc_feature 1..20: note = chemically synthesized
  source 1..20: mol_type = other DNA
agaatatatccccattgtta

SEQ ID NO: 21348 - DNA, 20 bp, synthetic construct
  misc_feature 1..20: note = chemically synthesized
  source 1..20: mol_type = other DNA
ccccattgttaaggaatgca

SEQ ID NO: 21349 - DNA, 20 bp, synthetic construct
  misc_feature 1..20: note = chemically synthesized
  source 1..20: mol_type = other DNA
tgtatgtataaaattaataa

SEQ ID NO: 21350 - DNA, 20 bp, synthetic construct
  misc_feature 1..20: note = chemically synthesized
  source 1..20: mol_type = other DNA
gtatgtataaaattaataac

SEQ ID NO: 21351 - DNA, 20 bp, synthetic construct
  misc_feature 1..20: note = chemically synthesized
  source 1..20: mol_type = other DNA
tatgtataaaattaataaca

SEQ ID NO: 21352 - DNA, 20 bp, synthetic construct
  misc_feature 1..20: note = chemically synthesized
  source 1..20: mol_type = other DNA
aaaattaataacagggactc

SEQ ID NO: 21353 - DNA, 20 bp, synthetic construct
  misc_feature 1..20: note = chemically synthesized
  source 1..20: mol_type = other DNA
attaataacagggactcaag

SEQ ID NO: 21354 - DNA, 20 bp, synthetic construct
  misc_feature 1..20: note = chemically synthesized
  source 1..20: mol_type = other DNA
cagggactcaagaagttgcc

SEQ ID NO: 21355 - DNA, 20 bp, synthetic construct
  misc_feature 1..20: note = chemically synthesized
  source 1..20: mol_type = other DNA
gggactcaagaagttgcctg

SEQ ID NO: 21356 - DNA, 20 bp, synthetic construct
  misc_feature 1..20: note = chemically synthesized
  source 1..20: mol_type = other DNA
ctggagttgttcctttcttc

SEQ ID NO: 21357 - DNA, 20 bp, synthetic construct
  misc_feature 1..20: note = chemically synthesized
  source 1..20: mol_type = other DNA
tggagttgttcctttcttca

SEQ ID NO: 21358 - DNA, 20 bp, synthetic construct
  misc_feature 1..20: note = chemically synthesized
  source 1..20: mol_type = other DNA
ggagttgttcctttcttcaa

SEQ ID NO: 21359 - DNA, 20 bp, synthetic construct
  misc_feature 1..20: note = chemically synthesized
  source 1..20: mol_type = other DNA
tgttcctttcttcaagggtc

SEQ ID NO: 21360 - DNA, 20 bp, synthetic construct
  misc_feature 1..20: note = chemically synthesized
  source 1..20: mol_type = other DNA
aatatatctgataccatctc

SEQ ID NO: 21361 - DNA, 20 bp, synthetic construct
  misc_feature 1..20: note = chemically synthesized
  source 1..20: mol_type = other DNA
tatatctgataccatctcaa

SEQ ID NO: 21362 - DNA, 20 bp, synthetic construct
  misc_feature 1..20: note = chemically synthesized
  source 1..20: mol_type = other DNA
atatctgataccatctcaag

SEQ ID NO: 21363 - DNA, 20 bp, synthetic construct
  misc_feature 1..20: note = chemically synthesized
  source 1..20: mol_type = other DNA
gataccatctcaagaggacc

SEQ ID NO: 21364 - DNA, 20 bp, synthetic construct
  misc_feature 1..20: note = chemically synthesized
  source 1..20: mol_type = other DNA
ataccatctcaagaggacca

SEQ ID NO: 21365 - DNA, 20 bp, synthetic construct
  misc_feature 1..20: note = chemically synthesized
  source 1..20: mol_type = other DNA
taccatctcaagaggaccaa

SEQ ID NO: 21366 - DNA, 20 bp, synthetic construct
  misc_feature 1..20: note = chemically synthesized
  source 1..20: mol_type = other DNA
caagaggaccaagggcttat

SEQ ID NO: 21367 - DNA, 20 bp, synthetic construct
  misc_feature 1..20: note = chemically synthesized
  source 1..20: mol_type = other DNA
ggcttataagatgaactttc

SEQ ID NO: 21368 - DNA, 20 bp, synthetic construct
  misc_feature 1..20: note = chemically synthesized
  source 1..20: mol_type = other DNA
gcttataagatgaactttct

SEQ ID NO: 21369 - DNA, 20 bp, synthetic construct
  misc_feature 1..20: note = chemically synthesized
  source 1..20: mol_type = other DNA
cttataagatgaactttctg

SEQ ID NO: 21370 - DNA, 20 bp, synthetic construct
  misc_feature 1..20: note = chemically synthesized
  source 1..20: mol_type = other DNA
gatgaactttctggggtatt

SEQ ID NO: 21371 - DNA, 20 bp, synthetic construct
  misc_feature 1..20: note = chemically synthesized
  source 1..20: mol_type = other DNA
atgaactttctggggtattt

SEQ ID NO: 21372 - DNA, 20 bp, synthetic construct
  misc_feature 1..20: note = chemically synthesized
  source 1..20: mol_type = other DNA
acttcctgattaactccaaa

SEQ ID NO: 21373 - DNA, 20 bp, synthetic construct
  misc_feature 1..20: note = chemically synthesized
  source 1..20: mol_type = other DNA
cttcctgattaactccaaaa

SEQ ID NO: 21374 - DNA, 20 bp, synthetic construct
  misc_feature 1..20: note = chemically synthesized
  source 1..20: mol_type = other DNA
cctgattaactccaaaaagg

SEQ ID NO: 21375 - DNA, 20 bp, synthetic construct
  misc_feature 1..20: note = chemically synthesized
  source 1..20: mol_type = other DNA
tgattaactccaaaaaggaa

SEQ ID NO: 21376 - DNA, 20 bp, synthetic construct
  misc_feature 1..20: note = chemically synthesized
  source 1..20: mol_type = other DNA
taactccaaaaaggaagaga

SEQ ID NO: 21377 - DNA, 20 bp, synthetic construct
  misc_feature 1..20: note = chemically synthesized
  source 1..20: mol_type = other DNA
aactccaaaaaggaagagaa

SEQ ID NO: 21378 - DNA, 20 bp, synthetic construct
  misc_feature 1..20: note = chemically synthesized
  source 1..20: mol_type = other DNA
ccaaaaaggaagagaaagga

SEQ ID NO: 21379 - DNA, 20 bp, synthetic construct
  misc_feature 1..20: note = chemically synthesized
  source 1..20: mol_type = other DNA
ggaagagaaaggaaagtaaa

SEQ ID NO: 21380 - DNA, 20 bp, synthetic construct
  misc_feature 1..20: note = chemically synthesized
  source 1..20: mol_type = other DNA
gaagagaaaggaaagtaaaa

SEQ ID NO: 21381 - DNA, 20 bp, synthetic construct
  misc_feature 1..20: note = chemically synthesized
  source 1..20: mol_type = other DNA
agaaaggaaagtaaaaagga

SEQ ID NO: 21382 - DNA, 20 bp, synthetic construct
  misc_feature 1..20: note = chemically synthesized
  source 1..20: mol_type = other DNA
gaaaggaaagtaaaaaggaa

SEQ ID NO: 21383 - DNA, 20 bp, synthetic construct
  misc_feature 1..20: note = chemically synthesized
  source 1..20: mol_type = other DNA
ggaaagtaaaaaggaaagga

SEQ ID NO: 21384 - DNA, 20 bp, synthetic construct
  misc_feature 1..20: note = chemically synthesized
  source 1..20: mol_type = other DNA
taaaaaggaaaggaaagaaa

SEQ ID NO: 21385 - DNA, 20 bp, synthetic construct
  misc_feature 1..20: note = chemically synthesized
  source 1..20: mol_type = other DNA
aaaaggaaaggaaagaaacg

SEQ ID NO: 21386 - DNA, 20 bp, synthetic construct
  misc_feature 1..20: note = chemically synthesized
  source 1..20: mol_type = other DNA
ttcttcccttattttcattg

SEQ ID NO: 21387 - DNA, 20 bp, synthetic construct
  misc_feature 1..20: note = chemically synthesized
  source 1..20: mol_type = other DNA
cattgcagctgttcacttta

SEQ ID NO: 21388 - DNA, 20 bp, synthetic construct
  misc_feature 1..20: note = chemically synthesized
  source 1..20: mol_type = other DNA
ttgcagctgttcactttatg

SEQ ID NO: 21389 - DNA, 20 bp, synthetic construct
  misc_feature 1..20: note = chemically synthesized
  source 1..20: mol_type = other DNA
gttcactttatggagtgttc

SEQ ID NO: 21390 - DNA, 20 bp, synthetic construct
  misc_feature 1..20: note = chemically synthesized
  source 1..20: mol_type = other DNA
ctgcttttcccttgctctgc

SEQ ID NO: 21391 - DNA, 20 bp, synthetic construct
  misc_feature 1..20: note = chemically synthesized
  source 1..20: mol_type = other DNA
cttgctctgcaagttccttt

SEQ ID NO: 21392 - DNA, 20 bp, synthetic construct
  misc_feature 1..20: note = chemically synthesized
  source 1..20: mol_type = other DNA
ttgctctgcaagttcctttt

SEQ ID NO: 21393 - DNA, 20 bp, synthetic construct
  misc_feature 1..20: note = chemically synthesized
  source 1..20: mol_type = other DNA
tcactttttttctttgaatt

SEQ ID NO: 21394 - DNA, 20 bp, synthetic construct
  misc_feature 1..20: note = chemically synthesized
  source 1..20: mol_type = other DNA
ttttttctttgaatttagcc

SEQ ID NO: 21395 - DNA, 20 bp, synthetic construct
  misc_feature 1..20: note = chemically synthesized
  source 1..20: mol_type = other DNA
ttcaactcttttttttttga

SEQ ID NO: 21396 - DNA, 20 bp, synthetic construct
  misc_feature 1..20: note = chemically synthesized
  source 1..20: mol_type = other DNA
caactcttttttttttgaca

SEQ ID NO: 21397 - DNA, 20 bp, synthetic construct
  misc_feature 1..20: note = chemically synthesized
  source 1..20: mol_type = other DNA
cagagtcttgctctgtcgcc

SEQ ID NO: 21398 - DNA, 20 bp, synthetic construct
  misc_feature 1..20: note = chemically synthesized
  source 1..20: mol_type = other DNA
agagtcttgctctgtcgccc

SEQ ID NO: 21399 - DNA, 20 bp, synthetic construct
  misc_feature 1..20: note = chemically synthesized
  source 1..20: mol_type = other DNA
tcttgctctgtcgcccaggc

SEQ ID NO: 21400 - DNA, 20 bp, synthetic construct
  misc_feature 1..20: note = chemically synthesized
  source 1..20: mol_type = other DNA
ttgctctgtcgcccaggctg

SEQ ID NO: 21401 - DNA, 20 bp, synthetic construct
  misc_feature 1..20: note = chemically synthesized
  source 1..20: mol_type = other DNA
ctgtcgcccaggctggagtg

SEQ ID NO: 21402 - DNA, 20 bp, synthetic construct
  misc_feature 1..20: note = chemically synthesized
  source 1..20: mol_type = other DNA
tcgcccaggctggagtgcag

SEQ ID NO: 21403 - DNA, 20 bp, synthetic construct
  misc_feature 1..20: note = chemically synthesized
  source 1..20: mol_type = other DNA
ggagtgcagtggtgcgatct

SEQ ID NO: 21404 - DNA, 20 bp, synthetic construct
  misc_feature 1..20: note = chemically synthesized
  source 1..20: mol_type = other DNA
tcactgcaacctccatctcc

SEQ ID NO: 21405 - DNA, 20 bp, synthetic construct
  misc_feature 1..20: note = chemically synthesized
  source 1..20: mol_type = other DNA
cactgcaacctccatctccc

SEQ ID NO: 21406 - DNA, 20 bp, synthetic construct
  misc_feature 1..20: note = chemically synthesized
  source 1..20: mol_type = other DNA
aacctccatctcccaggttc

SEQ ID NO: 21407 - DNA, 20 bp, synthetic construct
  misc_feature 1..20: note = chemically synthesized
  source 1..20: mol_type = other DNA
ttcaagctattctcctgcct

SEQ ID NO: 21408 - DNA, 20 bp, synthetic construct
  misc_feature 1..20: note = chemically synthesized
  source 1..20: mol_type = other DNA
ttctcctgcctcagcctccc

SEQ ID NO: 21409 - DNA, 20 bp, synthetic construct
  misc_feature 1..20: note = chemically synthesized
  source 1..20: mol_type = other DNA
tcctgcctcagcctcccaag

SEQ ID NO: 21410 - DNA, 20 bp, synthetic construct
  misc_feature 1..20: note = chemically synthesized
  source 1..20: mol_type = other DNA
gcctcagcctcccaagtagc

SEQ ID NO: 21411 - DNA, 20 bp, synthetic construct
  misc_feature 1..20: note = chemically synthesized
  source 1..20: mol_type = other DNA
cctcagcctcccaagtagct

SEQ ID NO: 21412 - DNA, 20 bp, synthetic construct
  misc_feature 1..20: note = chemically synthesized
  source 1..20: mol_type = other DNA
ctcccaagtagctgggatta

SEQ ID NO: 21413 - DNA, 20 bp, synthetic construct
  misc_feature 1..20: note = chemically synthesized
  source 1..20: mol_type = other DNA
tcccaagtagctgggattac

SEQ ID NO: 21414 - DNA, 20 bp, synthetic construct
  misc_feature 1..20: note = chemically synthesized
  source 1..20: mol_type = other DNA
caggcacccgccaccatgcc

SEQ ID NO: 21415 - DNA, 20 bp, synthetic construct
  misc_feature 1..20: note = chemically synthesized
  source 1..20: mol_type = other DNA
ccagctaatttttgtatttt

SEQ ID NO: 21416 - DNA, 20 bp, synthetic construct
  misc_feature 1..20: note = chemically synthesized
  source 1..20: mol_type = other DNA
taatttttgtatttttagta

SEQ ID NO: 21417 - DNA, 20 bp, synthetic construct
  misc_feature 1..20: note = chemically synthesized
  source 1..20: mol_type = other DNA
ttttgtatttttagtaaagc

SEQ ID NO: 21418 - DNA, 20 bp, synthetic construct
  misc_feature 1..20: note = chemically synthesized
  source 1..20: mol_type = other DNA
tttgtatttttagtaaagcc

SEQ ID NO: 21419 - DNA, 20 bp, synthetic construct
  misc_feature 1..20: note = chemically synthesized
  source 1..20: mol_type = other DNA
ttgtatttttagtaaagccg

SEQ ID NO: 21420 - DNA, 20 bp, synthetic construct
  misc_feature 1..20: note = chemically synthesized
  source 1..20: mol_type = other DNA
gtttcaccatttcaccttgt

SEQ ID NO: 21421 - DNA, 20 bp, synthetic construct
  misc_feature 1..20: note = chemically synthesized
  source 1..20: mol_type = other DNA
caccatttcaccttgttggc

SEQ ID NO: 21422 - DNA, 20 bp, synthetic construct
  misc_feature 1..20: note = chemically synthesized
  source 1..20: mol_type = other DNA
accatttcaccttgttggcc

SEQ ID NO: 21423 - DNA, 20 bp, synthetic construct
  misc_feature 1..20: note = chemically synthesized
  source 1..20: mol_type = other DNA
tttcaccttgttggccaggc

SEQ ID NO: 21424 - DNA, 20 bp, synthetic construct
  misc_feature 1..20: note = chemically synthesized
  source 1..20: mol_type = other DNA
ggtgtcgaactcctgacctc

SEQ ID NO: 21425 - DNA, 20 bp, synthetic construct
  misc_feature 1..20: note = chemically synthesized
  source 1..20: mol_type = other DNA
cctcaagtgatctgcctgcc

SEQ ID NO: 21426 - DNA, 20 bp, synthetic construct
  misc_feature 1..20: note = chemically synthesized
  source 1..20: mol_type = other DNA
ctcaagtgatctgcctgcct

SEQ ID NO: 21427 - DNA, 20 bp, synthetic construct
  misc_feature 1..20: note = chemically synthesized
  source 1..20: mol_type = other DNA
ctgcctgcctgggcctctga

SEQ ID NO: 21428 - DNA, 20 bp, synthetic construct
  misc_feature 1..20: note = chemically synthesized
  source 1..20: mol_type = other DNA
gcctgggcctctgaaagtgc

SEQ ID NO: 21429 - DNA, 20 bp, synthetic construct
  misc_feature 1..20: note = chemically synthesized
  source 1..20: mol_type = other DNA
cctgggcctctgaaagtgct

SEQ ID NO: 21430 - DNA, 20 bp, synthetic construct
  misc_feature 1..20: note = chemically synthesized
  source 1..20: mol_type = other DNA
ctctgaaagtgctgggatta

SEQ ID NO: 21431 - DNA, 20 bp, synthetic construct
  misc_feature 1..20: note = chemically synthesized
  source 1..20: mol_type = other DNA
tctgaaagtgctgggattat

SEQ ID NO: 21432 - DNA, 20 bp, synthetic construct
  misc_feature 1..20: note = chemically synthesized
  source 1..20: mol_type = other DNA
agtgctgggattataggtgt

SEQ ID NO: 21433 - DNA, 20 bp, synthetic construct
  misc_feature 1..20: note = chemically synthesized
  source 1..20: mol_type = other DNA
ataggtgtgagccaccatgc

SEQ ID NO: 21434 - DNA, 20 bp, synthetic construct
  misc_feature 1..20: note = chemically synthesized
  source 1..20: mol_type = other DNA
taggtgtgagccaccatgcc

SEQ ID NO: 21435 - DNA, 20 bp, synthetic construct
  misc_feature 1..20: note = chemically synthesized
  source 1..20: mol_type = other DNA
gcctctcttcaactcttcat

SEQ ID NO: 21436 - DNA, 20 bp, synthetic construct
  misc_feature 1..20: note = chemically synthesized
  source 1..20: mol_type = other DNA
ctgtgcccaccctgcaatcc

SEQ ID NO: 21437 - DNA, 20 bp, synthetic construct
  misc_feature 1..20: note = chemically synthesized
  source 1..20: mol_type = other DNA
tgcaatcctagcccctaaat

SEQ ID NO: 21438 - DNA, 20 bp, synthetic construct
  misc_feature 1..20: note = chemically synthesized
  source 1..20: mol_type = other DNA
caatcctagcccctaaattg

SEQ ID NO: 21439 - DNA, 20 bp, synthetic construct
  misc_feature 1..20: note = chemically synthesized
  source 1..20: mol_type = other DNA
tcctagcccctaaattggag

SEQ ID NO: 21440 - DNA, 20 bp, synthetic construct
  misc_feature 1..20: note = chemically synthesized
  source 1..20: mol_type = other DNA
tgccttcatccttctcttcc

SEQ ID NO: 21441 - DNA, 20 bp, synthetic construct
  misc_feature 1..20: note = chemically synthesized
  source 1..20: mol_type = other DNA
ttcatccttctcttcccaga

SEQ ID NO: 21442 - DNA, 20 bp, synthetic construct
  misc_feature 1..20: note = chemically synthesized
  source 1..20: mol_type = other DNA
ccttctcttcccagacagcc

SEQ ID NO: 21443 - DNA, 20 bp, synthetic construct
  misc_feature 1..20: note = chemically synthesized
  source 1..20: mol_type = other DNA
cttctcttcccagacagccg

SEQ ID NO: 21444 - DNA, 20 bp, synthetic construct
  misc_feature 1..20: note = chemically synthesized
  source 1..20: mol_type = other DNA
ccagacagccgaggactgtg

SEQ ID NO: 21445 - DNA, 20 bp, synthetic construct
  misc_feature 1..20: note = chemically synthesized
  source 1..20: mol_type = other DNA
cagacagccgaggactgtga

SEQ ID NO: 21446 - DNA, 20 bp, synthetic construct
  misc_feature 1..20: note = chemically synthesized
  source 1..20: mol_type = other DNA
ggaaaaaaatcaccaaaatg

SEQ ID NO: 21447 - DNA, 20 bp, synthetic construct
  misc_feature 1..20: note = chemically synthesized
  source 1..20: mol_type = other DNA
aaaaatcaccaaaatgcaga

SEQ ID NO: 21448 - DNA, 20 bp, synthetic construct
  misc_feature 1..20: note = chemically synthesized
  source 1..20: mol_type = other DNA
caccacatattgatgcctca

SEQ ID NO: 21449 - DNA, 20 bp, synthetic construct
  misc_feature 1..20: note = chemically synthesized
  source 1..20: mol_type = other DNA
cctccacccacctctctgct

SEQ ID NO: 21450 - DNA, 20 bp, synthetic construct
  misc_feature 1..20: note = chemically synthesized
  source 1..20: mol_type = other DNA
tgctcagcaactcatttact

SEQ ID NO: 21451 - DNA, 20 bp, synthetic construct
  misc_feature 1..20: note = chemically synthesized
  source 1..20: mol_type = other DNA
gcaactcatttacttggccc

SEQ ID NO: 21452 - DNA, 20 bp, synthetic construct
  misc_feature 1..20: note = chemically synthesized
  source 1..20: mol_type = other DNA
tggccctggacactcctaaa

SEQ ID NO: 21453 - DNA, 20 bp, synthetic construct
  misc_feature 1..20: note = chemically synthesized
  source 1..20: mol_type = other DNA
tccatgcctgcatccattta

SEQ ID NO: 21454 - DNA, 20 bp, synthetic construct
  misc_feature 1..20: note = chemically synthesized
  source 1..20: mol_type = other DNA
atccatttacagtcgttcct

SEQ ID NO: 21455 - DNA, 20 bp, synthetic construct
  misc_feature 1..20: note = chemically synthesized
  source 1..20: mol_type = other DNA
cagtcgttcctcagtatcca

SEQ ID NO: 21456 - DNA, 20 bp, synthetic construct
  misc_feature 1..20: note = chemically synthesized
  source 1..20: mol_type = other DNA
cctcagtatccatggaaaat

SEQ ID NO: 21457 - DNA, 20 bp, synthetic construct
  misc_feature 1..20: note = chemically synthesized
  source 1..20: mol_type = other DNA
cagtatccatggaaaattgg

SEQ ID NO: 21458 - DNA, 20 bp, synthetic construct
  misc_feature 1..20: note = chemically synthesized
  source 1..20: mol_type = other DNA
atccatggaaaattggtggc

SEQ ID NO: 21459 - DNA, 20 bp, synthetic construct
  misc_feature 1..20: note = chemically synthesized
  source 1..20: mol_type = other DNA
caagaccccctgcaaatatc

SEQ ID NO: 21460 - DNA, 20 bp, synthetic construct
  misc_feature 1..20: note = chemically synthesized
  source 1..20: mol_type = other DNA
cctgcaaatatcaagatctg

SEQ ID NO: 21461 - DNA, 20 bp, synthetic construct
  misc_feature 1..20: note = chemically synthesized
  source 1..20: mol_type = other DNA
atcaagatctgtggatgctc

SEQ ID NO: 21462 - DNA, 20 bp, synthetic construct
  misc_feature 1..20: note = chemically synthesized
  source 1..20: mol_type = other DNA
tcaagtctccgatataaaaa

SEQ ID NO: 21463 - DNA, 20 bp, synthetic construct
  misc_feature 1..20: note = chemically synthesized
  source 1..20: mol_type = other DNA
tttgtactttaaatcatctc

SEQ ID NO: 21464 - DNA, 20 bp, synthetic construct
  misc_feature 1..20: note = chemically synthesized
  source 1..20: mol_type = other DNA
ttgtactttaaatcatctct

SEQ ID NO: 21465 - DNA, 20 bp, synthetic construct
  misc_feature 1..20: note = chemically synthesized
  source 1..20: mol_type = other DNA
catctctaggtttctcttaa

SEQ ID NO: 21466 - DNA, 20 bp, synthetic construct
  misc_feature 1..20: note = chemically synthesized
  source 1..20: mol_type = other DNA
caatgtaaatgctatgtaaa

SEQ ID NO: 21467 - DNA, 20 bp, synthetic construct
  misc_feature 1..20: note = chemically synthesized
  source 1..20: mol_type = other DNA
agttgttatgctgtattgtt

SEQ ID NO: 21468 - DNA, 20 bp, synthetic construct
  misc_feature 1..20: note = chemically synthesized
  source 1..20: mol_type = other DNA
gttgttatgctgtattgttt

SEQ ID NO: 21469 - DNA, 20 bp, synthetic construct
  misc_feature 1..20: note = chemically synthesized
  source 1..20: mol_type = other DNA
ttgttatgctgtattgttta

SEQ ID NO: 21470 - DNA, 20 bp, synthetic construct
  misc_feature 1..20: note = chemically synthesized
  source 1..20: mol_type = other DNA
tattgtttagggaataatga

SEQ ID NO: 21471 - DNA, 20 bp, synthetic construct
  misc_feature 1..20: note = chemically synthesized
  source 1..20: mol_type = other DNA
tagggaataatgaaagataa

SEQ ID NO: 21472 - DNA, 20 bp, synthetic construct
  misc_feature 1..20: note = chemically synthesized
  source 1..20: mol_type = other DNA
gggaataatgaaagataaaa

SEQ ID NO: 21473 - DNA, 20 bp, synthetic construct
  misc_feature 1..20: note = chemically synthesized
  source 1..20: mol_type = other DNA
taaaagagtctgtacatgtt

SEQ ID NO: 21474 - DNA, 20 bp, synthetic construct
  misc_feature 1..20: note = chemically synthesized
  source 1..20: mol_type = other DNA
aagagtctgtacatgttcag

SEQ ID NO: 21475 - DNA, 20 bp, synthetic construct
  misc_feature 1..20: note = chemically synthesized
  source 1..20: mol_type = other DNA
gagtctgtacatgttcagta

SEQ ID NO: 21476 - DNA, 20 bp, synthetic construct
  misc_feature 1..20: note = chemically synthesized
  source 1..20: mol_type = other DNA
tcttgaatatttttgatctg

SEQ ID NO: 21477 - DNA, 20 bp, synthetic construct
  misc_feature 1..20: note = chemically synthesized
  source 1..20: mol_type = other DNA
tctgcagttaattgaatctg

SEQ ID NO: 21478 - DNA, 20 bp, synthetic construct
  misc_feature 1..20: note = chemically synthesized
  source 1..20: mol_type = other DNA
gttaattgaatctgtggctg

SEQ ID NO: 21479 - DNA, 20 bp, synthetic construct
  misc_feature 1..20: note = chemically synthesized
  source 1..20: mol_type = other DNA
tctgtggctgtggaactcac

SEQ ID NO: 21480 - DNA, 20 bp, synthetic construct
  misc_feature 1..20: note = chemically synthesized
  source 1..20: mol_type = other DNA
ctgtggctgtggaactcaca

SEQ ID NO: 21481 - DNA, 20 bp, synthetic construct
  misc_feature 1..20: note = chemically synthesized
  source 1..20: mol_type = other DNA
gtggctgtggaactcacaag

SEQ ID NO: 21482 - DNA, 20 bp, synthetic construct
  misc_feature 1..20: note = chemically synthesized
  source 1..20: mol_type = other DNA
ggctgtggaactcacaagga

SEQ ID NO: 21483 - DNA, 20 bp, synthetic construct
  misc_feature 1..20: note = chemically synthesized
  source 1..20: mol_type = other DNA
cacaaggagagctgactgta

SEQ ID NO: 21484 - DNA, 20 bp, synthetic construct
  misc_feature 1..20: note = chemically synthesized
  source 1..20: mol_type = other DNA
ggagagctgactgtacagtg

SEQ ID NO: 21485 - DNA, 20 bp, synthetic construct
  misc_feature 1..20: note = chemically synthesized
  source 1..20: mol_type = other DNA
gctgactgtacagtgtggtt

SEQ ID NO: 21486 - DNA, 20 bp, synthetic construct
  misc_feature 1..20: note = chemically synthesized
  source 1..20: mol_type = other DNA
agtgtggttgagtgaaaaaa

SEQ ID NO: 21487 - DNA, 20 bp, synthetic construct
  misc_feature 1..20: note = chemically synthesized
  source 1..20: mol_type = other DNA
ttgagtgaaaaaacagactt

SEQ ID NO: 21488 - DNA, 20 bp, synthetic construct
  misc_feature 1..20: note = chemically synthesized
  source 1..20: mol_type = other DNA
gaaaaaacagactttagaat

SEQ ID NO: 21489 - DNA, 20 bp, synthetic construct
  misc_feature 1..20: note = chemically synthesized
  source 1..20: mol_type = other DNA
aacagactttagaatcagat

SEQ ID NO: 21490 - DNA, 20 bp, synthetic construct
  misc_feature 1..20: note = chemically synthesized
  source 1..20: mol_type = other DNA
gactttagaatcagatcaga

SEQ ID NO: 21491 - DNA, 20 bp, synthetic construct
  misc_feature 1..20: note = chemically synthesized
  source 1..20: mol_type = other DNA
agaatcagatcagacagaaa

SEQ ID NO: 21492 - DNA, 20 bp, synthetic construct
  misc_feature 1..20: note = chemically synthesized
  source 1..20: mol_type = other DNA
gaatcagatcagacagaaat

SEQ ID NO: 21493 - DNA, 20 bp, synthetic construct
  misc_feature 1..20: note = chemically synthesized
  source 1..20: mol_type = other DNA
gacagaaataggtttgaatc

SEQ ID NO: 21494 - DNA, 20 bp, synthetic construct
  misc_feature 1..20: note = chemically synthesized
  source 1..20: mol_type = other DNA
aatcaagtatctgcctcctc

SEQ ID NO: 21495 - DNA, 20 bp, synthetic construct
  misc_feature 1..20: note = chemically synthesized
  source 1..20: mol_type = other DNA
ctcctctagacctgtgacct

SEQ ID NO: 21496 - DNA, 20 bp, synthetic construct
  misc_feature 1..20: note = chemically synthesized
  source 1..20: mol_type = other DNA
ctagacctgtgaccttggac

SEQ ID NO: 21497 - DNA, 20 bp, synthetic construct
  misc_feature 1..20: note = chemically synthesized
  source 1..20: mol_type = other DNA
tgaccttggacaagtcacac

SEQ ID NO: 21498 - DNA, 20 bp, synthetic construct
  misc_feature 1..20: note = chemically synthesized
  source 1..20: mol_type = other DNA
taactttgtcaaatgtaaat

SEQ ID NO: 21499 - DNA, 20 bp, synthetic construct
  misc_feature 1..20: note = chemically synthesized
  source 1..20: mol_type = other DNA
aactttgtcaaatgtaaatt

SEQ ID NO: 21500 - DNA, 20 bp, synthetic construct
  misc_feature 1..20: note = chemically synthesized
  source 1..20: mol_type = other DNA
caaatgtaaattaggtttaa

SEQ ID NO: 21501 - DNA, 20 bp, synthetic construct
  misc_feature 1..20: note = chemically synthesized
  source 1..20: mol_type = other DNA
atgtaaattaggtttaacag

SEQ ID NO: 21502 - DNA, 20 bp, synthetic construct
  misc_feature 1..20: note = chemically synthesized
  source 1..20: mol_type = other DNA
aggtttaacagtagtataat

SEQ ID NO: 21503 - DNA, 20 bp, synthetic construct
  misc_feature 1..20: note = chemically synthesized
  source 1..20: mol_type = other DNA
taataagaatatctatctca

SEQ ID NO: 21504 - DNA, 20 bp, synthetic construct
  misc_feature 1..20: note = chemically synthesized
  source 1..20: mol_type = other DNA
aataagaatatctatctcac

SEQ ID NO: 21505 - DNA, 20 bp, synthetic construct
  misc_feature 1..20: note = chemically synthesized
  source 1..20: mol_type = other DNA
aatatctatctcacaggtgt

SEQ ID NO: 21506 - DNA, 20 bp, synthetic construct
  misc_feature 1..20: note = chemically synthesized
  source 1..20: mol_type = other DNA
atctatctcacaggtgttgg

SEQ ID NO: 21507 - DNA, 20 bp, synthetic construct
  misc_feature 1..20: note = chemically synthesized
  source 1..20: mol_type = other DNA
tctatctcacaggtgttggc

SEQ ID NO: 21508 - DNA, 20 bp, synthetic construct
  misc_feature 1..20: note = chemically synthesized
  source 1..20: mol_type = other DNA
ctcacaggtgttggcaggat

SEQ ID NO: 21509 - DNA, 20 bp, synthetic construct
  misc_feature 1..20: note = chemically synthesized
  source 1..20: mol_type = other DNA
caggtgttggcaggatcagt

SEQ ID NO: 21510 - DNA, 20 bp, synthetic construct
  misc_feature 1..20: note = chemically synthesized
  source 1..20: mol_type = other DNA
ggatcagtgagacaatatgc

SEQ ID NO: 21511 - DNA, 20 bp, synthetic construct
  misc_feature 1..20: note = chemically synthesized
  source 1..20: mol_type = other DNA
tctccctactcctttcatgt

SEQ ID NO: 21512 - DNA, 20 bp, synthetic construct
  misc_feature 1..20: note = chemically synthesized
  source 1..20: mol_type = other DNA
ttaaatttctcaattctctt

SEQ ID NO: 21513 - DNA, 20 bp, synthetic construct
  misc_feature 1..20: note = chemically synthesized
  source 1..20: mol_type = other DNA
gctctttaataacttctgtg

(The sequence listing continues in the following parts.)
